United States Patent Application Publication US 2008/0276334 A1 - sequence listing, part 7

SEQ ID NO: 41511 - DNA, 494 bp, Glycine max
  unsure (1)..(494): unsure at all n locations
  Clone ID: LIB3093-045-Q1-K1-D9
cccacgcgtccgcccacgcgtccgctccctcctcatcttctctccccattcggcaaacatgcagcatccaaaatcgaatctttgtttgaaacatggcttcctcctccttcctctgccccgcagcatttaccttctcacagaagccacttcaatccacttttcttcattcctcctctcttctcactctaagcattcttcctaagaaattgagaaaaccccaccaactgagaagcctcatagtggccaaatccaatggcagtgactctgctgatgttcctgaccgtttgatttcagcactttgctacttttaccctttctttgatggcatacagtatggaaaatatgtaatcacacagttctaccctgttcatgccatngttcaaccattggttcctgcaataagagtcttcaagagcttcccttttaatgggttccttgtgttttgaccctttattttngtgtggtgggaaaccccaatttcagtaagtatgtga

SEQ ID NO: 41512 - DNA, 471 bp, Glycine max
  Clone ID: LIB3093-045-Q1-K1-E11
ctttagagttggaagatgctaaagaacctccattgaacttacacaagcctaaagaaccctatacagcaacgattgtttctgttgataggctagtgggaccaaaggctcctggggaaacttgtcatattgtgattgatcatggtggaaatgttccctactgggaaggacagagttatggtgttattccaccgggtgaaaatccaaagaaacctggggctcctcataatgttcgactatattcaattgcttctacaaggtatggagacttttttgatggaaaaactgccagcttgtgtgtgcgtcgtgctgtttattatgatcctgagacaggaaaggaagatcctttcaagaatggcatatgtagcaattttttgtgtaattcaaagcctggagacaaaattcagatcacaagcccttcaaggaagataatgcttttacccgaagatgacccaaatgctacccatataatga

SEQ ID NO: 41513 - DNA, 397 bp, Glycine max
  Clone ID: LIB3093-045-Q1-K1-E12
ccctctttcaaggctccacttttatgggtccttggaatttcttcatcgaagtatcaaacttgtcttctctctctctccttttacttcctctgcatatatgatatattcttccaaaatcctcatctaagggttaattttgttccggacaagtttttattattattattattattctttaaatttcagaatgatgtacttataagtttctgatccaaggtttaagatgttatagtttccttgaattctcatctgggttcaacctgcttgatgttttgactgaacaacatatgaatattgcacagttatcgatgcgcctggacatagggatttcattaagaatatgattactgggacatcccaagctgactgtgcttgtcttatcattgattcgaccact

SEQ ID NO: 41514 - DNA, 459 bp, Glycine max
  Clone ID: LIB3093-045-Q1-K1-E4
cccacgcgtccgcccacgcgtccgcgatcctagcactctcttctgcagctttcgccgacagcttcattcaccatggctgagcaaaccgagaaggcttttttgaaacaaccaaaagtgtttctcagctcgaagaaaactgggaagggaaagagacccggaaagggtgggaaccgcttttggaaatccattgggcttggatttaagactcccagggaagccatcgaaggaacctacattgacaagaagtgccccttcactggcaatgtttccatccgtggccgtatcttggctggaacatgtcacagtgctaagatgaacaggactattattgttaggaggaattatctccattttatcaagaagtaccagaggtacgagaaaaggcactccaacattcctgcttatatatcacctgctttccgtgtgaaggaaggagatcacgttattaatggtcaatgc

SEQ ID NO: 41515 - DNA, 269 bp, Glycine max
  Clone ID: LIB3093-045-Q1-K1-E6
acgcccacgcgtacgatggtacgtgaatatgtccaatttagactatgcttaaaaatgaggaggagggatataaaagtatacatgggatatgtgatatgatatggtagaaaaataaatagaaaaacttgtgttaatgaaatatttgaaataaaaaattgtatactataattactctttaatatttttactggacagaacaatttttttttctgtagactaagaataatgatattcggatattcatatatcataaatgcatatttgatatt

SEQ ID NO: 41516 - DNA, 451 bp, Glycine max
  Clone ID: LIB3093-045-Q1-K1-E7
tgaagccgtcctgacagacatgcatgcgccgttcgagcggctcctcgatcggctccagccggcgccgacagcgatccttggctgcgtcgagctccgctggcccatcgccgtagccaatcggaggaatattccggtggctgcgttttggaccatgtccgcgtcgtactattccatgctgcatcacctcgatgtctttgcacgacaccggggtttgaccgtcgataaggatacgatggatggacaagccgagaacatcccgggaatttcttcagctcatttggcagaccttcaaactgtgcttcatgaaaatgatcaacgagtcatgcagcttgctttggaatgtatatcgaaagttcccatagcatattatctttgactcaccacagtccaagagttataagctgaaacagttgagtccttaaaagctaatattccctttccaggctatcct

SEQ ID NO: 41517 - DNA, 345 bp, Glycine max
  Clone ID: LIB3093-045-Q1-K1-E8
cgtcacgcctcccgtcctgcatgcatgcgctctattttgcagcttcttaaaaatgcgttatggaactatgggtgtgcatatcatgaatgcttttatgtaacagccaaatgtgtttctcaactcgtagtaaactgataatggaaagagacccgggtatgggtgtgaacactcttatggaaatccactgggcttggctttaatacttccagggaagccatccaatgaacctacattgactagatgtgtcatttaagtgtctatgataccattcgtggccgcatcttggctataacatttcacagtgctaagatgaacatgactattattggtaggaagaattatctt

SEQ ID NO: 41518 - DNA, 482 bp, Glycine max
  Clone ID: LIB3093-045-Q1-K1-E9
caactgagttgagaggtccggttaactacaagtatacagatttgaaagctgcaacaaaaaatttcagtgttgaaaataaacttggagaaggaggatttggtgctgtatacaaggggatacacagcacctgagtatgcaatgcaaggccaattgtcagagaaggctgatacctacagttatggtattgtggtcctagaaatcataagtggtcaaaagagtaccaatgttaagattgatgatgagggtcgtgagtaccttcttcaacgagcatggaaactgtacgagagaggcatgcaattggagcttgtggacaaggacatagaccctaatgaatatgatgctgaagaagtgaagaaaatcatagaaattgctttattgtgcactcaagcatctgctgcaacaggccaacaatgtcagaattagtagtgctactcaaaagcaagagcttagtggagcaactgcgaccaactatgcctgtgttt

SEQ ID NO: 41519 - DNA, 360 bp, Glycine max
  Clone ID: LIB3093-045-Q1-K1-F1
accacgcgtgcgggcaaggatctcaagcgatgttttgtggcatccaactccaaggatgacggtgccgaggaagctgccaactgcacatttcaagtcattatcatgaaccaccctggccagattggaaatggatacgcaccgacgcttgattgcaacacgaggcacattgctgacaaagtttcgtgaaaacttgaccaagattgacaggcgatctggtaaggagcttgagaaggagcccacatctttgaagaatggtgatccacgtatagttaagatgattcccaccaagcacatggtggctggaacttactctgagtatcctccccttagaccatttgctatgagggacattcatgaaac

SEQ ID NO: 41520 - DNA, 492 bp, Glycine max
  Clone ID: LIB3093-045-Q1-K1-F10
cccacgcgtccgcccaattccactagggattcaattccgatgcgattccgagcttgttagatccacgacaacgtttcgtttcccagattcttttgtaaaaaaaaataatcttcctttgcccaacaggtaagttggaaaaaaatggaccatgacaagactgggtgccaagctcctcctgaaggtcctatattgtgcatcaacaactgtggattttttggaagtgcagctaccatgaatatgtgttctaaatgccacaaagacatgttgctgaaacaggagcaggccaagcttgcagcatcatccattgggaatattatgaatgggtcttcaagcagcactgaaaaggaacctgttgttgccgctgctgctgctaatgttgatatcccagttattccagtagagcctaaaactgtctctgtgcaacctttatttggttcaggtccagaagggagtggtgaggcaaagctgaaggatggaccaaaacgctgcagc

SEQ ID NO: 41521 - DNA, 389 bp, Glycine max
  Clone ID: LIB3093-045-Q1-K1-F11
gtcagctcttagatcctagggatgaaagttgtatatttttagcagtaacacagatttattgggtgtgaagcaatgtgggaaacacatgtgttggtcctagcatttcaaaaaatggttttgttcaatcagtttctgcggcgatttggcagtcccaattgcctgaagattcagtgtctaatagagaatctgtaaaagaggaagtaactaatgttcctgaatctgccttgcctgtccaaaacaaaccttctgagcagataactatgccgaaaccagaagcctatcatgagggaaaatcataaatagaaccggaacatgataagaagaaacagactaaacgtggttcggtgaagagagtttctagtgcaaggcttttcagttgattctgtgtt

SEQ ID NO: 41522 - DNA, 284 bp, Glycine max
  Clone ID: LIB3093-045-Q1-K1-F12
cccacgcgtccgaccaattccactagggattcaattcctatgcgattccgagcttgctagggccaccgcggcataccgtccaggagatcgtacgcttacatacaacgatctacctatgctcaacaggcacctcggatcaaactggagcacgacatgactgactgccaagcctgctatgaacgtgccatatcgtacattaacaactgtggattacatgcaagtgcagccaccatgaatatgtgctctaaatcccacacagacatgtttttgaaacaggagcacac

SEQ ID NO: 41523 - DNA, 61 bp, Glycine max
  Clone ID: LIB3093-045-Q1-K1-F2
gcgatcacgcgtgcaagtagctgtatgacaccttttttcctgcggatctcgacctagcagg

SEQ ID NO: 41524 - DNA, 388 bp, Glycine max
  Clone ID: LIB3093-045-Q1-K1-F3
accacgcgtgcgagatgctcaagctctattcttaaccattggcaaactgctgatcagtgggcgatagattcttagccacgctgcgcttgcaattcattatgatactgggatcaactgcgcactgtctcaggaccagatattaatccagtccgtgcaaggatgactgaatgttattacatgtgtggacgcgacttctgtgaagatgacagagagttcagacagactgaaccttgatatgcacatctgactcatttctgcatgagaactgctcattgtaatgtcccgtacatggaattagactgatatttaggaaccccatttcgtattaaaactctggtggatgtgccgagactctagctggatgtacattctatggttatgcgaggca

SEQ ID NO: 41525 - DNA, 354 bp, Glycine max
  Clone ID: LIB3093-045-Q1-K1-F4
gaattcgtatgccatggagtcacccggtatcgagcatgtggtgggtggcgcagaacccaaggacgtcgttacgcccttttcccacagagaagaacctcacaattcccaacccctcaccggcgacggtgccagtcccggaaagatatttataggtggtttagcgagagaaacgaccattgcccaatttatcaagcactttggtaagtatggtgagatcacggattcagttatcatgaaggacaggaaaactgggcatcctcgtggattcgggtttataacatatgcggatccctctgtggtcgattaagtcattgaggaacctcatgtcatcaatggctaacaagttgagattta

SEQ ID NO: 41526 - DNA, 374 bp, Glycine max
  Clone ID: LIB3093-045-Q1-K1-F5
gcagaatctcttctgcatggatacttattttacagcataaacacagttgattacatggcagcttttgcaaccatgatcttggcggatcctgccatgttacttgaaggcaatggaatccttgaatggttaaatactcatccatatccttggtcggctctcatcattatttttagctccggagtgttggctttctgtcttaacttctccattttttatgtgattcactccaccactgctgtaacatttaatgttgccggaaatcttaaggttgcagttgccgtccttgtttcttggctgatatttaggaacccaatttcgtatttaaattctgttggatgtgccgtgactcttgtgggatgtacatactatggtta

SEQ ID NO: 41527 - DNA, 87 bp, Glycine max
  Clone ID: LIB3093-045-Q1-K1-F6
gttgaatcacagatacacggccatttatattaaagcggaaccactgtttataacggggctgggttaagcaaccgggtgcgtagctta

SEQ ID NO: 41528 - DNA, 461 bp, Glycine max
  Clone ID: LIB3093-045-Q1-K1-F7
acagcttcagaatcagatctggtgtggtgtggtggctgttactgttagcacttagcagcgagggccaaagcgtcgatattcatttacatactcgtcgcagcggcgcttctcttattcctctctcattccccggataagcactccggccaccgccaccgccgcctcaagctccgctccaacttcaccctcgccccctcgcgccaccacgccgtcgccttcgaccctctcgtcgctgagctcgagcgccaccgctaggacaaggagtgggagaagcagataatccaccaggcccatcccgaactggagtcggacccggtcccggcccacgagtcccagcccgagtgggacgacttcatggacgccgaggattacctcaatgacgaggacaagtttaatgttaccaacaggttgatactcttgttcccgaagatcgatgtggaccccaccgattggttcgtgac

SEQ ID NO: 41529 - DNA, 372 bp, Glycine max
  Clone ID: LIB3093-045-Q1-K1-F8
atcaaagtttcatattctgcacttatcagtgcctttatgacagagctagaacctggtactgtagtcacccagtgtgattatgatcgcttgctattgtcaaccagttcattaatggagaggaatacataatttatgattgaatgcatggatgacttgtcactagaacaacataagttccaattctactatcggagcctgtctcgttaacaagctcattagcaagcatgggtttaaaagataaagtcggataacatggcttgtaaagctgttggataagaacctttgctggatgatgattctttaaatccaatttccaagtcgctcccagagtcatcccggttggagatgcttctcataacaaattaaattttc

SEQ ID NO: 41530 - DNA, 499 bp, Glycine max
  Clone ID: LIB3093-045-Q1-K1-F9
caattacaaattacactctttgcctcgcaccttcaacttaaccttttctactgataatctggacaacttgctagaagaagataaagaaagagaaaaagtgtgtgtgtgtgagagagagcaatggctggctcgtgggcacgccgttctctgattgttctggctatcatttccttcggatgtttatttgcaatttccattgctaaggaggaagccacaaaattggggacggtcatcgggattgatcttggaacgacctattcatgtgttggtgtttacaagaacggccatgttgaaatcatagccaatgatcaaggtaaccgtatcaccccatcgtgggttgctttcaccgacagtgagagactaattggagaggctgccaagaatctggcagctgtcaacccagaaaggaccatctttgatgtcaagagacttattggaagaaagttcgaagataaggaagttcaaagagatatgaagcttgttccttataagattgtca

SEQ ID NO: 41531 - DNA, 298 bp, Glycine max
  Clone ID: LIB3093-045-Q1-K1-G1
ctgaacctctcactcctaactatctgagccgttcttattatcctgcagcgacccactgaggaacaggctatcagttgcatgacataatacaacagtgttcaattagagcataatgggatccaaatatgcaaatgggaagaaccacaaggacatactagaacacatttaacgataatttgagttctagatattcatcatccagtgatgccaaggatacccttatcagttgatcctatatatttaaaggctcacacggatcctaggttccgatatgcttcaatgcgtgaaacgacagtgg

SEQ ID NO: 41532 - DNA, 350 bp, Glycine max
  Clone ID: LIB3093-045-Q1-K1-G10
gatgttacacccaacactctcctctcactctctcacaagctgtgtccaacgttattgctatgaacacacagttcacggcttaacgctctttcgttgttgattgatggaaagctgcatacttcgctaccatcacccaacactcctcactctgacatcaatttcgcacaaaccccacttgagattcttcacagggcctgatctcggtggtggcagtgtctctacttcttcttcatgagcgacatattataggcgaagaccctctatcagagcaagtgctggaacaagctcatgtgagttcagtagcctgaactctagcatggagccacgttccatggtgacgaagttactca

SEQ ID NO: 41533 - DNA, 453 bp, Glycine max
  unsure (1)..(453): unsure at all n locations
  Clone ID: LIB3093-045-Q1-K1-G11
cgctggattcctgagaaagtttcttctgttgattgtgacaagatggtcatggttgcttgtggttggcggcatacaatttctgtttcatctttgggtggcttatacacatatgggtggagcaaatatggccagttaggacatggaaattttgaggattctcttgtgcctcaaaagcttcaagccttgagtgataagttaatcagtcaggtatcgggtggttggaggcatagtatggcactgacgtctactggactactatatggatggggttggaataagtttggacaggttggagttggtgacaatgttgatcgttgctctcctgtgcaagtgaagttcccccatgatcagaaagtagttcagatctcatgtgggtggagacacacaattgctgtaactgaaaaggaaaatgtattttcttggngaagaggcacaaatgggcaacttgggcat

SEQ ID NO: 41534 - DNA, 287 bp, Glycine max
  Clone ID: LIB3093-045-Q1-K1-G12
aacactcgttacgacacgcgtccggattccgcatcagagagtagaaaagatggcgcggttgatcacagtggtatggtgcgcggtggcggagctactgtgatccgagtagtgcccgtcacgtgtggaggaggctgtaaaccacataccaatggtgactgcagtgtaggcacgaagtagttcgactgataaggcagcgactgcacgcactgaacagtgctaggattatgatcaggatagcgaagagttaccgaagccaggaatagatgagggagaggtacgagatattc

SEQ ID NO: 41535 - DNA, 428 bp, Glycine max
  Clone ID: LIB3093-045-Q1-K1-G2
ctggtccttttgctcctcactatctgcgccgttctttctgccctgtttcgttccactgaggaacacgctatcagttgcatgacataatacagagtgttcaattagagcataatgggatccaaaaatgcaaatgggaagaaccacaaggacaaaaggaacaaatttaaggataattagagttctagttattcatcacccagtgatgccaaggttatcctcatcagtgatcctcgatattcaaaggctcacacggatcctcggttccgtgaggctccaaagcgtgaaacgaatgtggctgttgactctcgcttcaaccgcatgttcactcacaagagttttttgccctcttctgcttctgttgacaagagaggcaagcccaataacaacccaacctctcagcttggttctctgcgccattactacaaaat

SEQ ID NO: 41536 - DNA, 207 bp, Glycine max
  Clone ID: LIB3093-045-Q1-K1-G3
ctcacgcgttcgattcaaaagatcaatgctgcacttcatgcaaagacattttcaaaatatgggcacgcggataggttctacaggagcgacctgaggccaaatgagcagctgaccacatgatgcaactctgatggctatacatcacgctgacctgttgtccagacgccctggtaggactggtcaacgtcaactaattgccgatgcact

SEQ ID NO: 41537 - DNA, 293 bp, Glycine max
  Clone ID: LIB3093-045-Q1-K1-G4
gcgctcagtttgatgcatattgctatatattccatttgttgaaagattccaaattgtctttgcggacgtggtcaaacatgacatgacatactgaaggcctaaacttgcaacatggtttgaggagttgaataagctaaatgcttatacctagactagagtgtatcctcaggaggatcgttgatcttttcaagaaacgcttcctgcctgaacagtgaacgttgtattgctgcatgctttctctaaaatggatactatgcccatatagcgtcctttcattcacgggatgggatgca

SEQ ID NO: 41538 - DNA, 246 bp, Glycine max
  Clone ID: LIB3093-045-Q1-K1-G5
tgaaattctaaaaatgactgggagatacttaataattcaatcatggaaatctatggattgggcaaattaatcggagggggcgtatggtttcaaaaaaatggtgtactaactcccatttcttattcattatccggattaaccgatcaactagctgtgctatcgaacatatgcttctggtactcaaaaatctcgcggaataaatctgcctctacttatatttgcaccctattcctactactctttggg

SEQ ID NO: 41539 - DNA, 349 bp, Glycine max
  Clone ID: LIB3093-045-Q1-K1-G7
gaaaatagttcaacttctctgtctcaatcatttcattatagttttctctcccttggaatcggagcgatctccaggatgaggggctcgtgatttctgtctcactggatgatcaagattaagaattgtttatctacatctgattccatgaagccgtaatcatcctctttgaatccatatgcagcctcatatgtttctctctctataagtggtggcagatggtagaataccttttacagataatgattccaatacttgtgatgggacaatgtgttttcatatgactcattatggtgcttcctaatgaccctgtacatatcaacacttgcttggaatggctctcgaaccccta

SEQ ID NO: 41540 - DNA, 491 bp, Glycine max
  unsure (1)..(491): unsure at all n locations
  Clone ID: LIB3093-045-Q1-K1-G9
cccacgcgtccggttgtgttgcaaacaaagaggagaaaaatatgagttacttgaaccgtgtttggatggcggcgacggtggcggtggcgcagggccacaccgatcccggccacaagtgcaagacggcgctcacctccatccaccacaaccggagccgcctcttctccggcggagccctgtcagatctccggcctctttccggcgtcgtgggatctgacgtggccggctcggtggcggggagctccgacgtggagaatagggtgaggcaagccgacgactctctgaggaaagtgatgtacttgagctgctggggtcagggctgaaccacacgtggcgttatgaacggtggagattgaagtggtggccggagaaagtgacccgggtcgggttcggatctgagttgacctgaccgagtcagatcggatgactcgggtggagagaaaaaccnggaatgttctgatcttgtaataggttatgtgtggatgtatgtg

SEQ ID NO: 41541 - DNA, 389 bp, Glycine max
  Clone ID: LIB3093-045-Q1-K1-H1
attcaatccattctaaacaacttttctcatttacaatgccttcacttacaaaaatgaaaagtaagcaccatcaatgatctgtgaacaatggaaaccacacacatagctttaatttgatctaattgcttcatggaggaccaaccattatcatcaaaatcaaagactgctgctatggatcaaacccttcattcaattgggtttgaaattgaagacttgtcaccacaaaaaatctctggtcgtctacctgtcacccagaaatgctgccagccattcaaggtgctttatggaggggtatcagcattgatagtatattctctggcaagcatgggagcacacatggtttctggttacaaaagagtggctggaatttaacttagcattaaccattt

SEQ ID NO: 41542 - DNA, 230 bp, Glycine max
  Clone ID: LIB3093-045-Q1-K1-H10
tatgatgactgatgattttgaaaagcctgctcaaacaaatgtcctctgtagcaattggaaggaatggaagcaacctatcatatggtttcaaggaactacagatgctgtggcagctcaatttttcttgaaaaatatacactctcagatgaggattgctgcttttgatttatctggtgatccacaagttctgggatctcagccgaatgtatttggagagctcttgagagttc

SEQ ID NO: 41543 - DNA, 493 bp, Glycine max
  Clone ID: LIB3093-045-Q1-K1-H11
aaaaaagtttccatatacacaaagagagtgacgagaaagaaaaatggtgtggaatttgtcggtgtcagcaactagggtagggttccctccgccaaacccaaagaaagagtagaagaaacctacaaaactcatctctataaacaactccgtttgtcactccggcggctttagcaatcactccctccgttttgcgttttggattcatttatctgctgctttatcttaaaggccaagcgataaataacctctctctctctctctctctgtgagattgagaatccgatccttcgtttccgaaattctcgcgagatggacgagaacctgctcgacgatattatccggaggctcgtcgcggcgaagaacggtagaacgacgaagcaggtgcagcttacggaggcagaaattcgacaactctgtgtttcctccaaagagatctttctcagtcaacctaatcttctcgaacttgaggcttctattaagatttgtggagatg

SEQ ID NO: 41544 - DNA, 341 bp, Glycine max
  Clone ID: LIB3093-045-Q1-K1-H12
gaatgatagcgaaaaccaaaaaacaagtgtcatcaccttcttctcgtcctttccttgattcggttggttccatctcttcattcatacctggatccgggatctcccaattcctaacttgaaagtttgaagaaggaatagataagtaatggcaggagcagaaccaggggctctgtggcagagaactgctaatcgttgctttgtccagaaagatccataaagagctcccaaattgggcttagactccaaacacctagttcacaggggattttttgtataatgtccattagggttatcaattatgttatatatggtctgggatacagtcttgacttacagttttt

SEQ ID NO: 41545 - DNA, 185 bp, Glycine max
  Clone ID: LIB3093-045-Q1-K1-H2
acgctaaatgtacgctcaaccgctcgcatcacacacactctcacgatcatcgctatatacaccgacgcagtgcaaatatcatgagtacacggtaaaccacacacatacctctaattagaattaccacatatctgcgagacctaccactatatgcacatcaaatgctgatggtctggatcaaaatc

SEQ ID NO: 41546 - DNA, 430 bp, Glycine max
  Clone ID: LIB3093-045-Q1-K1-H5
ggccgtccttttttttattttttttactttttttttttttttttttttttttttgtaatcggtaatctaaatagtaacccgtcaaagtttctaaattttattccatttccacttttagttatcaagtaaatatgttaactaattacataatagcagtaaattgtcatctcataaaaaaatttggcaaaaaattcatgtgtaatttttttagataaattaaatttttaatttcttgacttgaaaaacaatttatgacatcatactagtaaatgagagattaaaaacataatttaacaaaaaattatatgtatttatcctattaaaattcttgatgacatgataagctatgggcgataaatagtatgggtatgttattagttagtattgttattttacatcatcgactataagtcattaccaaaaaatttaa

SEQ ID NO: 41547 - DNA, 399 bp, Glycine max
  unsure (1)..(399): unsure at all n locations
  Clone ID: LIB3093-045-Q1-K1-H7
cccacgcgtccgaaagttaagcattctcttcctcctagtcttatccttcagttctgtactggcanaactatgcaacccacaagacaaacaagccctactccaaatcaagaaagatcttggaaacccaaccactctctcctcatggcttctaaccactgattgctgcaacagaacatggctaggtgtttcatgcgacaccgacacccaaacataccgcgtcaacgacctcgacctctccgatcttaaccttctcaaaccctactctattccttcctccatagccaacctttcctacttgaattttctttccattagcaggaccccaaccctaatcggtcaaatcctctcagccttcgcttaacttacccaactgctgtatctttatatcatccacaccaa

SEQ ID NO: 41548 - DNA, 272 bp, Glycine max
  Clone ID: LIB3093-045-Q1-K1-H8
ggcacgcgtacgaaagttaatcattctggttctactagtcttatctcttctagttgtgaactggggagaactatagcgcccgcgtgacaaacatgccctactgcaaatcttgatagatcttggaaactcgaccactcttttctcatggcttctaaccacttattgctgcaacatatcatggctaggtgtttcatgctactctggcacccatacatattgagtcaacgactactaccttgactagcataaccttctctaaccccactctattt

SEQ ID NO: 41549 - DNA, 247 bp, Glycine max
  Clone ID: LIB3093-046-Q1-K1-A1
tatgctttcaagttttaccaattgggcactttgaatagtgtcgtcattaatgctttcatggtcatcaattaaaccccctaaacagcatttatcttgctagccaaattacttattaattaggcacataatgttaaacccataatcctatttgtcacctgattttaggttccaccctaccgattatgaactcattcttcactaccttagtaaaaaggtatcatccatacccttgctctattccatcatt

SEQ ID NO: 41550 - DNA, 354 bp, Glycine max
  Clone ID: LIB3093-046-Q1-K1-A10
aaagcattgaattcaaaaacttaagttcattccttgtgttttgctttcttcctcaaaaccaaacatgtcgaacacatgcggcaactgcgactgcgctgacaagactagctgcaccaagggaaacagctatggtgttattgtagagactgagaagagttacatcgagactgttgtcatggatgttccagcagctgagcatgatgggaagtgcaagtgtggcactaactgcacttgcacggactgcacctgtggccattaaggaatatgtatgaaaatgtaattgccatgtgtttggcaatacaaatatccaaataatgtaatcttcgtatgaataaatgtgtgtgctgttatcct

SEQ ID NO: 41551 - DNA, 195 bp, Glycine max
  Clone ID: LIB3093-046-Q1-K1-A12
aatacactgattttcacaacatattagtatatatttatatgcatacaatgatgcacacacacgacgagcgcgttctcatgctgaatgcttcaagagctattatctgatactccgtacaattcatctctaacttgtactgcctttcccctctgacgaacacttaattacttatgatctcattggcagtcctgctag

SEQ ID NO: 41552 - DNA, 327 bp, Glycine max
  Clone ID: LIB3093-046-Q1-K1-A2
cggacgcgtgggcggacgcgtgggggaatctcttgattgagaaagtgtgttagggtaagagttgtgtcgtgtccacaagacactgggagaaagaaagtgtgtgtaagtggttgtaaactgaatttcaattttctttagccatgagcacacttggtcgcaacaacacccttaactttagccgcagaaaccgattccagcttcttggtttgcaaggccaagacactatggtcaagttcattagcttccgacgcataaagggcaaaccaaaggcaattttttttacaaacttacaggtattcttctttgaataagaacacttttggggag

SEQ ID NO: 41553 - DNA, 413 bp, Glycine max
  Clone ID: LIB3093-046-Q1-K1-A4
cccacgcgtccgattgggtggaagaaagtctcaacctttagtcgaaagagcaaggatctgagtgagtgagcgatcatgtgtggtggtgcgattatctccgacttcattccagcgggtcccgccggcggggcgcagcgcgtgaccgtcgacatcctgtggccgaatttgaggaagcggttctcgaagtcgctgctggacgatgatttcgaggcagggttcatagaattcgaggatgactcggaaatcgaggatgtcgatgatgaggacgatgaataggaggatgagttgaagaagaagaagccctttgggttctctcgcttcaacaacaaggctgcttttaagcctctctctcgtggagcatcaactgtgaaatctggggaatcaaaggggcaagcttagaagtgtgccaagag

SEQ ID NO: 41554 - DNA, 386 bp, Glycine max
  Clone ID: LIB3093-046-Q1-K1-A5
gataatcctacgtatttgtgaatagtgctgtactggctcgaagtcaggaggaggtgacccggattgtagctactggaaggccatttgagtgcatggatcatattgcccttaagggaaagggaggtcaatacagatatgcataataatatcctgacgtacaactagcacctgctcttcaaatgctacccatttcacaagaaggatacacagtttattcacaatgagaagcccataaagaactttgttttaatgggtcaatacaatgatatatcatgtaatatcaaccccattttgaattgtgatacttaccccataggctaaaattttttctgggccaaattcattgttcataaggaatttggtgctccatttaaattcgtttttac

SEQ ID NO: 41555 - DNA, 439 bp, Glycine max
  Clone ID: LIB3093-046-Q1-K1-A6
caaagttaagggacccaaatttcaagagattgttaatattcgtttaggagatggaactactcggcgtggacaagttctagaggttgatggtgaaaaagctgttgttcaggtatttgaaggtacatctggaatcgacaataaatttacgactgtgcaatttactggagaggtgttaaaaactcctgtctcactagacatgcttggacgcatatttaatggctctggaaaaccaattgataatggtccaccaattttacctgaggcttacctggatatttctggaagttccatcaatcctagtgagcgaacctaccctgaggagatgatacagactggaatatctacaattgatgtcatgaattctattgctagaggtcaaaagatccctctattctcagcagccggtctcccccataatgaaatcgctgcacagatctgt

SEQ ID NO: 41556 - DNA, 224 bp, Glycine max
  Clone ID: LIB3093-046-Q1-K1-A7
acgcatagttatgggacccaaatcacaggagattgtcgatattcaatttaagagagctgggctactcgatcgtggactacgttctatgaggttgaatggtgaaaaagcgagctggtcaggtattatgaaggtacatcttggactcgacagttaattcacgactgagcaatatactggagatgtgttaaaaactcaagtctgactatacatgcgttgacgcattt

SEQ ID NO: 41557 - DNA, 391 bp, Glycine max
  Clone ID: LIB3093-046-Q1-K1-A8
acgcagacgaaagagaccgaaggctacagcgagtttaaagctacagacggtgcgtccgcggccactgccaacgcaattaacatgatgtagtatgtgcaccggatgtcacctggttcgttgtgggcccacagaggacactctcccggtcaaacacttgactctatcgaggttcatgacgtgcatcatgacttgtgctaatactcattacatagcacccttggacgtgatcgacaacattcacatggagacacctcttccgtacttcttgcactcgtaagctggtactacaaagatgtccatctacgaggtctcaaatgcatgttgaacaatataatgaacagactttcagacatacgttacattgactcaagttcaagataccgatactcat

SEQ ID NO: 41558 - DNA, 449 bp, Glycine max
  Clone ID: LIB3093-046-Q1-K1-B1
atcgatttatcgctcttttatgtggttggcttcctttcgctctcttctctgcaaatgcttcattccaagatggttaggactctgtaggctgataaagacaacactcataccgttggaaagaaggatgctgctggccatgttgcttaatttagttcttgcttcctttgtcttcttgagttttatcagagacgggagtgcagggatcactagctctttcattcggtcagagtggccggcagttgacatcccccttgatcatgaagcatttgcagttccaaagggttataatgcacctcaacaagtgcacatcacgcaaggtgactatgatggaaaagcagtaatcatctcatgggtgaccacagaagagccagggcacagccatatacagtatggcacatcagagaataaatttcaaactagtgaagaaggcacagttacaaactatactt

SEQ ID NO: 41559 - DNA, 412 bp, Glycine max
  Clone ID: LIB3093-046-Q1-K1-B12
gagaaatggcgatggcaatggcgcttcgcatgctttcatcttcaattgacaagcctctgcgcgctctgttcaatgccggttccctctactacaagtcgtctttgcctgatgaagctgtttacgacaaggagcgacccggagttacatggccgaagcagttgaatgctccacttgatgtcgtggatcctgagattgctgatattattgagcttgagaaagctaggcaatggaaggggctagaattgataccgtcagagaatttcacctctgtgtctgtgatgcaagcggttggatcggtattaccaacaaatacagtgaggggtaccctggtgcatgatattatggtggaaatgagtttattgacatggctgaaacactgtgccaaaagcttgccctataagcttttaaattg

SEQ ID NO: 41560 - DNA, 405 bp, Glycine max
  Clone ID: LIB3093-046-Q1-K1-B2
accacgcgttcggctgagtatcgttacttgaagcataagtgaaactacagtgaggggtccgtgtagatggtcagcacatgatatatgagctggaaggctacaagggcatactgagggtagctgatgctctggaagacaaaaaccctgaactcaaagcatgggttaaacgagtaagagatgttgctcatgacatggaatacgctatacatgaattcagccattgccttgtagatcaacatggacaacgtaacaattgttcgtttcatatgaactttttcacccggcataagatcgctctaaatatgccaagtatcaaatgcagactggacattatatcccagaaacgttcagacatacctcggataggctcacgctcaaaataacgattggcatcaaggcttgata

SEQ ID NO: 41561 - DNA, 290 bp, Glycine max
  Clone ID: LIB3093-046-Q1-K1-B3
atcgatcgatcgctctaattcgtaggtgacttcctttgtgtctattctctgctaattctgagtcgggagatattctgggctgtgcaggctgactaacactacaatcatatccatgtaaataatgaggctgttcactatgatcattaacataattcttgcggacttcgtatgcttaaggttcattacatacggaagtgcatcatatcaatatctgaacgtgtcagacacaagcgttcagcaatggacactatactatgttgatgaaacattggcagcatcattgggacata

SEQ ID NO: 41562 - DNA, 456 bp, Glycine max
  Clone ID: LIB3093-046-Q1-K1-B4
gtacggttgctccaaaagcccaatgacttttatgtccactttggcatatgggacactgtgcatgctcctggcaatgagattagccaacactggagattctggtgtttttacatcacctaaccacaaaatacaggttggcaaaatggattattaccaaagacactgtaattgcaacctctttcagtctcatgggaggcataattcaaaattagaatgttttgaatgattctaattgtaattgctattattttatgcatgtggtctttgatgggtgcataaaatgggattcaatatggtccttttgccattccacagaatggattgcccataacactatatcccaaataaaaagtggaggcacactaatcaaggcatggaagcaacttgctaaatatggaaaaataactctttcaaaaatatttgaatatgttaaccagagaaagtgatgaaagtgac

SEQ ID NO: 41563 - DNA, 434 bp, Glycine max
  Clone ID: LIB3093-046-Q1-K1-B5
gtagaattggcggtgataggcgaaggaggtggcgactgactagtgaataggcttgttgatggattgatagcaataattgctgttagcgaagcttgggaattgacatttatgggtcgcaatcgcaggtcgcagtcgcagtgtgtcacgctctcctttcaattcccgcaaaagacggtactctgcatcccctgattctcatcgccactcgagaacttccaggcgccgatctccttgccacaagcgccgtctaaagcacagaacctcttcctacccctctctttcacgcaaccccactcccaaacccaagaaagatcaaaacataagcaagcgtcaacactaggaagaattgaaactattctaagaagaaactgcaagacgactggaagaagcaattccaaaaaatgctgacgaaaatcttaacacagaggaaagta

SEQ ID NO: 41564 - DNA, 443 bp, Glycine max
  Clone ID: LIB3093-046-Q1-K1-B7
cggacgcgtgggcgcaagtgcccttagacttaattggaccactatcctatgcatgcctttgatttatattataaaataaaaataatactatatataacatgttaattgcttaatatgtgctttaagagtaaagaataacatcgtgaaatcaaattacccctttttcaatacgtgttgaatcatcgatcttggtttgtaatttggttgtatattcacaaaattaataagtatattgtgatgtgattaattcccttctctgttatggtgtacttgccttccctgtattgtccatctccatcgtctgtctattaataagaattcttatgtgatattttcatttcaaaaaaaaaaaaaaataaaaaaaaattaaaaaaaaataaaaaaaaaaaatttataaaaaaataaaataaaaaaaataataaataaatatttttaataatata

SEQ ID NO: 41565 - DNA, 271 bp, Glycine max
  Clone ID: LIB3093-046-Q1-K1-B8
atgacgcgttcgcggacgcgtgggcgcaagtgcccttagacttaataggaccactatcctatgcatgcgtttgatttatattataaaataaaaataatactatatataacatggtaatagcttaatatgtgctataagagtaaagaataacatcgtgaaatcaatatacccctttttcaatacgtgttgaatcatagatcttggtttgtaatttggttgtctattcacaaattaaatatatatattgtgatgtgattatattatcatcttt

SEQ ID NO: 41566 - DNA, 62 bp, Glycine max
  Clone ID: LIB3093-046-Q1-K1-C1
aacagtacaatatcacagcgattcgcatacgtgggttacgatagcgtgctacgctatctgat

SEQ ID NO: 41567 - DNA, 434 bp, Glycine max
  Clone ID: LIB3093-046-Q1-K1-C11
gaagattctctccttttcaaatttcaaaccttttcccccaaaactaacagacccctcttcttcttcgcgctctgtaatctcaatcgtgcatgggtcgtcttcactgattcgataataaaaatctcagattcattcttcgttttctgttacgatggagttgatttcaggtctaccagaggacgtagcccgagactgcttaattaggattccctacgagcaattcccagcggttgcttccgtctgcaaaggctggaacacggagattcactcgccggactttcaccggcgtagaagaaccaccaaacaagcccaggaaatcctcgtcacggttcaatccaatatagactccgaaaaaactcgaaccggtttgctcgcgaagtccaccacgaacccggtttaccggctcagcgtattcgaaccgaaaacgggttcat

SEQ ID NO: 41568 - DNA, 123 bp, Glycine max
  Clone ID: LIB3093-046-Q1-K1-C12
cctcacacccccttctgtcaggcaaggggggtgtgcatagggatcattgattccctccaagtgaatatttaacatggcatcaaaaatcatgcagttgcttccttacgtttagtcatgaatgga

SEQ ID NO: 41569 - DNA, 428 bp, Glycine max
  Clone ID: LIB3093-046-Q1-K1-C2
cgtttttctctttccaaatctaacttacaccttacaatacatgtcatgtgaactcgtgaagtgtgcagtgtttggtgcttctttttgttctcctctttccttttttggttcacgattccttccctcctcatggagtctctggaacttgttcctcttcttcttcttcatccacgcgcatcaccaccactacaatcaataaggcaacctcgtttcccttctcttctcaatagaaaaactagaaatgccaacttgcgatcattttccgctaaccttcaaggcggcggtggctgcgctacttcacaaggcggtcccttctctttcgaagaccaaacctctcaccacaaagacgatagagctcttctcattgccagagaaaccgacgattttggctatctcgttggcttttcgttgctttctgactctggtct

SEQ ID NO: 41570 - DNA, 448 bp, Glycine max
  Clone ID: LIB3093-046-Q1-K1-C3
gaaaatacaagccgtagaagagggctcgctctttcgtgtttttgttcgcgaaggaaactctgtccttagctatcgcgatggatcggtaccagaaggtggagaagccaagagctgaaactccaatcgatgaaaacgagatccggattactagtcagggaaggatgcgcaactacattacttatgccatgagcttgcttcaggagaaaggttctaatgaaattgttttcaaagcaatggggagagctatcaacaaaaccgtgacaattgtggagttgatcaagaggagaattgtgggccttcaccagaatacagcaattggatccactgatatcactgatacttgggagcccctagaggaaggcctccttcctttggagacgacaaggcacgtgtcaatgataacaataaccctttcaaagaaagaactcgatacattgtctgtggggta

SEQ ID NO: 41571 - DNA, 436 bp, Glycine max
  Clone ID: LIB3093-046-Q1-K1-C4
cccacgcgtccgtttgttgttgtaactcgttcttcttcttttgttgttctgtgtttgtgtttgttttttctctcacctgaaaatgtcttgctgcggtggtaactgtggttgcggaagctcctgcaagtgcggcaacggctgcggaggctgcaagatgtacccagacttgagctacactgagtcaaccaccaccgagaccttggtcatgggagtggcacctgttaaggctcaatttgagggtgctgaaatgggtgtgcccgctgagaacgatggctgcaaatgtggaccaaactgctcctgcaacccctgcacttgcaagtgaggtgttgggagagcaagcttcaagcagagatagcccttaattaggaataatgataaactattaatgtgtagctaaaaacttatgtattatgtctgtgatggttttcgtgcactc

SEQ ID NO: 41572 - DNA, 338 bp, Glycine max
  Clone ID: LIB3093-046-Q1-K1-C5
acataacggaatttatatgatggaagttgatcgagttctaaggccaggaaactatggtctgctctatggtgattgaatcagatccaaggcgtagctacaaacactagctgagacctaatctagaacttgcgaaatacctaatactgattgaagagacgtgtacatcatacattactgtttcactagagcatacttcaggagaatggccattatgcaaaaggtttcaaagccttgaagatagctattaacaaaaccttaacctaggttggaatgatccaaatgataatattgcgacctcaccaggattcagcaattggatccactgatatcactgattc

SEQ ID NO: 41573 - DNA, 169 bp, Glycine max
  Clone ID: LIB3093-046-Q1-K1-C7
gctaccaaggttaagagtaattttagcacggtagaggataacggctactagtgatgtagctatttccatcatactcgcacttttggtggatatgacacaatcatcaactgcgatcgatcacaacatgatcagaattactaggcagatagctattcgacactacttccct

SEQ ID NO: 41574 - DNA, 206 bp, Glycine max
  Clone ID: LIB3093-046-Q1-K1-C8
gcggtcatccgtgctagatcacacgcattcagttttcgtgctgtcgtcatgtcaaacagggggagtgctcacatctaacgagaaggggttccagagcgtattcaatgccttaactgggaaaaaagctaaatcggcccgcgtgaaggccgtcacataattggccaagatgcggatacctgaattaaactacaacggcagggtgcgaa

SEQ ID NO: 41575 - DNA, 412 bp, Glycine max
  Clone ID: LIB3093-046-Q1-K1-C9
cccacgcgtccgctggtctctggcttccttggtacgggaagaactcaatcttgtccatttccctttgggtgttctttcttcgatctcttcaccttcctttcgaccactctcttatcaccgctcgctttcttaactagagccctctccgttgagtgacgagttcgtgaatattcgcttgagatttgactgcgaagctggttttagagggtttctccaggtgtggtttgatttacagtttctgatgctgaagaaataaaaaagcttgaaggcttttgctcttctgtgtgaaaaatgttggaaagtggtgcgaaattcccaggaataatagatctcaacaaaaattataacaactactatgatttctctcaaagcttttaccataagcctggggagggtaccaatatgtcaattg

SEQ ID NO: 41576 - DNA, 445 bp, Glycine max
  unsure (1)..(445): unsure at all n locations
  Clone ID: LIB3093-046-Q1-K1-D1
ctctctctctctcttcttcttcttcttcttcttgcacgtattgttctaatccacaaaaatgatggccttaaattacaacattgccctcgccttctctacggttctcacgctgcttctccttcccttaccaacccttggggagctcgtgcaggagcagccactagtcctcaagtaccacaacggccaactcctgaaggggcgcatcaccgtcaatctcatctggtacggcaccttcaccccgatccaacggtccataatcgtggacttcataaactcactaagcagcgcgccaaacgcgccgcttccatcgactgccacgtggtggaaaaccacggagaagtacaaggggggaggatcctctgcgctcgtcgtanggaagcagttcctacactcggcttactcgttagggaaaaatctcaaagggaaagacgtcctcgcactcgcg

SEQ ID NO: 41577 - DNA, 180 bp, Glycine max
  Clone ID: LIB3093-046-Q1-K1-D10
accacgcttgataaagatctataacaactccttacatgtataatcacaaggatattaatctttccatgcgtattatcattgcttgagcgttgagagtacacttgacccaaggattgtcaactccagtctagatactaaaggagagactaatgcagatgccaagttcaatgccacatatat

SEQ ID NO: 41578 - DNA, 445 bp, Glycine max
  Clone ID: LIB3093-046-Q1-K1-D2
ggtgaagtcaacaaagaaagaaaaaaagctttctccgagaaagcttctgttcacgtcagggtccggggtaggcttcttcattgagattgggttggtgttcagtgtgaatgcatttccagtgagataagagaaaaggaacgaggggaagaagcgacttatattaagaaatattaatatacttaatttaatattaatgttcgggtacccccctccggctcgtagttgagaagagctttcgtttaggaaagggctaaatgggtgcgatccctctcgttgagagtcaagggtctcctggagtagaatgcacatcctggatctattaagccggcaagggttcagcattggctttcacgaccgcaaaggggccatctttcagtcggagtagataagatagatatacttaatttaatatcttctattatatattgtaatattataaagaaaa

SEQ ID NO: 41579 - DNA, 443 bp, Glycine max
  Clone ID: LIB3093-046-Q1-K1-D3
tgtccatccaaaccttaaaaagattcagtgaagaacaacgttaatggcatctcttggtgtgcaagcagttcatcctcctccattaacatccacctccgacccacctcctctttttgatggcaccaccaggttgtacatcagttattcttgcccctatgcacaacgtgtatggatcgctcggaacttcaagggactaaaagacaagatcaatttggtccctataaaccttcaagacaggccagcttggtataaggagaaagtctaccctgaaaataaggtgccatccttggagcacaatggcaaggtgttgggagaaagtcttgatttgatcaaatatgtagatgaaaactttgaagggacacctttgtttcccagagatcctgccaagaaagagttcggagagcaattgatatcccatgttgatacattcagcagagacctgt

SEQ ID NO: 41580 - DNA, 378 bp, Glycine max
  Clone ID: LIB3093-046-Q1-K1-D4
cccacgcgtacgcccacgcgtgcgctggtctagaaaattcagtgctgaaacatggcttcggctactctctctgtagccaaaccagaccttcaggcaaatgggaaaggcttctctgaattctctggcctccgaagctcatcaggcttccttcccttttctagaaaatcttcagaggatttccattctgacattgccttccagacctatgcagttggaagcagtggaggatacacgaagggtgtgacagaagcaaaactgaaggttgccataaacgggtgtggaaagattggaaggaacttcttgaggtgctggcacggtcgcaaagactcccctcttgatgtcattgccatcaacgacaccggcggcgtgaaacaagcc

SEQ ID NO: 41581 - DNA, 443 bp, Glycine max
  Clone ID: LIB3093-046-Q1-K1-D5
caaccattgaactttgatatatatgatgacctaagaagcgagctactggatggcaaattattctcccctgtacttgcacatattcaaccagaatcccattatcaagcaaacatcgaatcagatggtcgatatgggcttcaatatggtacaaatgagacaaacatgtcagactttttgaattcagttgttaactgggatcaagtaccctttgaggatcccaattgtcaacagcagagctaccccttgtttaatgttaaggataacatattaaacagcgacttagattctgaacttgccaatatgacagtgagtaacagctcttacactattatatcttttaatctttctaggtaggttctgccttgatagtaaaacatagtagtttccaacttcaggtgtcagctctaacaatctaacatggtttacttgagtctcctgtataa

SEQ ID NO: 41582 - DNA, 377 bp, Glycine max
  Clone ID: LIB3093-046-Q1-K1-D6
ttcagttcagccctgtttagagctgtctgctaagtagcgaaggctatcgactctttgatgggcgcgctcatacaaatgaattgggaaagtgtatacatttgtttcaaggacattgagctgtaatattatgatctgcaattatcaagtacgatctatcactatttgtggatgactacatatactgtttgtccgagactaccgaacttctgctgggaatccagaagcaaccatgttttgaaaaagcatccttgatgtcattcttaaacaatttagacatatgttataataagatactgaagctaccacttaatgtattcgactgtttcggataatacctaccattttcaacagggaaacgtgacaatttatcattctta

SEQ ID NO: 41583 - DNA, 282 bp, Glycine max
  Clone ID: LIB3093-046-Q1-K1-D7
acgcttccgtatcgttgagaaatatagggaaaaattggattcgctgaaactgcacaagctgctgggcacaaacgttctcaagtgtggcacatgaaatgtgttgcttgaccccaatgaagtctacgaaatctccatggccatatctcggccaaacattcggaaattcgttaaggatgggtttatcatcatgaagccttccactatttacttacgctcgcgtgctagtacgatgaaagacgcacctaacaaaggtcggcactctggttatggttagataaatgg

SEQ ID NO: 41584 - DNA, 287 bp, Glycine max
  Clone ID: LIB3093-046-Q1-K1-D8
ttgaagtgatacctctgcatggagcataggacttgctggatgtgttatgaatatggcaataagtcttgcaaggtgttcagccaattggcaccatcattgagacaactaatacagaacgaatattatttactgatgatgcagataaccaattacttgatgaaaattatacgtatattcgtgcaccgtttgatggaaatcatccatttaatgttgtctaatttacatttcacgtgactggaattatccatgataacattcttgtagatatggtcatgcacatcaaaaca

SEQ ID NO: 41585 - DNA, 449 bp, Glycine max
  Clone ID: LIB3093-046-Q1-K1-E1
gtgcagtatcgttgagaaataaggggaaaaaatggtgtcgctgaaactgcagaagcggctggccgcaagcgtgctcaagtgtggcagaggaaaggtgtggcttgaccccaatgaagtcaacgaaatctccatggccaattctcggcaaaacatcaggaagttggttaaggatgggtttatcatcaggaagccaaccaagattcactcacgctcgcgtgctcgtaggatgaaggaggcaaagaagaagggccggcactctggttatggtaagagaaagggtacaagggaggcgaggcttcccaccaagatactttggatgagaaggatgcgtgtgctcaggcggttgcttcgtaagtacagggaatcaaagaaaattgacaagcacatgtaccatgatatgtacatgaaggtgaaaggtaatgttttcaagaacaagagagtcttgatgg

SEQ ID NO: 41586 - DNA, 445 bp, Glycine max
  Clone ID: LIB3093-046-Q1-K1-E2
gttcgtgtagattttgttgggggttggagtgatacccctccatggagcattgaacgtgctggatgtgttttgaatatggcaataagcttggaaggttttcagccaattggcaccatcatagagacaactaaaacagaaggaatattatttactgatgatgcagagaaccaattatttgttgaagattatacatctatttgtgcaccgtttgatggagatgatccatttcggctggtcaaatctgcattacacgtgactggaattattcatgataacattcttgtagatatgggcatgcacatcaaaacatgggccaatgtcccccggggcagtggattgggtacttctagtatcttggctgctgcagtggtgaaagggcttctccaagtaattgatggggatgatagcactgagaacgttgctagacttgttttagtgttagaac

SEQ ID NO: 41587 - DNA, 347 bp, Glycine max
  Clone ID: LIB3093-046-Q1-K1-E3
gtgcagcttcattgagaaatcaggggaaaatatgctgtttcagaaactgcagaagctgctggccgcaagcgtgctcaagcgtggcacaggaaaggcgtggcattgaccccaatgaaatcaacgaaacctccatggccaattctacactaaacattaagaagtctgttaacgatgggtttatcatcaggaatccaaccaagattgactcacgctcgcgtgctcatacgatgaaggaggcaaagaagaagggccaacactctggttatggttcgagaaagggtacaagggaagcgagcattcccaccataatactgtggatgagaacgatgcatctgctcatgcggttg

SEQ ID NO: 41588 - DNA, 419 bp, Glycine max
  Clone ID: LIB3093-046-Q1-K1-E4
ttttatccaattgaaattttaaaaatgactgggataaacttaagaattcaattattgaaagtgaataagtaaacaatttaattggattggtcgaatggtatcaaaaaaatggagtactaactcccatttcttatttattattgaattaaccgatcaacttgctttgatatcgaacatttctttttgatttcaaaaatttttcggtaaaaatttgaatctatttttatatgcgaatcaatcctactacttctggtcctgaggtttctgcgcttgaaaaaaaaaatctgggacgtattgcccaaataattgttccggtactagatgtagcttttctcccaggtaagattcctaatatttacaactctctgatagttaacggtcgagatactgatggtcaacacattaatgtgacttgtgaa

SEQ ID NO: 41589 - DNA, 425 bp, Glycine max
  Clone ID: LIB3093-046-Q1-K1-E6
acgcttcgtgtagattttgttgggggttggagtgatacccctccatggagcattgaacgtgctggatgtgttttgaatatggcaattagcttggaaggttttcagccaattggcaccatcatagagacaactaaaacagaaggaatattatttactgatgatgcagagaaccaattatttgttgaagattatacatctatttgtgcaccgtctgatggagatgatccatttcggctggtcaaatctgcattacacgttactggaattattcatgataacattcttgtagatatgggcatgcacatcaaaacatgggccaatgtcccccggggcagtggattgggtacttctagtatcttggctgctgcagtggtgaaagggcttttccaagtaattgaatgggatgatagcacttagaacgttgc

SEQ ID NO: 41590 - DNA, 439 bp, Glycine max
  Clone ID: LIB3093-046-Q1-K1-E7
gtgctttcccgccgccgctatactgccaccgtctccgccagcgatggcagaagatgattcaaagcctctgaactacatctccgaagtcatactcaagaagaggaaaagcaccgaagcatgggcgttaaggaaaaaagaacagttccagcaaaagaaattccaatccatcagaaagcccgaggatttcatccacgagtatcgcaacaaggaagtggaccttataagaatgaagcggagggtgaagaggaaagtgcctgaagctaactccaacactatgataatcattcggatacaggggaaaaaaagacatgcatcctaggactaggaaggtgttgtacagcttggtgttgaggagaaggttcagagctgagtatgtgaagccaagtgagggaataatggccaagctgcatagggtggaaccatatgtcacctatggata

SEQ ID NO: 41591 - DNA, 248 bp, Glycine max
  Clone ID: LIB3093-046-Q1-K1-E8
cccacacacacagttcgtcggaatgggaagggtgattcgcgctcagcgtaagggtgctgggtcggtgttcaagtctcacactcaccaccgcaagggtccggcgaggttccgcagcctctacttctgcaagcgcaacggctacctcaaggtcgtcgtcactgacatcatccacgaccccggtcgcggctcccctctcgccaaggttgcattccgtcacccctttctctacaagaagcacacttatctct

SEQ ID NO: 41592 - DNA, 444 bp, Glycine max
  Clone ID: LIB3093-044-Q1-K1-B2
tccacgcgtccgaggattacatcgatccaagtgtcaagagttctaacttcaatcttgaagagggagccaaggtgataattgctgcgcggagcaacaacgagatggatgcatccaaactgaagaacgagttccctgagcttctttccatcaaggaatcactgatcaagtatgtctctgagccaaacaagaaaactgcttaaatatattaaagcggattcatgttttatacatcacacattatgcatttctgtggcgggctacatatatcactcattatttcattggtattttgttgagtattgataagaaccatactacaaaagctagccatgtagttcttggtctcttagctataagcgattcctgtgtcagcatatctacattatattaccagggtttagaagggtgaacccccaagtattattaactgggccagatatggtt

SEQ ID NO: 41593 - DNA, 380 bp, Glycine max
  unsure (1)..(380): unsure at all n locations
  Clone ID: LIB3093-041-Q1-K1-C2
cccacgcgttcgcccacgcgttcgcccacgcgtncgctttcttccttctccttctcttgggtggttctcttttgatgggcgaaaacaatgaagctcattagcagcattaaccccaaaaatctcaaactcagtcccaaacgcttctttcgcaaaaaggaacgatctttagtctcacgctccgacccaccttcattcggatccggatcttcctccgacgactccaccacaaatcacaagccttccgccggtaaccaaactccgaccagcgtcctcccgggcgtctccggagactggtccgacgtcgccgccgtcgacgtgcggtgggacctcgcccaggcctttcgcctcattgaccgcgacaacgacggcgttgtcacgcg

SEQ ID NO: 41594 - DNA, 385 bp, Glycine max
  Clone ID: LIB3093-041-Q1-K1-C3
aaagcattgaattcaaaaacttaagttcattccttgtgttttgctttcttcctcaaaaccaaacatgtcgaacacatgcggcaactgcgactgcgctgacaagactagctgcaccaagggaaacagctatggtgttattgtagagactgagaagagttacatcgagactgttgtcatggatgttccagcagctgagcatgatgggaagtgcaagtgtggcactaactgcacttgcacggactgcacctgtggccattaaggaatatgtatgaaaatgtaattgccatgtgtttggcaatacaaatatccaaataatgtaatcttcgtatgaataaatgtgtgggctgttatcctacttcaagtctgtgtagtcatgcagtctgaa

SEQ ID NO: 41595 - DNA, 421 bp, Glycine max
  Clone ID: LIB3093-041-Q1-K1-C4
gtgaaacagcgcatagaagatacaaaattgagacgaggctgaacaaaaataagagtgtttagtttcccttctgatggtcgtgagtggttcctccccactaacttcgaagaggagaagggtcaccaacttttgttccaccgacatggacgctgaaactgctaaggccaagcttgctgctgtgaaagaaagatttggacgagagatccatgtttttgaaacatcagttctttcttcatcttcaaaggctgcgttatccaatgaaggagaggagacggatgacttctatgagtttactgctgaagattattacagacttttggctactaaaaaagaagataaattcttgaagactcgaaaactacgagaagcagaagaggcagctcgtaggtcaagaataaccaaagctgtaatcagaattcgc

SEQ ID NO: 41596 - DNA, 403 bp, Glycine max
  Clone ID: LIB3093-041-Q1-K1-C5
ctaaaattctctgcattttcttcgtcacaacaacccttctctgattcgtcttcaatttttgtttccaaaaccttaggtcagatttctgtgtttgtcgtttctgataatctggagtgagctaggtcaagatgccgtgggtttccttgtttgtggatcacaaaagaaattgtgttcgcttggtggtgttttttcgtgtgattctgtaatttaattagctcaggtgtagtcccattaggttgcgaagcaactcttttcattaggttgttctccttttcatttccaaagctgttggggggactgaggatgtactttgcggtaacaataaagagataccaagctgtgaaggaagttggacaaattaaaatgagtgttggagttattggatacaaccaattgatgcttg

SEQ ID NO: 41597 - DNA, 399 bp, Glycine max
  Clone ID: LIB3093-041-Q1-K1-C6
gctggtttcaaaccagatgatcccacgtacaccatggttattgattgcttttgtaagaagggtgatgttaagatggggttcaagttactcaaggagatgcaaagcgatggacatgtaccgggagttgtcacgtataatgcactaatgaatggactgtgcaagcaaggtcagatgaaaaatgctaaaatgctgttagatgcaatgcttaatgtgggggtggctccaaatgatattacatataacattttactagacggtcatagcaagcatggaagctctgttgatgttgacatatttaattctgagaaaggacttgttacagattatgcttcatatacagcacttgttaatgaatcaagtaaaacttcaaaagatcacctaaagagatgattgctactg

SEQ ID NO: 41598 - DNA, 329 bp, Glycine max
  Clone ID: LIB3093-041-Q1-K1-C7
cccacgcgtccgggaaaactaaaagagaaaaatggattgtagtaacgagttggatatgcaagaaccgagcattgagacggataagcttagttacgaaatcttctccattctcgaaagcaagtttctcttcggctacgacgatccaaagctctggttccccaagcaaatacctcccaagccggaatctcagactccggcagctaccgccgccgtggactgcgtctccgcagtcaagaaccagcgcggcaagatatgcattctcgccatcgacggcggcggcatgcgcgggattctcgccggaaaagccctcgcctacctggaagccgcgc

SEQ ID NO: 41599 - DNA, 402 bp, Glycine max
  Clone ID: LIB3093-041-Q1-K1-C8
gtaaaatgtaaacctttttgcagtgacagtgtgcgacagagattcctttcaacactagagcagttaggtttagaaccactacgtgttgatcttctgccccttattcttcttaaccatgatcatatgcaagcctattctctgatggacatcagtttggatacatttccatatgctggaacaacaacaacatgtgaatctttatacatgggagttccatgtgtcactatggctggatcagtacatgcacacaacgttggtgttagtcttcttagcaaagttggactggagcatttgattgccagaaatgaagatgaatatgttgaattggctcagcagttggcctctgacatttccgcactacaaaatttgagaatgagtctgcgaaatctcatgtacaagtcc

SEQ ID NO: 41600 - DNA, 421 bp, Glycine max
  Clone ID: LIB3093-041-Q1-K1-C9
caagggagagacagaagacattgggaaactattggagaggactatgatgcacaaatatggtgtggagaacatcaatgagcacttcatgagcttcaatacaatttgtgatgctactcaggagagacaagatgctatgtataaattggtggaggaagatttggatctaatgttagtagttggtggatggaactccagcaatacttcacacctgcaagagatagcggaggaacgtggaatcccttcttattggattgacagtgagcaaagaattggtccaggaaacaaaatagcatacaagttgaaccatggagagctggtggagaaagaaaactggctgccagagggtccaataacaattggtgtaacatctggtgcatccacaccagacaaggttgttgaagaatcactcatcagggttttt

SEQ ID NO: 41601 - DNA, 415 bp, Glycine max
  Clone ID: LIB3093-041-Q1-K1-D1
cacgaatatcttgttgtttggagcgatccgagaaaaactctgtaaacatgttggtttaccaggacctccttacaggtgatgagcttctctctgactccttccgttacaaggaaattgagaatggaatgctgtgggaagttgaggggaagtgggttgttaaaggagcagttgatgtagacattggtgcaaacccttctgctgagggtggaggagaagatgagggagttgatgatgcagctgttaaggttgttgacattgttgacacattcagacttcaggagcaacccgcattcgataagaagcagtttgttaccttcatgaagaggtttatcaagaatttgactcccaagctcgatgcagagcaacaggagttgtttaagaagcacatcgagggagcaactaaatacctgctctc

SEQ ID NO: 41602 - DNA, 371 bp, Glycine max
  Clone ID: LIB3093-041-Q1-K1-D10
cccacgcgttcgcccacgcgtccgatttctccatttccattttctctctcacttgggaagaatcgtaagctatgggaaagtcttacccaactgtgagtgctgattaccagaaggccgttgataaggcgaataataagctcataggcttcatcgctgagaagagatgcgctcctctaatgctccgtttggcatggcactctgctggaacctttgacatgggcacgaataccggtggacccttcggaaccatcaagcacccttccgaactggctcacagtgctaacaacggtcttgacatctctgttaagctttttgagccactcaatgcggaattccctattttgatctactccgatttctaccatttggct

SEQ ID NO: 41603 - DNA, 396 bp, Glycine max
  Clone ID: LIB3093-041-Q1-K1-D12
gaaaaaggtccctactaatacacatttcttaccaaaccaaattacacagagtaagagagagagattttactctgtctctctttctcttctttttcccctcgtttcgtttctttgttaatatctccccgtcaaccattgactctccgaggtaccaccaatagcaccaccaccaccgtggcggcgtaaggcttgttccttctccacgccacattttgagtttcttcaaacagcagctgcaccagcagcactagcatcaacaacaatggactccaccacacccaattgctttcacctattactccgaccgcttctgctgttcaatctccgacatcatctgtccctcctaagcccgtgaccagatccgaattcgcctacccgttcccgacttcctttttt

SEQ ID NO: 41604 - DNA, 400 bp, Glycine max
  Clone ID: LIB3093-041-Q1-K1-D2
gaataatattagggttttcgataagagtcctgtgatgttgtcgccggtgaatttggtgaaacacaacagtggtttcgttgggacccccaaaacccctcgcctcgacgattcgctgtcggaatcgaagcttgagtctctccccatggatttgttggttaaaattctgtgccacctgcaccatgaccaactgagggctgtcttccatgtttctcaaaaaattagaaaagctgttataattgcaaggcagtttcacttcaattatactactccagatcgctctcggcaggagatgttaagtacaatgactcctcgtcctactgagcattggccttttttgtgcaagggtgatgggaagggagttaggattccaagcccacacacacctaaagcacctagacat

SEQ ID NO: 41605 - DNA, 424 bp, Glycine max
  Clone ID: LIB3093-041-Q1-K1-D3
ctggaaggaacactttcccagatttgtatgaagactctactggagaagcatctgcttataatagcaataagagtcatagaatgagcactaaacatggtgttgaggggatgcgatctgattctgcttctaaccatagtgatcactatgaagagaagcttacagttaagcagaaaaccttgatgctgcatggttatgataacatcaatccaaagaatatacaaaggagtgaacatgtaaaatctaaaccttctagttcaatccataattcccgtgttcctatggatactgaagaacgggggttatctgctaggatggcaaaggaagagatgtttaaggggaacaggaaagcaaaaaatacatactgcgatgtaaagggagcagggatgctttcaaatgaaatcatggttgcaaaacgagctaaagt

SEQ ID NO: 41606 - DNA, 419 bp, Glycine max
  Clone ID: LIB3093-041-Q1-K1-D4
ggctgtttcgcgctgccattgccccgcgagtctggtattccgctccgaccgactctagtgttcgtttgggtcagactttgacgctaaagagcttcgagaattcatggattggaactaaagttggggtttcgccatgcagtctcaatcttagacctgtcgtgtccgtttcccggcggcgcccgctcgctgctaccgtctccttcagcctccccaccgcaaagccagagcgtgcttctactggccaagaaattcccaagtgagtagtatcgcccaaatgtgtttgtcggactctacttttttctcgttggtcccttgctaattgtgtttgatgaaagcaagatggttttccaaggctataaaatcatttgcaatgtctgaattggaggcaagaaaactgaagtatctgaccactggcactg

SEQ ID NO: 41607 - DNA, 322 bp, Glycine max
  Clone ID: LIB3093-041-Q1-K1-D5
ctttctcttcttctgctgctcgatcgatcgatcgatctcgtcactctcttagctaccatggcgactgagaatcctttcaatagcattttgacgacgctcgaaaagcccggtggtgctggcgagtttggaaagtactttagcttgcctgctctcaacgatcgtagaatcgatagacttccttactctgtgaggatacttttggaatctgcaatccggaactgtgatgagtttcaagttaagagtaacgacgttgaaaaaattattgattgggagaatacctctccgaagctggtggagattccattcaagccagctagagtgc

SEQ ID NO: 41608 - DNA, 409 bp, Glycine max
  Clone ID: LIB3093-041-Q1-K1-D6
cccacgcgtccgagagttttgaggaagaagcatagcgatgatggcatgcagtagtagcacaatgcagagtgtgtacccgagggtgagtggagcgaatttccacgttccgctatcttccccttctctcgttcctatttacaacaacaacctttccttttcaaagctacgcaattcaattcatctcgcggcggtgccattgccgccgttaaccaaagcctctgcggggaacggcggccccaccgacgagggagtgtctttagggacgatgaagctttctttggacactgacctccagagattcgattccttgctctttcagtgggcaaacagcctttgccagggagccaatctgcccctttccgtgcctttcaaggtggacaaaatacctggtggagctagactgggttta

SEQ ID NO: 41609 - DNA, 417 bp, Glycine max
  Clone ID: LIB3093-041-Q1-K1-D8
cccacgcgtccgaggaaacatcaaataaggatttgtcaacattagccaaggtagcatttgaattgcttaaatggatgattgtttgggaacctcaccttcagaaggctgtatctgtgattcttactgctgccaatgattccaactggcgaactagatctgctacattgacatatctgcgcacattcatgtacaggcacacttatattctctcaagttcaaagaagcaagaaatttggagaactgttgagaagttactagtagacaatcaaattgaggtaagagaacatgctgcagcagttttagcaggcctaatgaagggcggagatgaagatcttgcttgagatttccatgatagagcttataaggaggcaaatattgtacagaagagaaaaaaatcgagaaatgcaagttcttgat

SEQ ID NO: 41610 - DNA, 390 bp, Glycine max
  Clone ID: LIB3093-041-Q1-K1-D9
gctctgagctgttctatgttcatggtgtttgtcactttgagttcggctggggacggggtacaccctgatagtggtgctcccacaatgcctggctgttacaacaactttgtcctggttaaagtccctacttgtattgattgtgtggaaagctgtgagtattttggcgttggtgcaagatttggccctacattagaatcaaaagaaaaacatgctatccatactatagttgctatagctgacccttctgattgttgtatcaagcctaagaattatctcactgtcgaaatcattttggtgctccgaggacaatgttagttcacaaccaatgcatttatagctaaataagctttttcttcatccatcctcattataaattatcggacacaactt

SEQ ID NO: 41611 - DNA, 412 bp, Glycine max
  Clone ID: LIB3093-041-Q1-K1-E1
gtttgggatgaagcatcgggttattactatgatgctgcttctgggttttactatgatggaaatactggtctttactatgatggtaataatgggatttggtattcatatgaccaccaaactcagcagtacataccttgcactgatcaaaatcagaataaagcatctaatgagtctgaaccttctaaggtatctgatggttctggaagtaaaaaggtcatttctgcaccagctactgctgttgcaccggttgagaagccagcttcattggcagatgctgtccaggctgcagcaactgctgctttagctgcagagaagaaagagaaagaaaaatcaaaggaaataaaacttgcctcaaaaagcagtatactggcaaacaagaaaaaaatgaacaatgtgttgacaatgtggaaac

SEQ ID NO: 41612 - DNA, 204 bp, Glycine max
  Clone ID: LIB3093-041-Q1-K1-E10
tcgcccactcgttcgatcaatcttagtgaactggtctaacttattctccctcatatagatgccgttatgtcttgtgcacactgtttcctgtactctatgataagtactgatgatttgattgatccacactcagataatagcagtcattgagaataaaaagctttatgtcgtgtttgtagctttggtctttagttatttcccatt

SEQ ID NO: 41613 - DNA, 210 bp, Glycine max
  Clone ID: LIB3093-041-Q1-K1-E12
aaggaccttatttggtatgcacagggtttcacgcctgtgatgtttgattacaagatccatgatgaaaacaattcactctacaatacccctccttgttatgggatttacatgtgtgggttggtgtttgaggacttgtttgagcaaggtgggttgggggaggttttgagggaatatcaaaagaaagctgggattctctacagtgcaattgat

SEQ ID NO: 41614 - DNA, 421 bp, Glycine max
  Clone ID: LIB3093-041-Q1-K1-E2
gttcagtttcacgaccgatcctacaatggcgacagtcacgttttccttttccgctaaaaccctaactctaccttatgaccccaaaaccccaatctccaactttaccccggtaacgaatcttcgcctccctccttctatcgtgacccgaacccgcaattgtaaccggattcgggcggcgctggatggggatttctcggcgaaaaggagcagcagcagcaacaacaacgaccagagggagacgataatgttacctggttgtgactacaaccattggctgattgtgatggagtttccaaaggaccctgcacccacccgtgaacagatgattgacacgtacctcgacactcttgccactgtcttgggaagcatggaggaagctaaaaagaacatgtatgcctttagcaccaccacttacactgga

SEQ ID NO: 41615 - DNA, 419 bp, Glycine max
  Clone ID: LIB3093-041-Q1-K1-E4
gaaatccaggaaaagttctttatttaagtggccatgctttggaaagttgcctacaacccgagaactgtctccctattaaggcttggcagcagcaagatatagatgacacagctcttttggattttataccatttcttgagtgtaagcattccttaagatatattgaagaatgagttcatgtttgaattattgtttttattttcacatcactccttgagtgtaagtccattcccttaagatgtgtttataaatgaattcatgtttgaagttactgtggtgactttttatgcttgtaaaagttgcactaccttctctgttatctatttgcagttgttgcccgtagtagtccacctgatataagaccagtgctagcctcttaccaaggatgtgatattccaagtgagttcatcaagcgttcc

SEQ ID NO: 41616 - DNA, 316 bp, Glycine max
  Clone ID: LIB3093-041-Q1-K1-E5
ctttgggaagcttttcaagtcctcagcacccgtggagctcactgaagctgagacagaatatgctgttaatgtcattaaacacatttttgataggcatgttgtgttccagtacaactgcacaaacacgataccagagcaattgttggaacatgttattgtgactgtggatgcttcagatgctgatgaattctcagaggtgttctccaagcctctcaagtctcttccttatgattcacctggacagacttttgtggcatttgagaagccagaaggagtgccaacagttgggaaattttctaacattctgaaatttatt

SEQ ID NO: 41617 - DNA, 418 bp, Glycine max
  Clone ID: LIB3093-041-Q1-K1-E7
ctacatttgtcaggtctccatcacacgggcaatacccagctgctcttccaccatacccttccccaccccacatgtacggcagcagaagtcccccagcaaatccttatgctgcttattcacccgagccggcaccagctattgcagggtcttacccggcagctcccatgaactatcctcatgcatatggcggctatggaaatgttttggctcccacttatcagcaggcttactaccgatagaaatgacaacctttgaagatggtaaccactgatatgacgaccttgatccaatttacttttgcaatgttgtttgtaatcactaaccgtttaacggtagcagttctgtgtggtaattataactactgtcccactttctgctcggcatggggagaaagtgtatttttaatggtgatcccaat

SEQ ID NO: 41618 - DNA, 420 bp, Glycine max
  Clone ID: LIB3093-041-Q1-K1-E8
cccactcgtccgcccacgcgtccggttcttcataatcaggatcttcacaggctgcatctgccccagctgaaactggaacatcaacatcagagtcacagcagcaataagattgctcgtgtactgatgtttctagttatgtttaattattgttcaaagtttttccttaaactgaccgtgctgacagggaagatattttcactcaagctgtctatttactatctctgctagctcaatgttgatcgccttgtggcttgaacaagttattttattttgtgcttttgtaactcttggcttcctggttagatcagagtgatgctcagctttagtatattactttgcactgaattctaatgttacaacttgtgttttggtatatagcatttggtaaagatgttcaattaattttatataccatcaagt

SEQ ID NO: 41619 - DNA, 379 bp, Glycine max
  Clone ID: LIB3093-041-Q1-K1-E9
agaaatatctccaagactccaaccgtgcttcaaatatcaagcacttttttgtagtacttgcactttcactttttttttccagtttttagttgagtagccggagttctccccttgcgccgcctgaccaatgtcgaccacaactgtatccggcggcgaccctccttctcgcggttttgatacgccgacgctggaccgggaggcggcggcgctgctccacgcgatctccgagcatggcgggtacgcgtacgtgagcatggcggtgctggcttccggcggcgacattctcgcggcggaggcggctcgggagatggcgtgggagcagctgcactcgggtccgtggcactcggtgctgccggtgtggcgcgacgcctactccatg

SEQ ID NO: 41620 - DNA, 181 bp, Glycine max
  Clone ID: LIB3093-041-Q1-K1-F1
ggtgatgctccatggtgggcttagactccttaaaaccgttgttgtcataatatatatttaaacatgaaattcaaacattctgttttgtattaatgcataaatatattttgtaatcaaattgatattttgtgaactgaagctaagatgaaaaagaacctgaacaggtcacttttttccgtgt

SEQ ID NO: 41621 - DNA, 313 bp, Glycine max
  Clone ID: LIB3093-041-Q1-K1-F10
gcagtgtgtaaatgtgctatgctgagctgtgagcactgattgcattagactgagacccaccattgtctattttcctgtcccaacttatgtctctctctccccaacccttaatttacctattttgcgtttgcctgaggattttcagattttgattttctcctctttttttgtaaaccttgaattttactttgctttcttttgggttgggatgggtggaatctcttgtaatttttcagggttggaaaatcaaaaggcttaatgtgtatttattttattatggtttaattaatatattagtagtattatgtagctt

SEQ ID NO: 41622 - DNA, 399 bp, Glycine max
  Clone ID: LIB3093-041-Q1-K1-F11
ggattctggaattctggaaggttcttcaagtcaaacgcgagtcaatgactgaggccgcgagcctgcaagcacttatacgaagtcccgcaggtatgctggcttcctattcactcacttgggcctgtttgtaactgagggttgatctgctatgttactatcaacacccccttcgtcgaaaacaaccttgtccgcaaggttgtgaagatcacgtaagtcgtcccaaagttcccaggacgcctcctccggaggaagaccctcccattgcaccaaaacacgttttaccggcgtcatgcccgaggagtcgagtttccagtcgaggattgcgaaagggtgtacaatgggttttcatggagttcctgcaaaggagcgtctacactggcgttctttcttggttaaact

SEQ ID NO: 41623 - DNA, 375 bp, Glycine max
  Clone ID: LIB3093-041-Q1-K1-F12
ccactcgttcgcccacgcgttcgcccacgcgtccgcccacgcgtccgattcaggcgtgagtgctttccctagttgtcttagattccctccactgatcgcaatttcaacaacaccctcttcgatccgctttctaaattctccacccctccgttccactgcttcgtcgcaacacgttacaataatggcttcgaagaattctcaacaagacacgcgcttagcgagaatcgcctctgcaatccgagtcatccccgacttttctaagccaggaattttgttttaagacataaccactctgcttcttgatacaaagggcttcaaagacaccattgacttgtttgttgagaggtacaaagatcaaaacatcaatgttgtctc

SEQ ID NO: 41624 - DNA, 301 bp, Glycine max
  Clone ID: LIB3093-041-Q1-K1-F2
cttgctaaatataaccagctctgagaattgaggaggagcttgtgcggaagctttattcttagctaacttcgacccctgttgagccctactaaagttttcaagtggaaaaaacctggagatccccacgagtttagcaatgagattggatgcgcggttttagttgtgatcaataagtcgatagttagaacaatagtcttggtataaggaccttgccaataattttttagttctgattcacagagctaagacagttccgtcttagactttaaaagttttgatatttagctttaatactttgttt

SEQ ID NO: 41625 - DNA, 401 bp, Glycine max
  Clone ID: LIB3093-041-Q1-K1-F3
atcatcccaatgaccaacttggaaaccggtgataaaatcgttaccatcagcaaaagcttcattgtctggactactttctcgattccctttgtccccaatttcagcattggacgacattctccccgacgaagaatagttcggttgattcttcaaccttctcgaactagaaaattttgcatcttcgatactgttattaacagcccccaaagtccccatgcctctcacaccagcatacactgccaattaagctttcataacatcattatggcaacccatacataaacccattcacgccctaaacaaacatgaagcctaatagtaacccccaaaataattagtctttttttttttatctctaagttgacaacataattgtactaccctacagctcaaattaaaaa

SEQ ID NO: 41626 - DNA, 377 bp, Glycine max
  Clone ID: LIB3093-041-Q1-K1-F4
cacacaatggaaatggattgtcgctgcacctagagattcaattcaacacttcagaggtagtgtcgattttggagtttctccgcgtgatttcatgtgagtatgttttcaacaccgcggctgatctccttcttatttgaatgatgcatttgatttagcgctatcgacccttcatggtttatcaatcttccctcaagaaattttggtaaaattttgatcttttctaccctttctatcaacccttcttgctgcatgttgaagcgtggatacataccaaagccatggattggagcacagaattgcggggtctctgtgtttctcatgtttttcacattgatgcctatgttagtgggtttccttttagtatttcattatgatag

SEQ ID NO: 41627 - DNA, 382 bp, Glycine max
  Clone ID: LIB3093-041-Q1-K1-F5
cttactggtctgcctggactgcaagagagtctgccattgagcaggagaagctattaaaggatgcttcagatgaatacataaatgcagagaatgctggttctagtgcatatgtggaaatcagtactgcagcggcaatatcatttgttgtgattgcttcttgtttcttggttatgctttacaaattaatggcatattggtttgttgaagttctggtggttttattttgcattggtggggttgagggactacaaacttgcttggtggctctgttatcatgtttcaaatggttccagcatgctgcacaaacatttgtgaaagtacctttctttggtgctgtatcatatctgacagttgctgttactcccttctgcattgtgtttgc

SEQ ID NO: 41628 - DNA, 396 bp, Glycine max
  Clone ID: LIB3093-041-Q1-K1-F6
aaaccgcttctccttaatccctcccacttgttctgtttcagaattagaaaactaaagaacaagaagagaacaacggaaactaaacgtagtacacatcactaactctaacaagaaggaaggaaggaaggcagaatcagaaagccctaatcgattttcggttattatggagagatgaaaatgaaaaggcgtgggatcagcgcggaaaggataatcgtattcgtagatgcttctctcgggaggagtgtccgatctcaaatggatcctccaattcgtattctacgcgttcgtcttggcgattggactgcacgcgcttctcaagaacaccgcctccaagtacttcgaccttgacgccactttccacgctcacgctattcctggccttctcatggaccattc

SEQ ID NO: 41629 - DNA, 423 bp, Glycine max
  Clone ID: LIB3093-041-Q1-K1-F7
tggaaagttatatgctttttaacatcgatggtaagcaagttccacaacagatggtcattgaagttggagacacctttaagaaaattctggaagagacagggaaagtgagggatgagcataccgaggacatttcagtttcccaagctatttcaattgtgctagataagcaccctgatctaaggcaacaaggacttgcccatgaagtgctacaatggtttatatgcagaatggaagcttggtttgctgctgatgcagatatgatttcactgaaaacctgggatcaggaacatgtcctgtctggtggtcatggactcatggtgcaaggatatgatccagttataaaagttcttgcaaaagatattgacatacgcttgaaccacagggtgaaaaagatatctagtggttacaacaaggtaatggtga

SEQ ID NO: 41630 - DNA, 397 bp, Glycine max
  Clone ID: LIB3093-041-Q1-K1-F9
tcgtccacgcgttcgcccacgcgtccgcaaaatgggtgttgtggagggtctcttggcattgggtttgattctgaatgtgtgtgttgtgtgcaatggaggcacaagcagccccttcgtcaggaaagttgagaaggctgtagatatgccacttgacagcgatgtctttgctattcctcctggttataatgccccccagcaggttcatataacgcaaggtgacctagtggggaaagcagtgatcgtgtcatgggtgactgtggatgagccggggtcgagcgaagtgcgttactggagtgagaacagtgaccagaagaagatagttgaaggaaaacttgttacttataggttcttcaattacacatctggttttattcatcacaccaccatcagaaatttg

SEQ ID NO: 41631 - DNA, 288 bp, Glycine max
  Clone ID: LIB3093-041-Q1-K1-G1
cccctttttcagaaaagttgagaaggctttatatattccacttgtcagcaatgtctttgctattcctcctggttataatgccccccatcaggttcatataacgcaaggtgacctattggggaaagcaatgatcgtgtcatgggtgactgtggatgagccggggtcgagcgaattgcgttactggagtgagaacagtgaccagaagaaaatatttgaaggaaaacttgttacttataggttcttcaattacacatctggttttattcatcacaccaccatcagaaattt

SEQ ID NO: 41632 - DNA, 425 bp, Glycine max
  Clone ID: LIB3093-041-Q1-K1-G10
gaaaacacctaacaagcttggttggtaagttatctacaatctgcatcatggaaggtgttattctgagaagggtcattccttcggataacagttgcctcttcaatgctgttggctatgttatggatcatgacaaaaagaaagctgctgagttgagacaggttatagcagcaacagtagcaagtgatccacagaaatattgtgaagcatttcttgggaagccaaacacagagtattgtaactggattcttgactcagagaagtggggaggtgcaattgaactttcaatattagcagattattatggacgtgaaattgcagcatatgatattcagacaactcgatgtgatttgtatggtcaggaaaggaattattctgaaagagtgatgctgatttatgatggtctccactatgatgcattagtgatg

SEQ ID NO: 41633 - DNA, 418 bp, Glycine max
  Clone ID: LIB3093-041-Q1-K1-G11
cccacgcgtccgaaacttgtctattgtacctgacatgaattattctaggctagtataaaacagcttatgccaaagaggagattttattgaaggtttttactccatctcattctaacatgctaatttgattcttaaaattcattttttatgtgattgtttgattacttcattgattttaccagaacaatgacataaataactctagacttgttggatcttatttttagtaaacagtgtacaaaataggaggactcttgaaggtttcttctccatgtcattttagcatatgccaattctaaacttgatagcatttgtgatgtgattgtatgcatgacttgactgcatgtcacctttagaaattttaaatttggttcttttgaaatttcttaacaagaaataagtaatctagaatagtcta

SEQ ID NO: 41634 - DNA, 300 bp, Glycine max
  Clone ID: LIB3093-041-Q1-K1-G12
catttttcttcctgcgtagccacaagaatagtcaaagtggtggcttttttttattcatcgctgcttgtgtgcattccgcagtaacaaaattctgaatcctcagagcatcttgttggactttcggatgatgttggtgctggcttcatatctggtcatagtactcaacctgccacttcttctgagttgaatgtggacaggtgtagtgatttgccggctcatgatgaaattgggaactcgtgggtctcaaaagagatcagggctgatcaaaaaacattcttctttgatcttgggagcaataat

SEQ ID NO: 41635 - DNA, 417 bp, Glycine max
  Clone ID: LIB3093-041-Q1-K1-G2
cccacgcgtccggtttctttcttttcaacactctctctctctctcgcaaccactgctattagcttccttctctgactcagtctttcgaatcctctcacccagaggttcgattcgtaccatgtagtggtgggatttcagcttcgccatttcttgattccaaaaaattttgtttctttttttccccctaatttgatttccccagttagggtttttaattctactcgatcgccggtttcgaatacccggaggctcgaatcgtgttgggggttttggtttttgattaaggaagtttccgttttttgtgttgggtgatcaagggttgtttgatttttttttgcgatcgagaatgggtgaggcttcaggagctggttctgctgattgtttcagccagatgatgtcgtcgatgccgggtttttg

SEQ ID NO: 41636 - DNA, 421 bp, Glycine max
  Clone ID: LIB3093-041-Q1-K1-G3
cccagattcaaccagttaaacttggaacccaaggctttgaggtactattaactacattacttgctcttattttgataattgatacaattaatctcattctaggtttcaaaattgggattcggatgtatgggccttactggagcgtacaatgaccctctccaagaacaggatggcatatctgttatcaagtatgcgttcagtaagggaatcacattttttgatactgcggatgtttatggagccaatgctaatgaacttttggttggaaaggctttgaagcagctgcccagagaaaagattcagatagccacaaaatttggtattgcttcacgaggttttcctgatatgaagatcaagggttcgcctgaatatgtgcgatcatgctgtgaagctagcttgaagcgtcttgatgttgaataca

SEQ ID NO: 41637 - DNA, 242 bp, Glycine max
  Clone ID: LIB3093-041-Q1-K1-G4
aaaacaattctacttaatcggtaccactcgttctgattcagaattacaatactaaggaggaggcatagaacgagtgtatctaaacgtattactcttcacttactctaacaagaaggaaggatggaaggcagaatcagaaagccctatttgatttatcggttattatcccttgatgaaaatgaaaaggcgcggtatcagctcggaatggataatcgtattcgtatacgcttttcttgggaggt

SEQ ID NO: 41638 - DNA, 407 bp, Glycine max
  Clone ID: LIB3093-041-Q1-K1-G5
agagaggagagagtattggcgcttcatcaagatgggtatttctagggattccatgcacaagaggcgtgccactggtggcaagaaaaaggcttggagaaagaagagaaagtatgagcttgggcgtcaggcagcaaacaccaagttatcaagcaacaagacaatcaggaggattcgtgttagaggtggcaatgttaaatggagggcattgaggctggatactggcaattactcatggggtagtgaagcagttactcgcaagactcgtattctagatgttgtttacaatgcctcaaacaacgagcttgtgcgaactcaaaccctggtcaagagtgctattgtccaggttgatgctgctcctttcaagcaatggtaccttcagcactatggtgttgaaattggtagaaaaa

SEQ ID NO: 41639 - DNA, 404 bp, Glycine max
  Clone ID: LIB3093-041-Q1-K1-G6
cccacgcgtccgcccacgcgtccgcccacgcgtccgcaaagcgggttactgtctggtcaagctaccatctctctctctctttcttagtgcctccttgccagaagttaaaatggcccaagaaactttcctattcacatctgaatcagtgaacgaggggcaccctgacaagctctgtgaccagatctccgatgctgtgctcgatgcatgcttggagcatgaccctgacagcaaggttgcctgtgaaacctgcaccaagaccaacatggtgatggttttcggagagatcacaaccaaggccaacgtggactatgagaagattgtgcgtgacacatgcaagaacattggttttgtctctgatgatgttggtcttgatgctgacaactgcaaagtcctcgtcaacattg

SEQ ID NO: 41640 - DNA, 418 bp, Glycine max
  Clone ID: LIB3093-041-Q1-K1-G7
cccacgcgtccgggagggtgtaggtttggttgatttgattgttgtgcatccatcgttaagctagtggcgatcggatccagctacagcatagagatcaaggaaggaaggaaggaagatgttgggtgttataaggcacaaggtactgtctcaagtctctagtctgattcctattccatatgatttattttattttatttgcagagtattcgccctgccttctccgcaatcagacacttgtcttctgcagctaaagagattactgtcagggaggctctgaactccgcactcgatgaggaaatgtcagctgatcctaaagtgttcttgatgggtgaagaggttggggaatatcagggtgcatacaagatatccaaggggctgctcgacaagtatggccccgagagggttctcgatacttcaa

SEQ ID NO: 41641 - DNA, 420 bp, Glycine max
  Clone ID: LIB3093-041-Q1-K1-G8
cccacgcgtccgggcgttggtgaatccgtttctgtctccccctcgaactcccctcgctctgcgagtttcagctgcgccaaaccaagcactactacgttggactctctgctcccaatattcattcaaaccatcatcactaagatcgaagcacgccatgtgtggcgccactgccgacatcaaggctgcacctttagctgatggagaagcagatcacgcggttcttgtgggccccgccagcgaggacgagagaaaaggagactatgactggacacaggaatggtaccctttgtatctcactctgaatgtgcccgaagatgcacctttgggtcttagagtgtttgataaacagctcgtcttgttcaaagatggcaatggccagtttcgctgttacgaagatcgctgcccccacaggttagcaaa

SEQ ID NO: 41642 - DNA, 331 bp, Glycine max
  Clone ID: LIB3093-041-Q1-K1-G9
ccgattctctgaagtcatcattggtgcctcacctgtgcatcatacttttactactggaccattaccagcactggggattgacatgggtctttttccaaaaccagtaagatacccttccatttttcacctttgtttaccactaaagtactgtcgcatcttcttctccatcgatctcttaattcactgttcaatctctccttgctcagtataaaagttcctcattttgttgcaaaaggttcatgtctacttcaaatcaaaggctgattcatatgatcacatgctccaatgcaacaagagtttccacatgggtaacctttcctattcttatttc

SEQ ID NO: 41643 - DNA, 397 bp, Glycine max
  Clone ID: LIB3093-041-Q1-K1-H1
gagaaagagaactcgttcttctttttacattaacattttcaatctttttcacctaacacaccatctcctttccattcctttcttccttcgtcccattctcgaattggcgtgtgcctcttgcaatcccccaaaggttttttgaagcacaagaatggacttctttactagagacataaatgaggattctatgcttagatgcccattcttgaggaacatcaatgagcctactaacttctcattctcttcacctttggctttaccaatgcctgttcgtggagctaaaggtccaatttttgaagatggtcccaattttgatttggcatttaggcttttccacgggagtgatggtgtagtacccttatctgacagatcttttcggccttcagagaagaaagtt

SEQ ID NO: 41644 - DNA, 416 bp, Glycine max
  Clone ID: LIB3093-041-Q1-K1-H10
cgcacagaaagaatcgttttcagaagcagaatgaggttctccgtcatgtctcgcttagcgtttcgcgtttcgagttgcgaaacgatgtcctacatggtcatctccaccagggacagagatcgagagcttcttatacccgtcgtcgtcatccccgccggagatgccgccgtttacccttccgccaagccatcgtcgtcggcgtcgtccccgcattattccggacgcgagactttttacaaagttattaaaagctgtgcatcaaacaagtctatgactggatgtgtgattgtctgtgcaattgcaatcaccatctatataacatggtggtttatacatttcgtggatggatttttctctcctatctatgctcaactttgaaactgatattttaggtcttgggattcataacttgcata

SEQ ID NO: 41645 - DNA, 272 bp, Glycine max
  Clone ID: LIB3093-041-Q1-K1-H11
gccacaacaagttcaagcatagtttttgtgatagtgatacttgctctaacatcatgggcatggaggatgttgaattggctatggataaggccaaagaggctagagaggctcctaagggaacaaggccttcaaggaaacccctacaggatattggttggggacttaaaggagattgtgaagttgcaaatggcatctagatccacactgatgatttccatccataatattcctccacctatgtttacacatacgcctgaagaaaccctacgacg

SEQ ID NO: 41646 - DNA, 93 bp, Glycine max
  Clone ID: LIB3093-041-Q1-K1-H12
tccacaacatgcgcaagcatagatttgcgcgctcttgatgctcgctcttacatcttgggcgtggaggatgtctcatcggcttttgatcatgcc

SEQ ID NO: 41647 - DNA, 352 bp, Glycine max
  Clone ID: LIB3093-041-Q1-K1-H2
cccacgcgttcgatgacatacatgtttaaatacgacagtgttcacggacactggaagcatcacgatgtcaccgttaaggacgagaagacccttctcttcggtgacaaggcagtcactgtttttggacacagaaaccctgaagagatcccatgggggtcaactggagctgacatcattgttgagtccaccggagttttcaccgataaggacaaggctgccgcacatttgaagggtggtgccaagaaagttattatttctgcccccagtaaggatgcccccatgtttgttgttggtgttaatgagcacgagtacaaaccagagcttgatattatttccaacgctagctggacaa

SEQ ID NO: 41648 - DNA, 372 bp, Glycine max
  Clone ID: LIB3093-041-Q1-K1-H3
tcttgttctagttcttctaccctcttcttcactcttgttccatcactgctttcagagcttgctatttctctttgaagaagaggggcacagacccatgaagagtctcgtaagtagctgtgcttttagttatagtattaagcactgctctggaaagcaatggagaagatgatcatgaacgatgtaaacaggaagcagtggatcctaggcctcacagcgtgtcaatcttagagttcggagcagttggagacgggaaaacgctgaacacagttgcattccaaaatgcagttttttatgccaagtcatttgctgacaaaggtggggctaaactatatgttccatctggcaagtggcttactggaagttttaacctta

SEQ ID NO: 41649 - DNA, 382 bp, Glycine max
  Clone ID: LIB3093-041-Q1-K1-H4
aatgctcgttaaaaccaacgtgccccatgagaccttatctgcacagaatattcaggtccaacatgttccaaaatgtgtgtccaataaggcgctcgagaagatctatgatgagtcacaggtagattttgattataaacaaaattgattgagctctactacaattcccaagacgttgttcttgatctcaccggcaagaatattcacttaccaagaaatgctcgaaagactcaaaagcgaatttgcaccatgacctggcaaaagattcagaattggttttatggagatctgttgcacctgaaactgaatctataaaaaaatggttaggtttatcagcaaggacacttgtttttgaactcaatggggaatgaattcaaaaatttca

SEQ ID NO: 41650 - DNA, 406 bp, Glycine max
  unsure (1)..(406): unsure at all n locations
  Clone ID: LIB3093-041-Q1-K1-H5
nccacgcgtccataagtctttggttggtacatcttcaatggctgaatcaaactcggagccttgtattctggaccagccagctagacctgccaatgaatgtctttcaaagttatactgtcctgctacaaaattccccgcattatgtgaaaatgataatctgtatgatgatttcaacatggatgaagtggatctaaatcttgtgaactatgaagaactttttggtatggccctcagtcattctgaagagctatttgaaaatggtggaattgatagcttgtttgggacaaaagacatgtctgctggagatttcagttgtgaggatgctattgctgctgaggctgtttgcattggaatgtgattcctgggctacactgctgtaatatgaatgcattgcgttattcatata

SEQ ID NO: 41651 - DNA, 385 bp, Glycine max
  Clone ID: LIB3093-041-Q1-K1-H7
ggagattgtacggctacaaggatgcagagaagagttgcaaaggaaaaatgttgagcttgaagcaaatcttgaaggtgttgagagcagcaaaggtagcggaagtaaagttcaatatttgagagttccacatcctaagtctggaattgattctatggttgagatcctcaaatgcttgaaagacaaaggagtcgataccagaagcatcaaatcaactttctccccacaggagttgtttgcagtgttagagacagaaactgatgagatgctgatgttgaaagcgctacttggggaacacatgatgaacttgattggaagcttcatttcgatgcccgggaaggttcaaattaaaagcaaaagactattcatttagaatttgaccaaattt

SEQ ID NO: 41652 - DNA, 400 bp, Glycine max
  Clone ID: LIB3093-041-Q1-K1-H8
atactttttgacaatggttacaagcaagcgaaactaaaacgacgcgaaggggaaaaagggagatcggagagacagagagatcagtagtatcagagatggggagagggcaagttctgagcgcgtaccgcgcgcttctgaaagcgacacggaaaacattttccggcgacaccatgatgctgaaggaatctgcggtggaagtaaggaagaagttcgaggaaaacaagaacgtgagctccgaggcggagatccagaagcttctcctagaggctgaagaggcctcccatttcatcaccaacatgctcgtccaggcacagctcaatcccgattctggcacttacgcggtgaatccgtgtaaggagcatgctggagcaacgcttgaacttccctccgagaaattatt

SEQ ID NO: 41653 - DNA, 422 bp, Glycine max
  Clone ID: LIB3093-041-Q1-K1-H9
gtgcaataaagttggcaactggcaagcaagcaaagcactagaaaaactaggaagagagaagaacccagttgcaacactaattttctctttccctttttttggacttatccttctttctgcaactccaaaatgggttccaaaggggcaaaaaatctagcactctcttcagccttgttgctccttttggtcggttttgcaacctcagacatcaatcaagacaaagcagaatgtacggataaacttcttggtctagctggttgtctttcctatgttggtggcgaagccaaagtccccaccatggattgttgctctggtatcaaagaggttattaacaagagcaagaggtgcctctgcatcctcatcaaagatcgtgatgatcctagtcttggcctcaagatcaacgtcacccttgctttaaaact

SEQ ID NO: 41654 - DNA, 338 bp, Glycine max
  Clone ID: LIB3093-042-Q1-K1-A1
gagaaatgggccttcaatgcgaaattgctgcgtgctgctggattgttcgcaggatcaatactacttatgcgaaactatggtgaccttatggcaatctgaaagtagaagaactagttgtctgtcatgagttactattatctactttaccagtaatatgatgtttatgctttttttccctttctttttatcagtaatttgaaaatgaagtggtttttttggtttgaagcttttggtgaacgatggcaatgcttttccgattgggtttactttaatagtaaattctcacatactctggctaagatgtgttggatatgaaatacagtaactattttcgatgt

SEQ ID NO: 41655 - DNA, 476 bp, Glycine max
  Clone ID: LIB3093-042-Q1-K1-A10
cattattaagattcaccttagcaatatcatcctgaaagtttattattcacttgtgcaggttttttgagcctttggatttgtgcataagattactactttcgagaagacagcaggatttcaggcactggtgcaattctcagatgcagagactgccacctctgcgaaggatgctttggatggaagaagcatacctaggtatctgctgcctgagcatgtgggaccatgtacccttaggatcacttattccggacattcagatttaagtgtaaagtttcaaagccacaggagcagagactatactaatccttaccttcctgttgctccatcagctgtcgagggaagtggacaggctatggttggtttggatgggaaaagattggagactgagagtaatgttctccttgcatctattgagaacatgcaatatgctgtaacattggatgtcttacacatggttttctctgcttttggccctg

SEQ ID NO: 41656 - DNA, 351 bp, Glycine max
  Clone ID: LIB3093-042-Q1-K1-A11
gtcgggataaggaggttgacggagggggagtggatcgatacgatgccgtgttggtcgccgaaaggggatttgatagcgtggtgatcgaacaggcatgaccctaagaatagtgaggtgtttgggatatatttggtggggccaaatgggagtgggttgaggagggttgaggtggcaaagggggtcgaaggaatgaaagagaggttgaaccacgtgtgcttcagccgcgacggagagtggttgctgttcacggagaacttggttggcgtgagtgcggagccggtggtgctgccgaaccagtttcagccgtatggtgatttgtatgtggtgaggttggatgggagtgggttgagg

SEQ ID NO: 41657 - DNA, 464 bp, Glycine max
  Clone ID: LIB3093-042-Q1-K1-A12
tccacgcgtccgtagggatacacaagaggttatgttggagcctgggctgaaattaattaaaatgggcaaggaatataccagcaagacatgcattttggatgattttggcttctatgaggctcgtcagaaaactattttggagaagaaagcaaagcaacaattcccaaagcaggtatgggaagggaaacctgctgatgagaagattgagataaatggggaagttaatactcaaaaatctgaagttagctcggaattgctcaaggagtctacccttgctgagaaggatagtgatgaccacaaagttcccgagaatggatctgctacaaaaactggagatgccccaaagggtgctaaaccagttgttcccgagagtaagattgtagccaatggggttgtttctaatggtgtctaagctctactgtgtttgaaggatgcggtccaatacacctcagtggcatatattg

SEQ ID NO: 41658 - DNA, 361 bp, Glycine max
  Clone ID: LIB3093-042-Q1-K1-A2
ctctctctctctctctctctctctctctctctctctatatatatatatatatatatatatatatatatattccctcaaaacacttcacaaaaccctctttttattttcccttttcgcgttgattttgttcttcaatttccaaatcgacgttacaatcgcaatcgcaaattgcagaaacgcgcgttcgttccaataatgtctgaccccgctgccgaagaggctgctttcatcgagaagctctacgaatacggcgagcagctcaacaatgccaaggacaagtcgcagaatgtgcaggattaccagggaatcatagatgcggcgaagacgagtgtgaaggcgaagcagctcgccgcgcagctga

SEQ ID NO: 41659 - DNA, 441 bp, Glycine max
  Clone ID: LIB3093-042-Q1-K1-A3
cccacgcgtccgcggcaagtggccccaatcccagaagctcctcatcaaggacttcctcaacggaatctccgacgaccaccaccgcgcctccccctctccctccgtctccgactggtggcgcactgtctccctctacaccgaccagaccggcgccaacatctcccgctccgtctccatcgccggcgagtactccgacctccgctactcccacggcacacacctcacccgcctctccgtgcaggacgtcatcgccaccgccgtccaggccaagcccttccccgtcgaccaccgcaacgggatctacctaatcctcaccgccgaagacgtcaccatggaagacttctgccgcgccgtctgcggtttccactacttcaccttcccatccaaggtgggttacacgctcccttacgcctgggtggggaactcaggaaaacagtgtcc

SEQ ID NO: 41660 - DNA, 331 bp, Glycine max
  Clone ID: LIB3093-042-Q1-K1-A4
gtctaatcacgtaattacatatgccctcatgtaacactcgtaggtaataactaataattgctggtaacaacaaatataaaaggggatccatatgaacttcttttttttcccaagtcaaccgtcaaacattaacgaattttggatcatcccaccataagtaaatcaagataacagaataagggcataagttttgctaccaatgttgtccagtgtatggccactaaaatcatcccgcacgaggatcgagcacctgcccaataaagagtactgttccagttaaatcttctctgatcaggaacaagaaaggatggtcaactacgaagtctatttt

SEQ ID NO: 41661 - DNA, 441 bp, Glycine max
  Clone ID: LIB3093-042-Q1-K1-A5
cccacgcgtccgcccacgcgtccgcccacgcgtccgcgttgacttgctcttcgcctgcacccactcagcactgtttcgccttcacccgcaccaccgccaccgctaccgccacgtcactgagacaattcaacagccaccgtccgcccccactcaccacgaggatctcctcgtcgccttccaccgttgtctgcaaagctgtctccgttaagccccaaaccgaaaccgaaggtctcaacattgctgacgatgtcacacagctcatagggaaaacgccgatggtttacctcaacaatatcgtgaagggttctgtggccaatattgctgcgaagcttgagattatggagccctgttgtagtgtcaaggacaggattggttttagtatgataaatgatgctgagcagagaggagctataacacctgggaagagtatattggtggaac

SEQ ID NO: 41662 - DNA, 441 bp, Glycine max
  Clone ID: LIB3093-042-Q1-K1-A6
cccacgcgtccgcttggagcaaccaaaaggtccaagcttcacaattaatgggcactgggtgaaatgggcaaactgggaatttcatctgagaccagacccaagagctgggatcataatttcacaagccaaggtgagggaccctgacacatcaaagctgagaagtgtaatgtacaaagggttcacctctgagctatttgtgccatacatggatcccacacaagattggtactttaagacatacatggatgctggtgagtatggatttgggttgcaggccaatgccactagaccctttgaatgattgccccatgaatgctaactacaatgatggtgtcattgcctcttccgatggaacaccatatgtccaacccaacattgattgcatttttgagagttatgctggtgacattgcgtggccgacatgcaaagtgcccccatcac

SEQ ID NO: 41663 - DNA, 435 bp, Glycine max
  Clone ID: LIB3093-042-Q1-K1-A7
ttttctctatcttttgttctgctcagctcgatctacctaccttggttcttctctggtctgtgatttcagtgcagcagcagaaaatgaccatcctcattgagcaacctgcccttgagttacaagttgaaggcaacaatgtgcatgctgaagaaaccaatgagcttgtattggatggtggatttccattgccaaaggatggatatatggccccagaaatcaattcatttggccactccttcagagaatatgatgctgaaagtgagaggcaaaaaggtgtggaggaattttataggttgcaacacatcaaccagacatatgactttgtgaagagaatgcgggaggaatatgggaaattggacaaagctgaaatgggcatttgggaatgttgtgagctgctgaatgaattggtagatgagagcgatcctgatttggacg

SEQ ID NO: 41664 - DNA, 438 bp, Glycine max
  Clone ID: LIB3093-042-Q1-K1-A8
cagattagtaccacaaaaatggagaaatagaataactgaatatcgtatagctcaaaataaagatttaaccaaatgcaattcatatgaaaaaagccaattaattctttacaaagaacaacaagtaaacgcattaaaaaaaaaaaattagaaaacaatatagatacgatcttttatcctataattttatcaattatgcagataagaaagactcatatatttatggatatagatccctatttcaagtaaaaaaaaaccaagtgatttcttctaattacaacacgtataaaaaagaattattggatatcatagataatctctttatcaagaattatatatcggaagatgcgattctagatatggaaaaaaatatgtatagaaagtattttgattggatgggaatcaatagagaaaatctaaattcgtccatatcgaatccag

SEQ ID NO: 41665 - DNA, 375 bp, Glycine max
  Clone ID: LIB3093-042-Q1-K1-A9
ctgcagtttcgactcagagcgtccctttcacttctcagcagcttctgctcaggctcagaaacgaaaaagggttcggtgttctgttcgcgaggagaccaaagtcgaggggaagccttttaagaagtttgaaaagaaatccccaaagaataaaccgaaattcaagttattcggttaaactaagttggatctggtggttttaacatttgttaatgtggccaattggacccccagattgttatggcacttggttctcctttttgatggtttggacattttggtggattcaagttatttaaggtcgtcttatgttattatcttaaaaccatgtgtggaatggttttggtattaacattatctcctattttgcgtttcttg

SEQ ID NO: 41666 - DNA, 436 bp, Glycine max
  Clone ID: LIB3093-042-Q1-K1-B1
gaaattttaaaaatgactgggataaacttaagaattcaattattgaaattgaataagtaaacaatttaattggattggtcgaatggtatcaaaaaaatggagtactaactcccatttcttatttattattgaattaaccgatcaacttgctttgttatcgaacatttctttttgatttcaaaaattttccggaaaaaatttgaatctatttttatatgcgaatcaatcctactacttctggtcctgaggtttctgcgcttgaaaaaaaaaatctgggacgtatcgcccaaataattggtccggtactagatgtagcttttcccccaggtaagatgcctaatatttacaacgctctgatagttaagggtcgagatactgttggtcaacaaattaatgtgacttgtgaagtacagcaattattaagaaataatcgaat

SEQ ID NO: 41667 - DNA, 468 bp, Glycine max
  unsure (1)..(468): unsure at all n locations
  Clone ID: LIB3093-042-Q1-K1-B10
cttgacacgttccaacccacacgtgcacgccgctgtcacttccgactccaaggccgctacttcgcgtgacctaactcaacccgatctcgataatagcggcggcggtgccaacggtaacggaggcggcggtggaggtggaggtggaggtggaggtggaggagaaggaggaggtgataatagcaagggcgaggaaggatctgacggtgacaagaggaaaatggctctgttaatgtctcagaaattcactctagcttatgctgcactcgtcggagtgggtggtgtaatgggttatctcaagagtggcagcaacaagtcacttttggctgggggtttgtctgcatcactgctgtattatgtttatactgagctacctggaagccctgttttcgcatcatctgttggccttggcatatctgctgcacttcttgnggtgatgggttctcgtttcaagaaatcangaaaggtctt

SEQ ID NO: 41668 - DNA, 469 bp, Glycine max
  Clone ID: LIB3093-042-Q1-K1-B11
cccacgcgtccgacaagatgcagtttatataggtgagatactcaagtctgttcagatggtcacgggggtgatggaagcccttgtcaaaagagttttattggcagaatcagaaactacttttgagaaggaaaaagtgagtttaggtcaggaagaaattatgcgaaagtctgctcagttagagaatatgtccatgaaattggaggagatggagcgttttgctttgggtacaaatggtattttgaatgacatgcggcaaaaagttgcagatttggtggaagaaacaactagacagagacagcgtgctgctgaaaatgaagaagagctttctagagtgaaacgggagtttgagtctctaaagtcatatgttagtagtctaatcacagttagagaaaccttactttcttcagagaagcaattccaaactattgagaagcttgttgagcggttagttggaaagactacccaattg

SEQ ID NO: 41669 - DNA, 474 bp, Glycine max
  Clone ID: LIB3093-042-Q1-K1-B12
gcaagcagcaaacatgatttcttccgtgtcctttccagcgtctcttcccgccgttaacttctccggcaacgccatggcttcggcgtcgtgccgcgtcaaatcccggccaatagtcgccttcgccaccgccactgccaccgctgaagctcgctcttcctggacggagcaaccgagaccttcctatctgaactcctcttgctcttcgctttacgatatcctcggcatccccgctggcgcctctaaccaagaaatcaaggccgcgtaccggcgactagccagagtctgccaccccgacgtggcggccatcgaccggaaaaattcgtccgctgacgaattcatgaagatccacgccgcgtactctactctttctgatcccgacaagcgcgctaactacgatcggagcctattccggcgacaacggccgttgtcgacggcggcggtgttctccggttacacgcgtcggaactgggaaac

SEQ ID NO: 41670 - DNA, 307 bp, Glycine max
  Clone ID: LIB3093-042-Q1-K1-B2
attaaaccgttcttgttcgattcaagctcgaagaagaagcgatgagttcgggttgcagccacagcagtgagaaagagaaggagagacatagggtgagtggcacgttgatgatactgtggcacgcgcaccagaacgacgccggatcggtgcgcaagctcctacaagaggatccctagctcgtcaaggccagggactacgacaaccgaacgccgctacatgtggcgtacctccacggctggatcgacttcggcacgtgcctcatcgagttcggcgccgacgtcaacgcgcaagatcgcttggaaaaaca

SEQ ID NO: 41671 - DNA, 442 bp, Glycine max
  Clone ID: LIB3093-042-Q1-K1-B3
cagagtgttgtactgtgggatatgccactcggacctccacagcataaagaacgaatggggtgcttccatctatccaatggttcctgggcatgaggtagctggtgtagtaacagaggtgggaagcaaagtagagaagttcaaagttggggacaaggttggtgtgggatgcctggttgattcctgccgcacctgccaaaactgttgtgacaatcttgagaattattgtcctcaatctacgttcacatatggtgccaaatatagagatggaaccatcacatatggaggctactctgactcaatggttgctgatgagcattttgtggttcgcattccagatagattaccacttgatgctgctgcacctcttctttgtgctggcatcactgtgtatagccctctcagatattatggacttgacaagcctggtctgcatgtgggtgtg

SEQ ID NO: 41672 - DNA, 398 bp, Glycine max
  Clone ID: LIB3093-042-Q1-K1-B4
cccacgcgtccgctggttactatgaggatggagagtttgggataagattggagaatgtgcttattgtcaaggaggctgatacaactttcaattttggtgatagaggttacttatcttttgaacacattacctgggcaccatatcagacgaagttgattgacctgaaccttctaagtcccgaggagataaattggctgaactcctatcacgccacatgtaggaatattctggcgccatatttggatgaagttgaaaatgcatggctgaagaaagccactgaacctgtaagtgcatgagctgtgtttggagttgaaaagttaaataacttatagatggttcagcgtaattttagtgtcttaccgatccataatactgtaatctagattttagatatcatt

SEQ ID NO: 41673 - DNA, 228 bp, Glycine max
  Clone ID: LIB3093-042-Q1-K1-B5
cagaagcatacaaatctatatgcagaattggtacttctctgaatcatagagatggggcgcgagttctactttgctgacacttacttggatcgcagccctaaaaacagagactagaagggctgagacatccctgaagatcccagacctcacttaggatagttatgtcagacaacatattggtactatatcaagctttgctccttaaatgtgttcctcaaaacataccac

SEQ ID NO: 41674 - DNA, 374 bp, Glycine max
  Clone ID: LIB3093-042-Q1-K1-B6
ccccgataaagttgatcatggttacccaactggtattggggttaaaaactccctcattgtgcgttggtgtgatcaacttctttggaatggtattcaccttgttagtgccagaatcaaagggaaaatcactggaagagttgagtggggagaatgaagatgatggtgctgaggctatagagatggcagggtctgctatgacggttccagtttaaccaaagtctatgatcaacaaagtagttcataattctagtgatgctattattgtgtgacaatattacttcgggttttctacagctagatgcacatttatgatgtacatatatggttcttggtgctgtaacttttaaaatcaattataaagggtgtgtatttca

SEQ ID NO: 41675 - DNA, 434 bp, Glycine max
  Clone ID: LIB3093-042-Q1-K1-B7
cccacgcgtccgccttccttggctgctggttgcacaatggtcctcaagcctgctgggcaaacacctctctcgggcttggtttatgctcatcttgctaagctggctggaattccagatggagtgcttaatgtagtacccggatttggccaaactgcaggtgctgcaataagctcacacatggacattgataaggtaagctttacgggttcaacagaagtggggcgtgaagtaatgcgtgctgcagctaatagtaatttgaaaccagtttcacttgagctaggaggcaagtcacccgtcatagtttttgatgatgctgatgtagataaagctgctggacttgctctcatgggcatcctatttaataagggagaaatttgtgttgcaggctcccgtgtgttggttcaggaagggatctatgatgaatttgagaagaa

SEQ ID NO: 41676 - DNA, 429 bp, Glycine max
  Clone ID: LIB3093-042-Q1-K1-B8
cttgttagggcactggattctggaattgtagctcaggcggctcttgatgttttcagtgaggagccaccacccaaagacagcaagttgattctgcatgagctcgttactgcaacacctcatcttggtgccagtaccatggaagctcaggaaggtgtggctattgaaatagcagaagctgttgttggggcattgaaaggggagcttgctgctactgcagtcaatgcaccaatggttccctcagaggtgttaacagaattgaaaccattcattgatcttgcagagaaattgggtaggctagctgtccagcttgtagcatgatgaagccgggtgaaaacagtgaatgtcacttatgccacctttaggggccctgatgatctggacactcgtcttctccgtgccatgataaccaaaggtctgattgagcccata

SEQ ID NO: 41677 - DNA, 467 bp, Glycine max
  Clone ID: LIB3093-042-Q1-K1-B9
gctgaagattccaatcggagctcagaaaaaagaaacctaatcgccgatcgcgtcgccgtcgcgccggaagttcgttgttgttctgtgaaattgccggttttaatttttcgttttgtgataattctgagaattagtaacaattattgtggtttttttttctgttaggtaacgttgctgtggttctttttttttcttttttcttttttataatttcgttgccgttttgtaggtgaagatagtcgttttggttgctgctgagttttttgttttctggtgttcgaattgtgtgcaattttgaattctacttgttagttgtgtaatttgtttgttttctatcacttttgtgttctggagttaaaatgttttctaatgagttaagaatcgtttgcttttgtggtacgtagctgtacaatacgatgccttgaattccaaggtttcggtttggtttattttaatttacaaaaacc

SEQ ID NO: 41678 - DNA, 393 bp, Glycine max
  Clone ID: LIB3093-042-Q1-K1-C1
cattaccataatcactatttcctactgtcttctccatccattccttgactaatgaattatccgtcacaactaccaatggccgaagagaaacaccacacgcaccgaactcttccaccaccacacggacgaggataataagccagataaaaccgatactggttacgacaacacatcatattccaagccttctgatgactatgactctggcttcaacatgccatcgtatgagtcttctggcggtggctatgaaagtggttacaacaaaacatgttattctagtgatgatccaggttctggcggagactatgaaggtggatacaagaaaacaggttattctggtggcattgatgagactgttggtggctatggagctggtggtggtggatactctga

SEQ ID NO: 41679 - DNA, 477 bp, Glycine max
  Clone ID: LIB3093-042-Q1-K1-C10
ctttgaagctttctctatttgctatgtaagctctataacattttcccctctctagcattctccacgatgtcttaagatcagtttgaggtcttttcttctccagtacaacatgaattacaaaaccaggcagatacagctctgggggatcatctgcggatggattttcagaattcggaacagtatctataaactgagacactggatcatgatttgaatgtgcatctatagcaaatggatttgtaaattcggcattgtcaatttcaatgatatgatcccttgccctagtgtcagaccaaagtgaacattgttcatgctcattattgaggcaatcttcacttccaaaaggattcatatattcaccatagtcagcagtaacaagatcctttctaatagcctgaacctcttgttcgatgctacctgctgcaatgatggaagaacacacgatttccatcactcattatagtggtaaaaatatgt

SEQ ID NO: 41680 - DNA, 446 bp, Glycine max
  Clone ID: LIB3093-042-Q1-K1-C11
cccacgcgtccggtgttggattcatccaatgggattttagacaaagctggcagatggcacgtggaggttgagttcagtccacattctgcatcgcaagatcatgttaacccacaaccaagtccagaaagtgaatcaaatgacattggaactgggtttgccatgttcagtcaaaattttggggagtttagttcagggtcagggccaaatcaaaatttggaagtactgaagaaggctgacatttatcccactaatatggaattactgaaatttgaaggtgcaactccccatggtactattgattcatctctcacatcagaatctaatcaacctgatggatggaactttggatttaatttcaattctagttctgtgggtgaagacaatcatagttcagattcatatttcaaaaccaaaaacaatcaggatgataacaacagaaacaatgc

SEQ ID NO: 41681 - DNA, 449 bp, Glycine max
  Clone ID: LIB3093-042-Q1-K1-C12
gctcgtataggccattcatctcacataggaccactagacaatctttagatcaaagcgctattgaacatgcatgtgggaacaacaacatactgcagggtgtgacatacatatgttccatgaaaagaataaacgtcgcaagaactgaccactaggaatcttatctatgtgcataggtactggaaagagtacagctgactgatttgagagtactgattgcactgatgaactatgcaatgcccctaaagtgtataaccttaatttatccaatgacgctcgcttgaaatagatacttcatactcactatatatggtcatcaaattagaaatcacaataaaatctttctctatggaagtgacaatggcaaccactactcaagcgattaatcctttctacacattagacttgcattcatttctgatatatccatgacaattgcaaacatacactta

SEQ ID NO: 41682 - DNA, 316 bp, Glycine max
  Clone ID: LIB3093-042-Q1-K1-C2
catcaatctactcactatcacactgtgttaccgtcatctactgaatgcatattgcataggccgtacacactacattctgccaggaatggacacttatcagctccgatctcacagcacgagcctgacagtgctcgtgttgcaaatatcaatagtccggctgatagcggcccataatactcccaggattctgatagacaaatactcagcattggacttcagtttttaaggacattctttcctggctgagaaaatcacgtcgaagaatcaagtgtacctgggacaactgcaagttctggcttagatcatgctggaacat

SEQ ID NO: 41683 - DNA, 435 bp, Glycine max
  Clone ID: LIB3093-042-Q1-K1-C3
cccacgcgtccgggatcgcagtgatccagattatgaccgtagttatggaaggtatgctaggagtatcccagcctctgctgctaacttggtgccatttaacttgcaaaaagctcaaccttcatttgctcaatacgatgctacatttaaccagttgggtcagatgtcacaaactcaagcctcacttggctatgcaccttcttcaaccccgataatgagtccttttggcaccccaggattgaatcagacatctagtgagggtgcttacctacagtggcctagtgctgcaatgatgtatgctcattcatatgaccaatttagacatggtgttttccaggctccatttggtcaacagccgttgagctttgactattcacagaactattagatgacatttagggggagaatattcaatttggatgcaaaaagttatgttag

SEQ ID NO: 41684 - DNA, 426 bp, Glycine max
  Clone ID: LIB3093-042-Q1-K1-C4
aaaccctctctctctctctctctctctctgttcactctcactttttgttttcacctcctcctgatttccaagcacactttctttgtttcttatttcttcctgtctcaattataagtaaaagaaaaacatatttttaaggagattactgggacagctagatgacgcgagcgttcagaattctcgggtccgcggacaacgccacctcgctggcagcggtagcggcgccgccggatgctgttgcgcttgagtcggacttcgtggtgattctcgcggcgctcctctgcgccctcatctgcctggtggatctggtggccgtagcgcggtgcgcctggttccggcaaggctccggcagcggaagctcttcccggcaagccttggcgaacaaaggcctaaagaagaacgtgctgcagtcgctgccgaagttcg

SEQ ID NO: 41685 - DNA, 432 bp, Glycine max
  Clone ID: LIB3093-042-Q1-K1-C5
aaaaaatttctagagcgagaaagtgagaggagagagaaagtagctgatcctccatgggctccagcaaggaacgcgaaaactttggctacaccgccaagctcgccgaacaagccgaacgctatgaagaaatggtggaagcaatgaagaatgtggcgaagctgaacgtggaattgacggtcgaggagcggaaccttctgtcggtagggttcaagaacgtggtgggtgctcgtagggcttcgaggaggattctatcgtcgattgaacagaaagaagaagctaaagggaacgatgcgagtgtgaagaggataaaggagtataggcagaaggtggagtctgagttggccaatatcttgagtgatatcatgactgtaattgatgaacaccttattccctctagctctgttggtgaacctagtggttttttctacaaaa

SEQ ID NO: 41686 - DNA, 439 bp, Glycine max
  Clone ID: LIB3093-042-Q1-K1-C6
cccacgcgtccgcccacgcgtccgaccatctcttcctctctcagctgtctttttaggccccgttttctcattttcccttttgcaattttcactaacagtccttctttctatcttagctctcagaaacttcaataacaatgaagaaagttgtgttgaaggtggaagtacatgaagacaaaatcaagcaaaaagctatgaaggttgtctctggcatttcaggggttgagtcagtttctgtggacatgaaagacaagaaattgaccgtaattggggacattgatccagtaaaagtagcagccaagctgaggaagctttgtcacgcagaaatagtttcagttggaccagcaaaagaggaaaagaaggaagagcctaaaaaagatgataaaaaggaagatgactagaaaaaaaatccaccaagcgaaattcgtggcagatcaac

SEQ ID NO: 41687 - DNA, 437 bp, Glycine max
  Clone ID: LIB3093-042-Q1-K1-C7
gtgattttggtgtcgtccctttttcttatgtttaaggttgtacggagtttatgtggtgattgaattcgtcgataagaaaccttagtttgatattttgattggttctgtggagagtttttttttctttggtgtggtttttggtttgtgctgtttttggttgggaataacaatggccgatgaaggaaacaaaagcaataacttctattcgatcttggggttgaagaaggagtgcactgaattggagctaaagaatgcttataggaaacttgcaaagtaatggcacccagatcgttgttcagcgaccgggaattcagagttagtggaagaagctaagaaaaaatttcaggaaattcgggaagcctattcagttttatctgacgccaactaaaggttatatgtacgacgtgggagtctacgacagggatgacgactagaac

SEQ ID NO: 41688 - DNA, 435 bp, Glycine max
  Clone ID: LIB3093-042-Q1-K1-C8
cccacgcgtccgagagttgatgttactcggatttatatcactcttattaacagctggctcacgcatgatagccaatatttgcattccatcaaagttctacaacagtgcttttgctccatgcactagatctgagattgacgaagaaatggaagataatggctctgaagagcgtaaattattgatggcttcttcttatccacacttagttagaaggatgttgaatggaataaatagcagcacctgcaaagagggttatgaaccatttgtttcgtatgaaggcctagagcagttgcaccgattcatttttgtcatggcggtaacgcatatatcttacagttgcctaactatgttgttggccattgtgaagattcacagttggagagtgtgggaggatgaggctcatatggatcggcataattcattaactgaaattac

SEQ ID NO: 41689 - DNA, 463 bp, Glycine max
  Clone ID: LIB3093-042-Q1-K1-C9
gcccgttctctctttctataacaccaacaactaacaaccaactttgtcacctctctcgttctccctgctgagataacactctctcgcgagtcgcgatgctcttagctctctcttatttccatcgatggatgcagaaacggtagatctactcaatctctatccaacaggacaagacccactttcccttattcctccatctctttcaatttccctgcacgtgcgaatctattcgcaaattgcacactaaccttttccctttcccttttccttttgcttttcgtatttgtagagttggggttgtagataatgggaggggcaggaatttgaggggaagcgaaaacaaaatcagattttgattagtggggggttcgagaaagtggcgaaaatgaacttgggtgcagccgatgaagaagaatcggctgcacaagttcgtgttcctgcggaaatcgattggcacaaactc

SEQ ID NO: 41690 - DNA, 416 bp, Glycine max
  Clone ID: LIB3093-042-Q1-K1-D1
gttgctataaacgttgttgttttcagataaacacgtgactcactatctatctatcaatcgagatctccgagttcagccgaaccaaactccgaagctatggcagagctccaaaccaaggttgaacctgttacggtcccggctccggtggatcccgagccaccgctagctgaggctccgccgctcgagaagaaagcggtggcggtgccaccacctgttccggctgcggcagaggaaaccaaagctcttgttattgtggagaaggagaaggagaatgagaagataccagaacctgtaaaaaagaacgcctcaggtggatcccttgatagagacattgctcttgcagaaatagagaaagagaaacgattgtctaatgtgaaggcttgggaagaaagtgaaaaatcccaagcagagaatta

SEQ ID NO: 41691 - DNA, 504 bp, Glycine max
  Clone ID: LIB3093-042-Q1-K1-D11
ccggaatctcaaggctcgacccagagcgtccctatagactatctttatataataatataaataagaataaaaaaataaactaaaaaaaaaagaatctagataaatataaaaataagatatataaggtacaaatagtaaatcgaggtacccattttatgataaactctccttccatttttgttcctctagtaggcctagtatttccggcaattgcaatggcttctttatttctttatgttcaaaaaaacaagattttttagatacagaaaacaaagtaaaattctggggtcttatattccccaatcataatactaaattcaaaaaaaggagagtaatgagtataatctttcgctcagacgatctactgatatattctatggctaggttcgaagaacaagcaatttattttgggccgttttcactttgttaggttcattgaggttattgttcgttgcaatttccaattatcttggtatggatatgttctttatttctgagaaaatt

SEQ ID NO: 41692 - DNA, 475 bp, Glycine max
  unsure (1)..(475): unsure at all n locations
  Clone ID: LIB3093-042-Q1-K1-D12
aaacaattaacacacacaaacagaggctacgtacgatcaaattaattaagatggcggaagtgaggaacaaacaagtggttctgagggactatgtgagtggttttcctaaggaatccgacatgaacatagttgaaggaaccacaatattgaagcttccacaaggttccaatgatgtgcttctaaaaaatctctacctttcctgtgacccttacatgagaatgctcatgaccaaggtggaaggcctcgacgtgtttggcacctatacacctggctctccattaacagggtatggagtgtccaaagtcctagaatctggacacccagattacaagaaaggtgatttagtgtggggatctacaaaatgggaagaattcagcttggtgtccccaactcaaatacttttcaaaattgagcacaccgatgttccgctttcatattatactggtattnctggtatgccgggaatgactgcata

SEQ ID NO: 41693 - DNA, 357 bp, Glycine max
  Clone ID: LIB3093-042-Q1-K1-D2
gtgatgtactatctgaagcggaagatttgtgggaagaggctgaagctcgacgtgattcgtgggaccgatgtgtataagtgggatcctgaggatttgcctgggcaatctatattgaaaactggagataggcaatggttctttttctgtcacagagataggaagtatcctaatggtggaaggtctaacctagcaaccagacgtgggtattggaaagcaacgggaaaggatcgtaacgtgatatgcaattctaggtcagctggagtgaaaaagaccctggttttctatgctggcatagctactagtggtgagcggactgattgggtcatgcatgaatataccttggatgaaaaagagctt

SEQ ID NO: 41694 - DNA, 433 bp, Glycine max
  unsure (1)..(433): unsure at all n locations
  Clone ID: LIB3093-042-Q1-K1-D3
caaagccctaggccgctgctgcgtcgtctcgcgccgcttccactccctcgtcccgcaggtcgaaaacgtcgtcgtccgcgtcgactgcgtcatctccgacgacgactcctcttcctccgccgccgcctccgacaagtcccgcggccccttctggaacctcctccgcctcgtcttcggcggaatcgtgaaacccatccaaaccctcggtcagttcctcggccccaaacgcccctcctcctcctccgtcacgtccccttcctccaccacctcctcctcccccctcgccgtcggaaccgacgacgactccgacgccggcgtcacccaccactccccgacgcaggtcctcaaaaacttcaacgagattcgcctnctncggatcgagctccccagcggcgagctaggcatcgaagacggcgtgctcctcaaatggcgc

SEQ ID NO: 41695 - DNA, 381 bp, Glycine max
  Clone ID: LIB3093-042-Q1-K1-D4
cccacgcgtacgctaacaccaaatagtaatgcccggacaccgcgagtcaaacttgcagaacgagctggggcgattcattcgcactgccgaagcatttggaggcatctgtattggagccctgacagtgttggcagatttcatgggggccatcggttcacgaacaggaatattgcttgcagtaaccatcatctatcactactttgagacatttgaaaaggagagagctagcgagcttggcttctttggtttctaagttctgccaatgaactctaccacacccttttgtttagggaacgttatacttggaaggccgttaacatcgtaagggatgacatagtctagtttgttgtcattttttttactaagttgttcccttttaac

SEQ ID NO: 41696 - DNA, 432 bp, Glycine max
  Clone ID: LIB3093-042-Q1-K1-D5
attagatgtaaccattttgctccctctttactttgtagctgctgaaatgttctcagggtgatataagactaatgggttctggtcatgcatatgaagtatgttggagtcagaagttaaagctagttgctgttgttgtttagttctccactagtcctggttactattataacttttggggaggtttggcaaaatttgaaatttgaggtacaaagcttctggactggacacgaatgtgctggctggagctagatgtgtctctggagtttgggctgcacagggtccaatgcgattggtagtcaataccgtgatggctagaagttttgagagaagtatggaagctggcacattgggaatgattggtcataaacgttttatgagtgacatcccaagtaaaaccagtgagacaaacctatctggttttcgttcgctatc

SEQ ID NO: 41697 - DNA, 440 bp, Glycine max
  unsure (1)..(440): unsure at all n locations
  Clone ID: LIB3093-042-Q1-K1-D6
caacagcaacacgagagccactcagtgatcgcttctcttcttcttcatcttacagggtcaggggtgaagttggttgcatatgttcgtatttggctattgaatgaattgcactagtgttctgctgcaaattttttgacatatattggtgacgggatattttctagatggggggagcatgttctaggaagcaagagtgggataacgaagatagtcttatcagaggactaccacgaagatattgcaaatgcggaagtttgaaatggtggacatcctctttttcttatccatctgtagattntcacctacgaataggaagaatgtccatcactgttggacttatgcatacagaaaataagcgaggatattgataaatataacacattttctatgctaccacgagatataagtcagctaattttcaataatttggtttactcccg

SEQ ID NO: 41698 - DNA, 430 bp, Glycine max
  Clone ID: LIB3093-042-Q1-K1-D7
ctatgccaagccgagccagagctacattgagcgcggcgtgttgaaccatcattctggactggcttctacaaagccctataccttctctaactggtactcacctgatggaaaattagatcgggccgtaaatggataacagctgtataagctgtggtaatctgtatactttggattcctaggctacgacactccactaacatagacttcatccgacttgttagcgaatgctgactgatgatccacatgtgcctagggttaactcacttgagaaggatgctccaccgaaatcctgtgaatctggtgattacaaggggaaagagcacctaaagctactgctatgccacacttggaacagatgctatttcatcatggttagagcacttgtactttgactaggagcaaattgagtcatgattgcaattttaagggc

SEQ ID NO: 41699 - DNA, 431 bp, Glycine max
  Clone ID: LIB3093-042-Q1-K1-D8
cccacgcgtccggctgtctctcccatcctttcgcattctcaatacccttttgattggtgaagggaaagcaaacatggttgatcaggtccaacaccctacaatcatggacaaggttgctggtcagctccatctccgttctggtctttcatctggtattagaagttatgatggagcctaccgccacccagctatgtaccaaagaccctcttttgggaattactcgaatgctgcattgcagtttcctgtgatgcccacatgcaaagctaccatggatttgtctgctactgcaacatctgcctcacccgtctttgttgctgctccagcagagaaaggccattttcttttagactttctcatgggaggtgtttcagcagctgactccaaaactgctgctgctcccattgaacgtgttaagcttttgatccagaacc

SEQ ID NO: 41700 - DNA, 434 bp, Glycine max
  unsure (1)..(434): unsure at all n locations
  Clone ID: LIB3093-042-Q1-K1-E1
cattcacccatttttctctctcagatttcatttttcttcttcttcttctctctcttctttgtgcttattgtattttatggacaaaggatggggactcacccttgatacctcttcctctcaatctcttccattattcccttccaacgataataagatgtttcctctcctcggattccccgtcaacctcagccgcgcctccaaggaagacgatgaaaaccgcaaagttgtcggtgaagttgacttcttctctgacagaaacaaacctacacctncaccctctcacgaccacaacgttaaacccaacatcgtcaagaaggaaatcgatgaaacacctcttcacattaatactgggttacaactncttactgctaacaccgggagtgaccaatctaccgtggatgacggggtttcatctgatgcagaaaataagcgag

SEQ ID NO: 41701 - DNA, 407 bp, Glycine max
  Clone ID: LIB3093-042-Q1-K1-E11
actcggtctttaattctcgactcaaccgtcccttaattccactccttcttctacacatactacatcattttattccatttaaattacataccatattagtaatcttctaaaaagtggagccttccattcattatatcaacactaaaatacattatacatttcttcctaatcaaatctactatatttaactattactacttccaaaaccaaattttataaatatatatattcatcatcttcacatatttattttcattattatatacaacttctacatcatcaaaatatacttcactactatatgcctacattgacttatacttctactaatcttcaaaaccattctcatttcatttctcataatatcatttatttccctacctcttttattttcttatcattatttt

SEQ ID NO: 41702 - DNA, 226 bp, Glycine max
  Clone ID: LIB3093-042-Q1-K1-E12
tcttactcttaattttctcttcattaaactcaacgtttccctctattccctctgcgttttttaacttggtgttttcccttaacaaatccgaatttttctttccattacccaaacccaaacttttgaagattccaaataacttgttgttcttcaagaaaaataattcccctaaaaaaatgtattccatttgtgattcccttcccgaaccttctccgaaaaattttcc

SEQ ID NO: 41703 - DNA, 374 bp, Glycine max
  Clone ID: LIB3093-042-Q1-K1-E2
ccggagcaaaaaaacttgttacgatggtttcttccgacaaggatccacgagaggaagtccttgaagcatggtacatggatgatagtgatgaagatcaaagactccctcaccacaaagaacccaaggagtttgtctcgttggaccaacttgctgaacttggagtccttagctggaaattagatgctgataaccatgaaaatgatccagagctgaaaaagattcgtgaagagcgtggctacacctacatggatgtctgtgaggtctgcccagaaaagttgtcaaattatgagcagaatatcaaaagcttctttgaagaacatcttcacactgatgaagagatccgcttttgtgctgctggaagcgggtattttgat

SEQ ID NO: 41704 - DNA, 370 bp, Glycine max
  Clone ID: LIB3093-042-Q1-K1-E3
ctctctctctctctcttctctctctctctttcttcctttctttaatacttattaattcatctgttttatctttctttctttctttccccttttgtatttctgggttcgatattgttatcggttatttgtgcactgcttccgccggggctattcaggaatcatggctagggttttggctcagtctgttaatgtccctggtctagtggctgagcataggcatggtcagcaaaagggatcaggaaaattaaaaagatcgaccaaaatgatgagtgctttacggacaaatggattaagaatgtcaggtttctcaaggcttcgtactttcaatcctctggatactatgttgagacctggcataaattttcattct

SEQ ID NO: 41705 - DNA, 434 bp, Glycine max
  Clone ID: LIB3093-042-Q1-K1-E4
ccagaagaagaagagatcatgacaaagctcaaaaaccctcaactcaatgcaatcgaagaagcgcttaggtctctcagaaaactaacgagaataagagaagaaacaaggcttcaactttgcacccctcggttactctccgcgttacgctcactcgttttgtcgaagcacgtgaacgttcaggtgaacgctctggcatcggtggtgaacctctcgttggagaagagtaataaagtgaagatcgtgcggtcggagatggttccgccgttgatcgaggttttgaagtttggatcctctgaagcgcatgagcacggtgcgggcgcgttgtttagtttggcattggatgatgataacaaaaccgcgattggggtttgggggggtttggcaccggtggcttacatgctccgatccgagagcgagcggacttggcatgactc

SEQ ID NO: 41706 - DNA, 438 bp, Glycine max
  unsure (1)..(438): unsure at all n locations
  Clone ID: LIB3093-042-Q1-K1-E6
caagttgtgaaaccacatcgcaagaaaattcacaagcgatggatccgaagctgaaagagggtgctcagctcttcgatcgcttcaaggcttcgtttctccggaacgacttcgataactgttccaatctcctttctcagctaaaggtgttacttacaggtttcagaagcctgccaccgttgtttgcagatacacctaatgcagttcatgaattaacaatagcaagggatatatatgagcatgctgttgtccttagtgtgaaaattgaggatcaagatgctttcgaaagggatttcttccagttgaagccttattatacagatgcctgcaatcgtcttccaccatctnctcaggagtaccctatactgggtctcaacctgttgagactacttgtgcagaataagattgctgagttccatactgagttggaattgctttcat

SEQ ID NO: 41707 - DNA, 432 bp, Glycine max
  Clone ID: LIB3093-042-Q1-K1-E7
cccacgcgttcgcccacgcgtccgggcgatcgaggcgttggattcggacggcgacgggttggtgtgtttggacgatttgatgaatctgatggaggctgctggagaagaagagaagttgaaggatttgagagaagcctttgatatgtatgatactgataggtgtgggtttattactccaaaggccttgacgaggatgctgaagaagttatgggaatctaagtcaatggtagagtgcaaagtgatgataagtaggtttgatttgaatggggatggcatgcttagctttgaagagttcagaattatgatgaagtgactacgatgatggtggggatgattatgatgctacatggacattgattctggcacttggttgcttgcttcatgtgtctattaggttggttaggttggaggggtttcaatttggattgatta

SEQ ID NO: 41708 - DNA, 326 bp, Glycine max
  Clone ID: LIB3093-042-Q1-K1-E9
ttcccagctcgaccgactcatactcataaccctaaccctaatctttctcccactctttcttactaccaaacaatccctaatccacgcatgtcttacactgcttgtgttcacaaaccatctcacatctcttcaaccattaccacaactcgttccactccatccatcactttaccccaccatcattctcacatttcatattttttctctatcttctacctcacattaatacaccatcattaacatctatttaactacaactactaattcttactctacttcaattatatatcatccttaatatcatcatcaccatttgcacaatcaac

SEQ ID NO: 41709 - DNA, 298 bp, Glycine max
  Clone ID: LIB3093-042-Q1-K1-F1
aatgaatctgctgcgtgcggatcgctagaacgcctacgagggacgacctggcggcctcaatgactttgaactcacctgactcagctcaaaggctaactatgtggtaatgacactgatacctaattgcactaaccctattgacaggaagattgataagggtctaagtcggcctaaagggctctccagaacctttagatactataccttgcactgatctggctggagaagtagctgatatctgaactgaagttaaagatgctaaagctgcgaacacaagtacttgctaaactcactcatc

SEQ ID NO: 41710 - DNA, 420 bp, Glycine max
  Clone ID: LIB3093-042-Q1-K1-F10
caaaatatctatcaaaagtaaaaagcgaagagaatggaaaaactttaatttttttatggtaaaaagttcaattatacctgttatttcacaagaaaaaaaagaaaaaaacccaggatcggttgaatttcaaatattcaaatttaccgatagaatacgaagacttacttcacattttgaattgcaccgaatagactatttaatctaaaaaggtttacgtaaaatttttggaaaaccaccaaaaattgctgtcttaatttgtcaaagacagatagaattacggtataaaaaattaaataaatcaagttgaatatttcataatcacaaaattcttttaaattgaaaagtaattctaaatatatcgatttattagatctttgaattttgatgaacttttttttttaagcgattcataaaaaatta

SEQ ID NO: 41711 - DNA, 481 bp, Glycine max
  Clone ID: LIB3093-042-Q1-K1-F11
gcgcaggatccaaagaaacgcattacctctgctcaagttcttgagcacccatggattaaagatggaaatgcttcagacaggccaatagacagtgcagtcctttccagaatgaagcaatttagagcaatgaacaagctaaagaaacttgccttgaaggtcattgctgagaatatgtctgcagaagagatccaaggtttgaaggcaatgtttacaaacatggacactgacaagagtggtgcaatcacctatgaagaactaaaggcaggattgcatagacttggctcaaagcttacagaggctgaagtgaagcatcttatggaagctgctgatgtagatggaaatggctcaattgactacatagaattcatcactgctacaatgcatagacacaaattagaaagagatgaccaacttttcaaggccttccaatattttgataaagacaacagtgggtttattacaagagatgaacttgaaacag

SEQ ID NO: 41712 - DNA, 474 bp, Glycine max
  unsure (1)..(474): unsure at all n locations
  Clone ID: LIB3093-042-Q1-K1-F12
aaagggccttggctcgcttttggattaaatttggagaggattcgattgcttctattaccgatttggttcttggaccctgtaaagatgaacaagaaagagcaagtgcaaagaaaaaggcagaagaaactatcatggtaatggaagagcaaggcctaggagacaagaagttctttggaggcaacaatattggaatggtggatatagctcatggatgcctaagtcattggttagaaggcttggaggaaattgtggggatgaaattgattgagccaaacaaatttactcggttgcatgcgtggactcaaaatttcaagcaagttcctgttattaaagaaaaccttcctgattatgagaaactgttgatccatcttgaatggcgtangcagggatatgttacatagtagaactagaaatcataaaatgggtaatgaaattatgactatagtctataggcctatagtgaataggagttta

SEQ ID NO: 41713 - DNA, 441 bp, Glycine max
  Clone ID: LIB3093-042-Q1-K1-F2
cccacgcgtccgctttctaaaaggcctcaaggatacactccggacttaattacgttattttggtagggtcaccgtttcgagatattctaaacttgtactgaaaaatatggagggaaaagaagaggacgtaagagttggagccaacaggtacggagagaggcagccaatagggaccgctgctcaggctaaagactacagagagccaccgtcggcgcctctcttcgaaccgggagagttgtcatcgtggtctttctatagggctggcatagcagagtttgtggccactttcttgttcctctacatcacagtgctgactgtgatgggtgtgttcaaatctaagagcaagtgttccactgtgggtatccaaggcattgcttgggcttttgggggaatgatctttgctcttgtttattccactgctggaatctcagggggtcatat

SEQ ID NO: 41714 - DNA, 334 bp, Glycine max
  Clone ID: LIB3093-042-Q1-K1-F3
ctcgaacacccactatctcacgagagtcagggtctcactgagaacttaatcccgttataagggtgcagaaaccgatggatgatattatactctcgtactgatttgtatgccagttaaagaagttaacatgaaacttgaaggcatcatgaactgtgagagtctccctatatgcacatgcgcttaagctggatacttctgagtgccaacgctttaccttctatatgaacctggagagataggatcgtgaccttgatttcacatagtcctatcagaggaagtagccactttcatgtatctgtacatcacagtgattgctgagatgggtgagatcata

SEQ ID NO: 41715 - DNA, 302 bp, Glycine max
  Clone ID: LIB3093-042-Q1-K1-F4
cggacgcatgctctatctaaaatgactcaatgtttcactccggacttaattacgttattagggtatggtgaccagttggagatattctatacttgtactgaaaaatatggcaggaaaagaagatgacgttagacttagagccaacaggtaccgtgagaggcagccaatatggaccgttgttcaagctaaagacttcatagtgccaccgttggagcctctcttcaaaccgggagagttgtcatcgtggtctttctattagactggcatagcacagtttgtggccactttcttgtatctctaca

SEQ ID NO: 41716 - DNA, 294 bp, Glycine max
  Clone ID: LIB3093-042-Q1-K1-F5
tgccaatggcatttgttcattggtatgtgggttaaggaatggaataaggtgaatggggtggagcccgtgaggatcttgctgctcttgaaaaggactatgaagaggttgtagcataatgcgaataataagaataagaataacacgacgattactcgaaatatagtcaatcattcatcaacattgtcaccagctaccttacctacattttccttcttttctctgtctaatgtctgtccttgtccattgaattttaagcatttttatgttgtgtgctatctctgatcttactattgg

SEQ ID NO: 41717 - DNA, 438 bp, Glycine max
  Clone ID: LIB3093-042-Q1-K1-F7
atgactatgactctggtttcaacaagccatcgtatgagtcttctggcggtggctatgaagggggttacaacaaaacatcttattctagtgatgagccagcttctggtggtggctatgaaggtgggtacaagaaaacaggttattctggtggcattgatgagacttctggtggctatggcgctggtggtggtggatactctgacgtcactgatggtggctacggcaaaccaagtggtggctatggcgccgctggtggtggtggtgtgtaccctgacactaccactgatggtgggtacagcaaaacaagtggtggttggtatgatgatgaagttgactattagaaggaagagaagcaccacaagcatcttgagcaccttggtgagttaggtgctgcatcttgttgctgcttacgccttgcatgaaaagcacaatggcata

SEQ ID NO: 41718 - DNA, 465 bp, Glycine max
  Clone ID: LIB3093-042-Q1-K1-F9
gccacgcgtccggttcaccctatttacaaacttctgtttcctcactatcgtgacaccatgaacattgattcacttgcccggagatccttggtcaatgccgacggtattatagagaaaacattcttgtggggtaggtactctttggaaatgtctgctgttatttacaaggattgggttttcaccgatcaagcattgcctaatgatcttgtcaagagaggagttgctgttaaggatccatctgctccccatggagttcgacttttgatcgacgactatccttatgcttctgatgggctagagatatgggatgctatcaagtcttgggtggaagaatatgtctcattctactacaagtcagatgaggaacttcaaaaagaccccgagctccaagcttggtggaaagaactcgtagaggtgggtcatggggatttgaaggataagccatggtggcaaaagatgcaaact

SEQ ID NO: 41719 - DNA, 200 bp, Glycine max
  Clone ID: LIB3093-042-Q1-K1-G1
tccactcgtccgaaatatgccataattcaatgactggttcgagttcaacattggcgcatgtagacatggggattatggaaaatttatgaggcgttattcgtggagtatgatgtgcctattaatgtaattggagacacatgaataaataacttgtgcttctatgtaaggtgtttcctattgtcagctgaatcaataacttg

SEQ ID NO: 41720 - DNA, 472 bp, Glycine max
  unsure (1)..(472): unsure at all n locations
  Clone ID: LIB3093-042-Q1-K1-G10
cttgttggtattgatcgtaagaagcgagagctcacaaattggctaacagaaaaggagggtccagtgaaggtggtggttggcccaggagggataggtaaaacggcaattgtgaagaatgtgtacaacatgcaagagcaggtaagccttcagaagaagggaacaagctatttcgagttttgtgcatggataaccatgtctgggcctcaagttgatgatcataatatgctgataataaggcagattatagaaaatatactcgagaaggaccccggtgcatcagctacattgcagaaggaaacaacagctatacactctcttataagaaaagtaagagaatacttaaaagataagaggtacctcattgtgtttgatgatgtgcatagttcaaaattttggaatgttatcaagcatgccctaactccanacagaagcaaaagcagtaaggttattatcactacacgagatgaaaatg

SEQ ID NO: 41721 - DNA, 438 bp, Glycine max
  Clone ID: LIB3093-042-Q1-K1-G11
atcagctatgtctttcggcaagaactagcactacaacagggcctcacgttgtgggatggccaccaggttgatcttttggaacgagcgatgatgaatcacacgaaaaacaacggtgtctctctgtacaactcagttcggatggtgtcccttatcattgaaaggatctccagtgattcatgtccatgactaaggactataaaaggctatgaaaaaattgtagtgactaaagttgtagtattaatgcatcttgcaatgctcgagtatgtatcatatacaaatactttcatatcatacgacgtaaattcgcgttcatctcatactacataatactgagtggactagaatgtacataaccatattgacaacaaaggttaaagccaaatgtaaaagggtgtactcctaactgtcccacggaaagagaacctacaagatttaaag

SEQ ID NO: 41722 - DNA, 464 bp, Glycine max
  Clone ID: LIB3093-042-Q1-K1-G12
ctttgcttccccttagtcaaacagagtaacacaccatccatcctctctctcttctcttcttctgggctctagtttcctgctctagtttcttagaatccgtacggtctaatcaacacagcatactggatgcaattagttgcctggatgagagcaccaccaccgagtcactctccataagtcaggcgaagccttcttcgacgattatgtcgtccgagaaggcttctccttccccgccgccgacgaacaggctgtgcctcgtcagtagcggtgctagctcagtcgtggattccgacggcggcggcggtggtggcagcaccgtggtggagtcgcggaagctcccctcgtacaagtataacggcgtcgtgccccatcccaacggtcgctgaggctcgcagatttacgagaagcaccagctcgtgtggctgagaacgttcaacgaggaagacgatgcagctcgtgcgtac

SEQ ID NO: 41723 - DNA, 427 bp, Glycine max
  Clone ID: LIB3093-042-Q1-K1-G2
gtgcatcttctttttgttgttctctcaaactttaacaatctcataaataaataatcagaacgaagaaggggaagaattgaattcgaaaaatcgtagcgtatcgttggttgcgattgaaacggtacgatgggaagaggaaaattcaagagcaagcccaccggtcgccggcagttctccaccccggaagatatgcttgctggaacctctaaccgtcctcgaacttttagacagaaagaagctgagcatgaagaggagcctgaggaagtatctggggatgaatctggagaagaatcagaagaggaaacttctaagaaaaaaggaacacaaggagttattgagattgaaaatcctaactttggtaaaccaaagagcttgaaagcttaaaatgttgattgttggaaaaacaacagaacttttcaagcgtgaa

SEQ ID NO: 41724 - DNA, 131 bp, Glycine max
  Clone ID: LIB3093-042-Q1-K1-G4
tcggccaagccgtccgatcatatcccactcttattctatgtcacttaactctatgtatttagcggatatgggggtgaaatattgggtctgtgaattttcgagagaaaaagtgtgcgccctttaatagggtg

SEQ ID NO: 41725 - DNA, 410 bp, Glycine max
  Clone ID: LIB3093-042-Q1-K1-G5
acactaccctcaacatagtaaagcagctggtgcaagtgaagcaatggctcaaaccatgttgggcatgtctagtgtctctagcagttattccgtggatttgaagaaagaccttttcctccaattgcagagtcaaagtttaaggcctaagttctctcaactctcattcaacccacttccaccatcaacttcttccttttcttcaccccgtacattcacaaccctggctctcttcaaatctaagacaaaagccgctcctgctaagactaaggttacaaagccaaagcaaaaggttgaagatggtatctttggcacttctggaggatttggttttactaaacagaacgagctctttggggtcgtgttgctatgcttggttttgcaacatcaattgtttggttgaaggaataact

SEQ ID NO: 41726 - DNA, 265 bp, Glycine max
  Clone ID: LIB3093-042-Q1-K1-G6
acactaccctcaacatagtaaagcagctggtgcaagtgaagcaatggctcaaacgaggttggtcatgtctagtgtctctagcaggaattccgtggatttgaagaaagaccttttcctacaattgcatagccaaagtgtaaggcctaagttctctcaactctcattcagcccacttccaccatgaacattgtctatttcttcacccggtacattctcaaccctggcttctctataaatgtaacacatatgccggtcctgctaagac

SEQ ID NO: 41727 - DNA, 366 bp, Glycine max
  Clone ID: LIB3093-042-Q1-K1-G7
acacgaccatgctcagatttcatacactcatgcttggaatgccatggatagtaccaaatttgagaatgttagtgcccctgccattgatatcgactactggaggcttgacaaggatgcaactctcaaggatgatggcactgtgattagcgctgatgaggctcatcacagggatgttaaccactatgcttctgacattcatcatcaagggaaggaattaaaagaggctcctgctactattggttatcactgagtcattgttgtaaattttttaacaaatctaaaatctaacctttgctggctcatagaccttctagctatttagaccataatgattcaataaaatttatttctattgagcactttaaa

SEQ ID NO: 41728 - DNA, 385 bp, Glycine max
  Clone ID: LIB3093-042-Q1-K1-G8
atcacttagtgcagaccccaaaaatgttgttttcattgttagtggacgggggaggaatagggtaagtgactggtttgattcctgtgaaaaacttggaattgctgcagaacatgggtacttcttgagatggtctcacggtggagaatgggaaaactgtggtaagagctccgactttggatggatgcagattgctgaacctgtaatgaaacaatatacagaggcgactgatggctcctcaattgaaagaaaagaaagtgctttggtctggcaataccgtgatgcagaccttggttttggatctgctcaggctaatgaaatgttagatcatctagaaagtgttctggccaatgagcctgttgctgtgaagagtggccagtttattgtt

SEQ ID NO: 41729 - DNA, 455 bp, Glycine max
  Clone ID: LIB3093-042-Q1-K1-G9
gacccgggcgacgcgtcacgcgtccctcgatcttcgtccggggactgcttcgaataccaccaccaccactcgccgatggcgacgatcggaggcttacgaggactcccaaggctctcaaaacagcgtctaaaccgaagccctcgctcgattcgccgtagaccaacacaacacgaagcagaattcgcttctggagtttgctagggtggttagggcacatgaacacgttgttgctggtaccctgcatcaccttactcttgaggctattgaggctgctgagaagaagctctatgaagccaaagtgtggttgaaaccatggctgaatttcaaagaactccaagagctcaagcctgctggtgatgcaccatcgtttacctctgctgatcttggtgtcaaaaaggatggtcaccaaccacgatggcaatctgtgccaacacatgaccctcaagtttatgatg

SEQ ID NO: 41730 - DNA, 444 bp, Glycine max
  Clone ID: LIB3093-042-Q1-K1-H1
cccacgcgtccgaaaaaacataagaaaagaaaggtgacatggcaaagtgataataatagcttggttctgcgtctcaattcatctcttctctgagtctcaacctaattccccaatcaatcatctttacgtgtttgttcgagaccatggccaaaagccccttcaagcttgaacatcccttggaaagaaggcaggctgagtctgctcgcattagagacaagtatcctgatagaatacctgtgattgttgagaaagctgaaagaagtgacatcccagacatcgataagaagaagtaccttgtcccagcagatttgactgttggccaatttttatgttgtccgtaaaaggattaaggtcagtgcagagaaagctatttttggttttgtcaataacactttacctgcatcttgccgctttgatgtcttctatttatgagggaaaattaag

SEQ ID NO: 41731 - DNA, 472 bp, Glycine max
  Clone ID: LIB3093-042-Q1-K1-H10
cccacgcgtccgcaaaataaaatatgaccaaaacattacttctatggatttttttattgatcagcatcctcatgttttcaactactgggagcacatttactacaaaaattgaagatcttgggacttccaggcaacaaaaggaaaccaaaaccatgtacggtgtgatcatggaatcaagcaaaccaaacactcaaagaagaacaaatctaggattgcatgttgttcaacacacaaaggtgtcacagaaagcaaagacaaatggtggagggaataacgtaaaggatcataaggggaagaatagtgcaagcacctattcaatcaacaaatcttcatccttgttcattcccgtgatgcttttgtttggttacttgttttgaattccaaggcttaaatttatttacagtgaaggcacaactagtgatgcttaataacatgatgccgctagtggtactttggatttgtataatacatg

SEQ ID NO: 41732 - DNA, 470 bp, Glycine max
  Clone ID: LIB3093-042-Q1-K1-H11
attgactcttctgttcgggaactcttttttctctcaacctcactcttcgggatagatgaatggaagaacactcttgagaaccgtcatccccaaaccacaacaacaccaccaccattgtcgtggtttctcaacatacgacataggaacatgcatttccaccctccaatcatgtgcgcacaatgcaaacctctccaaaggcaaggaacttcacacccacttgctcaaaaacgcgttcttcaaatcccccatcgccatcaccaacctcatcaacatgtactccaagtgctccctcatcaaccattccctcagagtcttcaacttccccacccatcacaacaaaaacatctttgcctacaacgcgctcatcgctggcttccttgcaaacgcgtttccccaacgtgcccttgctcttgataaccaaatgaggcatctaggtattgctcttgacaagttcactttcccgtgtgtca

SEQ ID NO: 41733 - DNA, 452 bp, Glycine max
  unsure (1)..(452): unsure at all n locations
  Clone ID: LIB3093-042-Q1-K1-H12
cttgcttggttatgatattggagtgatgagtggagcagccatatacataaaaagggacctgaaagtctcggacgagcaaatcgagatcctgctcggaatcatcaacctatactctctgataggctcatgtctcgccggcagaacctccgactggataggtcgccgttacacgattgttttcgccggcgccatcttctttgtcggagcacttctcatgggtttctcccccaattattcctttctcatgtttggccgtttcgtcgctggcattggcatcggctacgccctcatgatagcccccgtctacaccgncgaggtctccccggcctcctctcgtggcttcctcacttccttccctgaggtatttattaatggagggatattaattggatacatatcaaactatgcattttcgaagctgacactaaaggtgggatggccaatgatgcttg

SEQ ID NO: 41734 - DNA, 444 bp, Glycine max
  Clone ID: LIB3093-042-Q1-K1-H2
cccacgcgtccgaaaaaacataagaaaagaaaggtgacatggcaaagtgataataatagctgtcttctgcgtctcaattcatctcttctctgagtctcaacctaattccccaatcaatcatctttacgtgtttgttcgagaccatggccaaaagccccttcaagcttgaacatcccttggaaagaaggcaggctgagtctgctcgcattagagacaagtatcctgatagaatacctgtgattgttgataaagctgaaagaagtgacatcccagacatcgataagaagaagtaccttgtcccagcatatttgactgttggccaatttttatgttgtccgtaaaaggattaaggtcagtgcagagaaagctattttttgtttttgtcaataacactctaccttcaactgccgctttggaggtctttctatttattgaggaaaatta

SEQ ID NO: 41735 - DNA, 417 bp, Glycine max
  Clone ID: LIB3093-042-Q1-K1-H3
gttgatcctgtgaacttatggctgacggggtggttctgttggatacatgggccagcatgtttgggatgagggttaggattgcattagctgaaaagggtgttgagtatgaatacaaggaagaaaatctcaggaacaagagtcctttgcttttgcaaatgaacccaattcacaagaaaattccagttctgatccataatggcaaaccaatttgtgaatctgcaattatagtgcagtacattgatgaggtctggaatgataaagctccaatcttgccctctgacccttatgagagagctcaagccagattctgggtagattacattgacaaaaaggtgtatgacacttggaggaaaatgtggctttctaaaggagaggagcctgatgcaaggaaagaaaggagttatctctatctttaag

SEQ ID NO: 41736 - DNA, 443 bp, Glycine max
  Clone ID: LIB3093-042-Q1-K1-H5
acgcccacgcgtccgcgggatcagcacaagattgctaaatgaagttcaacattgcaaatgccaccagtgggtgccagaagaagctggaaatcgatgacgacctgaagcttcgagcattttgggacaagaggatctcccaggaggttcttggtgatgctctgggtgaggagtttaaaggatatgttttcaaaatcaccggtgggtgtgacaaacaaggattccctatgaagcagggagtgctgacccctggtcgtgttcgacttttgctccatagaggaactccttgttaccgtggatatggaaggctcaatggagagcgttgaacgaagtctggtcgtggttgcattggcagttcagatctctctggtttgaacctgggaattgtgaaaaagggggatagtgatttgcccggtgctcactgaatgttgaaaagcccagggatg

SEQ ID NO: 41737 - DNA, 70 bp, Glycine max
  Clone ID: LIB3093-042-Q1-K1-H6
tctgatcgatatgatactattatgtgatgtggagggagggagagggaggtagagttgtatatatatgtaa

SEQ ID NO: 41738 - DNA, 393 bp, Glycine max
  Clone ID: LIB3093-042-Q1-K1-H8
gttacttcaggaggaattactccgccgtggctgccgcagcggcggcggcggaggctgatgaggaggaagatgaggatgaggcggaggatttggaggaggaggaagaatgtgaagaggaagggagggggagcgaagtggaggaaggggagaaggagagggaagggatgaggaggttggcgaaggcgatagagaggtttggtgaagtgtatgagagaatggaggcgcagaagctgaggcagatggtggatttggagaaacagaggatgcagtttgctaaagatcttgaagtgcagaggatggagatgtttatggacacacaggttcagctcgagagaatcaagcgcgggaaaagatctggctctaacgatatggatagctagccaagtgggcgat

SEQ ID NO: 41739 - DNA, 314 bp, Glycine max
  Clone ID: LIB3093-042-Q1-K1-H9
caaaagtgagaaattgtgcgtgtatctggttgctaattcgagtgctattagtctgtggtttggttggtttgtaaccccgctacttgggttatgtttgattgtatattatcctagagaaataaaaattttaaattatcagtacgtattggtattacatgctagtgagctgtggttacatttttctttttttttaaaggagctattgtggttacactgtattccaacataatgcaattgatgtgattataattgccacagcaataattctaaaaacttgatattgtggctacaattacatattattttttagaatc

SEQ ID NO: 41740 - DNA, 306 bp, Glycine max
  unsure (1)..(306): unsure at all n locations
  Clone ID: LIB3093-043-Q1-K1-A9
cccgggctgtattgctgctattggggcacggaatcagaatgagtggcaccaacttagtcttaaacgtcatctgaatctcagttncgcaggcttacgactaattgtgattgattggtgtgaaaaggatgaaaggaaagagtgactttctttttaatattttggatcctaaattttagaagctgcatttgatctttgtatttcggagctatcaagatcggatgtcaatccatccagatctttattgttgaatccccaacacctattataatgtgtactcattctcttgatgctgctgacttgagctcc

SEQ ID NO: 41741 - DNA, 247 bp, Glycine max
  Clone ID: LIB3093-043-Q1-K1-B11
cttatttctccgaacccaatccgaggctataatgttatcctctgatacgtggaatgataagaggaaggtgaaagacagtgcatgggttgtgaaattctgcgttccctggtgcaagcattgtaagaacctgggttctttgtgggatgatttggggaaggcaatggaaggagaagatgaaatagaggttggagaagtcgattgcggcatggacaaagcattgtgttccaaagttgatatttatttcata

SEQ ID NO: 41742 - DNA, 314 bp, Glycine max
  Clone ID: LIB3093-043-Q1-K1-B9
gttcgtactacatgttatgcagtcatgaatgtccgagagacaacacaaaggtcttccccagtgatcagcgagatcctgctctcgggcttcaccataaactcttccctaagacgcacgacacacttggtgcaatctttctcagttgttttcctccactggttctacgttttctcatgaactaaattaactgacctcgtacataggagtataaacatagtactcgtgttcttttttcaatactacatcacattcaaatcattaaatctagctagcatattagagttattatttattatcattgcacaaattaaata

SEQ ID NO: 41743 - DNA, 166 bp, Glycine max
  Clone ID: LIB3093-043-Q1-K1-C12
cacaacaccatagcctttctctcgctggcccgaacgggagtgtttaccaaccttggcaagcgagctttcgtaaccttatagaacacctttctgcgttacttctttttattcgatattctgtaagccccaaacaagttaaacgattaaacccttacccattttaggc

SEQ ID NO: 41744 - DNA, 320 bp, Glycine max
  Clone ID: LIB3093-043-Q1-K1-D9
acgcccacgcgtccggtctctctcactttctctcataataatttgggtttcattgttcggtgctgaagcaaatttgcggtgtagcaggggcaatggaggttcaaagtctcagctttgaggagaacactttgtgggttggctcttttgtggaggctttggtgcttgacactctccttgccactgccaaatctcttgcttgctttctcgttgtgactggatctcttcttacggatgccaataatttattgtcaccaatggtggatggaaggttttctttagaccaaccgtgcaagggaaaacatacttcttaagaaaacaag

SEQ ID NO: 41745 - DNA, 399 bp, Glycine max
  Clone ID: LIB3093-043-Q1-K1-E11
cggacgcgtgggcggacgcttgggccaagtgctacagacaccaacaacgctgtagctctctcggctctgtgtcaccggcaccggggatctacatctgaacccgatccagccaatagatctcagaaatccaaatggagaacctaatctctttggtcaacaaaatccagagagcttgcaccgccttatgcgaccacggagaaaacagtgcactccccacactatgggactctcttcccgccatcgccgtcgtcggaggccaggtctcacctccgatccctctctcttactctcttctcttttcatctcataacgattcatatcgaaatctgtatgtctcactgtcagagctcaagaaagtccttcgtcttggaaagcgttgtctgcaaagatttcttaacc

SEQ ID NO: 41746 - DNA, 224 bp, Glycine max
  Clone ID: LIB3093-043-Q1-K1-E9
gtaaatggaacccggcatagtgacatcactgatcctaatggccagaacagagacacatataggcccaactgcaatgagtgcatgggcattcatatagatagtcctggtcataatttatcataccgatcctgacatatttagaacatggaacaaatactagctcatccatgaaaaaattcgtcatcactgcatagctaaaaatcccaaatttattatggataaac

SEQ ID NO: 41747 - DNA, 229 bp, Glycine max
  Clone ID: LIB3093-043-Q1-K1-F10
gacccaaacggccgacaagaacagaccaacgagaacaccgggaaaataacaaacaaaaccaaaagggaaaccaccagaagccaaggccaggcgaaagcgcaaaccacgcaaaaccacacacagacacaaaaaaccaacaacagcgagaaaaccacaccaacaaacaaagaccaaaaacacaaaaaacacaacacaaacacacgacccaacaacacacacaccaacacaa

SEQ ID NO: 41748 - DNA, 174 bp, Glycine max
  Clone ID: LIB3093-043-Q1-K1-F9
gcctgcatgcggagacagctgctatcgggtcttatctgaggctggctccaggggcctatttagaatagcctgccccggattgaggctgcgttatagcactgtgaaatcaagcttggcgaggctactgcacgagattgaatggataccatctgatgagcgagacagttgatctaa

SEQ ID NO: 41749 - DNA, 292 bp, Glycine max
  unsure (1)..(292): unsure at all n locations
  Clone ID: LIB3093-043-Q1-K1-G9
gcttgtggcttttacagaaagctacagtccgatanttgatcacacctccaagtggctttcttaggcaggtgcttacatgcgttcgtctccattactgctcaatatcactgatcaattcatgtttttcgacgacagctaagagtctagatcattatcgcatgaccaatccagtaaaatactagtgaggtattacatacatacatcttgtggactagatattattgcctatattgatgctattcagccaatgaaaagcttgtgtgctaattaaacattatattatatatcctat

SEQ ID NO: 41750 - DNA, 242 bp, Glycine max
  Clone ID: LIB3093-043-Q1-K1-H12
accagtgaggtacgcttccaaaagctctcctgatacatgaattttaagacatagaggaatggggggacgaaaatcaagtttgcttgcaagaaggcacttgctgacagtcagccaagaatccgcggaagatttgcaaggactgaagaatctgatgtctagagggaatgtatgacataaaactgattttagtaggaagaaaatagagttgagtatctatatctgatccagctatatggaaaaac

SEQ ID NO: 41751 - DNA, 342 bp, Glycine max
  Clone ID: LIB3093-043-Q1-K1-H9
tcgtccacgcgttcgcggagatgtaccctgaaacgtagctacagccagaggctagaactccacgaggcgttacttagaacggtgacagagagtatcttgaatacgatgatcctaaaacggtatttcgaggataggcttgtgatgatcttggacgaactttctgtgagaccgaatatcataagggtgtctactagagaaatgtgaaaaccctttttattgccatgactactgcgttatcaatgtcaaccagtagtaattgtcgtgttgaattgtacatatgtataaggctatggatctcaatttatattggggtgaagtatcgctattaaactttacaataat

SEQ ID NO: 41752 - DNA, 188 bp, Glycine max
  Clone ID: LIB3093-044-Q1-K1-A1
gctcttctgaccatgactttgacattttcatcaggtctatacatgtgccaaatgtaccatgagaacatctcatgccctgtcgggcaccatgctcaaccacaacaaagtgatagcaatgtttcgatgagaggcttgtgaaacacctcaagctgtgcaactcgctgggcctgaaagataatatgcatcct

SEQ ID NO: 41753 - DNA, 430 bp, Glycine max
  Clone ID: LIB3093-044-Q1-K1-A3
tccacgcgtccgcttttcggaaccaagcgtgtgatcggtttgcgttttgatgattctcaagcgcagaaggagatgagagatggggccatacaagattgttaaggcgtccaatggagatgcttgggttgaagccaatgggcagcagtattctcccagccaagttggtgcttttgttctcaccaagatgaaggaaactgctgaatcatatcttggaaagtcagtttcaaaagctgtaattactgtaccagcttacttcaatgatgctcagaggcaggcaacaaaagatgccggtagaattgctggtcttgatgttcagagaatcatcaatgagcccactgccgctgcactttcctatgggatgaacaacaaggagggtctcattgcagtttttgatcttggaggtggaaccaattttttgatgtgtccatct

SEQ ID NO: 41754 - DNA, 239 bp, Glycine max
  Clone ID: LIB3093-044-Q1-K1-A4
ctctttctctctatgaccaatcccaaacccataacacaatttaaaaatgggaggggatctggggccaaagctgatgggaaaaaggaatgaagaggaagaagaacaagaagaagagtttttattgggccaaaaggtttggaatgagaaccatggtatttggatagtggcggtaccagccatatttacaaagggtttcaccttttgaatcaatgttataatcccaactttttttggccata

SEQ ID NO: 41755 - DNA, 434 bp, Glycine max
  Clone ID: LIB3093-044-Q1-K1-A5
cgctgttcctacaatcattccattagtgccctaccggtcgcaccctcctccctgcctccgtctccaatttccgacgagcattcgacgtcctcgatgccgaccgcgacagcaaaatcagccgcgacgacctccgcgccttctacgccggagtcggcggcggatgagatgacctgatcggggcaatgatgacagtggctgacaccaataaggacggtttcgtggagtactaggagttcgagcgcatggtctcggcggacagaaagcccgtggggtactgtggggccattagaggacgtgttcatggtcatagacaatgacagcgaccgcctacttatccaccattatcttaagacttacataggctgcgcttgttttccggtcaccgacaacgacatcaacgtccaattttatccgattctgctgcagctaccaaa

SEQ ID NO: 41756 - DNA, 117 bp, Glycine max
  Clone ID: LIB3093-044-Q1-K1-A6
aaaagcagtgtatttctattttaatcttgttatgacatcatgggactcttagggttttttgcaaattcatgggggatggatggtttttccattcccaataatacctgacatttttct

SEQ ID NO: 41757 - DNA, 449 bp, Glycine max
  Clone ID: LIB3093-044-Q1-K1-A7
cccttatctttctctcttctcatgaccccggttaaaccctaactccctaccctagtccgctttgtctcatccatcatgaaaggaggaaagtccaagaccgaatctaagagagccgatgccaaacttgctgtgaataagaagggcgccgccaccaagactaggaaacccgccggaaaggggaaggcagcgaaagatcctaacaagccaaagaggcctccaagtgctttcttcgttttcatgtaattataatatattgttatctctacgattcatttgacttccgatgcgctctcttatctttcctccgaataattttatcgtcaaaacttttatccttgtccaattggaggaattcaagaaggtgttcaacaaggaacattccgacaacaaagccagtgtctgctttttgtgggcaaagctgctggaacaaaatggaagctatgtctgat

SEQ ID NO: 41758 - DNA, 423 bp, Glycine max
  Clone ID: LIB3093-044-Q1-K1-A8
ggcttccctccctcctttgaagttacaaatctgaagagtgtgttgtgttgtgttgaagtaggaagctagcaaagatggttggcatcttatgaggcaataaggggcacaagatcaagggtactgtggtgttgatgagcaagaatgtgttggacttcaacgaaatagtgtccactactcagggtggtttggttggtgctgccaccggcatcttcggtgctgccaccggtattgttggtggagttgtcgatggtgctactgccatcttcagtcgcaacattgccatccagttgatcagtgccaccaagactgatggacttggaaatgggaaagttggaaagcaaacctatttggagaaacatgttgcttcgttaccaaccttggggagacagtgccaagatgcatttttctcaatcggtttatttt

SEQ ID NO: 41759 - DNA, 181 bp, Glycine max
  Clone ID: LIB3093-041-Q1-K1-C12
attcaatcccacggattctaccttaggcaggtgatcttgtatatatgattattaatggggaaggtgggctggttttgaaagacaactttgagggtggggctacgtgggcatatgaagttgggtcactatcaatggtttgaaccattggacccgtggggctcgtttcaccgcggcagacgct

SEQ ID NO: 41760 - DNA, 374 bp, Glycine max
  Clone ID: LIB3093-039-Q1-K1-C11
cccacgcgtccgctctcacctcgttcttccaacccctctagatttgaatcaccaaacttccgggttccttctctctctctctctctctctctcttatatttgtactgtacccaaaaaagcacttcacaaagttgaaagctgaaacctcttcttcaatctacttcacgatggcggagaagcacttgcgggagctccttaaagaggatcaagaacccttccttcttaaacactacatttgggagcgtcgcatgcagctcaaaagaccttccccaaacagccctttacaacaacaactgaaaaagaaaaactcaaacttcccacttaacaaatgcttcctcacttccctacaaaacgccacaaaaatcccactctta

SEQ ID NO: 41761 - DNA, 318 bp, Glycine max
  Clone ID: LIB3093-039-Q1-K1-C12
cccacgcgtccggttgatttcatttgctcttattaaactcaccaccaccaccaccaccaccgcgctctcttccattttcccgcagaacaaacacattcacatacttttccctcactttctcggcggccaaacgccataaaaatggcgtcgaaggtggcgctgatggcgctgatctacgtcgcgctcctgttctctccgacgcaatccgcggtcttcagcgtagatctacgctccgaatcgatgaaagttgcagtgctgaacctcaagccctgccaatccccgatctccgacgcgatcaacgagatgtccaaacgcaaa

SEQ ID NO: 41762 - DNA, 440 bp, Glycine max
  Clone ID: LIB3093-039-Q1-K1-C2
cccacgcgtccgcccacgcgtccgggaccaaacagcatccgcggcagcgacggtaaccctgcaacaacaacacttccgctgcgaaaaatgtctctggtggcgaacgaggatttccagcacattctgcgtgtgctgaacaccaacgtggatgggaagcagaagataatgttcgcaatgacctccatcaagggtattggaaggagattcgccaacatcgcttgcaagaaggctgatgttgacatgaacaaaagggctggtgagttgactgctgctgagttggatagtgtgatgactgtggtggcgaaccctaggcagttcaagatcccagactggtttttgaacagaaagaaagattacaaggatggcaaatactctcaagttgtgtctaatgctcttgatatgaagctcaaggatgatcttgagagactcaagaaaatcag

SEQ ID NO: 41763 - DNA, 257 bp, Glycine max
  Clone ID: LIB3093-039-Q1-K1-C3
cccacgcgtccgggcactccgttttagatcaagagagcaatacgatttcagcgcaacaaatgggcaaatacccacgagaggatcaaaagcacccaaaagatgaaaacaagatcaaagccacacacaccttgaactagcaagcagccgaaaccgatatccccgttttgcctgccgaacccgacgaaaaatacgagcccgcgtatcaaacacaagacaacccactacatgagacaaacgcaaaagaatcctacaccaac

SEQ ID NO: 41764 - DNA, 394 bp, Glycine max
  Clone ID: LIB3093-039-Q1-K1-C4
cgcattcgtaggataaccgttgcacggtggctactgttctgctggtggctacacgcatgatgcatagccatgacgcatgatgccatcctgagtattgcactcttagggataggagatgcgctttgtgcataggcagtacactgtcatagcacccttggcaaggactagcctatctgacatggcttgtgcttgctacttagggcttatcgtgcatatgataaataccgtttgagaatgaggatatgttgccataagaatacaggtgagcaagggttagagtgatcgatgaccacacacctgagcgatgccgaactgagatctctgctgagcgtgagggcagtacctcaggatcgagctggacagtttctgggtggacaaagggtcctaaagcttt

SEQ ID NO: 41765 - DNA, 414 bp, Glycine max
  Clone ID: LIB3093-039-Q1-K1-C5
gtcagaatctgagttctttgaactcaaaccctaaaaaaaacgatgtatcgttttttgtcttccattcgccatggctgtggatctgccctcacatcacttctcgcgccgaaacccacccttccattcgacgccgccctacaatctcgccgtttacctcaaaacgacggacatgttagaggattttcaagctcgaattttgattggaggaatcttattgtgaacgagaatgtgaatgcagatgattctatgcaggatgcagagaacagaaactccgaaaagtggaataatatgaggctgaatatgaatgcagatgcaaaagctcctccaaattttgtgcagaatagagggaccataaactccagaagctggaacaatatgcgacagaatttgaatgctcctccaaattttatgggg

SEQ ID NO: 41766 - DNA, 410 bp, Glycine max
  Clone ID: LIB3093-039-Q1-K1-C6
agctttggctacagccctcgcaaatgctccatcataacagcagaggactatgctcggtgaagctttatacccacttgtggatcatctggaacatgatactgctgcaaaggttacaggcatgcttctggagatggaccagcctgaagttttacatctgattgagtcaccagatgctctgaaggcaaaagttgctgaagccatggatgtgttgagaaatgttgctcaacagcaaaccaacccagctgatcaactagcctcactctctctcaatgacaatcttgtgtcttagattccgttagtcatttgacaagaatctgtacaccagttatttctatcccgtacgctacccaccagtttatttgcaggtgtcttagatgttttgttttagtcagagtactaaaggagtttat

SEQ ID NO: 41767 - DNA, 446 bp, Glycine max
  Clone ID: LIB3093-039-Q1-K1-C7
cccacgcgttcgtgagcatacatattccttggaagagcttaaggtgattactgaggaagcgggtgaagttagatgatcagcgtagctatgatagggttacatttactccaacagtggaacattgcagtatggcaacggttataggtctatgcttacgtgtcaagctcatgagaagcttgccttcacgatacaaggtggatatcagagtggcacctggatctcatgcaactgaagctgcagttaacaaacaattaaatgataaagagcggatagagcagctgcactggaaaacccaaaccttctgaatatggttgatgattgccttgcttcatcttatgattgaaggaacttttttcctcctccaattctccaaatgcaatgaactctgtaggtgcttttatgcctttaataaaagttggtcaactttatctgtgtttatgatattt

SEQ ID NO: 41768 - DNA, 222 bp, Glycine max
  Clone ID: LIB3093-039-Q1-K1-C8
gacgaacagaccagaactgttgtcagtgggtttgtgaaatttataccactcgatgaaatgcggaaccgaaaggtcggtgttctttatatcctaaagtcagttttgatgatgggcattaaatctcaagcaatggttcttgctgcttccgatggtgatcacaccaaggctgagttggctgagcctcccagttctgctcatccatggtaatggattacattccct

SEQ ID NO: 41769 - DNA, 380 bp, Glycine max
  unsure (1)..(380): unsure at all n locations
  Clone ID: LIB3093-039-Q1-K1-C9
cttctacattttcagcttcctcaagggcatttcgctcttcactctaattgtcttgattggcactggctggtccttcctcaaacccttccttcaggataaggaaaagaaggttctcatcattgtcatcccccttcaagtcattgccaacattgctcaggtcgttattgacgagagtgggccctttggccatgactgggttacctggaagcagatcttcctccttgttgatgtcgtctgttgttgcgctgtgctcttccccattgtctggtccatcaagaacctccgtgaggccgctaggaccgacggcaaagctgctgttaatttgatgaagcttactctcttccggcactactatgtcngtcgtatctggtacatntact

SEQ ID NO: 41770 - DNA, 429 bp, Glycine max
  Clone ID: LIB3093-039-Q1-K1-D1
attgtttgttgttgtaactcgttcttcttattttgaggttctgtgtttgtgtttgttttttggctcacctgaaaatgtcttgctgcggtggtaactggagttgcggaagctcctgcaagtgcggcaacggctgcggaggctgcaagatgtacccagacttgagctacactgagtcaaccaccaccgagaccttggtcatgggagtggcacctgttaaggctcaatttgagggtgctgaaatgggtgtgcccgctgagaacgatggctgcaaatgtggaccaaactggtactgcaacccctgcacttgcaagtgaggtgttgggagagcaagcttcaagcagagatagcccttaattaggaataatgataaactattaatgtgtagctaaaaacttatgtattatgtctgtgaagggattcgtgcactct

SEQ ID NO: 41771 - DNA, 427 bp, Glycine max
  Clone ID: LIB3093-039-Q1-K1-D10
cccacgcgtccgaaggagatcaagaagaaaataccgacacagagatctagtcctagctagaggcaaacatgggcgatctcacgttcaagaacacatcgccatggcaaggaacttgcttcttgtgctttttgcagtagccaccctcctccatggctcagcagcccaaaccagacacatggtcggtgatgccacgggctggatcatccctgctggcggcgctgccacctacaccgcctgggcttccaacaaaaccttcaccgtaaacgacactctcgtgttcaacttcgccaccggccaacacaacgtggccaaggtaacgaaatcggctttcgacgcgtgcaacggcgggagcgccgttttcaccctgacctccggtccagcgaccgtgaccctgaacgaaacaagggagcaatactacattttgctc

SEQ ID NO: 41772 - DNA, 357 bp, Glycine max
  unsure (1)..(357): unsure at all n locations
  Clone ID: LIB3093-039-Q1-K1-D11
ccagaaaccaacctcaacttctgaatccgattccaaggggagctctgatgccaaagagagccagagtagtgatgtgaaggacgaattatgaggagttaagtgatatatttttatttatagaaactatgattcagacagatgatgacatagtgactgaggtaaaaaataccaagttacttctcacccctggtcaataaaaaacaaacggggagtggggggagagagacaaatgcgaggcacacatgtattactattaacttcaatttgtacaacagtgggtaatttagaattttgattntgggttgagacttcacanaaaaaaataatatttaaattaaaaaaaaaaaaggcggcccg

SEQ ID NO: 41773 - DNA, 506 bp, Glycine max
  unsure (1)..(506): unsure at all n locations
  Clone ID: LIB3093-039-Q1-K1-D12
cgnntccgcttggtttggttggttggttgtnntggaagcccataaactccttagccagccccggcgagantnatggcagaccgttgggaggtnntgatgnntggcggcgttngcggcgggcgggcgggcggcttgcnnagggcagcccnnnaagaagaagaaccgnnttcaagananngttcagctttnncaggggggnntggatcnntggacgcngcccttctggacatnnngtccactgnnacgaactcnngtgaaganntgttcagtggcttcgcgccacgcccagaagggttccccagagangggtctcacnnncagaaagggcccatggcnccttgatnntaaaaagcttcnncgcaaanngcgaaannagggaagccaccanngcaggtgagaaagccccagaaccccagttcgcnnacccatctttccgcaaccatgggattattggtgcnnctgagaaatgattggtaagcattttcattggggagtctaccaatggg

SEQ ID NO: 41774 - DNA, 446 bp, Glycine max
  Clone ID: LIB3093-039-Q1-K1-D2
ctgaacgcggttccgtgttcggttagtgcggcggcgcacgagcactcgagttcgacgacgtggtgttcggggaagaagaagaggaagctgacgcagtttctggaggggttgatgagggaagtgatagagaagcaagagacgctgcataggaagttcgtggaagtgttggacaagtgtgaaaaagatcgaatggcgagggaggaagcgtggaagaaggaggaactcgaaaggatcaagaaagaacgcgagcttctggctcaggaaagatcaaatgctgctgccaaagacgaagctgttcttgcttttcttagaaagtttgcagaagcagaagacacggtgcagttactcgagaaaattcaggttcaaaacgacaaacagaaaaacatgaaacaaaatggcggttattgtaatgctaatggaggtggtggtgtcgcagttgtcactga

SEQ ID NO: 41775 - DNA, 437 bp, Glycine max
  Clone ID: LIB3093-039-Q1-K1-D4
gggtgaggtagaaccctgccacggtggtgactgcgcgatgggtgcctacaagtatgtttcagagctatggctcaggaagcagtcgtatggcatgcgcttcttgcagcgggtgaggtgctgggagtataggcagcaaccttccattgttcgcttgacaaggtcgacccgccctgacaaggctcgtcgcttgggcttcaaggctaagcagggctatgtgatataccgtgttcgtgttaggaggggtggccgaaagaggccagttcccaaaggtaatggttatgggaagcccacaaaccagggtgttacccaactgaaatttcagcgtaacaagaagtcagttgctgaggagcgagctggacggaagctgggtggacttagggtcctcaattcttactgggtgaatgaggactctacttataaatactttgaggtgattc

SEQ ID NO: 41776 - DNA, 111 bp, Glycine max
  Clone ID: LIB3093-039-Q1-K1-D5
tctctagtgctctgcgcccattccttccattccattgtggacgcatcttaaattcacgttcacattcgctcctctgcatttgcttcatccactctactctgctctgctcta

SEQ ID NO: 41777 - DNA, 397 bp, Glycine max
  Clone ID: LIB3093-039-Q1-K1-D7
cggacgcgtgggggttgttatgcgccgtaagtaatttgtttgttggattggaattgagaaggcagcaacgtggtgaaatgggtgatagataagaacaaggcgagggtgctggctcctccttggaattggaagctcctattccagagacccaaaaagaaatcccaatttcagatggcatcgcattcaacaatcagagcgcgattttccaagccatcgaggttgtggaacgagactcgttggccatcgctcagagtttcacttctctcttagatttctctagattggccctcttcgaatccacatccacctctctccatcacatgcagtgcttcaccgatgccaccggtcgccttcaggaatctgtgcttgatgcagctaccaatgggaatcgctatat

SEQ ID NO: 41778 - DNA, 224 bp, Glycine max
  Clone ID: LIB3093-039-Q1-K1-D8
gtcatggtggctctcaggttgcaaactatatgtcgagaacatacccattgggccttggctgaggaaatagaatttgtgacggaagttcgaatcagcgtgagaatgaaagatggttgtcaaaagcagtacaaaaaggttagcaccaatcgtttcttaaaggtcgatcctcacgttggtggcaaagttaataactaacctcttgccccagaaactggtggctccac

SEQ ID NO: 41779 - DNA, 298 bp, Glycine max
  Clone ID: LIB3093-039-Q1-K1-D9
gtggcaacaacgtacctgctgcaaagatagaaagtgatcctgaggtggaagcaaccatgtgagacgcattcagtttgatactgtggtcgatgatgttttaaattggtggaaatataatgaattgaaaatgaaatctcttcttttttttgacggtttgaaggataaaatcttgctgggactaatgtagttattctaaagactggactaaatagttaaagctgtcaaatatcattctgggtgtgttcttactgacaccaggggtccgatgacccatgtgtactgatgaaaaaagggcggc

SEQ ID NO: 41780 - DNA, 451 bp, Glycine max
  Clone ID: LIB3093-039-Q1-K1-E1
atgatcgtgatgttactgtgctgaatgattttaagtatagaagcattgatggtgaccttgttggtgttgttggagattcatgggtgttggaaaccaatcctattcctgtgacatggaattctaacaaaggtgtggagaaagagtcttatggcgagattgtcacggcgcttgttaaggatgttcaagcgctgaattcttcagcaataggaacaaattcatcttatttctatgggaagcaggttggaagggctgcgaggttggcgttgatagcggaagaagtgtcttaccctaaagtgattccaaaggttaagaaatttctgaaggagactattgagccctggttggatggaactttcatagggaatgcttttctctatgaaagaaaatggcgtggacttgtttctaaacatgggtgtcagattcaactgctgattttgggtttgggatttac

SEQ ID NO: 41781 - DNA, 426 bp, Glycine max
  Clone ID: LIB3093-039-Q1-K1-E10
gagaaagagaaccgtttgagaattttagagacgttaacggacttctaatccacaattcgccggaatttgggaaccggggtcgcgtccggagcctctcggcttagttagttagggtttctttttctctttcttctcttccattcggtttcgaattctcgcgattcgcgatgggggaacgacgctgaggttgaatttcaaggttctggtttttcgtcgtcgctgtggagtgaagaattctgtgttgctggtgatgtttacgccgccgagggtttggtcgggttggtccctgactccgaacaagagcggcgttcggagaggaaccgggtcgggttcggaattgggtccgaattcgggagatggagcgagcgctaaaggaaaaggtgtcgtggttgttgagaatggtgggaacttggatcgcgagggttt

SEQ ID NO: 41782 - DNA, 313 bp, Glycine max
  Clone ID: LIB3093-039-Q1-K1-E11
actctcgtataaccgcttgataatcgcatagatgtcttcttacttcgaatccacaatacggcggattgatgaaaccatcgtggggttctgtgcatacacagtaacctagataggaactcttcgtatagtatcagtatatcattggatgtgctaattgctcttgcctattattctataaccacgctgctgatgaattttaagcatatggctgctcgctttccatatagatggatgcttattcagtttgttgctatgattgctctgtctagagcaactcatttcataaacctgagtacattctagatacactcta

SEQ ID NO: 41783 - DNA, 345 bp, Glycine max
  Clone ID: LIB3093-039-Q1-K1-E12
cccacgcgtccgcccacgcgtccgcccacgcgtccgggcggtgatgcatgagatgataaggaaggaggtgaggagttacatggaatggaatgatggaaagtgatatttcattcaattttttaaatcctaccctttcctttttctccatctaacccctcatttttatgtcttttccaaactaaatagaccctgaagcacaggataatccaaagaggttcagaacacaagccaaagaaatttcaaatttgccatgaaatttcactttccatcattccattccatgctactactcttgtcttctctcgtctcgttcccactgtacactatccaatattattattacct

SEQ ID NO: 41784 - DNA, 402 bp, Glycine max
  Clone ID: LIB3093-039-Q1-K1-E2
ctcttattaatttgtcatctttcagcagatctccctagtttttcttccaacatgagtttcaaatctcccctgcatttgctcatagtcattcttctagttttttcatttgatgtctcttctgctgctctccaaacaacatgaaggcttttgccatacaaagaaaaaactctcaacccagattacatctgataagggtgttgaggaattgagaaatggagaagaaatgttaaatatggcataaaagttcatgggagagggaaggattgatatgattagttttgattatccagggacaggaccaaacaaccggcatgatccaaagacaccagaaggaccttgagaaattaatgcttaaattttgtccagattatgagagctatgagatttatcaatggtcctaaa

SEQ ID NO: 41785 - DNA, 448 bp, Glycine max
  Clone ID: LIB3093-039-Q1-K1-E4
cccacgcgtccgacttggcataccatcttacttttactttgttttcacaacatagccatgggcatctccagcaacgcttgtccttgtgattccatcatcttcgatttggacgacaccttgtacccgtcaagcaccggtattgacaagtgcgtcaagaaaaacatccaactctttctcatccagaaatgcggattctcagaatccgaagccttcaccctccgagttgatctcttcaaaacctacggaagcacccttgccggtttaagagcactatgccatgatatcaccgcagaggagtaccatggtttcgtgcacggaaggctaccttacgactccatcaaccctgatcatcacttacggaaccttctctgcaccatcaaacagagaaaaattgtttatactaattcgtgcaggattcacgcgatgaggtcgttggatagacttggga

SEQ ID NO: 41786 - DNA, 396 bp, Glycine max
  Clone ID: LIB3093-039-Q1-K1-E5
ccggtcggcccacgcgtccgcccacgcgtacgacgagcgcagtaagtacgtcatctgtggaattccagggcactgtttggtaggtgaaaaaagtagacatgaacgtgatcgagatcagcaccgccgccccaccttccgccgcggccccccccaccactccttctagcccttctccagccggtgctgtcactcctcccccacagaactctggtgctgcatctcttggagttgttggagtatttgccaccctgctttcagttgccgccacttttatctattagatactccacgagagtagactagacaggagcttgcgagtcatcatcatcgctctttgattgtgtttcatgaattcaggttttctcttatgtttttgaggatgacactaaagttagc

SEQ ID NO: 41787 - DNA, 387 bp, Glycine max
  Clone ID: LIB3093-039-Q1-K1-E7
acgcccaattgaaattcttccaattccaccttttttttattcaataaatcaacacccaattttcggaattctctacttgtaaatgggaatcatttttctttccatttgtcaaaccataccaatcaaccaacctcgttgcttcttgtgatcactctttgaaccaccctcatggatattgatgagtgggagtttctctctgatgatggctaccttgatttcaatgaagagggtgggaagcaaaagcaaaagcaaagttcctttggaaaattatacttaaagggtgtctttgacatggactacttttgctcatcaccaccaccaagggtgagaactcaactagtccctttgccaattcaattggaaccaagaattgtgaaagccccataa

SEQ ID NO: 41788 - DNA, 368 bp, Glycine max
  Clone ID: LIB3093-039-Q1-K1-E9
cctagttcaagggtgccggtgccaacatcctgcgtgccgatgccggcgctggtgtgcttgcgggttgtgacacgttgcaggttcttgtgttcggcatgaagtacggctctggtggggcttaagttctaatgctgagtcagtactattatttgtttttagatggcgatgaaaaacaccattgagttccaagagtcttagactaattgctgccgcaaattttgttcaataaatttactagatgggatattgtcccaaaaaccgtttttaaatttcatcatgatggaaattttacatttgagaatatgatttatttgagtggcaccggaaagctttcacttggaatttccaatttatgaattcaaaattta

SEQ ID NO: 41789 - DNA, 377 bp, Glycine max
  Clone ID: LIB3093-039-Q1-K1-F10
gcaaacactctgttccttccttctctcgttcgttcatggaacttcagaggcgccaagatcagagcctctcccagcggaagggccagaaacggaagctcgacgaggagcagcaccacgaggaccgccagatcttgccggcgccgcccaccgccgacgagcgcgccgcactcctatccgacgtcgccgaacaggtgagcatcctcgagtcgactttcacgtggaacgaagcggacagatccgcggccaagcgcgccactcacgcgctcgccgatctcgcgaagaatgaggatgtggtgaacgtgattgttgaaggaggcgcgattccggcgttggtgaagcatcttcaagcgccgcctctcagtgaccttggccagcat

SEQ ID NO: 41790 - DNA, 332 bp, Glycine max
  Clone ID: LIB3093-039-Q1-K1-F11
agcatcactacggacgttgattatatcacatgttcctgaaactcaagcggcgccaagatcggaccctttcaaagtctgaggctcattatacttatcacgacacttaatatctctacaaggactacctgatctcgtcgtcttaatccacagttgacgaacgcacatggctaatattccacatgagcttacagagcagcatacggtcaattacaacgacgaccatcacattcaccacattcgcaaccgattgcaccacttacaagctagacgatctgtcgattattgatactctcttaaccattacatggctcggactctccattaacgccctt

SEQ ID NO: 41791 - DNA, 366 bp, Glycine max
  Clone ID: LIB3093-039-Q1-K1-F12
gctaaatccctagtaagccgtcatggtgaagtactcaagggagcctgacactccaaccaaggcttgcatggctagaggcgccgaccttacggttcattttaagaacactatggaaactggctttgcaatcatgaagttgcccttggataaagctaaaacgtacttggatgatattcttgcgcacaagccagccattcatttcagacgtttctgtcatggtgttggaaggacagactaaagcaaagaatatacactctaatggccaaggaaggtgtcctgataagtcagcaaaattcatacttgatttgctcagaaatgctgatagcaatgctgaagtgaaatgttcgaatgttgattctctttaca

SEQ ID NO: 41792 - DNA, 372 bp, Glycine max
  Clone ID: LIB3093-039-Q1-K1-F4
ggccaatgttaaagctgctgatgctaaacataacttggcggctaggatgaacaatggtaaaagagttccagctgcaaaagtgaatagtgctggctgtgtggatgatcttgaatcctttttcagcatgggctctcgatcaagcagtgtgccaaagtcaaggactccaactatggatcgtatgtatgataaccaaatgaagaacaaagggaaacctgaggtgtcaccaagagtgccatctagatcctcaacaaatgtgaataaatctccaaggaagatgtatattgatgacctgtctctgatgtttgggggttccccgtcatctgaatttcaggaggttgaaggggaaactgaataaagacgaaaagcaagatt

SEQ ID NO: 41793 - DNA, 307 bp, Glycine max
  Clone ID: LIB3093-039-Q1-K1-F7
aagaacggtcgttagtctatgttcttcatgtttggcttctttgttcaggctattgtcactggcaagggtcctattcagaatgtttatgatcacgttgctgatcctgttgccaacaatgcttgggcttatgccactaactttgtccctggacaatgaggatgcctacatgcaatgcaatcttctgctcccttttgcagttcccttgtgtttaactccattttcactaatgtaactacacctgtgtatcagaaaaatctgtattagagctgttaatttgttatatattagaaatttgggttcccagaaa

SEQ ID NO: 41794 - DNA, 406 bp, Glycine max
  Clone ID: LIB3093-039-Q1-K1-F8
cccacgcgtccgggagtttaggaagtgtttggttacttctgagattctgctgttccttagagagcgagcgatgacggtagcagcatgaatgggttacgctctgctagcgttaggaccctctctctccatcttcgtttctgtcatttccaaaaaacccttcctcattctcaccgttctctccagcacactgctgtggcttataagtttgattgtgctgtctggaatatggaggggggttttgcctctcaacacaacagcttggtggccttttggaatactcattttgttatctgttgcttttcaagaagccctcaggcttttctcctggaaaatatataagaggttacaagatatgttagatgcctttgctgatagaatatcaaaaccacatctgtacctgacagat

SEQ ID NO: 41795 - DNA, 394 bp, Glycine max
  Clone ID: LIB3093-039-Q1-K1-G1
cgccgggatgtcgccggtgcccggagcacacgcccctatactgccgggatccaagtccaaggatgttccgccggccaccgtgttcggcgccgtgttgaatgtctgcaccagcataatcggcgccggaataatgtctcttccggcgactctcaaggtcctcggagtgattccggcgttggttctgattctcgtgattgcttttcttgcagagctatccgtggagttcctcatgaggttcacacgtgccggcgaaacgacgacgtatgccggcgtcattagagaagactttggacccttgggagcagtggcagctcaagtcgcttgttgaatcaccaatctcgggtgtttaattatgtacctaattattattgcggatgtgttttctgggaatcaa

SEQ ID NO: 41796 - DNA, 368 bp, Glycine max
  Clone ID: LIB3093-039-Q1-K1-G10
gcagcatgcgcccaccgggtatactcaaacctaccacctgtctttcggattcttcttctccgtcacgaccccatgaccgcaggctcaacactctcgctagacactcccttccgcaaatggctactcacgacagcatctccacttctccaacctccgcttctgattccgtcttcaatcacctcgatcgtgctcccgaagatcctatcctcgacgtaactgtcgcttataacatagatccaagtccagttaagctcaacttgtgagtcggtgcttaccgaactgatgaaggaaaacctactgttttgaatgtaatgaggccagttgaacagcaactcataaatgacgtgacacgcatcaaggaatatatt

SEQ ID NO: 41797 - DNA, 401 bp, Glycine max
  Clone ID: LIB3093-039-Q1-K1-G11
gtttttcttttctctccgtcttccgaagcttcgacaatcatagatactgctgagatgtctggggaagtttttgatggacaagatgcaggctatgtgcctgagaaccctgagtttccgcaaaaccattctgacgaatacgatggaggaaatgtgattgatgactcagggtttccgcaactgcagcctgatgaacacgataatggagggtttccgcagctgcagcctgatgaatatgatgccggagggtttccgcagctgcagcctgatgaacacgatgctggagggtttctgcagctgcagcctgatgaacacaatgcccgcaaattagcttaaggatgcaatattcctgaacataattttgacgggaatgatgttaaagggtgcctgggaacccctgattt

SEQ ID NO: 41798 - DNA, 409 bp, Glycine max
  Clone ID: LIB3093-039-Q1-K1-G12
aattaccagagatttaggaaaaatctcaatatcttactagttgaagctcgtggatttctgggaaccatgtgatcaactgtgtatggcttgtatttgtataaggcttgaaaagaagagttgagaattaagactactaattaaaccagcagctggagacaaaaatagagagctgatcttttgccaggcgaagtatttggggctacagaaaaccgagtcctatcttcactgggcatttgtaagtcatatatatcacttggggttgtttgcataaataaaagctttttggtttgtcagatgctattgcaaaagcagaaaagctgtctgaagatcttaatagcaatttagtgacaaaatggttgttgaggcacattcttttctgtcaagttgcatcgatgtgtatatatacatt

SEQ ID NO: 41799 - DNA, 453 bp, Glycine max
  Clone ID: LIB3093-039-Q1-K1-G2
cccacgcgtccgcatgaaagaaagaaagaaaaagctttgcagagatgtcaggtggtggatgcagcagcatagtgtggttcagaagagatctgaggatagaagacaatccagcactgacagcaggagtgagagctggtgctgttgttgcagttttcatatgggcacctgaagaagaaggacaatactaccctggcagggtctctagatggtggctcaagaacagtttggctcaccttgattcctctctcaggaatcttggcactcctctcatcactaagcgatccactgatactctttcttctctatttgaggttgttaagtccactggagccactcaactcttttttaatcatttatatgatcctctgtcacttgtcagggatcaccgagcaaaggaggttctgactgcttagggcataacagtacgttccttcaacgcggacttattatatt

SEQ ID NO: 41800 - DNA, 211 bp, Glycine max
  unsure (1)..(211): unsure at all n locations
  Clone ID: LIB3093-039-Q1-K1-G4
gtcacgcgatctgttgagtagacagngggctgtgaaaagatcgactgcacattgaaagtaggggagcttgaaaaggaagaggggagagagagtaggctgatagcaatcgagagctataggaattgaggaagctccagaactgcctaccccgcgtgcagccgtacaccatggtgaatgtgacgatagtgcccaggcatcacgccataataat

SEQ ID NO: 41801 - DNA, 380 bp, Glycine max
  Clone ID: LIB3093-039-Q1-K1-G8
cccacgcgtccgatttttccgcccaaaacaaatgctgccttcaggctcgtcaaggggagaaagagaaaagacaaagggagcagagaaaaggacggaaagtgatgtgaaggtgtaagaaaatgggcaaagagaagagaggtagaagcttcatcgccttcaccggagctgcggcggtgcttggaattgcggcgaacctagctatcaccgcaatcaagtaccagaaggcaaaaaatgctaagaagaaagatcttgcaggttccaaggtgcgcgttgatctctttgcatcggagaatattaagtgggctgagcaaatcattgctaactcaaacaaggcccataaatctgttgcgtcggtgcctctcgacaagggtacatatgca

SEQ ID NO: 41802 - DNA, 356 bp, Glycine max
  Clone ID: LIB3093-039-Q1-K1-G9
gcagcatgcgcccaccggttattctcaaaactaccacctctctattggattcttcttcttctgcaccaccctgcgatcgcagactcaacactctcgctagacacttccttccgcaaatggcttctcacgacagcatctacgcttctgcaacctccgcttctgattccgtctttaatcacctcgttcgtgctcccgaagatcctatcctcggcgtaactgtcgctcataacaaagatccaagtccagataagctcaacttgggacgtggtgcttaccgaactgatgaaggaaaacctgttgatatgaatgtagtgaggctagttgaacagcacctcataaatgacgtggtacgcaac

SEQ ID NO: 41803 - DNA, 372 bp, Glycine max
  Clone ID: LIB3093-039-Q1-K1-H1
tgtttctcggcaggggatgagccaatacaaaaatgcaataccatcaccaattaatcatcctggaattagccagaaaaatgggatggtaatatttttcgaaactaattttgtggagatctgtcggagaagaaagcaaataattatcctctttccattcattcgctgttcacttggttctggtgagcgcagcagaggggaagaaagaagctgatgagaggagctcgttggatgaatatataatataaattggtttgtttgatgggcaacacttgacgaggatctttgaaaggtaaatattctcaaggcttgagccagcccgaaaaccatttaaaggccaccacccaccattctgatcccttcttcgaccaaccc

SEQ ID NO: 41804 - DNA, 467 bp, Glycine max
  unsure (1)..(467): unsure at all n locations
  Clone ID: LIB3093-039-Q1-K1-H10
cttgagccagtgctagatcagaacttgtacaacatggggatgaagatgacctcaacaacgtttgcatctgccactgttaatgtcctcccggccattacttttgtaatggcactcattttcaggctagagaaggtgaacttgagaaaatttcacagtgtagccaaagtcattggaacccttataacagtttcaggagctatggttatgactctgtacaaaggccctgccttccaaatcataaagggtggaggagccatcagcaaccatagcaactctagcagtactagtaccaccgaaccctctgaccagcactggatagttggaactgtttatctcatatcaagttgtgctagttgggctggcttcttcattntgcaatcattcactttgaagaagtacccggcagagctctcactgacaagcttgggatttgtgtgatgggtattattgaggggtcaatcgcattc

SEQ ID NO: 41805 - DNA, 434 bp, Glycine max
  Clone ID: LIB3093-039-Q1-K1-H11
cttgagccagtgctagatcagaacttgtacaacatggggatgaagatgacctcaacaacgggggcatctgccactgttaatgtcctcccggccattacttttgtaatggcactcattttcaggctagagaaggtgaacttgagaaaatttcacagtgtagccaaagtcattggaacccttataacagtttcaggagctatggttatgactctgtacaaaggccctgccttccaaatcataaagggtggaggagccatcagcaaccatagcaactctagcagtactagtaccaccgaaccctctgaccagcactggatagttggaactgcttatctcatatcaagttgtgctagttgggctggcttcttcattttgcaatcattcacttttgaagaaataacccggcaggagctcttactgaccagctttggatt

SEQ ID NO: 41806 - DNA, 233 bp, Glycine max
  Clone ID: LIB3093-039-Q1-K1-H12
tactgctagattcatcaactcggatttagttttacgcacacgacctcaacaacgtgtagcggttccactggtaatgggctcccagccattactttatgcaatggcactcattttcaggctagataatgacaactttaacaatagtcacactatagccgaagatttaggaacccttataacaatttcatgagcaaaggttcatactcattactcaggctaaacttttcatctca

SEQ ID NO: 41807 - DNA, 392 bp, Glycine max
  Clone ID: LIB3093-039-Q1-K1-H2
agaaaactagacctggtgctgcccaggaagctgttaaagctagagccatgagagttcttaggcaaaaacgaatgtgatgaaggccagcagtacatgcgtgtacaatcagacgttcaatctcgatcaagttcaatttgctgctgagggcattaaagatgctcaacaaactatgacagctttgaagtctgccaacaaggagttgaagggaatgatgaaaactgtgaagatccaagacattgataacttgcaagatgagatgatggacctcatggatgtaagtaatgaaatccgagagactttgggtagaagctataatgtgcctgatgacattgatgaggatgaccttatgggtgaacttgatgcattggaattagacatgggaaatgagactg

SEQ ID NO: 41808 - DNA, 68 bp, Glycine max
  Clone ID: LIB3093-039-Q1-K1-H4
ggacccctggatatgccggtggacagcgtgatgagatcgcgcgcgacatgctaacatcatatgaggcc

SEQ ID NO: 41809 - DNA, 346 bp, Glycine max
  Clone ID: LIB3093-039-Q1-K1-H7
ctttttctcaaccaaaaggggttcaattctagctagttctattacatcgtccgcgaccatgaacatggcgatcgtgcttctgtgcatggttttcgcagtttcatcagctttagacatgtcaataatatcacatgacaacgctcatgcggatagggccacgaggcgcaccgacgacgaggtgatgtcaatgttcgaggagtggctggtgaaaccacgacaggtgtacaacgcgctcggtgagaaagagaagaggtttcaaattcttcaagaacaatttgcgcttgatcaatgaacgaaactctctgaaccgaaccctacaagttgggactcaacgtgttcgctgatc

SEQ ID NO: 41810 - DNA, 402 bp, Glycine max
  Clone ID: LIB3093-039-Q1-K1-H8
gaaagaaagaaagaaaaaggtagagaaggagagagagagagagagaaagaaaactgaaaaaggaaaaaaaaagataaggctaattaactacatttttggtttggtttttcttcatctcgcaggagacacgaagagacaagttacatcacatggttaaaacttgtttaaagagttttgtgtttgtgtgtgtgaaagtagtttaaggttgtgggggtggttgaagtttttagctttagctttgcagagatgtcaggtggtggatgcagcagcatagtgtggttcagtagagatctgaggatagaagacaatccagcactgacagcaggagtgagagctggtgctgttgttgcagttttcatatgggcacctgaagaagaaggacaatactaccctggcagggtc

SEQ ID NO: 41811 - DNA, 311 bp, Glycine max
  Clone ID: LIB3093-040-Q1-K1-A1
ctacaatggacatatagcattttccccttcccactcagatccagtgatcgtttcttgagccgacggtgctgattcgtgggcgcggaatcttgctcggcgtctgcgtgtaagtcatctgtgaattcccttgggcaagatggctttggggaaatatgctagagtagatggttgaagatcgtcgagtcggtgttcaacggggactggtgtcatgcctgtggctctgtgcttggatggggtttggatgatgacatcatcttcaggtgcatctgtgcgtaactgagacgaaacccacgagagtacgaaccatgcta

SEQ ID NO: 41812 - DNA, 252 bp, Glycine max
  Clone ID: LIB3093-040-Q1-K1-A10
atcccacgccacttgcaattccatctcggtgtttgattctctgcttcgtcctttcattcctctggcgaatcgttaatcgttcgatcgatccatctcccgcttccaatgacaacccctaccgacaacattaacaaccctgcacaggaaaaccctaccaaaaccctaaaccccaccgaaccagatccaatccttgccaccgaggacgacgccgccgccgacactaaggactccgacgccaaaaattcccggccg

SEQ ID NO: 41813 - DNA, 412 bp, Glycine max
  Clone ID: LIB3093-040-Q1-K1-A11
cccggctgtatttctgctattgggggaaggaatcagaatgagtggcaccaacttagtcttaaactttagctgaatctcagttggtgaggcttaagactaattgtgattgattggtgtgaaaaggaggaaaggaaagagtgactttttttttaatattttggatcctaaattttagaagctgcatttgatctttgtatttcggagctatcaagatgggagggcaatccatcaagatgtttagtgttgaatccccaacaccaattaaaatgggtactcattctctgtatgctgctgacttgagctcctatgaagctgcatgtgttaacgatccaaacttgcaatcctttgatgtgagcattcaggagcataccaataaggtgattagttccctacctcatggggttgaggttag

SEQ ID NO: 41814 - DNA, 347 bp, Glycine max
  Clone ID: LIB3093-040-Q1-K1-A12
cccacgcgtccgattcgcaccgcaaacagtgagccatggccgtctgaaagaacaagcgcatctgcaaggggaagaagggtggcaagaagaaggcagctgatccctttgccaagaagattggtatgacattaaggctccttctgtttttcaagtgaaaaatgttggcaaaaccctcgtctctcgtactcagggtaccaagattgcttctgaaggactcaagcatagagtgtttgaggtctccttggctgatcttcaaggggatgaggatcatgcattcaagaagattaggttgagagctgaagatgtgcaagggaagaatgttctgacaaatttctggggaatggatt

SEQ ID NO: 41815 - DNA, 449 bp, Glycine max
  Clone ID: LIB3093-040-Q1-K1-A3
atcggattatttagcgcatatccaaagaacgtgaccacaccatggcagtgacaagtcaattgagaggccttcttgcaactctagaggctgaggaagcatcccaaaaatccaaaggtaaagtgaacacatacaccaaccatggcgatgggtttcagaacatcactggcactaagaccaacagtggtgcatattctggtgatggtaacactcatcacgccaccaacaactacggtggtggtcctgctataaataatagtggcaatttccagggacatggcaatggaggctttattggtggtaatttcgatgcctcaacgaggaactactgattaatttatgtatgatcaacttcatgtattaaatatcgtgttctgcgctacgtatactaattaataataaaattagagctgcatgctgcagctctaacagtgtgtgatatgaataattac

SEQ ID NO: 41816 - DNA, 389 bp, Glycine max
  Clone ID: LIB3093-040-Q1-K1-A4
cccacgcgtgcggttctactaggattcccaaggttcaacagttgttgcacgacttgttcaacggaaaggaactttgcaagagtattaacccagatgaagctgctgcttatggtgctgcaatgcacgctgcgattctcagtgacgagggtcatgagaaagtgcaggagcttctttcgttggatgttactgctctatacactggtttggagactgcaagaggagtcatgactgtgttgattcccagaaacacaaccattgccaccaagaaggagcacgtgttctgaacctactctgacaaccagaccggtgtgtagattcatgtctatgaaagtgaacgaacgaggactcgtgacaacaatttgcttggcaaattagagttatctggaatt

SEQ ID NO: 41817 - DNA, 445 bp, Glycine max
  unsure (1)..(445): unsure at all n locations
  Clone ID: LIB3093-040-Q1-K1-A5
tatttgctgatattcaaataaggagacagctaatttccagtgccaagttgttgatggagtggactcggggacaaaacattgtattttctagtgctgctcctacggtgaatgagcttagagggccctgtgatgttgcaaacttgttgtcattgtttgggctttccaaggagcgagctaatgcggctatttctaaaaactgtaggattcttttagctaattctttaaggaaaaagcgattttacaaagagacaataagagtagaagttttatcatcagatgcagcatctcattctaaggaagaccggtatcaagagttactaaagtgggaccctatctccagtggtgaaggtgatatcctgttggatgatatgcanaaatcttctctagtctnctgtaaagcatcaaaacctgcanaagccattgacttttgctccgtggtcaaaag

SEQ ID NO: 41818 - DNA, 442 bp, Glycine max
  Clone ID: LIB3093-040-Q1-K1-A6
ccttgctcttagccctcctcctcttcgccgccgtggccaccgccgcgatggcggtggccgcgtccgacgccgacgacatcctgatccgtcaggtggtgccagatgttggcgaagccgaagaggaggacaacctgctgaacgccgagcaccacttcgcgagcttcaaggccaagttcgccaagacctacgccaccaaggaggagcacgatcatcgcttcggcgtcttcaagtccaacctccgcagagccaggctgcacgccaagctcgacccctccgccgtccacggcgtcaccaaattctccgatctaactccggccgagttccgccgccagttcctcggcctcaagccgctccgcttcccggcgcacgcccagaaggcgcccatcctccccaccaaggatctccccaaggatttcgattggcgagacaaaggagccgtcac

SEQ ID NO: 41819 - DNA, 452 bp, Glycine max
  unsure (1)..(452): unsure at all n locations
  Clone ID: LIB3093-040-Q1-K1-A7
ggaaaactttggacaaaaaatggagtgctacacaaggccaaacaggagtgacatccacctgggagcagaggaagaagccaccatagaagcaaagaccagagagtactttgatggagtcgcaccacaacgccacacaaagcctcaacgaagtgactattcagctcaatatgtcgatgctttctccaatgcccatcactcttctttaactataccagaattaacacaattccaactcctccagaatgatccccaagagaagaaattggtgtacaatggaagtcaagtaccggaagaatttgtggaaacagagtattaccaagatctcaacagcgtggacaaacaccaccatacgactggaacaggatttatcaaagtagagaaaaatggaaatgactntcacatagaaccagataatgacactggttgccatcactcttgcaagggcaatccag

SEQ ID NO: 41820 - DNA, 344 bp, Glycine max
  unsure (1)..(344): unsure at all n locations
  Clone ID: LIB3093-040-Q1-K1-A8
agcgagcagnccactaccgaactcatcacgagcgcgaacctgggggcggaggcggcgcagggggctctgaaaagcgacagcgacaaancggacaaggccaaagtggctgacgctgccggcgatcttctcgacgcggcggggaagtatggaaaacttgatgacaaacaaggcatagggcaatatgttgacaaggctgctgattatctgcataattaccagggtgataataccactgctccttcacagcctgcagagtctaaaggtgaagacagtggaggtgggttaggtggtcttgcaaacttggctggaggctacttcaaaaagtagttacaaagcaactaaat

SEQ ID NO: 41821 - DNA, 421 bp, Glycine max
  Clone ID: LIB3093-040-Q1-K1-A9
cggacgcgtgggttcccacatttctctattttctagtatttggcacatagtgcattgtttgggccattattaatcaaccaaggaaaaacaccaccttttggcttcttctgctgttccaactgtgcattttgtgtgctgtttctttcacaaacaagcagcaacagcagccagaatgagaatggggaacctcttctggcttggcattgttgcagcacttgttttcagcttctgggttgattccttttctgcctatgaatatcaccacttcaatgaaaccgagttctctttgttggagtctcaagaacaggtacattcatccctccttgggagaacttctctcatggttggactcacagttattcaaagtgctgctggcaaaggagcagtttgcttggatggaacattgcctgcttatcatttg

SEQ ID NO: 41822 - DNA, 388 bp, Glycine max
  Clone ID: LIB3093-040-Q1-K1-B1
cggcgtagacccacgcaatcgccaactactccgaagccgctcacgttatccacacaacaacactccttaaaccctaaccaaccatggcttcttccaccttgaccgcaatgtccgcttgcaagctttcctcctccgccgccatctcctccttccccacccaccgccgcaccaacgccgtccttctgtccagacgcagccgcgccgccagggtctccgccatggccaaggagttgcacttcaacaaagacggcaccgcaattaggaagctccagagcggtgtgaacaagctcgcggatctggttggggtcacgcttggtcccaagggaaggaatgttgttctcgaaagcaagtacggctcgcccaaaatcgttaacgacggtgtcaccgt

SEQ ID NO: 41823 - DNA, 332 bp, Glycine max
  Clone ID: LIB3093-040-Q1-K1-B10
aagaattttgtcaatcttattggatactgtgaagaagaggatcctttcaccagagtgttgggtgttgaatatgccccaaacggaacactatttgagcatttacacataaaagaggctgagcacttggattggggaacaagacttagagttgcaacgggtatggcttattgcctgcaacatatgcaccagttggaccctcctatgacccttatcaagctgaattcttcagccgtttacctcaccaatgactacgctgccaagctttcagatttaagtttctccaatgacataacctcagctgaggcaagagccattgacatgccaatagcaac

SEQ ID NO: 41824 - DNA, 408 bp, Glycine max
  Clone ID: LIB3093-040-Q1-K1-B11
atttcatcaaatttgatgcggggaatgctgctatggccactggtttaaggaacagaggccgtgtcggtgtcatcaagaacagagagaaacacaagggaagtcttgagaccatacatgtccaggatgcaactggtcacgaatttgcaactcgtatgggtaatgtcttcatcattggcacagggacaaaaccttgggcgtctcttgccaaaagcaagggtatcaagttgtctatcattgaagaggctagacagaggcttgctgcacaaaatgaaacagttgcctaaatgattatgctggtaaaatctagctactgtatctcttcggctgtctgagcataggatgatcggtgaaatgactgagcataggtttgtatcaaactttatagtacaattttgagctgctgatttc

SEQ ID NO: 41825 - DNA, 402 bp, Glycine max
  unsure (1)..(402): unsure at all n locations
  Clone ID: LIB3093-040-Q1-K1-B12
gtgaatccctttcccatatagaccccttcattctccccaagaggcgactgtcatgacatctcggccacttattcaacctgaaagtatggaggcagaaccatcgattccctcagattcactccgggcccagatttccaaattttctaccatgctcactgaagcacacaaaagaaagccaatccattattggattcttcttgttctcagcatcttggcaatgcttgtggcatttcctgcttccagcattctgtctcgtgtttattatgataacggtggccagagtaagtggatcatatcttgggtagcagttgctggatggcccctaactgccttaatactngttcctgtatactttatcaagtaaaccctttctacttctttgaacttaaaaactgagtctgg

SEQ ID NO: 41826 - DNA, 299 bp, Glycine max
  Clone ID: LIB3093-040-Q1-K1-B2
cacgatactctcaccacatcactcactaaaccctaaccaaccgatacattctccaccatgaccgccatgaacgctagcaatccattctcctacaacgccatctactattaacacacccaccaacataccaacaacaacattccttccatactcaaactcaaccccattcacaacaacattcccaatctgatccacattaacaaacaacattccgaatttacaaatatccagaactacattaacaaactctcgaatcataaagctgccacccttccctctaaccctaataatatagctct

SEQ ID NO: 41827 - DNA, 427 bp, Glycine max
  Clone ID: LIB3093-040-Q1-K1-B3
aaaaaaaaaaaattaaaattaattaaatgtcaaccgaacatgttcatgtgaataatatttcggggcacaatattcctaggggtacaatattataccgtgaaacgaataccccctaagttataagattggaatcacaggcctaagttgtccaagacttttactcttcagtggaataagatgattagttgaattagtcacatctgtttggagcttagctgtaataatgccaatctatgttggagaagaaaacctagtgggataaggattttttttttgttgttgttgttgtatgtaagagaagcaaattggtgagaactgattaacaaaattatgtgacacaacacagcagtctcaacatccttttaattgggggttaaattttataactcttggaaatttggatttcttattgtgcatagacaacaag

SEQ ID NO: 41828 - DNA, 453 bp, Glycine max
  unsure (1)..(453): unsure at all n locations
  Clone ID: LIB3093-040-Q1-K1-B4
cccacgcgtccgcccacgcgtccgcccacgcgtccgcgaggttttgaggaagagtccgcagtgggaggagatggcggtgctgattacttacgatgagcatggtgggttttatgatcatgtggcgacgccggtagaaggggtgcctaaccccgatgggatcgttgggccccacccttattactttcggtttgataggttgggggtgagggtgcccacgtttattatctcgccttggatcgacaagggtactgtgattcatgaagcagaggggccaacaccatattctcaatatgaacattcctctatccctgccacagtaaagaagcttttcaatttaaaatccaatttcttgacaaagagagatgcatgggctggtacctttgaaaagtacttttacattcgagatactcctcgtgatgattgtccagaaactcttncagacatcaagatgct

SEQ ID NO: 41829 - DNA, 449 bp, Glycine max
  Clone ID: LIB3093-040-Q1-K1-B5
ctcttacatgactgctatagccttcctgtttatccttctaatcagttatacaggcacaacggatgcacaatccggggtgtgttatggaagacttggcaacaacttaccaacccctcaagaagttgtggccctctacaatcaagccaacattcgcaggatgcgaatctacggtccaagcccagaagtcctcgaagcactaagaggttccaacattgagcttttgctagacattccaaatgacaacctcagaaacctagcatctagccaagacaatgcaaacaaatgggtgcaagacaacatcaaaaactatgccaacaatgtcagattcagatacgtttcagtgggaaatgaagtgaaacccgaacactcatttgcacaatttctagtgcctgcattggaaaacattcagagggccatttctaatgctggccttggaaaccaagtaaaag

SEQ ID NO: 41830 - DNA, 446 bp, Glycine max
  Clone ID: LIB3093-040-Q1-K1-B7
ggcaaaacgattggagaattattatcccgttcttttccgtggagtcaatggaacagttgctgatgaattcatcattgacctgagaggctttaagaatactgctggaattgagcctgaagatgttgcaaagcgcctcatggactacggttttcatgcaccaacaatgtcatggcctgtgcctggcacactcatgattgagccaactgagagtgaaagcaaggctgaactagacaggttctgtgatgctcttatttccattagacaagaaattgctgagattgagaaaggaaatgctgacattaacaacaatgtacttaagagcgcccctcatccaccatcactgctcatggctgatgcatggacaaaaccatactccagggaatatgcagccttcccagctccttggctccgtgcttcaaagttctggcctaccacaggacgtgttg

SEQ ID NO: 41831 - DNA, 441 bp, Glycine max
  Clone ID: LIB3093-040-Q1-K1-B8
cactttcactggaatcacaatcctgaaacaaaaacatcttagcatttaacatactactagacaacatgaccaccacattggaaagaggtttctcggaagagcaagaagctctggtggtgaagtcatggaatgtcatgaagaagaattctggagagttgggtctcaagtttttcttgaaaatatttgagattgctccatcagctcagaaattgttctcattcttgagagattcaacggttcctttggagcaaaatcccaagctcaagccccatgccgtgtctgtctttgtaatgacctgtgattcagcagttcagctgcggaaggccgggaaagtcactgtcagagaatcaaacttgaaaaaattaggtgctacccattttagaaccggcgtagcaaacgagcatttcgaggtgacaaagtttgcacttttggagaccataa

SEQ ID NO: 41832 - DNA, 327 bp, Glycine max
  unsure (1)..(327): unsure at all n locations
  Clone ID: LIB3093-040-Q1-K1-B9
cccacgcgtccgcccacgcgtccgcccacgcgtccgttcgaattttctcatcttttcggaaagagatcaacaccccagataaaaatagaagaaagccttttctgggttaatttggtaatttggtttttttcatgggtaacataggaagcagcggctccaacagccgctggagacacggcggaggcggtggcagcgggaggcggattcacccgccgcctccgccggtgatgtcgccgccggaggtaacggcgaaccgattcgtgtaccctccggccgncacgccgtatcacaactaccccgggtactacccgncgncgaccaccatgc

SEQ ID NO: 41833 - DNA, 454 bp, Glycine max
  unsure (1)..(454): unsure at all n locations
  Clone ID: LIB3093-040-Q1-K1-C1
cgctccggaaaagctgctnctttaagcatcatnnatctatataacaatatgcaattatgtgttttttaacttacttcggaccgtatgcactcttcttcctctcctgtttgatcttttttggtagtgttttagccacttgccctagtcttcaacatttatgatttgatcgtacctgtaaatcatttggtttgcatgtagtcacgtatcttaaacttctcatcacgaaagctttaaactcaattcttggtggtttaagtaagagctttatacctgcagtttaacactcccttaaaaaaatggcttgcaatattaatgttaaagctgtgaatgggagtttgttttgcattcagctactttgacattgctgatgatggtgtaaataataatgtaattctgatgactaaattaatattatgtcaatgttcttccaatgcctaaaaattgttttgatgaa

SEQ ID NO: 41834 - DNA, 264 bp, Glycine max
  Clone ID: LIB3093-040-Q1-K1-C10
cccacgcgtccggtttaccgagtcttttcgaacgtgtgacacggtttatttggtggtactgcagcttgaccagtgtgggcgctgtttgcctgattatgtagtagtttctactttggcacagtcgccaaggcatttatctagtttatctactctatccctcagtggtgcatgccgactttcagatggaggtttgcgtgcacttgtttcttctgctccggcacttagatccataaatctcagccagtgttccctttttacatcttc

SEQ ID NO: 41835 - DNA, 430 bp, Glycine max
  Clone ID: LIB3093-040-Q1-K1-C11
cccacgcgtccgctagcatcgccgcttgttccttttcaagggttttgtgttctcctttgctccgtatttgattctctctctcttggtgtttttgtctctgtcttcaccaaaatttctatctttattcacattcggcaattgggttcgcttccaatttttatttcgccttcgaccaccttcggaacctttcttcccttccttcttctgcaaattagggttttatttccaattgggtaatttttaatttgggaatctcgtttattcaatttggatcaagaaatccgcgacaatgcctccgagaatagtgaagagaggtgctgcggcaaagagggcatcgaggggatcctcaaaggctgcacctgagaaccagcctgagcctgaaactacggaagtggttgtgaaaaataatcaagaaaatcccgggtgtgat

SEQ ID NO: 41836 - DNA, 248 bp, Glycine max
  Clone ID: LIB3093-040-Q1-K1-C12
gtttgtctcagatcttttaacagtcgacacaacaccattgcctctctctcgctggcccgtacaaaatgtggaccaacctagccaagcgagcttcctcaaccttaaggaacaccttccgcgtttcttctttatatccgagattctgtaagccccaaacaagtaaaacgataaacccatacccatttcaggctttccctaaagccggggtgagccggtccaagtttcttttttacgaaggcttttctagc

SEQ ID NO: 41837 - DNA, 453 bp, Glycine max
  Clone ID: LIB3093-040-Q1-K1-C2
cccacgcgtccgcaaccatatctattcttacaagttacatccattgagaaacatgaaggtctgccccttagcattttcaatcctttttttgtccttcaccatagaactcttcattggcattgcttcagcagcacaagaaccagtgcttgacacctcaggccagaagctgagaacaggtgtcaagtactacattctaccagtcttcagaggcagaggtggaggcctaacagtttcaagcagtggcaacaacacatgccccctctttgtggtgcaagagaagcttgaagtctcaaagggcaccccagttaccttcacaccctacaatgccgaaagtggtgtcattctaacctcaaccgatctcaacatcaagtcctatgtgaaaagcaccacttgtgataaacctccagtgtggaagctcctcaaggtgctaactggggtgtggtttttgagcac

SEQ ID NO: 41838 - DNA, 464 bp, Glycine max
  Clone ID: LIB3093-040-Q1-K1-C3
aacaacaatggacctccgtgaatcgataagcaaccaaaccgacgtggccctgagcatctcagagctcctgttgtcgagagaagctcgggacaagaacctcgtgtattcgccgctgtcgttgcacgttgttctgagcatcatcgccgctggctccaagggccccacactcgatcagcttctctccttcctccgatccaaatccaccgatcatctcaactccttcgcctctcagctcttcgccgtcgtgctctccgacgcctctcccgccggcgggcctcgcctctacttcgccgacggcgtgtgggttgagcaatccctctcgcttctcccttccttcaaacaacttgtcagtgctgattacaaggccactttggcttcagttgatttccagaccaagccttgctgctgaccacaaaatatggaaaacattcaagtgtcatctttgtagtcattaccaatttaaa

SEQ ID NO: 41839 - DNA, 445 bp, Glycine max
  Clone ID: LIB3093-040-Q1-K1-C4
cccacgcgtccgcttttattgaatttgcagatttgaatcaagccattgcaatgatatcgtacgatgcctcatcatcagagcctgctcaagtacgtgggaaaactgtatacctacaatattcaaataggcaagaaatagtgaataacaaaactactgcagatgttcccgggaatgtattgttggtaacgattgagggtgcagatgcacgtcttgtcagcattgatgtcttgcacttggttttttcagcctttggatttgtgcataagattactactttcgagaagacagcaggatttcaggcactggtgcaattctcagatgcagagactgccacctctgcgaaggatgctttggatggaagaagcatacctaggtatctgctgcctgagcatgtgggaccatgtacccttaggatcacttattccggacattcagatttaagtgt

SEQ ID NO: 41840 - DNA, 278 bp, Glycine max
  Clone ID: LIB3093-040-Q1-K1-C5
caactccatcatgaaatgtgatgttgatattagaaaggatctgcgtggaaacattgtgcttagtggagggtctactatgtctccgggaattgctgatcgtatgagcaaggaaattggtgctcttgcacccagcagcatgaaaatcaaggtggtcgcaacctctgagagaaaggacagtgtctggattggtggctctatcgtgacatcacttagcacctgtgaacagatgtggatctctatgggcgaatatcatgaatctgggccagctatcggtcatc

SEQ ID NO: 41841 - DNA, 394 bp, Glycine max
  Clone ID: LIB3093-040-Q1-K1-C6
cccacgcgtccgggaagataagataggtaccagctatcacataggttatttaatccgttatatgccacctgatatataggcatattagctagttaggtaggtatagtagtttaagttaattcaaccatggaagacagggatcactgttgttccaacaattcaacgatgatcacaacaacaaagaaaagaacgggtagaagaagtccaacatcggataagctcaagaatcaacaccgcgagaagcagtcgatgaaaccttaccgtggaataaggatgcggaagtgggggaagtgggtggcggagatcagagaacccaacaaaaggtcgaggatatggttgggttcttacacgacacccgtggccgtcgcacgtgcctacgacaccgctgtctttt

SEQ ID NO: 41842 - DNA, 442 bp, Glycine max
  Clone ID: LIB3093-040-Q1-K1-C7
ctaatccctcactcttgttcttcagtctcctcctattatccgccaccgtagccgccgccgaacggatcgacgatgaagacgaccttctgatccgtcaagtggtgccggatgcggaggaccaccacctgctcaacgcggagcaccacttctccgccttcaagacaaagttcggcaagacctacgccacgcaggaggagcacgaccaccgcttccgtatcttcaagaacaacttgctccgcgccaagtcacaccagaaattggatccctccgccgtccacggcgtcaccaggttctccgatctcactccggcggagtttcgccgccagttcctcggcctgaagccgctccgccttccctctgacgctcagaaggctccgatcctaccgaccaacgacctccctaccgatttcgattggcgcgaacatggagccgttactggagt

SEQ ID NO: 41843 - DNA, 439 bp, Glycine max
  Clone ID: LIB3093-040-Q1-K1-C8
ggtgggtggagagaggaacagaacagagcaacatgaagccaccgacgaaacccatttcgagccctggtcgaaccgagaagtttccaccaccgttgatgagattcttgagaaacaatgcctcaagcagaagcagaggaaggtcaagaaccaccaccgccatgtttctgagaaagaagaacaccaacaatattgaaacacaagaaccctcttcccccaaagtcacttgcatggggcaagtccgcgttaaacgctccgcctccaaaagggtgccctccgccggcgccggaactccgaccaagtttcggtgctgctcatgggtcccacatgctctgttttttcaccgtttaataaaacccgaagtttggttcccctttcagtgcaaacaaagttggcccaaattgagggtcttacaaagaaagaaaagggattcaaagtcacg

SEQ ID NO: 41844 - DNA, 412 bp, Glycine max
  Clone ID: LIB3093-040-Q1-K1-C9
cccacgcgtccgcccacgcgtccgctcactcgtgacctaacaaatttggtgcttctttttctgggcagcctcttcgatcccgctggtgctcacttcgatcccgttggcgctctcttcgattcagtttagcaggttgtgctgaggcttaattgacccttgaagcatatttcggagttttatcagagaacaaatgggatatattggggctcatggtgttgcagctctgcacagatataaatatagtggagtagatcattcctacgtggccaaatatgtactacaacccttttggagtcgctttgttaattttttccccctatggatgccttcatacatgataactcttatgggatttatggtcttactagtgtctgcattgcttggttatatatactccccacaattggacaca

SEQ ID NO: 41845 - DNA, 453 bp, Glycine max
  Clone ID: LIB3093-040-Q1-K1-D1
tgtgcctgaagtttcattctttcaacaacagcaagttcagaaatcattggagcgtattctgtgcacatgggcaattcgacatcctgcaagtggatatgttcaggggataaatgatcttgttacgccatttttagttgttttcctatcagaatacttggaagggggcatagataattggtcaatgtctgatttatcttcagatgaaatctctaatgtagaggctgactgctattggtgcttgtcaaagttgcttgacagtatgcaagaccattatacatttgctcaaccaggaattcaaaggcttgtttttaagttgaaggaattggtcaggaggattgacggtaacttttttctcaggcctgttgtttttcttcaagtatatctataattgcatgaatttaaagaccccacttttgaatatggatttggatatgcattaattttaccgaacct

SEQ ID NO: 41846 - DNA, 288 bp, Glycine max
  Clone ID: LIB3093-040-Q1-K1-D10
cgcagacgaacattccgctcccatcgcatctgtaacaatggaagttcgccatgcaactcttgggcgacgaacgttggaggaaattcggcaaaagagggccgcggagagattgagtaaaacctcttcgggaccagatctcacgcaggttcccagcacctccgagattgcgggaatgagcaagtccgagagcgcaaataagctctctgagacagatcttagtgctctattgtctcaattgaaaggactgcaaaagaagaacacggagttggaagaagaaaacacaaaaat

SEQ ID NO: 41847 - DNA, 384 bp, Glycine max
  Clone ID: LIB3093-040-Q1-K1-D12
cccacgcgtccgccggcgccatatcgcgtatctttctctgttctattcctacgatggagttttggggtgccgaggttaaggttggtgagtctgttaaggtagatccagccgaattcgaggcatgcatacacctttctcaggctgctcttggtgaggcaaagaaagacaaatcaaatgaaccagttgttctctacttgaaagttggtcaacagaaatttgtcttgggaaccctttccagggagaaaattcctcaaatacctctggaattggttttggaaaaggagtttgagctttcccacaactcaaagaatgccagtgttcatttctgtggatacaaagcattttatgatgctggcgatgatagcgaggaagatgaatttactg

SEQ ID NO: 41848 - DNA, 424 bp, Glycine max
  Clone ID: LIB3093-040-Q1-K1-D2
gccacgcgtacgggcatttatgacttgtataatggcttgactaacctattcacaaccctggctgatgcatcgtcttacgcatcagcgaaagacataactgcgcccgccaatgcgtacaccaactggcgtacgaacttgctggcattgaaccatgttttgaacaacaacaatataaactaccctgtaagaagcattggcgggagaatttgcaagagatcaatcagctcgataacaatctctctagctatggcaaacgccaagaacaactctgacagcacaagcaatatcacaagcgacaattctggttccagatagaattcgttacacttaccgtctcttctaccgcgtattaatgcgcgaaatagagtcggttcatgttccggctcaggtccatcgtgtaatttgttgcggaatagatcttcct

SEQ ID NO: 41849 - DNA, 453 bp, Glycine max
  unsure (1)..(453): unsure at all n locations
  Clone ID: LIB3093-040-Q1-K1-D3
cagatcaactatatttcattaaaagaaaattcggttattattaagagagttcattacttgttcctaaaattaatgggaatttggtatggctatagttgatttgttctgcttcctcttgttttgtcaccttgtactcattctctccgctggttatggaaatgggcaccaagattgtccacactcctttacttgtggtaatcttggaactttccattaccctttcaccaaggcagaaaaacctgactgtggcttgctagccatacatgattgtgataatcctcatcaacacagaaaaatgatccagctcgagctaaatggaaaaggcatagtgcttataggcgtggctcagcagaatgcgatttcaattttggatgaagattttcacaagcgtttacaacanaacccttgtggcactttgaagaataattatagtcttccttcccctttttcttc

SEQ ID NO: 41850 - DNA, 452 bp, Glycine max
  unsure (1)..(452): unsure at all n locations
  Clone ID: LIB3093-040-Q1-K1-D4
agcaattcgaattcccaatccaaaaccctaataccttcaaagaacctagtagtgaatcagtgatggcacctaaggcagagaagaagccagcggagaagaagccggtggaggagaagaagtcgacggtgggagacaaggctccggcggagaagaagccgaaggccggaaagaagcttccgaaggagggaggagccggcggagaaggggggaagaagaaaaagaggaacaagaagagcgtggagacatacaagatatacatattcaaggttctgaagcaggtccaccctgacattggtatctcaagcaaggccatgggaatcatgaatagcttcatcaacgacatcttcgagaagcttgctcaggaatcttccagacttgcccgctacaacaagaagcccaccatcacttcaagggagatccagaccgcggtcaggcttgtgctgnccgtgaac

SEQ ID NO: 41851 - DNA, 411 bp, Glycine max
  unsure (1)..(411): unsure at all n locations
  Clone ID: LIB3093-040-Q1-K1-D5
cccacgcgcacgctcgngcaatcaccagcgagnaagcgagacgggcccaaaaccaaaacggtgccgannagcccaaggatctctctatggattgcaagaagcgagttcgggatgactcggacgagtcagttctggaatcgcccgaggcgaatcgactgacggacgatttactctagttcttcgacgacgccgacgacgcaccgttctctcaggaccttgactccgtcatgaagagcctgcaggaggagatttccggcgtggtctcagattccggcgagtctcaagcgcacatcgggtaccttctggaggcctccgactactagctatgtcttacacccgtcggaaactaatctgcgccagaagagaagaacgtggagaccgagtaggtccgagtcgcgtctgactcgtacg

SEQ ID NO: 41852 - DNA, 440 bp, Glycine max
  Clone ID: LIB3093-040-Q1-K1-D6
gaaagagagaaaaagaaaaatcaaaggacggtggtgagtgctgcgtctgcttcatcatcaggagagaagaatggcggctactgtgtcttctgcgtggtcaaagcccggcgcgtgggctctcgattccgaggaacacgaagccgaactccttcaacagaacaacgacaagccactcgccgacttcccctccctcgccgccgccgctgccaagcccaagaagaagaaggcccagacctactccctcgccgaattcaccgccaaacccgacacctcctttgccgaccaagatcccgtcgtcctccccaccggcccccgccagcgcaccgccgaggagctcgaccgcacccgcctcggtggcggcttccgcaactacggcgaccgccccaacaggaacaactccggcggcggcgacgagtctttcaattcccgctggggttcat

SEQ ID NO: 41853 - DNA, 441 bp, Glycine max
  Clone ID: LIB3093-040-Q1-K1-D7
cagggatgctttcccctgcatgtttgatggaagtcggacgcctccgccagttttagatcattccaatagaacaagtttaacttcattggatggagattatgcaacaaagccagttcctgtaacttcacgagcagaaaggagcccaagagataacacaagaatgatcacatctttaccagtatctccctgttcaagtccattgcgacagtacgagccagcgcacaagagctgtttcctttctcctcctcacccaacttacactttgatggggcagaatacactcccctcatatccagtgagatcaaatgccacgttcactcttgacccttttcaggaaacttctttttacaaagcccacacgcccggtggatccccaagaagactcatttgagttgccgattgtaaatacctctaaaatcttttggtttcctcggcatgcct

SEQ ID NO: 41854 - DNA, 402 bp, Glycine max
  Clone ID: LIB3093-040-Q1-K1-D8
agaaatggaagcaaaaatcgcaaaggcattggatagggttgcgcgcaatctgaagcgcaagcgagcgacccgatatgctgcacatttaagtggagcttctcaaccaatgttagggcattggtcatctcttacgtcacaaacaagcagggctgtcaaacgcatgagattgggtggatatagaaacaggctgacaaatgctggtcctcatattggacggtccttaactaggcgttttttgaattataaaaagagtgggagactggagcgtttgatgttctatgagaattgggaatggttggactttacaaaggatgtagttgacttggttaaaaaggatctttgaatttaaaaggcagcttgtgagatagaatcaaaaggggatcatcttttgtttgatatttt

SEQ ID NO: 41855 - DNA, 276 bp, Glycine max
  Clone ID: LIB3093-040-Q1-K1-D9
tgggcttggagatggactacttttggaagccccggacaaggattttgaatttattagaaacacttctttcaatttgttgcaaggctgcagaatgagaaatacaaagacagagtatgtctcatgtccatcctgtggcagaacattgtttgatcttcaagaagtaagtgcacaaattcgggagaagacatcacacctccctggtgtttcgattgcaatcatgggatgcattgtaaatggaccaggggagatggctgatgcagactttgggtatgtggg

SEQ ID NO: 41856 - DNA, 446 bp, Glycine max
  Clone ID: LIB3093-040-Q1-K1-E1
aaaaagcgtaacgagcgagagaggaaggaagagaagagagatagggagagcgagcgtgagaggaatatcttcgatttaggggtttcaatatcgtattcatcaaggcggcgagtgtgagatttttagagagagagaggtgagaacgctgagtgctctgctgagagattccattgccccaacagaaggaagaggacgagaaggcggatatatatatatatatatttttctttctgcttatttatcctcagagtggtggatagggattattccctctgcagcgttccgttcctttacactgtgatttgttgacgtttctgatggagcatcgaaagcttgtggttttggggattccgtgggatgccgatactgagggattaagggaatatatgagcaagttttgtgagctggaagattgcattgtcatgaaagagcggtcaactggacgg

SEQ ID NO: 41857 - DNA, 270 bp, Glycine max
  Clone ID: LIB3093-040-Q1-K1-E10
accaagttcatctcctgaagaactccagtcagacaatgctggattggtggaaaccgcatctgatggcaatgcaactgtggttaataaactatgtgacagtaggatagatacaattgatggccaatcaaatcaactggagattgcaagccagacaagtgaagctgctgatttttcatatgcagatgatgatgatagtgaccaaagttggatggttaggtctttgtctgaatcaagtgtagcctgtataactggtgacttttgcgatgcaaa

SEQ ID NO: 41858 - DNA, 397 bp, Glycine max
  Clone ID: LIB3093-040-Q1-K1-E11
gccatttgggagttaggttctgcacgctctgcttccagcgagtgttctttcttcgtttcaacagcttaatttgcacacgctgcttcttcagcttgagaaatggcacaagaaacctttctattcacatctgaatctgtaaacgagggtcaccccgacaagctgtgcgaccagatctctgatgcagtgctcgatgcgtgccttgaacaggaccctgacagcaaggttgcctgtgagacatgcaccaagaccaacatggtcatggtctttggagagatcacaaccaaggccaacgtagactatgagaagattgtccgtgacacatgccgcgaaattggattcatctctgatgatgttggtcttgaagctgacaaatgccaggtgttggtcaacatttagc

SEQ ID NO: 41859 - DNA, 413 bp, Glycine max
  Clone ID: LIB3093-040-Q1-K1-E12
ctcgacaacttggtgctcaccgacgccgatggccagggggtactttacatgaacagggagcagctcgaggagctgagggtgaagccgctctcggcctcgtcggcgtcgaagaggactctcgttccggcgcttaacatgaggctgtggtacgcgccgcacttggaattaccaactggggttgtgttgaagggtgccactcttgttgctattaggcccagcgagctatcccccaatactgcgaagaaggaggcgtcggatttgtcgtcggtttcgacggcgtttgaggagccgtataggacggctgctacaatgcttgtcaagaggaggacttattgccttgagatgaactcattctgatgcgtttgtgaggtatatacaaattgaaccctcattgtttgaatgtatgccatttt

SEQ ID NO: 41860 - DNA, 422 bp, Glycine max
  unsure (1)..(422): unsure at all n locations
  Clone ID: LIB3093-040-Q1-K1-E2
gaaggatggaaaatgaagcctcgtgtcggtggtgctcttgcagtgcacgcaccctcgtgtcagtattcgctgcaattcttctcctattccaaccaaattgcatcgctaagcaacagcaccaaccatgccctccttcatcctgcggcataattggcaacatatcgttcccatttcgcctcaaagacgacccaagccactgcggcgacacaaggtaccagttagattgcgtgaataacgcgacgctgttaaccttgttctcgggaaaataccatgtacaagatatcgattacaagagatacaaaatcaaggttagtgacgcgggtgcagtggaggactcaaattgtttcatccctcgcaatttcttatgggatggtaatttcaggcccacgggcctggtcggcccagatgatnttggatcacag

SEQ ID NO: 41861 - DNA, 450 bp, Glycine max
  Clone ID: LIB3093-040-Q1-K1-E3
aagaaaaaaaaaactcaaacaccttcaagaacttgtatctttctttgttagtatttgttactgcaattttacattcttggcatctctacatatttcattagtcatggcacctcaagcagtttccttcaagtccttcgccgttgctcttattgtggcgcttttcttctccgcctccgctctggacttagtttcggggcagtcgccggtgccggcgccggcgccggcaccagatgccggagcagctggatccgtgtcgagctcggtcgccatgattggagcttccgttgtgatttcattgctcgccatcttcaagcactgaagaataatctgatgatggatcgattttgtgtgaagattattgattcgttctgcacactcagatttattggtgctgctttataatacgttacgagtgatgattattatgtacgtataaaagagagagagaga

SEQ ID NO: 41862 - DNA, 360 bp, Glycine max
  Clone ID: LIB3093-040-Q1-K1-E4
gtctgtctccgatggcttcctcataccgtgaccgcacgtcggagttccggttattattggagactctgaagaagatcggaagtccggtgcaacccgagaatgctccttcgacctctcatggcgagtcgtattcgagatccgaattcaaccgaaaggcctcgcgtatcgggttggggatccacgagacctcgcagaagatcgcgaggctcacgcagctggcgaggaaatcgtccatgttcaacgatcccgcagtggagattcaggagctgactgttctgatcaagaacgagatcactgcgctcaactcggctttctttgatttgaaaccgttcataacactgatatggctgacggcggtta

SEQ ID NO: 41863 - DNA, 352 bp, Glycine max
  Clone ID: LIB3093-040-Q1-K1-E5
aaatatcacaacattaaaaaacacgatgactgaaccacatcagagcgacacttctttcagggccggggtataatatctgacttgactagaaaccttctactctttaatacatactgctcagacctagatctgatggagcagcacatgatgttcaacatcggtttacacatctacacaggtcatctccaaataatggagcctaataacgagactgaatgccagaccactgaactccccattgatagcattaataattgtggcatctttcgaagagcatctaccattaacattttttacaaagtgaacaaggacatgctcttgaatcaagatcaggagaaatttttagtatcat

SEQ ID NO: 41864 - DNA, 302 bp, Glycine max
  Clone ID: LIB3093-040-Q1-K1-E6
tgacaacgaatggggttacagttcccgtgtgattgatttgattgtccacattgcatccgtggcttaaagaattgagtctgagcttggatatcatcgctacaccgttccaaatttttatcttaatcgagtttattttagtgtgaattcggaataaacactttgtgttgctgtgagagatatcattgaaaaacagtgcaatatgttgagttggtagacggccttataggtttttcctctcgtaagggacgattgactattctgtttcgttatcataatcatctagtataagcaacattttgttt

SEQ ID NO: 41865 - DNA, 406 bp, Glycine max
  Clone ID: LIB3093-040-Q1-K1-E7
cccacgcgtccggggtaagcaaatgaccaagatacaaaaacatgaaactggcaaggatgttgtcgcaggtgctacagatggagttggtgtagagcttattgatcatatggtttgtcagacagctaaagcagatttaaaaattcagtcaaatggacaaatttcttctaatcttgattcaaaattttgtgatgttggaagcattcaagattcacccaatccatcattaccggcaaatggtgaagacaacattagaactgtgaataattcaaatacagcatctgatggatcagaacataatggaataagccttgaccctgtaattggtgagaaggaaaatgatgcttccttacctcataatattgatgtgcctcagaatgagggtgctgtatgtgaagatacagaatgc

SEQ ID NO: 41866 - DNA, 441 bp, Glycine max
  Clone ID: LIB3093-040-Q1-K1-E8
cccacgcgtccgcccacgcgtccgcccacgcgtccgctctcttgtccaaaattagggaaacgacaaggacgcaaaatgacacaatagcccttcttccctgtttccagcttttctccttctctctctccatcttcttcttcttcttcactcagtcagatccaactcctcagataacacaagaccaaacccgctttttctgcatttctagactagacgttctaccggagaagcgaccttagaaattcattatggtggcaacagctgctacttcatcatttttccctgttacttcaccctcgccggactctggtggagcaggcagcaaacttggtggtgggcctgcaaaccttggaggactaaaatccaaatctgcgtcttctggtggcttgaaggcaaaggcgcaagccccttcgaaaattaatggaaccacagttgttacat

SEQ ID NO: 41867 - DNA, 436 bp, Glycine max
  Clone ID: LIB3093-040-Q1-K1-E9
cccacgcgtccggtttcttttcgtgaaacaaaagaaaacaaaagtttaggttttgtgatgtcgggcatggagaggcttcagaggatgttcgcgggtgcaggtggagcgctgggccatcccccaccggattcccccaccctcgattcctccgagcaggtctacatctcctccctcgcccttctcaaaatgctcaaacacggaagagctggggtacccatggaagtgatgggtctgatgttgggggagttcgtggatgagtacaccgttcgcgttgtggatgtgtttgcgatgcctcagagtgggaccggtgttagcgttgaagctgttgatcatgtttttcagactaatatgcttgatatgttgaagcaaactggaaggccggaaatggttgtggggtggtatcactcgcattctggatttgggtgttggctttctg

SEQ ID NO: 41868 - DNA, 426 bp, Glycine max
  unsure (1)..(426): unsure at all n locations
  Clone ID: LIB3093-040-Q1-K1-F1
gaccacgcgtnctgcgttgtgggccccgccgagcagacaggcaaacacgccaccgatctttccggcggctccaggtcccccgagaaagtcgaagacaactacaaacaggactggtccttcttacgccgcccaaaggagatcgagaccgccgacaaagtccccgacttcgtcgacaccttctacaatctagtcacagacatctacgagtgggggtggggccagtccttccacttntccccctacatccccggcaagtcccaccgcgacgccactcgcctccacgaggagatggccgtcgatctcatcgaggccaagcccggcaacagaatcctggatgtgggctgtggcgtgtgcagtcccatgcgggccataacggcccactcgcgggccaacgtagtcggcatcaccatcaacgagtaccaggtc

SEQ ID NO: 41869 - DNA, 358 bp, Glycine max
  Clone ID: LIB3093-040-Q1-K1-F10
ctttcaattgcttaccagaacaagcatggaagctacgggggaaatagcatggcattctctgcatgtggttcggaatatggaagcaaattctatgctatttatggcataacaaccaccttgggtcttcataatccctatgcaaatccaatctagaagattaaccatgtccctatgtaagtaccctgaggctgaaacagtacccctttatatacccttcaaatctattgacatgttcacccttggaggaaagcatttttgttcttattttgctccatctctgtatatcatcacaacttccaaaggcttacttactctaatatatctctgattcaagtggttctgtgagttttcttggttt

SEQ ID NO: 41870 - DNA, 450 bp, Glycine max
  unsure (1)..(450): unsure at all n locations
  Clone ID: LIB3093-040-Q1-K1-F11
ggccattcaaaccttcaacataaaatggaagaatccaagggttttgttggtggtgagtctcaagaaccacatccagaaatgccctctatttcttttcaaattcctatgccagggaggaatcgatctggtggtctctacccttggggatggaggcaaagagcaataataccacagcacaccgtgcgaaactctaacggggcaagtgagaacacaaatttgaaggtgtaagtcactcatggagtaataatactatgtatgaaaatgtgaaacgtttgaacagttgttgcggttgttatgttgtcttcttcattatcgtatattatcgtgcatgggtgtacgtagctcagtacctgctttgaggataaaagctttactaggcttgaatatgaatatcttcagcagnttgtattgataaatgactcatatatggaatggaagtgctacaacttt

SEQ ID NO: 41871 - DNA, 447 bp, Glycine max
  Clone ID: LIB3093-040-Q1-K1-F12
cccacgcgtccggtaaaaaaaaaaaacaagtgtagaaccgaatcaatggaatcgtactttgttatttccgttagtttcgatttgcttcctcttcttcttcctctgcgcttcacatcctcagacctcaaccatcagcaccaccataccaacaacatcatcgcggcgccatcaccaccgtaccaacaacatcatcgcgcgatccaagcaacactcacaccaacagatctatgcgccacaacaccaccgcgcaacggagaagtcgcgcgcgcgcaggaagcctcaaagattgattcgcgcacacagatggaggtgcaatgatggtgtgacggcggcgcggtggtggctggtccaaggcggcgacgcgtgacgttattcgagaagaaaggggtcgcgcacgcagatctggagtctggagcgaaggacatgggcgacactgatttcttgggc

SEQ ID NO: 41872 - DNA, 441 bp, Glycine max
  Clone ID: LIB3093-040-Q1-K1-F2
cacaccatcacttccttcccgctttccacgaaccttcttcttcttctctctgtcacattttgaatctcttattttcatgcctcacaatcattcacctcttcttcacgctctctgcttccttactcctcttccggagtaggctgtgagattttgaggttcatgaagaagctatttactgtcctgtgacggttgcgcgacactgatttgttgaattctaccttgcttttgaactaggctacaatcatgaattttcagcaagacaaatttgttagatttcgggattggagttcagacaggggctccgagaccaactctcctgcaattcacgtgacacgctcgggaagagttaagaatacactaaattcagtttccgagaagtttcaaaggggtttggaatctagttcggaggggataaagagatttagaaaatcattcaagtct

SEQ ID NO: 41873 - DNA, 315 bp, Glycine max
  Clone ID: LIB3093-040-Q1-K1-F4
cttcaacatttgtcataccgttgtgtaagctgcataaatgtaacaccattgccctagtgccccatgacttttgcgatgcgtattttagttattttgtggccttatggatgactgtagtctcgtatttcatctaaagatttggttgtactttctacctaggattaggaaattaaatgagtcttccttttagtttagattaggacatctgattttacttagtgcagctacgtagattgtagactttctgtgacacatttgtgtttctagtcatttagatttcacattccccatctaagagtgctctttttatgtttg

SEQ ID NO: 41874 - DNA, 444 bp, Glycine max
  Clone ID: LIB3093-040-Q1-K1-F5
aaacgccgcactctcttttcttcctcagaaacacatcctaatggcagagcgcggaggtggcgatcgtggcggcgaccgtggcggtttcggacgtggattcggcgggcgaggacgcggaggtgacaggggccgaggccggcgccgaggcccccgccgcgaggaagaggagaagtgggtcccagtgaccaaactgggccgcctggtgaaggagggaagaatccgaagccttgaacagatctacctccactcgctcccgatcaaggagcaccagatcatcgacacgctcgtgggtcccaccctcaaggacgaggtgatgaagatcacgccggtccagaagcagacccgggccgggcagaggacccggttcaaggccttcgtcgtcgtcggagacaacaacggccacgtcgggctgggcgtgaagtgcagcaaggaagtggcgacagc

SEQ ID NO: 41875 - DNA, 440 bp, Glycine max
  Clone ID: LIB3093-040-Q1-K1-F6
cccacgcgtccgcgctattctcttccatttccatttctcaattgtctttctgtattccattatcgatgttgcaattttcattcaaaattacactctcattaactaattttagaacatgtatgcaagttgttttcagctctttctgtgttgtatgctatggcatcttaattggttcgattgaataatctgttaggtctaccctagcaaaacaaaccttatactttcttatttccttggtgctttttgtagctttcagataggtttctgtgtgttaatcgaatagacctgaattatttattgtatcacaggttgtgatggcagcagcaccagcagctaccttcgctattggaaccaccggttccctcggccaaagaggaagctcgcttcctcaatcaaagtcctttgggttgaaattcaactctctgaatcatttgaagagc

SEQ ID NO: 41876 - DNA, 436 bp, Glycine max
  Clone ID: LIB3093-040-Q1-K1-F7
cacaaacaaactgtgctcttgagagttgagacataagaaaagaccatttgggaaattcaacgatctcctgaaatcaggcagcgaaataagtgcctgatgttgagagaatctgcacccttccaataatcaaagggcttatttagagccacatatcatccttgaaaatttcccagccaatttggcgccaaatgttggacctttctacatgactttgcaaccacgttgaaggaagccacaattgtctcatagtttcatcctctggaagggtgagtgagagggtgctgagtctgaaacctagttcagtgttctgcttttgaaactgcaaaaagctaaacaagggcctcctgatttggaccgtgatatatcagagcatgaaaaaggcctttctatcactacccaaccaaagcagtctctgaattatcatcatcatcaatgc

SEQ ID NO: 41877 - DNA, 440 bp, Glycine max
  Clone ID: LIB3093-040-Q1-K1-F8
agagtttctcaccaaacacacacttctcttctcttctcttctcgtcattttctgtggttctgactttcttttctctaatcttctaatctcttattttcttcccccctctgttactccccgcttctctgaatccctttctgttaatcatctgtctttcaactcgtgattttttgggtttgcctcaccaaaaagattcaaactttgaaaatttttctcgaaagccaggtgttttcagaatcgagatccagcttttttttttgtttgtttttaaaaaattattattttctttcgttcagccgcgagggttgtttttgatccctcaaaagctctctttctttttttctttcttggatttaaggggttgtctattataaacctctcccatcctttcttgctgtaatatttaaaaaccacaggttgatttttttaatctaagatct

SEQ ID NO: 41878 - DNA, 364 bp, Glycine max
  Clone ID: LIB3093-040-Q1-K1-F9
cccacgcgtccgcccacgcgtccgcccacgcgtccgcccacgcgttcgcctaaacctaaacatggactgaatttcccaaatccccttcccaattttcaccaaaacctaatactcccaaaccaatcttcgatcatggccgccgaatcacaacctcaactaatcgtacgttctatccattttatttgctttccatccttattattctattttccatgtgttggtttgaattttcagaatgagactattctatttccgacatgtttgttgttatctacggttttgctttgattggttttttttggattgagagtattctattgttcaggttttgttaattaatctagggtttgaatttgattgaaat

SEQ ID NO: 41879 - DNA, 442 bp, Glycine max
  Clone ID: LIB3093-040-Q1-K1-G1
gtaattttgacgtgattctgttcgcctacaattaacttgaaatttgtgattaattacccttggtgtgtctttttttttgatttgtcacctttctctctcttcaggttaaggactgaatcatgtgcatctggctccaaggcatgtcgtgagaaattgcgaagggataaacttaatgagaggtttctggaattgagttcgatcttggagcctggtagacaccccaaaacagacaaagttgcattattaagcgatgcggctcgagtggtaatccaattgagaaatgaagccgagaggctgaaggaaatgaatgatgaattacacgcaaaagttaaagaattgaagggtgagaagaatgagctctctgatgagaacaataagctgaacgaagagaacgaaaagttggagaagcatgtgaaactgacaaatatacaacccagctttc

SEQ ID NO: 41880 - DNA, 395 bp, Glycine max
  unsure (1)..(395): unsure at all n locations
  Clone ID: LIB3093-040-Q1-K1-G10
atattttatctttattccactgaatagaacatgagcatataaattgataccctttatattatgtatctttatattatctataaagggtaaagatatccgatgtgaatctatttgtttagttttctatcggtatgtatataggtgaataatccaacatgcctttttgtgaagtaaaaaaactaccctcgatccatgcctcaaaagggttgataataagtaaaaaaaatcaatgaattcatgataaaacccttctgcgtttttttattataaatttttttgtcaataaaaggatcaaggggttgggggatcaaatggtaaagttcttttgttggtaaattggaggattagaaacatgactattgctttccaattaactgnttttgcattaattgcta

SEQ ID NO: 41881 - DNA, 380 bp, Glycine max
  Clone ID: LIB3093-040-Q1-K1-G11
caagaaaggaccaaccaaaaccaagtgctttcttggagcttggtagagagagaaagtcccactttctctctcttctcttggttctttctgtgtgtgttgtgtgcgtgcgtgcgtctgagggtacatgcaaaacagtgagtttgagatagagaaagaaggagttcaagattgttgttcaattttgcaaaaactgcccatcaagtacttttgttgtttttttttcgattttgcttcttatccaacccgttcttgatttggaaggtgattccgggaaggaattgttagggtgctgctgaggctgttcatcacctatctttgtggtgttgaatttgccacttctgataaagacagaagaaagcaccggattgaaggttgagttg

SEQ ID NO: 41882 - DNA, 378 bp, Glycine max
  Clone ID: LIB3093-040-Q1-K1-G12
cccacgcgtccgcccacgcgtccggaacaacaacaacaaccgagttccagcacagtatgattggcacaataatagaaggttactcactcatcattgccctaaccggagtttcaatcaggtcgcgagagcgaagcaacagtgtggttcggattggggaaggccaaccaagcctaataactatttggttcagcagcaacaggttaaggttcagagtagagcgcgtgagtttgggcacgagagtgtgaatgcgaaatgcactcgtccatctgcgtggccccctttgcaagttcagcagcaaaacaaccgggtacagtttggcggatccgggtctagggttggtggatcttctgtgaaaagggggtgtggtggaactggggt

SEQ ID NO: 41883 - DNA, 455 bp, Glycine max
  Clone ID: LIB3093-040-Q1-K1-G2
cgacgcagaaggttcatccaatctccgaatcctttaatcgcattgcaaccatgtcgaggagaaaggtcagagagccaaaggaggaaaacgtgactcttggcccagctgttagagatggcgaacatgtctttggcgtcgctcgcatatttgcctcctttaatgataccttcattcatgtcactgatctgtctgggagggaaacgcttgtccgcatcactggtggaatgaaggttaaggctgacagagatgaatcatctccttatgctgctatgcttgcagctcaagatgttgctgccagatgcaaggaacttggcattactgctcttcatatcaagctccgtgccacgggtgggaacaagacaaaaactccgggtcctggtgctcaatcagctcttcgtgcccttgctcgttcaggaatgaaaattggtcgtatagaggatgtgactcccattcct

SEQ ID NO: 41884 - DNA, 462 bp, Glycine max
  unsure (1)..(462): unsure at all n locations
  Clone ID: LIB3093-040-Q1-K1-G4
cccacgcgtccgcccacgcgtccgcgacaacgtatcacaagctcccaatatagcaagcaggggacatgatttcttccgtgtcctttccagcgtctcttcccgccgttaacttctccggcaacgccatggcttcgccgtcgtgccgcgtcaaatcccggccaatagtcgccttcgccaccgccactgccaccgctgaagctcgctcttcctggacggagcaaccgagaccttcctatctgaactcctcttgctcttcgctttacgatatcctcggcatccccgctggcgcctctaaccaagaaatcaaggccgcgtaccggcgactagccagagtctgccaccccgacgtggcggccatcgaccggaaaaattcgtccgctgacgaattcatgaagatccacgccgcgtactctactctntctgatcccgacaagcgcgctaactacgatcggagcctattcc

SEQ ID NO: 41885 - DNA, 438 bp, Glycine max
  Clone ID: LIB3093-040-Q1-K1-G5
cccacgcgtccgcccacgcgtacgcgcggattgggaaaggcagggctggttaaatggattcggtttggaactttaattgccaatgtatcagctgcttgtattatggctgcactttccagcgtgaagaatgcagtgaacaccagggattgtgatactgttgtagcaggaatacaatttggtctaatggggtgtttgagtacggtctctacattcgctgcagagtttaatgcgatgagagaaagcagtcgtcctatgagagcttatgcatatgctgccattacagttcttgtgtcattcgctttaggaatcttgatatactgtattcccgcttggacaaaggggtttgacattgacacatagcaattgagtaaggcaatcatgttttggttgaaacattgcagcttcacgacaacctccctcctgattttaaagataacg

SEQ ID NO: 41886 - DNA, 254 bp, Glycine max
  Clone ID: LIB3093-040-Q1-K1-G6
cccacgcgtccgaattaagattacgtgaatttttaggtttttagggggtgaaaaaatggggggaggttgtgttgtatcatccccttgccttgatattaattgtgataattttaggtttggaatatgcgttgtggtttgagcatctgttactgttatggttgggtttttgacatctgataatgaatctgtgtactggaaggattactgggtcttggtcatccagattgaaatacctgaaaatccttgctacttat

SEQ ID NO: 41887 - DNA, 443 bp, Glycine max
  Clone ID: LIB3093-040-Q1-K1-G7
ctctcacacacaccactttatatacgcacacgagagtcggaagcactactctcttcgccgcttgctctctctctctcgctctttcagctttgactttggtggaaactaaagactagtcaaaatggtgaagttcacagctgaagagctgcgtcgcattatggactataagcataatatccgtaatatgtctgtcattgctcatgttgatcacggaaaatcaaccctgactgattctcttgtggctgctgctggtattattgctcaagaagttgcaggtgatgtccgtatgactgatacccgtgcagatgaagctgagcgtggtattacaatcaagtctacgggtatctcactctactatgaaatgactgatgaagctctcaagagttttaagggagagcgcaatgggaatgagtatcttattaatctcattgactcccctgggc

SEQ ID NO: 41888 - DNA, 427 bp, Glycine max
  Clone ID: LIB3093-040-Q1-K1-G8
gtttttgtttctggtcagttttgtgatcacatcagctaagtggcggcgaatttttggttgggtgcacaaagagtagccacttgggtgatttagactccttgctccgctacttcaccaagttaaataaactctgcatcccttaaatagtgtgttaccttacccgtatccatcacaggaagaggctggatagtttctctttctctctccatggatcttcaggatttccttatccgtgctcgggtcttgaggctttacagacaagcattgagaattgctggtcgagccccttcttccgctaaagctgaactgaggcagacaattaggcaagagatggaaaataatagaaactgcattgacaagcaaaggatccgtttcttgattagtgagggattggataaactgaaacgactggatgaaatgctagata

SEQ ID NO: 41889 - DNA, 322 bp, Glycine max
  Clone ID: LIB3093-040-Q1-K1-G9
gttttgagagggtaatatttgagaattgagggaaccttgttagattttagaagggacattttgtgggcaaaggtggttaataatgttgataaggattgaggtaagttaatccatccaaagggtgagggagttaacaggaagagacaggacaaaggctgggaacaggcagggcacgaatggagctatcaacagaaaatggtaaagtgagaatgaaaggagagagagagagagagatctgttgtggctacgctcatgcactgcctcttccctggctctgtctctttcctattccaactccatttccctctctaattatttattt

SEQ ID NO: 41890 - DNA, 247 bp, Glycine max
  Clone ID: LIB3093-040-Q1-K1-H1
ctctctcattctctctctgattcgagcgacatgcatcgttgaattcatcccatcgcggagcgtgcaaatttgtaggggagcaactattgtgctatcgctatatgctgatatcattctcttttgtgcttttattccgaaaggacagttaccaggtacttccaccgtgcccgcatacctttggacatcacacaatgaacaggcctctgataatggatatgaaggaatctgtaaattaccaagtcatttc

SEQ ID NO: 41891 - DNA, 328 bp, Glycine max
  Clone ID: LIB3093-040-Q1-K1-H10
ggagaggagaggagaaggcgatgcaacccacatccggcggcggtttgctggcaaggttccgtgcagctccggcgagctggttagaatcagttctgttgaaggaagaggaagaagaagaagaccccttaagcttcactcaactgctttccactatcgatgatgctccctctcattctcaacaccaactctatggtgccgctctctcaaacaaggataaaacacctgaaatcttcatgttagaagattccgttccttgcagagtgagggctaagcgtggctgtgctactcatcccaggagtattgctgaaagggttcgcaggactcgtat

SEQ ID NO: 41892 - DNA, 375 bp, Glycine max
  Clone ID: LIB3093-040-Q1-K1-H11
atactccttattcttctcctgcttctgcacctcactgctataccttctttcaagcaggagaaagtctctcactcctttctctttctctccacgccgccatcaccacacaaccatgccttcgctctctctctctgaccctgacacccccaaacctattgccaagaagaaaaccaaaacccagtccctcaccgatcccgacctcgatggggtttcggggaagaagacgaagaagcgcaaggcttcagatttagaacaagaagccatgccccccgccgcttacaacaacgatggggacgacgagaccagcttcgacctcgtccaacccgaacctgctttcaaagaagacgacaacaagaataagaagaaaaagaagaa

SEQ ID NO: 41893 - DNA, 436 bp, Glycine max
  unsure (1)..(436): unsure at all n locations
  Clone ID: LIB3093-040-Q1-K1-H12
cttcttatcagcaactgcaccagtgaggaacgcttccaaaagctctccagatacaggaataagaagacaaagaggaattttgggaggaaaatcaagtatgcttgcaggaaggcacttgctgacagtcagccaagaatccgtggaagatttgcaaggactgaagaatctgatgtcaagagggaatgaatgacttaaaactgatttagtaggaagaaaatagagttgagtagctatatctgatcaagctatatggaaaaactcagcagtaatatgtgattagaacttatgtggngagtctctgtttgtttgagcagatatttgctgaataaaccaggcctcaaacttcttaagctagttcatctcttatctattggattaacgtctctatagacggaaataaccttccagatatgtaaatagttttgttgaataatgg

SEQ ID NO: 41894 - DNA, 431 bp, Glycine max
  Clone ID: LIB3093-040-Q1-K1-H2
tagaggcacgcgttcgaagagctgagaagacatccgaaagggagaatgaattgaaacaacaattagagcagagcatgaaagaagctgctgatagggatcaaggcgcaaacttgtatgtaaaaaatttagatgatagcattggtgatgaaaaacttaaggagctgttctccccttttaggtaccattacctcttgcaaggttatgagagacccaaatggcttaagtcgtggatcgggttttgttgcattctcgactcccgaggaggcatctagagcactcctggagatgaatggcaaaatggtggtaagcaaacctctgtatgtgactctagcccaaaggaaagaagataggagagctagactgcaggctcagtttgctcacatgcgacctgttggaatgccaccatctgttggtcctcgtgtgccaatgta

SEQ ID NO: 41895 - DNA, 444 bp, Glycine max
  Clone ID: LIB3093-040-Q1-K1-H3
ggaaaaatggcagcctctgccggcggccagataactctctcgtcaaccgtgcagttacatggagtggcctgtagtaggaattggaagctagtgaagttctgtaatggggaagtcatgggacgtaagcttgtgttaaaaagtgcttatggtggcagcactaaggatgttaggcaccaccaacaacaacaacatatatgcatgtctctcacagctgacgtttctactgaatccaagttgagagacctagatatggaaagaaggaacccaaggacagtgttggcagttatactaggtggaggagctggaacccgtctcttccctctcactaagcgacgagccaaacctgctgttcctattggaggtgcatacaggctcattgatgtaccaatgagtaactgcatcaacagtggtatcaacaaggtgtacatcctcactcagtttaac

SEQ ID NO: 41896 - DNA, 460 bp, Glycine max
  unsure (1)..(460): unsure at all n locations
  Clone ID: LIB3093-040-Q1-K1-H4
cgccccaacactcaactcggctcgtcgctattgttgttgttcttcttctccatatcaaacagagtatagataaaatatcattgcagcttcattttcatcctccaattaattagcaatggggcacacatcccttttcactccctcttcctctcttaggttcaactctcttcttgtttcctccaccccctcttcttcttcacgctccaacagcgtttctttccccgccctctccaggaacataaggaaatcggtagaagatagaaagattaataaaaattctgctgtgaaagcagtgtatggtgatgaattttggacacctgcgaggagttcacctcaggatatttggtccataaggagtgatttgcaagtcccatcttccccttatttccctacctatgcacaaggacaagggccacccnccatggttgcggagcgtttccagagtgttataagtcagctt

SEQ ID NO: 41897 - DNA, 141 bp, Glycine max
  Clone ID: LIB3093-040-Q1-K1-H5
cccacgcgtccgcccacgcgtccgaaacagaaactcataggcggggcacattctcaacccagaaccctaagagcagagcgaaagtgacaacaaacttcgcgaccgtcgcaagactcggcggcgcattagctgcatccacct

SEQ ID NO: 41898 - DNA, 432 bp, Glycine max
  unsure (1)..(432): unsure at all n locations
  Clone ID: LIB3093-040-Q1-K1-H6
nctngcttcacggtatgttgatataaagctttgccaaaatgagaggcataaatgtgatgggagaagtggatgtccctgggcatgcanaatcatggggtgctggatatcctgatctttggccatcaccttactgtagggagccactagatgtttcaaagaactttacttttgatgtcatttctggtattttgacagatatgagaaagattttcccatttgagctatttcacttgggtggtgatgaagttaatacagattgctggagtagtacttctcatgtaaaggaatggcttcagagtcacaacatgaccactagagatgcctatcaatattttgtactgaaggcccaagagatggctgtttcgaaaaattggagtccagtgaactgggaggaaaccttcaatacgtctccatcaaagctccatccaaaca

SEQ ID NO: 41899 - DNA, 433 bp, Glycine max
  unsure (1)..(433): unsure at all n locations
  Clone ID: LIB3093-040-Q1-K1-H7
gatgatttcgaggcagggttcagagaattcgaggatgactcggaaatcgaggatgtcgatgatgaggacgatgaagaggaggaggagttgaagaagaagaagccctttgggttctctcgctccaacaacaaggctgcttctaagcctctctctcgtggagcaacaactgtgaaatctgtggaatcaaaggggcaagctgagaagtgtgccaagagaaagaggaagaaccagtatcgcggaatccgccagcgtccatggggaaagtgggctgctgagattcgcgacccaagaaagggggttcgtgtttggcttggaactttcagcactgctgaagaagctgcaagagcttacgatgctgaagcanggaggatccgtggcaagaaagccaagtgaattccctgatgagccttcangcgctgctttctcaaacgtc

SEQ ID NO: 41900 - DNA, 380 bp, Glycine max
  Clone ID: LIB3093-040-Q1-K1-H8
cccacgcatgcggctacatggtcagaatacatgggtagtgatgccaactacgttctcaaaggggatccagccattgatcgagctcatgccacatacatcttatgtggctactgaactgcatttggagctacttgtaaggaagccaaggttgaaagtggatccactgatgctgttgttggtcttgtggctgatgaatataggtctgtaatagaatccaaaatgctagaagcaggtaagatcattgtaatggacacaaacgagaacacgatagcaaatggagaagcttttggaataactgacattataaatccgggtgattctaataaatctgctgcagaatcggtcaccgaactaagtggtgaaatgggtgccgactattc

SEQ ID NO: 41901 - DNA, 360 bp, Glycine max
  Clone ID: LIB3093-040-Q1-K1-H9
gttttaaggttgtttgcttttgtatctcaatcttcaggttcagtttgatcttatgtcaatgaaggatttttagacaaaacccagattcacaggaaaaacccttaaagcggagaataaaaggcaacgacttttcatctctacgcaagtgattatggcggttgttgagaatgttggggccaaaatcggttcttcgagccagagtttggagaacggtgtagtgtcagcggattctggtgaggttgagaaatcgaaaaccagatgcgatcatgatatgaacaacggcgttttcaaccatcaacagcaccaagagacagtttccggtaccatgccagttcctaacggcaattttagctacaagca

SEQ ID NO: 41902 - DNA, 419 bp, Glycine max
  unsure (1)..(419): unsure at all n locations
  Clone ID: LIB3093-041-Q1-K1-A1
tcgcccacgcgttcgcccacgcgtncggaatcttactagaaagtaaataaaatgaacgagtgccaaatccgagagccatgtccgtggttgatatgttgaattgagaagttagtagggttccttcattcgactcaaacacacaatgagtttgtctctcattcaaggttattcttccgccgaagacgaagaccaaccccaaccccacgattccgacctcgaagattccgacgatgaagccgccgccgccgccttctggaccgccgccgcaaaccacccttctctgggcgacagatccatcttcgaccacgttccgaatcctccttctgccacgggtcttccttctgcattcgacgctttctccgaaattgcagaaccgccacaatttctgaacaacagtgtggaagagtataacaacaacc

SEQ ID NO: 41903 - DNA, 410 bp, Glycine max
  Clone ID: LIB3093-041-Q1-K1-A10
cccacgcgtccgatggaaagctgctgaaaaccaaagacagaaatactagaaaggacatacaaagggaacttaggactctatccaaagaagaacgtaaaaggcagcagcttgctgtaacagatgtacttaaaagtgcagatgtaatattaactactttgattggggctttctctaaaaaactagacagcacttcatttgatttggtgattattgatgaagctgctcaagcacttgagatagcatgctggatacctatactgaagggttcaagatgtatacttgcaggggaccatcttcaacttcctccaaccattcaaagtgttgaagccgagaagaaaggcttaggaagaacgctctttgaacgacttgcagaaatgtatggagatgaaatcacatcaatgcttacaatc

SEQ ID NO: 41904 - DNA, 422 bp, Glycine max
  Clone ID: LIB3093-041-Q1-K1-A11
aaatttttgacagatgccaaattggctataagtgaaacatatcaacagactgatgctaattttctggattctgaaaaggacaccttcagggatgatggatctacagcttcgacagcagttttggttgataaccatctttatgtagcaaatgttggagattctaggactataatatcaaaagctggtaaagcaaatgctctctctgaggatcataaaccaaatagaagtgatgagcggaagagaatcgagaatgctggtggtgttgtcatgtgggcaggtacttggagggttggaggggtgctagcaatgtctcgtgcctttggtaaccgtatgctgaaacagtttgtagtagcagaacctgagatccatgaccaggagatagatgaacaaattgaactgattattcttgcaagtgatggact

SEQ ID NO: 41905 - DNA, 401 bp, Glycine max
  Clone ID: LIB3093-041-Q1-K1-A12
accacgcgtccggaatagaacatgagcatataaatggataccctttatattatctatctttatattatctataaagggtaaagatatccgatgtgaatctattcgtttagttctctatcggtatgtatataggtgaataatccaacatgcctttttgtgaagtaaaaaaactaccctcgatccatgcctgaaaagggttgataataagtaaaaaaaatcaatgaattcatgataaaacccttctgcgtttttttattataaatttttttgtcaataaagggatcaaggggttgggggatcaaatggtaaagttcttctgttggtaaattggaggattagaaacatgactattgctttccaattagctgttttcgcattaatagctatttaatttattttat

SEQ ID NO: 41906 - DNA, 416 bp, Glycine max
  Clone ID: LIB3093-041-Q1-K1-A2
cgattgcacaaacattatttcagttccttcagattgcaagcaattggtggatggcttgggctaaccctcaaacagaaggagacctgcccaaagtaactccctcagttcttcttcttgtttatatggcccttgcttttggcagctcatggtttatatttgtaagggctgttctggtggctacatttggtcttgcagctgcccagaagctatttttgaaaatgcttagaagtgttttccatgcaccaatgtctttctttgactctacaccagctggaaggatcttgaatcgggtatcaattgatcaaagtgttgtggatcttgacattccttttagacttggtggatttgcttcaactacaatacagcttattggtattgttggtgtaatgacagaagttacatggcaagttttgctc

SEQ ID NO: 41907 - DNA, 390 bp, Glycine max
  unsure (1)..(390): unsure at all n locations
  Clone ID: LIB3093-041-Q1-K1-A4
attaatttggaaatgtaaaaaaaaaattgggtgtttccgatagtagtagttgtagcggtcaagccgagccgatccgatgacgcgagccactcacacactgggggttcccccaacaacacgcgcccctccccggcgaccgtaccgtattatccctcaccattcccactctttcgccttgccgtttcgctttctctctcttcttcttcttctttctctttctctttctctttctcttttccctttctctttatctctcttccaaccctaattccctttttccgatgccggactttcacgactcccttctcaccaccacgccgncgtcatcgggccccgtccccgtccgcgaagactgctggtccgaagaggccttctccacgctcgtcgacg

SEQ ID NO: 41908 - DNA, 394 bp, Glycine max
  Clone ID: LIB3093-041-Q1-K1-A5
ggaaatatttgaggaaccctgttgtggtcaccattggcactgctggaaaggcaactgatttgatcagccagcatgtgatcatgatgaaggaggccgagaagttttccaagcttcataggttgcttgatgagcttaacgacaagactgcgattgtgtttgttaacaccaagaagaatgcggatcatgttgccaagaatttggataaggatgggtatcgcgtgactactttgcacggagggaagtcgcaggagcagagggagatcagtcttgaagggtttaggaccaagagatataatgttcttgttgctactgatgttgctggacgtgggattgacatacctgatgtggctcatgtcatcaactatgatatgcctgggaatattgaaatgtacac

SEQ ID NO: 41909 - DNA, 413 bp, Glycine max
  Clone ID: LIB3093-041-Q1-K1-A6
gaaaaaaccgacacaaagatctagtcctagctagaatcaaacaggggcgatctcaccttcaagaacacatcgccatggcaaggaacttgcttcttgtgctttttgcagtagccaccctcctccatggctcagcagcccaaaccagacacatggtcggtgatgccacgggctggatcatccctgctggcggcgctgccacctacaccgcctgggcttccaacaaaaccttcaccgtaaacgacactctcgtgttcaacttcgccaccggccaacacaacgtggccaaggtaacgaaatcggctttcgacgcgtgcaacggcgggagcgccgttttcaccctgacctccggtccagcgaccgtgaccctgaacgaaacaggggagcaatactacatttgctcccgttgatcacac

SEQ ID NO: 41910 - DNA, 407 bp, Glycine max
  unsure (1)..(407): unsure at all n locations
  Clone ID: LIB3093-041-Q1-K1-A7
ttagcatttcatgtaaagcttcctgtatagcatttattggttaggcaattcttctatcacctaaatggtgtgtgtaacaaggcagaagtgaccaattgatgtgaaaatcccatcattggcaatgcctttattggtcgaggttttcctttttccctcctccaccctacgatctgctccaatttttttcaaagtataatttgttgacaaattcactgangtcaagcttaacgttggtccccttctgatccaactctgctctcggcttgtaaatacccagttaatttttaaaaacaagtataatttttgctaattccactaacnnannanaaaaataaaataataaaaaaaaaaaatataatttaataaaatttatataattatgcttggcaagttttgctcttaatttt

SEQ ID NO: 41911 - DNA, 91 bp, Glycine max
  Clone ID: LIB3093-041-Q1-K1-A8
aagtgaaagccattctgttaagtggttaactgtatcatgtcataattattattattattgaatacattgtgcaagtatttatcattttttt

SEQ ID NO: 41912 - DNA, 385 bp, Glycine max
  Clone ID: LIB3093-041-Q1-K1-B1
ccctatctctcaccaacttccgctacttcctactccaaccactttcttttttcccgcagtcatgggcaaggtcaagatcggaatcaacggatttggaagaattggccgtttggtggccagggtggctctgcagagagacgatgttgaactcgttgccgttaacgatcctttcattaccaccgattacatgacatacatgtttaaatacgacagtgttcacgggcactggaagcatcacgatgtcaccgttaaggatgagaagacccttctcttcggtgacaagccagtcactgtttttggacacaggaaccctgaagagatcccatggaagtcgactggagctgacatcattgttgagtccaccgggagtttcaccgattaggat

SEQ ID NO: 41913 - DNA, 129 bp, Glycine max
  Clone ID: LIB3093-041-Q1-K1-B10
catcaacgatctgcagtctaacaaaggcttcgtgaaattgccttatagcaagaagggtggtggattgccagtggaagggaaaaatccaaatatagaagaaacaggggacgatggaaattgacattgtgg

SEQ ID NO: 41914 - DNA, 179 bp, Glycine max
  Clone ID: LIB3093-041-Q1-K1-B11
ctgtggctcagagtactgcatcagataagagagaaaacggctcttcatccgttgggggaaatccgaccatggtgcacgtctcctcttacaggtactatggtgagtcgcttaacaagcccccccgtccttaccataaggatcttttagacgcgtatcttaatcttgttccggagtactgg

SEQ ID NO: 41915 - DNA, 422 bp, Glycine max
  Clone ID: LIB3093-041-Q1-K1-B2
gcaaggcatgtttgatggtgtgcttgacaatacaggtcggggagtcgctgatgaagaagagtatgaggctgctgatggtgattggggtgaggagcttgacatagttgatgcagatggcttacaaaatggagatgttgctgcgattttggaggatggagaggtggctgaagaaaatgatgaagagggtggatgggagatggaggatttaggcctgggcccagaagctgacactcccaaagcttctatcagtacccaatcttcagtttttgtgaccccaacacctggcatgccggtaagtcatatatggattcagaaatcatctcttgcagctgatcatgcagctgctggaaattttgatactgcaatgaggttactgaaccggcaacttgggataatgaattttgcccccctgaaatccatgt

SEQ ID NO: 41916 - DNA, 419 bp, Glycine max
  Clone ID: LIB3093-041-Q1-K1-B3
cacaatctcattcgatcatcaatcctcactcgtggatttcaatctcgttcagttcctcccattttcatacacaaataattttctttatatttctgcattgctttgagtggattttgcataatcatattatcaatttttcattcattttgggatatgagtgcagaagtactcttgtgaaggttggaaaaaagaaatctcaatttgatgtatgaaccaggggtgtaagaagaagttgaggtgatggaaccccaggatgaagaagagatccataactgtttgatcaagctgagaagtaatccggaaaggcgaaaggataaggtttacattggttgtggagctgggtttggtggtgacaagcccttggctgctcttaagttgcttcaaaaagttcaagaactaaattatctggttcttgaatg

SEQ ID NO: 41917 - DNA, 282 bp, Glycine max
  Clone ID: LIB3093-041-Q1-K1-B4
agaaatatctccaagactccaaccgtgcttcaaatatcaagcactttcttgttgtacttgcacttccactttttttttccaggatctagatgagtagccggagttctccccttgcgccgccgcaccaatgtcgaccacaactgtatccggcggcgaccctccttctcgcggttttgatacaccgtctctggaccggtaggcggcggcgcttgttcacacaatctactatcatggggggtaccctctcgtgagcatgttggtgctgggcttccggcggctaca

SEQ ID NO: 41918 - DNA, 358 bp, Glycine max
  Clone ID: LIB3093-041-Q1-K1-B5
aaagagatcaactaatcgtggttgatgacgtttctcatctagcatggctcctatcttcaggtgtgaatgcgcaagagggcgtgtttatatctgagattggctttgctatggccgtggatactcatatggccagggagaaattggttataggatttgcaagcagagaggctcttgaagaggtggtgggaatcaaatataagttcattttgtgacccacgggtgtcagatgaatctaacgtgatggtcccctgttaatacaacaatataaatcgctgttgtgaccaatctctgactctatttgaagaacgaactgaatgaggtttacattctgtttgaaactatatttgaatttgacaag

SEQ ID NO: 41919 - DNA, 413 bp, Glycine max
  Clone ID: LIB3093-041-Q1-K1-B6
ctttcatatcaaatagttgactctttgatttggcttggaattcgagacatgattaatgatcttaggaagaaaaagttgaagctacgaccagtcacatatttaagtggctcacaaggctctgaaactgatgttccacatgcatatatatggagtcctcatcttgttcctaaaccaaaagattggggaccaaaaattgatgtagtagggttttgctttcttgatcttgcgttaaactatgaacctccagagtcccttgtaaaatggcttgaagaaggagacaaacctatttacattggatttggtagcctgcctgttcaagaaccaaataagatgacacaaataattgtagatgctttggagatcactggacagaagggcatcatcaataaaggatggggaggtcttgggaattt

SEQ ID NO: 41920 - DNA, 387 bp, Glycine max
  Clone ID: LIB3093-041-Q1-K1-B7
gatggtttccatggcattcggtgtcagcactgcgacttttccgaatctaaacaggtgtcgtggagtggcatatgcaagtttgagcaacaaatcaagtactacatctttgggagtgcgagttacagagggagaggggaatttgccgaagcttgttctcacttccccggccggtagtgaggctgagatatacctgtttggaggttgcattacttcttggaaagttcccagtggtaaggaccttctctttgttcgccctgactctgttttcaatgggaacaaacccataagtggaggtgttccgcattgtttttcacagtttggtcctggtccaatttaacagcacgggtttgcacggaatatggattggactgttgtcgattctgaaaa

SEQ ID NO: 41921 - DNA, 388 bp, Glycine max
  Clone ID: LIB3093-041-Q1-K1-B8
ccggaccggaattgaagtgttccggcccagcgcgacccgtcacgtccaatccgatcatcaatcctaactcgaggattccaatctcgctcagttcctcgcattcccatacacaaataatgctctttatttttctgcgttgcttcgagtggatttcgcataatcatattatcatattcttcattacatcctgggatatgagtgcagaaggactcttgtgaaggttggaaaaacgaaatctgaatgtgacgtatgaaccacgggtgtaagaagaacttgatgtgatggaaccccacgatgaataagagatacatagctgtctgatcaagctaagaagcaatccggaaaggcaaaaggataaggtttacattgattgtagagctgggtttgg

SEQ ID NO: 41922 - DNA, 380 bp, Glycine max
  Clone ID: LIB3093-041-Q1-K1-B9
aaatttttgacagatgccaaattgtctatgagtgaaacatatcaacagactgatgctgattctctggattctgaagaggacaccttcagggatgattgatctacagcttcaacagcagttttgggtgataaccatctttatgtagcaaatgttggaaattctaggactatattatcaaatgctggtaaaacaaatgctctctctgaagatcatataccaaatataagtgatgagcggtagagaatcgagaatgctggtggtgttatcatgtgggcaggtacttggatggtttgacgggtgctagcaatgtctcggtccttttttaaccgtatgctgaacctagtttgtatagcagaacctgtgatccaggaccagtatat

SEQ ID NO: 41923 - DNA, 420 bp, Glycine max
  Clone ID: LIB3093-041-Q1-K1-C1
ggccaaatcaatcaaattctttgagttgaacacaggggccaagattccttctcttgggttagggacttggcaagctgaacctggtgttgtagctgaagctctcaccacagccattcaggttggatacaggcatattgactgtgctagtgcgtataagaatcaagcagagattggttctgctcttaagaagctttttgatgatggtgtggtgaagcgtgaggacttatggatcacttccaaactctggtgttcagatcatgcaccagaagatgtgccaaaagcattggataaaacattacaggaattgcaacttgactatcttgacctctatctgatccactggccagtccgcatgaaaagtggaacatttggactcaataaagaatatcttgagcaaccagacatttccaatacatggag

SEQ ID NO: 41924 - DNA, 184 bp, Glycine max
  Clone ID: LIB3093-041-Q1-K1-C10
atcaaatctagcattacttcaccatcaacaactacagtgattaatgacgaacgggtgcagggcataacttatagggagctcctttaacttctcctttaggcttatcttgctaaatccaaatatcatctactcctattactctttatcctttatttcaaactaaatccccctacgagcactgtat

SEQ ID NO: 41925 - DNA, 412 bp, Glycine max
  Clone ID: LIB3093-039-Q1-K1-C10
ggacaatgctgctgtgccgggtctagaacatttgtacacgaacgtgtgtacgatgaatttattgagaaagcaaaggcacgcgctttgaagcgtgctgttggtgatccattcaaggggggaatagagcaaggtcctcagattgattcagaacaatttcagaaaatactgaagtatattagatccggtgttgaaagtggagctactcttgaaaccggaggagatagatttggcaactcgggcttctatattcagcctactgtcttctcaaatgttaaggatgacatgctgattgcgaaggaagagatctttggcccaatgcaaagcatattaaaattcacggaccttgatgatgtgattcaaagagcacattacacacactatggccttgcagcatgggtgatcacaaaaaaca

SEQ ID NO: 41926 - DNA, 457 bp, Glycine max
  unsure (1)..(457): unsure at all n locations
  Clone ID: LIB3093-037-Q1-K1-D12
ataatatcaggatagcagagacttaacatcaaataatccaagtgtaagtttggctagcacgtggcgaggcatttgttctcctgacatttctgtgactcttccaaatacttcaccaaagtcctttcggtctgacaatacaatttctgaaaggtcacatgcgccaccagacccaacaaacatgcaagtgaaaggatctgcttcagatgtatttcgtgtcagtgtttccagtgccccaagtacatctagtcatggatctgcacctgatgactgtgatgctttgggggatgtatacatatggggagaggttacctgtgaaaatgttaaagttggtgctgataaaaatgtaaattatgtcagccccagggcagatgtacttctccccagaccactggaatccagcgtagttttagatgtacatcatatagcatgtggtgttagacatgnctctctagtcact

SEQ ID NO: 41927 - DNA, 321 bp, Glycine max
  Clone ID: LIB3093-037-Q1-K1-D2
ctcttcccatccctcacctcaacgctgcatcttcacgtcgtctcacgaggtgcatatagtagagagggaaaatgagtcgaggaggcgcattatcatcagcgaagggaaagaagaagggtgctacattcaccattgactgtgcaaagccagtggaagataagatcatggacattgcttctctcgaaaagtttcttcaagagaggatcaaggttggtggcaaagctggtgctcttggtgacagtatcactgttacccgcgagaagaccaagatcattgtcacctctgacagtaacttttccaaacggtatttgaagtacttga

SEQ ID NO: 41928 - DNA, 307 bp, Glycine max
  Clone ID: LIB3093-037-Q1-K1-D3
gccaagcgtccatacaactcaatcaacagattggtcaggccaaaggacagcattgcgttgcgaggtagggctatgcgaaacgctatgagattaggctcaagcctcaccatttggcacagccgtttgcacgtttcgtcgacgtcatacctcgacatcgtcggcatcatctttatcatcgtgctcaatgacgtcaagctcgacgctagctacgtcaccatgtcattcaccaaccaagattcctacaacgttattaaaccgtctacagtagacgaggataaaaatgatgaggatctcgtattggagttac

SEQ ID NO: 41929 - DNA, 407 bp, Glycine max
  Clone ID: LIB3093-037-Q1-K1-D4
ctgtcccatatagttgttttggcaccgctgaccagacagaggtcttacgacaacgtcccacagcccggtgccatcctctactactcccagagaacttccaacggaggccttctcattactgaagccactggcgtctctgacacggctcaaggctatccgcaaacccctggcatatggactaaagaccatgttcaagcttggaaacccattgtcgatgccgtccacgccaaaggcggtgttttcttctgtcagatttggcacgttggaagagtttcagattcagtttatcagccaaatggacaagcacccatatcttctacggacaagccactcacaccccaaattcgaagtaatggcattgatcaagtacaatttacccctccaaggagattaacgactgatgaaat

SEQ ID NO: 41930 - DNA, 406 bp, Glycine max
  Clone ID: LIB3093-037-Q1-K1-D6
ggaaatctaaaatccccgttcgatctcacggagacggacctctctctcgcgcggacgcgttgcgtgggctcgctcactctcagactctcgcgcaacccccctctcgtggacgcgttgttgcagatcctcgttcgttctcgctctctcgcgtgagtttttgaatttgttggtctatgtgcaggaccagccccgaactcctgctcaatccccatcgatttatccctggaagaaagtaaacaaaatcctgtagaatagctctttgtggcttttaaattgaatcgaggatgggagacgaagcaagtgaagagcatcaaaggtcgctagcagctcctttcatatttttcgtggttctcgcatttcagtttgcttctcattggattgatcactttaaagagagtggatctga

SEQ ID NO: 41931 - DNA, 345 bp, Glycine max
  Clone ID: LIB3093-037-Q1-K1-D7
cccactcgtcctcccactcgtccgcccactcgtccgcccacgcgtccggccttactgagattggttggtcactataccttctctcttcagtcttcattatcacactcatcattctctaatttctctaacatggcttcaaccgcttctgaggttagccaacaagtccaatccaacaacaacagaccaattttcaaaagcgtgaaagcactaactgaatcaccagaactcacttccctcccaccctcttacacctacaccaccaactcagatgatgaaatagtggcagacccagatgaagatgatccaattcctattattgactattccctcttggtcactggaaca

SEQ ID NO: 41932 - DNA, 366 bp, Glycine max
  unsure (1)..(366): unsure at all n locations
  Clone ID: LIB3093-037-Q1-K1-D8
gtctagctctctggaagaccaagacgctggataaggattacgaggctctgcatgcaaggtgggagaatcttaagtccaactatgacagcctcctcaaggagaaagacaacttaaaagctgaggtggcgagcctcaatgagaaggtgcttgcaagagggaaacaagaggggcacatgaagcagcaggctgaaagtgaagaagaaacaaaaagattattgcatttgcatgaacatgaaccaccccagaggcttttactggaatcagtttcggagggagaaggatccaaagtctcttctgttgtcnggggttgtaaacaagaagatatcatttcagccaggagtgatattttggattcagatagtccac

SEQ ID NO: 41933 - DNA, 375 bp, Glycine max
  Clone ID: LIB3093-037-Q1-K1-D9
gcttgatggactcaaggctggcgttagctcaagagatattgtccacattcaaaacgccgggggtcttggctatgcaatgaatacatcggaggagcttaattttgtaaaagaagttgctgccactactggtgttgttcttgacccagtatacagtggtaaggctgcttatgcaatgctgaaagatatgtctgaaaatccaaagaagtgggaaaggagaaagatcctcttcatacatacgggtggcctcctaggattgtatgacaaggtcgatcagttggcttcttttgttgggaattggcaacgaatggatgtcaatgaatctgttcctaggcaggatggtattggaaagatgttctagagaaggaaaatgaaaaa

SEQ ID NO: 41934 - DNA, 237 bp, Glycine max
  Clone ID: LIB3093-037-Q1-K1-E1
ttttgttgcttcaaaaaaaaaaaaaaaattaaaaaaaaaaaaaaaaaaaaaaaaaaaaaaagaaagaattataaaaaaaaaaaaaaaaaaaaaaaaaaaaaatgggccgtccgttctaaataatccaaatttccttccgcctacatacaaccaaatagaacttcaataggctcaccaaaattaaattaactgtccgtcgttttaaaacttatttacttgaaaaacctttaaataacc

SEQ ID NO: 41935 - DNA, 439 bp, Glycine max
  Clone ID: LIB3093-037-Q1-K1-E10
cccacgcgtccgaaaaaattgaaaaattgaggaggcggcaacaaatgcaagcaatgcttgctgttcagaaacaacagcaagaattcggccatcaagttcctagcactaataaatcaatgaatgaaaaatgtgccatagaaatccatagtcaactctgtgatggggctgatcctgaaattgaagatttaagaacagctctagatccaccaactgagcaagatgattctaatacaatgtctctggcaattgatgatcattttgttgaagacaccatactgtacatgcttcaggatgctatatcaaagttagatgtcaaaataagactatgcattagagatagcttgttccggttggctcaaagtgcaatgcaaaagaattatgctaatgatacaagcagtacaaacaacactagcagagaagaactaaagttgctgcaaga

SEQ ID NO: 41936 - DNA, 402 bp, Glycine max
  Clone ID: LIB3093-037-Q1-K1-E11
aaaatcgacaaattcagattcaaactcaagttttgaggctgattcagattctgggcgtgtgggattcataaagtcaggttcaagataaagttttagctcaattcatattctgggtgtgtgaaattggggagaaaagaattcaaatttgggggtgcaaagtggtttaatttgattaggtgtgtgttagttaacatgggtgctagtttttccattctgggtatatgcaattgaaaaattcaggttccatatctagttttgagttcaattcatattctgggggtgtgtgttaagtgttaacatgggtgctagtttttcctcttgtgtttgtgatggggatggtacccctttgagaccaatgcttggggacatacccgagagctgtgtggcattggtgttgatgta

SEQ ID NO: 41937 - DNA, 385 bp, Glycine max
  unsure (1)..(385): unsure at all n locations
  Clone ID: LIB3093-037-Q1-K1-E12
ctgactcgtccttcctccctttctttttgtccccttcaaccaatctacagccagaagctagtactcctctattcgttacaganaacntttatagagagtatcttgaatactattatcctaaaacggtatttcgaggagaggcttgtgatgatcttggaagaactttctgtgagaccgagtatcagaatggtttctactatagaaatgtgaaaaccctttttattgccatgactactgcgttttcaatgtcaaccagtactaattgtagtgttgaatgtacataggtataatgctattgatctcattttatattgattttcagtatcactataaaactttacaataattatacancttttttaaattcatttttttgttattcatt

SEQ ID NO: 41938 - DNA, 458 bp, Glycine max
  unsure (1)..(458): unsure at all n locations
  Clone ID: LIB3093-037-Q1-K1-E2
actctacgaccttagctctgcctctgggttgaagaagcttgatgagtaccttctcccacgcagctggtcaccgggtaccaagctacaaaggatgatcttactgtttatgcagctttgccaactgctccatcagatgaatatggaaatgtttccaggtggtacaagcacattgatgctttgttgagaatctctggtgtttctggcgagggatctggtgttattgttgaaggatccctggttgcggagcctgttgcaactcccccagctgctgacactaangctgctgttgctgaggatgacgatgatgatgatgttgatttgtttggtgaagagactgangaagagaagaaggcagctgaggaacgggcagctgcagtgaaagcatctgcaaaaaaagaagagtctgggatatcatcttgtctggtggatgtaaaaccatgggatgatgaaactgacat

SEQ ID NO: 41939 - DNA, 230 bp, Glycine max
  Clone ID: LIB3093-037-Q1-K1-E3
tcttccttccactcttcctacttttaaccctttcttcatcccaataagctaactttttcctacaaggtaagtattatttcacttttcctttcttcttttcttttcttcattatcatatttcaaaatcatgttcatatctcacaaattgaatattttctcatttctatttttcttctcttcttactatttcttcccctttcttttatttttatttaacaatataatatcat

SEQ ID NO: 41940 - DNA, 475 bp, Glycine max
  unsure (1)..(475): unsure at all n locations
  Clone ID: LIB3093-037-Q1-K1-E4
cccacgcgtccgcaaaacttctctctcacactcactttctctctctataactctntctcacccgctgagggtttccttttcatcgcatcttgagtttgcaacctcgtcttgtgatttccatggagggtgctgggatggaagagaataatattattaatgatgatgataataataacaagtctgaggcgcatttgacttctgccgctgcttttgtggagggtggaattcaggacgcttgtgatgatgcttgcagtatatgccttgaagctttctgtgatagtgatccttccacggtgacgagctgcaagcatgagtttcatcttcagtgcattctcgaatggtgtcaaagaagctcccagtgccccatgtgttggcagcctatcagtctcaaagatccaacaagccaagaattacttgaggcagtggaaagagagcngaaacttatgttcaatccatctagaaatgccacaatatt

SEQ ID NO: 41941 - DNA, 465 bp, Glycine max
  Clone ID: LIB3093-037-Q1-K1-E5
ctctcccattctctcgcatctcaatacccttttgatttgtgaaaggaaagcaaacatgcttgatcaggtccaacaccctacaatcatggacaaggttgctggccagctccatctccgttctggtgtttctggtattaggagttatgaaggagcctactgccaccccacaatgtaccaaagaccctcttttgggaattactcgaatgctgcattgcagtatcctgtgatgccctcatgcaaagctactatggatttgtctgctgctgcaacaactgcctcccccgtctttgttgctgctccagcagagaaaggccattttcttatagactttctcatgggaggtgtttcagcagctgtctcaaaaactgctgctgctcccattgaacgtgttaagcttttgatccagaaccaggatgagatgatcaaaactggtagactttctgagccctacaaaggtattggtga

SEQ ID NO: 41942 - DNA, 111 bp, Glycine max
  unsure (1)..(111): unsure at all n locations
  Clone ID: LIB3093-037-Q1-K1-E6
tctagatcgcgagccctttttttttttttttttttttttacttgtttggtcgtttcctgtcgtgtagattcagatctactttgttgcanagcagcttactttgttactttc

SEQ ID NO: 41943 - DNA, 421 bp, Glycine max
  Clone ID: LIB3093-037-Q1-K1-E7
gtggattgacacatttgctgaatgggtggacctatggccctcacactttccaacttatggtggcacttactgtctccaaaatactcactgcattggtgtcatgtgccactgccataaccctcatcactctgatcccattgcttctcaaagtgaaggtcagagagttcatgctgaagaaaaagacgtgggatcttggacgtgaggttgatcatattatgagacaaaaggaagctgcaatgcatgtaagaatgcttactcaggagatacgtaagtcactcgatagacatacgattctgcataccactttggtggagctgtctaaaacacttggcttgcaaaattgtgctgtgtggatgcctaatgttgataagactgagatgaacctcactcatgaattgaatgggaggaattttaatttgac

SEQ ID NO: 41944 - DNA, 328 bp, Glycine max
  Clone ID: LIB3093-037-Q1-K1-E8
cccactcttccgctgacgcgtgggtttccccccccctcttcgcgtcttttcgcaaccgagtagatcttgtatactggaatagtgtgccaatatgagctctcggtcaggcaagggacctgccgtcagaagttatcggaggagaaagacagcgttggaccttgaccttaaccgtgtaccagctggtgagaatcgtgagcaggaaggaccttcgactcattcggtgcctcgagaagttcaagttgaacagcagcagcaggctactcaacctccgatgattgacgtggaagccattgatgattatgtttgtgaatgtaccccaagggctttt

SEQ ID NO: 41945 - DNA, 202 bp, Glycine max
  Clone ID: LIB3093-037-Q1-K1-E9
tcgtccactcttccgacatgtaaccatttctacatcccacatagcttaatgatcactaccaggagcgatcatcttactctaccgaactatttctatctacctaactacaccagctcaagtgcaagtgcttctcaaaaatcatgagcttaaccgcatgactctctacgacacctactcaacattcttaaccgcttctgccaac

SEQ ID NO: 41946 - DNA, 377 bp, Glycine max
  Clone ID: LIB3093-037-Q1-K1-F1
tgataatgtaaaattactttaattgtcagtatataatccattttctcaactatcaattgcagagagaaattatcacttttggtgaaattgtcttgagctagttgaaaatgatttcggtgtgcactcaaagatggagtatatatgatgaatttcttttcagggatattctccactaggttcaccagcagctctcaaaagtgatattcttaagaatcctgttgtcacagagattgcagagagattggggaagacaccagcacatgttgcccttcgatggggcttgcaagcaagtcatagtgtgcttcctaagagcactaatgagtccagaatcaagggaaattttgatatctttgactggtctattcctcaagatttga

SEQ ID NO: 41947 - DNA, 427 bp, Glycine max
  unsure (1)..(427): unsure at all n locations
  Clone ID: LIB3093-037-Q1-K1-F10
ctcaaactcaactcatctttccttcgatccctgaatctggacgttactaaagcagccgagccatccactcaccattttaaaagccaacacagaaagcacagaaccaccacatcgttgccttcctctaaacgataaatttttgggattctgaaactagtgatacattttcttgcatgaaggcagcgtattgaggaattcagttagtgtattggaagatctagttcaacatgtcttctgtaagcaagggtgataggaaggcttccattgatgcagcatcatggctgttcaatgtggtcacgtctgtgggaattattcttgtcaataaggccttgatggctacatatggttttagttttgctacaactttaactggtctccattttgccacgacaacctngttgacactcatttctaaatcgttgggata

SEQ ID NO: 41948 - DNA, 471 bp, Glycine max
  Clone ID: LIB3093-037-Q1-K1-F12
agcaaagcaaagaagtgaagagagagagagatcattctagagacagagagaaattagcgttcagtagatattagtggtgggtatgtgtgtgtgtgggtttgggtttcaagagaggagacatgcttaacttcaacccaacacttcaagtacttgcttcttcatacccttaccagatcccaaaggtcacgatctaattttaagtgattagtctgatgagcattttgaaggttacatgaagcaatttctctttttgaatcttcctgacaccgagatcaattgttcacaagttgattgcaatcactcaatggctcattcttcttatccctacggcgatccaattcttgcttatggaccacaagctattagtcatccccaaatggtaccccagatgctgggactagcatccaccagagtggcattaccacttgatcttgctgaagatggaccgatttatgtcaacgcgaaacaata

SEQ ID NO: 41949 - DNA, 309 bp, Glycine max
  Clone ID: LIB3093-037-Q1-K1-F2
gagactctctctttctatctcccacagtgcacatcttgaagttgcaaagcgataatggatcgagaggtgtctttatctcctctttctcttcccatctttacttacttggcatcattctgcttccttgctatacaagactcacattcacctactacacttattgataccacaactactaagatacagcatcttcacaatgcatctgctctacttgatagttaccgatctgatactctgaacttgtaatggtaagaactcaccgcacatcttgatattcttgcaaaatacttgcataggcgcttccacgaa

SEQ ID NO: 41950 - DNA, 386 bp, Glycine max
  Clone ID: LIB3093-037-Q1-K1-F3
cacacttcacttccccaacacattcttctttttttttttttttcacactcttcactcacttcgatcagcatcaattcatgtacacggcggaggttttccgcgtcttcgccgtgcgcggcggcgacgcttctccagcagtggcccccgccaccaccaccaattgcttaaaaatagtagctttcaacacacccactttccgtaacggcttgaatgcgaggtgggcgaaggcgttgacgctctgtcgctgcagcgttgactcaaagtccgtcggcgacgaagttttctcggtgactcagtcgaacaagtccgatgtggactacctcggggagagcaccaaaagtgatttgaacgtcaagttggagcatcttgaaggctttggaattgat

SEQ ID NO: 41951 - DNA, 405 bp, Glycine max
  Clone ID: LIB3093-037-Q1-K1-F4
cccacgcgtccgctttcttcattctcctcggagctttgctcgttattcttctttttcttttggtttgttcgtttcgttcggaaaacgcgtatgctgtgccgtcgtttttagtgggtggatgggaacgacgtcgtgtgagtacgtgagctgggaggaggtgtttatgtcgaacgacaaggggaggagggaggttcattacttgcttaaacgacgaggcggtggctcggatctggccgttttgggaaaagagaagagcctcaaacacatgtcgtatcgctacgccattcgaaacacgtcgtcgtttcggccttactttaagctcatgtcgcgcagagaggttgttaattggttggattcaattgtttcagattcgtcttctggggatgcggctatggtgggaaaaca

SEQ ID NO: 41952 - DNA, 436 bp, Glycine max
  Clone ID: LIB3093-037-Q1-K1-F5
cccacgcgtcctcccacgcgtccgataaatattccgttttgcgtttctctgcctaaaaggatggaaagatgggtcaagcactaggttgctatcaagttgatcagtcaaatgtggctatcaaggagcattttggaaaatttgatgatgtcctagaacctggatgtcattgcctgccttggtgtcttgggtaccagattgctggtagtttgtcactgcgtgtgcagcaacttgatgttcgatgtgagacgaaaaccaaggacaatgtctttgtcactgtggttgcatctgtgcaataccgagctgtgtctgagaaagcatctgatgcattctataggcttaccaacacatgggagcagatccaatcatatgtttttgatgtcatcagggccagtgtaccaaagttggagttggattctgtctttgagcagaagaatga

SEQ ID NO: 41953 - DNA, 474 bp, Glycine max
  unsure (1)..(474): unsure at all n locations
  Clone ID: LIB3093-037-Q1-K1-F6
cggacgcccttttngaaatcatacttttgaattctgcaccatacatcaatgacttgtctgtagcacgtataactggactgttgatactactcccccaacatcatatgttacagcctcatcatcttttacaagttctttaaatgtgtctgtaaacatatctttcacagaaccctgtataggtggaggtggctttggatgcaagtcggtaaatgcctgcaatcttcttgtctatggtgctggccaggtcataccatcttcctttagaattatacagccaaacctcacgtattctcttcttgttagtctatcgtctacagttcaatatggccgggcaatccttgtaatggataggaacttctgcactgaccgtgctgtcaacaactttatgaaaatgccaaattcaactgtttatatacattttgacagaataaaagtttatgtcaacatcaggactcatttaccaaataactactt

SEQ ID NO: 41954 - DNA, 374 bp, Glycine max
  Clone ID: LIB3093-037-Q1-K1-F7
gtatacccaacacaaactaatatcaacatggactactacacccgcgtttcagaagttaggaagaaacctatcatggagtattccacaccacgaccaatgatgggcaactaccaccaccctaatgctcaccgtgtcctcaacgagaagattgtttatgaggaggatgtgattggaggatcccgccacaaccacatgcatcaccaccaccctgagactcatgaaagagtcaaggtggtggaatatgaacaagttcctgagaggcgcgttgtctatgaagagaaagttgcttatgacaacgatcgttactactctccaaagtattgaaattggacaaatggaagaacacctataacgtgttatcatgtggcttttta

SEQ ID NO: 41955 - DNA, 366 bp, Glycine max
  Clone ID: LIB3093-037-Q1-K1-F8
cccactcttccgcgttaagctagtgtctatctgatccagctacagcatatagatcaaggaaggaaggaacgaacatgttgggtgttataaagcacaagactattcaccctgccttctcctcaatcagacacttgtcttctgcagctaaagagattactgtcagggaagctctgaactccgcactccatgaggaaatgtcagctgatcctaaagcgttcttgatcggtgaagaggttggggaatatcaagttgcatacaatatatccaatgtgctgctcgacaagtattgccccaacagggttctcgatactccaatcacttaggcttggtttactgatattggaattggcgcttcttactatggtc

SEQ ID NO: 41956 - DNA, 418 bp, Glycine max
  Clone ID: LIB3093-037-Q1-K1-F9
attgaaagttcttcctggtgcaaaggttcctgctgatggtattgttacttggggatcgggtgatgtaaatgagagcatggtaactggtgaatctgtacctattatgaaggaggtgaatgcttccgttattggaggcacaataaatttgcatggcgtccttcacgtataagctaccaaagtaggatctgatacagttttgagtcagattattagtttggttgagatggcccagatgtccaaagctcccatccagaagtttgctgattatgtagcaagcatatttgttcctacggttgtttctttagcattattgacactattgggttggtatgttgctgggtctattggagcttacccagaataatggctgccagaaaatggaaatcactttgttcttgccctaatgttcgcaatatct

SEQ ID NO: 41957 - DNA, 293 bp, Glycine max
  Clone ID: LIB3093-037-Q1-K1-G1
cccacgcgtccgatttggggcttttctttggaattagggcacacgcacatgcttttggttgagtgagcctcacaatcacagacagtggggaagatgtaatcccaccgagattattggttgattgattagttgattgattgataagtggtaagtgcaagggaaagtggaagtgcaagtgtttgtgtgtttgtgtaagggttttttggcatgaagggtgcgttggatcggacgaatgtggtgctccgccacttgccgccttctatttctgaggccgcccttttggcccaaattga

SEQ ID NO: 41958 - DNA, 351 bp, Glycine max
  Clone ID: LIB3093-037-Q1-K1-G10
cccactcttcctcccacgcgtccgggaaagaataaattggagagagcaagagaactagttgaaaatgcagttgaatcggccccagctgatcaagtgaaaccactttacctgcaatatgccaagctggaggaggactatggactagcgaagcgagctatgaaggtttatgatcaagcaactaaggctgttcctaacaatgagaagttaagcatgtatgaaatatatattgctcgtgcagctgagatatttggtgtacccaaaacatgggagatctatgaacaagcaattgaatctggtcttccagacaaggatgtcaaaaccatgtgtttgaagtatgctgagttggaaaaa

SEQ ID NO: 41959 - DNA, 385 bp, Glycine max
  Clone ID: LIB3093-037-Q1-K1-G11
tgtcattttaatcccaaccgcataataacaatttcagaattttctgggctctagagagattggcgagtttattagcggggccctttcatggtctatggcaaaggctatacttgctcctcttgagaccatcaggacaagaatggtagttggtgttgggtcaaaaaatattgctggtagtttcatagacgttatagagcagcatggatggcaaggactgtgggctggaaacatgatcaatatgcttcgtatagttccaacacatgccattgagctaggcacatttgagtgtgtcaaacgggctatgacatccctgcatgagaaatgggaacacaatgaataccccaagttgcagataggttccatcaatttcaacttatctttatct

SEQ ID NO: 41960 - DNA, 384 bp, Glycine max
  Clone ID: LIB3093-037-Q1-K1-G12
cccactcgtccgcccacgcgtccgattttcttactttcctctcacgctctgccacaagactgggtctccgcaataacggaataaaaaaacaagtttaattactattatggcgccgagggatcataagacaagcaacgctaaggctaacggtaacggtaacagcggggtgaaggaggtgcattttcgtggagtgagaaagaggccgtgggggagatacgccgcggagatcagagatcccggcaagaagagccgcgtctggctcggaaccttcgacacggctgaggaggcaacgcgtgcctacgacgccgcagcacgagagtttcgcggccctaaggccaagacaaacttccctctccctttggaaaatgttaagaactcgagccc

SEQ ID NO: 41961 - DNA, 295 bp, Glycine max
  Clone ID: LIB3093-037-Q1-K1-G2
cacatctcaagtcattatcatgaaccaccctggccagattggaaatggatacgcaccggtgcttgattgccacacttctcacattgctgtcaagttttctgaaatcttgaccaagattgacaggcgatctggtaaggagcttgagaaggagcccaaatttttgaagaatggtgatgcatgtatggttaagatgattccaaccaagcccatggtggttgaaactttctctgagtatcctccccttggtcgttttgctgtgagggacatgcgtcaaactgtggcttgtcgagtcatc

SEQ ID NO: 41962 - DNA, 313 bp, Glycine max
  Clone ID: LIB3093-037-Q1-K1-G3
ctaacgcgtacaatatttcatataacatcacatatgactgcacatatgcagccgcatagcagacccgctaatttgctcacacatatggatgacccactattgtactcactactgtctcttgcgcttgctaacactattcataaccaagtgcctcggcaagggacgcatgcaagtacatactcaagcacatactcactcgctgagtccacagttacaaccacagttacaacccatattaattctgatagtactttgcctgctatgcaccttcataatcactttcatcattgctttgaccaatgttgtcacactt

SEQ ID NO: 41963 - DNA, 426 bp, Glycine max
  Clone ID: LIB3093-037-Q1-K1-G4
cttaactagcataaaaatcacgtttgcaattctgcgtgttctttccccacccttcattatacgtacgagattcatccacccaccctctagctaccaataaaattgttcactttcactaattaattttatagtatggaaattgaagagcaaacgatgaaaatgatgatgaagtcgtcgtctaggttcagacgtatctgtgttttctgtggcaccagccctggcaagaaccccagctaccaactcgctgccatccaactcgccaaacaacttgtggagaggaacatcgacttggtttatggaagagggagcattgggttgatgggtttaatctcacaagttgtgtttgatggtggacgccacgtgttaggggtgattccaacaactcttatgccaagaaaggtatttttattttattctatttttcat

SEQ ID NO: 41964 - DNA, 467 bp, Glycine max
  unsure (1)..(467): unsure at all n locations
  Clone ID: LIB3093-037-Q1-K1-G5
cccacgcgtccgataacataaaatcttcctccgttcaatcttcatctctctctctctattggtgtgggttaagcaaaaatcatgggtccgatggtgctgagccaactcgccaccggtcttagcgttctagccggagcggttctggtgaaatcggttatggaccagaagcccatggcaggcccattcactcgctgccccacgtgcaacggaaccggtcgagtcacgtgcctctgctcgcgttggtccgacggcgacgtctgatgctccacgtgctccgggtcgggtcgcatggcctgcagcagttgcggcggctccggtaccggtcgacccttgccggcgaaaatcgcgattcgcccgccgaaccgcccaattaattagttcaccaattcgttgggctcgctcgctcgcttgctactactnnctttattttagcgtcagtataacattttaattttatatagcttttt

SEQ ID NO: 41965 - DNA, 245 bp, Glycine max
  Clone ID: LIB3093-037-Q1-K1-G7
aatcctcttaatcttaatctcatggcttacttatacaaactaaagaaggtcttataccaccgcaacttcacacactacttcgtccttcttatccatcctcaccacaccaatactacttaccccacgttacatactgtccacacctctaacaatccttaacctattatcttatatcttacatattatatcttgcttaccaggcatgtttcaaatacactacacctatttcatcataccaacttttt

SEQ ID NO: 41966 - DNA, 367 bp, Glycine max
  Clone ID: LIB3093-037-Q1-K1-G8
tccagctccagctaatcaccaatgctctcctcaactgcagcaacatctgcgtcgcgcagatcgtctccgcttcgtggtcgaacaacatctacaactctccggccgccggggctcctgcgcctcccgcggccaccgccacggacgccgctacggtgcctctccccgtcgtcgtcgccgccaacgaggacgtcgttgtctccgccgcggcagacgagaacggtgctgtacagttaaacagtagttcttattcttcatttttgaaatccgatgcaagcaaaacgattcatgccgctgaaagactgggtaggggtattgagactgatggaattaccacccctgtggttaacacttctgcctacttttttaa

SEQ ID NO: 41967 - DNA, 408 bp, Glycine max
  Clone ID: LIB3093-037-Q1-K1-G9
atttttgttcgtgctagaaccaagttactcacaccattccaaggtataagttagttcgagaggtggaacagaatggggagaagactaacttccatttctgggatgcaacatgtatcaaaatctttaacaaaacggccgatcaatgttgccaagagttgattgcaagtggcgatgagatcaaggttttccctccctattttgatgaattattgggaaagacttgggctatcaagttttagtaccatgcacgatgctcaaaaaggcctacaatgtgttgctgaaccttggtaccaatatttgagagacaatgcctttagtgttggagatgagatatgtttctacttcaggcctaataaaaaagtatgaaagttgataatcagaaaacaattggcttgggatgacagtgac

SEQ ID NO: 41968 - DNA, 395 bp, Glycine max
  unsure (1)..(395): unsure at all n locations
  Clone ID: LIB3093-037-Q1-K1-H1
ctagctctgtcgttccgtcgttgccgatggcgtttcgggtgcgaagccctgacctccgctcgcgcgttcttctctctctcttgtccatcgcttccgccaatgtcttcttcgaagagcgtttcgatgacgggtgggaaaatcgatgggttaaatcagattggaaaaaagatgagaacgtggctggggagtggaaccacacctctggtcaatggaatggagacgcttatgacaaaggtattcaaaccagtgaggattacagattctatgctatttcagctgagtaccctgaattcatcaacaagggtaagacactagtctttcaattttctgttaagcacgaacagaagctngactgtggtggtggctacatgaagttgctcagtggggatgttgat

SEQ ID NO: 41969 - DNA, 272 bp, Glycine max
  Clone ID: LIB3093-037-Q1-K1-H10
gctggaatcagtgattggggcatgctctgtgtgctggacggctgtccaaagctgaggaaacgagatgtaagggactgtccatttggcaacttaactcttctgtcaggcttggggaagtatgagtcaatgagatcactgtggatgtcagactgcaatttgacaatgaatggtgttagattgttggcccaagaaatgcctaggttgaatgttgaagtcataaaggaagaaagctatgagactcatcaagctaaaaaagtttatgtttatcgatc

SEQ ID NO: 41970 - DNA, 240 bp, Glycine max
  Clone ID: LIB3093-037-Q1-K1-H11
cccactcgtccgcccacgcgtccgcccacgcgtccgctttctctctctttctaaaagcgagaggcaacaaacacataccgaaaaggcgaaaggggttttccgagtgagatctagggtttccatcgattcggagagaggatattgatagaacgacctcaacgagcaaggtcaggaagtggagtactagaacatggattcggtgccttcgaattcgcatggaaacctcgatgagcagatttc

SEQ ID NO: 41971 - DNA, 372 bp, Glycine max
  Clone ID: LIB3093-037-Q1-K1-H3
gctggagaaactgaataagtatgctactgtggttcgtgttttggctcacactcagatcaggagaatgaaagggttgaagcagaagaaagcccatatcatggaaattcaggttaatggtggtagtattgcacaaaaggtggactttgcatacagtttctttgagaaacaggttcctattgatgcagtgttccagaaggatgagatgattgacatcattggtgtgaccaagggtaaaggttatgagggtgttgtcactcgttggggtgttatcccgcctccccgtaagactcacaaaggtttgaggaaagttgcttgtattggtgcctggcatcctgcaagagtttcattcactgttgccagggctggtcagaa

SEQ ID NO: 41972 - DNA, 246 bp, Glycine max
  Clone ID: LIB3093-037-Q1-K1-H4
cataagtctacatgctctctcttccccttcttttcgttttctctctctaccgctacttatgatcagggcctgataatcgcagagagaaaccaatctctctgttgctcatctgtaacgaaaggttatggcctacaagataagcagaacccacttcagtcttcactatacatattaagccataaacattaacggactttagttttaagagatacatattggaagaaaaagaagcttaactatgtccgc

SEQ ID NO: 41973 - DNA, 443 bp, Glycine max
  Clone ID: LIB3093-037-Q1-K1-H5
accgaaccgcaatttccacccaggcgtccgaattgttaaaggaagcgaaagaaagattgatcaaattatcgcagaggaattgaagatgggggggagagggatactgggttttgaatatggtatagttcaggccccattaggccctgatatctctgctcccccacttgttgctgcagttgccaatgctggtgctcttggacttcttagggcccctgattgggaatcgccggattacttgagggaactcataaagacgactaggaccttaactgataaacccttcggggttggcgtcgttctagcttttccttttgaggagaatttgaatgtcattttggaagaaaaagttgcagtcttgcaagtttattggggtgattgtacaaaggaattggtgaataaggctcattccgctgggatcaaaagttgtcctcaagttgggaata

SEQ ID NO: 41974 - DNA, 249 bp, Glycine max
  Clone ID: LIB3093-037-Q1-K1-H6
aaccccaatgacagagagggcgcacgcgtccatctgcttgtccttcttctccctcctcatcttctctccccattcggcaaacatacaggatcggaaatcgaatctttgtttgaaacatggcttcctcctccttcctctgccccgcagcatttaccttctcacagaagccacttcaatccacttttcttcattcctcctctcttctcactctaagcattcttcctaagaaattgagaaaaccccaccaac

SEQ ID NO: 41975 - DNA, 418 bp, Glycine max
  Clone ID: LIB3093-037-Q1-K1-H7
cccactcgtcctcccacgcgtccgaccttctatacttgttccttttgaaggttagaaggggcggaatacaaacaatggcagctactcatgaagatgtgaagcttttgggtattgtgggaagcccatttgtgtgcatggtccagattgcccttaagttgaagggagttgaatacaaatttttggaagaaaatttgggcaacaagagtgatttgcttctcaaatacaaccctgttcacaagaaggttccagtgtttgttcacaatgagcatcccatagcagagtctcttgtgattgctgaatacattgatgagacatggaagaacaaccccatcttaccttctgatccttaccaaagaaccttggctcgtttctggtccaaattcattgatgataagattgtgggtgctgtatcgaaatc

SEQ ID NO: 41976 - DNA, 414 bp, Glycine max
  unsure (1)..(414): unsure at all n locations
  Clone ID: LIB3093-037-Q1-K1-H8
tttttcagcaccaaagtttgaaacttttctcaattgggttgtagagagtttgactcatgaagggttatttttttatttttattttctctaaccaagtagaagtgcaataattaaatgtccaacatcttcttgttgttgatgtttgagattcatgtatccgattctcagtgaaatcttcttttccgggtgtatgatcaattccactgttaggcgcatgacccatttagttcaatccttctcagttgccttcctctattggttgtactacgtttcatgatttctaacccttccttagcttaataatcatctatctaaaatatcataatatcttctactagctagttttatttttattatcacaataaaatctatctgcaatatattgntatttttattttctgagaaatttgtgtc

SEQ ID NO: 41977 - DNA, 240 bp, Glycine max
  Clone ID: LIB3093-037-Q1-K1-H9
cactggggaggaatggatactgaatgagttgcacgagttatgcttggcaagtcgacatgactgtgacctgtgaagtgcataaaaccagacaaagattttgggtgggtttcctttagaagtttggtttttgtatatgaacgaactattatatgattgttatatgacatgacgtgtgtattaccagtgtttttgaatgatatatggatgtcatctggctcctccaccgtctattacactagg

SEQ ID NO: 41978 - DNA, 406 bp, Glycine max
  Clone ID: LIB3093-038-Q1-K1-A1
ccaagacttcactttgggacctgcttgagtccactctgacatatcagcacaggacatatgctgaagccgttaagaaagtcattgcaaaacccgttgcaagttaagctttttacagtgatggtgatgtgctacctttgagaagggtgttcttgtcttgcccaagtgttctgccatattatactggttgattttatataaaatcgtaaattttcctcctattggtttcgttagcctgtaggcaatatagcccccacatggagaagtaggaatttatacaagggcaatctgtgctctatgtaattttaatgtagagaccatgcgctgctaaacatgttgagacactttatatattacctagggaagacttttttctgtgtttttaaggatctctcgattcattgctttg

SEQ ID NO: 41979 - DNA, 406 bp, Glycine max
  Clone ID: LIB3093-038-Q1-K1-A10
atactatggaatctaatccaacaaccatggacgcaaaacgcgaactcgaagtggaagacggggaactgctccacccaaacgaccacgattcaatcgtgttcggtgggcccccactcgactctatcctccccgatcacttctcccttaatcccaattccagttgcagttccaattccaattccaattcctcctccgaggtcgatcgcaacttcgacgattcctatgttgccaatcagatattcccaaattccaccctcgcaccctggaacggggattccgattccgacaccaccgtcaccaacgcccccgtggtggcgattgccgaggccgaggccgaggctttgttggaacatgatgaggaacagaaaaaaatggaaagagtggaagagaaagatgatgattaaga

SEQ ID NO: 41980 - DNA, 259 bp, Glycine max
  Clone ID: LIB3093-038-Q1-K1-A11
gctagctgtaaggtgcttacataataatcatcaatatgagaaccatggttggggaactcgggtgaatgatcatacctcttgtgggagacactgaatatgtcacaattcatgatataacctaatttcggtatattgtcacaagtgatcctaggacctgaagcgccaaatgggatcataaaagggccacaatatgaccagtgcatgctacaagaatctgcacagtatagatactatctggttaacaatactttcatgtcaa

SEQ ID NO: 41981 - DNA, 407 bp, Glycine max
  Clone ID: LIB3093-038-Q1-K1-A12
cttaattaacaatcaaatgtttaaggaagaatttctatgacgattcgcaaccccatgcgaggaatccgtctcctccactccttctccgtcgtcttcctctactggttctacgttttctcatgaactaactccctctcaatcccctaccctaattcctccaatttccccattttttttctaattaatcagatttgcaaaatcctaatttctctatcctaacaaaaaccccaaattcaaacaaatccaatggcttcgattccgcgtccggcgagttcgggatcttcggagggaggaggagatccggctgcgatggacgagagaaagaggaagcggatggagtcgaaccgcgagtccgcacggcgatcgcggatgaagaagcagaagctgctcgaagacctatccgacgt

SEQ ID NO: 41982 - DNA, 411 bp, Glycine max
  Clone ID: LIB3093-038-Q1-K1-A2
tgcagatccaccaaccgttatggctgccttcagcggtgatgaaacggcaccgtttttcggcgttccttggcgccgcagctgccctcgtcttctcctgtatgggagctgcctatggcacagcgaagagtggcgtgggcgtggcttccatgggtgtaatgagacctgagctggtgatgaagtcgattgttcctgttgtcatggctggagttttgggcatttatggccttattattgctgttattatcagtaccggtattaatccaaaggccaaatcctattacctctttgatggttatgcacatctctcttctggtcttgcctgtggcttggctggcctttctgctggcatggctattggtattgttggtgatgccggtgttagagccaatgcacaacaaccaaaactttttg

SEQ ID NO: 41983 - DNA, 455 bp, Glycine max
  Clone ID: LIB3093-038-Q1-K1-A3
gtaccgtgtccggaattgacggatgcatccactctttctgtgtcttcagtttggtataaccttagccgaggtcacgaggagcactagctagcgtcacaatcatccaaatggctaggggattgaagaagcatctcaagaggctcaatgctcctaagcattggatgcttgacaaactgggtggtgcatttgcgcccaaaccctcatctggaccacacaaatctagggagtgccttcccctcatactcatcctacgaaaccggctaaagtatgctctgacttaccgtgaagtcatcgctattctgatgcagagacatgttcttgttgatggaaaagtcaggactgacaagacttaccctgctggtttcatggatgttgtttcaatcccaaaaaccaatgagaacttccgcctgctctatgacactaaaggccgattccgtctccattctgtcaaggat

SEQ ID NO: 41984 - DNA, 367 bp, Glycine max
  Clone ID: LIB3093-038-Q1-K1-A4
cttgagcgagattggagaatagattgtgttcctgtgttgtggatgatttagatagagagagaatggttggtggttaattacatcatgggtcattgtttcttttatccgaatgggttatggtttcctccatcaacaatgttcaaaagctttggtctaattgctaaagtggctctcttagcctgaaatgccaactcttttctttattctcctgctttggtttcccacctcataatattgctatcgctacttggtttccctttccataaacgcaaaacaaaagtgtctttgtccaatgaattctattttatttctctctccatgttccatctaattgttcaagggttattcatgtctggaaaaacacatc

SEQ ID NO: 41985 - DNA, 369 bp, Glycine max
  Clone ID: LIB3093-038-Q1-K1-A5
tccactcgttcggtgtatttacctacctataccttcaagatgcagatcttagtcaagacccttaggggcaagaccatcacccttgaggtggaaagctctgacaccatcaacaacgtcaaggccaagatccaggacatggaaggaatccccccggaccagcaacgtctcattttcgccggaaagcaacttgaggacagtcgtacccttgctgactacaacattcataaggagagtactcttcactctcgtctccgactgcgaagtggcatgcagatcttcgctaagacactcaccggcaagaccataaccctagagggtgaaagcttcgactccatcgataacgtcaaggccaagattcaggacaaggaa

SEQ ID NO: 41986 - DNA, 435 bp, Glycine max
  Clone ID: LIB3093-038-Q1-K1-A6
tcctgcgacaccagacagtgacagacagttcaatggtggtagcacagggaaaggaagaaggagtgttagcctcagttcactcaaccgtgttcaaagaatcagaaagccttgatggaaagtgtgttaagattgagggctatgatttcaaccgcggcgtcaattatccgttgctactcagctccatggtcacaactgggtttcaagcttccaacctcggtgatgccatccaagtcgttaatcaaatgctagattggaggctagttgatgaacccgtagctgaagattgcagtgaccaagagagggatttggagtaccgaaaatctgtgacgtgtaaagtgtttctgggtttcacttctaatcttatttcttctggtgttagagatactgcgaggtttcttcttcagcatcgcatggttgatgtagttgttacaacta

SEQ ID NO: 41987 - DNA, 332 bp, Glycine max
  Clone ID: LIB3093-038-Q1-K1-A7
ctctttttgtttcttcagtttggtataaccttagccgatgtcactaggagcactagctaagttcacaggttccaaatggctcggggattgaagaagcatctcaagaggctcaatgctcctaagcattggatgcttgacaaactggttggcgcatttgcgcccaaaccctcatctggaccacacaaatctaaggagtgcctacccctcatactcatcctacgaaaccggcttaagtatgctatgacttaccgtgaaatcatcgattttctgatccatatacatgttcttgttgatggaaaaatcaagactgacaagacttaccctgcttgttt

SEQ ID NO: 41988 - DNA, 386 bp, Glycine max
  Clone ID: LIB3093-038-Q1-K1-A8
cccacgcgtccgacagcattatcttaccttgcttcacaaagatatgaccccaatacacaacacacaggccaaagctctcgtcacgctcctggtacgccttctagaaacaggagggggcaatgatttggagctcaatgtttggtggatatatacaacataatctggacaaaaattcaagtatattatttaatggtcttctcaacttcaagatataggtttatagatgttaatatcattgtcctttggtggtgttctttcagttcagaacacacactttaaaaggaaaaaaaaaaacttgtggaattctggactagttctggtactcaaaactgctcccatttctgtttggagctaagaaagtacttccactttattttcacgaaaaa

SEQ ID NO: 41989 - DNA, 385 bp, Glycine max
  Clone ID: LIB3093-038-Q1-K1-A9
aaggctcacttaactgcttctggttctaatgctgctggtcgttcatctgcagatgttgatggcagaaccatgtttgttagcaatgtccattttgctgacaccaaagattgcctgtctcggtattataatcccaaatgcggatgttctaaaagtgattatcgttacagatgcaacggcagggcagccaaaaggggcagctcatgtagagttcatgcgatatgaaacggcagataatgcattatctctggataacacttctttcatgtcaagaattctcaaggttattaagaaaagtgctactcctcatgaatcagctccagccatggcatggccacgctttgttaaaggttctccattcccttctgctaggttttccagacatcct

SEQ ID NO: 41990 - DNA, 392 bp, Glycine max
  Clone ID: LIB3093-038-Q1-K1-B1
ttgacggatgcatccaggcgtaatcaatcacattctgtgagttggacacatgggccaagattccttctctagggtgagggacttggcatgctgaacctggcgttttagctgaagctctcaccacagccattcagggtggatacaggcatattgactgtgctagtgcgtataataatcaagcagagattggttctgctcttaagaagctttttgatgatggtgtggtgaaacgtgaggacttatggatcactttcaaactctggtgttcagatcatgcaccagaagatgtgccaaaagcattggataaaacattacaggaattgcgacttgactatcttgacctcgatctgatccactggccagtccgtatgaaaagtggtacatttggactc

SEQ ID NO: 41991 - DNA, 313 bp, Glycine max
  Clone ID: LIB3093-038-Q1-K1-B10
tctctctctagcttggacgagtgaattagattcatcatcaagatgtcgtctctgatagcggaagatgtgaagagcagatcagaggtgtaccacggggacgaaatgtgccaagtgaagtccaaggagcttctcaaggaaatcgccctccccaacggccttcttcccctcaaggacatggaggagtgcggctacgacagacaaaccggcttcgtctggctcaaacaaaagaagagttacacccacaagttcgacaagatcggaaagcttgtcttctacgcgcccgatgtaactgctcatgtccaacaaggtaaaa

SEQ ID NO: 41992 - DNA, 413 bp, Glycine max
  Clone ID: LIB3093-038-Q1-K1-B11
gaattctctaaaagagatctttttctgctctttgaagaaagaagggtctttgcttgattttggagatgtctctgctctcagatctcatcaaccttaacctctccgataccaccgagaaggtgatcgcagagtacatatggatcggtggatcaggaatggacctgaagagcaaagcaaggactctcccaggaccagttagcgacccttcagagcttcccaagtggaactatgatggttccagcacaggtcaagctcctggtgaagacagtgaagtgattttatacccacaagccattttcagggatccattcagaaggggtaacaatatcttggttatctgtgatgcctacactcctgctggagaacctattcccactaacaagaggcacgctgctgccaaggttttcagccat

SEQ ID NO: 41993 - DNA, 273 bp, Glycine max
  Clone ID: LIB3093-038-Q1-K1-B12
gaaatggcgatggcaatggcgcttcgcaggctttcatcttcaattgacaagcctctgcgcgctctcttcaatgccggttccctctactacaagtcgtctttgcctgatgaagctgtttacgacaaggagcgacccggagttacatggccgaagcagttgaatgctccacttgaagtcgtggatcctgagattgctgatattattgagcttgagaaagctaggcaatggaaggtgctagaattgataccgtcagagaatttcacctctgtgtct

SEQ ID NO: 41994 - DNA, 427 bp, Glycine max
  unsure (1)..(427): unsure at all n locations
  Clone ID: LIB3093-038-Q1-K1-B2
cccactcgtcctacaagattgttttaccttgcttgacaaagatatgaccccaagacacatcacacaggccaaagctctcgttacgctgctggatcacgctctgaaaccgtgtgcgcgccatgaaacgctcgaagcgccgagtcatgattaggccgaactcgaacgtcataataaaattcctcttggtgatgcagaagcatgggtacattggtgagttcgagtatgttgatgaccacagggctgggaaaatcgtggttgaattgaatggcaggctgaataagtgtggngttataagccctcgctttgatgtcggtgtcaaagagattgaaggttggactgcaagactgcttccctcaagacagtttggttatattgtcttgacaacctctgctggtatcatggatcatgaagaggctttgagaaagaa

SEQ ID NO: 41995 - DNA, 323 bp, Glycine max
  Clone ID: LIB3093-038-Q1-K1-B3
atcgtatcataaaaatctcaccctgttgtgcaactttctctctgacacacaccgaacactgaaacacacacagtgtgcagcagcagcagcatcatcaagagaagaagatggctctgcaactatgggagacattgaaggaggccatagatgcctacacggggctctccccgcccaccttcttcacccttctggccctgatcctagccctatactacgtcgtttctgggctcttcccctcttacgaccaccgtcacaacaccggctcgcgcgacttggagccccagatggagcctctgggaccccccgttcagatcggcgaggtc

SEQ ID NO: 41996 - DNA, 406 bp, Glycine max
  Clone ID: LIB3093-038-Q1-K1-B4
acgcgcgattatacaaattttacgtatacacaaatgctacattgtagcgcaatgtattgatacgcgtacacccagtatgttaagatgagagcgggtccaagacgcgtatggtaggaaaggggttgtgtgatttttgaagaatcgcgtttgggagtagtcggagatggagctttcgactccgaattcttcctcgaagcacttgtccatcacgccgggttctagggttttgagaagccctctctccgacgaacagatctggaagcgcctccgtgacgcttgcttcgacgaggaatcgattaagcacaaagacaaagctgcgcttattgcttacatcgccaagctcgaagctgagatatatgatcaccagcaccacatgggccttctcatattggagaaaaaggatttg

SEQ ID NO: 41997 - DNA, 249 bp, Glycine max
  Clone ID: LIB3093-038-Q1-K1-B6
tagagcgggtcctgagcctatgtcgagcgattgcgattgagtgatacaggaagaaatcccattggtaataatcccagatggagctttcgactccaaattcttactcgaaacacttgtccatcacaccgggttctaaagctttgagaagccctatctccgacgaacagatctggaagcgcctccgaaaacactggctgcgccctatgaaaggatctaagctcaaagacccagcttcgctaattgattaca

SEQ ID NO: 41998 - DNA, 307 bp, Glycine max
  unsure (1)..(307): unsure at all n locations
  Clone ID: LIB3093-038-Q1-K1-B7
gaaatatgaaaaagctgttgatcctcaatatcttccaacacggtctgatgttcagaaggttcttaatggctctatgaacagctttagtatttataatgtttatccaagatatttccgtgtcactggttcaggcgatgttagacctttggaagaggataatgctgttagtgctgatctcattataaatcgtgagcaacttgagtggtggggccttccgagatactaatccatcaaanttgagtagactttgtggaggtttgacgggacctatggcaatcatagtatctgaggagacaccaccgcagga

SEQ ID NO: 41999 - DNA, 434 bp, Glycine max
  Clone ID: LIB3093-038-Q1-K1-B8
cttttatgaaattgatctgaacttcttttccattcttaattcatcttcaatcagcatggagaagatcacttcctctcaatttcttctcttcctttcactccttgctttatggttcacatcgattgcttttggagctgataccactcacccagaagaagtgcaagctctgaaagatatgggcaagacgcttggtaagaaggaatgggacactgacatagatccatgctcaggacaacctccctggttcacatctaaggagaacaacaatgtcacttgcaattgcactatccccggtgaaaacttctgccatgttgtaataatattgctgaaatcacaaaatcttcgaggcatgctcccacgcgaactgataaggttaccttaccttgaagaaattgacctcacacaaaactaccttaacggtactatacctaccc

SEQ ID NO: 42000 - DNA, 424 bp, Glycine max
  unsure (1)..(424): unsure at all n locations
  Clone ID: LIB3093-038-Q1-K1-B9
caaaatgggtggatcagtgagggacgtgaagtcgaagggcgaggtcgacgaggtggtggcgagtggctctccggttatcctccacttctgggcgtcgtggtgcgaagctttcaagcacatggaccaactcttctctcacctttccactgatttccccaacgcccgcttcttaagggtcgaggccgaagagcaacccgagatttctgaggcttactccgtctccgctgatcctttctttgccttctgcaaggatgggaagacctttgatacattggaaggagctgatccgtcaagcttagccaataaggttgctaaagtagcaagctcaattaaccctggagaatctgcatctnctggcagtcttgggatggctgcaagggcttctgttcttgaaacggtgaaagaattagcaaaggacaatgat

SEQ ID NO: 42001 - DNA, 323 bp, Glycine max
  Clone ID: LIB3093-038-Q1-K1-C1
cgcgaatggtacatttaaactagagaggatctgtttgaagagatgttgcaagaacctgaagaggtagccaagaaaagaaaaaactgtcgagaactgctccgagcttatcaacaggcttttaaagtgagtgcttataatactttaatcagcattgtctagctgaagttctggattattctatatgaagtttggttctcctttaaaggtagttctacgcctttgagttcctgtggaaatgctcatgaactttgttgctcacattggtctactcacctataaaaaaagggcagccttgtgctataaaactccgtttatgcatgggg

SEQ ID NO: 42002 - DNA, 311 bp, Glycine max
  unsure (1)..(311): unsure at all n locations
  Clone ID: LIB3093-038-Q1-K1-C10
cccacgcgtccggaaaaagccaaaaagcctaccttgttcttatagacttggagttaactgggattggaattaagtatggagtctccaacaccaataatccctttcaacgatcaagccttctgcttttcctcactgctatattttcccacgtacttgcatccacggctgacatgaccaaacaaattatcatcataacatttcacatgtcagggataacgggatgtgaaacactcatgtggattctcattcatgactntatgtgctactttatggtcaacttgcttcttttactgctgctagccaaattcttc

SEQ ID NO: 42003 - DNA, 443 bp, Glycine max
  Clone ID: LIB3093-038-Q1-K1-C11
cgttgattgatttcatcagtattgtaatggaaggaacatgaacagaaacacgatcgattgagagtctcattcggggttagaaatgtgacatttccatggatgaaaaccctaacccctcaatccctcgcgcctcttcctcttcctctcaggaattcctcaaacaagtccaagctgccctaaagcgccatcgccctctcggtactacgcaatcgcataacgtgaggccgaagcgcgccatggtggctctacgaaaggccacgaacaagctcgaggaggatccgccgtcgatctccgacacgtgcaccggcgaaggctgcaaaaatgagccctctttgctgctggaatctctgagtgttggtgcacacaacaaggttcagtttttaactgagatcaacaatgccactgcacagccgcaagatgaagcatcgattggattcaatcaa

SEQ ID NO: 42004 - DNA, 253 bp, Glycine max
  Clone ID: LIB3093-038-Q1-K1-C12
ccatcctcaactaccattattattgccacccccactcgcgagtgtattggattgagatctgaaaagaatattttggcagaaaaaactcccgcgtggatctttgctcatttgaaattcgatggcgaagttcggctagggtgacaagcggtggatcgtggctgagcgccccgacggcaccaacgtgcacaactggcactgggccgagaccaactgcctcgagtggtccagaacctttttcaacaacagtttcacc

SEQ ID NO: 42005 - DNA, 383 bp, Glycine max
  Clone ID: LIB3093-038-Q1-K1-C2
gccacgcggtccgatcacgcgtccggattgatgaatgatgatccccatacatcaatctgctgcatggtaagtagacttggcttccacaattcacatcgctgatgaagagtatgtgttcgtctatcttaacttgttcgggttttggattcggtagttgttagaagtaattaacgatgtaataacttgataagtgaaaggttttaatgactattggtatgtgtgtaagtgtgatgataatttccaatagaggttactcttgaaattctaagaaataatttattggtgcttatttgggaagtctttagaagtcatcactgccactaaaatagaggtttttaagatgagaaagaacaaccccaacttgaagaggacatcatgtaccc

SEQ ID NO: 42006 - DNA, 402 bp, Glycine max
  Clone ID: LIB3093-038-Q1-K1-C3
ggaagacacccacccctctaagaaatgcggtcaattcctttgggaacctcagtatctgcaactcctgtaaacacctcaaagttatcacctttcagtgttaattttaagaagccaaccacctttccatctcggggttcaactcctcctcatgaattctctctctcccaatcaggattatgcagagcgagtcaagttgttgatttgttcccaactgtgtctcctgaaattattgtgcgggaggccaggttagaggactgttgggaagtggcagagactcactgcagctccttcttccctgaatattccttccctttagattttgtgcttaggatggacagattggtggccatgatggcaggattcactctaccaaacggttacaagagaatcttgttggttgct

SEQ ID NO: 42007 - DNA, 357 bp, Glycine max
  Clone ID: LIB3093-038-Q1-K1-C4
acatggcgtaggtcgagttccaagatcagacgcctggtgtgatggtactcaatctccgatggacacacgcactcgaagcatgtgggtgatgcgcataggctctggctgcactctgctgtgcaaaggcacatgttgttagagaaagaatactaaaatgagtcgcggaagaagaaaacgagctcgctaagggaagagtgcaagcagtaatcttagacatgagcaaccgtgatgaatggtgatacttctgggattctaatactggaggaactgcacatgaggtagctgtcgcgtggcatacaattggctatggtgaaccctaggtagctagtgattcacaagcttcaagtggcacatttt

SEQ ID NO: 42008 - DNA, 174 bp, Glycine max
  Clone ID: LIB3093-038-Q1-K1-C5
tcgtcacgccttaagaaatgcggtcaattccttagtgaacctcagtatctacaggtcctaggaacacctgagagatctgacctttcagtgttaatcttaagatgccaaccacctttccatcttgtgggtcaactaactactgatgcattctctctcactcaatcacgatcatgc

SEQ ID NO: 42009 - DNA, 421 bp, Glycine max
  Clone ID: LIB3093-038-Q1-K1-C6
cccacgcgtccgagaagatgtcgggtatgggagacgggtacgtgggcaccgaccaagacgcggtgaggattcgacggttggagaagcagagagaagcggagcgtcgcaaaatccaagagctcaaaaccaagtcgacctacgccaagggccaacccggtctcctccaattcggttccagcacttccgagattcttgagactgcctttaagaaggaaactgtgggtttggtcactagagagcagtatgtagaaaagagggttaacattcagagcaaaattgaggaggaagagaaggagaaacttcagaagcaacagcatgaagaggaggagcttcaattagaaaagcgtaaaaagaggaagatcaggggcaactctcgattgtcctttgctgaggatgttgacaatgatccccaagacgacga

SEQ ID NO: 42010 - DNA, 366 bp, Glycine max
  unsure (1)..(366): unsure at all n locations
  Clone ID: LIB3093-038-Q1-K1-C7
cccacgcgtccggtttcaagagtttgaagcaaggaggaaaaagaagtttgacaaacaaattgattcaaatgtgatgatcggttccaaaggtcttgatgagggtgttgatctatgaggtggtcttaggcttgttgatggggttctttcagttgtacatttggatgagcttctggatgtagcgtggaatactgggtgttttgtccatgccttttatttcacanatganataagtgtatggagatccctttgtcacgttgtatattattcttaattctattttctgttacccttatccagatttgcctataaatgtgctggcttgtagatgcagccaatatccagcactagactaaatttcagaatatg

SEQ ID NO: 42011 - DNA, 415 bp, Glycine max
  Clone ID: LIB3093-038-Q1-K1-C8
gatacacgtcatcatggatctgtccaaagccagcttgttgacgcacctcacaaccctctgcgattctcacggacgaccttcctcgtgcgtttcaatccaggctgctctacttctcactgcccggaggaggccgcggatgagcgccttcgaagaaagcaccagcttcaaatggaacctgccatgtgcaatattaaccgtaccgaaaccgcttcaaagcccatacaatcaccttattatctaaacattatcatccccaagctcctagaacacgtgtctgcactcaccggcaacctattgaactttgactaccgaattctaaccctaatccgcgagagcgacctcgacgagtcggctctgtacacgcgccagtcgatctactccaactgccggcccaccatcttcaccattaacgccg

SEQ ID NO: 42012 - DNA, 302 bp, Glycine max
  Clone ID: LIB3093-038-Q1-K1-C9
cccacgcgttcggatggttaggactctgtatgctgataaagacaacactcataccgttgtagagaatgatgctgcttgccatgttgcttaatttagttcttgcttcctttgtcttcttgagttttatcagagacggtagtgcagggatcactatctctttcattcagtcagagttgcctgcagttgacattcctcttgatcatgaaacattttcagttccaaagggttataatgcaccttaacaagtgcacattacgcaaggtgactatgatggaaaagcagtaatcatctcatgggtgacc

SEQ ID NO: 42013 - DNA, 166 bp, Glycine max
  Clone ID: LIB3093-038-Q1-K1-D1
gtctgattgatgatgccgaagaacaagggtatagggaggtcagaacagtaagagtggtaagaacgaggctgacgactagaagcgatagctgttgttcaaggagcgacgggcaggactacgcgcatgtgctccggatgcttatgaacggtctgtacgaggcgatgtg

SEQ ID NO: 42014 - DNA, 386 bp, Glycine max
  Clone ID: LIB3093-038-Q1-K1-D10
gctatacttgttccttttgaaggttagaagtgctacaatacaaacaatggcagctactcaggaagatgtgaagcttttgggtattgtgggaagcccatttgtgtgcaaggtccagattgcccttaagttgaagggagttgaatacaaatttttggaagaaaatttgggcaacaagagtgatttgcttctcaaatacaaccctgttcacaagaaggttccagtgtttgttcacaatgagcagcccataccaaagtcttttgggattgttgaatacattgataagacatggaagaccaaccctattttactttctgatccttaccaaagagctttggttcgtttttggtccaaattcattgatgataagggaactcaacatttcaaaa

SEQ ID NO: 42015 - DNA, 442 bp, Glycine max
  Clone ID: LIB3093-038-Q1-K1-D11
cccacgcgtccgattctatgtatgtagattgattgctaagtacagaccaattatgcctgtgatatccgttgtcattcctcaactgaagacaaatcaacttcgatggacattcaccggtgcttttgaggctaggcaatctcttattgtgaggggtctttttcctatgctggcaaatccactacacccggtaagaattgctcaacatggattgatataatgatggatccaaataacatcacaaaaattcattatataaaaatcacagaacatataacgtacgtaaggtgtattaggcaaatcaaataaacataattttactagcataatgctaattcaaccagaaataatatattccaaggcccaagacaattacattttaagccctaattaacattaaaatccctatttcccggattgaaacctgccataaaatcaattaaat

SEQ ID NO: 42016 - DNA, 220 bp, Glycine max
  Clone ID: LIB3093-038-Q1-K1-D12
cccacaccttctactcaagatatatatatttatatcaacacacacacatactatatcctgggtatatttcaaactttctcatctcataactaacccacttctttccacatcctctaatacatttaaatcttatgaatctgcaaacatatctactaacgctcctattcttctctcatcaaaaccacctgtacctactacatcttctactactatatcaaat

SEQ ID NO: 42017 - DNA, 420 bp, Glycine max
  unsure (1)..(420): unsure at all n locations
  Clone ID: LIB3093-038-Q1-K1-D3
ggtgaatcgaggtggttctaggatcatcaaatcagtgtctgcagctcttggtacgaggttttacgccaaggttgcaacagggactgacatagtctctgccgcacccaatgtttctctccagaaagctcgtacctgggacgagggcctggcttccaagttctccaccactcctctcaaagacatcttcaaggacaagaaagttgtcatctttgggctcccgggtgcatacacgggagtttgttcaaacaaacacgttcctncttacaaggagaatattgataagtttaaggctaaggggatagattctgttatttgtgtggctattaatgatccctacactatgaatgcgtgggctgagaagcttcaagccaaagatgctattgagttttatggggactttgatgggagctttcacaaaag

SEQ ID NO: 42018 - DNA, 435 bp, Glycine max
  Clone ID: LIB3093-038-Q1-K1-D4
tcttgtttctcgtttaagccatcatagggaggaggggcttgtcgggtcaaacaagtgcaacagagcgagatctgagtcgtaattcggagtcccttttgaaaaaagaggtcttttttgctgtaattcacttggctctccatttgggttacttggattttgtgaggttgtcttggagttggagtcatggcagttgaggttgtgggatttgagatggttcaaggaccagtggagaatggtactggaggaaaacctgttttaaatgacaaggagaatggcaagctggaaaaagatgtgggagctgcggatgccatcaaatttgggacacatggataggaatctgcaaaaacggaagggattgatgtttcggacgtgaatgccccgaaagatgctgctgaagattgtcctgcacctaagcagattcattctttttatttt

SEQ ID NO: 42019 - DNA, 325 bp, Glycine max
  Clone ID: LIB3093-038-Q1-K1-D5
acggctagaggtttggtcgacgcgcttgtcgacaacagcgcgctcgagctcctcgtgcagaagctgcaccgcttgaacgattccgatcccgacaagaacgccgccgtgtacggttccctcgccacggtggagaatatgatcgaggtgaagcccgcggtggcggagctggtttgcgagaagacgaagttgctgaagtggcttctcgggaagataaaagtgagggagtttgacagtattaagcagtatgcttccgagattttggcgattttgctgcagagttgtactgtgaatcagaagactctgggacagatgaatggggttgatg

SEQ ID NO: 42020 - DNA, 432 bp, Glycine max
  unsure (1)..(432): unsure at all n locations
  Clone ID: LIB3093-038-Q1-K1-D6
aattaattcccagggagttaatatctatattcaatgacaaagagctggaattattgatcagtggacttcctgatattgatttggatgacttgagagcaaatacagaatattctggatatagtggtgcctcaccagttatccaatggttttgggaggctgttcaaggtttcagcaaagaagacaaagctagattgctgcagtttgtgactggcacatccaaggtgcctttggagggttttagcgctcttcaaggaatttcaggtgcccagaggtttcagatacataaggcatatgggagttctgatcacttaccttctgctcatacttgtttcaatcaattagatttgccagagtatccatctaaacaacatttggaagagaggttactgcttgccattcatgaagcanatgaaggattcggatttggttgac

SEQ ID NO: 42021 - DNA, 413 bp, Glycine max
  unsure (1)..(413): unsure at all n locations
  Clone ID: LIB3093-038-Q1-K1-D7
ctttgggtggatacatttcttccaatagaaagcagattgaagctgcttcagccgaagccactattgaagctacggcccaaggcattgcctcagtgctttgcgctcatggtccagaggtagagtggagaatttgtaccatttgggaagctgcttatgggttgattccattaaattcctcagctgttgatcttccagaaattgttgttgcaacaccacttcaacctcccatactctcatggaatttgtacatacccctactcaaggttctggaatatcttcctcgtggtagtccgtctgaagcatgtctcatgaaaatatntgttgctacagtggaagctattcttcagaggacatttccagctgagtccactagtgatcacaagaatanaaacaggatactattgtgtggggtc

SEQ ID NO: 42022 - DNA, 393 bp, Glycine max
  Clone ID: LIB3093-038-Q1-K1-D8
ctgacgcatgcgcggacacgtgggtccgggtgtatgatcaattacactgataggcgcacgagatatttagtgcaatccttatgagttgcctaactctattggctgtactagctatacatgacttgtaacctctatcttagcttaataagcatctatctggtagactaggatatctagtactagctagtgttattgtgattatcacgatactatctatctgcaatatataggtatctgtattatctgagaaatttgtgtctagttataagtgtctgggtcctggtcctgcctattgtgtcaattaaattgagaagggttgcattgtattgaatcatatatcgtatcatataaacatggcttgttcaagtggaacatcttcaaggtcattatcta

SEQ ID NO: 42023 - DNA, 320 bp, Glycine max
  Clone ID: LIB3093-038-Q1-K1-D9
cgaaggactttaggttgggatttgggaattagggttattcgcgtggcgaagatgattgaggtggttttgaacgatcgattggggaagaaggtgcgcgtgaagtgcaacgacgatgataccatcggcgacctgaagaagcttgtggcggctcatactggcacaagagccaccaggatctcgatccaaaagtggtacaccatctacaaggatcacatcactttaaaggataacgagatccatgacggcatgggttctcgaactctactacaactaaacacaacaaggtgtggtttatgcgtaatatactatgtgctggaaat

SEQ ID NO: 42024 - DNA, 429 bp, Glycine max
  Clone ID: LIB3093-038-Q1-K1-E1
gctcctctcacattctccttcttcttcatccttatctcttacatttcttcatcatcaggtggaaacatctcccacttctcttctttgagtttgtatttgaatttcgtcttaccaacatgaactctagttgtaattagaaaataacacttatgaaactgcatgtaaattttgttgcttcatctcattttgcatttgaaagttgtcaactttctgacgggctttgcagaagcgggatcaatcggaataaactatggaagaattgcgaacgacctacctacaccggcgaaagtggtggagcttcttaagagtcaggggctgaaccgtgtgaagctctacgacaccgacgccaccgtcttaaccgcgtttgccaactcaggaatgaaggtggtggttgccatgccaaacgagcttctcgccaacgccggcgcg

SEQ ID NO: 42025 - DNA, 421 bp, Glycine max
  Clone ID: LIB3093-038-Q1-K1-E10
ctcacgcgttcgtcgacacgttcggtctgaagcaaccatggcaatggcagcgcaagcctagctcttaaccacacccgtgtgcggtctcaaagccagcgaccagtcctacgtgccatggaagcaaaactccagcctctgcttctacagcccgaagcccctcaagtgctgcacaacaatcagagcagcagccgccgacgagaccacagaggcaccagcaaaagtagaggctgcaccgctcgtggtcaccccaccagaactttgacccaaacaccccttgcgcgatctttgggggcagcaccggcgggcttctgcgcaaggcacacgttgaggagctttatgtcattacgttggactcacccagagaacagatctttgaaatgcccactggcggcaccgctatcatgagggagggtcctaacct

SEQ ID NO: 42026 - DNA, 400 bp, Glycine max
  Clone ID: LIB3093-038-Q1-K1-E11
ggaaaaatatatagcttctacatcatggcatcgggcacttcaaattccggactatgctgtgtccttggatgataaagaccacctctttgccaaggttgtgagccagaaagatagtagcttaacacatatagtgtggaatccaggatctgaatttgcattctgtgattgttcttggtcaatgcaaggtaacctttgcaagcatgttgtcaaagtaaacatgatttgtgaaaatcttaaaggttatcaaccatccatgtctttccggtcttttcaagaggttttgatggatctatggaaaaagccagtggatgattcttttgcgttggatctgtcattggcttggacccatcagatgctagatcaaattcaaaaacaagttgaactgaataattctactgat

SEQ ID NO: 42027 - DNA, 436 bp, Glycine max
  unsure (1)..(436): unsure at all n locations
  Clone ID: LIB3093-038-Q1-K1-E12
cccacgcgtccggaacaaagtaggaagcactttacaagtccaaccttctgcatcttggtcgaaatttaaatcccctaaaactggtgaaacaaaacatactagttagtttttgtggcatataggattaaaaaataccaagcgcctaggttggactggaaaatagacttattttcataatcttgtaagttatagccaacaaaccatcagcggacaactcccaggaagacacatacaaaatatgagctttgtatgattttgtattacgaaccgcgacaatcaaaacaacggagtatgaggtctggagcatgcagcaacaaccaaaatcatcaagcatttacttaacgatcagataataatgggttaatatatttccatgtcttcagtacatatgcctcaataatgaaattcagaaactangtaggatgtcaagtggcca

SEQ ID NO: 42028 - DNA, 438 bp, Glycine max
  Clone ID: LIB3093-038-Q1-K1-E2
agtgtccagaggttgaagacgacgaaaaggaggagcattatcaatagcgtcataacacacctctgcaattggatccgccacaaatcgaagagcataaatggcgttgaagttgcaaatttagagatctgaacattaatcataatcaccatcactgttcatgctcttctggttgcgctgattctcaccaatggacaagtcaagtgctctggagtacatcaaccagatgttccccaacgaggtgtctctttctggcgtggaaccgctgatgcagaaaatccagaacgagattcgcacagtcgatgccggaattctcgccgccgttcgccaacagagcaactcaggaactaaggcgaaggaggatctcgctgctgccacacgcgccgtcgaggaacttatgtataagatccgagagataaaaactaaagcggttcagagtga

SEQ ID NO: 42029 - DNA, 334 bp, Glycine max
  Clone ID: LIB3093-038-Q1-K1-E3
ggctaagagtaaggaagaggaagatgggttggtcttccgcaacagcatgtgcgtcgctctcctcttcgactccgctgcctcgacttccaccgtctcgcactggcactcccattcctggttcgctttcattttcatggctttcttcatttcccactttaactttaagtgcttctcgttctcgctcctccggaataaaccctcccaatccctcacgttccgatgattccttcattcgagctgcctggacccgaagatctcgaggtgaagctgcaaagaaacctaacaggaaatcgtggaagcagaggacagacatgtacatgagaccattcttatt

SEQ ID NO: 42030 - DNA, 347 bp, Glycine max
  Clone ID: LIB3093-038-Q1-K1-E4
cccacgcgtccgaaaaccctgaagaaagacacagccattgtttacttttcattgattgagccaaagctttgtattttctgcgataattttccattgggtggaagaaaggctcaacctttaattcaaaggaccagggtcttaattgaagttaatggtcatggtttgggggtccgattatctccgacttcataccggcaggtcccgccagcggggcgcggcgcgtgaccgccgacatcctgtggccgagtttgaggaagcgcttctcgaagccgctgctggacgatgatttccaggctgggttcagagaattcaaggatgattcggaaatcgaggatgttgatgacgag

SEQ ID NO: 42031 - DNA, 425 bp, Glycine max
  Clone ID: LIB3093-038-Q1-K1-E5
ctcgccgccggcggatcctccgtcttcagaccagacgaccccgtcggaggcgaagcgcgtggtgaaccgctgctccggctgcaggaggaaggtcggactcaccggatttcggtgccgatgcggcgagctcttctgcgccgagcaccggtactccgaccgccacgactgcagctacgactacaaagccgccggaagagaagccatcgcgagggagaatccggtgattagagccgcgaagatcgtcaaagtctgaaaaaaaacaaaaaagaaggaaaaaacccgaacggaacggaatctcaaaacgacgtcgttgacggttgacctttcgcgcgatcgggttcaggtcacgggtttcgctttttttcttttcagatttatatatagagagaagaaaaaaaaaggtgcagataacagggttgagagag

SEQ ID NO: 42032 - DNA, 430 bp, Glycine max
  Clone ID: LIB3093-038-Q1-K1-E6
cactctcatcagattcgggtcgggttagcgttatcggataacttcgcccatagattctgtgtttacggggcgaaaatgacagtattcttagccacgaggctcgtgttgcggagatccccgccgcttctctggcggcgcagcttttctcgggcggcggtagaggccgaaaaggacactgttgccgtgccgtcgcttccgttgttcgattactctccgcctccgtatgcggggcccaccgctgacgagattctggcaaagcgcagggagtatctgagtccttccatcttgcacttctacaagaatcccgtgaacatagtggagggtaagaagcagtacctgtttgacgagaaggggagaaggtacgtggatgcgtttggagggattgctacggtgtgctgcgggcactgtcaccctgatgtggtccaagcca

SEQ ID NO: 42033 - DNA, 295 bp, Glycine max
  Clone ID: LIB3093-038-Q1-K1-E7
ctttcaagatgcagatcttcgtcaagacccttaccggaaagaccatcacccttgatgtgggaagctcttacaccatcgacaacgttaaggccaagatccatgacatggaaggaattcccccagatcagcaacgttttatatttgccagaaagcctctcgaggactgtcgtactctctcctactacaacatccagaaggagtcaacccttcaccttgtacttcgtattccgagctgcatgcagatcattatcaagactctcactggcaaaaccataacactagaagtcgaaagctc

SEQ ID NO: 42034 - DNA, 394 bp, Glycine max
  Clone ID: LIB3093-038-Q1-K1-E8
tgtttccttgatgatagattggagatattacgtttgtacccagctgcaccacggaatgtgccacacgagtcctaagaagatgcaccggggggtggatatcatgtccaaactggcacgcctcttgtggactaattttcaaaactttaacgagacccttcattataccctaatccattagaattttggccagagagattcttgacaacccacaaggatgtagacattaaaggtcaacattttgaattaattccatttggggcaggtagaagaatgtgccctggaacttttttcggtcttcaagtaatgcaactaacgcttgctactctattgcatgggtttgacatttgaactagtgattgggaacatgtccatatgcctgaacaaattggactta

SEQ ID NO: 42035 - DNA, 438 bp, Glycine max
  Clone ID: LIB3093-038-Q1-K1-E9
gcttgagagaaaaaatattccatttccagaattagtagcactagtgctctcttttgtttcgaaaaaaatggttcaacaggaagtgcgtaaaggtccttggacagaacatgaagacttcaaattggtgtcctttgttggattgtttggaaaccgtagatgggactttatagcttaggtatcacgtttgaaggtggctggagaaagttaaatatgcattagactaaaaaaatcaaatgcttatttgggcatcatgctacaaaaaaatatagattatggaagaagaagcctttaaccacctcattttgctgtacgtttgaatcgaacaggttagagttgcagattaaggtgggttaattacctacatgctggctctaagcgtgtaaagatgaccccttaggaagaacgccttgtattggaacttcacttaaaatgggggaa

SEQ ID NO: 42036 - DNA, 395 bp, Glycine max
  Clone ID: LIB3093-038-Q1-K1-F1
ctcgaactccaaaaccctacgcatgcggtgacgtgaatcgctgatgcgccaaaaatgaccggaagcggaagaagtagcgttcggagcagggcgagatccctctccgactccgacgccgacgccgattctcttcgacaaaagaggcctccgctgaatcgccatagagagagaagcaaatacggaagctacattccgatatacagcaatgccaatctcaaagtgctgctcggtatctgcttcgtcgcattcttcatcatctggtttatgattcaccacctctccaattccgtaacggagccgaagcttcctcgcgccgttacgccatttcccgcgccaaagataatggaccttcctcagtttgaaggtgagcaccaggagagtttgtattggggaac

SEQ ID NO: 42037 - DNA, 443 bp, Glycine max
  Clone ID: LIB3093-038-Q1-K1-F10
ataagcacaagagtagctgggacttatggatatatggctccagaatatgcaatgcatggggatttgacagacaaagctgatgtctatagttttggagttgttgccttggaaattgtatctggaaagagcaataccatccaccgatccaagcaagaagcattgcatcttctagattgggcacatttattgaaagagaagggtaacctaatggagctagttgatagaaggttaggttcagatttcaatgaaaatgaggtaatgatgatgatcaaagtggcgctcctatgcaccaataccacttcaaaccttaggcccaccatgtcatcggtgcttagtatgctagaaggaaaaactatgattccagaatttgtttcagatccatctgagataatggatgaaatgaagttagaggcaatgcgacaacattactttcaaaaagaaaa

SEQ ID NO: 42038 - DNA, 204 bp, Glycine max
  Clone ID: LIB3093-038-Q1-K1-F11
cccacgcgtccggtttttcaacaaatcagttcaggaaacgtcacttcaggtttgaaaaatgttactaatgatatgaagactaagaatcgcaccgatagaactgagttgttggggctattgaaaaagaaacttctgcaagttcacgtgtgttttctaaagctggacctctcaaatttgaacttcaaatgggccgcaaatgggtta

SEQ ID NO: 42039 - DNA, 415 bp, Glycine max
  Clone ID: LIB3093-038-Q1-K1-F12
gtgatacttgctattaacgatttcttggccctgatattttctttaatcctgatatatagggcatgtgactttaccacccctttgtcagttgtaataaacaagtgcattcagtctgcgccaattgacacatggagatcattatacaataatgtactgtagtctggaggttcaaccatgttcaaggatattcacaggaagttgcaacgttatctaaaaaaaatagagaatgctcgtgtccttttatctgaagcgcgcttgaatggtgagataaaatctcagccagcatatgtcaatgtactcatcaatccaatccagagatattcagtttggcttggaagatcagtacttgcgtcaacacctgatttttttactgcttgtcatacaaaggcagaatattaagagtatggagcaagca

SEQ ID NO: 42040 - DNA, 411 bp, Glycine max
  Clone ID: LIB3093-038-Q1-K1-F2
ggcatggaatgctctttatgactcgctcttggaacgttgctgttgattcttgattgttgtctatctcaactttacgtctgaagtgtcttttgagcaaggtgatgggtctggaaaagaatcctcttgtgtttttcgatgtctcaattgatggggaccctgtggaaagaattgttattcagctttttgccagtatagttcctaggacagcagagaattttcgggcactctgtacaggtgagaagggcattggagaattgacggggaaacctttgcattataaaggaacaagctttcatcgtataattagaggttttatggctcaaggtggtgatttttcaaggggtaatggcacaggtggagaaagtatatatggagggaaatttgtagatgaaaatttcaaactaacacatg

SEQ ID NO: 42041 - DNA, 365 bp, Glycine max
  Clone ID: LIB3093-038-Q1-K1-F3
cccacgcgtccggttccgttgctgccatagttttagtatcatcactttatcatactcatgggaaactgtttcagaaagacagcagctgatgacaacaagattcacaagaatgagtataagactcccaccaccaataatccacgcccttctcccccagagagattggtgaaggaaacagtggaagaaagaggtgagcgtccacaaaacaacagcgttccaaagcttataaagtacacgttggatgagttgagaagtgcgaccagaaacttcagaccagacacggtcctaggcgagggtggttttggacgtgttttcaaagggtggattgataagaacaccttcaagccctcaagagttggtgttgg

SEQ ID NO: 42042 - DNA, 282 bp, Glycine max
  Clone ID: LIB3093-038-Q1-K1-F4
agcccacgcgtccggttcctaagctgacattgttttagtatcatcagtacatgatactcatgagatacgtgtgcagaaagacagcagctgatcacaacaagattcacaagactgaatgtaagactcccaccaccaataatccacgcccttctcccgcaggatctttcgtgaaggaaacagtataagaaagaggtgcgcgtgctcaaaacaacaacgttccaaagcttatatagtacacgttggatgagccgataattgcgaccaggaactttagaccagaca

SEQ ID NO: 42043 - DNA, 366 bp, Glycine max
  Clone ID: LIB3093-038-Q1-K1-F5
atcaattcaaataccagaggtaccactctctacttcatcgtaattcagatctcaatgaccacactctcatctttgacgtagaaggtgcgttgttgaaatcctcttcagtgttcccatttttcatgctcgttgcgtttgaagcatgagggttattaagagctattgttctgcttttagtgtacccttttgtttgtttagttggagatgaaatggggttgaagatgatggttatgatatgcttctttgggatcaaagaagagagtttcaaagtgggaagaacccgtttgccgaagtttttgttggaagatgttgggtcaaaaatgtattaagtggttaaaagaagttgccaaaaagtgggggttaacc

SEQ ID NO: 42044 - DNA, 427 bp, Glycine max
  Clone ID: LIB3093-038-Q1-K1-F6
cacctatgcatatctgaagcctttgtttccatgaaagggaagggttatcagtgccgtagagatgctcacggagggttccttgatccatgaaatcgtaaaccagtatcatctcgttgttctcgtagcaataaccgatgagggaaacaagatggagatggcgaagttgagacagcatttcgatctcgttcaagaactcgttcagaccttgttgagaaccgggtttgagccttttgattgcgacacatgttgaaccgtcgtcgatgtagcctttgtacacgttgccaaagcctcccaatccaaccacaaagagttcgtcgaagttgttggtggcggctctgatttctgcgattgagaacttacggcagaggttggttggtagcgatgatgagccaccgtctcgagaagttccaccttttttattggaacc

SEQ ID NO: 42045 - DNA, 355 bp, Glycine max
  Clone ID: LIB3093-038-Q1-K1-F8
aacacgcgtacgattccttcttgcaacccgcgagacggtacgagatcttgttgcttgactcgtgacgctataataataagatggccgattgtggtgctgaaagcgaaaggaaagttacgatacgaaacaatcatggcgaaaatctcgtcgggatcttacataacgcggcttcaatttcgcttgatatcgtctgccatggcttccaatcttccaaggaaaggattcccatggtgtaccttgccgctgctgtgggaaaagatggatttagttcttttcgcttcgactatgcaggaaacggtgaaagtgaaagttcatttcagtatggtaactactacagagaggttgaagatctgcg

SEQ ID NO: 42046 - DNA, 389 bp, Glycine max
  Clone ID: LIB3093-038-Q1-K1-F9
gaaaaaccaaagaagattgaccatggcttcttcattgaggatctcaaggctcctctctcgttcttttctttctgctttcactactactcctttgttttctagaggcggtagtggtgctcttggtgcagggctcagtaaattcagcactgctgctgccattgaagaaccaattaaaccaccacttaaagttgaacacacccagctcttaattgatggaaaatttgctgatgctgctactggcgaaacttttccaacgttggaccccaggacaggagatgtgatttctcatgttgctgaaggtgaccatgaagatgttgatcgagcagttgcaactgctcacaaagccttctaccgcggaccttggccatagatgacagcctatgtaagac

SEQ ID NO: 42047 - DNA, 425 bp, Glycine max
  Clone ID: LIB3093-038-Q1-K1-G1
cttcgtacaccgtggtggatcatacttatgatgctgttgtcgttggtgctggtggcgcgggattgagagctgctattggactttcagaacatgggttcaatactgcttgtattaccaagctcttcccaactcgttcacacactgttgcagctcatggcggtataaatgctgctttgggaaatatgactgaagatgactggaggtggcacatgtatgacactgtcaagggaagtgattggctaggagaccaggatgccatccaatatatgtgtagggaagcacctaaagcagtcattgagctagagaattacggattaccattttcccgaacagaggatggaaaaatatatcaacgtgcatttggtggtcaaagcttaaactatggaaaaggtggtcaagcttaccgctgtgcatgtgctgctgat

SEQ ID NO: 42048 - DNA, 370 bp, Glycine max
  Clone ID: LIB3093-038-Q1-K1-G10
caacaatgccagtactatctgttgtgatcccccgacttaagacaaaccagctaaagtggagctttagtggagcttttgaggcaagacaatcacttattgtgagaggtctctttcctatgcttgcagatcctcgacatcctgctgaatcaacaagtgcaacaaatgagtctattcttaaagttgcccttgatcatggaaaagcattgggagttattaagtcacatgaccgggtagttgtttgccagaaacttggtgatgcatctgtggttaagattattgagcttgaagattaaactattaaagcgcattcaaccaactacagttttagtgttatttaattaattttacaactttgcctagttatttaaag

SEQ ID NO: 42049 - DNA, 238 bp, Glycine max
  Clone ID: LIB3093-038-Q1-K1-G11
gtttcttcttggatcttaccctcttgtttgctaatattctcattcttctgtctctgcttcgtctccttctgaactaagagatggggttgtctttcaccaagctttttagccggctctttgctaagaaagagatgcgtattctcatggtacgtcttgatgctgctggtaagactaccatcttgtacaagctcaagctgggagaaattgtcacaaccattcccacaattggattcaatgt

SEQ ID NO: 42050 - DNA, 392 bp, Glycine max
  Clone ID: LIB3093-038-Q1-K1-G12
cataagtgctgcttgaaaaagattaacatatatctttggcccattatctatagctactttggattcacagagatgtttatcactaatctactttctctttttggcgggagaaatataaaacatgttaaaggaaaagatgatgaattagatccttctgaaggcaaggtaataagtcatgagaccaatttgatccttctgttccttgtacagaccatggaaaggtcctgtcatgtttttgtttattgtttattggccacttttatgtttgtagttactataactgaaaataaccaagtactttctgttaaaaaaaaaacttcagttctagggttaaccaatgatttttacaagctttcctaaatatttaaagaaaaaaaaaagggcggcccctt

SEQ ID NO: 42051 - DNA, 324 bp, Glycine max
  Clone ID: LIB3093-038-Q1-K1-G2
gtcactcgtgcggagcttccatgggcgctggtatatccaggcgtgatccacggcatcatcgacaagctaggatgctcgcaggaattggccgcatagatcgatacttggatccatactggagaccattcggcatacataattgctatgatatttgctatgatatgaaagatgtttggatcgtaatggattactgaatgtggtatagtttatgtggatgcttaactgggtacatatgatggtcattatgaatatcatatcatatatacgttcataagcacattatgtaacagtatacagatgtggtaacaggactggtaacatgac

SEQ ID NO: 42052 - DNA, 435 bp, Glycine max
  Clone ID: LIB3093-038-Q1-K1-G3
ggtttttattttggtgaaaaggagcaaaggggaatcaagaagtacttaagcaaaagtcttgaagggatatctcatgtagctaatcctattgttggtcaagatttgaggaaggggaggaatctttagctcgtcaactaccaaagggtttgagcaaggaggaggaagactcattgctagggcaagtggaaatatggaggtacatgacatgcttcacggactccgtggccttgaaagctgtcatagagcttcgtatagcggacatactagaccgttatggtaaaccactatccttgtcgcaaattgtggaagaacatagaagacgcaccctccccagatgcctctcttctccagagagtcctgagagtgatggtgcgcataaagatcttcagtgcacaagaatcagagacaggagaaacccttttcggcttgacacga

SEQ ID NO: 42053 - DNA, 381 bp, Glycine max
  Clone ID: LIB3093-038-Q1-K1-G4
cccacgcgtccgaactagtctaagcagaaatggcctcttcagtgatggcatctgtggccctcaaacctgcccctttcactgttgagaagtcctcagttagaggccttacctccctctcaaggaactcctcttcattcagagttgtggccagtggtggcaagaagatcaagactgacaagccttatggaattaatggtggcatggctttgagggaaggagttgatgcatctggcaggaaaggaaagggaaagggcgtttaccagtttgtagacaaatacggtgctaatgtcgatggttacagtcctatctacgacaccaaggactggtctccaaccggtgatgtctacgcctgcgggtacgactggcttggctatctgggct

SEQ ID NO: 42054 - DNA, 392 bp, Glycine max
  Clone ID: LIB3093-038-Q1-K1-G5
gctactttctttgtttcatttggttttcttccttctcacacttcccccaattcgcaaaccgaactctgtcttttcttctctgtacggcactctctcttccggcgttctgggggtcgcatcgccggcgattccccactctgcttctctcttcacccttcaattcaaccctctcgtcttcgcttcactgattccctcttcgaaaatgcttccgatcgcttgctagggttttccttctcccaaatctccgtctccgaaagaaccctgtaccttttcttcctccgattaatcaacttcctagttatggctattcgtgtaactttttccttttcgggctacgtcgcccagagcctcgccttcttcggcggcgttcgcgtcgcccattcgcgatgtgt

SEQ ID NO: 42055 - DNA, 222 bp, Glycine max
  Clone ID: LIB3093-038-Q1-K1-G6
gggcaatgagggcatttctctagccagactttaacttaaccccaaatcgtatcagcggaatgcgttgttgcaattttgttgcttgcttgtttgtatgtcttactaaagattgtagattgccgcttttctgtgcgttctgttttaatatccgtgaggtgcttctgtaaatttgaaacttttttaacgttacgttggaaatatactggatttattttcattgtc

SEQ ID NO: 42056 - DNA, 343 bp, Glycine max
  Clone ID: LIB3093-038-Q1-K1-G9
aaaaaaacatacggaggattcaaaccttgaagttattctctttcttctttggtagctatcgctctcttgaaaaatctagatctcgttcttccttgatctacgttacgcttttagtgaccggatctgtatggatctgaaccacatctacacgccgatggtggttttggcctggtctttcatagatctgatgcatggaggctcagatctactgtacagaggtatgcgattcatgttcgtctctcttttggaatctgcttcatagaaagtcgtttggtcttccatgtcgcatgggttctgaggtatttatttttgcagatactgtacataatcgatgagaagaacg

SEQ ID NO: 42057 - DNA, 428 bp, Glycine max
  Clone ID: LIB3093-038-Q1-K1-H1
cccacgcgtccgatctccattcatccaatgcaatgaaactcatagatcatgttggagatctattgcaggcttttgtggatagacgggaacaggtcagacttataaaggagctgtatggaaatcagattagagagctgtatcatagccttccctaccatatggtcgaatttgtattagatgattctgattgcaaggtgacagtcagccttagatatgcagatctcatttcggtgcttccaactcgaatttcagtgctagcctggcctatgttcaataaaaatactatgagtaggaaggaagatggactctcgggaagtcattcttccccaattcgcctaacatatgcagaagatgccttacgaaccatgagtttacccgaagcatatgcagagattgtattaaacttaccacaggcgattcggcagacg

SEQ ID NO: 42058 - DNA, 105 bp, Glycine max
  unsure (1)..(105): unsure at all n locations
  Clone ID: LIB3093-038-Q1-K1-H10
ggaaaagagangggngagctaaangcncgaggaacncgaaagcngaccgggggaacaaggggganngcgcaccacaaacanccaccagcaagagccagggaggaa

SEQ ID NO: 42059 - DNA, 296 bp, Glycine max
  Clone ID: LIB3093-038-Q1-K1-H11
gttgtaaacgacacctcccgtgtagttgttgctgaccaaaacgaccccacgccccatcccgagtacaaatcatgtctcaacccctcgcccccaacttcctgtcgcttccccttcttcgctccccccccgctcgttgaccttcgattcttccctcatcggagctcaaatctccgatccctcccttcatatcgcttcacggcaacctgctcttcacccatcgcaagatctagttgaatctcgaccggttcgaagctctactcactcaaattctcttcagatctggggggcttgattgc

SEQ ID NO: 42060 - DNA, 382 bp, Glycine max
  Clone ID: LIB3093-038-Q1-K1-H12
accacgcgtacgagccaacacatcagaagaatcctcaattctcatttctcactgtcctttgttatttttttttttagagaaaaaaagaagttattctttcttctttttgctgaaaccccataaagcgaaatcgtaaagggtgtccttggaaaaggagtgtttcattaaaaagcagggatctttcgggagaaagataagagaaaggggtaagctttgttttggggcaatgggggatttggagaagcaggagaaggtgagagagaatgagaggcttttggagggtatgcctggcttagattttgacatgctttgttcctctagggcgtttcaaagtgcacatgggagttggggaaagcttgggggtcgggattaggaacaacaa

SEQ ID NO: 42061 - DNA, 327 bp, Glycine max
  Clone ID: LIB3093-038-Q1-K1-H2
gggcattgctttgttgtgtactcaagcatcggctgcaatgaggccagccatgtctgaaggagtaagcctactcagtagcaatgacttacttgaacatatgagaccatcgatgcctatcttttttgagtcaaatttaaagccccgcaatgatatctctgcttcaactagttcctctatgactaacactactacctcaaattctataatacctgctcgatgattgagtatatgatctaaaaataaatttttgtccagttcattatcaaagatgggtataattatttgtaaatcttacttatttttatgaaaaagttacattgacattcc

SEQ ID NO: 42062 - DNA, 347 bp, Glycine max
  Clone ID: LIB3093-038-Q1-K1-H3
gtagacgagtgattgcgttgcgattgacgacgacgaggaatcatgtcttccggctgcgggggtggtaagccgttcttctgccacgtgtgcagtcagaggattacgtgctccgatgagtcggaaccattctgcccgatgtgtatggaaagtttcgtagaagaatgcaaccctaacaatgccaaccctaatctcttccccgacagtgatgaatcttcggatcccgaacttcccttccaccgcttctcacttctccctctcttgctctcatcagtctctaggtcccgatccgaacccgacgtgttcgacccgatggtctttctccagaaccaccttcaggaccttcgcgc

SEQ ID NO: 42063 - DNA, 255 bp, Glycine max
  Clone ID: LIB3093-038-Q1-K1-H4
gcgtccggcgaatgtgtctgcagagaaccttacggggtacccagtactccatgaaggatgttgaaatgtccaaatatgttcgtagcttgacactatttattgaagacaatcagtcaggatcagagatcactattgttcagatgaacggactgcatggtacaacagttgaaacacctgacatgaatggcttgactaagattgaggatcgttaactcctgggatgaggagattcaactttgctcctaatcacttctt

SEQ ID NO: 42064 - DNA, 393 bp, Glycine max
  Clone ID: LIB3093-038-Q1-K1-H5
cccacgcgtccgatggacactactgactgggaagtcctttcttatgatggccttgctgagtgtgatgactatgacttgtgcacctgaccaaaattcaagaaagcctctgaagcatcaaggaattttcatccaagggtgcctaaacagattcttcatattccaattcaattggaaccgagaattgggaaggccccagatgaagggtcaatggaagaaaacactaaggatcatcatcgtgttgaggtccctcttgttccatcatcaccaactaccattgagaatataaaggagggattttggaggctgattatgacactgttgcacaccttttctccaagatcaaggaaattgagtcttccaaagccattgatagaggattgttggtccctgata

SEQ ID NO: 42065 - DNA, 436 bp, Glycine max
  Clone ID: LIB3093-038-Q1-K1-H6
cggacgcgtgggcacgggctgccattgaagatacttatttttccaccaaggtgttcgttgggtcctatgtttctgtgtatgattccttgatctcatgtcatgaatttgtgtttttataggatacttttgagagacatcgcgtggttttcaccgttggaacttccattgcttccgttgccactgcttggttattccttgcgccatttacatgacaccaaagttgatcaaaggcttcaatctatcgaaaattctatgaaaaacaattccaatctccaacattcccaaatcaaagacattgtcgcgggttccgcttccggagcttttagtatccctgcttgtgttgccactgctggaacctacttaatcatcggggttgctcccacacttacttgcaaacaacatgctcgctttgctccttaacatatagttaggtcta

SEQ ID NO: 42066 - DNA, 352 bp, Glycine max
  Clone ID: LIB3093-038-Q1-K1-H7
ggtgcacaaggttactgcgtggagaaggcaagcctccacattacgtgaaagtagattgggagtaaatgggtggatgaggatgaagatgatggtaataatcgtgaaagtggacattctaacacatgcctactataatattaataatgataacaacaacaacatcggtgttggtggtcttagaagaatcccaccaacgcaaactttaattgacagtaactgcacagtcatatcccaccttagatctacccagctcgagtcccatgcgccgaacgaatctcgacggcaaagacttatacatgttcacaggagagcaagcatgttgtctcaacgagtgccgttcagggctaacatt

SEQ ID NO: 42067 - DNA, 435 bp, Glycine max
  Clone ID: LIB3093-038-Q1-K1-H8
gtctaaagcaaccacttgattacacacttgtatcgaacagtgcatctatggagattgacgaagatggtcccatctatggttggctaccaacagcacctcaaggttataaagctgtatgctatgttgtcaccacaacacccactaagccttcacttgacaaaatcaggtgtgctaggttagacctcactgaccaatgtgaggcaaattcattcatttggggttcagacaacttcaattattatgattgtagaccaagcaatagaggaactcatgcacctggtgttagagtaggcacctttgttgcacataatgggagtcctaaccctgcatctattgtttggttgagaaacaccgacgctttaccaaaatacatgcctaatctaccacaaatcaaggcaattctgcaagtttactctccagacatgtccttggcac

SEQ ID NO: 42068 - DNA, 247 bp, Glycine max
  Clone ID: LIB3093-038-Q1-K1-H9
aattgctactggtggcatgccctgataatgagtggttgtgtgttgggcttgtgcgttggcgtatgaggttgtgtatgtgtggtggagaacgagaatggaagaatcatcattgatattagtcacaggtaccatcctgatatgcctgactgggaatccaaggatagccttggacaattattgttgcttacaataatcatggtcaatgtgtctttggctaactggttggaattgaagcttctggctcaca

SEQ ID NO: 42069 - DNA, 338 bp, Glycine max
  Clone ID: LIB3093-039-Q1-K1-A1
cccacgcgtccgcccacgcgtccgcctgaatggggaagcacaggccctactgatgctggacagtataacaactggccagaagacactcaatttttccgcaaagaaggtggaggctgggatggtccatatggtgagtttttcctcacctggtactctcagatgctgttggaccacggtgacaggattctctcatcagccacgtcaatctttgacaacactggagtgaagatctcagtgaaggttgctggcattcactggcactatggctcaaggtctcacgccccagaactgacagctaggtattacaacacccgggtttcgtgatggctacattccca

SEQ ID NO: 42070 - DNA, 394 bp, Glycine max
  Clone ID: LIB3093-039-Q1-K1-A10
gcccgccgccgccgccgccacccccaccgtgtccagcctctccggctccgatcaggagtcggcgccgcgccgccgtgcggcgcctccgccctctgggaagatctccaagaggaagtcgcgcgcctcgaagcgctcgcagacgacgttcatcaccgcggaccccgccaacttccggcagatggtccagcaggttaccggcgtgcggttcggcggcgcgccaattgcgccggcggcggtggtgaagcccgagccgcagcgcgcctcgggcctcgccaggttccccgccggcgtggggtgccttccgacgctcgacacgtcggccttcctgctggaccatcaccagcagcaggtggtgcccgcctctgttaactctgggcctggcaccgggctttct

SEQ ID NO: 42071 - DNA, 353 bp, Glycine max
  Clone ID: LIB3093-039-Q1-K1-A11
agccccgctacgttggacgtgcgcgattcttcgtcaactttaacacaccgtttacagtctcaacggatacgatcaggattcgggaccgtgccgacgtgcaacgggtccgtcatatgcgaagatctacaagaacaagtcatgctcttcgaatcgttcgcatacaacattaatcactgcatactcctgcaacttacagcagatggtgcagcatgtaaccggcctgcggctcgtaagcacaccagaaataccggaccctgaggttgaacatcgagacatactcctgaggctcacaatcgttgtactcgtaaaacaaggatcatcgatcttacgtacaatgcatctaataacgagct

SEQ ID NO: 42072 - DNA, 349 bp, Glycine max
  Clone ID: LIB3093-039-Q1-K1-A12
gacagataacggcagcggcatgcttaatgtttccagtctctctgtgtgtgatcatgattctgcgccgcaccttattgcggttccttcacactctgacaatatctacaagacgaagtcgtgctcatataagagctatcacacgatttttatgactgaggacatcgtcaacttacctcagaccattcatcacgaccctggcctgcaaatacggtgctatctaaactctccggatacgatcacgaagcgtgatattcatcgcgcatagagccttggcacactaagcgctaatccaaaacggcttcatactctccaatcgtccgaatgccttctggaccatcaacatcatcag

SEQ ID NO: 42073 - DNA, 452 bp, Glycine max
  unsure (1)..(452): unsure at all n locations
  Clone ID: LIB3093-039-Q1-K1-A3
ctgaaaacaatcccgcttggattttcgtgactccctcgaacgcaatacctaataatacaatgtacctcgatctgaagacaatctcgttccccctcaccacgcaaaaccccgtcgttcccttcattgcgccaaccgtggttctcagcaacaccgccagccgctctagaggtgatgaaaaggattgctgaagaggtgatgtcacagaaccatgagaaggcatctgttcaacgaaaaaaaagggaaaagtacagttgaagagatcgaaatataatgaaaaagttactggttgaccgtggtgcaattagatttgtcttggcgggtgcaaacataatgtgtcccggtcttacatctnctgggggtgtttaggatgaagatgtaagggcaaaatgccctgtggccatcatggctaaaggaaaacagcattctcttgctattggctttacaaaaatgtc

SEQ ID NO: 42074 - DNA, 263 bp, Glycine max
  Clone ID: LIB3093-039-Q1-K1-A4
cacaaagtcacaatggacctcctatatctcttctgcaccggagccctgctcgcccgccgcccgtactggttcgaaggcggtataggccccatccaaccaaaaggccaaccccccaaccatcttttcggcgggttcattttcggccagaaaagtcaagaccacttccaacaagaccggtccttctttcggcgcccaaaagagatccagaccgccgacaaaattcccgactttttcgacaccttctacaaactagtcacagacat

SEQ ID NO: 42075 - DNA, 218 bp, Glycine max
  Clone ID: LIB3093-039-Q1-K1-A5
gaaagacatcttttgatttgacctagatcgcgtcatggatcatattcagggaatgatggcttcaggatcagatgcttttttgatgattgattatcaaaactgctagagatacgagctcggcaatccaaacgctttataagaaaggtctgatactgggggaattgaaccggattaaaaggaagcctttaggattcgggctttttggaccatggttcccc

SEQ ID NO: 42076 - DNA, 237 bp, Glycine max
  Clone ID: LIB3093-039-Q1-K1-A6
cttgcggctagggttatagcgcagcttcttatatgtttaaggaagatgggtaaggaaaaggttcacatcagtattgcggtcattaggacatgtcgaagatgggatatccactaccactggtcacctgatttacaagcttggaggcattggacaagcgtgtaattgaaaggtttgagaaggaacctgctcagatgaacaagaggcctttcaaggatgcctgggtcctgaacaaactta

SEQ ID NO: 42077 - DNA, 393 bp, Glycine max
  Clone ID: LIB3093-039-Q1-K1-A7
cccacgcgtacgtccacgcgatcgtccacgcgtccgcaagtatgttggggagctatggcgcgggaagcagtctgatgttgtgagagtcttgcatcgggtgaggtgctgggagtaccgccagcaaccttctattgtccgtttgacaaggtctactcgcccagacaaggctcgccgcttgggtttcaaggctaagcagggttatgtgatttaccgtgttcgtgtacgaaggggtggccggaagagaccagttccaaaaggtatttgttatggtaatcccatgaaccaaagtgttactcaactgaaatttcagcgcaacaagaagtctgttgccgaagagccagctggaatgaagttgggtggccttaaggttctcaattcatactgggtgaatga

SEQ ID NO: 42078 - DNA, 439 bp, Glycine max
  Clone ID: LIB3093-039-Q1-K1-A8
ccaaggccttggctgaagttctcaagtttcatgggaacataaaaacccttaagcttggttggtgccagataggagcaaaaggggcagagtgcattgcagatgctttaaaatacaataccaccatatcgattttggacttgcgagcaaacggtctaagagatgaagatgttattgttttatgaatcaactattgcagggtgcacagagcctggctcgcagcttgaaagtggttaatgaagctttaacctctctagatttaggatttaatgaaataagggatgatggagcttttgctattgctcaagcactcaagtctaatgatgatgtagctgtcacatcactaaacattgccagtaacttcctaacaaaatttgggcagggtgctttggctgatgcgagagaccatgttttggagatgaccgaaaaggaaatcaacatc

SEQ ID NO: 42079 - DNA, 315 bp, Glycine max
  Clone ID: LIB3093-039-Q1-K1-A9
attttcttgaatgattatcactctccaagggtaattttttagagtagagacaagtcagtcttctatgttcggtggcaaagcttgtatgctttgtctctagaacattatggtttagttttgcgatccagcatttcgacacgatgataattgggagaaggggatatagtgatatcttgtataattagtgttttgaactgctacgagttcgtaaaatgtattgcccctttgatttctcactcatattaacttactacattaatttctccactaaagaaatgaaattagggatatagtggagctttagtttttgttttt

SEQ ID NO: 42080 - DNA, 406 bp, Glycine max
  Clone ID: LIB3093-039-Q1-K1-B1
cccacgcgtccgtgaagattccgcaacagagagtagaaaagatggcgcggttgatcacagtggtgtggtgcgcggtggcggtgctactgtgcgccgcggcgggcgcgtcgtgggtggaggaggcggcgaacccgatacgaatggtggcgggggtggaggcggaagtggttcgggtgatagggcagtgccggcgcgcgctgaagtttgctaggttcatgagcaggttcgggaagagttaccgaagcgaggaagagatgatggagaggtacgagatattcttggaaaatctatggtgattcggtcccacaacaagaacccgttgccctacactctctctgttaatcattttgctgattggacttgggaggagttcaaaagacacagactaggctgctgccaaaattgg

SEQ ID NO: 42081 - DNA, 315 bp, Glycine max
  Clone ID: LIB3093-039-Q1-K1-B10
gcacagcgtacgcctatgcgtctgaaacaaagtatgaacctttagtcgaaagagcacggatccgagtgaattagctatcatcacagatgctgccatgatctcagacttcatttcatacgtgtacagtcaacagagctcagctcgataccgctgacatagatatggacgaatttgtatagacatctggtctatgtaatcgatgatgtacgatgatttcgcatcaaggttcaccgtatatatacttgacaataatgtcttatatatgctagattatgtcgattacactgtacaggcatattataagatatatctcta

SEQ ID NO: 42082 - DNA, 380 bp, Glycine max
  Clone ID: LIB3093-039-Q1-K1-B11
acgaacgtatctatatattcataattgcacgttctcttttgttgacttcagttcatataatattgcatttactcagattcaggcagactttcaaattcacattaccttcttctctgatactcttactatcaaagctgactgcataaagacctgatctactattgaaagatggcatctttgagcatgacccagatcagaactgagagatgttcatatgggtttgacttagatagtgctcgaaagcgcaatgcatcatgcactcagagttatacttaaagagtacgctatacagactcatgctacacaccctgatcttactgtcactgttaatgggttgcacatgcctaaccgattcgttattggttcatgcacaccatgta

SEQ ID NO: 42083 - DNA, 312 bp, Glycine max
  Clone ID: LIB3093-039-Q1-K1-B12
atctatatcgtaactgtcacagatcctgacgagtgatgaaagcctcatctttactgtctcaatagatattgctatggcagatatcgctctgttataatggtggattgacattactatatgtcattctatacataatatagtgttatgaatcattagtattttctctagatatacttaacaatcctgttatatatatgctcctatatgataatttcactctacatccataccataagtgatttcaataaccaagtctttaagctttctacacaacattcatcatctattatgaaatcctgacacaatgtatac

SEQ ID NO: 42084 - DNA, 441 bp, Glycine max
  Clone ID: LIB3093-039-Q1-K1-B2
ccaactccaagatataaataagggaaaggggggaattctaggaggaggaggtagaagtagacacagaagtggcagaaagcaaaaatgttctatggccatgatgtttgatctaatgactaccctggaatttccaccaagtaatgacctgcaactaaaaatttggggggggaaggactaaggaagagcatagtttatacaacggccattgtaacttcctgccataccatgcaaaatctatggtactggcaccttcaatctcttgttcccaatgttgcaattgtacaatcatgctagtgctttaaattgaaatcaattgaaaatccatttaagcctctttcatttatgcaaattgccacagttcaaaagtgcaatattaaccatttattgaagtaattaggcacagttcttaatgttaacttctatttgaaaggaatattcttt

SEQ ID NO: 42085 - DNA, 176 bp, Glycine max
  Clone ID: LIB3093-039-Q1-K1-B3
ctcaatgcatcgatcactgaaagtcgcggtgatcggcgccggcgtctcgggcctcgccgccgcgcgcgaactccgcgacgagggctacaacgtcgtcgttttggaaaagtccaatcacgtgggcggcatgtgggcctacgacccaaaaacagattccgacccattggggctcgacc

SEQ ID NO: 42086 - DNA, 364 bp, Glycine max
  Clone ID: LIB3093-039-Q1-K1-B4
aaaaaaaaaaatttttgtataaatttttatttttaaaaaataaaaaaagttaaaattattattggttaaatttttatttttttatgttttttatcttttctatttatagtatctaagtttatttccctttccttgcaattactaactttttttttagggtaacctaatttaatttcacttacttcccttttaaaacgttttgattgtcaataccttgccttacccaaattaaatccctttccatcactttttcttttgcttacctgtttttattttattttatgtccctttcctattttcctttccatacatttccctaatttgaatttttactggaccttccctttttccttaatttaaaccc

SEQ ID NO: 42087 - DNA, 445 bp, Glycine max
  Clone ID: LIB3093-039-Q1-K1-B6
ggcttctgcagaagtagagttccgatgctttgttggtgggcttgcttgggccaccgaccacgatgctctcgagaaagccttctctcaatttggcgaaatcgtcgaatcgaaggtcatcaacgatcgtgaaactggaagatccagagggtttggatttgtgaccttcgccacagagcaggcgatgagagacgcaattgaaggaatgaacggccagaacctcgacggtcgtaatataaccgtgaacgaggctcaatcccgtggaaaaggtggcggcggcggcagctgcggctacggaagaggtggtggtggttacggtggcggcggaggttacagccgcggtggaagaagatatggtggcggaggaggccgccgtgaaggtggttataaccgcaacggtggtggaagaggatatagtggcagtggcggcggatatggaggtggtgga

SEQ ID NO: 42088 - DNA, 389 bp, Glycine max
  Clone ID: LIB3093-039-Q1-K1-B7
cccacgcgtccgcgtctttaaagggtttgatgcattggagacttctgtaggggatcgctgcgatgactggtagcatgcttacattggcatcattgcagctttgggtggcattgctgtgcttttggaggcctacacatggattgttgtgttgaagaggaggaactcagagaacaagacagcacatggtgtcaatggaacaaatgggtatggttctagaggacagcaggtgtaagggaaagtggcctcatatatactggatttttggcttgttgattctacttatatgagtttggttggtaaaacttaaacactttctgtttgtatatttgttcacttatatggagtgtatttaggacactcccagtagcttagagtctgggtttgatata

SEQ ID NO: 42089 - DNA, 440 bp, Glycine max
  Clone ID: LIB3093-039-Q1-K1-B8
gaaaaagaagcccttgctgcagaaggggggtggacagttgttgtgcaccataagggtagaaagaaaactactgattctgagagtggaattgcagtgggctctgttgctcaagctgctgtagagaataaaatgaccaaaaagaaacataaagaagttggtcaagatttctatcgctttcaaagaagagaagcacagagaaatgaaatcatgacactgcagagcaaatttgaggaggataaaaaacgtctgcagcagatgagagctgccaggaaatttagaccttattagacaatgtttttggcgtacaaggttcacagtaatttttttggtggatttggcgtacaaggtacttatgtagtcttgaacttgagttatgccattgctcttaaattcaaaacgaaagttcatttatcattccaattttgtcgaaagtatttgta

SEQ ID NO: 42090 - DNA, 404 bp, Glycine max
  Clone ID: LIB3093-039-Q1-K1-B9
tctctctctctctctctctctgttgcaaaattcgttcccctatctttctgcgtttcgagttgttgctaaagagtgatggactcaccgcccagtaatcaccacgccgtcgacggagacgccaacgacctcgttagacccttttcccaccgcgacgacgacggcaaaccccaacccctcaccggcgacggcgccagtcccggaaagatattcatagggggtttagcgagagaaacgacgattgcgcaatttcatcaagcactttggtaaatacggtgagataacggattccggtatcatgaaggaccggaagaccgggcagcctcgcggtttcggcttcataacttacgccgatccctctgtggttgatacagtgattgaagacactcacattatcaatggcaagc

SEQ ID NO: 42091 - DNA, 362 bp, Glycine max
  Clone ID: LIB3093-039-Q1-K1-C1
cccacgcgtccggccaatccgggtaagtcccatgggtcgtatttgtagagagaaagagtggtacttcttttcaccacgggaccggtaatacccaaacggttcgaggccgaaccgggcggctggcaccggttactggaaggcaaccggggcggataagcccattggtcagcccaaaccggttgggattaaaaagctttggtgttttacgcagggaaagctcctaaaggggacaaaagcaattggatcatgcacgagtatcgtctcgcagacgtagatcggtccgttcgctaaaagaacaccctaagggtggatgattgggtgctttgccgtatttacaacaagaaaggcacgatcgagaaact

SEQ ID NO: 42092 - DNA, 448 bp, Glycine max
  unsure (1)..(448): unsure at all n locations
  Clone ID: LIB3093-037-Q1-K1-D11
gagacactcatgtgctcttttcagatactaaggcctgcggaacacagaaagcctaagggggggtttgggagcaaaactacattcaaggcaattcttgatgctgctagagtatgaccccattgagctgacttagatcaataaagtttgtaacatagcaaaaaattgacatggacaaattgatatccgtgttcactccaatgtgaaggaagggtattacaactaccaatataatgaagaacgtangaatattatctctgctttttcttttcaagtatagctgaaagtgtttttctgtgctggcgcattctcaatatgtaccatgttgtcaacacagatttagggggtcaggttccatttttcttttctttcagctntttgatgtgagagacagttatgcaattctccttttcatatctcctgttgtattataaatggcagcatacttttc

SEQ ID NO: 42093 - DNA, 374 bp, Glycine max
  unsure (1)..(374): unsure at all n locations
  Clone ID: LIB3093-035-Q1-K1-E1
gcgcgccggctcctccgcttctttccaccgctcttctcctcctctcccacgcttccgcttctcgccgcttctggccgctaacaccctcaccgctaataacatctcgccaagaagtggactatacactgttggtgactttatgacaaagaaagaggatttacatgtggtgaaaccgacaacatctgtggatgaagctttagaaattcttgttgaaaacaggataactggttttcccgtgattgatgataactggaaactggttggtgtcgtttcagattatgatttgagagcactggactctatatcagggtttncccaacgggttaaaggataacatgtttccagaagttgacagtacttggaaaactttcaat

SEQ ID NO: 42094 - DNA, 384 bp, Glycine max
  Clone ID: LIB3093-035-Q1-K1-E11
ttaaagcatgatgtactgccatatctagtccggagccaactggttagttgttaaaggttggggcagagataggctagggaatgttgtacttttaaggattctaaccttgttcatattttctaaacgagagttagaaatcagaagtattattaaatggcataccacatgcagaagaaaacagaactgaaaaggttatttctcaaagcaatcaacaaatgctatctcaaatactcgctaatgcatctgaaccaacctttcatctacgacatgcactgggtccttatggttctacttttgatcgaagaacccacaaatgctgtgtgtatattgctggaagcagcaaatactgtgctcgcttaaattctatacaagcatacactgaca

SEQ ID NO: 42095 - DNA, 416 bp, Glycine max
  Clone ID: LIB3093-035-Q1-K1-E12
gcaatgaccaagccaacttacactgcaattgttcaacatgccaagaatggaaaacctgctggcatgtttgtacctacaaggaagcatgtccgacttacagctgtggatatgattacatactcaggtgcagacagtggggagaagccatttttattgcggtcagccgaagagcttgaaccttttcttgacaagattactgacgaaatgttgaaagttactttacgggaaggagttggatacttgcatgagggattgaacagtcttgatcatgacattgtgactcagctatttgaagctggctggatacaagtctgtgttttaaacagttccatgtgttggggagtgactttattggctcatttggtagttgtgatgggcacacaatactatgatgggcgggagaatgcacagacaga

SEQ ID NO: 42096 - DNA, 351 bp, Glycine max
  Clone ID: LIB3093-035-Q1-K1-E2
tcgcagatttgtaaacctcatgggaggccacatatggattgagagtgagggtcctgacaaagggagcacagggtcatatataatcaaacttgagatttgcggcaatccagatccatccgatcatcaagctgcaaacagaagccaagcatacagtggaagtggtggcctcgatagatttaaacccttcatcaaagatgaagacgacactggtttttctactatacgcaatcaaagaagtttctaatatccaagacaccaacattgcatacctttcgatcacagtcgacaagatggagtacacatactttcaattcttaatatgcatgtgctaaaaagtataatttacaagtt

SEQ ID NO: 42097 - DNA, 282 bp, Glycine max
  Clone ID: LIB3093-035-Q1-K1-E3
acgcagacgcgtgggcggacgcgtgggttccattggcacccacttttgaatatattactattggttctttggtacttcacttgcttccatacacataaccatgtcttctcaggtcctcaacccaatgcctccttctattcttgcctttagcacttcactcagttttagtgcgcttgatcattgtcattctgggtgctgtactttattcggctaatgttgcttgatatgggtctctgctctaagcgtatgtgctgaacttgatgagctcccaagttgattgag

SEQ ID NO: 42098 - DNA, 286 bp, Glycine max
  Clone ID: LIB3093-035-Q1-K1-E4
acgcagacgcgtggacccaaccacacgcttcatatgacatgagctcattgggtgggatacaagaggcgcacggcctttatttacttatctaggaaggtgcagcagtccatgcacagtccgagctgaagccgccaacatattcactgcatgcattggagccggtgatgtgcctagagacactcgcgtcatactggaggaagacccccctgacttatgtactatatccgaacaaacaagttgttggtacagatcacgacggcaaggcactacaagagatcattgtcac

SEQ ID NO: 42099 - DNA, 420 bp, Glycine max
  Clone ID: LIB3093-035-Q1-K1-E5
cccacgcgtccgcccacgcgtccgcccacgcgtccggaagaagaacctgttgttgtgggtgtattacagctgccacttatggataggagcgggcaaataccagcgtttgggaattgggattacgcaaacgagttgccaatcactcagtacttcgagagtgcgagacaagctggtttagttcgttacagttcctcctccggcgaaagtgacccttacgtgcgtgcagaccgtgacctttacgccgttgattttaagaaacccattcgcaacatcccaacttctactctgaaaaaggccactcttaaaggtggacaaggtggttaaaggaagggaaaagggtaatgtgaagattaatattagaaaacaggggaaagggtgccacgtgacggaacaagcaatgaagccagtggcagcgatgca

SEQ ID NO: 42100 - DNA, 386 bp, Glycine max
  Clone ID: LIB3093-035-Q1-K1-E6
cccacgcgtccgtctatctctctgacacacactcatcattttctagcaaactctctagccgcttcaaatgggctaggaaggttgaataaaaagaaaacaaaccctagcttaattaattaacttgcttgtgttgttaattaatttgttcaacatggaaggatgagtgcctgaagctgatatctctgcctttagagaatgtttgtctctatcatggaaaaatccttatgttcttcgccttgctttctccgctggaattggaggctatctctttggctatgacacatgagtcatatctggatgcccaaacaattttgtacatcatagatgatttcaaagaagcagatagaaagacgtggctgcaagaagctttaatgagtatggcactt

SEQ ID NO: 42101 - DNA, 410 bp, Glycine max
  Clone ID: LIB3093-035-Q1-K1-E7
cggacgcgtgggaaaaaaaaaaaagaataatatatagaaaaaggagcatgttgattatatagaaagtaaagggcaacaatcatttttgtttaccatgggtaaggacaccatcgctgacataataacctatataagaaatgctgacatgaataaaaaaggaatggttcaaataccatttactaacataacagaaaacattgtaaaaatacttttacgcgagggttttgttgaaaacgtcagaaaacatagagaaaacgacaaatattttttagttttaactctacggtatagaagaaatagaacaaaaataaaggatcatattaaaagtttttaaatttaaaacggatcagtacacccggtctacgaatatattctaattatcaacgaatccctcgaattttaaggggcat

SEQ ID NO: 42102 - DNA, 439 bp, Glycine max
  Clone ID: LIB3093-035-Q1-K1-E8
cccacgcgtccgcccacgcgtccgctctctctctctctctctctctctgttttctctctcgcgtctcacttgaaactccacaacccaattttcttttcctatgacccaattccaaatccaaatcaccaattctaattccattcttcaggagttgaattgaattcgtgatgaagagggaccacaaagatagctgcggcggcggcggcgccgccggagggactgtgaagggtgagtgttcctcaatgcagtcaaacgggaaggcgaagatgtgggaggaagagcaacagcagcagcagcagcgaaataatccaacagcaacaacaacaacaggggatggacgagttgcttgcagcgttggggtacaagggtcgggctttcgacatggctgacgtggcacaaaagcttgagcagttggagattgtcatgggttgtgcccaag

SEQ ID NO: 42103 - DNA, 384 bp, Glycine max
  Clone ID: LIB3093-035-Q1-K1-F1
cttggactattcgacagcgaagtagaagctgcaagggcttatgacaaggcagctatcaaatgcaacggaagggaagcagtgaccaactttgagccaagtacttatgaaggagagctgaaatctgcagccattaatgaaggaggcagtcagaatcttgatctcaatttgggcatagcaaccccaggacctcccaaagaaaattgggggcaacttcagttcccctccttcccttacaatacacatggtggaagaagttcaatgatggaaaccaatgttagttctggaattggtaatccatctttgaaaagggggggaaaatggttgcaactgaagatcgtccttcattatggaatggcatgtctcctaatttctttcccaatgggg

SEQ ID NO: 42104 - DNA, 263 bp, Glycine max
  unsure (1)..(263): unsure at all n locations
  Clone ID: LIB3093-035-Q1-K1-F10
cccacgcgtccgcattaatgtgtgtttgtcacgagacccatagtgctgccaaattatagtggctctgtttctctatctgaagaagaagaagttctgaagaagcatgtgtggaagtgctatcatctcagacttcattggtgtgaagccttgccccaaacctttnccggcatgatcttgtgtcccaacctgaccctttctcttaccttcttggcttcgataccaccaacaacaacaacaaccaaccacccctttcaaaccaaaaa

SEQ ID NO: 42105 - DNA, 383 bp, Glycine max
  unsure (1)..(383): unsure at all n locations
  Clone ID: LIB3093-035-Q1-K1-F11
ctctctctccctctttctcgtcactagctctgtgcattcttctctcgctctctgccttcggtcacactcggcatttcctttcccaagatagtagaagatggcagacactgaggatattcaacctcttgtttgtgacaatggaacaggaatggttaaggctggatttgctggagatgatgccccacgtgctgtgtttcccagcattgtaggtcgtcctcgtcacactggtgtgatggttggcatgggccaaaaagatgcatatgttggtgatgaggcacaatctaagaggggtattttgactctcaagtaccccattgaacatggaatngtgagcaattgggatgatatggaaaagatttggcatcataccttctataatgagc

SEQ ID NO: 42106 - DNA, 386 bp, Glycine max
  Clone ID: LIB3093-035-Q1-K1-F12
ctagacatcccttctacacaacataggtcatcgaacggatctcgaagacccaccatcgcgcgaaagccggtatctttcagaaaatggattcctattcgaagggtgcataaccgcatggataagctcacactaacccgtcaatttgggatccaattcggttccttacgaggtatcgggaccgaatcttggaatgtaataatatctattcatacagatacagacgaaagggttctctattgattcaaacgctctacctacgagatagggatagagaaagaggacaaaaccgaggatttcacatattacttttggtcgaaaaatcgatctgatttttatcgcactttccgctcaatgatgaaatgggccagattctacaggaccaaacc

SEQ ID NO: 42107 - DNA, 378 bp, Glycine max
  Clone ID: LIB3093-035-Q1-K1-F2
acgcccacgcgtccgctttccctctgttgactggtagtttcgaaactctcttctttttccacatgttctaacggtttgctgcttctctcttcatgaagatccccaacaagcatccactattatatgcaacatggaacaactctctcaaccatcatttcaaccccatcaagtctccgaccatcttcttcattcggatagagtcccttgcattgaagtgattttgagagaaaaacaagaagaggagttggagggaaaggaagtggagtatttcaaagaaagagttgagagattggagagtgagagggaagaagttaaaggtaaatggggtcatgtttaaggctttggaatctctcacttaatcgaagggaaagcttgtct

SEQ ID NO: 42108 - DNA, 279 bp, Glycine max
  Clone ID: LIB3093-035-Q1-K1-F3
tcgcacacgcgtccggagacaggtgattttagtatatcaaatttcaaatggtgagtggtgaacccaccacgggaagaaaaaaattaaaagatgatgatgagtgatgacagaggtgaggatatgtaatttagctttgtgaatactaccaaatttgtttgttcaacattatgaattatgaatggatcagtgcttgtattccttggttggattttaaatcatgatccttgaggagcaaaagaaaatctaatcatatgtacctgttggaatgaacaaaataaa

SEQ ID NO: 42109 - DNA, 274 bp, Glycine max
  Clone ID: LIB3093-035-Q1-K1-F5
ggatgccattaccaatggtcatggccgtaccgtttctggttggagcatactttgcaatcgatatgttcataggtactgtggttgtgtttgcttggcagaagcttgactccaagaaggcagagttgatggttccagcagctgcctctggactaatttgtggggaaggactatggactctaccagctgcgattctagctcttgcaagaattaaacctcctatctgcatgaaattcgttcctacctagagcttcacccacaatagaacaaacaattc

SEQ ID NO: 42110 - DNA, 390 bp, Glycine max
  Clone ID: LIB3093-035-Q1-K1-F6
gcagctgtgggaaaccctgaaggaagccatcgtagcctacactggcttctcgccttccaggttcttcacggtgctggcgcttctttttgccgtttactacgtcgtcacgggtctctttggctcctacgacgatcaccatcaccgccaccgccacgtcgaggaggaggaggagatgccgtctctgcgccccccggttcagctcggcgagatcacagcggaggagctcaaggcctacgacggcaccgatcccgagaagcccttgctcatggccatcaaggcccaaatctatgatgtcttcccaaattttaagcatgatggtttatggacctggtggaccttatgccctaattgctggcaaggatgctagccaagccttagcaaagatgtctt

SEQ ID NO: 42111 - DNA, 265 bp, Glycine max
  Clone ID: LIB3093-035-Q1-K1-F7
ttctttagacaatgaggtgcagccaaattcattagacactggggtgcagccaaaatcgatgagcaatgggatgaagcacagtgcatctggcggtaagagtcagggaagactaactaggaaggatttgcgcttgcataagttggtatttgaagcagatgttgagccagatggaactgaactagcctactatgctcatgggcagaaactgatggctggttacaaaaagggatgtggaatcttttgtacctgctgcaatgagcaggtc

SEQ ID NO: 42112 - DNA, 434 bp, Glycine max
  Clone ID: LIB3093-035-Q1-K1-F8
tctctctctcgcacgcgaaacccttgttctgttccatgctaacatatctgcagagaaaagcagacaccagaaaaggttcgttcagagacaaaaccccaacgatccaaacggtcattgagcatatcatggcgcgagtcactgagttgaatcggataggaatctgagttagtgatcggttgacgcggtcatggctgctgcgggctccaagctcgagaaggctctcggagaccaattccccgaaggagaacgttactttggcctcgagaatgtctgcaacacttgatactgcaacagcgtctttttcggacatgcactatacttctgagttccgatacgcgaacaattactagagtattatggagataacaaaagcatattggacggggaagaaaatctgttaacttgcttagccgacttattttcacagataagtt

SEQ ID NO: 42113 - DNA, 276 bp, Glycine max
  Clone ID: LIB3093-035-Q1-K1-F9
attcccaatcgaccactcataaccctactcttaccatatatatacaccaatcctttactcacttaccttcatacacataaccagatatatttacacccatgtcatccaatcacccatataattacaaaattcatctataactaacaatcttctttttaacacatttctaatcctattaaacaatcacaactaacaatacaatcttcatcctacacttactcaacatttacaaactcaactaattacatattcaaatactacatcaatacatccaac

SEQ ID NO: 42114 - DNA, 386 bp, Glycine max
  Clone ID: LIB3093-035-Q1-K1-G1
acgcacacaagcactacaacattttctttggtctctcattctctctatagctagatgggttctggggctttagaactacttctgatcttgggtcttctggctagctcatgcttagcacaagccccaggtgctgcacccacacaaccacccactacaaccccatcaccaccaccaccaagatcagcacctgcaccagcacccaccccgccagcaacaccaccaccagcaacaccaccaccagcagcagcaactcctacaccagcaacatcaccaccagcaacaacaccaacgccaacaccaacagctgcacctttaaaacccaacctgcttcttctcctgcaacctcaccagtcccttccgctagttctccaccagcaccaggcaca

SEQ ID NO: 42115 - DNA, 354 bp, Glycine max
  Clone ID: LIB3093-035-Q1-K1-G10
aaacgtgacgtttttaactcaagacccatgttctcagtctaagcactggcatacattccgaaacattctacactatcaacttgtacaaaggtcactataactcaaaccacactctctatcactttgtataccctcacatcctctaatttgcaatcatactactcgaatcattctctctaacgctaatactttctaatccattcaaccctctatcttcatctctcatccaatactcataacatgctttcttggtacaatacgctcacttacatgctgctcttgtttgcctatacaacatcaccattgcaaacatcttggctaactaactaacacagattccaagagtttacagca

SEQ ID NO: 42116 - DNA, 418 bp, Glycine max
  Clone ID: LIB3093-035-Q1-K1-G11
cccacgcgtccggtgttttttgttcttggtcgagccttgtactgattaacgagaatggagaacgaggtggagcttggttcccttgaaggtgaaatggccacccagcacatttcacaaccacagaagcgcaagggtggtcttgttaccatgcctttcatcattgcaaatgaggcacttgcgagggtggcaagtttgggccttttgcccaacatgatactgtatttgatggggacctacaggcttcaccttgcccaagcaacccagatacttctctggtcccatgctaccagcaatttcacacctgtggtgggtgctttcattgctgattcttatctgggtcgattcctcgctgttgggttgggttcggccatcacttttctgggaatgacactgctgtggttaacagctattatcccac

SEQ ID NO: 42117 - DNA, 382 bp, Glycine max
  Clone ID: LIB3093-035-Q1-K1-G2
gggacacgcaaagggcgtcacagttgtcaccgacaacaccttcgctcccatggtcatctgggccgctcgtggcggctctgacgtcgtcgttcacagcatctccaagtctatcagtgggggtgctgatattattgcaggggctgtgtgcgggcctgcgagcctagtgaatgcgatgatggaccttcacgacgggtccctgatgctgctgggtccaacaatgaatgcgaaggtggcgtatgaactgtcagaaagaatccgacacttgagccttaggatgaacgagcattgtcaccgtgcgttggtgttcggttcatccttcatggctcaagaaattaaggttgcaagtgatctacccaggccttgaataccacccacagcacga

SEQ ID NO: 42118 - DNA, 393 bp, Glycine max
  Clone ID: LIB3093-035-Q1-K1-G3
acggattcattccatcatggctctctccaaagccaccttcttgacgcacctcagaaccctctccgattctcagcgccgcccttcctcgtgcgtttcaatccgcctcctctccttctcctccccggaggaggccgcggcggagcgccgccgaagaaagcgccagctccgcatggaaccgcccctcttcgccctgaaccgcacccaaaccgctccaaagcccctacaatcaccctattatctaaaccctaacaaccccaagctcccggaacacgtgtctgcgctcaccggctaccggctgaaccttcacaaccccgggaaaaattctaaccctaatccgcgagaacgacctcgacgaggcggcgctgtacacgcgccactcgatctacttcaact

SEQ ID NO: 42119 - DNA, 391 bp, Glycine max
  unsure (1)..(391): unsure at all n locations
  Clone ID: LIB3093-035-Q1-K1-G4
gcgaaaacatggctctaacacttcgttcttcaacttcttttattaatcagaaggaaaccaaagtcctcaaaggctttgacaatgcccctgcaatagttagtttttcaaaattcaagccatcatcatcattgttccggctccgggcaaaaaattccatgcaagaagctcatcacactcgtgagaaatgggagaaggtgctggctccgtcggtcgcacatagccacaatgattcaaagagagtacctgtgtatgtgatgttgccattagacacagtaacaatgggaggaagcttgaacaagcccagagcgtaaattttgggaatgcgagtttgatggcccttgagagtgcangggttgaaagtgtaatggtggatgcctggtggngtttggtg

SEQ ID NO: 42120 - DNA, 275 bp, Glycine max
  Clone ID: LIB3093-035-Q1-K1-G5
gatgagccaacgatgacacgaaggtgaaccagttcaggaggtctacatatgtgctacatgggctagttgataggctgctggatttgtaacagatgctataggaatacatgccatgtttgatgctattgcagaccgaattaaggacccaagtgatggacacgcatgccaatgcttttgtggtgaaagtagatgatctagggcctggactatttgtaacacttgatttagggacaagtggatcgaagactaatgtaaccaccatcaagcaagcacag

SEQ ID NO: 42121 - DNA, 331 bp, Glycine max
  Clone ID: LIB3093-035-Q1-K1-G6
tgcccttctcgttagcttgatatgataatctaaatgtttcaacactttgtttaacctgagggttttgaatttgggttctctttgttgcacattaaatcttagctgtttcataatagtgcaagggctttggaagagaaaagagctcgtttgggtttagtggaatgtgtgaatcatgagctcctgcaaccttatcctgttctgcatgaaaagcctggtgattatgttgcacatatcaaattcactgtcttgctaatgcccaatggatcagatcgtgttacgtcttactcactccaagagtttttgggtctcacccaacaaaacaattgatgat

SEQ ID NO: 42122 - DNA, 235 bp, Glycine max
  Clone ID: LIB3093-035-Q1-K1-G7
aacaaacctcagaagccaggcatgatactctcctcgatccaacaccctgagggactatgggggtaatacagactcatagcgtgacaggtcactacgatccctaattcaagtgcaaaaaagaccacgtgattgctcctagtcacaacacgtgtaaaatagaattataggatatcatacataacctctgcatcaagacaaatatatcgaaagacgcgctactagacatggatctaaa

SEQ ID NO: 42123 - DNA, 365 bp, Glycine max
  Clone ID: LIB3093-035-Q1-K1-H1
tcgcacaaaaagacaacacagagagaagcgtcttaataaacgctcttctctgaaaaacctgattggttctctgcatcacttctctatcgtttcgatcttcgatctctgaaaatgagagagtgcatttcaatccacatcggtcaggccggtattcaggtcggaaacgcctgctaggagctctactgtctcgaacacggcattcagcctgatgggcagatgccaagtgataagactgttgatggaggtgatgatgcttataacaccttgttcagtgaaactggagctgtgaagctcttgcctcgtgcgattttttttttatgacatctcgagcctactgagattgatgaagttaggactgagacata

SEQ ID NO: 42124 - DNA, 270 bp, Glycine max
  Clone ID: LIB3093-035-Q1-K1-H10
gaccacgcatccaccatacgatattctatgcatgccatataaccttatatcattattggatctcacaccatggtctaggtcacacactgacttaagcttatcatgtggcaatgctctatgaaggaaccccacatcacactactgtacacgattatacgaggaacctgcttacagcaataggccatttcgtgctctccttgacgatgatcttattaaaactacatccggtaaccgtctcttacttgaccttaatgcaactcaccatgaagc

SEQ ID NO: 42125 - DNA, 448 bp, Glycine max
  Clone ID: LIB3093-035-Q1-K1-H11
tgccgttcttgatgattttggcatggaatccatgctcgagagattgatgaatgatttcataagtcgcatatctcgagttttctacactgaaattggtggaacctcgctggactcccatcacgggtttgttgttgaatatggaatcaatcgggatgtggaacttggcttccatgtggatgatgcagaagtcaccttaaatatttgcttgggaaacgaattttctggtggagaactgttcttcaggggtgttcgatgtgatgaacatgtaaattcagatatccaaccaggggagatctttgattatccccatgttccaggacatgcaattcttcatcctggtcgtcaccggcatggcgctagacctactacatctgggaatcggatgaatttaattatctggtgtacaagttccgcttttaaagagttgaagaaatatcggaaagatttt

SEQ ID NO: 42126 - DNA, 242 bp, Glycine max
  Clone ID: LIB3093-035-Q1-K1-H2
accggtccgtagtctccacgcttgcggccttttggctaagatcaagtgtagtatctgttcttatcagtttaatatctgatatgtgggccattggcccacacgatattaaatttattttttgaaggggagatcccaatgcagtagcttgctactggggttctcaagcgtcgtccttgttttgcactatagcattgtcctggcgcaccctataacataagtgtaaatatctttaatggtttagt

SEQ ID NO: 42127 - DNA, 444 bp, Glycine max
  Clone ID: LIB3093-035-Q1-K1-H3
acgcacacacatactaagaagcaacaattcttctacaatggatctcctccttctggaaaagacggtcatagggctcttcctcgctgcggtggtcgccatcgccgtcttcaccctccgcggccggaaattcaagctcccaccgggcccactccccgtcccaatcttcggcagctggctccaagtcgtcgacgacctcaaccaccgcaacctcaccgatttggccaaaaaattcggtgacatcttcctcctccgcatggggcatcgcaacctcgtcgtggtttctacccctgagctcgtcaaagaggttcatcccctaatctacgcatggcgtggagttcggctcccgcacccgcaacgtcgtcttcgacatcttcaccggaaagggccaagacatggtcttcaccgtctacggcgagcactggcgcaaaatgcgccccatcatga

SEQ ID NO: 42128 - DNA, 352 bp, Glycine max
  Clone ID: LIB3093-035-Q1-K1-H5
cccacgcgtccgcaatttaccagctatacttgttccttttgaaggttagaagtgctacaagacaaacaatggcagctactcaggaagatgtgaagcttttgggtattgtgggaagcccatttgtgtgcagggtccagattgcccttaagttgaagggagttgaatacaaatttttggaagaaaatttgggcaacaagagtgatttgcttctcaaatacaaccctgttcacaagaaggttccagtgtttgttcacaatgagaagcccatagcagagtctattgtgattgttgaatacattgggaaaatttgagacatggaagaacaaccccatcttaccttctgatccttacc

SEQ ID NO: 42129 - DNA, 293 bp, Glycine max
  Clone ID: LIB3093-035-Q1-K1-H6
gcaaaaccctaattcctaccgcaaggtaaaaaaaaaaacagaaaaccagtggtgcgcgaggccaccgaagttcgatcccttgcaggtggtggacgtgttcgtccgagtcatcggcggcaaagtcggagcggcgagttccctcgctccaaagatcggtccattgggtctctccccaaagaagatcggagaagacattgcgaaggaaaccgcgaaggactggaaaggcctacgcgtgacggtgaagctgacagttcagaaccggcaagcgaaagtgacggtagtgacctacggcg

SEQ ID NO: 42130 - DNA, 297 bp, Glycine max
  Clone ID: LIB3093-035-Q1-K1-H7
gtggagcaggaggcgaacgccaacacggcgccgttcgtggcgcgcgtgtcggagttgtgcgcttattacggcgcgctgtttgactcgctcgagtcgacgatggcgcgagagaactcggcgcgagttaggatcgatgagggactgactcggaaggtggggaactctgtggcgtgcgaaggaaggaaccgcgtggaacggtgcgaggtgtttgggaagtggcgagcgcgtatgagcatggctaggttcaagttgaagccgctgagtcagcgagtcgctgagtcgagcaaagcgcgactc

SEQ ID NO: 42131 - DNA, 396 bp, Glycine max
  Clone ID: LIB3093-035-Q1-K1-H9
cggacgcgtgggcattctctagcttccaaaccctaacactcctcttcctcttccatcatgggctctggacaatgccggcgaagttcgacccctcccagatagtcgacgtcttcgtccgcgttaccggcggctaaatcggcgcggccagttccctggccccgaaaatcggtcccctcggtctctcccccaagaagatcggagaagacatcgtcaaagaaaccgtcaaggactggaagggcctccgcatcaccgacaagctcaccgttcagaatcgtcaggcgaaagtcaccgtggtcccctccgacgacgccctcgttatcaaggccctcaaggagcccgagcgcgaccgcaagaagaccaagaacatcaagcacaacggcaacatctcgctcgatg

SEQ ID NO: 42132 - DNA, 347 bp, Glycine max
  unsure (1)..(347): unsure at all n locations
  Clone ID: LIB3093-036-Q1-K1-A1
ctacgaattactttagtgtgacctcttgtcacattaaaatcaacttacgagaattaccagatcatcgggacagttaccagattagttcaagaattagaacattgaatgttgcaccaaatgtttaaattggcgaaggcttttaagaaccatcgcttatccaggtgaacatgccttaagatcagctcaacaccatctcaaaaaccatgttggctcattctctcangctaacaagctttcttcatctgctatgatatccacaacactaaaacatgagaaagcaaatcaatcataagagtcttttataactgtcatgtacttaaactgcttgcgtcccaactagatatcat

SEQ ID NO: 42133 - DNA, 393 bp, Glycine max
  Clone ID: LIB3093-036-Q1-K1-A10
gttgtgttgcaaacagaaaggaaaaaagaagaaaataagagaaagaagaaaaatatgagtgacttgaatcgtgtttggatggcggcaacggtggcggtagcgcaaggccacaccgatcccggccacaagtgcaagacggcgctcaactccatccaccacaaccggagccgcctcttctccggcggagccctgtctgatctccggccgctgtccggcgtcgttggacctgacgtctctggcgcggcagcggggagctccgacgcgaagaatagggtgagccaagccgatgactctctgaagaaagtgatgtactttagttgctggggtcagggctgaaccacacgtgatgaacggtggagattaaagtagtcgccggagaaagtgaaccgggtc

SEQ ID NO: 42134 - DNA, 381 bp, Glycine max
  unsure (1)..(381): unsure at all n locations
  Clone ID: LIB3093-036-Q1-K1-A11
gttcattctctttgcgcagttccctacctctcctttcaagatgcagatcttcgtgaanacgctaacctgaaagaccatcacccttgacgtggaaagctctgacaccatcgacaacgtcaaggccaagatccaggacaaggaatgaattcccccggatcagcaacgtctcatcttcgccggaaagcagctcgaggacagccgtaccctcgccgactacaacatccagaaggagtcaacccttcaccttgtccttcgtctccgtggtggcatgcagatcttcgtcaagactctcactggcaaaaccataaccctaaaagtcgaaagctctgacaccattgacaacgtcaaggccaagatccaagacaaggagggaatcccccc

SEQ ID NO: 42135 - DNA, 376 bp, Glycine max
  Clone ID: LIB3093-036-Q1-K1-A12
ctaagctctcttcttcctcgcaaactgcaaagttaactctgagaaagaaaaaccgaacgggcccttttgccatttcctgcaaaacccgtttctcttcttcaattcgcgcgtccatggcttcaccctccatcacagacgccgaaacaaagccgttttctgttctcttcgtgtgcctcggcaacatctgcataagccccgctgctgaaggagtcttcactgacttaatcaacaaaagggacctcaattcgaagttcataatcgactctgctggcaccatcaattaccacgagggaaatgaagccgattcgagaatgaaggcaacttcaaaaaggcttgggattcagataacttctatttcgaggccaatcaagccctc

SEQ ID NO: 42136 - DNA, 319 bp, Glycine max
  Clone ID: LIB3093-036-Q1-K1-A2
tccacgcgtccgataaaaatgaaaattctaattaaaggaagctacaaaaatacttgagtattggcttaaagaacaaaatgtttgttatgcttaatatctttaattaggtctgtatttgtattcactccgtcctttattcacgtagttttttctcggcgaaattgcccgaagcctacgctttcttgaatccaattgcggatattatgccagtaatacccttactcttttatcttttagcttttcgtttgctacactgctgtaaattttccaacgatttctgtatttgaagtatgtgcttaaaaaaaattaagaatttatc

SEQ ID NO: 42137 - DNA, 348 bp, Glycine max
  Clone ID: LIB3093-036-Q1-K1-A3
acgcccacgcgtccgccgctttctaaattctccacccctccgttccactgcttcgtcgcaacaggtgacgataatggcttcgaagaattctcaacaagacacgcgcttagcgagaatcgcctctgcaatccgagtcatccccgactttcctaagccaggaattttgtttcaggacataaccacgctgcttcttgatacaaaggctttcaaagacaccattgacttgtttgttgagaggtacagagatcaaaacatcaatgttgtcgcatgagttgaagctagaggctttatatttggtccacccattgcattagctattggagcaaaatttgtccccatgaggaaacc

SEQ ID NO: 42138 - DNA, 304 bp, Glycine max
  unsure (1)..(304): unsure at all n locations
  Clone ID: LIB3093-036-Q1-K1-A4
cggacgcgtgggcggacgcgtggagcgagaaatggcgatggcaatggcgcttcgcaggctgtcatcttcaatagacaagcctatacgccctctcttcaatgcccgttccctctactacaagtcgtctttgcctgatgaagctgtttacgacaaggagcgacccggagttacatggccgaagcagttgaatgctccacttgaggtcgtggatcctgagattgctgatattattgagcttgacaaagctaggcaatggaagggctagaatngataccgtcagagaatttcacctctgtgtctgtga

SEQ ID NO: 42139 - DNA, 397 bp, Glycine max
  Clone ID: LIB3093-036-Q1-K1-A6
aaggtgaaaaaaaacagcaactttaacctaagacaagagagtagtatctaggaagtttcacgttccgtggagattccaactcacatcaaaatttgaggaagatctcaaccacttcactttccaagaggaggtgaggcatcatggctcaaaatggaagtggggatagagtagtggtggacaatggttttgaatccattgatgatgcatacgatcatgaacacaagctgagtcaaaagggtagcaccaaggtcaaggacgaagaagtttctttagaaaaggcgttccaacaccttctggtgccattatggatgaaccaattgacagttagagcctttctggtcagcttttcactcaacatactcttcaacttcatttggaataaactcaaccttaccac

SEQ ID NO: 42140 - DNA, 362 bp, Glycine max
  unsure (1)..(362): unsure at all n locations
  Clone ID: LIB3093-036-Q1-K1-A7
cccacgcgtccgcaacaacacaaggccatcatcatggcatctgcttctcctatgggaagcgaactcaagtccaccttcgctaaaactcttgtagctcccaagggcctctctgcctcttcaccactccacctnctgccttctaagaggcaatttagcttcactgttaggtccatccaatcagaaaagccaacctatcaagtgattcaaccaatcaacggtgatcccttcattggaagccttgaaaccccagttacatccaaccccttgattgcatggtacttatcgaacctccccgcatacaagaccgcattgagcccactactaataaggatcgaagtgggcctggcccatggctaccttct

SEQ ID NO: 42141 - DNA, 263 bp, Glycine max
  Clone ID: LIB3093-036-Q1-K1-A8
gattattcgtttttgttttagtcatagaattttgcatcacgattgatattcctttgtctgggactgcttttaacctgacatccttgttcaactgatgaaggttcaacatgttgctaatttattttgctcatatatacttgggtttggcttttttttatgtttcttttttgggatctttgttgtaattttggcgtggttaatgtttgtgtggtgctgtgtttttaattgaacggattgcttgcacatgagcttatcgcccatgc

SEQ ID NO: 42142 - DNA, 342 bp, Glycine max
  Clone ID: LIB3093-036-Q1-K1-B1
acgcgtatctgcaaattcagttcatccaaaagcaagtgtatatgcaaatgataattcttatacggattcgcaaaagcatcccttgcggccatatcttgactacattgaatatctttaccaaataatggatcctctatctgatcaagaacattttcagcatatcatgccatctaggttacaggaatttttaacaataacctatgcaacctttgatcgatactacagagactcatacttacgatacttttaaaagagattcacataaatccattcattacaaactaccaatcattcaatcattcatacacaagcttactgatcaaaatacttctattaaaacca

SEQ ID NO: 42143 - DNA, 401 bp, Glycine max
  Clone ID: LIB3093-036-Q1-K1-B10
cgggaagcgaccaccgcttctgcgtgcccaccgtatctcaggtgttctttaggcccaacgggcccattaaccgaatcgcgtttcccaaggccaccctcaagaacgacggcttcgtggtggacctgagcttctacgaccttctgggaataccggaatccggttcggtaacggagatcaagaacgcctacaagcaactcgtccgaaagtaccacccggacgtgtcgcctacgggtcgggtcgaggagtacacatagaggtttattcaggtgcaggatgcctacgaaaccctgtctgatccttccagaagagctatgtacgacaaggacatggccaagggcattaacttcgccttcaacgcccgcagacgctataattaccacgatcaggtaattgaacaaaaa

SEQ ID NO: 42144 - DNA, 324 bp, Glycine max
  Clone ID: LIB3093-036-Q1-K1-B11
cgatcagattctcaagtcaatggtttttttgatttagggttgcttcaaagaacacaaagtgggcttctttggaaccctagtttttttggttctcccaggtattgctgcatcgatttcctcttttagaattatttccactgataattgatccctttttgcacacttttaaaattttattatatcagtgtcaattttttaattaatggttaatattttaaatccccatattctgatttcctttttcctttcattttatctttactttttacttacttccattcattcatggaacctaaacaaaaaccctaggatgtgttaattttc

SEQ ID NO: 42145 - DNA, 409 bp, Glycine max
  Clone ID: LIB3093-036-Q1-K1-B12
atttccatcttcaacttcaacacttaaactccttttagtttcaatcatccacacggcaggggccaaatctttccctatttattttcatcttattcctccctatgaccatatattataccatatttatatatcttcacatacttaataatatataataatgcacgttgtaccgacgttggtgagcatgacggcagatctagaggcctatcatcggagcctggtggaaaccgtcatcatccatcggcttacagactatgagggttggagaacccacacattcgtttactgctatgaacctgacgatggaaagggtaccttaatctgtgtcacttgtggagtttcctactttgatcttgccttgatcaaccatctcttgctcttaggttactctcttcgagtcaccgtttac

SEQ ID NO: 42146 - DNA, 228 bp, Glycine max
  Clone ID: LIB3093-036-Q1-K1-B2
agaaaacaatcatcatcactaataaaattataggcacgattctggcatgtccaatggtcagcagaattagcttcattattcaaccgccaacggtgaccagagggcaaacccttgtctagccaacacgcgctgcagcttgtgctttccctgttgcttcggttcccgtcgcgactcggtcactcctcgggtattgattgtcggagctcgtgcgatccacttcaccattgt

SEQ ID NO: 42147 - DNA, 348 bp, Glycine max
  Clone ID: LIB3093-036-Q1-K1-B3
ttttacttcccctatggctcgtcactccttgctcttagccctcctcctcttcgccgccgtggccagcgccgcgatggcggtggccgcgtccgacgccgacgacatcctgatccgtcaggtggtgccagatgttggcgaagccgaagaggaggacaacctgctgaacgccgagcaccacttcgcgagcttcaaggccaagttcgccaagacctacgccaccaaggaggagcacgatcatcgcttcggcgtcttcaagtccaacctccgcagagccaggctgcacgccaagctcgacccctccgtcgtccacggcgtcaccaaattctccgatctaacttcggccgagtt

SEQ ID NO: 42148 - DNA, 408 bp, Glycine max
  Clone ID: LIB3093-036-Q1-K1-B4
tcgcccacgcgtacgctttgcataccaatttttattattatcattgtttcttcgtttcgtatagtctgttatcgtatctgctattaacataaaaattaaaaccaaagatgaagatgatcttaaaaaacggttcataaacgtcaagaaattttttgtcccaacaatcacatggaaaatgtaattcaattaaaatcctatgacggaggtaccttgatttattttaggatttaactcctctaatcttgatgatttatattcaaatatattcaattcctttaatatgtaagtaaggttttaaattggaataccaaaatcgtttatatcttgatatttatgagaaattactaggcaaatgaaacctatggggtggtaaacccaaaatcttgaaattttaaattaaaatatttt

SEQ ID NO: 42149 - DNA, 279 bp, Glycine max
  Clone ID: LIB3093-036-Q1-K1-B5
aattcctcgctcgacccactcgtcctaaaaaatataaaatcatcaataattaataattaaaaaataataaaaaaaaaaaaaaataaaaacgcaaaaatataacaaaaaaaacatatctatctcttctttctttatttttcttcccctttttccccatccttcttttcttcctcttctttcacatctttttccacctttatcaccttttttactttctttttcttccaatttcccctttacttactcctcttttctctctcactaacatcacttttttta

SEQ ID NO: 42150 - DNA, 297 bp, Glycine max
  Clone ID: LIB3093-036-Q1-K1-B6
cttcattccccattaccatggtgcatcctatccaccaccactattatccccttcactgcaaagaacgcttctactagattcccaccttccaattcattctaccaccacaagcaacgttgatctctggataccagtgatgttcgtctcgcctgcatttgaccctacaatcacattcaaaaccaagactcttccgacattaattacaatggtacctccaaatcataacaactgatcacggcgtgagatcatgatgatgattctgatgttcttattgaatgtatatatgtgtataagtct

SEQ ID NO: 42151 - DNA, 200 bp, Glycine max
  Clone ID: LIB3093-036-Q1-K1-B7
acgtgataatgaaaatattcaattattgttcaaggaaaaaaaaaaaaaaaaaaaaaaagaaaaagaaaaaaaaaaaaaaaaaaaaaaaaaaaaaaaaaaaaaaaaaaaaaaaaaaaaaaaaaaaaggaaatactatctaatcacttaaatttaatcaacttgttcaacccatacaacaactttactatgcttaccctaaa

SEQ ID NO: 42152 - DNA, 389 bp, Glycine max
  Clone ID: LIB3093-036-Q1-K1-B8
acgctttctggtagcagaagcttgcttgatagcaggtgcaaccaagaatgcctaccacaccaagtaccgtggaatgatttatgctcataacttctcatgtgaagccttgcggaaaggtgtcttcattgccggagcggttttcgttgttgcaaccatgattcttaacgtatactattacatgtacttcacgaaggcaatgacaacaccagtttctcataaggcaaatcgggtgagctccactgttggaatggctggatatgcatgatggactatggctgaaaaaggtaacaaattgagtcttaatttcagtggatatctctatgattgtcactagcaaaacggtgattttcaatttgggttttcttaggtgtttataatgtttttgtgga

SEQ ID NO: 42153 - DNA, 420 bp, Glycine max
  Clone ID: LIB3093-036-Q1-K1-B9
ggacgaggttgtcacggatttggagcagctgcaggttccccatgtgaatcaaaagcgttgtgtgaatgcctctcgcggtcgtagaaaaagtgctgatgattttactcatggtagaatcgccacagcttctgtttccccgctctcacatgacattgcaaatacacgtccttgaaagctgatgcatgtttccacatgaactcaaacacgttcatatcatgcacacatgctatctaataggttttacgtatgtatatatttcaggttctgtttgtaatatgtagtcaaaatagctggaactactgcaggtactgtcttatttggctctggttagctcaattttggtgttttttatattggtataaagttttccaactttattttggtacacttgcaatgtgcagttttcacatatatagaact

SEQ ID NO: 42154 - DNA, 395 bp, Glycine max
  Clone ID: LIB3093-036-Q1-K1-C1
caagaaagaaagaaagaaaaaggtagagaaggagagagagagagagagaaagaaaactgaaggaaagaaaaaaaagataagactaattaactacatttttggtttggtttttcttcatctcgcaggagacacgaagagacaagttacatcacatggttaaaacttgttaaagagttttgtgtttgtgtgtgtgaaagtagtttaaggttgtgggggtggttgaagcttttagctttagctttgcagagatgtcaagtggtggatgcaacatcatagtgtggttcagaagagatctgaagatagaagaccattacagcactgacagcaagagtgagagctggtgctggtgttgcagttttcatatgggcacctgaagaagaaggacaatactaccc

SEQ ID NO: 42155 - DNA, 427 bp, Glycine max
  Clone ID: LIB3093-036-Q1-K1-C10
caaaactccactcaccgtgttaatcaaaagtacttgttttctagttgtccatacgatcccgatccatcaacgtgacaattaagatttgtgattataagaagattgaattaatgtgttgtacctcttgctatctccgcctatgcacctataagagtatgtagtttctactttgttgataaccacatgctctctacatcttacaaagaagcatcctctatagactaatgggtttgttcagaagtaagggtgtgatttataggccagtgaaggatgttaacttacgtcctgatagcactgaattctatctccaagccaatgtcaaagctccccgcatgactggaatcctggtcaagattttcacttggttcttggagtcttcaatacttggacccttgctattgtatatattgaaaggaaacaatcttat

SEQ ID NO: 42156 - DNA, 371 bp, Glycine max
  Clone ID: LIB3093-036-Q1-K1-C11
cccacgcgtccgcccacgcgtccgcccacgcgtccggtgtgtgtgttttttgtgcttgggggagccttgtactgattaacgagaatggacaaggaagtggagcttggttcccttgaaggtgaaatggccacccagcacatttcacaaccacagaagcgcaagggtggtcttgttaccatgcctttcatcattgcaaatgaggcacttgcgagggtggcaagtttgggccttttgcccaacatgatactgtatttgatggggacctacaggcttcaccttgaccaagcaacccagatacttctctggtcccatgctaccagcaatttcacacctgtggtgggtgctttcattgctgattcttatctgggtcg

SEQ ID NO: 42157 - DNA, 381 bp, Glycine max
  Clone ID: LIB3093-036-Q1-K1-C12
gtcaatcttttgtgcaaccttactcgaacgcctacggctgctaaatattcaaagcgtatggctcaattgtactgaatggtcaacagaatacaaagcaagctctcgtttactatgtagaatgagaatgatctatctcaaaactgtttcacatgccaacttctgcgaaccaatgcatacaaatagtgcctctaatagctgctaagatagaacaatctcagaagcacactgacatccattaagagaacatcatgccaatatcctatcagtaattagctgcagtatcgagttcaagcacaccttattaatgcttgcatctatgcactctgcaatgaggcacttgttgctataactaatgcagtagaaccatatcaggaactggat

SEQ ID NO: 42158 - DNA, 243 bp, Glycine max
  Clone ID: LIB3093-036-Q1-K1-C2
ctttctgacaacataaccatcacttgatagcatgtgcaaccaagaatgcctaccacaccaaagaccagtgaaccatttatcctcataacttctcaagtcaagccttccagaaaagtctcttcattgccagaacaacactctctcatacaaccatcattcttaacacatactaatacatgaacatcaccaatgcccttacaactacactcacttatactgcataaccctgtgatcttcactttt

SEQ ID NO: 42159 - DNA, 253 bp, Glycine max
  Clone ID: LIB3093-036-Q1-K1-C3
accgaattccaattcgacccacgcgtacgcgcgtttgcaatccttcgccgtcatgtgatcccatgagaacgaatagtatgtcctgctaaggacggggtatcacactttttcctgtgcccgcatgcccatctaaacactgtcttgactagagcagccacatcgacgaatccaaccatctaagtgctattcaagtctaaacacacacacttgaacttattaacttatcacatagaccactcctataccctatcgc

SEQ ID NO: 42160 - DNA, 210 bp, Glycine max
  Clone ID: LIB3093-036-Q1-K1-C4
acgcaccctaacatttttcccatcaaattttatgtaaaattcccaaatctatatttaggcctttgatctgttacaccttttaccccaatcaaaaccaacacaacgcctcaaaaaaaaatcagtgcttagataaatatacactgtcacattcactgtacccatgtaccacatcattattgcatagtattatcattttaccttatcactata

SEQ ID NO: 42161 - DNA, 392 bp, Glycine max
  Clone ID: LIB3093-036-Q1-K1-C5
cccacgcgtccgagatgttagagcaaaattagcaaaagatttaccctcaatatcaggggtggagtcacatgacgctaatgtagctgaaaggcaggaaggcacagaggtagtgcaaccttctatgtctgttatggcaggtcctctgctttcaatgcaggactctatgaagtctgatgaaatccttcgctctccaaacaaagatggtttggacattgtggacattgattcagtggagttaaaggatcctcaagtttggagttcatatgcccctgatatatacaatagtatatttgtcaaggagtttgaaaggagaccgtcaagtgattacatggatatgttgcagcaagatatcactccaagcatgcgtaggattctgattgattggcttgtgg

SEQ ID NO: 42162 - DNA, 309 bp, Glycine max
  Clone ID: LIB3093-036-Q1-K1-C6
caattcccaattcgacctacgcgtcacgactctgacaattcttccatcaaattttttgtaaaatttccaaatctattattagtactatgatctagtacaccttttaccccaatcaaaaccaacacaacgccacacaaaaaaaacactacatagtaaaaaaaacactctcacatacactgtacccctgtaccacatcattattgcttaatattttctttttaccttatcactatacccgcttaccctgtttactctgttataattactcttgctattgggtgcccttcgttttcatttttgagaagcttt

SEQ ID NO: 42163 - DNA, 134 bp, Glycine max
  Clone ID: LIB3093-036-Q1-K1-C7
acgctcacactttggcggccacagcaacaataacaatggcagcctcactacaagctgcatctacgttgatgcaacccaccaaagtgggcatggtcactcacaacctcaaatctactcaatgcatttctaaagct

SEQ ID NO: 42164 - DNA, 411 bp, Glycine max
  Clone ID: LIB3093-036-Q1-K1-C8
tcgagaatatcttgagcaaccagacattcccaatacatggagagcaatggaggcactgtatgagtcacacaaggctagagccataggagtgagcaatttctcttcaaagaagcttcaagatttgttagatatagcaagagtggttcctgctgttaaccaagtggaattgcacccaggatggcagcagccaaagttgcgcgcattttgtgaatctaaagaaattcatctatctggatattctccactaggttcaccagcagctctcaaaagtgatattcttaagaatcctgttgtcacagagattgcagagagattggggaagacaccagcacaagatgcccttatatggggcttgcaagcaagtcataatgtgctttctaagagcactaatgagtccaaaatcaaaggggg

SEQ ID NO: 42165 - DNA, 266 bp, Glycine max
  Clone ID: LIB3093-036-Q1-K1-C9
taattcccgtatcgacccactcatactaccacaccttcaccaaccagacattcccaattcacgaatagcaattcatacacggcatttctcaatctatactatagccataccagtattcacattctatcactaccttctctaaaacatccacaatatataaacaaccctttctgctctttaccaatttcaatttaacccactaaacttctttttaaaccacatctaacactctcaaaccctatacttccatctctctctatataatt

SEQ ID NO: 42166 - DNA, 361 bp, Glycine max
  Clone ID: LIB3093-036-Q1-K1-D1
cccacgcgtccgcccacgcgtccggttgctttaattgaatacggtcagtctcttgaagaggggggaattaaaaatttggaggaaattgagaagaaagttcagttgcataggaaacggctgcaagtggagtatgggttatcagattctggtgaagatggtcaaggcaatagaagaacttcagagaggagggataggcatgatgtttcaaggaaacggcaccgaagccgtagtccaagtagtagtccacagccaacattatctggcaaagacagagatagagaacacgatttagaaagggatcgagacagacacagagattgaagtcatgatttcgatagtgaaagatgaagggaccggcaca

SEQ ID NO: 42167 - DNA, 435 bp, Glycine max
  Clone ID: LIB3093-036-Q1-K1-D10
catacatctattcctcgtctccatcattttgtgttgtgctcgctctgtctctctgtctcggtaaagcgcgtttcagcacccgttaccggcgaacatggagagggttatcggcgggaagtttaagattggtcggaaaatcggaagcggttcgttcggagaaatttatattgcatcaaatatggatacctctgagattgtcgccatcaagatggaaagcaagaagaccaaacatccacagctattgtatgaagcaaagttatatagtattcttcaaggagaaagtggtattccaagtatgaagtggtgtggcactgatggagacaataatgttctagttattgatcttctgggacggagtcttgaagacttttttgtctactgcgggaggaagttttcattaaaaacagttttgatgttggccgatcagatgctgac

SEQ ID NO: 42168 - DNA, 209 bp, Glycine max
  Clone ID: LIB3093-036-Q1-K1-D11
tcgacctcccacacctactcctaatcctcataatttcttttctcacaatctctcactctcggtacctgtccaattcctatcatcgccataaacccacaaacaatcccaatttcatctccatttaaactcaatatttatttcaaacatctttaacctcttcattcatataaacttatcttatatctaatattaccaacccttaatatact

SEQ ID NO: 42169 - DNA, 446 bp, Glycine max
  Clone ID: LIB3093-036-Q1-K1-D12
gcgcacactttgtacactccgtccctcttccctgtctctcaaatggcttccctgactgaaactttcatgtccctcgcctgtcttcccaatctagttatggtacccggtaccaggatctcccacccaagttcagtttccctctcaattaaggagggacgaagtttcccatccgttacattgcagcccataggatgtcggtttcgatttagatgtgtggcaaaaccagagacagtgaagaaggtgtgccacatagttaagaagcaattagcactaccagaggaatcatctgttactggagagtctaaatttgctgcacttggagctgattctcttgacacggttgagattgtgatgggacttgaagaagaatttggtattactgtggaagaagaaagcgcccagactatcaccaccggtcaagaagctgctgatatgatcgataagct

SEQ ID NO: 42170 - DNA, 238 bp, Glycine max
  Clone ID: LIB3093-036-Q1-K1-D3
tataattaggatatcactccttgacatagctctcatcgtttcaccgatctaaatatcgtgacgtgggtttaaatagacgctataagaaacctttgaactaaatcattcatcgttattagatcatactttttaccgatgacatgcacactttaattctatacatatcattctatcgtacattcatatgcttctaccttactaaatccagctcttgcaacatgtgcactacagtttattt

SEQ ID NO: 42171 - DNA, 314 bp, Glycine max
  Clone ID: LIB3093-036-Q1-K1-D5
cctcccgttatttaatattaaatttctatgtaattgtttgttgtaataatcattaacttactcaggggccgggggttgtcctgatccatcacaacactttgtcacttaaattcaaaaaaatggcgttaacaatgtttcgtaagaacatcatcacccactacttccagtttgcttcttctttgtcttccttgcctctccattcctcaatctacaaccctctctctatgtctctgtcttcatttcatatccaaagtgttagtggtggttgtgggttgccatatttcatacctggagctgtgtattttgaacacaac

SEQ ID NO: 42172 - DNA, 254 bp, Glycine max
  Clone ID: LIB3093-036-Q1-K1-D6
attccgacgctacgacctacgcgtatctcacacgcgtcctcatatgcaataatgttcgagatcatccacactatttcatagagcatcgatgtcctagaacactagattgaggatcacaaacgagtacactttgattagcaaacattttaactcgactgattactctcttaacttcacaaaggtcttcacaaacttaaacaccaccattgacagcacatttagttacttgtgtatatgatcattgactagatcca

SEQ ID NO: 42173 - DNA, 238 bp, Glycine max
  Clone ID: LIB3093-036-Q1-K1-D7
acgctttttctctcattccattcacattctcaacccaacacacaacttccaaccatattctctggccacgtgctcacatggactcaaagagaaccctagagctcacgggtttatcgttggaggagctccacgtggactgtaaacacgccactgagagcctctacgtggtggtacggccagagacaataaccagctactccacggccacggccaccgaaagcggtggcaacccttcttg

SEQ ID NO: 42174 - DNA, 410 bp, Glycine max
  Clone ID: LIB3093-036-Q1-K1-D8
cccacgcgtccgcccacgcgtccggtccctcctcattttccttcaggccctccttctcatgttcctgtctatgaaatgaatcctatgatgggtggtcctgtctttgcttatggacctcatgatgagtctgcatctacaacacagtcacagcctcaaaaaagtactacatctgcatcaaggccaattgggagctggcaacagtgccattctggtgtggaatctttttatggacctgcgacagggttcactgggccttttattggttcttctggaagcattccaagaattcaggggccaccacacatggttgtttataaccattttgctcctggtgggcaatttggtcaaggtggcttgagtttcatgggaaccacttatatcccctctggaaagcatccctaattggaaaa

SEQ ID NO: 42175 - DNA, 337 bp, Glycine max
  Clone ID: LIB3093-036-Q1-K1-D9
aattcgcggacgactcacgcctctcttcatgcgtccatgtgagtctaatatttgcaatgcccaaaatgtaaccattcctgcacaaagccaaaaactatgatctggataaagtcactaacatgcccaatcctgatgctagtgtaacccaccatgattttaatcgcgtcaacccccacagtgatgactactctattcatggctgtgtttccaacccttattctaatcgcattgctatttgctaaatcaaatactcctgtaacagtgctgtctacgacatagcatgatgcacaataccttacccacagacacttagtgcaagtgacacatcaattctata

SEQ ID NO: 42176 - DNA, 381 bp, Glycine max
  Clone ID: LIB3093-036-Q1-K1-E10
gttgggttgtcattgttggcatagcaacaagttgacactaatctaatcacctgcgctgcgtctctttgtattctacgatggacacgcgcggccacgatgaggaggagccaccgaaacctgtggttctgatcacaggatgttccacgggagggataggccacgcgcttgcacgcgccttcgctgagaagaagtgcagggtggtggccaccagcaggtcgcggtcgagcatggcggagctggaacacgaccaaaggttctttttggaagagttggatgttcagtccgatgagagcgtgcgtaacgtggttgatgctgttgtcgacaagtacggtcgcatcgacgtgctcgttaacaacgccggtgttcaatgtgtgggcccac

SEQ ID NO: 42177 - DNA, 428 bp, Glycine max
  Clone ID: LIB3093-036-Q1-K1-E11
ccaaactcaagttcaccaaaagcaaccacaacaagcacttctcttatttcctatgacaccctattacagattcacaagcgcagacacttcaaatggctctggaagctcttcaatcacccagaactgccactccatcgtttagtccctttgaagaaaccaacctcagttacttggagacaccgtggaccaaaggaaagcgttctaagcgtaaccgcatggagcagcaactgcaacactcttcatgcaccgaggaagagtacctcgctctctgtctcatcatgctcgctcacggcggcgccagcggtgtccccgccgccaagcctgctgtctccgacaacaattccgcgccgctacccgccgacaaactgagctacaaatgttcggtctgcaacaaaaccttctgctcttaccaagcactcggtggacac

SEQ ID NO: 42178 - DNA, 408 bp, Glycine max
  Clone ID: LIB3093-036-Q1-K1-E12
aggacttattcttcacagggaaactctactaatttgccttcaccacactcactctagagtaacattcgcagcctgcgtatatcaatttccactagcccgaacgcactcacttcaaagatttcttgagaagcgaattaacaggttggctaacagatccccttatgccttaacaaaaaaagtgattcacaccatagacaacaactcttattctgacgacactccacattatggttccttgaactagcactttctttaaggcaactaatgttaagtctgctttataagaagtggtactattctggaataacatttgcatgcatgtagaaccatacaaactcatataactatgttatagctctcgagaccatatcatatgcctaattagagaacttgaatgtgtcaactatg

SEQ ID NO: 42179 - DNA, 399 bp, Glycine max
  Clone ID: LIB3093-036-Q1-K1-E2
cccacgcgtccgaaaaatcttgctagagatttcttccatcactaagccacaccggaccacggttagcaagtatcaattgggttatttttggtcatctaataaaaagcaaaattaagcaagagttactttgaagaagacttgtacaaagatgagttcagcaagcataacttgagctgtggcagcaagtgttggagttgtggaagccttgaatgaccagtgcctgtgtacgtggaacattgctttaagatcagcacaacatcaagtgaaaaaccatgtgagatccttgtctcacgataagaatgtttcttcttcatcatcttctgctgtggtttctagtagattaaaggaagatggtgcataacagtcacaggaatcattgacgaaattaatgtactttaa

SEQ ID NO: 42180 - DNA, 383 bp, Glycine max
  Clone ID: LIB3093-036-Q1-K1-E3
gattaaagctcatcctaggcacaaggttttccacaagcaaatgcctcctgaaccgggttagcttgcatcaaggcttctccaatattcacctaatctacgctgcactgcgctggaagcatgtgcacatcctcattacaatgaactttgaccaccaaatgcccgtgacaactaatgacacatccaaatgcctccacttaaaaaatctaaacctaggatagctcaaacttacactcaaccaatcaatactctcacatccacagcatgtattccaagttcaagccaattaactctcctcattctgtcgcttcatagacacaaacggataatgaaaccatcagtcaacctatatagagatcaaactgaatcaacacacacgctgtttt

SEQ ID NO: 42181 - DNA, 401 bp, Glycine max
  Clone ID: LIB3093-036-Q1-K1-E5
acgcattaacactcatcttaggcacaatgttgatcacatgcaaattcctgctaaagcagcaaaggttgcataatagcttctgcaatcttcacctactctactcttcactgctctggacgcatgttcacatcctttctataatgaactttacaagccaaatgcccgaatctctaatggccatccactgcccccactattcaacttcatactggaattagctggagcatcacctgaactgatcaatatgctcatcccaaaacatattaagcggcagatgggtctcagctttccgcattctgccggttcataaattcaaagggataatgaaacgatgagtcaaccgatatagttatcaatgtgaatcaacagacaggctgtttgttgcctatatataacctttt

SEQ ID NO: 42182 - DNA, 362 bp, Glycine max
  Clone ID: LIB3093-036-Q1-K1-E6
cccacgcgtccgcccacgcgtccgattgaattcaaaaacttaagttcattccttgtgtttgactttgttcctcaaaaccaaacatgtcgaacacatgcggcaactgcgactgcgctgacaagactagctacaccaagggaaacagctatggtgttattgtagagactgagaacagttacatcgagactgttgtcatggatgttccagcacctgagcatgatgggaagtgcaagtgtggcactaactgcacttgcacggactgcacctgtggccattaatgaatatatactaaaatgtaattgccatgtgtttggcaatacaaatatccaaataatgtaatcttcgtatgaataaatgtgtgt

SEQ ID NO: 42183 - DNA, 151 bp, Glycine max
  Clone ID: LIB3093-036-Q1-K1-E7
aattccacatccgacccacacgtacgccaatgagcaccacattgtaagattcgctagtgatgcacttactattgcaagtgatgctaggatggacaacgttgagagtagtataatttcaaatatattatccatggactttcatgcctcatat

SEQ ID NO: 42184 - DNA, 351 bp, Glycine max
  Clone ID: LIB3093-036-Q1-K1-E8
ccaatatattccattctctctgtgtatttccctacctctcccttcaagatgcacgtcttggtcaagaccctgaccggcaagaccataaccctagaggttgaaagctccgacaccatcgataacgtcaaggccaagatccaggacaaggagggtatccacacggaccagcaacgtctcatcttcgccggaaagcagtctcgaggacggccgcaccctatccgactacaacatccagaaggaatcaacccttcacctcatcctccgtctacgtggtggcatgcagatcttcgttaagaccctcaccgccaagactattaccctagaagtcgaaagctccgacaccatcgacaa

SEQ ID NO: 42185 - DNA, 421 bp, Glycine max
  Clone ID: LIB3093-036-Q1-K1-E9
ctctactgcttcaccttctgctctagaaaattcagtggtgatacatggcttcggctactgtctctgtagccaaaccagcccttcaggcaaatgggaaaggcttctctgaattctctggcctccgcagctcatcaggcttccttcccttttctagaaaatcttcagaggatttccattctgtcattgccttccagacctatgcagttggaagcagtggaggatacaagaagggtgtgacagaagcaaaactgaaggttgccataaacggatttggaaggattggaaggaacttcttgaggtgctggcacggtcgcaaagactcccctcttgatgtcattgccatcaacgacaccggtggcgtgaaacaagcctctcaccttctcaagtacgattcgatcctcggaacttcgatgctgatgtc

SEQ ID NO: 42186 - DNA, 320 bp, Glycine max
  Clone ID: LIB3093-036-Q1-K1-F1
accgaaccgcaattccggggtacgcctacgctttcactaaggtaagggaaggaatcaaacactagatcaatagccagagccaaagctccagaggagatgcaatgagaaaagggtcctaagcaaccacagatggtgctcgcagacaagctattacttttacggcaacccaatgtgcaagacattgacaaggtttgctacaaataagatgtcttcactcatgtcaaggaaaactatattgtccctctgtacgaaaccctagtcgctgattccatgttggacttggatcgtgccctttaggactctatgcgcgctaaaattga

SEQ ID NO: 42187 - DNA, 295 bp, Glycine max
  Clone ID: LIB3093-036-Q1-K1-F10
tcttcctgatacttctatatcgccagctgccacactatcatcttattttttatattttttagttttgttttttttcatttatttattatacttttttatctatttttttctttttctctatatttttttctttattcttattatttattttcttacacattttctacttgtaactctattttataccaatctttactattatctaaataatttatttaattaaatcctgaaatctattctaaatccctcattatacaaaaaaaaaagctctaccgctcatataaatccaatctta

SEQ ID NO: 42188 - DNA, 383 bp, Glycine max
  Clone ID: LIB3093-036-Q1-K1-F12
cccacgcgtacgtccacgcgtccggcttaagatcacccaagagagaacctaagagacacagcacagactcacacaaagagttacaagagaaatcatcatggcatcagcagcatctgggtttgtgttgtcacttaatgttgcagctgccaccacaaactcaagggtggtcatgttcaacaccaagaacaacacttctaggtttgatgtaaaggcttcagatgagcctgcagcggcggtacccggcaccgtcacacctccagctgaagctgaagctaaaccaaagccaccacctattggccccaagagaagtgctaaggtgaagattcttaggactgaatcttactggtacaaaagcaccggctcagtggttgctgttgatcaag

SEQ ID NO: 42189 - DNA, 227 bp, Glycine max
  Clone ID: LIB3093-036-Q1-K1-F3
acgcttacacttccataacttaatctatctcaatactgatctgcatccgactaccattaccccacggtcagctccttttgcttattaactctctagaaacatgccaagacaatccaaaaagtttggctccaacctctaactaaattttaaacccaataacgttccttatcactcataatgacattaacttcatcaaccaaaacttctaattaatcccatataacatt

SEQ ID NO: 42190 - DNA, 271 bp, Glycine max
  Clone ID: LIB3093-036-Q1-K1-F4
cccacgcgtccggggttatggtacacatgggtatgattctcgcactaatggactgtcttggttagctgttgacagtaaatacaaaactaggggaagaagtggtggctactttggctatggcaatgagaacgcagatggtttgaacgaactgaacagagggcctagggccaagggtggcaaaaaccaaaaaggttttgcaccaactattctggcagtcaaagggcagactttgcctgcaactttaggcacagatgaagagaaggacaagact

SEQ ID NO: 42191 - DNA, 364 bp, Glycine max
  Clone ID: LIB3093-036-Q1-K1-F5
actcgaacctcaattccgggctagacctacgctttcacttttatatatgaaaaaactcatactcatttcattcagccagataccatgtcccaaagaaaaagacattttacttattaacctattgaacttgcaaagggattcaaaaatttggtccaacccttaatcaatttaaaccctacaaggttcttaccactcattatgacattaactttattagtcaaaacttctagtttatcccatttaacatttgaaaaaagtcatattctgtaattacattttggtttcaaatctttcactttactcttgcttgatttctttaaaggttttatattttcacaaaagatttaactttaatttatattac

SEQ ID NO: 42192 - DNA, 210 bp, Glycine max
  unsure (1)..(210): unsure at all n locations
  Clone ID: LIB3093-036-Q1-K1-F6
acgcccacgcgtacgattnttattccttctttgtttcttcactttcttccatacacataaccagctcttgtcagaccgttgtcctcaaagttggtatgtcatgtcaagggtgtgctggagctgtaaacagggttttggaaaaaatggaaggtgttgagtcatttgacattgatctgaacgagcagaatgtgacagtgaaaggaaatgtgc

SEQ ID NO: 42193 - DNA, 201 bp, Glycine max
  Clone ID: LIB3093-036-Q1-K1-F7
acgcccacgcttccataacttcttctgtctcaacctcatcttcatcctactactactacccaccgtctggtcctttgctgatcgagtccacaaaacatggcagacaatgaggattgaaaggataagactactcgtcggaattaattgcatgttttatctcttacaacatcaacatattcaactgcttcttgttctgattaa

SEQ ID NO: 42194 - DNA, 319 bp, Glycine max
  Clone ID: LIB3093-036-Q1-K1-F8
acgaagacagatttctgcaattatacggcaacgtataaagtgctgtgttctgcggctctgttggctgtgatgcacttccggcaccgctgtttcccatagtaaggttatttccacacactcagttgtatgacacgtgtctcttgatctgtcagatttcgtcgtcgtcgtcagtacgcctccctcggccagtaaataggaaaacaagggttcacaatgtccggcccaggggtacagttgcacattcaagatcaccatgtggtgatggataatggcataatccaagttaccttatcaaatccagatggaattgtcacttgga

SEQ ID NO: 42195 - DNA, 313 bp, Glycine max
  Clone ID: LIB3093-036-Q1-K1-G1
tctccatacaaatccctctctccatcgccctttgagtttgggttccaaaaggattgttccggcagtttgctactttaatactggagacaaatctgactccaaggaatcgggatggcctattctcaggcgatgggatgtgccttggcaatggcaaacagtttcactgacctctcttgcctgtggattgggttatgtgttgacaggtttgactgaagcaattgccttaccatatctcaggatcaaacctcatgtgctaagtttagattacaaggcaaatatacttttattcgatcagagcatcacaactgctgtt

SEQ ID NO: 42196 - DNA, 465 bp, Glycine max
  Clone ID: LIB3093-036-Q1-K1-G10
cttccgcagctggtagtaacccccttaggatgcatctgaattaagtacacacaatctaaaacaaaggtgaacgtaacttgtgggaagagtcttagttcaatttctatataatacatctttggtgagggatgaacttgattaagcttcaaatcaaggattaatcttataagttatctaattagtcgaaacttatgggatactttaagaattgtaacggtggttaaaaaaaaactgacgtatgagggaagagtcaagtaaatatattgagtcccattctctctctatttaatttgtatcgataaatataaaaagtgttgttgattgagtttttgtggttcgtttggtttcgattgaagaacccttcttttgctccacgtttcttcactctcaaccgttcgactcgttcgatatcaaccgaattgactcaaatctctaaggaaagtgccacactgaattctctttttt

SEQ ID NO: 42197 - DNA, 207 bp, Glycine max
  Clone ID: LIB3093-036-Q1-K1-G11
gaagaagaaagagaggcttggatcactaccatatctttggcaatctgtaaggcgctagagctgctggatatgttgaagaaagaggaagagatgctttctgctgttaaggatagacaatccaaggatggggataaggagttctctaaggatgttcttgatgaacgtgccaagaaagcagaagcttggcatcatgattctgcagttcgt

SEQ ID NO: 42198 - DNA, 431 bp, Glycine max
  Clone ID: LIB3093-036-Q1-K1-G12
ctccttccatacatttgctgtatggtctgagagctgctcttgatctgatttttgaggaaggacttgaaaatgtgattgcaagacacagtcgtttaggcaaagcaaccagacttgctgtagaggcatggggtttgaagaattgcacccaaaaggaagagtggtacagtgacactgtgactgctgttcttgttcctgcttacattgatagtactgaaatagttagaagggcatggaagagatacaatttgagcttaggtcttggactgaacaaagttgctgggaaggttttcagaattggacatcttggcaacttgaatgagttgcaactgttgggatgtctagctggtgtggagatgatactgaaagatgtgggctatcctgtaaagcttggaagtggagttgctgctgccagtgcatacttacaggacact

SEQ ID NO: 42199 - DNA, 360 bp, Glycine max
  Clone ID: LIB3093-036-Q1-K1-G2
ttcctccttgccccttctcatatctccgattccgttaactcccaaaactcgaacgctagccctaaccctaaccataaccctaaccccaactattacaattaccatcctatataagcaatcatttcgactctctttctcagctccacggctgctattctgcctatgcttaatgaaccacatctttcgctaaaacttcaccctctttacaaccttaacaacttagtcaacaccttctagccacagatcttcactaatcttccatagataaagagttctcatgaaaatcatgactttgatcaacattaaaggcaacttcctgcaactcttatatcaaatgtctattattacctaactgaactt

SEQ ID NO: 42200 - DNA, 339 bp, Glycine max
  Clone ID: LIB3093-036-Q1-K1-G4
cgcttctcgaagccgctgctggacgatgatttcgaggctgggttcagagaattcaaggaggattcggaaatcgaggatgttgatgacgaggacgatgaagacgaggaggagttgaagaagaagccctttgggttctctcgctccagcaacaaggctgcttctaagcctctctctcgtggatcagcaactgtggaatcaaaggggcaagctgagaagtgtgccaagagaaagaggaagaaccagtatcgtggaatccgtcagcgtccatggggaaagtgggctgctgagatccgtgacccacgaaagggggttcgtgtttggcttggaactttcagcact

SEQ ID NO: 42201 - DNA, 313 bp, Glycine max
  Clone ID: LIB3093-036-Q1-K1-G5
acgcgacagacaaacaaacaatttaccagctatacttgttccttttgaaggttagaagtgctaggatacggacaatggcagctactcacgaagatgtgaagcttttgggtattgtgggaagcccatttgtgtgcagggtccaaattgcccttaagttgaagggagttgaataaaaatttttggaaaaaaatttggccacaagagtgatttgcttcttcaatacaaccctgttcacaagaacgttccagtgtttgttcacaatgagaagcccataacaaagtctcttgtgattgttgaatacattgattagaca

SEQ ID NO: 42202 - DNA, 210 bp, Glycine max
  Clone ID: LIB3093-036-Q1-K1-G6
cgcttttcaaacccgttgctggacaatgatttcaaggctgggttcaaagaattcaaggtggattcggaaatcgaggatgttgatgacaaggacgatgaaaacaaggaggagttgaaaaaaaacccctttgggttcttttgttccagcaacaaggctgcttttaagcctttttttcgtggatcaccaactttggaatcaaagggccaacct

SEQ ID NO: 42203 - DNA, 172 bp, Glycine max
  Clone ID: LIB3093-036-Q1-K1-G7
gaattcccattccgacccacgcgtacgcgacaacaacaatgtcggcgaaatctagatccagttctacaacaaacatggtgactcttaggtctgggtcagttctcccgcaacgcacgcaaaacatccgataagtataccatgttgaacgccaattaccacttggtcaacttca

SEQ ID NO: 42204 - DNA, 388 bp, Glycine max
  Clone ID: LIB3093-036-Q1-K1-G8
tcgaaaaaaacctaccaatggctcccgcaaaggcagagaagaagcccgcggagaagagaccggcggagaaggccccagcggagaagaagccgaaggcggcgaagaagatatcgaaggaaggaggaagcgagaagaataagaagagaacaaagaatagcgttgagacctacaagatctacatattcaaggtgttgaagcaagtgcaccccgacatcgggatctccagcaaggctatggggatcatgaacagtttcataaacgacatcttcgagaagctcgcccagtagtcatcgcgtctcgctaggtacaacaagaagcccaccattacttccagggagatccaaacagcggtgcgtttgggcctaccttgggagttggccaaacatgc

SEQ ID NO: 42205 - DNA, 367 bp, Glycine max
  Clone ID: LIB3093-036-Q1-K1-G9
ctggaagaaagatcatcattgatacctatggtgggtggggtgctcatggtggaggtgccgtttcagggaaggaccctaccaaggttgacagaagtggtgcctatatcgtgaggcaggctgcaaagagtgttgtggcaaatggccttgccagaaagtgcattggccaaagtttctaatgcaatggtgttccttaacccttttcaatggttggggacacttattgaaactggaaaaattcttgccaaggaaatcctcaaaattgtaaaggaaattttcaacttaaaacttgaattgatcaccattaacttgaaccttaaaaggggtggccataggttcttaaaaacagttgttaatggacactttgaaa

SEQ ID NO: 42206 - DNA, 400 bp, Glycine max
  Clone ID: LIB3093-036-Q1-K1-H1
cccacgcgtccgactgaatctaacacgaggctcatgacggaatatgtcttagagaccagtggcgttgaaaccgagaagtgaatagtcttgcggcaatgcattagcccttcattccctctgctcgaacaggagctagggcaatgtatatgtacaggaaagaactcgtctacatggttttcgaccaattttatactccagtattggcatggctatgattaaaaaaaaaaacagttagatcataaaatggttgggataagttcgtgttacaaattgataatgaacaaaatatattgttaagccctccatgataattttgggatacttggagcaccaaaattatagtggtaatgttttcaaggcttggttctgaagacagctttgaccaatttgtgtgtaaaaa

SEQ ID NO: 42207 - DNA, 450 bp, Glycine max
  Clone ID: LIB3093-036-Q1-K1-H10
cccacgcgtccgctccaatgccgcagaagtacattagatgtgcgcagagtgattatggaggctacaatgtgacagagccacctattgatgcgccgcgagatcctctgtataaaactgagagggagatcctcaaggtgtacttgacaaaacactacaaaaatcgaaggaagggtgattctgagtttgtgcttgattttgaagagatttatgttattgattccaaatccaagtcaattaccagagccaaagttttggtaacagctcctggagggagaacaagagatagaaggagtgacttgcttgttatatctgatcgtgggagctccttcaaaataatacatgcgagtgaaaaagaggatccaacgactgtcatagaaaagcaggagtgggagcataagcagagagaaatggagagacatcttaagaagcttagagacttcaacatttcaa

SEQ ID NO: 42208 - DNA, 341 bp, Glycine max
  Clone ID: LIB3093-036-Q1-K1-H11
cccactcgtccgctcaaacgtcccatgcattcatgttatttgaaccttgtgactgttagggctacattgtatctctggcacatactatcaaatccctactgcctacgatccttattctgatgcaaatgctgatgactcacttgctgagtcaataggagtatgtgcatattcgtgattctcagctaaatcttaattttagcctgacaaccgttcttgaatccaaatacaaattcatttctaacaccatacttatagacacatataatgagttctgaacaaatggtacagttattcacttcccataactatctcatgctattcaacttctatgttatcatgac

SEQ ID NO: 42209 - DNA, 329 bp, Glycine max
  Clone ID: LIB3093-036-Q1-K1-H12
cccacgcgtccggtcttgtataattcttttctatgaccctttacacactctcttgtccaggcctaggtgtctttactgcttctatttatctttcaccatataactcttctccatcacacacacacacactactgtgctgctaaccatggcatatttcacttcttagtcttcatctctgacacacattccacccatttcagctacttattcttctgcagctttctacgattctttcgaagactcctgcagtatatgctcagagcccttcagcgttcatgacccatctactgacacctgtcgcaaacatgaatatcatctgcattgcatta

SEQ ID NO: 42210 - DNA, 387 bp, Glycine max
  Clone ID: LIB3093-036-Q1-K1-H2
cttgctagggttttaggaaaagacactgtctcgcgagtgaacacaggttacagcaatgggggtcggtggtagaattgggaatttattaagacagacagcaagcaggcaggttagttcagaattgcgatcatccccttcgttttttcaggctatacgcagtatgtcatctgctccaagcacaaagctgtttatcggaggtgtttcatattctactgacgagcaaagtttgagggaagctttttcaaaatatggtgaagttgttgatgctaggataattatggatcgtgaaactggtagatccagaggatttggctatattacatacacttcggttgaggaagcatcaagtgccattcaggccttggatggtcaggacctacatggtcg

SEQ ID NO: 42211 - DNA, 318 bp, Glycine max
  Clone ID: LIB3093-036-Q1-K1-H4
cccacgcgtccgaaagctagcccccagatctaacgtctaatggtttttgttaactgtgtagggtagaataccctataatcacagtcgtgaacaaaggtgaaaaaacaatgtctcactgtgccgcaaggtgtgccacaaggagtgccacgaggcttcttaacctaacgcgcgctctctccacggaggcgcgtgggcaaaagatcgagcgcatcgccacggagcttctcgacctcaacaggttcgagaggcacgatttcacggtcctctggcggctcaagatgggtctgcaccgctacagctctcctgtggctggcatga

SEQ ID NO: 42212 - DNA, 259 bp, Glycine max
  Clone ID: LIB3093-036-Q1-K1-H5
ctacgcttacttccactcttcctactgaatctaacatcacgctcaataccaaatatctcttacaaagcactcgtgttaaaaccgagaaggtattactccttccgcaaatcattaacccttcactccctctgctcaaacatcacctaatacaatcaatatttacccaaactaacttttcttcaattctatacacctcaactatacaccattatacccatatacttcattaaaaacttaaacacatacttcataaaatttt

SEQ ID NO: 42213 - DNA, 347 bp, Glycine max
  Clone ID: LIB3093-036-Q1-K1-H6
agaaaatcctcacccattttcttcgtagccaaacactctgaaattctcagatatggcagggcaagcgtatgtggatgatcacctactgtgtgaaatcgaatgtaaccacctcactcacgccgctatcatcagccaagacggaagcgtttgggctcagagcaccaacttacctcagttcaaacctgaggaaataactgccatcaataatgactttaatgagcctggatcacttgctccaactggattgtatatcggtggcaccaaatacatggtcatccagggtgagcctggtgctgtcattcgaaggaagaagggtcctgctggtgttactgtgaagaataccggtg

SEQ ID NO: 42214 - DNA, 328 bp, Glycine max
  Clone ID: LIB3093-036-Q1-K1-H7
acgcagatattaaaggaatggtggctaggggaatatgcatcacaaggagctcaataaagccaggtgtagcaaattgctcggtggtgtatcctcctagatctttgtatcctgaacagttgacatcaatcaaagctcttcaaataggatcaaatcttgctttttgtccctcaagaacctttaattcatacttttccactatttgcaatgatgccgattaaagaaaaaaacttcttaaaacaaacattaatgcctctcttacacctgctgtttctggaaactcttaaagtattccaagtgttcaaagtgatagttaagatattaaacccat

SEQ ID NO: 42215 - DNA, 234 bp, Glycine max
  Clone ID: LIB3093-036-Q1-K1-H8
gtcagagaagggacggataatgccgaagcagctgaggctcaaaggaatgaagaagctagggctgtttcttcacatttgggttcaactccagaagggctttcatcacccgcatccttggcagaagttctacgttctaccagacaaatgattgatcaacaagccggcgaatgcctacttcaactatcagggcatctggagaatcaagcaaatgtaacggatcccttgttgcggtca

SEQ ID NO: 42216 - DNA, 435 bp, Glycine max
  Clone ID: LIB3093-036-Q1-K1-H9
ctcttttcaattttcaactctctttggtatttaacttccaccccaactctcctgggactggtgcatttcctgttggctcccatagagtgtggccgtcacatcccaggatcattatgagttgtggctgctttggagcctcaactctcaagaggaaaaggaatccttctcgtactcctaatgagattgatggctttccacttgataatgttaagaatttctctgataaagacctgagactggccactgataactataatccaagcaaaaagctaggacgaggaggttttggtactgtttaccagggaactttaaaaaatggacaacaggtggcagtgaagacactttcagctgggtcaaagcagggagttcgtgaatttttaactgaaattaaaactatatcaaatgttaagcatccaaaccttgttgaattggttg

SEQ ID NO: 42217 - DNA, 133 bp, Glycine max
  Clone ID: LIB3093-037-Q1-K1-A1
ttccgtcgacccagcgtcgctaattgtgggagctcggctctgatgcttaagggcaaactcctgtgccgtaagtaacatggccctaggctaagggtatgacagttgacactaagtgcaagatgataccgtgtaa

SEQ ID NO: 42218 - DNA, 388 bp, Glycine max
  Clone ID: LIB3093-037-Q1-K1-A10
agaagatcgaacgaaggctccttccattattccattcagcgattccatggtggcgagaggcgtgccggcgatggcggtggtggccgttgccgcccttgacttgacggaatcctccaactggtggcgggacatcaaccgctccccgctctggcaggatcgcatcttccacctcctctccatcctctacggaatcgtcgccgccgtcgctctagttcaattagttcgaatacaatggagagtgccggagtatggttggaccacgcagaaggtctttcactttctcaatttcattgtgaatggggttcggtgttttggttttgtcttccgtcgggatgtgcaaaagttgcagccagagattgtccaacatatcttacttgacatgcctagt

SEQ ID NO: 42219 - DNA, 376 bp, Glycine max
  Clone ID: LIB3093-037-Q1-K1-A11
gaaaaatataaccgattctttcctttgtttgggctactggccatccgccggaagtttcgggggtaataccgatattttagcaacaaatctaataaatcttagtgtagtgttaggtgtattggttttttttggaaagggagtgttaagtgatttattagataatcgaaaacagaaaatcttgagaactattcgaaactcagaagaattacgggaaggggccattgaacagctggaaaaagcccaagcccgcttaaggaaagtcgaaacggaagcagatcgttttcgggtgaatggctattctgagatcgaacgagaaaaattgaatttaattaattcaatttatacgactttggaacaattagaaaattacaaaaac

SEQ ID NO: 42220 - DNA, 360 bp, Glycine max
  Clone ID: LIB3093-037-Q1-K1-A12
ccaagttcactttggtggcagttgaacgagtttgcaaccccacacacaaaaaccaaaggctgagaaatgtcatccccctcgccggtggccacggtggtctccgccgccgcgctgtacgaccgccccaaagccgtgaaagaattcgacgaaaccaaggtcggagtcaaaggtttgatcgattcgggaatcagaaccatcccccctttcttcgtccacccgcccgaaaccctagcggacctcaagcgcggaaccaaacccgggtccgcgccggagatccccacggtggacctcgccgccgaggagagctcccgcgccgccgtggtggagcatgtccggcgggcggcgagcaccgtgggattc

SEQ ID NO: 42221 - DNA, 364 bp, Glycine max
  Clone ID: LIB3093-037-Q1-K1-A2
gaaatggtactgctcgtgcaattaattggtgtggttgtattgtccaagatccacatccagcagtgcgtgctcttggatttcttcccgaagaaggtcatggtgtatatgtggcaaggtggtgtcatgggagtcctgtacatagatatggtctatatgctcttcagtggatagttgaaattaatggaaaaccaactccaaatatagattctttcgttaatgtgacaaaagaactagaacatggcgagtttgttcgtgtaaagacaattcacctcaatgggaagccacgagtcctaacattgaatcaagatttgcattactggcccacctgggaattgagatttgatcctaataatgcgatgtggca

SEQ ID NO: 42222 - DNA, 237 bp, Glycine max
  Clone ID: LIB3093-037-Q1-K1-A3
acggattttgtgtgtgcgcctttgtcttgatcattgtgctgttaatagttgtttggatacagaacgggggggatgaatgtacttagagactagaatatcatattttgatgctttattttgttttgaaatgggtggtataaacattatatgcttcttgttgagaaacctatgaccatccatctttttgagattgattgaggtaagctgactttacactattttgtatgatgcccacac

SEQ ID NO: 42223 - DNA, 380 bp, Glycine max
  Clone ID: LIB3093-037-Q1-K1-A4
cccacgcgtccgcccattgattccgaagagaaaagaaaagatgtttgagccacaacagctatgcactggcgcgaagaccgaggaattcgacctcgaatcaggagaaaccctctacccagggctgagcgtcggcgagaaccagctccgatggggtttcatccgcaaggtctacggcatcctctccgcgcagatcgtcctcaccaccctcgtctccgtcaccaccgttttctatactccaatcaatgacctcctcaagggcaattccaccctcctcctcatcctcctcttccttcccttcatctttttgattcccctgttgaagtaccagcagaagcatcctcataattacatcttgcttgcactcttcaccgtgtcgatca

SEQ ID NO: 42224 - DNA, 368 bp, Glycine max
  Clone ID: LIB3093-037-Q1-K1-A5
tgataacagatttgctccgtcaaaccggcggcaccgccgtcatcgactgcggtctggcgacggagctgtagcgccatggcgccgacctcaatgatcctctttggagcgccaagtgcctcttttccttccctcacctcattcgccaagtgcaccttgattacctggaaaatggtgcagacattataatcacagcatcttaccaagccaccattcaagggtttaaagccaaaggctattctgatgaagagagtgaagccttgctcagaagcagtgttgaaattgcacgggaggcacgcgaagtttactataaaaattgtgctggatgtcgttcgggtgatggggatgatgatggtagaatcctcaaacaa

SEQ ID NO: 42225 - DNA, 437 bp, Glycine max
  Clone ID: LIB3093-037-Q1-K1-A6
attgcagagtgttattttgagtatcagcatcaatggctccaattgcagtgggaaacgtgattgcagacggcattttggcttacttggatgaagaaaacaaaccccaaactgtctccattcactctctcgccaccggcaagaaagtcatcatctttggggttcccggtgccttcactcctacttgcagcttgaagcacgttcctggcttcattgagagagcagaagagctgaaagggaagggtgtggacgaaataatctgtatcagtgtgaatgatccatttgtgatgaactcatgggccaaaacattcccagagaacaagcatgttaagttccttgctgatggtgcagccaaatacaccaatgcccttggtcttgagcttgacctcactgacaagggtctcggcgtccgctcaaagaggtttgctcttgctgtggga

SEQ ID NO: 42226 - DNA, 190 bp, Glycine max
  Clone ID: LIB3093-037-Q1-K1-A7
tcgtccacgcgtccggactggcgtttgtttggtgtgtttttcgtgtgcgtcgaaccctcggcgttggttaattttgttttgtgttttcggatcaacttgtttcgcgttcggttgcggggatcttcggtttaggtaaatgagtggtaaatgagtggtttttgagcagaagcaagtaaaagagaaagggatt

SEQ ID NO: 42227 - DNA, 318 bp, Glycine max
  Clone ID: LIB3093-037-Q1-K1-A8
gcagggaagactgtctctgggaacaatatgaggcattccaaagatggaagcagcccatcactgttgatccactatgctggtccaatgaaaacctctgaagatactccaacaaatggatctactgtgccccctggcagacgccttgttgttccactgcagatttgtgttttgcagggtttgtcttttgtgaaggctcagcttctttcaatggagtttcctgctcatgtcggtgaaactcttccgaagttggatgacttaaataacaagtctactgatgttgaatcagaaacaaaaatggacagattggtgaaaatagat

SEQ ID NO: 42228 - DNA, 361 bp, Glycine max
  Clone ID: LIB3093-037-Q1-K1-A9
ggaggactgagcttctttttgtcaatggcctttaccgtcgtatatcttgtcaagccaaggcagcttggagatccctcttatttgtcatggaataggagcccaggagggcactgaccaaagaaacttgatgttcccaagatttacattgcttgtgcattatgcaaactacagttgcgtttgtaattttgtacatcaatactcatacatgctaatagttaggtgttattattatcctctaccccaaaaaaacaaaattcttttattgtttttcggtcttttgcatcagaattggtatatcttgtattttaagacaaaaattggcctatacctatatatttgctaagtacttttattcaatttg

SEQ ID NO: 42229 - DNA, 164 bp, Glycine max
  Clone ID: LIB3093-037-Q1-K1-B1
gtcatgattggcataattttgccattattttatttctaggtattcacaagattgtgttccaatgcaagccattttttggctataagagtctctggacagttaaaaatttgatgcctgtacattgcaaattgaattggtgatacaggttggattatgttattttc

SEQ ID NO: 42230 - DNA, 303 bp, Glycine max
  Clone ID: LIB3093-037-Q1-K1-B10
aagaaattgcagaagcagctagcaataccaattgcagcctgtgattttgcagaggggaagtggctcgtcactgaggaagagaaaacagtaagcacttctcaaagatgaggtgttatatttttgctacttgtttaggcaacaatgcagtttccatgctccatgttttattcttcatattgcttcttacctattgtacttattgacaatacatgagtacacattagaagcttccttgcattcccttgagtcatgaattggaaatcttatgtctatgtggcactgcaataaaatctattatttttt

SEQ ID NO: 42231 - DNA, 377 bp, Glycine max
  unsure (1)..(377): unsure at all n locations
  Clone ID: LIB3093-037-Q1-K1-B11
actcctatacttccaccacctccantattctcccttccaccacctgatcaatactattatagcaagcctccttctcaacaacactctccacctcctccttcacctcattcttcacctccaccaccacattcaccaccaccaccaacaccattttatccctatttatcaccaccaccacctcctccacttcactctcctaccccaccactttattcaccaccacctccacccccatcttcaccaccttttatagaatcaccttctcctccaccacctacaccacctttttaaaatcattcaccacctccaccatcaccacactttttcaccttaccatctctcaccatcaccatcaccacccatcttccccattcaat

SEQ ID NO: 42232 - DNA, 428 bp, Glycine max
  Clone ID: LIB3093-037-Q1-K1-B12
ctcttcgagggtttgggtttctcttcctcccttggagaaaaagaagagccaccgctgcgacgccgttcgtgcatttttgaggtgccgctgtcatgtttgggcgtggtggaccaaggaggagtgataactccaaatattatgatattctcgggatttccaaaaatgccagtgaagatgaaatcaagaaggcctatagaaaggcggctatgaagaaccatccagataagggaggagatcctgaaaagtttaaggagttaggtcaagcatatgaagttttaagtgatcctgagaagaaagaactgtatgaccagtatggtgaagatgcccttaaagaagggatggggggaggaggctcgtttcataatccatttgatatatttgaatcattttttggaggagcaaagcttggtggtggtggtagttcccga

SEQ ID NO: 42233 - DNA, 331 bp, Glycine max
  Clone ID: LIB3093-037-Q1-K1-B2
gtggttgaaagttaagaagtagcaaagatgtttccattcgggcacaagggtcaaaagataaaggggactatggtggttatgcagaagaatgtgttggatatcaacagcatcaccagtgttgacgggatcgtcggcaccggcttagacttcttaggcagtgcactcgatacagttacttttttagcctcctccatctccatccaacttattagtgctaccaaagctgatggtgggaaaggaaaaggtggaaaggctacaaatttgagaggaaagataacattaccaaccatatgagcttaagaagaagcatacgatgctcaatttgattggg

SEQ ID NO: 42234 - DNA, 354 bp, Glycine max
  Clone ID: LIB3093-037-Q1-K1-B3
aaacaagccaagtgaaagagagaagaaaagtcaaagacaatgtcagggatcattcacaagatggaggagacccttcatgtgggaggccacaagaaggatgaggagcacaagggtgagcagcaccatggtggagaatacaaaggggagcatcatggtgaacacagtactgaatacaaaggagagcatcatgttggtgagcacaagccggagcaccatggaagagaagagcacaaagaggggttcctagacaagatcaaggacaagatccacggcgaggaaggtggcgccaccgccgagggcgagaagaagaagaagaagaaggggaagaagaagcatgaacattgccattacagc

SEQ ID NO: 42235 - DNA, 251 bp, Glycine max
  Clone ID: LIB3093-037-Q1-K1-B4
ctcaaaggctgatgtgtatagttttggcatggtgcttttggaacctggtgagtgggattaggaactttgagatccaaggttctgtggttaggagtgaagagtggtacttccctggttgggcctttgataagatgtttaaggagatgagagtggaggagattttggatgggcaaattatggatgcttatgatagtagggcacactttgagatggttaataggatggtgaagactgcaatgtggtgtctgcaa

SEQ ID NO: 42236 - DNA, 436 bp, Glycine max
  Clone ID: LIB3093-037-Q1-K1-B5
gttgttttttattctttcaaatacattccaaaatctcttggaaattgcgagattcactgctgatccgagcagcagattttgggttctgacccaattattcattttccccaactgggtcttgtggattttttgttggggttttaaatttcgtgttgctgggtttgaaagttatttcctttcttccccgtctggattcaactcccaagtatttgctttaattggggtatttttttatttatcagaattgttaggttgctttgaggttttccaaggcttgaaagctgaaaatgacgattagtagtcttgcacctaaggcagagaggaagaaatcaaggaagagcaaggcagttgttaatgagaatgcacccttgttgccaaaaagtcatgttcaggagagtgatgctgggtttgatgatttcaatggagcctcattttc

SEQ ID NO: 42237 - DNA, 224 bp, Glycine max
  unsure (1)..(224): unsure at all n locations
  Clone ID: LIB3093-037-Q1-K1-B7
cccacgctttctcccacgcgtccgcggactcgtgggtgaggagcatggcatatccatgggggagccaccaaagggggatgaggaggaccgcngatcttctttcgttctccaatccaaaggtgaatggtggcatgcggggtttcacttaacgaccgcaattgttggacccacgatacttaccctgccatacgcgttcaagggattggggtggggacttggattta

SEQ ID NO: 42238 - DNA, 151 bp, Glycine max
  Clone ID: LIB3093-037-Q1-K1-B8
ttccattccatcacaatgttcaaaacataaaggagacgattttttttattcagaacaatctcttagatatcaacaccatcaccatttcttacgctatcttctgcacccacttaaacttcttatgcattacactctattcaattactttttt

SEQ ID NO: 42239 - DNA, 381 bp, Glycine max
  unsure (1)..(381): unsure at all n locations
  Clone ID: LIB3093-037-Q1-K1-B9
gaaaaagaaaagagagagtgagagacaaagagagagaagggaagcaaccaccataccgtgacagcgttgacaaaattagggctcattangaatggaaaatgccaccctttcacattctaaggtcatattcaatcagaaaagcaggtgcaaatttagttgaagtatgacaggttttgtgatagttgaggggtgggagggtaactttttgtcctacctagatagggatttcgatggaagagatgtcctttgcggttgcagtgccattaagagtaggtaattgtaattgcaattcagtctgtgataacccaaccacagtagttccccacatggatgtatccagatttaagctgattggggatacaaggttgttatctaattctg

SEQ ID NO: 42240 - DNA, 306 bp, Glycine max
  Clone ID: LIB3093-037-Q1-K1-C1
ttgacgcgtgggctgttacggattatcatcaaagcaagttaacaaaatttgggtgcgtcctggatggacccttttgccccctctccctcaccctccactaactcctcctttttggtttttataaagcacattcccaatagaggagggtccctacacaacacaacccttcaatgacgtccatggccactttcttcgcccaaaccttcttccccttccactctctctccaaaaccttcgatacccatttcgcccctgccccgaaagtcaacgtctttgtgaacttcatggcgaggaagcacgtttggg

SEQ ID NO: 42241 - DNA, 438 bp, Glycine max
  Clone ID: LIB3093-037-Q1-K1-C10
cccacgcgtccgtatttgggtacatgttatttggggattcaacccagtcagacattctgatcaattttgaccagaatgctggttcagcagttggttccttgctcaatagtttggtccgtgtaagctatgccctccacatcatgctggtgtttcctctcttgaacttctctttgagaaccaacatagatgaagttctcttccctaagaagcctatgctagccacagacaacaaaagatttatgatcctcactctggtgctgcttgtattctcctaccttgcagctatagcaatcccagatatttggtacttctttcagttcctgggatcctcatccgcagtgtgccttgccttcattttccccggctctattgttttaagggatgttaaaggtatatcaacgagaagagacaaaattattgcactgataatgattatac

SEQ ID NO: 42242 - DNA, 402 bp, Glycine max
  Clone ID: LIB3093-037-Q1-K1-C11
cccactcgtccgaacctatcaagtgattcagccaatcaacggtgacccattcattggaggcggggaaaccccagttacatccagcccttttatcgcatggtacttgtccaacctgcccgcatacagaaccgcagtgagcccactactaagagggatcgaggtgggcctggcccacggataccttctggtgggcccattcgtgaaggccggtcctcttatgaacaccgagatcgccggtcaagctggctctctggccgccggtgggcttgtggtgatcctcatcctttgcctcacaatctatgggatttcatccttcaacgaatgatccccatccactgctccgtcgctgaccttgacgggccgcatgaaagagcccgatcagctccaaactgctgatgggtg

SEQ ID NO: 42243 - DNA, 359 bp, Glycine max
  Clone ID: LIB3093-037-Q1-K1-C12
gccttgtactgattaacgagaatggacaaggaagtggagcttggttcccttgaaggtgaaatggccacccagcacatttcacaaccacagaagcgcaagggtggtcttgttaccatgcctttcatcattgcaaatgaggcacttgcgagggtggcaagtttgggccttttgcccaacatgatactgtatttgatggggacctacaggcttcaccttgcccaagcaacccagatacttctctggtcccatgctaccagcaatttcacacctgtggtgggtgctttcattgctgattcttatctgggtcgattcctcgctgttgggttgggttcggccatcacttttctgggaatgacact

SEQ ID NO: 42244 - DNA, 400 bp, Glycine max
  unsure (1)..(400): unsure at all n locations
  Clone ID: LIB3093-037-Q1-K1-C3
ggtccggaannttcccggtgtcgatcccagcgcgtgccagtaattgtttttttaatttgaaataaaatgtccgggaatcaatccacatagaattgagtgagacccctccatgggtgggagggcacatagaaatgaggagcacaatatgataacatccatggtgatgcacaaaggtgaacacaaaggagaacaccatggtgagcacaaaggtgaacacaaaggagaacaacaccatggggagcacaaggagggacttgtggataagatcaaggacaagatccatggtgatggccatgacaagggtgagaaaaagaagaagaaggacaagaagaagaaggagcatggacatgaccatcatggtcatagcagcagcagtgacagtgattagatcttatatgtt

SEQ ID NO: 42245 - DNA, 129 bp, Glycine max
  Clone ID: LIB3093-037-Q1-K1-C4
agtccctttcctttacttcgctcgctcgcacctctcatcacaacgcagctcgtgtcgagaccacccctccttccccctctcttctcgcgcacccggacgtccctacctcaacacacctgagagcattcg

SEQ ID NO: 42246 - DNA, 385 bp, Glycine max
  unsure (1)..(385): unsure at all n locations
  Clone ID: LIB3093-037-Q1-K1-C5
ccacgcgtncgtgattaccgtgttcgtgttggaggggtggccgaaagagaccagttcccaaaggtattgtttatgggaagcccacaaaccatggagttacccaactgaaatttcagcgaagcaagaggtcagttgccgaggagcgagctggacggaagctgggtggacttagggtcctcaattcttactgggtgaatgaggactctacttataaatactttgaggtgattctggtggatgttgctcatgctgctattagaaatgatcccagaatcaattggctcgccaatccagtgcacaagcacagagagctgcgtgggcttacctctgccgggaaaagcaacatgggtttacgtggcagaggacatctatatcacaaagcacg

SEQ ID NO: 42247 - DNA, 378 bp, Glycine max
  Clone ID: LIB3093-037-Q1-K1-C6
ttgaattctcgacccgagcgtccgcatgctctaattgagatgtactatgatctggtttctgggggaactgagaatcacccggttggggagagtctgaagaataaggagaccgatggctccagagttgagaaggtgttgtaagcagttcatattgcatctaataaaaacactgttcctggagatatgtctgccatgcttcctgttctcatcactgactggaacccctgctcttactcctataggatctgttgaggaggattttgttaaggtagcacatgctcttagatgcatcagtgcagttggctgtgaagattaagggtcagagcacaagaacaaagctctaggacttcttgaccgcaattcaatcatcttctacct

SEQ ID NO: 42248 - DNA, 388 bp, Glycine max
  Clone ID: LIB3093-037-Q1-K1-C7
gttctggagccagggcagttggatttccacagatggcaaatgctgcagccattgcagcggccgttggtggaggtctacctgctgaaataactgggacaaatgacaggtgtacagttcttgtatcaaatcttaatcctgatagaattgatgaggataaactattcaacctgttctctatttatgggaatattgtgagaattaaacttctccgaaattaaccatatcatgcacttattcagatgggagatggttttcaagcagaattggctgtacactttctgaagggagccatgttgtttgagaaacgattagaggtcaacttcttcaagcatccgaacataacccatggtgctgacacacatgaatacatcaattcaaatctcaatcg

SEQ ID NO: 42249 - DNA, 356 bp, Glycine max
  unsure (1)..(356): unsure at all n locations
  Clone ID: LIB3093-037-Q1-K1-C8
gcaagatagagtcaatctgctgaaaagattatcaggtgatataaatgaggaggtggagaagcataacctcatgctggatcgaatggngaatgatatggattcatcaagaggggtcctttcgggcactatggacaaatttaaaatggtattcgagaccaaatccaaccatagaatgttcacgcttgtagcatcctttgttgtgctctttcttataatatactacctcactaggtaatttgatctttcattcaactgccatctttatgttaggtccaagatgacgctatttcctctattactgtaaataatgctactacctctggctctgtaagataactgntctgtataaaggtttg

SEQ ID NO: 42250 - DNA, 420 bp, Glycine max
  Clone ID: LIB3093-037-Q1-K1-C9
cccacgcgtccggagaaagagagtgaagagagaagaagatggcgtcgagcggagcggggccggtttggagggcagcggggatgacatacatcacatactcaaacatatgcgcgaatctggtcaggaattgcctcaaggaaccctacaaggctgaagccatctctcgtgagaaggtccattttgctctctccaaatgggtcgacgccaagcctgaaaaacctagtacgcctcttctcttttattactgcgcttccaccatcaatcattttattttcatattaatcgatcctctcattcccctaattaaattaccctaaatcctgcatcaccaatttgtatactttatgttcgtcataaccatctcatgctaggattcattcccgtataatgcggattaatttgtgccagatccatttctct

SEQ ID NO: 42251 - DNA, 422 bp, Glycine max
  Clone ID: LIB3093-037-Q1-K1-D1
gtggtcgctggtttctggcagacagtgggtctgtgcctggagatcttttacttataataggagaggcacttacccatgctactgttggcctatgtcctgctgcatcatatagagcttctcctgattattttttgagtcctaatggtggaggaaggacttctcttgcatatagactcatgccacagggcaatgctatattagattgttccctaattgcagcagctggccatgttattccccaaagttatgttcgaatatctgtaagccaatttatggatgaccttgttgtcgaagaactgataggcaatagatgggtttataaaaacaatggataccttatggtctcgtgcaatggaggactcaaccaaatgagagttgcgatatgtgacatggtggctattgccagatatttcaatgtcaca

SEQ ID NO: 42252 - DNA, 230 bp, Glycine max
  unsure (1)..(230): unsure at all n locations
  Clone ID: LIB3093-037-Q1-K1-D10
catacttttcattctccttaaccttttatctctncaccnaacaaccaanccctcaaagaaagacttttatttanatctgcccccaccctctanccccacctttnttattcaaaatttttcttacaactcatacaataaatcacatctcttaaatttaatcataaaaaaccttttacttattcatccctatccaaataaatatatcctttattttatacccttccccccaa

SEQ ID NO: 42253 - DNA, 397 bp, Glycine max
  unsure (1)..(397): unsure at all n locations
  Clone ID: LIB3093-035-Q1-K1-D9
ctctctctgtctcctacgattcgttttgccccttttgttgccctaatttcaaccatgccgggccgtagctccggtggaagatctgcccgtcctgctcctcgggcagctcctcgtcctgctccagttcaccatgctcctcctccagcccctgctcagagtggtggtggatctatgcttggtggcattggttcaaccatagctcaaggtatggcttttggcaccggaagtgcagtggcacacagggctgtggatgcagtcatgggtcctcgtaccattcaacatgaaacagttgttacagaggctgctgctgcttgccctgcacccactgcaaatacttttggtggcgatgcatgcagcattcatacanaggcattccangatttgatgctcatggaca

SEQ ID NO: 42254 - DNA, 405 bp, Glycine max
  Clone ID: LIB3093-033-Q1-K1-D11
attgaagacagacgttatactcaggcttctgaaacgtaaatatcctacatccaatgagtggggatctgaaatcattcctgcagctacgagggaaaacaatgtccaagcgtatttattcattgactattgccaagacattggaacaataaaatcattttacgatgctaacttggctcttactgaagagaatccaatgttcaaattttatgacccgaagacacgcatttacacatctccaagattcctaccaccaacaaagattgacaaattgcccattgtggatgcaataatctcccatggatgtgtcctgagagaatgcactgtccaacattccattgttggcgaacgttcacgtctggattatggtgttgaactccaggacactgtaatgatcggagctgacta

SEQ ID NO: 42255 - DNA, 343 bp, Glycine max
  Clone ID: LIB3093-033-Q1-K1-D12
cccacgcgtccgcccacgcgtccgatttcctcacctccttcaaccgctgctaaattctagggttccgaaatggacgctggcggaaagatcaagaagggcgccggaggtagaaagggcggcggcccaaagaagaagccggtttcaaggtccgtcaaagccggtctccaattccccgtcggaagaattggccgttatttgaagaaaggaaggtacgctcagcgtgtcggtaccggtgctcccgtatacttggctgcagttctcgaatacctagctgccgaggtgcttgagttggctgggaatgccgcacgtgacaacatgaagaacaggattattccaagacacg

SEQ ID NO: 42256 - DNA, 340 bp, Glycine max
  Clone ID: LIB3093-033-Q1-K1-D2
tctatgtcgtcgtttctcaaaaagttgcaagagttaaagcaaaaaccaaagtgagagagagagatgatgaagccatcgatgctcagatctcttcactctgccgacacccgcggcgcctcccacctctcccgccgtggctacgcctccgagccggtgccggagcgcaaggtggccgttctaggtgccgccggcgggatcgggcaacccctctcccttctcatgaagctcaaccccctcgtttccagcctctccctctacgatatcgccggaactccccgtgtcggcgccgatgtcagccacatcaacaccggatctgaagtagtggggtaccaaagtgacg

SEQ ID NO: 42257 - DNA, 353 bp, Glycine max
  Clone ID: LIB3093-033-Q1-K1-D3
gaagaaagaaaaattgaaagggagaaataaaggtagcgaaaagaaggaacataaatacaaaggcatctttgttctgctgtctgatgcatgcacgtctggtcctttgatcatgaccactgagggtctcttcacatgtcgtttttgagccccatcgtgattctattctcagacacaggatagcggaggccgagaaagccggggaaaaaagtcacctttctttctttttcattttccattttcatttaaaacattaaaaaaaatctattttttctatatctggttctccacttcttttctcagtggtttggattggaggtcacagagggagagagagggttctactctctatacat

SEQ ID NO: 42258 - DNA, 376 bp, Glycine max
  unsure (1)..(376): unsure at all n locations
  Clone ID: LIB3093-033-Q1-K1-D4
gtttctactctcacagctgtttattttcttcctcttctcaactgtgttcgtgtgtatgcatgtgagttgaaagccagactcaaggagctgaaagacaaaagaagaaacttggatttgaatcagccaaaatttgagttacacgtaattgcaaagataagatgagtgttatgtatagtcctgttctcaattactcagatgtggagcatcagctaaggaaaaaccaagacatggattcaagtattggacatccacaacaacactgtcaccaacccaattctggactattgaggtattgntctgctccaagctcattgctgcaagcctcattgacaacaccattcatggctgtgtcaacgaggaatcggtcacaagtgag

SEQ ID NO: 42259 - DNA, 466 bp, Glycine max
  Clone ID: LIB3093-033-Q1-K1-D5
gagaagctgcgcaccttttcatactagtgctgattgctgaaactgccatcgctcgccattggcacaaagatcccaacaacacttgaaagttgaaacagaaaaacaccaatccctcatcgtactgttccgttatcaattctcgtgtttaaggacacaatttgcttgatacattttcaagttttcatctccatgttttgattttgaagaataaggagtatgcaattgactactacagatatggttttactataagtggcctgtatatggttttgggtcttgcaagtgtaagcagtatggaggatattcaattggatatcagttgggacgatgctgtctgtcccatatgcttggattttcctcataacagtgttctccttcggtgttcattttatgataaaggatgtcgtgcttttggttgtgacacaaatcaattgcactctaattgtttggatcgctttaaaaattc

SEQ ID NO: 42260 - DNA, 446 bp, Glycine max
  Clone ID: LIB3093-033-Q1-K1-D6
gcagctccttctagttccggtgtcggtgtgggtgtttgaatctggtgaaggatgtcaattggtccaatcaaccagggtgatgccaacggctccaaccccttcgcttcgtggggtcaattcgtggattttcctctccctccttccatctccggcttcttccccggcttggaattcggattcggattcggatcatccgtgaacacacgtgtggactggagggagactcccagagcgcacgtgtggaagctggtgcttcccggcttctccaacgaggacgtgctggttgagctccaagacgagagggtgctccaagtcagcgtggagagcggcaacttcgtcacgaggtttaaggtccccgacaacggtaacctagaacaactcaaagccaacatgcgtcacggggttctcgttgtcactgttcccaagtttcatcaacccactactac

SEQ ID NO: 42261 - DNA, 444 bp, Glycine max
  Clone ID: LIB3093-033-Q1-K1-D7
tggtatcccagcagttctgctaactttgggagccttgttcgtggtggacaccccgagcagggtgattgaacgtggccgcttggaagaaggaaaaacagtgcttaaaaagattcgtggcactgacaacattgaacttgagttccaggaattgcttgaggccagtcgtgtggctaaagaggtcaagcatccattcaggaatcttctcaagcgcaggaaccgaccccaacttgtcatttccgttgccctacagatattccagcaattcacaggcatcaacgcaatcatgttttatgccccggtgctgttcaacacgttaggattcaagaacgatgcatccctgtattctgctgtgataactggggctgtgaacgtgctctccactgttgtatcgatctactcagtggacaaagtgggacgttgcattctagtgctggaagctggtgt

SEQ ID NO: 42262 - DNA, 397 bp, Glycine max
  Clone ID: LIB3093-033-Q1-K1-D8
cactatcaagattggaagtttatgatcttgaactttccaaccacaatcacaatggcgcgtcgtagtagtatggttctccaaggcttgcatcaattggtatagaagccttccacatgtctctcaattgcaaacaagtgttgcagggggtgatgcttgggctacggatcatatgatggaacattatgatccaattgcaaggtatataggacttgagtcctgcatcaaaagtatgggatttgatgtgggatcattatatggccttgggatttcttcgcacaatggttagcttacctatatgtactagggtcataaatgcttttagatcgtcgaccgtcaggtaaagccgaatatatacataacattgatttaatctcttctagatataacagaacctttt

SEQ ID NO: 42263 - DNA, 330 bp, Glycine max
  Clone ID: LIB3093-033-Q1-K1-D9
attcaagacagatgttttactcaggcttctgaaatggagatatcctacatccaatgactttggatctgaaatcattcctgcagctgcgagggaaaacaatgtccaagcgtatttcttcattgactattgggaagacattggaacaataaaatcattttacgatgctaacttggctcttactgaagagaatccaatgttcaaattttatgaccccaagacacccatttacacatctgcaagattcctaccaccaacaaagattgacaaatgccggattgtggatgcaataagtctccattgatgtttcctgagagaatgcactgtccaaca

SEQ ID NO: 42264 - DNA, 402 bp, Glycine max
  Clone ID: LIB3093-033-Q1-K1-E1
cttcacttgttctgcattgaccatagcttctctctttctttcctaattaatccttccatgcgaacggacgctctctctcatactcatagtgacacacacagcttagtttcgttgtattgtatgtgtcctttctcaattctcatcatatatctgttcaagtaccattatctttctatgttgagtgtcggcattttttgagtttctcactaccacttgttctttttttctgatacatgcatatatatacgtccagatatacagtctattcactcaaattcagtgtcacaagttctcaagattgttgtccggcactatctgcagcaccattcaattcttcactctatattggatacacacacttctagtatataccaagtgattgatgatgttgtcagcaaaatc

SEQ ID NO: 42265 - DNA, 345 bp, Glycine max
  Clone ID: LIB3093-033-Q1-K1-E2
cccacgcgtccgtccacgcgtccgtaaattttcaattggactctaaaaaggaagtggaaacgactgctgcttatccagatatatgtttcgcaattgatgattttgactccacttttgatgctgtggttttgactgaaaaagatcattgctattgtgtagttctaaatgcacatgatggggcagcatttccgagtgaaaaggtgtccaatgattgtagtactagtgatagctcctctctgcaagtccacactatttctgcaaagaaaaaggatacatagcttacactatgctcatgatatgtgagctatcagatggtccgagatgcttatgatgctggtaggtcta

SEQ ID NO: 42266 - DNA, 194 bp, Glycine max
  Clone ID: LIB3093-033-Q1-K1-E3
acgctcacgcgtacgtccacgcatcactaaatctttaattccactctaaataagaaatgcatacgactggctcttatccacatatatgatacgcactccatacaatttgactccactttagatgcttgggttcttaactgataatgatcatagctattgtcaagttctatatgcacattatggagcatcatttc

SEQ ID NO: 42267 - DNA, 356 bp, Glycine max
  unsure (1)..(356): unsure at all n locations
  Clone ID: LIB3093-033-Q1-K1-E4
gttttgatgcaacgctgtcactgagaaaggatctctatctacgaaggagcggaataaaacgcttgtctctgtgattaagagaatggcttcagatcggaaacttcacacttttgaggaggtggcaaagcacaaccagaccaaggattgctggctcatcatttctggcaaggtgtatgatgtcacccctttcatggaggatcatcccggaggtgatgaggttttgttatctgcaacagggaaagatgcaaccaatgactttgaagatgtggggcacagtgattctgctagagatatgatggaaaaatactacattggtgagattgatgcatcaaccgtnccactaaaacggacctaca

SEQ ID NO: 42268 - DNA, 407 bp, Glycine max
  Clone ID: LIB3093-033-Q1-K1-E6
cccacgcgtccgagaattcagaatggacgtgaaagaacgaccactgaaactttactgcatggcataccttgccgcgggtcacatgatccctctatgcgacatagcccagttcttcgcctcacgtggccaccatgtgaccatcatcaccaccccttccaacgccgaaatccttcaccagtccaaaaacttccgcgtccacaccttcgacttcccttccgaagaagtaggcctccctgacggcgtcgaaaacttatccgacgtcaccgacctcgaaaaatcctacagaatctacatcgacgacaccacactgctccgcgaacccatcgagagtttcgtggagcgggacccaccggactgcatagttgccgatttcctatactgctgggtggaagacttggctaaaaagc

SEQ ID NO: 42269 - DNA, 396 bp, Glycine max
  Clone ID: LIB3093-033-Q1-K1-E7
gaaaaacgcggaggttgaaattgatgctctatccatatgtctcaacatcaatggatgggaagtgatgatatcccttggtttcatggctgcagcaagtgttcgagtagcaaatgaacttggaagaggaagtgccaaagctgcaaagttctctattattgtgtcagtgctcacatcattggccatcggattccttctgtttatattcttcttattttttagagaaagacttgcatatatatttacctcaaataaagaggtggcctttgctgttggggatttgtcacctttgttgtcggtctctatattactgaacagtgttcaacctgtactctcaggagtggctataggaacaaggtggcaaagcattgtagcatatgtgaatatggggtgttatta

SEQ ID NO: 42270 - DNA, 341 bp, Glycine max
  Clone ID: LIB3093-033-Q1-K1-E8
aaaaaacaaaaaactaaaaaaaaaaaaaaaatatacaaaaaaataaacataaaaaaatggagggtaaattttatccctaagctgtcataaccactcaaactaatcaattacacaagtgatcttggaagacgaacatgcccaatctataatgattcatattacttactcagttctcacatcattggccattctctttccttccatctctattcttatcattttttagataaacgctttcctatatatatacctcatgtacatacgtcatgctcaactgatggcgatttgtcaccttttttttcacactctctataacactgcattgttcaacctgtactctc

SEQ ID NO: 42271 - DNA, 468 bp, Glycine max
  Clone ID: LIB3093-033-Q1-K1-E9
tctcccggtgcgaccacgcgtacgctgggataagattaaagattcaacaatggcctctgcttctgctactcttctgaagtcatcggctgttcttgacaagtgcgagtgggtcaaaggccagacccttcgacaacctgtcgtgagatgtaacccttcctcagcatcagctctcaccatcaaagctgcttcctatgctgacgagctcgtcaaaaccgccaaaacagtggcctcaccggggcgtggtattttggcgatggatgagtcaaatgcaacctgcgggaagcgtttggcatctattgggttagagaacacagaagctaatcggcaggcataccgtaccctacttgtgacagtacctggtcttggtgaatacatctctggtgccattctctttgaggaaactctctaccaatccactgtcgattgaaggaagatcgtcgacgtacttgttgaccaaaacattgttcc

SEQ ID NO: 42272 - DNA, 395 bp, Glycine max
  Clone ID: LIB3093-033-Q1-K1-F1
cccacgcgtgcggtcaagggcagtgattacatcaacatcaacaactcatcaaaggcttttggtgaggatttcaatgatgggtggaagatcaccaattccaatggacccctattctctatgcctcacatcaacaacaacaacactcttgaagttggaggcttcaacaagggacgaggaatctattccaacaccaacaccaccatttgctcctaccatcctaataaccttaacatcaacgctattggaggcttcaacaagggaatctattccaacaccacatactaaccctatcttaacaacaaccaccaccacctggacgacaacaacaacctcatcagacataatctcaagggctacaagacatattttaagggtgaagatcagtttcacacacc

SEQ ID NO: 42273 - DNA, 454 bp, Glycine max
  Clone ID: LIB3093-033-Q1-K1-F10
gagcaattgaacaagcaaagaaggctccttgaacaggacaaaacaaaacaaactggtcttgttgtgttgagcctaattgctatcaatattcaatattttatactattctttattcttattcttccagttatatggtttgtatttgctaatagctcccatcaaaggcccaaaaatgggtaccatcgttgaagcagataacacatataccaagatcctaggaagatggccagtcttttattatggcatgggacacatgctcaatgacataactgctgcttgttggttcacatatttattattgttcttgacagatattggactttcaccaaggaatgcagctgttgtgatgctttctggtcaagtggctgatggatttgtcaccatatttgttggtgaactgatagacaggtttggacacttcaagatatggcatggtgctggatctttattggtg

SEQ ID NO: 42274 - DNA, 327 bp, Glycine max
  Clone ID: LIB3093-033-Q1-K1-F11
caaggtcttagcatggattgctcggtgcttgctcatggcatatcaacatcacctgttgctgggtcttggctggatcaggtctccgatactcaagatacattacatacaaccaatgtgatggacacggttgtataggaggctgaaaatgtgaacaacgaatgggatgacacatacaggaaaccgcatgagcacattgtggcacatgcacagtgtggataaccagatggagcaaatgatgagaaaaattctctcaccagactgaatggcattgctgaagatggctgggctacatattcattattgctcttgacacttgatctacttgct

SEQ ID NO: 42275 - DNA, 193 bp, Glycine max
  Clone ID: LIB3093-033-Q1-K1-F12
cccacgcgtccgcccacgcgtccggtgatgtttcaggccatgtcaacctatggatttgggggagtccagactcttaatggtgatattaaacccgaaggttaaggtcaaaagagcattgaacgagattaacgcatctgctagattgaggttggctgcaaatgagaaggctgacgcagaaaaaatactgcagatc

SEQ ID NO: 42276 - DNA, 397 bp, Glycine max
  unsure (1)..(397): unsure at all n locations
  Clone ID: LIB3093-033-Q1-K1-F2
gttcgacagcccaatgagctaagtgttttctacaagtttttgtatatctcacttggccttgctgggtttcttttggtcatgatcatagttcagaagcaagtgcatttctcacaaagtgagtatggtgtcagtgctggggttgtgctcttcttactatttcttcctcttgctgttgtgtttgttgaacaatataagatcagagagagtcaaaagctagcattcattgacccctccccggtcaagatagtagctgaaggagagtctgcanatggtaatacctctaacacgccaatttcaacagagattgaagaaactagatgggggcaaaaagtgttaagtccaccgnctcgaggtgaggactatactatacttcagccctattcagcttaaatatgat

SEQ ID NO: 42277 - DNA, 372 bp, Glycine max
  Clone ID: LIB3093-033-Q1-K1-F3
ctagaattccaaatgggtattgataattttcccattaggtagggttttgctttctgagtaggctagattttggagttggggtttgggggatacatagacatgggttcaaaagatgagaatagtaaagcatggaaatggggtttgggtttggtatacatatttgccgtggcaacaatttggatagctgctagctttgtagtgcagtctgttgtagaagctggtgtgtcaccattccttgttacttacatctgcaattctttatttgtggtgttgattccaattgttgagattgggaggtatttggaggattcttatgggagtttatggttttggaggagtgagaagagtaatccacattcgaaaggaagggta

SEQ ID NO: 42278 - DNA, 390 bp, Glycine max
  Clone ID: LIB3093-033-Q1-K1-F4
gaaatcaaaaacaagtgctaagaagctccgtgtatctattctcaaacatgtagcaccaaagccaagttggcatccaagttttataacactaatactgcatataatattattataatatacataacaacagttattgatattgttgtgattgtgtgtgattttggtgtcgtccctttttcttatgtttaaggttgtacggagtttatgtgttgattcaattcgtcgataagaaaccttagtttgatattttgattggttctgtggagagtttttatttctttggtgtggattttggtttgtgctgttgatggttgggaataacaatggccgatgaaggaaacaaaagcaataacttctattcgatcttggggttgaagaaagagtgcactg

SEQ ID NO: 42279 - DNA, 430 bp, Glycine max
  Clone ID: LIB3093-033-Q1-K1-F5
cttgagagtttcatagacgctgtatcgctatatggatgctgagtactctttcttctgtttgtgatacgtgtgttttgggtctcttcaaattttggttttctctgtcactttggcttatccctcgggcttcttggattcttacccttcaggaagcttttccttgtctttcccttttttcacctaattgattttttttaaggtagaaattccgaattacaatatttcatttctaggatacaattgttttgggcaatgtccttcaatttaatatttttcaatccactcttattctccttgctttggttacctggatattcctaactaggctaattttatgtttcatgtgttgctcttaatttaacaccttttaatttatatttacttggtagaagaagaaaaaaaaaaggaaagaaatattttgttaccagag

SEQ ID NO: 42280 - DNA, 379 bp, Glycine max
  Clone ID: LIB3093-033-Q1-K1-F6
cttgagagtttcatagacgctgtatcgctatatggatgctgagtactctttcttcgtgttggtgatacttgtgttttgggtctcttcaaatgctggttctctctgtacctttggcttatccctcgggcttcttggattcttacccttcaggaagcttatccttgtctttcccttttttcacctaattgatattatttaaagtcgaaatttcgaattacaatatctcattcctaggatacatattgcttgggcaatgtccttcaatgtaatatccttcaatacactcttattctccttgctttggatacctggatattcctaactaggctaatgttctctttcatgagttgctactaatctaacacctttgaacttatat

SEQ ID NO: 42281 - DNA, 440 bp, Glycine max
  Clone ID: LIB3093-033-Q1-K1-F7
ctcataagctttacttaattagcaaatccaaatatggcactttcttcttcatcatcgtcaagatccatatttgctttagctttgttcactcttttgcttataggaagttcttcagctcaactctctgagaacttctatgatagtaaatgtcccaaggttttctatgccgtaaaatccgttcttcaatctgctttggctaaagaacctcgccagggagcatctatcgttcgcctcttctttcatgactgctttgtcaatggttgtgatggatcagtactacttgatggcccttcctcagagaagactgcacctcccaacaataactctttgagaggttatgaagtcattgatgccatcaagtctaaggtcgagacagtatgccccggagtggtgtcatgtgctgatattgtaaccattgctgctcgtgactctgttgcaat

SEQ ID NO: 42282 - DNA, 444 bp, Glycine max
  Clone ID: LIB3093-033-Q1-K1-F8
cacccttgaggtggagagctctgacactattgacaatgtcaaagctaagattcaagacagggaaggtatcccaccagaccaacagaggctcatttttgctggaaaacagcttgaggatggccgtacccttgccgattacaacattcagaaagagtccaccctccacctggtgctccgtcttcgtggtggcatgcaaatctttgtcaagaccctcactggaaagaccatcacccttgaggtggagagctctgacactattgacaatgtcaaagctaagattcaagacaaagaaggtatcccaccagaccaacagaggctcatttttgctggaaaacagcttgaagatggccgaaccttggcagattacaacatccagaaagaatctaccctccacttggtgctccgtcttcgcggtggtatgcaaatctttgtgaagactcttac

SEQ ID NO: 42283 - DNA, 384 bp, Glycine max
  Clone ID: LIB3093-033-Q1-K1-F9
caaccttgtcgacacagcatagcaaagtaacatattaagagaagaagatgtgtttggtgtgggtgtgcggggaagatgagagggtggtgtcaaggcagccagcaccgggggcctgtccttactgcagagggatgatccaagctatggacgtagagagtcagtggaatttctgtttcctacctttgtattctaagaccaagcgcaggtattactgcaccatgtgcaccagaaaactcgtccttcagtaatactgcatgatgctgatgctcatcttactttgtttcccgggttttatttactacttaatttccatgtatatgctttcgggatttgatgtactacttgtccatgtatatgtacggttttcataggatcattaggatc

SEQ ID NO: 42284 - DNA, 391 bp, Glycine max
  Clone ID: LIB3093-033-Q1-K1-G1
caacaacgtaacgttgctaattgcttgcacttcccatggtcgcttcttttgtttcacattagctgtgtttgtttttgtcttagttttacacctttcctcatttccgcagtagcaacctgcgaatcaacctctctgagaaaaaaaatggcgtcgaacgggaatggcagcgttgcgaacggtaacgggagcgctaggaacggacttgcgaagattcagacgcagaagaagcatgacgggatttgtcacgacgacagcggtccaacggtgaaggctcagaccattgacgagcttcactcgctgcagaagaagaaatccgcacccaccacccccgttacggggtttcaggctcctttcgccacccttaaccgaagaagaacgtcataagcaacaa

SEQ ID NO: 42285 - DNA, 390 bp, Glycine max
  Clone ID: LIB3093-033-Q1-K1-G10
cgtccggcgagcttgagaaaaaggttagtggaaatgatgtaatcttgattgccaccagcaggataggagggccaccaaataaaggttctgctgttcagcgccatagtaccagaacactcactgatgcacatgacgcaatgctggatgatattgcattgcctgctgagattgttggaaagcgagttaggtatataattgatggttccaagcattataaaagcctctttgtaccccaatgagcgaaacaataccgagtacacatggaagacttgtgctgcatgatacaggacactttcatgcataggtgtctggtgtgagtattctactaccgaggcttatgtgctatttactagctttgaattgcatcctgaattacatatggtggatgct

SEQ ID NO: 42286 - DNA, 461 bp, Glycine max
  Clone ID: LIB3093-033-Q1-K1-G11
cccacgcgtccgcttcacttgacggctcttggtgcttttatgaactttcttcagggacatgtctgactcaggtttatgacacttcaggttcttctgaagggtacacttctgcagcttttcatcctgatggtcttattcttggaaccggcaccacagaatctcttgtcaagatttgggacgtaaaaagtcaggcaaatgttgctaggtttgatggacatgctgggccagtaactgccatatctttctctgagaatggatacttccttgcgactgctgctcatgatggtgttaagctttgggatctacgtaaattgaagaacttcaggaattttgctccatatgattcagaaacaccgacgagctccgtggagtttgatcacagtggatcctacctagcagttgctggctctgatataaggatttaccaagttgcaaatgtaaaatctgaatggaactgtatc

SEQ ID NO: 42287 - DNA, 408 bp, Glycine max
  Clone ID: LIB3093-033-Q1-K1-G12
tcctcgctggcttattaatatgcagagatatggtcctccaccatcatatcctcatctgaaggtccctgcactgaatgctcctatcccgcctggagctagctttggctatcatcctggtggatggggcaagcctcctgctgatgaatatgggcgtacactgtatggagatgattttggtgttcaacagcaagatcagcctaactatgaggaatagccattcgataagaccaagcatcgtagagacttgtaagaggaagagcaagatgacgactacgacgaagaagaggaagaagatgaagaaacggcggaggaggaacttgaagctggtattcagtctcgtgatagtctgtcacagcactcccactggagtgaaaacacccgatgttattgacctccagaagcaactga

SEQ ID NO: 42288 - DNA, 410 bp, Glycine max
  unsure (1)..(410): unsure at all n locations
  Clone ID: LIB3093-033-Q1-K1-G2
cactaacctatagtctctgattattgatctcgctctgcacaagcttccccatattacattaggggactttatttaccactgcccccctttttcctagtttcgtagtatattctttgaaatttgccttagctaatgtctattttattacatgtcacatttatttgctgtcaatttcggttccaattccatggtgtctgattgatgacctatctcacccctatgatatatgtcgtgtactttatgcatattatcatttttttaattgttgtgcccaaaaataaaacgagctaataatggcagcgggaagaacttccttttattaggaatttattaagtgccgtggatataattgatgcccaattttatacttgtatgattctgcaactcttatcnttttgcttaataatttt

SEQ ID NO: 42289 - DNA, 377 bp, Glycine max
  Clone ID: LIB3093-033-Q1-K1-G3
gggatgttcggggtgatgatgcagatgatcccacaacattcttagttgcattcgatgagtcagaagcacgctacttgcctcttccaactaaacttgttttaagaaaaaagagggcaaaagagggaagatcgggtgatgaagttgagcaatgtccagtacctgcaagagtgactgtaaggcgaaggtctagtgttgctgcgattgagcggaaggattctggggtatatacaagttcaaagggaaattcctttaagagagttggcttagaaatggatgatggtctcgaagaccaacatagaggtgcaccacaccaggacaattatcagtctagtggagcagaagattacatgtctgattgattatttgatgcaaatgct

SEQ ID NO: 42290 - DNA, 303 bp, Glycine max
  Clone ID: LIB3093-033-Q1-K1-G4
cagcaagcagttcatattctaatgaggggtccacagatgagcaaggtcttaattgttcttggagagcgataaagattgataggacatatgacaagggtcatgaaaacaggtatgttaagttcttggtttggtttgcaacgggagtgggaggacttgaacttctgtgcgcatttgtggtttggttttttctggtgagaacaacggagcaacaagattctggtgcagatgggcgggtctacgctctggccggttttagaaaattcagttattctgagctgaaacaagccaccaaagggtttagtc

SEQ ID NO: 42291 - DNA, 374 bp, Glycine max
  Clone ID: LIB3093-033-Q1-K1-G5
tttgtttctatggcttctgcagaagtagagttccgatgctttgttggtgggcttgcttgggccaccgaccacgatgctctcgagaaagccttctctcaatttggcgaaatcgtcgaatcgaaggtcatcaacgatcgtgaaactggaagatccagagggtttggatttgtgaccttcgccacagagcaggcgatgagagacgcaattgaaggaatgaacggccagaacctcgacggtcgtaatataaccgtgaacgaggctcaatcccgccgccgccaaaaacaaaaccgtcatccccgaccttcaggacatcctccaacgcttcacgtttgacaacatctgcaagatcgcgttcggcttcgacccggagtatc

SEQ ID NO: 42292 - DNA, 464 bp, Glycine max
  Clone ID: LIB3093-033-Q1-K1-G6
cgattttcggtgagaaagagtggtactttttcagccctagagacaggaaataccgtaacgggtcccgacccaacagagtagccgggtcgggttattggaaagccaccggaaccgacatgatcatcaccaccgaaggtagaaaagttggcataaaaaaagccctcgatttctacattggcaaagcccccaaaggcaccaaaaccaattggatcatgcacgagtatcgactcctcgactcttcccgaaaaaacaccggcaccaagcttgatgactgggttctgtgtcgtatctacaagaagaactcgagtgcacagaaggcggtgcaaaacggcgtcgttccgagcaacgagcacactcaatacagcaacggttcctcttcctcttcttcgtcacaactcgacgacgttcttgaatcgctgccagcgattgatgaacggtgtttcccgatgccacgtgtcaacacg

SEQ ID NO: 42293 - DNA, 348 bp, Glycine max
  Clone ID: LIB3093-033-Q1-K1-G8
cccacgcgtccgcattgactggcgagctgacgtagaaaactgcttgacatgggaagctcagggccggctttcaaatggattgtctattgaatatcttaacacagctgcggatgacttaggctttgctatttctatctgaaatgaaatgagaccatatgtaatcatcttagtaatttatgtttaggaacttaaattaagcttttcatgacagatattatctcaagatttgtataaaaccttgatgtaatctatgtttaggaacttaaatggtttgcaaataagtaaaccttctcattctgctaaaaaaaaaaacacctaccaaatctacaccatcaagcaaaacataaa

SEQ ID NO: 42294 - DNA, 366 bp, Glycine max
  Clone ID: LIB3093-033-Q1-K1-H1
aatttttctaggggttaatccaattttcgatggcttcttcaaatgttgagtcccgttgcttggtcggtggcctcgcttgggccactgacaaccaacctctcgagaaacccttctttcagtacggcaaaatcgttgaaacgaagattatcaacgatcgtgaaactggaagatccaggggttttggatttgtgaccttcgcctcggagcagtccatgaaagacgccatcgaagggatgaacggccaaaaccttgacggccgtaacatcacttgtaacgaagctcagtcccgtggtggcggtggcggcggaggcggtggaagtggtggatattgtcgtggtcccggtggtggatatggtggtggtggtc

SEQ ID NO: 42295 - DNA, 295 bp, Glycine max
  Clone ID: LIB3093-033-Q1-K1-H10
ctagatttcaacttgatacacaacttcaatatatatctgtcttataacccatactagcgacggactatttcaacttatctacaagctctacaaacactccaattcccaatcctaccctctattaccatattaaactgcactctcccacatatatcatcctcaaccactcaactaacatcatttacttaatcaccaaacttccactctactacaatcatcactctcatacctaccacaataccacatttctcaaatcataaaaccacacctgatcacataataccattatctcata

SEQ ID NO: 42296 - DNA, 414 bp, Glycine max
  Clone ID: LIB3093-033-Q1-K1-H12
cccacgcgtccgcaaccacttatcccctttctccttctaacgagtgaggaaaaatggcgcgtaagaagatcagagagtatgactcaaagaggttgttgaaggagcactttaagagactctctggcaaggagttgccgatcaagtctgcacaaattaccgcatcaactgatttcactgagctacaagagaaggaaccctggctttcatcttctaaattggttgttaaacctgacatgttatttggaaagcgtggcaaaagtggtttggttgccttgaatttggattttgcacaagttgtttcatttgtgaaggagcgtcttggaaaagaggttgagatgagtggatgcaaaggacccataacaactttcaattgtgaacctttcatcccacacaatgaagagttttaccttaaca

SEQ ID NO: 42297 - DNA, 338 bp, Glycine max
  unsure (1)..(338): unsure at all n locations
  Clone ID: LIB3093-033-Q1-K1-H2
cccacgcgtacggttagagacagagagagagagaaacaaaaccctaattggtgagtggcgagaatggcgcagccggcggcggcagcagcagcaacaggagcagcagtaatcgagcaagtgcagtgcttcgggcggaagaagacagcggtggcagtgacctactgcaagcgtggtcgaggcctcatcaagatcaatggctgcccgatcgagctggtggagccggagatcctccgtttcaaggccttcgagccaatccttctnctcggccgncaccgcttcgccggcgtggacatgcgcatcagagtcaaggggcggcggtcacaccttccagatctacg

SEQ ID NO: 42298 - DNA, 303 bp, Glycine max
  Clone ID: LIB3093-033-Q1-K1-H3
tatttggccgacggaatggcaccacttggagttggtatgaatcaaaggagctcccaagtaattttactcaattatggacctatttaaaattaaatcatgggcttgatttctgttatagaatagatagggtttggctttcattttcagaggaatgtatatttacacctcattgcatgaatatgagagaacaaacaagcgttgacaaagtctggatggatggatgatgccaaataacatttgcatcttcaatgagccacgaccaataaaagaggttccttgctacactctcttgagcacgaacac

SEQ ID NO: 42299 - DNA, 293 bp, Glycine max
  Clone ID: LIB3093-033-Q1-K1-H4
acgcccacgcgtacgaatacaatcactttgacgaaaacgctgtcgattgggctttgtaggtctagtacggactatacctgttacctaactgccactgcatcagcttcgtcgatcgaagtggagcttccatttcatagacggagacaaagatagctaggacgctcactaggctgaccctgagcatgacgaataacaagcctacttacaactgtatgttacagcctaagacacatattatgaaggactccgtgatgaatctagtagtacgggtgagcaaacatagctgcataaca

SEQ ID NO: 42300 - DNA, 332 bp, Glycine max
  Clone ID: LIB3093-033-Q1-K1-H6
acgcgtccgcccacgcgtccgcccacgcgtccgctcgtcggagtacactcgccggaaaacactggtcggggtatcttctcaaacaaaatttaaaaaccaaaaaaaactaatcctcgtggtcacagtgggtttgagtgaactaaaaggaacaaaggcaatacatagagggcaacgcgattttcattcttcacaactgctatttccttttacgacgtcgttatgggaatcaaggttatgcaattgtcgcaacccgttcttcctcattccccttcttcgtctcataccctagcttccgcaatcttttccccttattcgtcaaaaacgcgaaccct

SEQ ID NO: 42301 - DNA, 223 bp, Glycine max
  Clone ID: LIB3093-033-Q1-K1-H7
acgctcacgcgttcgtacagctggatcataaccgtatttgactcactgcatctgactgatccgaatgtacacctctaggaagttaattcacatcaataacgatgcctatcccactgacttttatgagacagtcgcacagtacttgttctactcgcataacaccaatcatcaatctatattgagactcgtaagatctctacataaatcatgcaattcaaatgga

SEQ ID NO: 42302 - DNA, 452 bp, Glycine max
  unsure (1)..(452): unsure at all n locations
  Clone ID: LIB3093-033-Q1-K1-H9
aatatataagaagatgataaggggaagcgaagcatgtaggtgtgatggagcagaagaaggcagagatagtggcagagctccaagctgtgaagcacaacagtggcaagtcctacaatcagttagcggaggagactggactcaccaacgtctatgttgctcagcttctcaggagacaggctcagctcaatccccaaactgcccctctacttcgggcagcgctgtccgacctgccccaagaccttgtttctgagatgatgagaccccctctgaggtcttatgaccctaatctcatccaagaccncactgtctataggttgaatgaatgctgtatgcatttttggggagagcatcaaagaaataatcaatgaggagtttggtgatgggatcatgtcagcattagaattctactgctcggttgataaaattaaaggagtagatggaaaggatcgtgt

SEQ ID NO: 42303 - DNA, 293 bp, Glycine max
  Clone ID: LIB3093-034-Q1-K1-A1
ctccttctctctccgtccaaaagcgacgtcctcaacgcgagagcgagagatcaggcccaagggctcggagtggttccgactctctctagacttccaaactgcgcgtctatgaatatctctcatatggaactcatgttctccatcatctacggcaaactctatcctttcaacgcattctacttgtgctcacaactctgtattggtcgtactctttaagaacctcacagctcctaattctacttatgatccacatctgcgaactcgctttctgcgttcaatagctactctcacat

SEQ ID NO: 42304 - DNA, 401 bp, Glycine max
  Clone ID: LIB3093-034-Q1-K1-A10
tcgcaacgcaagaaattgctcatgtcattcgatgtactactatttcagacgcgtgactgtcccacaaccaccgatgtaccgaacgtctccgccaccttcaccaatgtaccgtccatcaccgtatcaacataatcctactccttcttcaggactaggcgttagggttgccataaaaccggaatatatgatcacaccgacaactcatttatcatcacttgctggagataatccacggagcaacttccaatttgattttggattggagagaaaaattttagctgaagcagataatgataacccaaattggagcaaatttggatcataaaatattccatctaaagtttctgattcatcaacatcaaaggttactgatttggatcccattgtgagcaaatttatgg

SEQ ID NO: 42305 - DNA, 448 bp, Glycine max
  Clone ID: LIB3093-034-Q1-K1-A11
tctcacacactctcttcaatttctagggttttgttattgctttgcctccattccccctttctcagagaaacaacaccttttctcttctccttcgcatctattctttgcgtttggtttttggttgattgaaagcattcacagcgtaattcgttgctgcattttaatcgatttatctaaccaggactgaatgacctaatggagtctaaaggtgggaaaaagaaatctagttatagtagtagtaaatcaattttttacaaaactcccctctgatacagcatttaatacgttagaccaaacagtggaatcaagaaattcagatctgctgcttactctaactgttctcgcaaaccattcttatacacatatcgattgatagttcgttgcatgcaaccataattttattaggaatttttcttctttgttttcaattaaatttttttgttgctct

SEQ ID NO: 42306 - DNA, 280 bp, Glycine max
  Clone ID: LIB3093-034-Q1-K1-A12
ttacgcatcacaatcgattgttatttgtattctatggactacgatttcaaaagcgagtcagtcccatttccaacgatgtaccttccttcacctccaccttcacctatgtaccctccatcaccgtatcaacagaatcctacttcttcttcaatacttgacgttattgtttatataaagccttaatatattatcacaccttcatctcatttatcattacttgctctatataatccactgatcaacttccaatttgattttttattgtacaaaaaaaatttaa

SEQ ID NO: 42307 - DNA, 424 bp, Glycine max
  unsure (1)..(424): unsure at all n locations
  Clone ID: LIB3093-034-Q1-K1-A2
gttttctttgtcgttttctgagttgcactggcatgtatcattggaattgctgtttgctgtggcctgccctgtatcattgcacttctttatgcagttacagaccaggaaggggcatcaaaggaagacattgagcagttgtcaaaatttaaattccgaagaattgaaagcaatgagaaacttaccggtactatacaaggacctgttggaggaataatgaccgaatgccaggctgattcacctattgaacatgctctagctgaggaggatgcggaatgttgcatctgcctttcttcttatgatgatggggttgagctaagagaacttccttgcggtcaccattttcactgtgtctgtgtggataaatggctgnatattaatgctacatgccccctctgcaagattaacatcttaaaaagtagcaacc

SEQ ID NO: 42308 - DNA, 450 bp, Glycine max
  Clone ID: LIB3093-034-Q1-K1-A3
cgcgtacggttctagcgcaacttcttctagatgcaagggtgatgggtatagaaaatgctcacatcagtgtggcgtcattgtccatgtcgactctgggaaatgcactaccactggtcacctgatttacaagctcggaagccttgacaagcgtgctattgagaggtttgagaaggaagctgctgagatgaacaagaggtctttcaagcatgcctgggtgctagacaaacttaaggctgaacgtgaaagaggaatcaccattgatattgctttgtggaagtttgaaacaccaaagtattattgcacagttattgatgcgcctggacatagggatttcattaagaatatgattactgggacatcccaagctgactgtgctgatcttatcattgattcgaccactggtggttgttgagctcggattttccaggatggacagactcgtgaacatgc

SEQ ID NO: 42309 - DNA, 310 bp, Glycine max
  Clone ID: LIB3093-034-Q1-K1-A4
acggatagacaagaaagggcaaggcttcaaggaaaaagttatgatgagattcctggagctgaagcgtctagttataagagttgtgtcatctgttgacaaaaagttagaagtgaaaccgcggtttctggagatttttcaggaagagaattacccaacagaatttccatataaatcaaaggtagttatgctgtttcaaaggatagaaggtgtggaagtttgcctatttgagcatgtatgttcaagaatttggatctgaatgtcaatttcctaattaaacgccgcgtgtacctttcatatttggattctgtga

SEQ ID NO: 42310 - DNA, 396 bp, Glycine max
  unsure (1)..(396): unsure at all n locations
  Clone ID: LIB3093-034-Q1-K1-A5
ctcagatgcattacacgctccaaccagagagtgagagagagagacgagactcttagttaggtcaatttcttcaaccaccaccagcatgcaagactccggctccatgaagatctcccctctggatctcatgtccgccatcatcaagggcaagctcgacccctccaacgtctgctactactcctacaacgccgcagctgccgtcctcctcgagaaccgtcaattcctcatgctcctcaccacctacgtcgccgtcctcgtcagctgcttcgtcatcttcatctggcggagatcctnctcccccaaggccaagcctctcgaaccaccaaagcgcgttatcgagaagctttccgaaatcgaggtcgacgacggcaccaagatagtcacccatctttttcg

SEQ ID NO: 42311 - DNA, 281 bp, Glycine max
  Clone ID: LIB3093-034-Q1-K1-A6
accgaacctcaatttcgagccaggcctacgcgtacgctcgaaagtatctggagcacactagcatgtatcattggaattgctggactctgcggcctagggtgtatcatggcacttctgtatgcatatacatacgcataatgcacctctaaggaagacattgagctgctgtcaatatctaaactccggttaattgtaagcaatgagaaacttaccggtactataccatgacctatttgaagcataatgaccgtatgccacgcttgttcacctattgaacatgc

SEQ ID NO: 42312 - DNA, 410 bp, Glycine max
  Clone ID: LIB3093-034-Q1-K1-A7
ttagaagttgagaagatagcggaagtgaagaagggaagggatccattgcaattccatggcggcgtcgtggtcgtcgtcgtcttcaaactgaacgccggagagagtcaccgtggtcacttgccggagccagagagagtcaacagaacagaacaatctcatccctttcctctcaatccaattttcattcctttgctcaactgtgtgtagcaaggtcgtattttgttagaagatgaaacgcaagcgtgggcataagaaagggaaggcaaaaggcaccactaaccatggaagcagtagtgctaatgctaattctaaggaagaagaaacctctgggttggatgataaagatcactctggaatggaagttgacacaccttcttcgacggggacggatcagcagcataattacaatg

SEQ ID NO: 42313 - DNA, 358 bp, Glycine max
  Clone ID: LIB3093-034-Q1-K1-A8
ctcagattccacgttgggcccgggtggcctggacctctcccaggccttcttcaggcgccatggacaacgccgcccctccgtcgccgaccaagcgccacaacaagatctccgtcatcggcgccggcaacgtgagaatggccatcgcgcagaccatcctcactcatgacctgaccgacgagctcgtcctcgtcgacaccaactgcgacaagctccgcggcgagatgctcgacctacagcacggctgtcgacttcctcccccgcaccaaagatccacgccctccgtcgactactgcgtcaccggcggctccgacctgtgcatcgtcaccgccggcgcccgacagatctccggcgagtcacg

SEQ ID NO: 42314 - DNA, 383 bp, Glycine max
  Clone ID: LIB3093-034-Q1-K1-B1
cttctctgttacgtcctcctctcacagccacagccacagccacaaccacaaccacaaccacgacccggggagtttcagaaaccctaaccccacaataacctctcacaaactcactatttttcatcattcgataattcgaacttccaccatcttccccaaagtttgctatcatggctgggtcggcacccgaaggatcacaattcgatgctcgtcaatatgatgctaagatgaatgagttacttggaactgatgggcaagatttttttacttcttatgacgaagtttgtgaaagctttgatgctatgggattgcaggagaaccttctgaggggtatttatgcatacggttttgagaagccctctgcaattcaacaaagggggatt

SEQ ID NO: 42315 - DNA, 450 bp, Glycine max
  Clone ID: LIB3093-034-Q1-K1-B10
ctcgtgaggctgctatggcagttcaaggaaagatggtagattctcagcgtaagaagagcaagtcaaggttgcagaagcttgagaaacaacctgaatggttgaagggtggagagctccgtgattatcaacttgagggtctgaattttcttggtaacagttggagaaatgatacaaatgtcattttagctgatgaaatgggccttggaaaaactgttcagtcagtatcgatgcttggttttctacagaatgcccagcaaatccatggtccttttcttgtagttgttccattgtccactgtatcaaattgggccaaagaattcaggaagtggcttcctgatatgaatattatcatatatgtaggtactcgtgcaagtcgagaggtttgtcaacaatatgaattgtataatgagaaacaacctgggaagccattaaattcaatgcactgttgac

SEQ ID NO: 42316 - DNA, 301 bp, Glycine max
  Clone ID: LIB3093-034-Q1-K1-B11
tactccactcctactatcactcacatttacctcttacagtagacaactgtcatctttgcatatgggatcttagactactaatcatatttctattcactattatcagccacacattgatctatctaatttacttttcaacctactattttgattcttactacatccccatctctcatcttcctctacttctattccaaaatccatacaattttcatacatcatgatttatcccccatagaacatatttgaatacactataagacacttatcttaacaatttatcaaaacacagtattaccaa

SEQ ID NO: 42317 - DNA, 413 bp, Glycine max
  Clone ID: LIB3093-034-Q1-K1-B12
gcgctcgtgaggctgctatggcagttcaaggaaagatggtttattctcagcgtaagaagagcagagcagggtttcgtaagcttgagaaacaacctgaatggttgaagggtggagagctccgtgattatcaacttgagggtctgaattttcttgttaacagttggagaaatgatccaaatgtcattttagctgatgaaatgggccttggaaaaactgttcagtcagtatcgatgcttggttttctacagaatgcccagcaaatccatggtccttttcttgtagttgttccattgtccactttatcaaattgggccaaagaattcatgaagtggcttcctgatatgaatattatcatatatgtaggtactcgtgcaagtcgagaggtttgtcaacaatatgaattttataatgag

SEQ ID NO: 42318 - DNA, 389 bp, Glycine max
  Clone ID: LIB3093-034-Q1-K1-B2
acgcttccgcttattcgaatccccggcatgccactgaccaaccaacaccaatcattccctttcagtaccggccgcatagccacgacggcgaaagcggagctcgggacggcggtggcgcggacgggcggagccggctaccaatctgcgtccgtcgacgttcctcacgcataaggtcacagtccacgacagacaacgaggaatcgttcacgagttcgtcgtgcctgaggaccagtctatattacatactgctgaggcccagaatattaccctttcattcaacttcatgcatggctgttgtactagctgtgctgtacgtataaagaagggacacattaggcaaccagatgctcttgggatatctgccgaattgagagacaagggttatgcac

SEQ ID NO: 42319 - DNA, 416 bp, Glycine max
  Clone ID: LIB3093-034-Q1-K1-B3
cccacgcgtccgcccacgcgttcgctcaagcaaccatggcaatggcaacccaagcctctctgttaacgccacccctctccggtctcaaagccagcgaccgcgcctccgtgccatggaagcaaaactccagcctctccttctccagcccgaagcccctcaagttctccagaacaatcagagcagcagccgccgacaagaccacagaggccccaccaaaagtagaggctgcaccggccggtttcaccccaccagaactggacccaaacaccctttccccgatcttcgggggcagcaccggcgggctcctgcccaaggcacaggtggaggagttttatgccattacgtgggactaacccaaagaacagatctttgaaatgcccactgtcggcgccgctatcatgagggagggtcctaac

SEQ ID NO: 42320 - DNA, 402 bp, Glycine max
  Clone ID: LIB3093-034-Q1-K1-B4
acgattatgatcgactgacgatcgatcctgaattggagaaagagattggagcacaacttgatgaggaccgtgatgcaatgcttccaaagtgtgatgtaattgttatcaacacccctctcactgagcagacaaggcgattgtttgacaaaaatagaattgcgaagtgcaagaaaggtgtctagattgttaacaatgctcgaggggcaattgctgacacccaagcaattgcagatgcttgctccagtggccacgttgcatgttataatggtgatgtttggttcccacagccagctccaaaggatcattcatggcgttacatgccaaaccataccatgacttcttatatttctggcaccaccatagatgcacagttacattatgctgctgtggtcaaagacattc

SEQ ID NO: 42321 - DNA, 326 bp, Glycine max
  Clone ID: LIB3093-034-Q1-K1-B5
gtcacgcgtccgttaaggtataatgagcgtcatcaattgaccagactgccactgtggcacagatgctcactctgtgagcagacgcggagctatcttctttctaggacactggagctggaactctgagaaacattgaccgaaccactacttgtgaaatttgctagaaaacccagttctgttctcgaattcgtgcccacatggctagacccttcatcagaggctccagagctcagcgcgtgtctggtctatcttggtgcctcagcatcttctgaataagccccgctaatgcaggaggcttcactgacttagcaaacaagcgggacctc

SEQ ID NO: 42322 - DNA, 389 bp, Glycine max
  Clone ID: LIB3093-034-Q1-K1-B6
cggacgcgtgggcggacgcgtggtcggacgcatgggcaacaattgctccatatgaggctcggcgtgatcggcttcgatgatgaagctgtttcagttccagaaaccgtatgatcagcacgcgcagtacgtgaagatggaggagcacaatttcctcagcgcggatgaagcctgcaatttcttctaggatgaacaagcaccgacccttcaatggtactgtccagaacagtggagctgagaaaagaaacatggaaattaaaccgcttttagaaattttagtttgaaggtagaaaatgaaatactgtgcaaacgaaacagagagaacagagatcaatggctgcatggcgtggggtcggaaatgagaggttgattatgactactctcgaccgtgc

SEQ ID NO: 42323 - DNA, 438 bp, Glycine max
  unsure (1)..(438): unsure at all n locations
  Clone ID: LIB3093-034-Q1-K1-B7
cccacgcgtccggagttatgaaatttaggttagattggactaatacttggacctactccagtcccggcttctccgccaccgcctccaagcgctgctgttcctccgagggaaagcagcctcactacgacttgtacacgcgcctcctctgcgcgtacctacgcgcttttgttccctcttatgatcttatcgcgcaccagccctaccggacttcgattctccactacggctccggctacgacggttctgttgcggcgcgggccgagttcgtggtcaacgcgcttatccacttctggctcgtggacaacgatttctcgccgctgccggcgagtgtttgccggagcctcggggtttcgtttgcggtgggggaggcgcctacgncgncggggctgggggaggtggtgaggctgtttgtgaggtactagaatttgagcaccgtcg

SEQ ID NO: 42324 - DNA, 278 bp, Glycine max
  Clone ID: LIB3093-034-Q1-K1-B8
ctcacacgtcatgaaagtccttgtcttagatattgtcggctattcttataactttagccttgggagctgatatgtttacaacagactaactcattctcaatcttacaaacttctgtattaattcaacactttcattattaccactcaacacatatccatacatacaggagaagactccatattcttatcaaattaccaagcaccaatattctaatcttactattcaaaacagctccgcttattatcggactatacatatgcaatccccttattactat

SEQ ID NO: 42325 - DNA, 449 bp, Glycine max
  Clone ID: LIB3093-034-Q1-K1-B9
acggttcgacacaaggccaaatatgagtgacatccacctctcagcagaggaagaagccaccatggaggcagagaccagagactactttgatggggttgcaccacaacgccacacaaagcctcaacgaagtgagtattcacctcaatatgtggatgcttactccaatgcccatcactcttcttcttcttcttctataccagaattcatgcaattccaacgcctcgagaatgatccccaagagaagaaattggagtacaatggaagtcaagtaccgcaagaatttgtagaaacagagtattaccaagatctcaacagcgtggactaacaccaacattcgacgggaacaggatttatcctagtacacaaaaatggagatgactttcacatagaacccgataatgactctggatgccatcactcttgcaagtgcaatccagcaaccaatgatt

SEQ ID NO: 42326 - DNA, 375 bp, Glycine max
  Clone ID: LIB3093-034-Q1-K1-C1
gcggctctttccgatcagcttttcaggaagaggcatggaggaagcacaataagcgcatgcacgaggagtgagaggaggagatcgaaagagtggaacgaataaggcgcatgcaaagtgtgtttaacagagaaaggaataagtacaaaagaagctattagagctggatggaaagtggtcctggtgcatatgatcagcattcccaaagagaagattggtactggaaggctgatacatcctttagagacaagaggactaattatcgagaaactccaagagagagtggaaactatgcattatcacatcactactcagttttgggtcttgacaaggttagaaaaactccatattcagaagctgagattaagacagcattta

SEQ ID NO: 42327 - DNA, 385 bp, Glycine max
  Clone ID: LIB3093-034-Q1-K1-C10
cctcggttacaagacaaccccaaatctcatatacctctacttcgtgctcggacatgtaccacttaccttggctatacctactaacagctatccatgcatatcattaagaacctcaaaattctcttaccagactggggtagggtctatatgcttatgggggaactccgataaaccaacatcttccagaacttgatagaagcctggatatacttgttgcaactcctggaagactgctagatttactggagagagctatagtttcattgccaatgattaggtatacatccttatacgaggcaaatataatgctggatattgattttgagccacaaataaagaagattgttgaacaaatggacatgccttcaacatctgccagacatac

SEQ ID NO: 42328 - DNA, 429 bp, Glycine max
  Clone ID: LIB3093-034-Q1-K1-C2
acggtcagtctcagtggacatgaaggaccagaaaatgactataattggggatgttgatcctgtagacaggggttggaaagtttacaaaattcagtcttggcaagcttacaaaattctgtcatgttgagatactttcagttggaccagccaaagaggaaccaaagaaagaggagaagaagccagaagccaagaaagatccaaaggaggaatatgctgaacttctgaaggtagttgaagccaattattatcagactagacatctgcaatacccttattactatagcagaactgcggaagagaatccaactggctgcgttatttgctaagtattggagttagatggataataaatgagatcaatgaaagaagatggtggctggagttgagaaagatttggttctgttcttgaaatttccttttttccttttc

SEQ ID NO: 42329 - DNA, 425 bp, Glycine max
  Clone ID: LIB3093-034-Q1-K1-C3
acgcaccaaagcactcgtgagtgtatacccaacacagactaagatcaacatggactactacacgggcgggtgagaagttgagagggaacctatcatggagtattccacaccacgaccaatgatgggcaactaccaccaccctaatgctcaccgtgtcctcaacgagaagattgtttatgaggaggatgtgattggaggatcccgccacaaccacatgcatcaccaccaccctgagactcatgagagagtcaaggtggtggagtatgaacaagttcctgagaggcgcgttgtctatgaagagaaagttgcttatgacaacgatcgttactactctccaaggtattgaaattggacaaatggaagaacacctataacgtgttatcatgtggctttttattaggcaggctacctagtataccaaaagc

SEQ ID NO: 42330 - DNA, 115 bp, Glycine max
  Clone ID: LIB3093-034-Q1-K1-C4
acgcgcacacctttctcaacttctattccacatatctagtcctctattattctaactcatcctatggagagggagcgaatgagatcatggagcttcgttcgagcttacgagactc

SEQ ID NO: 42331 - DNA, 181 bp, Glycine max
  Clone ID: LIB3093-034-Q1-K1-C5
cccacgcgtccgctcactcttacggacagcctgaaagcattactcacataaacaacaccgggtatcgggttcatcagatccttagactgcatggatgctgcatttactacattttcctacctagtgcacacggtttgttgtgccaatacacaatgtgaggatacttgactggactagcaga

SEQ ID NO: 42332 - DNA, 372 bp, Glycine max
  Clone ID: LIB3093-034-Q1-K1-C6
acggtctaacgctatcagaatcaacacatcggcatatacattaacgtgctatgctgttgagttagtaaacaccgcgcctaaaatcgttcgtatcagattgaacatgtctccaagtagcacggctgatataatggctacccctgatgcagctccctggcagctcaatgtagatacatatgatgcattcataatcaggaacaataatttctacaccttattatcgcttcaactttgacacaacattaacatgcatacactctgataccacatctctgatgacaattggactaaggttactaatatatgttcatcatttgcatttaccctagccaaatttcatcaacaatgatctcttggataacttatatattg

SEQ ID NO: 42333 - DNA, 375 bp, Glycine max
  Clone ID: LIB3093-034-Q1-K1-C7
accgatctccaattccgagctacgcccacgcatccaaccactcgtgagtgcatacctaacacatactatgaccaacatggactactacacgggcgaggtataattcgagacttgatcctaccatattccattctacatcaaaaactattatattcacctacctacaccctcaaactcaccaaaatctcaactactatattctttataagccagttaccacaactggaaccctccacatcctcaagcatcaacacgatcctaagactaatgagatagacaaagaattaaagtctgaacaaggaactcaaagactcattatctatgaaaagaaagccatttatagacaacgaccgttactactctccaaaaccttga

SEQ ID NO: 42334 - DNA, 318 bp, Glycine max
  Clone ID: LIB3093-034-Q1-K1-C8
acggaaaaaaccgacacaaagatctagacctagctagaatcaaacaggtgcgacctaaggtagagagcacatgagcatgtcgaggaacttgcgagctgagcttactgcagtaggcaccctcctgcatggatgagcaacccaaaccagacacatggtcagcgatgccacagggctggatcatccctgctggcggcgctgccacctacaccgactgggctttcaacaaaaccttgaccgtaaacgacactctcgagttcaacttcgacaccggccaacacaacacggccacagtaacgaaatccaatgtccacacgggca

SEQ ID NO: 42335 - DNA, 429 bp, Glycine max
  Clone ID: LIB3093-034-Q1-K1-D1
cggacgcgtgggctgacataatgggggtgacatggatgaaggtaccaaggagtaaccaactgggtggtcaaatcaaagatgggttgttctacaagttcacgggatttcgtgaccaggatgttgtaactttgaccaattttttccaaaacacctgtggaatatcagtataagagaagcaactttctgttatcggacgtaattggggagaagttgatctaaatggaaatatgctggctttcatgggtggttcaaagcaagcttttgaagtatctttagcagatgtctatcaaacacaggttcaagggaagaatgatgtgatcttggagtttcatgtggatgacacaactggaactaatgagaaagattcactgatggagataagtttccacataccaaattccaacacccagattgctggtgatgaaaatc

SEQ ID NO: 42336 - DNA, 272 bp, Glycine max
  Clone ID: LIB3093-034-Q1-K1-D12
ttgcttttcatgtattaatttttcttatatgactattataatctgttggacctggttcaaataagttactaatataaccgatggatttaatttagttttaaattttcctgtaatttcactttttttcttatttttgaccaatattgcattaaaatttaattttcaatgaataactttgttacaaataaaattgcttctatttatctcaaatttcattacccttcactattggtttcttttaactttcttttattctttattggtatttcaat

SEQ ID NO: 42337 - DNA, 305 bp, Glycine max
  Clone ID: LIB3093-034-Q1-K1-D2
acgctctcacgttactgatcgtctattcggcaaacctagctatagtattggagccgatcctacggggaggaggaacccgagcacttccagtgacgttggagacaagataactagtgaaggcaggtgtgacgatgaatgagactatctcatgaaacatacgaccaacttggtttaagattaaacactacattatcaatctgcataatcatgactacacacaaagatcatcaacaacatgactatgaacaacaccaagaatactaacaggaacatgcttaaccaaggagctgcaacagtaactgaat

SEQ ID NO: 42338 - DNA, 405 bp, Glycine max
  unsure (1)..(405): unsure at all n locations
  Clone ID: LIB3093-034-Q1-K1-D3
tcgcccacgcgtccgcccacgcgtccggtctcttcctactctctgtgcatagctgcgttttccgagatcgaaaggtgaggttagtaagtaacaatggtggagaaagccaagggtatgaaggaggaggttgtcactcgagagtacaccatcaacctgcacaaacgcttgcatggctgcacatttaagaagaaggctcctaaagcaattaatgagattaggaagtttgctcagaaagcgatggggacgaatgatgtaagagtggatgtgaagctcaacaaggctgtgtggagccaggggatccggaacgtgccaaagaggattatggtttgcattgctcgcaagatgaacgacgatgacgatgcanaggaagagctctattcccttgatactgtcgtcgaaatcccc

SEQ ID NO: 42339 - DNA, 431 bp, Glycine max
  unsure (1)..(431): unsure at all n locations
  Clone ID: LIB3093-034-Q1-K1-D4
gcgaaaactatattgaattaaaatcgctgntgagattcaaagcccctaaaatacatactgacattggttagcagaatacaaatgaattggcattcgttcgcataactagaacgttaaaagaaagacaagagggccagagattatataggatagtttttcacatatacaggccttcaagcaccccttctttcttattaaacatcactttatccttggccttcttaaagtcagcatgagtcaccttcattcgacgttctcgtagagcaagtaaaccagcttcatgacatattgcctatatatcagctacggagaattcgtctttagtcataacaaattcttccaagttgacatcatcagctaatgtcatccttgacgtgtgtatctggaagatgcgtctacttgtttcgatatcaggaagaggaaattctatc

SEQ ID NO: 42340 - DNA, 252 bp, Glycine max
  Clone ID: LIB3093-034-Q1-K1-D6
gtttctccctcgtatgagtgcgtgtgtgagctatcttcttgactcttcacttatgttgactggcatggctctatgagaatccgttgctgggtaccactcgaacgttcctgcttatgcgagtttgacgtccaccaaaccaagtcctaccacgcttgactctgtgctcccaatagccattgaaaacataatcactaagatcgtagcatctcaagtgtagcccctctggagacattacatcagatcacgcggatc

SEQ ID NO: 42341 - DNA, 445 bp, Glycine max
  Clone ID: LIB3093-034-Q1-K1-D7
cccacgcgtccgagctgcacaaattaatatccaacactctcaagctttccactttcaaactgtgcccgctcaatttgctttatctttccgaggtaatttcttttactttctttctgaactcaaataaatttctaatgaataccccatcctctcatatctctatgtatctgttttccctttctttgcattccatcttccaacgtcggtgcttgtctgaattaaacatatttctctgtatctgttttctgtctttttcttttttaatattcctgtttgtgttaattttcaatgtttcagagtcttgctttttcttcttcttttatcggatttttttaatagaaagattacatcatggatttttttaaaattataatctcattgatattgattgaacaatttttttgtttcataataatttggtttggatgtgatgtaacttgggttt

SEQ ID NO: 42342 - DNA, 398 bp, Glycine max
  unsure (1)..(398): unsure at all n locations
  Clone ID: LIB3093-034-Q1-K1-D8
gagttaacgtagaaaagcttcgtctcttgtcttcgcttctttcaattccttctcctttctagctctctctcttcttatatttccacattccacgtgaaccttctagaactataatagaaagaaaccctccattccatggctccgccgctcgaacacaacggcgtttccacgagcggtgactctcagagatccattcccacgccatttctcaccaaaacctaccagctcgtcgacgatcacaccatcgacgatgtcatttcgtggaacgattctggatcgtccttcatcgtctggaacaccaccgctttcgccaaggatttgcttcctaaatatttcaaagcacaacaacttctccagcttcgttcgccaactcaacactnatggatttagaaaagttg

SEQ ID NO: 42343 - DNA, 291 bp, Glycine max
  Clone ID: LIB3093-034-Q1-K1-E1
acgcgcacgcgtccgtgccaagcttggtctctatctcatttagaggactgtggagaagtaacggcgacaggggctatcactcttatatgctagcaagctatctaagatatcccgctgcgtcataatagccctaggcttcccatatactccatttgacctacttctatacagattccattgcttcttatattggcattggatctataccattcaagggtacgggattctgacattccgaattatgcacacaaatacttcttgaagtcccttaagataactagatgcaaatat

SEQ ID NO: 42344 - DNA, 162 bp, Glycine max
  Clone ID: LIB3093-034-Q1-K1-E10
tatgctcacaactttaacactgcttttcaattatacatcacactcccttttactttcaccttcaaatccaccttagaatctatagatacaacacaactctaatatactttacaaatttttttccaacttaaatacttcatacatatcaaaaaattcttctta

SEQ ID NO: 42345 - DNA, 427 bp, Glycine max
  Clone ID: LIB3093-034-Q1-K1-E2
agaaacaccaagatacacaaaggattagtcacgtgtatttttaaaaatatccaaaagaacatggatggggatgtataatagaaaaagaatactaattggggctttccgctggtagaaaaaataaggcagtacttcccagaattccgatccagagtatacttccatgcaccgattaaataaataactatcagaaacgatataatcctttaatttttggaagaccccttctattttacttacacaaaaaagactacgataagaacgaagaaaaaagtgatcccccttttcttgttagtcttatatccatatttatggagatagaattcatgtcataatttaaaaaatgaacatgtataattctttttcggaatcgaaaatgatgagggagtttttgataatttgaaaagagtattttatggaagaatta

SEQ ID NO: 42346 - DNA, 339 bp, Glycine max
  Clone ID: LIB3093-034-Q1-K1-E3
acgctttagggaaggatgaacgaacaactatactactattatccttattatctgcatcattgcaggtaaggctacttattataggtataagatgtcgttattatgcctcacatatggattcgatatgcctctccaacaactcagctgtttatcgattcaaagacccagcgtcccagttgtccccttccatgtctaggatatccagatccctcatcacagactcaccatcactacgcactaactgaacattcacaaggacatgaaccatgctgatcagcatcctttgtgtgcatgaacatctgccttgcttctacctgcgactggctgcacaccgtgctg

SEQ ID NO: 42347 - DNA, 233 bp, Glycine max
  Clone ID: LIB3093-034-Q1-K1-E5
gaactgtcgatcatacttctactctccgaatccgctacacttgcatctcacatgggtgcaagcaccaacactagcatattgaaacccctcatatttcatcacccagagcagcttctgtattcccaccggtcttatctacgcttgcacaccaaatctaagacccactgcggagcgaattctcggccgatggtttcgaaagccacggcggctccctgagccttgaagacagaaaa

SEQ ID NO: 42348 - DNA, 277 bp, Glycine max
  Clone ID: LIB3093-034-Q1-K1-E6
tcgatccttgagttgcctttctagccccaaggattcattggtgacaagcttgataccaggtgaggtttaacttgaggaagagactatatatcgaaaaatatgaatatcgtaataataatctcatactttcacatcgaagcaatatccatttcaaacggtgctaatatcatcctatttaatgactgcctaacttatttggctttctttgtccaattgccctaattgagtgcttctaacgctattccaatttattggcccaattgagcttcgttaattt

SEQ ID NO: 42349 - DNA, 375 bp, Glycine max
  Clone ID: LIB3093-034-Q1-K1-E7
ggaaaattagcctcacaaaagcaaagatcaaacaaaccaaggacgagaacacgatgttgcttgaacttgcacttggtttattggttttggctctgtttctgcacttgcgtcccacacccactgcaaaatcaaaagcacttcgccatctcccaaacccaccaagcccaaagcctcgtcttcccttcataggacaccttcatctcttaaaagacaaacttctccactacgcactcatcgacctctccaaaaaacatggtcccttattctctctctactttggctccatgccaaccgttgttgccttcacaccagaattgttcaagctcttcctccaaacgcacgaggcaacttccttcaacacaaggttccaaacct

SEQ ID NO: 42350 - DNA, 402 bp, Glycine max
  Clone ID: LIB3093-034-Q1-K1-E8
atttcccgtggtccccaccatctctccgcagtcatttaaatcatgctattttattgtatcggtttactctcacaaagagtctgtttgtttcctcgattcaattttccttgatatggttgtccaaatccaaccagatagattatcaaactcattctcactcattcccttcgtttgtgacggaaattggtctcctgcttagtcatatctgcatctgattttgcacgtggcgtacacccagacattctgcctgatctagttgggataaagtgtttccttatattgccaagacgagtttactgtgtggcgggagtgtttttagtttggaggcctaatatacttgtgagacagacagcttttcgactttgagtagttgggtgatagaagaaggctaaggttctttgg

SEQ ID NO: 42351 - DNA, 354 bp, Glycine max
  Clone ID: LIB3093-034-Q1-K1-F1
attgacctcactcatgcatggatcactcgtcgatgctcaaaacaccaaggacatgagcctgcgctagtgccataggtctctgatcctatttgtgccttggtgaccacagccactggaaagtcataagtactgtgccatttacacaacccacgaagcccaaagcctgagattaagttgataggacacgttcatccctgaaaagacaaacttttggactacgcactcattgaacggtcctaaaaacatgggcccttatcctctatgtactgtggcttcatgccaaccgttattgccttcacacgagaattgttcaagctcttcctacaaacgcacaacgcaacttgatttaacaca

SEQ ID NO: 42352 - DNA, 338 bp, Glycine max
  Clone ID: LIB3093-034-Q1-K1-F10
aaattttaaaattgattattcatcatcacattataacactatatcaagttctagaaacatcaacagacatatatatctttataaactatttaaaatctatacaactctttcattacataatattataataatcttctgcaacattattaatcccatcatttttttcatcatataatccctaatttggagtactctcacaggaatattctcttcatacatacctctatcctcataatttactcttttactcaaaatttaacatcaatacttcttattcaactttcatcaacatcattcattattttcaccttcttaaaacaaatttttgtaaccctaat

SEQ ID NO: 42353 - DNA, 276 bp, Glycine max
  Clone ID: LIB3093-034-Q1-K1-F12
attttaagattggttatgcatcatcacattatacgactatatgaagttctggaaaccccatccgacatatatgttgttatagagtatgtgaaatctggatagctcttttattacataatagaaaatggtctgctgcaataagattaaacccgtcatttttttcagcagataatttctggtgtggagtactgtcacaggaatatggtggttcattgagacctgaagcctgaaaatttactcttggactcaaaatttaacatcaatattgcttatttt

SEQ ID NO: 42354 - DNA, 333 bp, Glycine max
  Clone ID: LIB3093-034-Q1-K1-F2
acgctacgcgtacgatccaacggcttcagagatgaaactttcgaacccactgagggagactaaagtgcggtaactcgtcctgaatatctctagtgtctagagtagcaatcgtgtcaccagatcctccaatgcgtcatcatcaacttatggataataccacctaccttacaaaatcatgttcacagtctccgtcatcaataccaacaataactaaaacaacggttaccatgacaactacatgagataccttggcttagcacctgtgtcacaaactccagaatggttatggacctagtcaccatactagggaagcttatcgacaacgttggattt

SEQ ID NO: 42355 - DNA, 353 bp, Glycine max
  Clone ID: LIB3093-034-Q1-K1-F3
acgcccacgcgtacgaaaaagttgttgttgagatacatgtttgtggactgcgatagtcgagctggaagtgctgctactggtctacagtcagctcaatggcgtcttccatctgagctctgtcgccttacgtccaatcacagctcactaaaaccacccttgcaggtacaatccctctctatcaacgaagcaagtgcgatatgagcaggacgaggtctgcgtgtaaaggaattacggcctatgacagctcgatcgcgggttctactctgacacccacatgcagaaccatcttccatagagctcgaaagattgcccgacaagccggaaggggacagttattggacatggaagactca

SEQ ID NO: 42356 - DNA, 289 bp, Glycine max
  Clone ID: LIB3093-034-Q1-K1-F4
acgctgcaatgttcctctcaattattgcattcattgtcggatacccgctttaccgtaactcgaacgcgtggggggagcccgtttacccggttagtgcaagtggctatgactgcatttcgacagagaaaggtgccaaatgtgtcacaccctactttactctaacgaaatgatgaactaaatgcctctatttctatggcagggaaagcttgttcacaatggacagatgaaacttatggacaatgcatcaatagttaccgaagaacatgacatcataaacactatcttatgg

SEQ ID NO: 42357 - DNA, 416 bp, Glycine max
  Clone ID: LIB3093-034-Q1-K1-F5
ggcttcagcaagaaaagagggttttcagccgcagttaaagtttttgaggagctgatttccgagggcaatgaaccgggtcaagtcacctatgcttcagttataaatgcatattggcgtcttgggcaatatagcaaagcagaagaggtgtttttagagatggagcaaaaggggtttgataaatgtgtttatgcttattcaaccatgattgtgatgtatggaagaacggggagggtgagaagcgcgatgaagttggtggccaagatgaaagaaagagggtgcaaaccaaatgtgtggatctacaactacttgatagacatgcatgggaaggacaagaatttgaagcaacttgagaagcttgtggaagaaatgaagagacgaagggtagcaccggataaggtgagttacactagcattat

SEQ ID NO: 42358 - DNA, 270 bp, Glycine max
  Clone ID: LIB3093-034-Q1-K1-F6
ctcatctatggacttaagtggcatatctaaacctccaaaattcatgtgaatcctactttttggtaattaaaaatgaagtttttaaacctcttgaaaggcagacttgtcaatcctgctcctgtccttcatcatggggcctggccatcctgccaccaacccaaaaccttttttttcaaagtaaccgccaccattaccaccattaccaaaaccaccattgatgtatcacccaccttgggaacacattacctaaccgttagtgtcccaaactcc

SEQ ID NO: 42359 - DNA, 428 bp, Glycine max
  Clone ID: LIB3093-034-Q1-K1-F7
cccacgcgtccgatcatttagagaagcatttgaaggaaaattgtaagcacaaacacatggggcttttattgaacaagtgtgatctagttcctgcttgggcaacaaaaggatggcttagagttttgtcaaaagaatttccaactctagcattccatgcaaacattaacaagtccttcggaaaaggttcacttctatcagttctgagacaatttgctcgattgaaacgtgataagcaagcaatatctgttggatttgttggatacccaaatgttgggaagtcatccgtaatcaacacattgcgtacaaagaatgtctgcaaggttgctccaattcctggggaaacaaaagtatggcagtatataaccctaacaaagaggatctttctgattgattgtccaggtgttgtctaccacatcattgattctgaa

SEQ ID NO: 42360 - DNA, 266 bp, Glycine max
  Clone ID: LIB3093-034-Q1-K1-F8
ctcttttcttacttatagacacattctaatggcacagcgctttacgtggccatcgtggccgtggagcgtgcccgtttaccgacgttagatcaagtggctatgactccaatgtgacagagaccgatgccaactccgaggcaccctacttgagtataacgaaaagatgatctcaatgaccatactggtacggctggtaaacgacgtaacaatgcacagactagaacagatgtacctgcactcaatcctcactcaagaacaccacatca

SEQ ID NO: 42361 - DNA, 331 bp, Glycine max
  Clone ID: LIB3093-034-Q1-K1-G1
acgatgagttcagcgcatcatgactccgaccctcccatccgactccacttgcctgctctctcaccgagggtcttcaattccgaaccaccggagctctctcacggatcctccgcccgacccttctacgacccctccagtcccaccagcagcggttacgccgctgaaaggggcggcagcagcaccgccacaagcgtattccaagtcgatgacgtactacaccacgaaattcaagagatcaccatccacgattcccaacctttctctcactcctcctggctttccggaaaacgacacggcgatgacgatgatgcttccatttcatggaggaaaa

SEQ ID NO: 42362 - DNA, 428 bp, Glycine max
  Clone ID: LIB3093-034-Q1-K1-G2
gcgaattcaagcagaaaatatggaattctacatgtccagagcatgtgttggaaaatctgaatgggggcacggaagattgtaacacagaacaggagcaagaagctattggttttaaggtgaagaatgcaatgctgtatccgcgtgaagtggagaaaggactatggccagaagattattctctttctgatcatgctagactcacagctgtgttttcaccagcaaggatgagatgttctgcctcacaaaactgaatgtacttcatggcactaatagtcttatcccacagaaaaatattcaattttgggaccagtttggtgtaagggtaaaactgaagtgatcccttttttcactttcatttttagtcccctaccaaacatgtcttgccataattagtgattaatctgtcttgtatatgtgtttggagtcaa

SEQ ID NO: 42363 - DNA, 428 bp, Glycine max
  Clone ID: LIB3093-034-Q1-K1-G4
acgcaaaatgtgagcggcatcaattttcttatcaaagagggtccaaaagtcaatgcaaagttcgagctgaggccgccaccatatccactgaatggtttggagccggtgatgagccagcagacacttgagtttcactgggggaagcaccacaagacttatgtggaaaatctgaaaaaacaagttgttgggacagagcttgatgggaagtcactagaagagattattgtcacatcatacaataagggtgacattcttccagctttcaacaatgcagcacaggtatggaaccatgacttcttctgggagtgcatgaaaccaggtggaggtggaaaagccatccgggagcttctagaactgattgaaagagactttggttcaattgtaaaattcttgatgaggtcaaggctgctgctgcaacacaatttggt

SEQ ID NO: 42364 - DNA, 288 bp, Glycine max
  Clone ID: LIB3093-034-Q1-K1-G5
gcaccacggatttttccttcgctacgaagatatccctctctttctttctcatagtggtcaggtttctgcgaaatcgccgatgctagaatcggagcttcacgatttatccgatgacgccgattacgccgcgtcgcagcaacaaggatctgctagcgtgatgttgcggagtgacagtgccaaacagatttcccctcggaacggtgcctaaaatggtatttccgaaggacaatgttgcaattcatccgactcaatttgcgtctgaaagattcagcggatgactgaaattga

SEQ ID NO: 42365 - DNA, 433 bp, Glycine max
  Clone ID: LIB3093-034-Q1-K1-G6
cccacgcgtccgtttctttatgtgctatagaggccacgaggaaattatcatgaatgggcttgtttctgctgcttctgagattgctgctgggttggccgtaaggcttgcttctatcggacctggcgttggtcaaagcactgctgcacggcaagctgtcgaagggattgcacgacaaccggacgcagagggaaaaatacgaggtactttattgcttagtttggcttttatggaagctttaacaatttatggactggttgtagcattagcacttttatttgctaatccttttgtttaatcctaagaaaatagaaatacatatgcttttttccgaggacttgctttaccggacttgctttttccaatgctatttatcataatattccactcctataattctttattccgtcggacaagaacacaggggaaggactaa

SEQ ID NO: 42366 - DNA, 331 bp, Glycine max
  Clone ID: LIB3093-034-Q1-K1-G7
actcgaacctcaattcccacctagacccacgcttccagcgtatacgctactgtcttattccaaccctctaccaaatactacattgctaccacgtgtacgtgatacacatccaccctaatttcagctcaactcttgctaaccagttacagcatgacttttaacatacacaatcatatattacatccctattctcaaacaatacgcccattcccggtccgtatcttcaatcggcatgccacaaccactatcactatcatctacacatatcgacaaagacacgccttataattagtctaaaaggcaagatccatttgtgcccataacctattcc

SEQ ID NO: 42367 - DNA, 83 bp, Glycine max
  Clone ID: LIB3093-034-Q1-K1-H1
ataaaataagagacagactctgtaaaattcttgtacatgctactgctgtattctatcacaatgaaagagacaaatactgctgt

SEQ ID NO: 42368 - DNA, 137 bp, Glycine max
  Clone ID: LIB3093-034-Q1-K1-H11
aatctctacatcatatcactcaatatgatcaacctaaaacttaaccccttgccttcacctttcgttgatgacaaatttatttccaccctcaataaagtaaaacctcatctccttaaaaagatgctctcccccatcat

SEQ ID NO: 42369 - DNA, 285 bp, Glycine max
  Clone ID: LIB3093-034-Q1-K1-H12
ggtttgatcctactcaaggctgtcaccaaattcagccgtaccaccagcaatgggctccagcggctgccgctcctcctccttctcctgcagccgcggacggtcctcctcctcacccttgggaggaggttcgaacgatattcataactggtctttctgataacatgaaatatagagagctgcagaatctgctgagatagcttccctccttctaagcatctcaactgaatttcaaagctgataaaccaatattgtttgctctctttttcgcaccaaaccaaaaacttt

SEQ ID NO: 42370 - DNA, 332 bp, Glycine max
  unsure (1)..(332): unsure at all n locations
  Clone ID: LIB3093-034-Q1-K1-H2
agncaagcgtggcgcgcacccgttctgacgcacgtctctctctctctctcgccatggctatggctatgcaaagcgtgatcagaagtctccaagatcctcatcatagcaggagcaggttacaccggcaccgtcctcatcaaaaacggaaaactctcggatttaatcggcgagcttaagttgctggagaagggattggaaaaatctggggagcatgctgaaggcaaaggtgaatatgctgatgccatagctgctcaggtgcatcgcctggcgaatagaattcggcagctagcatcaaacaggccaatcacagtactgaatgggggttctgaaca

SEQ ID NO: 42371 - DNA, 444 bp, Glycine max
  Clone ID: LIB3093-034-Q1-K1-H3
cccacgcgtccggaaaggggttcctctaagaattgaaattgggccaaaggatttagcaaatgagcaggttcgcgctgttcgacgtgataatggtgcacagatagacattgctagtgctgatttggttgcggaaataaaaaagttgctcgatactattcaacagaacctgtttgatgttgcaaaacatatacgagatgaatgcattcagatcatacacacttgggatgaatttgtgcaaagctttgaaccaaagaaaaatgatcttagctccttggtgtgacgaggaggaggttgaagcttatgtcaaagcgaggacaaagggtgagattggagcagctaagactctgttgcagccctttgatcaatcagaactcccagaatgcaccaaatgctttgcatcaggaaagcctgcaacaaagtggacatactggggaagaagttact

SEQ ID NO: 42372 - DNA, 328 bp, Glycine max
  Clone ID: LIB3093-034-Q1-K1-H4
gaggcacgcgtcacgccacgcgtccggaaaggggttcctctaagtattgaaattgggccataggatttagcatatgggcaaggtcgcgctgtacgacgagataatggtgcacagattgacattgctagtgctgatttggttgcggaaataaaaaagttgctcgatactattcaacagaacctgtttgatgtttcaaaacatatacgagatgaacgcattcagatcatacacacttgggatgaatttgtgcaagctttgaaccacagtaaaatgatcttagctccttggtgtgacgaatacgaagttgaagcttatgtcaaagcgatga

SEQ ID NO: 42373 - DNA, 174 bp, Glycine max
  Clone ID: LIB3093-034-Q1-K1-H5
acgcaacaggcaacttagtgagttgcaccccatatacaaattgctacaccctcattttcgttagggaatggacattaacgctatcgcacgataagcacttatcaacgcttatggctccattgagagctcatttgcaccaggaaagcgctacatagagactaactctgcttgtta

SEQ ID NO: 42374 - DNA, 426 bp, Glycine max
  Clone ID: LIB3093-034-Q1-K1-H6
gtcctgaataccttcaggattctgacattgtgtccagtcgttttcagaggagagatgtttagggtgcttgagagcaatatcttggtttggagcatactgataatgctcctaaaagatcatatgctgttaaccagaatcgccatactttcgagaagccagtaaagatttataattaatgaaactggtattgatgagttatcgtcttgcgtgggatgaatttgccatattctgctacatctatgaggcttttgtaaaaacagggtaaatagcgaaaggctactacgtataggccacaattagtgagatcagcaatccaggtggtttctgcatgttttatattagaattgtggtatgtaattatttctgtcaacggatctgaacactgtctgacgaccacagcccgttgagctttactacttccaactt

SEQ ID NO: 42375 - DNA, 397 bp, Glycine max
  Clone ID: LIB3093-034-Q1-K1-H7
cccacgcgtccgctcgcagttcccttctgctcgactcggatcggagcaaagctctcgtctggccacaatcctacgactcactctctctaaaaccctaacactccgaaatgcccgaaccggaatcgcaaaacggacacgagcaagacccggagccgcagccagaaacagaaccagtgccaacagatcaaacacaaccacaattgggaccgaaatccaaatgcacgcccgaaccagatccaaatccggatccagaatcggagccagcgccaacagaccaaacgcaagcacaatcggagcctaaatcgggatcaaaagctgatccagcgggcaacgacgcatatctgagggaaacgactattcattccaatgaaacgtatgccaatccttctcccactcc

SEQ ID NO: 42376 - DNA, 349 bp, Glycine max
  Clone ID: LIB3093-034-Q1-K1-H8
aaacgacaccgttttgaccgatggtgaaagggttgcacgggcagaacctccctgacgacggggctcatgtggatgatcagctggagcgccactgcttcgctcccgatggatctctaatatacaggcctatcttcaacgatcttcagcttgccagacaggaaatgagcaaggaaagactgcattacctggaagccatggctatatattctgaggctattgcaatggtggaagagtatcagcaagccatttctgagtccaacctcagtggaatcagagatactggcaatctttatccacagcttggattgaagacctctactcaggtttatcagactttatagcatcaaat

SEQ ID NO: 42377 - DNA, 453 bp, Glycine max
  Clone ID: LIB3093-035-Q1-K1-A10
cttcttgagggtaccctattgaagccaaacatggtcacccctggatcccaatctgctaaggtttcggctcaagtggttgccgagcacactgtcagagcccttcagagaaccgtgcctgctgcagttcctgctgtcgttttcttgtctggtggccagagtgaggaggaggcatccgtcaacctcaacgccattaaccaggtcaatgggaagaagccatggtcactctctttctcctttggaagggcacttcaacagagcacccttaaggcatggggcggaaaagaagagaatgtgaagaatgctcaagaagcccttttggtaagagccaaggctaactcagaggcaactctgggaacctacaaaggtaactcacagcttgctgatggtgcctcaaagagccttcatgtttcgaactacagctactgatcaatcgaagttggtgttgtttgaaaa

SEQ ID NO: 42378 - DNA, 286 bp, Glycine max
  Clone ID: LIB3093-035-Q1-K1-A11
ttcccattcgaccgacgcgtacgcttgttgagggtaccctattgaatccaaacatggtcacccctggatcccaatctgctaaggtttccgctcatgtgcttgccgagcacactgtcagagcccttcatagaaccgtgcctgctgcagttcctgctgtcgttttcttgtctggtctccagagtgaagatgatgcatccttcatacctaacgccattaaccaggtcaatttgaagaatccatggtcactctctttctcctttggaaaggcactttaacagagcaccct

SEQ ID NO: 42379 - DNA, 364 bp, Glycine max
  Clone ID: LIB3093-035-Q1-K1-A12
cccacgcgtccgcaattatctagggtttatacaattttcgatggcttcttcagatgttgagtaccggtgctttgtcggtgggctcgcttgggccactgacgaccaagctctcgagagagccttctctcagtacggcgaaatcgttgaaacgaagattatcaacgatcgtgagactggaagatccaggggttttggatttgtgaccttcgcctcggagcagtccatgaaagacgccatcgaagggatgaacggccaaaaccttgacggccgtaacatcactgttaacgaagctcactcccgtggtggctgctgcagctgaagcagtggaagcagtggatatggtggcggtctcaacggtcgatat

SEQ ID NO: 42380 - DNA, 375 bp, Glycine max
  Clone ID: LIB3093-035-Q1-K1-A2
tcgatcattgcatttgcttgggagccaaagggccacaggtttgcagttattcatggtgataaccgtaagcctgatgttagcatttactccatgcgtactggtcagaacagccgagtttcaaaactcactactctgaagggcaagcaagcaaatgctctgttttggtcacctgctggtcgctacattgtactggctgggttgaaaggcttcaatggacagttggaattttacaacgttgatgaacttgaaaccatggctactgctgaacattttatggcaacagatattgaatgggatccaactggaagaaaattaaaatgttgcaactgcagtgacttcagttcatgaaatggagaatggtttcaatatatgggc

SEQ ID NO: 42381 - DNA, 403 bp, Glycine max
  Clone ID: LIB3093-035-Q1-K1-A3
cttgacggatgctctttcaagcaaagtgcattaaacacatggaagcttttactcaaagggttatatctagatggtgggttacactttacgctcgttactctgatactcctcagaagaagtctaagcttgctcctttgcaggagagaagaatgatggaccagtgtaagatatttgcaaaagcaggtgatggaggcaatggttgttctagcttgcgcaagggaagacctgatggtggcaatggggggagaggtggtgatgtgattctggaatgctctcacagagttcgggacttgagtgggatgcaacgtcacctgaatttaaatggctgataaaggaggacctggatcatcaaaaaagttgataggtagcatgggtgctgataaaggtgcccgtgtaccgattg

SEQ ID NO: 42382 - DNA, 399 bp, Glycine max
  Clone ID: LIB3093-035-Q1-K1-A4
tcggtttttgactcagggaaaacttaaaaatgctcaactgagacaaacacaagagataactttgaacataagtgacagccagagggctacacctataagtacagaaaacttactatcgagagttaataataattccgggtctaatgatagaactgtggaggatgagaatggtttttgcgaaaataaaccaaactctggtgcaaagctgcatcaactactggacacaagtcctagagctgatgctgtggcagctggttgatacagaaaaccagtaattgtactggctgatcagaggtagttttggcatatttttaaacccaagcccaaaattactactaacaatttcctgagggatggatcaactgaattttagtatctaaatccatcaaaatcagaact

SEQ ID NO: 42383 - DNA, 389 bp, Glycine max
  Clone ID: LIB3093-035-Q1-K1-A6
cccacgcgtccgtggacgaatcacaaccaataaacaaagaaacagaggcagagatatatggttatgaatttctcaacagaaccctctgcctcacgcttaccattctgatctccacttcttcgctgtgcgtcgaagtgaaatttcgttgctgcaaatagtgagaattcgctgcctttggtcagagttgctccgagtgatcgcttcccctggtgcgacgaactgaaatttcgatgctgcaaatagtgagaatttgctgcctttggtcagagtggctcctagtgaccgtttcccttggtgcggaaaatcgtgaattgaaatttcgtcgctgcaaatagggataatttactgtcttaggtcagagtggctcaaagtgatcgcttcccctgaaa

SEQ ID NO: 42384 - DNA, 386 bp, Glycine max
  Clone ID: LIB3093-035-Q1-K1-A7
gtgtggaaacattctgctatggattgcgctgcaatcacaacacaccaatatgtatctgcggagcagattgtgaatggcatgcatcaggcaaaggcagaacgagctgatatagaggagcttacgcttgactgcatcaccaatttccactctcaccatgacctcaaaatcattctccaaaataagccactacccgtgcttattgttaaccgaccaaaatgggaaggtggtttgtacgagggctatgagaacaagcgggtggaagcattacagcttgctgaggaattgagtgctgatttcatttaaaaggtacgttgagctgaaggcagcttcttgtcttacaaccttggtggaacatatgagaaatcataatagtcaatgcaaaatca

SEQ ID NO: 42385 - DNA, 412 bp, Glycine max
  Clone ID: LIB3093-035-Q1-K1-A8
atcaccgtacggtttaaattgtatagtattttttccccactcacagactatcaatgttgcgacagtgtcacgtcatttgacatgtccatagcgtcgaacaaaactaacagcagcaaaatgagcacacccttgttccatgaattcaaaaagcaagcttatttcttcttcaaggagaaaattaagactgctagattagctctaacagatgtcacccctgcagaactgatgacagacgaggcaacatgtggaaatccatgggccccagatgccagaactctcagatcaatttcaagggatgcctttttttattaacttaaacaataatggaaggattgtggagattctgcttaaaaggttcctaaaatttgaaaggaataattgaaggatctctaacatttccttgatcgggctt

SEQ ID NO: 42386 - DNA, 266 bp, Glycine max
  Clone ID: LIB3093-035-Q1-K1-A9
acccacctcggaatctaagaatgtcctaacgatatcatcacaggactaataaaccaggtatggatactcggggtgtatcctcctaatctttgttcctgaacagttgacatcatcaaactttacataggatcacatcttgctgtttgccttcagaaccttattttatacttttcactattgcaatgatgccgataacgaaataactactaaaagcagccatgaatgctcttcttacactgcctgtatctggaaactctgaaagtatt

SEQ ID NO: 42387 - DNA, 447 bp, Glycine max
  Clone ID: LIB3093-035-Q1-K1-B1
gcgcccacgcgtccgcccacgcgtccgttgttccttctccttgtgatcttcttcaaccttcagagtgagaaggcacattcagaaaccacgtttctctcttcttcttcttcttcttctttttcttctctcgaggtcattattaagtattcaccatggaggcaccatctcccaccaaacccaacgacccaacaaaaccttccaacacttccaccacccttagtctggaggccggcccggcccaagcgagcccactccgaaaaatgtttgccgtggcgtccatcgccgactgcatacagttcgggtgggctctttttcctccagctctctcttctaaccccctacgttcagcttttaggagtcccccacgcggcggcctccttcatctggctctgcgggcccatcttcgggctcgtggtacagcccattgtgggctactacagcgaccac

SEQ ID NO: 42388 - DNA, 266 bp, Glycine max
  unsure (1)..(266): unsure at all n locations
  Clone ID: LIB3093-035-Q1-K1-B10
cccacgcgtccggtcgtcgtttttgaaatggcagcgtcgtcgtcagagaagcaagtggtggtgataggcatagacgacagcgagcagagcacgtacgcgttgaattgggctctggataactttttcccgagcccaattttcaagctcgttctcatccactccaggcccaccgncaccttcgctgtgggcttcggcggccctggtaggttcattctgttacgctcttccttttcacgctttcttcgttaattgagaatccctttctt

SEQ ID NO: 42389 - DNA, 321 bp, Glycine max
  Clone ID: LIB3093-035-Q1-K1-B11
cccacgcgtccgcttcactcccattttttcaaaacattcacctctccttcagaagaaacgtgctagggactcggagcctcttccgatgaagccctggccactgagtatagcagttactctcgccctaagcccaggcccgctcctgcaggcttcaatcccgccgccggatccgggtatggtaggaagcaggagtcggaatacggatccgggtatggaaggaaggaagaaggagaatacgggtcaggatatggtggaagaaaggaggaatcagaatacggatccgggtatggaaggaaggaagaaggtgaatatgggtccggg

SEQ ID NO: 42390 - DNA, 396 bp, Glycine max
  Clone ID: LIB3093-035-Q1-K1-B12
gcatctcataggccgattctttagccgcttctctctttccttgtggtgttctcgtgttgcgggtaacaaaatggttgcaagtgttgacgctttgaatgacggtttgagaatcaaccgttcagttgaaccgttgcctgaggactttgatgcaacagctgtaatcatagatcccgtgccttctgcagctgtagacaatggcattctgaaggaggaggcgcagatcaataaaggaatagaaaaaagagaaatagtactgggaagaaatgttcataccacatgtctagaagtcacagagcccgaggcagatgactagatcactggtgaccgggaagctcatatggcaagtgtgttggccagatacaaaagagccttgactgaaaggacaaagcaccattt

SEQ ID NO: 42391 - DNA, 306 bp, Glycine max
  Clone ID: LIB3093-035-Q1-K1-B2
tcggagagagagagaaagagacgaggagagagaaacaaagaagagtgctcccacattacatggggtgcttgcgcttggtgcaccaccaccatcaccaaccggcggcggcgactatacacccgtcgcaaccgccgcagtgtcagccgcaacccgaagttcctcgccggagcatcgatatggagaccgataacgatatgtcagctactgtcattgaggggaatgatgcacgtactggccacataatcgtgaccacaattggaggcgaaaatggggaacctaaacagaccatgagttacatggcagaac

SEQ ID NO: 42392 - DNA, 260 bp, Glycine max
  Clone ID: LIB3093-035-Q1-K1-B5
aacgcaaactcttcaagagcatacaccgtgaaattccgaggccgcaaggtcaattataactccactggttgccaagatcttgccaaacaaaacaaagtgccattccttagtgacgatttggagcttgaatgctaatgaatggtcatatacatgtgccgttctaatgtaatctggaaatggtgaaaggaggcaaccttttatgcccaactgcgaattattcgctttgcgatgtacctaactgcttgaatatataccatatt

SEQ ID NO: 42393 - DNA, 362 bp, Glycine max
  Clone ID: LIB3093-035-Q1-K1-B6
cccacgcgtccggtttagctcaaataattttgtgaagcatttttattggtagaaatggagagtgagtcggtgaaacgcagaattcacatgattgctgctcactttgcacccaatgatgatatttcaactacccacgttctgcctatgaactgtagtggcagtctgaactctgtgctccggagatgtgataataaggtgtattttgcacgccaagcatctgcttctcttggttattttatgaggcagacttcaattgaagagggtggctcaactggctttattggttccaaaaaccaatcccttttgtgggtgcttctgaatttgaaggtccttttaatgcaaaagcaccatgttttgctaaa

SEQ ID NO: 42394 - DNA, 305 bp, Glycine max
  unsure (1)..(305): unsure at all n locations
  Clone ID: LIB3093-035-Q1-K1-B7
cctggctccaccagcttcacctcctccaccatctcctcctcctcctcctccattgcctgtgcttgaaacatcacctgaaaagggtgcaaactctcccattagaagaggccctggaaggcgtggaagagatcgaagagctggttcacggcaccaccgcaaagttgttgctggaagcagagagatggaaccaagttaacagttttgtttgggcgagattatattattagtagatttggttaaaattccacctacggaaatcattcngtgcagagcttgantggaaaagtgcaagatgagtgtttttt

SEQ ID NO: 42395 - DNA, 438 bp, Glycine max
  Clone ID: LIB3093-035-Q1-K1-B8
gtgcaatctaagaaagagctaacaaacaaaacatgggttctttgggcacaatcaacaacgggcctcatgctgtgtgcataccgtacccggcacaaggccacattaacccgatgctaaaactagcaaaactccttcacttcaaaggctttcacataacctttgttaacactgagtataaccacaaacgtcttctcaaagcaagaggccctgattcccttaatggtctctcttcttttcgctttgaaaccattcctgatggtctacctgagactgatctggatgccacacaggatattccttttaacaaccatgtgttaggccactataagaacttggttccctcaatttaagaaccttcttactaaaatcaataactctgatgcccctacagtgaattgcataatctcggatggtgtcatgagcttcactcttgatgct

SEQ ID NO: 42396 - DNA, 298 bp, Glycine max
  Clone ID: LIB3093-035-Q1-K1-B9
cgaagattgtgatgagaatgatgacaaaaatgatgaaaacattcctgatcataccaatgccgaaaatgaatgattcaggacatgagtatttcagtttcctttagaagttcaaattacaattctgatttctttgcagactgttttcggcgtatttggggttgaatgcaaattttggttaagttgtatctttagtttgttcgcctatgggtgggtgcctcttgtttcattgtatttaacttttgaagtataatctttgttattaattttttatccactcaatgctacctgattcctgctc

SEQ ID NO: 42397 - DNA, 449 bp, Glycine max
  Clone ID: LIB3093-035-Q1-K1-C1
gcgaagaactcactcaaactcaacatagagagagagagagagagagagagagagagagagagagatatgaccgattacgaagagagatacgaagggaacggagaagaagaggaacttcacaattctcatcatcagcctcatcctgattcctctcctttacccacccacgacgatctcaccgattccaaatctcgccatggatctcgcgattatgacagagattcttccagaagcagagataaggagcgggagaaagggagagacagggagagaaaaagggaaaaggggagggacagggaaagggagaaaaggggtttaatggatagggattcggagagaagcagggacaaggacagagatagggataagagcaaagacagggagagggaccgggatcgtgatggtgagaatgaaagggaccgtgacagggaccgccatcatagagatcg

SEQ ID NO: 42398 - DNA, 185 bp, Glycine max
  Clone ID: LIB3093-035-Q1-K1-C10
gttgaattgtgagagaaggccaaccataattgatctccctcccaccaagttcaatgattgcgaccttgggaagattcccttttgtggccggaatggtactattttgcctccgtccatggatcctagcatgtctgcttcgagattccaaatgcaggtcttcaagatgccgtcggcgcttaaccgat

SEQ ID NO: 42399 - DNA, 328 bp, Glycine max
  Clone ID: LIB3093-035-Q1-K1-C11
gtgagttgggacttgtggcggcgagattgctgctgctccaaacgttacaggagagaaagcgcttctgtgccgtgaattcggatcgagatcaatgggttcagcggagaaagagccactgttaacagcggagggaactcgatcaaactcaaagcacgagtcctcctcccatgggcaacttgagagaattctctccgacgacaccctacccttcctcaaccgtgtgggacccgccacctggatcgagttgaagctcctcttcttcctcgccgcccctgccgtcatcgtctacctcatcaactacctcatgtccatgtccacccaaatcttc

SEQ ID NO: 42400 - DNA, 204 bp, Glycine max
  Clone ID: LIB3093-035-Q1-K1-C12
gaaacctaacaaccccctaaccgttcctaacccatcctgccaaggccctcgaccctcgggcgaccgcaactccaaagggctgtgcctgtcgacggcgtcttccacgctcatgtcggaacccgacatccacgcgccggcgttcctgcttcaacgcccgccggtcctgcagtcggcctttgcactcttcaagcagcgatcgtggtc

SEQ ID NO: 42401 - DNA, 442 bp, Glycine max
  Clone ID: LIB3093-035-Q1-K1-C2
caagattcctcgtggccccgatgttcccagtgaagctgctgactaaaaccattcagggatgatccttacgaaataatagctcctctttgtgatcattggtcgtatattggaattttcattggtataatagggttatttcttaattgcatttacaggcaagtgttcaatattttgttttacccgaacaaactaatccgtaggagcagtttcaaaattcctttttagtggcttaaagtagattggtaacatatgtaggtgccaatttttaagatgataaaaaggatgtcaacattgattataccaagtttttttaaaggctacttgcacattcatgtatgaacaattgacactggctttccattttatccaagtatattataagcatgtactttctatgtttgccaaattaatggtacagtggatttaatcaaaatcataaaaa

SEQ ID NO: 42402 - DNA, 448 bp, Glycine max
  Clone ID: LIB3093-035-Q1-K1-C3
gcgtgactgatgaagaatttgcaagagaaacgattgctggtttaaatccaaatgtcattaagatgatagaggagttcccactaagtagcaagctagatactcaagcctatggtgatcatacctgtataatagcaaaagaacatttggagcctaacttaggtgggctcactgatgagcaggctatccaaaacaagaagttgttcatcttagatcaccatgactatctcattccttatttgaggaaaataaatgcaaataccacaaagacttatgctacaagaaccatatttttcttgaaagatgatggaaccctttttgttgacaccattggccattgagttaagtaagccacattctcagggtgaagaatatggtcctggtagcgaagtctacgtgcctgccaacgaaagagtggaagcttatatttggttactggcaaaagcttatg

SEQ ID NO: 42403 - DNA, 363 bp, Glycine max
  Clone ID: LIB3093-035-Q1-K1-C4
acgcttatgctcttgttactgcttacaagaagtgcaaattcaatatggcccatatagacgtcttggcaccgctgaccacacaaaggtcttactacaacgacacagaaccgcatgctaaacactaatactaccagagaacttataacggaagccttctgattactgaaaccactgacgcctgtcacacggctctatgatatactcgaacccctggcatattgactaagaaccatgttgaagcttgagaacacatagtcgaacccgtatatgccaaatgcagatgtttcttctgccaaatttggcaccaagcatatgggtaaacttacatattcattgtatcacactaatggacaagcacacata

SEQ ID NO: 42404 - DNA, 437 bp, Glycine max
  unsure (1)..(437): unsure at all n locations
  Clone ID: LIB3093-035-Q1-K1-C5
atggttgtggactaacagattggtcccttgcttccacctatggaaagctagccatctttacaataggagcatgggccggttcatcaaacggtggagttctcgctggcctagcagcctgtggggtgatgatgaacattgtttccacggcctcagacctgatgcaagattttaagactggctaccttacattggcttcgccacgctccatgtttgtgagccaaataattggcacaacaatgggttgcataatttctccttgtgtattttggattttctacaaagcgtttcctgaccttggggttaaaggtaagtacaagtgaatatcctgccccatatgcaattatataccgtaacatggctatattgggggtacaaggttttggccatctaccaaaaaactgcctnttgcttggttacatattctttgctgctgccgt

SEQ ID NO: 42405 - DNA, 251 bp, Glycine max
  Clone ID: LIB3093-035-Q1-K1-C6
cccacgcgtccggaattcgtgatgaagagggaccacaaagatagctgcggcggcggcggcgccgcactagggactgtgaagggtgagtgttcctcaatgcagtcaaacgggaaggcgaatatgtgggaggaagagcaacagcagcagcagcagcaacaacatcaacaacaacaacaggggatggacgagttgctggcagcgttggggtacaaggttcgtgctttcgacatggctgacgtggcacagaagct

SEQ ID NO: 42406 - DNA, 366 bp, Glycine max
  Clone ID: LIB3093-035-Q1-K1-C7
ggaacgtggaactgcggcaaccggaatatctcacttctcagatcatatcaatccgacggggttgcagttataatggctccattcagcggcgatgagacggcaccgattttcggcttccttggagccgcagctgccctcgtcttctcctgtatgggagctgtctatggcacagccaagagtggcatgggcgtatcttcgatgggtgtgacgagaccggagctggtgatgaagtctattgtccctgtcgttatggctggagttctcggtatacatgggcttattatggctggaattatcaattgtttttttctggcctttagtcccagggccaaatcttattacctctctgatggatatgcacatatc

SEQ ID NO: 42407 - DNA, 393 bp, Glycine max
  unsure (1)..(393): unsure at all n locations
  Clone ID: LIB3093-035-Q1-K1-C8
ctctttccgcattttcccaattaggatgtgtcattgagacagaagaagaagaagaaattggagggggtgtgtgatcgggtcctcaggtgaagatctgaggctgttggtgtctcttttcttttctccgagttccaaagatgagcgcttctaggttcatcaagtgcgtcactgttggggatggtgctgtgggcaaaacctgtttgcttatttgctacaccagcaacacttttgctaccgattatgtgccgactgtttttgacaatttcagcgcaaatgtngttgtcaatgggagcattggggaaaaaatttctgggtttgtgggatactgcttgacaagaggattattacagattaagacctttgagttatccgggtgccgatgttttcatactg

SEQ ID NO: 42408 - DNA, 217 bp, Glycine max
  Clone ID: LIB3093-035-Q1-K1-C9
cgcaaacaaaaaacattgcgacagttgcgacttattggagttcattcttcgcactctctcggaaaccgcttgtttccaatcatctaatcagacgatagcagactcaagaaagacgtttccttcccagatccttctagaccatttgcaaaccgtctccttccccgaatccattctccaaaccctcgatccttgaggagctccaccaccgtgacggcgc

SEQ ID NO: 42409 - DNA, 356 bp, Glycine max
  unsure (1)..(356): unsure at all n locations
  Clone ID: LIB3093-035-Q1-K1-D1
gcgcttcctaaggagagggagggagagattcgaattccaattagggttttctcatcatcatcgactttttcgcttatgcaaggaaggttctccttctccgatttcaatttgattgaacgagtagtgttaagattatgatattttttgagaagcttcgtttctctccttacctaagccgcttcattgccggcatcatcttgttaattttctgcaattcattccagttagtctccaatttccccattcctatacagccttagattctacgtcgttaactctctccgatatgattctatattcgatattcggtnnttttgggattgaattcaccctctctctctctctctctctctcgc

SEQ ID NO: 42410 - DNA, 347 bp, Glycine max
  Clone ID: LIB3093-035-Q1-K1-D10
ctctggctactttttattcttccattatcgcttctcgtagcattttcggaacactcatggggtccagtgccggatccagctgcgtcgctctccgaaccgccgatttcgcctcctacgataaccggaaaatcggccagatccggcaatggtctccaattctcactaatctccgtactgtttccggtcttcgccaccgatcaaatactccgattagctcctacggtgtaagaacacaggttgctactctggaggaagcacgaaccggagcaactcataaagtggaatcgacgggtgcaatggtgaccggagcttccaaaagcattggaaaagcgattgcactgtcgtta

SEQ ID NO: 42411 - DNA, 430 bp, Glycine max
  Clone ID: LIB3093-035-Q1-K1-D11
cccacgcgtccgcgaactccgaagcccttcagcaaccatgtcgaggagaaaggttagggagccaaaggaggaaaatgtcactcttggtccagccgttagagacggtgaacatgttttcggcgtggctcgcatctttgcctccttcaacgacaccttcatccatgtcactgatttgtctgggagggaaacccttgttcgcatcactggtgggatgaaagttaaagctgacagagatgaatcatctccatatgctgctatgcttgcagcacaggatgttgctgccagatgtaaggaactgggcataactgctcttcatatcaggctccgtgccactggtggaaacaagaccaaaacacctggtcctggtgctcaatcaactcttcgagcccttgcacgttcaggaatgaaaaatggtcctatagaggatgtt

SEQ ID NO: 42412 - DNA, 401 bp, Glycine max
  Clone ID: LIB3093-035-Q1-K1-D12
ctttcttcttctcgttcttactttgacggtttctagagagagaaagtttgttatagagagagaaagcgcgctgctgcttcttctgctgctgcttcgacagtgagaagagagagagaagcgctcttctccgtaccgtttctagagagagaaactgatggccggagttaatccgaacggcgtcgccgattttccggcgacttcaacgcacggcggacagttcattcattacaacatattctgaaacctcttcgaggttacggctaaataccgtcctgcgatcatgcctgtcggacgcgtcgcctatggaatcgtttgctcgctgctgaataccgatactaatgacctggtcgcggctaataagatagcgaacgctttcgacaatcacatggacgctaaaccta

SEQ ID NO: 42413 - DNA, 351 bp, Glycine max
  Clone ID: LIB3093-035-Q1-K1-D2
acgggctcacagtttcagcaggaactataaattgggatggtcctttaaggattgaagcttcttgaactggcgccaacactatgatatcgaagattgtacgcatggttgaggatgctcaatcacgtgaagcacctgtacaaaggcttgcagattcaatagcagggccatttgtatacagtgtaatgactttgtcagcagcaacatttgcattttggtattttgtaggatcacacatatttcctgatgttatgctcaacgatattgctggcccagaaggagatcctttggtgttgagtataaaactatccgttaaaaagaaatgtgtttggttgtgtcttgttcatgtgcact

SEQ ID NO: 42414 - DNA, 267 bp, Glycine max
  Clone ID: LIB3093-035-Q1-K1-D3
gcgcccacacgtccggtcaaggttaggaggtagccaccaaaatggatgtaaaggcaatgccaacatttttgcggctgaatgacagagctgcggtggacaacgtggttggtgccaatccataagagataaacaataggatagatgtcgctgctgagtccactcgtgtatcactagcctagttaatcatatgtatgatattctactgttgcaagttgcatgatatgtgctcatagacatgcactgaactatggcatctgagtcaaagct

SEQ ID NO: 42415 - DNA, 375 bp, Glycine max
  Clone ID: LIB3093-035-Q1-K1-D4
acgatttgtttggatatactacaaaatcagtggagtcctatatatgatgtggctgctatactcacatctatgcagtcattgctttgtgatcccaacccaaattctcctgcgaactctgaagcagctcgaatgtttagcgagaacaagcgtgaatacaatcgaagagtgagggaaatcgtggagcacagttggacagccgactaagttcatccttatatgcaggaagctttgacggcatgaattaggttgcagtggtggcacctatatataagaatgattgtgcaaactcatcaagtatatattctcttctttgggggaaattgaatgatagcatcatcttatctttaatttattgtagctactgcattgcatatg

SEQ ID NO: 42416 - DNA, 376 bp, Glycine max
  unsure (1)..(376): unsure at all n locations
  Clone ID: LIB3093-035-Q1-K1-D5
ttcaggcatcggatacggtctaaaatatcaggctagatgcatatccgatgtgaaggcagggacagatcacactagcttcctcgctggcactctcagcctcaaagaagaaaatgaggtacatctgattcggctttcgtcgagtggaaccgaactcttctgcgagggattgttctctcatcccaacgagatctgggaccttgtttcttgcccctttgatcaacggatcttttcaaccgtctactctaacggtgaaacgtatggggcagcaatatggcaaatccccgagctatatggcgaggttttttaaaaattcacctcagctagagagaattacctncctcgacactgattctggcaagattaaatgtattctatg

SEQ ID NO: 42417 - DNA, 278 bp, Glycine max
  Clone ID: LIB3093-035-Q1-K1-D6
acgaataaattggtccttgtctcttgaattgagcatttgctgcgaaattttgaagattcaagtgttcaactttccagaagagtactgtgcttacatttatatatagcacctgaaattggctatggagttcttatactggctgtttgattggtatttgaaattctggattttggattgagttctgctcagtcttgataaggataaagtggtgtttgagagtcacggcattattcataagtagcgcgcatggatccacattccagataccgcaaacctgg

SEQ ID NO: 42418 - DNA, 353 bp, Glycine max
  Clone ID: LIB3093-035-Q1-K1-D7
tcgcccacgcgtccgcaatttaccagctatacttgttccttttgaaggttagaagtgctacaggacaaacaatggcagctactcaggaagatgtgaagcttttgggtattgtgggaagcccatttgtgtgcagggtccagattgcccttaagttgaagggaggtgaatacaaatttttggaagaaaatttgggcaacaagagtgatttgcttctcaaatacaaccctgttcacaagaaggttccagtgtttgttcacaatgagaagcccatagcagagttctttgtgattgttgaatacatttgggaaattttagacatggaagaacaaccccatcttaccttctgatcctta

SEQ ID NO: 42419 - DNA, 249 bp, Glycine max
  Clone ID: LIB3093-035-Q1-K1-D8
cccacgcgtccgcatttcaccagccatgctagctagttaagaaacttacatgggctacgcgtcaaacacttgctgaaacgcgctaagatgtgatcctttcgcgcactacggtaagcctacttgagctcaacgagcaaactgcacgcctcatgagagaagttgaatacagaagtggggaacaacaaagggacagcatgagcgaaatgctactcaaattcaacgctgtgcacaagatgggcacagcgtata

SEQ ID NO: 42420 - DNA, 362 bp, Glycine max
  Clone ID: LIB3093-033-Q1-K1-D10
gctgaatcctagctttatcttcccttcccttcaaaataatatctctgttccaaacaagtcgggcaacacactgcttctatctcaaacgcacatcgagaaatgagtttgagtaatgggaaaaccgaggcaccattgccaattagtaatggggatgagaagaagccgttcaagatcttcgtagggtatgaccctcgtgaagatcttgcctacgaggtatgtcggcactccatcttgaaaaggtcttcaatccctgacgagatcataccaattaaacagtcagatctgaggaaaagtggctagtattggcgtgagaggggccagtttgagagcactgagttctgcttttcaagattctcgacacc

SEQ ID NO: 42421 - DNA, 408 bp, Glycine max
  Clone ID: LIB3093-031-Q1-K1-D8
aacaaaacctacgaggaagaagaaagcacggttctattttcccattcccaaacacgggcagggttgttacccttcaacgagaacgacccgcaggacatggtcatataccaagtcctcaacgaagccaatgctctcaccaacacatttctccctcagaggcttcaccaacctcagttgtgcctcgagcccaccagaaacataacaaagaagcactacagaggagttcggcgccgcccctggggaaaatacgccgctgagattcgcgactctgcccgccacggcgccagaatatggttaggcaccttcaacgtgaaagtgcatggtataccaccggtaaatgaggtcaggttgtaattcactaatgtgtgacgatatttcaatataagacatacatctgtttatcatgtg

SEQ ID NO: 42422 - DNA, 401 bp, Glycine max
  Clone ID: LIB3093-031-Q1-K1-D9
cccacgcgtccggtactttggactcatgggtgatggccaacctattggacgatacgatgatatgtgggctggatggtgtgttaaggttatatgtgaccatttgggcttgggagtgaagactggccttccatacatctggcacagcaaagcaagcaacccttttgtcaatctcaaaaaggagtacaagggcatcttctggcaagaagaaatcattccattcttccaaagtgccactctttcaaaagagtgcacgtctgtccaaaaatgttacattgaactctccaagcaagtcaaagagaagcttggtgtgtcctattatagtacaatgcaggactgatgactggatactacaacacacattaaaagtctcaagcaacaagtgtgtgtgcagtgacttatgt

SEQ ID NO: 42423 - DNA, 305 bp, Glycine max
  unsure (1)..(305): unsure at all n locations
  Clone ID: LIB3093-031-Q1-K1-E1
ccacgcgtgcgaagatatctcgggatgttgtcttcaatgaatacatgttggttgatgctaataaaaccaacgacccgtcagaactttcagccagaaggtttntacttaaatacttaagagcataaaggatttggagatcctttttctaacaatggaggtcttacacaggatatcttgtatggacttggagaacttgatttgtggttgctacccctgcgtatatctgatgaccacagtttataggagttcatgtatttgcaaggaaatcatcctaatgactattacaaaaatgcattgaaatattt

SEQ ID NO: 42424 - DNA, 320 bp, Glycine max
  Clone ID: LIB3093-031-Q1-K1-E10
tgtaaatcagcttcttactaagatagatggtgtggagtcactaaataatgttttaggtattggaatgactaacagaaaggacatgcttgatgaagctctcttaagaccagggaggttggaagtccaggttgagataagccttcctgatgaaaatggtcgattgcaaattcttcaaattcatactaacaaaatgaaagagaattcttttctagctgctgatgtgaaccttcaagagcttgctgctcgaacgaaaaactacagtggtgcagaacttgaaggtgttgtgaaaagtgctgtctcatagttaataacatgattaa

SEQ ID NO: 42425 - DNA, 380 bp, Glycine max
  unsure (1)..(380): unsure at all n locations
  Clone ID: LIB3093-031-Q1-K1-E11
aaaaaaaccgccccgccaacacttctccttttccacatataacaacacattctacaacaaaacgacttactacaaaaaatcgtctaatctttaaaaaaccgtcctcatccccaanttcttnccatacaaaccttaatcctaattccaactcatttttcaaataatcaattattaccctttcattcccatttacaccaaataccccatcttttttttccctccttccactttataccccacaaaacccttcctcccacctttcatccactacccctttctcaaatccaactttgattcacttaaccttatccaaaacccacatcantntnttatccaccaattccccactttaccacaaccttatttaaataacttcttac

SEQ ID NO: 42426 - DNA, 302 bp, Glycine max
  Clone ID: LIB3093-031-Q1-K1-E12
gacccacgcgtgcgcccacgcctccgcgtttttgagtaagctcaaactaagaaatgaacttgcagatccgggtgcgcaatctaagagcatggccatccaaaaagattaagatcaatatgcaaaatatacaatcacatttgtggagaaaatgtacaaaccacaagctttttgtggagccagatctaggaatacctctacatcttcttgatctcacacattacaaacctcaccaaatcataccacctattgctcgacaatataaagaattgatgcgagacgatgaagctcttactcctattcaa

SEQ ID NO: 42427 - DNA, 292 bp, Glycine max
  unsure (1)..(292): unsure at all n locations
  Clone ID: LIB3093-031-Q1-K1-E2
cccacgcgtncgctttagagagatagagagatagagagagagagaaagaaatttagaaaagatggcagcctgcactgtctactcaacacaatctctgagcacaaattgcttcatctaaccccatcaaagacacaactgagtttctttcaccaaaagcaagtaggttttttgaggaacaacaacaggggccacagcagcagcagaagaagctatgtgataacatgtgcagcaggtgactcacagacagtggtgattggtcttgctgcaaactcacggtgtgggaagagcacct

SEQ ID NO: 42428 - DNA, 386 bp, Glycine max
  Clone ID: LIB3093-031-Q1-K1-E3
ctgctttcatcatatgaggttgaaccagagagagaatataactatcaacgcggatagataggcgccatgcacgagagcagttgaagagtgctaatgggatggaggcagaaaatggcttcattttccaccaattggatgcagtcagggtgctattattttcgattatgtgataaagatactgatggtcatgtcaaggcaacaacaaactgaagacgctcgagtcacagctaatttttattctgctctagattttactgctgttgctcgtcatcttagctatgcaaatcatttaatttgaaaaatttattataccggttttaattattaaaaaaaatatgagatgtatactctattggagctgcaaccatatggttaaatacaaataa

SEQ ID NO: 42429 - DNA, 290 bp, Glycine max
  Clone ID: LIB3093-031-Q1-K1-E4
atggcgcttgcaaactgtttttctttgcctttgtggtaatacagtcaatgcaacagattctggtgcgtgatgaaatcaagagacggtcacaacaagtacgcaatactttcctatgctcgatgtacacattttttaaatattggaacggcttcaatatattctcaagatgtaaatgcaatcttgagaaataacaagcactttattaaaaaaattgctagatatatgagctaattatcgtgctgtaacatctgatgcatacttaacctaaaatgtttttcttattacacctg

SEQ ID NO: 42430 - DNA, 334 bp, Glycine max
  Clone ID: LIB3093-031-Q1-K1-E5
acgaaaaaggaaaagaaggacaaagatgaagaaacagacacattaaagggaaagggaaaaaatggtgatggtgaagagaagaaggaaaagaaagagaaggagaagaaaaaggaaaagaaggacaaagatgaagaaacagacacattaaaggaaaagggaaaaaatgacgaaggcgaggatgatgaagaaaataagaaaaataagaaaaaggataagaaggagaaagagaaggatcacaaaaaagaaaagaaggaggatggaaaagaagagggtgagaaagagaaaagcaaggttgaagtttctgtaagggatattaataaaaaacacaagaggg

SEQ ID NO: 42431 - DNA, 346 bp, Glycine max
  Clone ID: LIB3093-031-Q1-K1-E6
tcttgctccttttcctcgtgttgttgcagaagcgattccaaatgggcttgctagaagaaaacgcctaatcattccaagaccatcctgatccgcgaggtctgggcatccaacctcgaatccgaattccagctgattcgtcaagtcatcgatgattaccctttcatttccatggacaccgaattccccggcgtcgttttccgtccccacactgtagaccccacaaaaccctacctcccaccttccgtccactaccgctttctcaagtccaacgttgatgcacttaacctgatccagatcgggctcactctcttattcaacgaattccactcgacgcaccgtattggat

SEQ ID NO: 42432 - DNA, 397 bp, Glycine max
  Clone ID: LIB3093-031-Q1-K1-E7
agctttcgcagaaaaaggaatcaaatatgagtacatggaacaagatctcaccaacgggagtgctttgcttcaagaaatgaacccaattcacaagaagattccagttctcatacatcatggaagacctatctgtgagtccctcataattgttgagtatattgatatggtttgggacaacaattgtcctttgcttccctctgatccctaccacaaagctcaagccaggttctgggctgattttgtagatcagaaagtgtatcatgcttctaagagagtttggatttcaaagggagaagagaaagaaggcaaaagcttctaaagctaacaatggagattttgaacacctatttggggaccattggtagtgagtgcttatactctatgtgttatactataa

SEQ ID NO: 42433 - DNA, 251 bp, Glycine max
  Clone ID: LIB3093-031-Q1-K1-E8
accactcgtccacccacacatccattattatttcatatatcacaatcccacctgctgccgtgtttaatattaatgaatgcccactacacacaaaacaccattccttataatactctcttccaacaacccaatcattctcacacccattcatctatcatatcttaatcttttccatcacacaatcaacacctcttacatttattctttaactcatacttcttaccctttttctcttaattaatctaaataat

SEQ ID NO: 42434 - DNA, 330 bp, Glycine max
  Clone ID: LIB3093-031-Q1-K1-E9
cccacgcgtccgcccacgcgtccggtgatgaaggtggcgttggagatgacctcggggattgggctgagttcagaaggcgcgttggaaagaagtgctccgaaactgattccactgccttttatgagttccaagaccgacgaggaaaggcaggggatcctctctatgttctgttatgctgttggctagcagccattggtgcaggtcttctcaaaaccgaggatattctggaaggggtggctcggctccggatctccaatgacattgaatttgaggagcagagtttcatggctttgatgaatgagtaaggaaacgcaagcaacctatctctgt

SEQ ID NO: 42435 - DNA, 343 bp, Glycine max
  unsure (1)..(343): unsure at all n locations
  Clone ID: LIB3093-031-Q1-K1-F1
acgcccacgcgtncgtcatcatccatttgaatgaattgctgtggagacacgtctttctcaagctgtggatgattggatttagtctctgtgtaatttttatcatgtttgcttattgtacaaacgacagaataacgacttcgaagtagttgatgaagggcttctgataatttggggaaatcagatgtgatttttaagatagttggatcagattattgtggtttcattacacgtctcatttgattgatataaaggttatgtcatgctaagcgagatgtatatggcagcactgcagctagatggatttgccgaaaactaggcattgaattcagcttttggtatttac

SEQ ID NO: 42436 - DNA, 337 bp, Glycine max
  Clone ID: LIB3093-031-Q1-K1-F10
cccacgcgtccgagaaacacgacttcaaaagttcagggacttgagaatgcaacaaaagacggggagactcaatagttttccaaaaagagatgccgctatattgaagagacatttagctcatttggaaacatatcttggcggcattaaatatatgacggggttacctgatattgtaataatcgtcgatcaacaagaagaatatacggctcttcgagaatgtataactttggaaattccaacaatttgtttaatcgatacaaattgtgacccggacctcgccgatatttcaattcaagctaatgatacttacctaatcataatctacaatatattgatt

SEQ ID NO: 42437 - DNA, 359 bp, Glycine max
  Clone ID: LIB3093-031-Q1-K1-F11
acgcaaataaccaaaggattgaaccttctaagagcaccatggaccctgacgtcatcggcgttcggtctccaattcacgaccctccaagattccgcgagcagaacaaggtcattttgcatgatgtgattgacattgatgaccactctgaggatgtagtgataattggtgaaaaagttaataatagtaacaaagggaagacaattgacgccgttcatgatgatcatcaagttgtgaaaacggctgattatacttactctctgcctggtgtggaaaattttggatcagttagtgagattgtctcgttctaaatttcttatgtcaatatatacacaatatgcatggttattatattacatata

SEQ ID NO: 42438 - DNA, 364 bp, Glycine max
  unsure (1)..(364): unsure at all n locations
  Clone ID: LIB3093-031-Q1-K1-F3
acgcccacgcgtncgnccacgcgtncgaggaaaacgagtcaattcatcatttgctctctgctctgcttgtgcaaattttaggagcggagaatccagagaaagagagatgtctggtatcgcccgtggacgtcttgccgaggagcgaaagtcatggcgcaaaaaccaccctcatggtttcgttgccaagcccgagactctccctgatgccaccgttaatttgatggtctggcattgcactattcctggcaaggctgggactgattgggagggtggatatttcccactgacaatgcacttcagtgaagattacctacagctccaggcnatcctaggttttaccatggatcttaactgtgtgttctat

SEQ ID NO: 42439 - DNA, 298 bp, Glycine max
  Clone ID: LIB3093-031-Q1-K1-F5
gagaggccacgtgagtgccggccatggccgcatcgggaagcaccggaagcaccctggagggcgcggtgtatgcctgaagcatgcaccaccaccggatcctctttgacaagtaccaccctgggttcttcggcaaggtcggaatgcgctattttcacaagctccgcaacaaattctactctccgatcctcaacatcgacaagctctggtccctggttccgcaagaagtgaaggacaaggcctccaaggagaacaaggcgccgctgatcgacgtcacgcagttcgggtactttaatgttct

SEQ ID NO: 42440 - DNA, 407 bp, Glycine max
  Clone ID: LIB3093-031-Q1-K1-F6
gcgagcaacctttgcttctctcattaattaattcacaaactaacttagcttccaaattcatatggagagggtgacaaagatggtatcagagaggccagtggtgatattcagcaagagctcgtgctgcatgagccacaccataaagaccctcttgtgtgactttggggtgaatccagcggttcatgagctggatgagatcccaagaggcagagacattgagcaagctctttcaaggcttggttgttctccatctgttcctgctgtcttcatttctggtgagcttgttggtggagccaatgaaaagcatgagcctacttatgtcttatcaagctaaagagagcttggtaatgaaatattatgactctcaatatacactattgacacaactttgggtttatatatatctg

SEQ ID NO: 42441 - DNA, 66 bp, Glycine max
  Clone ID: LIB3093-031-Q1-K1-F7
aaaaaaaaaaaaaaaaaaaaaaaaaaaaaaaaaaaaaaaaaaaaaaaaaaaaaaagggggaggggt

SEQ ID NO: 42442 - DNA, 411 bp, Glycine max
  Clone ID: LIB3093-031-Q1-K1-F8
cccacgcgtccgcgctcactgccgaagatcattgttggcctcgcttctctctctctgcgatgcattcatttcttcgttcttctccaccatttaatacatattattatactacaaaaacataacctccagaacacatttatatattcccttgttgcatatatactttgttgttgttgttgttgttgttcttcttgtaaatggcgaatgcatctgggttcttcagcccttcggttccccacttcaaagtgagggttaagcctctcaccactgccattggattctccgccaaagtcatttgcgttgaactcaagactgaaaatcttcacgttccttttcaattcaaacagctgcacaaggtcagtattgattgcttgtggccacttaatttatacacttcaaatgtgtctatat

SEQ ID NO: 42443 - DNA, 412 bp, Glycine max
  Clone ID: LIB3093-031-Q1-K1-F9
accaacttccgctacttcctactccaaccactttcttttttcccgcagacatggggggggggaagatcggaatcaacggatttggaagaattggccgtttggtggccagggtggctctgcagagagacgatgttgaactcgttgccgttaacgatcctttcattaccaccgattacatgacatacatgtttaaatacgacagtgttcacgggcactggaagcatcacgatgtcaccgttaaggatgagaagacccttctcttcggtgacaagccagtcactgtttttggacacatgaaccctgaagatcatgagtgatgactacatatgtgatcacgagttaccgtaggatagtgcgacattaaggggcaagacgtatatttgcccagaggtgccctttgtgtgggtacaca

SEQ ID NO: 42444 - DNA, 400 bp, Glycine max
  Clone ID: LIB3093-031-Q1-K1-G1
ggtgtgaagatggacactactgactgggaagtcctttcttatgatggcctttctgattttggggactatgacttgtgcacctcaccaaaattcaagaaagcctctgaagcatcaaggaattttcatccaagggtgcctaaacagattcttcatattccaattcaattggaaccgagaattgggaaggccccagatgaagggtcaatggaagaaaacactaaggatcatcatcgtgttgaggtccctcttgttccatcatcaccaactaccattgagaatatcaaaggagggattttggaggctgattataactgtgacacttttcaacaagaatgattcaagcatgtaagatgtgtcctgttgggttgaatgagacaaggtgaagccagaaatatgcttc

SEQ ID NO: 42445 - DNA, 302 bp, Glycine max
  Clone ID: LIB3093-031-Q1-K1-G11
atttttccatagcataagctaacaaaataagaaaaatgaagttgaggtcttcaatcgcattgatttgcattctggcgagtgcgagtgtgacaatttcagaatcattaagccaacaagagcaattgtcagcatatgaagttcttgagaaatacgatctcccagtggggcttcttccaaaaggtgccacagggtatgagctaaacgaaaaaaacgggcacttcacagcgtatttgaatggaacatgctacttcagcatagagtcgtatgagctaaagtacaagtccacaatcaagggatggatc

SEQ ID NO: 42446 - DNA, 276 bp, Glycine max
  Clone ID: LIB3093-031-Q1-K1-G12
cacaaaatcaagcacacaagcaaattcacttctctgttctgacacacatattaaggtcccgggaaagatctagagagtgattaacatggttactttgttcacaaatgcaaggccgtatctgctgttagtggcagttcaatttgggtctgctggcatgttcatatttgcgatggatgctataaagaagggtatgagccattacgtgttcatcgtctatcgtaatgccatcgcctctgtatctcttgctcccttcgcatttgttcttgaaaggaaagt

SEQ ID NO: 42447 - DNA, 325 bp, Glycine max
  unsure (1)..(325): unsure at all n locations
  Clone ID: LIB3093-031-Q1-K1-G3
acgcgtntcgccacgcgtncgaataatcaaaacaaacacaaccaaacccaaagcccggtcgatttggatccgatgggtgatatactgaaacaaatattggcgaagccgatccagctggcggaccaagtaaccaaagccgccgacgaagccagctccttcaagcaggaatgcggcgagctgaaggcgaagacggagaaactggcggcgctgctgcgtcaggcggctcgtgcgagttccgatctctacgagcgtcccacgcgccgcatcatcgacgaaacagaacacgttctcgaaaaggccctcctggcctaatgcgggaccctat

SEQ ID NO: 42448 - DNA, 312 bp, Glycine max
  Clone ID: LIB3093-031-Q1-K1-G4
acgatttaactccattttactttcgtcattttaaaccactgcttcaaatctatttaactctttcgctctgtaatccgcgtctgtttgcgtttcacggcccacattgctgcgttctctggagtctttggcctttcaaggaaaaaatggcagagacaaaaccagacacaccgttgatgccaccatcatcgcggaaccttccagatttcaagaagtccgtgaaattgaaatatgtgaagcttggttatcattacctcataacacatggcatgtacctctttctttcccctctggtggtgctcattgctgcacaag

SEQ ID NO: 42449 - DNA, 248 bp, Glycine max
  Clone ID: LIB3093-031-Q1-K1-G5
acgatttttccataccataatctaacaaaatatgaaaaatgaaattgaggtcttcaatggcattggtttgcattctggcgagtgcgactgtgacaatttcataatcatttaaccaacatgatctattgacagcatatgaagttcttgagaaatacgatctcccagtggggcttcttccaaaaggtgccacagggtatgaactaaacgaataaaactggcacttcacaatggatttgaatggaacatgc

SEQ ID NO: 42450 - DNA, 311 bp, Glycine max
  Clone ID: LIB3093-031-Q1-K1-G7
cccacgcgtccgatcttcttctatgggttggcttagtcggttcataactgccgtggctttgtgtagccatcggagtgatattctcaccggagacactggggtcaaaatcaaccacactttccacctacctcaaactcgctcacctcctctgcttctccaccgccttcggcgccgctctgtgggtaacattcatcggcggcatcatcatgtttaaaaatctgccgcggcatcagtttgggaacctgcaaagcaagatgtttccggcgtatttctcgatggtgggtgtctgctgcaccgtatcggtgttcttg

SEQ ID NO: 42451 - DNA, 403 bp, Glycine max
  unsure (1)..(403): unsure at all n locations
  Clone ID: LIB3093-031-Q1-K1-H1
gcgtaacgggggaagaatgatggttactttcaagaatccgaatgagggacccaaacgaatgtgggattgaanaagggtgtaacgtgctggtttgcgcgtgcaccaaaaancctcgtcatgagaggtgaactgatatnggatngactgacgctgctcgtttcaattctgaatgcannaatatattatnntaccttaccaattattattctgtatcgggtgattgtgaattgaaaaaatctagaactatngatgttgccctgttagtctgaacactctcttgttttaaaggggaacacattctaaattattgattaccgatggttcaaaagatgttaaagcttttcgttgtgttatctggtaacaaaaagagatactgcttagtctatcaaaaaaaaaagaaaaa

SEQ ID NO: 42452 - DNA, 408 bp, Glycine max
  Clone ID: LIB3093-031-Q1-K1-H10
catgtgtcgtggaacttttgtggttgcaaccactgttggagtggtggaggcgttgaaggatgaagggtattgcaaaatgaacagcacaatgatgaagttggtggctcaacatgccaagaaccacatagggtcagtaactgaggccaagaagctggcttctccttctccttctccttctacttcttcttcttcagtaacttcaaataacctgagagatgatgagaagagaaggatggcagaggagtctctcagaacagttatgtatttgagcacatggggtcctaattcttagatgtagaaaacattataaatataatttacatattacaggacaaaattgatgcgacagtagcataatttaaatgaaggtatacattacacttgtcatatgcacgttatctatatgtg

SEQ ID NO: 42453 - DNA, 399 bp, Glycine max
  Clone ID: LIB3093-031-Q1-K1-H11
ggtgtggtggtggttgtcgatttttaaatggcagcgtcgtcatcagaaaaacaacgtgtggtgatatgcataggcgacagcaagcaaaacacgtacgcgttgaattgggctctggataactttttcccgagcccaattttcaagctcgttctcatccactccaggcccaccgccacctccgctgtgggcttcgccggccctggtaggttcattctgttacgctcttccttttcacgctttcttcgttaattgagaatccctttcttagtgtttgcaggaaccgctgatgtctaaactattgtaatccattgaaaaatgcccaatctcaaacgtacaattgatacaatcgaattgtttctctcttctccttcgtattttatctttttgatttgtttactt

SEQ ID NO: 42454 - DNA, 398 bp, Glycine max
  Clone ID: LIB3093-031-Q1-K1-H2
gcgcaagaacaaagaactaaagcacctgggatttgtgaggattgctgctattcaaacttttgtgagtgtgtcaaatctgtatgagtacgcaaagcagaattctgggcctttgagatccgctgttggaacggttgagaacactgtaaccaccgttcttggtcctgtctgcaacaaattcaaggacttccctgatgatgtcctggtttatgttgacaaaaaggtggatgaagcttcccacaagttcgatgagcatgctccttcctttgccaagcaccttgcggatcaagccaagggtgtgattcagaaagtgatggagcaggagtgcagaactattgggggaaactgtgtatttgtgtcaatcaacattggtgtaatcggagtggatgataccattacat

SEQ ID NO: 42455 - DNA, 402 bp, Glycine max
  Clone ID: LIB3093-031-Q1-K1-H3
gaccacgcgtgcgatttctgtgccaacaaaagaagatggcctcacaggtttgcaaagctgcttccagagccgcgaggtccgttctctccgcttccagagcctcccatggacgtgcggttggggctgctacggctgtttcattgagctgcaaagtgcctcttttctacggaaagaacggttctggaagtggttccgcttcatcatcatcatcatcatggatttcaggagcacttgctcttcctgccgcagcttacatgttccaagatcaggaggtgcgcgcagctgagctggagcgcactttcattgccattaagcctgatgatgaaagggtgatttaatatattgttgacgaagggcaagctggggtaaagatgatcttaagaattgcaacactatacactg

SEQ ID NO: 42456 - DNA, 406 bp, Glycine max
  unsure (1)..(406): unsure at all n locations
  Clone ID: LIB3093-031-Q1-K1-H4
gcgcccacgcgtccgcccacgcgtncgaaccattgtggcctcactaagggatgaagcatataagcggcctcaagcacattcaagtcttcaaggttcaagcacaaaaatggtaaccattgtgggttcttacaatgtcactcctaatcaaccaactccaaaggatccttcatggctatccgatagtgaccaaatcggtgtcctaggtcatgtagccattgtctacatatacgaagcaaatcccaacagcaacaccattgagagattgaggaactctcttagcaagcttttggtgtactactatcaattcgctggaattactgcaaagggtgataatggtgaccaagaggcttatgactaactaaccatgtatatgaacttactcagtgacagactgtcaaatgtatct

SEQ ID NO: 42457 - DNA, 305 bp, Glycine max
  unsure (1)..(305): unsure at all n locations
  Clone ID: LIB3093-031-Q1-K1-H5
cgcgtacgctagaattctcagatttgcggngcgagatgatgcagcagccaggacccggcatggcacctggcaccgtgggccagcaggcgcaggaacagtaccagcagcagcctccgccgcagcagcaacaaccctacgtcatgatgccgccgcagcatcaggcgccgcagcctatgtgggccccatccgcccagcctccgctgccgcagcagcctgctagcgccgacgaggtccgaaccctctggatcggggatctgcagtactggatggacgagaactatctctacacctgctttgctcatacc

SEQ ID NO: 42458 - DNA, 239 bp, Glycine max
  unsure (1)..(239): unsure at all n locations
  Clone ID: LIB3093-031-Q1-K1-H6
cccacgcgtccggaacatgtcattttagtatttgccaacgtatatttaacattaattaatgaattatgagtaatttgatgtcaaacaaaaaaaaaaaaaaaaaaaaaaaaaaaaaaangncggcgcccaaaaaaaaaaaaaaaaaaaaaacaggcgcgcgccaacaaaagaaccgggccggcggtccaaaaaaatccaaatttactgccccgggtatgaaaccacaaaactttagaaaa

SEQ ID NO: 42459 - DNA, 392 bp, Glycine max
  unsure (1)..(392): unsure at all n locations
  Clone ID: LIB3093-031-Q1-K1-H7
gggcggccgacgcgtccgaaaaacaccaaattacatagaatttttaggcgtaaccaaagtacgtaccaaaccgtggcatggacaaatcaatggagaaaccttcttgcagctctagaggctgaggaagcagcccaaaaatccaaaggtaaagtgaacacatacaccaaccatggcgatgggtttcagaacatcactggcactaagaccaacagtggtgcatattctggtgatggtaacactcatcacgccaccaacaactacggtggtgggcctgctataaataatagtggcaatttccagggacatggcaattgaggctnaatgggtattcatgctaacagaatactataattatgatacaactatgataatatggtttggctctatctaat

SEQ ID NO: 42460 - DNA, 373 bp, Glycine max
  unsure (1)..(373): unsure at all n locations
  Clone ID: LIB3093-031-Q1-K1-H8
taatttctcaacttctctgtcccttgttttttttccccctcatcttaattaattctgattcgtaagaggaactgaaactccttcaatctcttttttttcttttttctcggacaccatgattttcgatcaagggtcaatgcaatctaagtccaaccttgactgcttcctccggcgtacgacacctgttgtgccgtctcagtttcttcccaagcacgagattcgaaaccttaaccgtttgtggcacccgtgggagagagaagcggttgagtacttcactttgggtgatctatgggatcggntcccatgatctatgactgattcatacttgcaatggaacatgtagacttttctacctttcattaatttacacaca

SEQ ID NO: 42461 - DNA, 371 bp, Glycine max
  Clone ID: LIB3093-032-Q1-K1-A1
gttaacactttccaatacaataatcactaactgaatattcgatcggagatgtctgccgccggcgaagaagctaacgctcccgccgtcgaaaagccggttgaggaggtgaaggcgccgaaccccgcgaaggagaagaaacctaaggctccgaaggaaaagaagccaaaacaggccaaaacagcttcacatcctccatattttcagatgattaaggaggctttgatcgctttgaacgagaaaggaggatcgagtccttatgcgatagcgaagtacatggaggagaagcacaaggcggtgctccctgcgaatttcaagaagattctaggtctgcaactaaagaaccaagctgcgagagggaaactcgtgaagat

SEQ ID NO: 42462 - DNA, 458 bp, Glycine max
  Clone ID: LIB3093-032-Q1-K1-A10
atgcattcttctatcttcattccttccgtattactctttctctgctaaatcatttaaatttgctggctttctctaattaattccctttgttatcaaaatggctgtggctatggctgcttgcagtcttggacttcacttgagtgctgacaacaccttgagaccttttgaaaaaaccactatcttgaaggccctctctatctctgatgctactaaaccatgttacatttctcacaaaacaagattatcatcttcatcttcaggaataacaatgatcccacgagcaacaacagttattggtactgtggaggatggaaatcaaggagaggctgataccattccaactccggtagttattattgatcaagactctgatccagatgcaactgtggtcgagataaccttttgtgatcgccttggggctctttttgacactatgaatgcgttaaaaaacttggggc

SEQ ID NO: 42463 - DNA, 455 bp, Glycine max
  Clone ID: LIB3093-032-Q1-K1-A12
gggatgaggatgataatggggagactggggatgatgagatgggggtcgaagatgatggggagtttgaagatgacgatgaagaagaagactatggtgctgggtatcttgttcagccagttggacagtctgatgctctcaatgctggaggagctgatgtggatggtggaaatgatgacgatggtgaagaggaggatgaagttgatgacgacgacgatgatcaggtgttgcctcctgctgactcttcccacaagatgaagagggatgatgaagaggacgtggactacgatgacgatgtggtagcattcacgaagtcacccaagaagcatcattgacttctattatatatatcaatgttcttgttctgtttcaagcttccatgtgttggaagcagggaaacctcagttttagatagaataacgattgattaagttttaggaatttagctctctcatgaa

SEQ ID NO: 42464 - DNA, 167 bp, Glycine max
  Clone ID: LIB3093-032-Q1-K1-A2
ctgacgcgtgcgccgtacccgtctgcaatgcctggttattcggtcggacctgtcgcgcgacggcgaggaagataacgataacaagatcgagacgacggtcgagccggcgaacgcgccgcaccacctgcggcagcagaagcggacggatgcggcggcgcaggtgccga

SEQ ID NO: 42465 - DNA, 443 bp, Glycine max
  Clone ID: LIB3093-032-Q1-K1-A3
acgcgtacgcccacgcgtccgctttctccaagttgatgacgttactttactggttgaccgtcagaatgatatgcgcttgggcattgacgatatgtcttatgaggagcttcttgcattaggggagcggattggcaaagtaaacacacgtttgtcagaggaaatgattacaagtcaaatgaagacaaaatcttatttattactagctactaatgctattaacttggatgaggcagcttccgaggaacaggaaactgattcttgcataatatgccaggatgaatataaaaaccgagaaaaaattggtattcttcaatgcgggcacgaatatcacgcagactgttcaaagaaatggttacttgtgaaaaatgtgtgccccgtatgcaaatcagaagcattgactcctggagagaagtgtgtataaaatctgaggattacatgtctct

SEQ ID NO: 42466 - DNA, 455 bp, Glycine max
  Clone ID: LIB3093-032-Q1-K1-A5
cggcccagtgctcatcgaggcttaaaccctttcggcggcagcgaaaaaagtctccccgggcccagacccaaacaatgaggaagaaaaaacaagggttcagaagacccgttgtcataaaaaagccgaagcaaccgcaagagcaacccagcgttgatcctattacgggaaagaaaatccccaaaagtttcgtgttttcgcgaggcaagttgccggctcctctcaaacagcttcagatggacctcagaaagttgatgcttccatacactgctctcagccttagggaaaagaaacggaataatctgagggactttctgaatgttgctggacctatgggtgtcacgcatttcttcatattgtcaaaaactgctacttcatcttacttgaaggttgcaactacccctcaagggcccactcttacgtttaagatacatgaatactcattggccgctgacatt

SEQ ID NO: 42467 - DNA, 452 bp, Glycine max
  Clone ID: LIB3093-032-Q1-K1-A6
cccacgcgttcggggtagcggaaatgacaattctttgaattctgatggaaatgctgctgatggaggggcaaaattagagaatgctgcattgtcatggtcaaagggcatctataaggacacacgcacgggtggggctacagaaaaatccgatcagaatccaaatgctgataaatttcctacattaaggagaagaaaacatctgtttgtcattgctgtggattgtgataccaattgaagccttcttgaaactattaaagccatctttgagactgctgaaaaggatagggcagatagcattgtaggtttcatataggcaacatcattaacaatatcagagatacagtcattactaatctcaagtggctcgagacccatcgatgatgatgcttatatttgcaatagtggcagtgatctatactatacatacgtcaattccggagatcgtccatttg

SEQ ID NO: 42468 - DNA, 251 bp, Glycine max
  Clone ID: LIB3093-032-Q1-K1-A7
tccatcggcagttagagacagagagagagagaaacaaaaccctaattggtgagcggcgaaaggggcgcaaccggcggcggctgcagcagcaacaggagcagcagtaatcgatcaagtgcagcgcttcgggcggaagacgacagcggtggcagtgacctactgcacgcgtggtctatgcctcatcaagatcaatggctgtccgatcgagctggtggagcctgagattctccgtttcaaggccttcgagccaa

SEQ ID NO: 42469 - DNA, 451 bp, Glycine max
  Clone ID: LIB3093-032-Q1-K1-A8
agaagaaacagaattgaattgaattgcgtttgcgccattgaaaatcggaagtaatggaattgcattgctccgtgaaaaaattggaaaacgagaaagcgcttgagtttctcggaggcgttcctcttctgcagaggcttccgagctcgtctctgaggaagatagctcaacttgtggatgtcaaacactgtgagccacgagagtatgttgctcgcgagggtgaacctggagatggcgtgtacttcatattggatggagaggctgaggttcttggatctgctagggccaatgatgaacatcgaccagagttccaattgaaacaatatgactactttggttatggtttgtcaaacacagttcaccaggcagatgttgttgctttgtctaagctcacatgcttagtgcttccccatgtgcactcaacactgctgcagccaaagtctatctggagagc

SEQ ID NO: 42470 - DNA, 466 bp, Glycine max
  Clone ID: LIB3093-032-Q1-K1-A9
ctgaaggccgcggcagccgcggccaccgcgccacccaagaaggaccaggccaagcccggagcgcgcagcggcgcgccggcccagttgccgtcgaagccgcttcctccctctcaggctgtaagggaggctaaaaatgaaacttcttacggcggtcgtggtggtggccgaggaggtggaagaggatttggacgcggccgtggtggcggcggtggctttggccgtgatttttccaatgatgataactcatcggcccctgctaaccaaggatcttttgaaggagattctgggaatccctcagaaagacgcggttatggtggaccccgtgggccctaccgtggtggcggcagtggacgtggtcgtcgtggaggttttagcaatggtgaaactggtgatgaaggacgtccaagaagagcatttgaacgccacagtgggactggacgaggaaatgaatcaaacgggaagggtc

SEQ ID NO: 42471 - DNA, 481 bp, Glycine max
  Clone ID: LIB3093-032-Q1-K1-B1
cggacttgaagggtccgacccgcgcgtccgcttccacttccaattttcaataattcacgactccttccgagatctctctctctcgcccacaggccagccatggcgaatacggggaatttagacgcggcgatagagcaattgctgaacgtggagaagcagatgaggctcgccggtgacgtggcgggtaccagaaaagcagccaccgatattttgcagctctgcttcgatgcacgagcctggaaaacactcaatgaccagattgtcgttttgtcaaaacgacgtggccagctcaagcaggctgtaacagctatggtgcaacaggctatgcaatatattgacgagacaccagatatcgaaactcgcatagaactcatcaaaacgttgaacagtgtgtctgcagggaagatatacgtggaaattgagagagctcgattgatcaaaaaacttgcaaagattaaggaagaacaagggcttatagctg

SEQ ID NO: 42472 - DNA, 377 bp, Glycine max
  Clone ID: LIB3093-032-Q1-K1-B10
cgtccacgcatccggtctgcatttgcaacagggttccattttcgccgagctattgatgctgaaggaaggccttttactgatgtgtgacgcaacttctttgctggttacttcctgcccaacttgtcacagcctgtagccacagctgcccccagagacagagttattatcctatgagatggaaaccccaaagctgtttttaacaaggaagaggatattggaacttatacaatcaattctgtggatgatccaagaaccttgaacataattctctacattacaccaccagctaataccttgtcgtttaatgagcttgttactctcttggagggaaagattggtaaaactcttgaaagaatctatgttccagaaaaacaact

SEQ ID NO: 42473 - DNA, 483 bp, Glycine max
  Clone ID: LIB3093-032-Q1-K1-B11
agagctatgacgtccgatgcgcgcgtccctttcgcctgaggctaccgtatcactgtcagtgtatactgacatccgagatacacctgatcgaggaagcggctacaacgctacatcgctcatatcaatccatgggtacttactggcatatctctgtcagcggagtctccgaatatgacatacaactacgacctacttcaagttgcgcttccagcccctgatgtatctctaactaatgtcacgagtcgatcacttagaccactacttgtacgaatcactctatgatgatattcagcattctatcaagtttgacacctgaatgcaccgttacattcaataaccttgacaatatgtcgctgagcgtgaagctgcttggaaggctgatcttttttgtcccgatgcaacaattgctcgtgcagatgcaacactgcatatcgatcgtgacagtctacatgtccagaaaccagtcttaatatgaactggatc

SEQ ID NO: 42474 - DNA, 85 bp, Glycine max
  Clone ID: LIB3093-032-Q1-K1-B12
acagttggtgctacatcataattcccatcaaatttaattatcgatgggttagaatttcattaatttatgattttggtggtgctgg

SEQ ID NO: 42475 - DNA, 457 bp, Glycine max
  Clone ID: LIB3093-032-Q1-K1-B2
attgactagtatcattaagatggctaattcctacttatccttgcttgtcttgatccttgtaggtctgctcctcacccctcaagggcttgctgatgaatctgattcttactataagccaccagtttacaagaaaccaccagtgtacaagcccaagcccaagccacccattcacaagcccaagccacccgtttacaagcccaagccacccgtttacaagaaacccccttatggtaagtacccaccagttcaagacaacgatcacttctaaaccatgcaacaaggcatgttaatgttaactatctactaaaataaagaggttcagttaacctactacgtacgttgctccttttaattcctaaatcgtaatttacaactatgtacggatgagacattcttggctagctctgcacttcaatcctttatttgtacaatgctatggccaagtcaataccatgca

SEQ ID NO: 42476 - DNA, 446 bp, Glycine max
  Clone ID: LIB3093-032-Q1-K1-B3
cttacttcagctctgacctttcgaccacttgtttggataatccgacccttgaatgggttaagcagggcccaaaaaccccggggacctaatccttgcttccggctgttcctttgaagggtgctgctgatcaggttcagaagaccaacaactcgcaggatgtggtggctgcacaagatgattctgcaaaaaccctttccgaagagcttgcagacattgaatcccagctcaagttctttgagaccccttctttacttgatgaagcctgtgctgatgctacattggcgtctttgctcggcggagacgcaactcatgacgccgacggataccctatgaacctttggagcttcgacgacctgccttccatggcacgagtcttctgaacaccctctatctcccctattatgtaaataaagctacaagaattgtgatcgcgatgttggtgatgg

SEQ ID NO: 42477 - DNA, 369 bp, Glycine max
  Clone ID: LIB3093-032-Q1-K1-B5
atttggcgttcggagcgactgaactaatcattaatttgcactcgctgcttcagcttcgtcagccttcttttgcatcatttatatctcttgagaaatggcacaagaaacctttctattcacatctgaatctgtaaacgagggtcaccccgacaagctgtgcgaccagatctctgatgcagtacttgatgcgtgccttgaacaggaccctgacagcaaggttgcctgtgagacatgcaccaagaccaacatggtcatggtcttctgagacatcacatccaaggccaacgtagactatcaaaagattgtccgcgacacatgccgctaaattggattcatctctgatgatgttggtcttgatgctgacaaatg

SEQ ID NO: 42478 - DNA, 416 bp, Glycine max
  Clone ID: LIB3093-032-Q1-K1-B6
cttgggccaaagtggaggacttgacactgagggtaatgaacttccacgtttagtctatgttggtcgtgaaaagcgtccagggttccaacatcacatgaaagctggtgccatgaatgcccttgttcgagtatctgcagtccttaccaatggacctttcttattgaatcttgattgtgatcactacataaacaacagcaaggccttgagggaagctatgtgctttatgatggatcccaatcttggtaaacatgtttgctatgtccagtttccgcagaggtttgacggtattgataggaatgatcgatatgccaatccgtatacagttttctttgatataaacttgaaaggtttggatggcattcaaggtcctgtttatgtgggtactggatgcgtcttcaacaggactagcttatatg

SEQ ID NO: 42479 - DNA, 290 bp, Glycine max
  Clone ID: LIB3093-032-Q1-K1-B7
ctcacgcctacgctcaggcctggtccttgactcatacgcactccaatctaccgatccggttgccttaacaaagactgcaccgtttcaacggacgccgtcagatcttcccatgaataccatgccatcaaggtctaagggtcttactagcgcacttctcctatctacacttcactggactcactgcctagacttcagcccctctctaaaccaacgtctgcgctgtatcagcgattcctaccttctacaacatgattgctatacacataaatcgtagtagtaatactgattat

SEQ ID NO: 42480 - DNA, 453 bp, Glycine max
  Clone ID: LIB3093-032-Q1-K1-B8
gagagatcgaaatttcccattggggcaatatacagatcacagagcattacagtattatgcatgctggtgctcagagcaaaggagaattttctaggcttgactatcagaccaggcaatttttaagaggtgcatcagcctttaggcgtcttgttgccaagctaccaccaagagctcattctgtgtactacagggatgaaattggcaacatttccacttctagtttatggggtgactcaaaaaagacagaactggagattgaacctaggtaccctatgtttggtggctggaaaactgcctttaccattggatatggcttgccacttcgagacttcttatttggatcggatggaaagcgcttccttaatatctcttttggtgcccctattagtgagttggtcattgacacactctttgtgaaggttgttttgccagagggttctaaagatatttcag

SEQ ID NO: 42481 - DNA, 357 bp, Glycine max
  Clone ID: LIB3093-032-Q1-K1-B9
cccacgcgtccggtctgcatttgcaacaaaggccaaagttcgccgagctattgaggctgaaggaatgcccttcacttatgtgtcaagcaacttctttgctggttacttcctgcccaacttgtcacagcctggagccacagctgcccccagagacagagttattatcctaagagatggaaaccccaaagctgtttttaacaaggaagaagatattggaacttatacaatcaattctgtggatgatccaagaaccttgaacaaaattctctacattagaccaccagctaataccttgtcgtttaatgagcttgttactctctgggaaggaaagattggtaaaactcttgaaagaatcta

SEQ ID NO: 42482 - DNA, 455 bp, Glycine max
  Clone ID: LIB3093-032-Q1-K1-C1
cttgattcttatctctcacactgaacactcttgtagttaatcgaatttctcattccgcagaggccgtcaacgatggccgctgaaacgattccctaccagaacggcgtcgttgccagctccaacgattccaccgccacgggcaagaaatcgcgggagaacgaccgccgccgccgccgccggaagcagaagaagaacaacaaggcatctgaggccccggttcctaactcttccgaagagagtgacgatgcgaaagagaacaacgattcaaaacagcttgttgaacaaattgaaattgagtacgtaccggagaaggcagagttagttgaaggcatggatgaagagtttagaaaaatctttgagaaatttactttcactgatgccactgctttggaggatactgataagaaggatggttcagaagaaaatgcagcaactaataagaaggctaattctga

SEQ ID NO: 42483 - DNA, 459 bp, Glycine max
  Clone ID: LIB3093-032-Q1-K1-C10
catattcaccaacatctccatcttattctccatcaagcccaacatacagtcccagcagcccgtagaattctggtgtgagcccagactatagccccagttcgccccaatttagtcccagtacgggttactcaccaagtcaacctggttactcgccatcgtcgaccagccagtacactccacaaactagtgacaaggatgatagaggcactcgctgaggtaaactaacagctctgctgaagcgcaaattcatgacttaaaagtttttatcttattggatggacagcatttacgatgtaaatagtgaagaatttcttccctggagaaatgttgactgtaaaaaattcctgattctgccatctttttctcctattggttttaaattgtgaaaagaaggtctatttggccaaagttcttgtagtggccggaaactatcagatttctagaaatccctatatttta

SEQ ID NO: 42484 - DNA, 200 bp, Glycine max
  Clone ID: LIB3093-032-Q1-K1-C11
gtcgacggcgcgtccgcccacgcgtccgggaaaacttaagccattccttgaccgacagtttcgaacatgatcaagatgctcggatccatatgggcatgtcgtggtcaacgattacagacccagctgtcagtagatcggctggtgtcaccaaagctgtactattcataacacccatttctcgtggcgtgcacagtgccaac

SEQ ID NO: 42485 - DNA, 361 bp, Glycine max
  Clone ID: LIB3093-032-Q1-K1-C12
ctttgttcgagataaggttttccctatcaaagctgaattgttgaaaccacaggaggaaatggaaagacacataactgatctcattaaaaagagtttagaagatgttactggcatagaatttcgaatgtttatggattttctgaagagtttgagcctatttggagaaaaggctccggctgagcggatgaaagagcttattggaatcattgaagggcaagctgatttagatgcacagttcaatgtatcagatgcagatcatattgaccggttgatatcttgccttcacatggcacttccatttgttgtgaggggtgcatcaagcaacatatttctcaactatataaacatatatataatatct

SEQ ID NO: 42486 - DNA, 386 bp, Glycine max
  unsure (1)..(386): unsure at all n locations
  Clone ID: LIB3093-032-Q1-K1-C2
ctttgaaagggttcacgaagaagcaccaatccgctccgagttgtatgtcttgcagagctagaggatgtcaacnatgcctcgctatgatgataaatatggaaatacccgcctctatgttggacgcttgtcttcgaggactcgttcacgtgacctgaagcgtgtcttcagcagatatggaagagttcgaggcgtagatatgaagaatgatttcgcctttgttgaatctagtgatcctagagatgctgatgatgctagatacaacctgaatggacgtgatgttgcaggaagtcgtattatcgtggaatttgacaacgggggtcctcgaggcttccgggaccaggaatatatgggtcgggagacacctactggatctgggcgatgcttta

SEQ ID NO: 42487 - DNA, 462 bp, Glycine max
  unsure (1)..(462): unsure at all n locations
  Clone ID: LIB3093-032-Q1-K1-C4
agcgcggtccgctctgtgttngccggctgangattcccaacgagccaccttcttcggttctcgcaaaggttaagggagggttggtaaaggaaagactcacattaacattggcgtcattggacatgtcgactcttggaagtcaactaccactggtcatttgatctacaagcttggaagtatcgacaagcgtgtgattgaaaagttcgagaaggaggctgctgagatgaacagaggtcattcaagtatgcctaggtgcttgacaaggctcaacgctgagcgcgaaagaggaattaccatngatattgctttgtggaaagttgaaaccaccaagtactactgcacagtcatcgatgcccctcgacatcgtgactttatcaagaacatgattactgntaccttccaggctgattgtgctgtccttatcattgactccaccactggtggttttgaagctggtatttc

SEQ ID NO: 42488 - DNA, 336 bp, Glycine max
  Clone ID: LIB3093-032-Q1-K1-C5
cagcctatcatggcgtgagttggtgactacactatcaacataaatgtgtcagtgtgacaggtagaggctactggaggctagcacacgagtttagtacaagtatgacgctcgataatcttccagctatacctacactagtccttgtcatgatgggcctgactaatatccctggataacggtcaaaatcatgaatcctatgaactcagcttctgacgggtcatgcgaaatatgacttgatatctaattaaactggtcctgtatattgtaacacttaagacgtcagattatgagtcatatattcatccattgagtggttcactcagaatctcactcaga

SEQ ID NO: 42489 - DNA, 450 bp, Glycine max
  Clone ID: LIB3093-032-Q1-K1-C6
ccgatgaatgccttcctccgctggacatgtcaaagcagccacctacccaggagttggtggcgagggatctgcacgccaacgagtggcgattcaggcatatttttcggggtcaaccgcgtagacacttgctgcaaagtggttggagtgtttttgtcagctccaagagactagttgctgcggatgcgtttatatttttaaggggtgagaatggggaacttcgagttggtgttaggcgtgcaatgagacaacatggtaatgttccatcatcagttatctcaagccacagcatgcatatcggtgttattgcaactgcttggcatgccatattgactggcaccatgttcactgtgtattacaagcccaggactagtccagcaaagtttattgctccctatgatcaatacatggagtctcttaaaaacaattataccattgggatgcggttcaaaa

SEQ ID NO: 42490 - DNA, 433 bp, Glycine max
  Clone ID: LIB3093-032-Q1-K1-C7
ctcactctctctttgatcaattccacatccataacaagacatctacccagaagttgatctggggcaaactctactgcgacgaatagcggatgaggaatatgacgaagattaagaccgattatacgctcacagctagtgcaatgaaatcaaggttatatgtatagtagactagctagtcatattgcctatgtattccacatgtgtgatcattgttatcagccaagctttgagtggccatctaggatataacgaattgaccgttcatgctctcgtatcaccgctctcatatgttcgtcaatgcagttctgctacaatgatgacagagttactaacactatgtggactagcatatacaacctcagaacatggccagatcggagtatatcttcatagatcatggacagatttgctcttaactgcaattttgctattt

SEQ ID NO: 42491 - DNA, 464 bp, Glycine max
  Clone ID: LIB3093-032-Q1-K1-C8
gacgcgtccgcccacgcgtccggacgtcaaggctatatcggcaggctggggttaacccattggcaggttgtgtaccaactctggctacaattccagtctggattggtctctaccaagctttatcaaatgtggcaaatgagggactgctaaccgaaggtttcctttggatcccctctttgggtggtcctactaccattgctgctagacaaagtggagctggaatttcttggctttttccatttgtggacgggcatccacctttgggttggcaagatactgcagcatatcttgttttacctattcttcttgtcgtttctcaatacgtttcaatggaaatcatgaaaccacctcagacagatccttctcaaaagaatcaacttcttattttaaagtttcttccactcatgattggctacttctcactatctgtcccatcaggactaacaatttactggtttataaac

SEQ ID NO: 42492 - DNA, 401 bp, Glycine max
  unsure (1)..(401): unsure at all n locations
  Clone ID: LIB3093-032-Q1-K1-C9
cccacgcgtccgcgaaaactccttatggtcaccttcaaaaccagtcaaccaacgtgatgctgatctgatccatttttgggataagttccgcaaagctcctgagggttctctcaggaaaaatgcagctcagaaacaagttttggaagcaatgtctcatagaatgcatgtagacaacagtgtaaaacttattgggaagcttttatttggtattgaaaagggtccagaagtactcaacgctgttagaccggcaggatcggcacttgttgatgattggcactgccttaaaaccatggtgaggacttttgagacacattgtggatccttgtctcagtatggcatgaaacatatgaggtcctttgcaaacatctgcaatgtanggataaagaatgagcaaatggctg

SEQ ID NO: 42493 - DNA, 450 bp, Glycine max
  Clone ID: LIB3093-032-Q1-K1-D1
gatcaccaaagtacttgtgagtgtatacccaacacaaactaagatcaacatggactactacggccgcgtttcagaagttgagagggaacctatcatggagtattccacaccacgaccaatgatgggcaactaccaccaccctaatgctcaccgtgtcctcaacgagaagattgtttatgaggaggatgtgattggaggatcccgccacaaccacatgcatcaccaccaccctgagactcatgagagagtcaaggtggtggagtatgaacaagttcctgagaggcgcgttgtctatgaagagaaagttgcttatgacaacgatcgttactactctccaaggtattgaaattggacaaatggaagaacacctataacgtgttatcatgtggctttttattaggcaggctacctagtataccaaaagcaccactgtgcttgtactaaataaat

SEQ ID NO: 42494 - DNA, 259 bp, Glycine max
  Clone ID: LIB3093-032-Q1-K1-D10
gcgtccaggtgtctttctggcttctgggttttctccctttggtcggttgagctaacagtggcatgtgtcgtcatcacaattaggttcaaaaaccaccactctgtgtgtttttttccttgtgtttctctcccatgtgtctccttctttacttaaaattgacgcatcagacaagggattaacttcttctttcttagttgacatatgcacattgcttatttttgggatataggacttgcatcaacaattaacattcttaatg

SEQ ID NO: 42495 - DNA, 380 bp, Glycine max
  Clone ID: LIB3093-032-Q1-K1-D11
gtttacaccgagcagccacacctcccgcagcttccatggttctcaaaactgaactatgccggttcagtggtgccaagatctacccaggaaagggcatcagatttgttcgtggtgattctcaggttgtcctgtttgcaaactcaaaatgtatgaggtatttccacaatcgtctgaagccttcaaagctcacctggactgcaatgtacagaaagcaacacaaaaaggacattgctcaataagctgtgatgatgaggagacgtgctgccaaaaagccttactctaggtccattgttggtgcgaccttggaagtcatccaaaaaaagagagctgagaattcaaaagttcgagatgcatctagggaagctgctcttcgtgaaatt

SEQ ID NO: 42496 - DNA, 271 bp, Glycine max
  Clone ID: LIB3093-032-Q1-K1-D12
ggcgcgtccgcttataaccgatcatccgcacgtacataggtttccgtggttctcaatactgaactatgctagtgcggtggctacctgatgtacgcacaaaagggcatcagatatgctcgtggtgattctcaggatgccctcgttagcaaactgatgacgtaacgatgtcttcatacaatcgcttaagaccttcgaagattaagtggactgcattggacagaaagtgacactgaaaggacattgatacagaggctttgagaacaaggacaca

SEQ ID NO: 42497 - DNA, 436 bp, Glycine max
  Clone ID: LIB3093-032-Q1-K1-D2
cccacgcgtacgggcgaacgtgatgaagagctggaggaacttcgtgcggatattgtacactggaaggaaatgtacagagaacaagtgaacttgctcgttaataagatccagacaatgggtccatcaatgggtagcgactagtttgggcgaagaaagtgctggcttgaggaacggaaagtttagtgttcaataactatttgagaagaccatgaccatgaccatgaccatgtccatgtctctgggctgcgtgtgatgtacattggcacagtaataatatattggagaatagtgccatcagcctctgaagaatgattcgttcaggtttacatcggcagatatatattttgtttgcctgggcagcaaatacggatagtctgcattgaaatgggaatgttgtatagtcagtcttttaaaacgtattcatgcttggagagat

SEQ ID NO: 42498 - DNA, 442 bp, Glycine max
  Clone ID: LIB3093-032-Q1-K1-D3
gaaatatcgtttctctctcaaaggtaacaatgtcggaagctaagacccaaattgaatccatggggaggtgggtcgtcgagcacaagctccgtactgttgggtgtctatggctcagtggtattacgggttcgatcgcttacaattggtctcgacccaacatgaaaactagtgttaagatcattcacgctaggttgcatgcacaggctcttacactgggagcattagccggagctgcactagtagaatattatgatcgtaagacaggagcaaaggcttcgtaaggaattttgacaataagtagaacgcaaccaaagtaccttgaattctttataccgagggatcctagtacactacctgatatgattatagctaaatttgcaattggacttgtactgtactctattcattcttaaaataaaatactaagaaatgttaacatgcc

SEQ ID NO: 42499 - DNA, 421 bp, Glycine max
  Clone ID: LIB3093-032-Q1-K1-D5
cccacgcgtccggctactcgtactagtcatagccttaatggcctctgtattgatccgaggtggggtcctcagacatgttcttctcactgcttacaagacttctgatcgagacctctcctaggtctcaaggaactcctctttatctagacttgccaacagggactgcaataacatcaataatgataagccttatgcaaccatatgatatattgagtaaaagggatcgagatgaagcatctgtcattcaaggtatgtataatggcattacatactatgtagacaaatacagggctaatgtcatcagttacagacctctttacgacgatattgactgaggtgctaccgatgatgactacgctgacgatgctactgtctagaatatctgtgctgcgacactacttgatcttttagctctgactgc

SEQ ID NO: 42500 - DNA, 361 bp, Glycine max
  Clone ID: LIB3093-032-Q1-K1-D6
gctattctctcagctattcaccagagatagcttccatttttgctcatatcttactctggctgctcctgttcctaggaggatacttcccacttgataaacagataacaataactgctccatatacttttatcaacatacatttacagaagttgcaacatctatgggaatcatcactcgcaggtctgatgcttgaaaaccaagtcaaattatcaggatatttgtgacaacctttattattataattctaggattctcatataggagtatcaaactcaacagtgtcattaacaaatttgaatctcccatatagcctgctttccttcatatgatcattattacattcaagacagatatacaggtc

SEQ ID NO: 42501 - DNA, 450 bp, Glycine max
  Clone ID: LIB3093-032-Q1-K1-D7
cccacgcgtccgctagtatccgatcctctgtcctctcgaagctttcatcgttcaacatattctcaccatctcagtcatgggcctgctatcttgttttaggtctaccgtcctgagaaaatgttccaaaggaagctctggcatgtcaagattcctgtatacgaacaattttcaacgaaacttgatttcgtctggtggcaatgaatcgtattatgggtattttaacaggagatcatacacttcactttatatgggaactggaactgtgggtgggattacaagtgctagaatcagggtgccaaatgtaggatgtgaaggattcatgtgctcaagtcatctgtcaatcactcaaagaaattcaagattgatccattctactagcaagattgttccaaattctgaaattcagaatataactactgagatggtgaagacaccagaggtctcaagatg

SEQ ID NO: 42502 - DNA, 409 bp, Glycine max
  Clone ID: LIB3093-032-Q1-K1-D8
cccactcgttcgattgtcattgcaactcggtattcctgatgcttccatcgctcaacagactgggatcatctaacctatggcgctggtttctcggaatacgactaccgccatgcgcaaatggccaaaatgaagcgctgacacgacatgatacgtgtatacaaccactttcaaaccaaactcgatgctcgctgctccgaatatgaacacttctggatacataatcaacttatgaagcactctactgtgtataggacacatgaacaggttgtggcattacacgctgcatcacctatactctccaaactattgatgcgaatgagaaaagtccttatgaaatctatgtatcactgaaaccattggatgattgcaacgaactactagcatgaatgcctgatattgagataccatc

SEQ ID NO: 42503 - DNA, 346 bp, Glycine max
  Clone ID: LIB3093-032-Q1-K1-E10
caaagattcatcctcacacgccaccgttttcacccactccacgccaccgtcgtggctccacgccggccaaaaccaccctgccaattccatttccatttttaccccttcccagcgctccgaattccaattcgccccaatcgcagttcggttctcgatctccaagaaacggagtcctaaaaatagttcttttagggtttctctgtctcggtggttttgggattgaaacttttgatccgtttaagaatgggggatcgaggtgaagacgaggatttgcaaatggcgattcggatgagcatgcagcgcgggacgccggagccgaagcgcagcaagccgcgtgacgcccgtc

SEQ ID NO: 42504 - DNA, 332 bp, Glycine max
  Clone ID: LIB3093-032-Q1-K1-E11
ccacgcgtacggcctctgatacccagcaaagtcctctgtaacagctactatcatagtcacgaaggcttattttgccgcgtgcagatgacatagatcacaacacgataagcaaccgatgatgggatgtctggaactatcggaagtggcttttatgccagttattcatgtcctacttatcagtgcattgagagctttgatggcaactcactttttcgatcatattctttcaccagacattcagtaagcctcgaacaagattgagctcgtgatattcacaccttcacttagcgcatacagttttgccaaaagtgtctgactcgatgatatgacat

SEQ ID NO: 42505 - DNA, 447 bp, Glycine max
  Clone ID: LIB3093-032-Q1-K1-E12
aaagagaggaggagattgcgaaggcaaagcatgccttggaaagaaagaagaagttagcagagaaagctgcagccaaagcagccatcagagcacaaaaggaagctgagaagaagcttaaggaccgtgagaagaaagcaaagaagaaatcaggtgctgcagctgtggccaaccctgaggatgaaccaaaagatgaagttgtcgaggctacagagccagaaaaggttaacgatgatgtccaagtcctggctccagtgaaggaaaaggtccaaaaggagagtggcatcaggtccaggggccgagcaagaggcccagactcgattccaaaagctattattaagcggaagaagtctaacaattacctgatatgggctgcagctgcggctttgctagtcctcctgttggcagtgcttggatacatctatcttttctgaaaagcttaaatgtaga

SEQ ID NO: 42506 - DNA, 435 bp, Glycine max
  Clone ID: LIB3093-032-Q1-K1-E2
gggagcaacaacagtctcgatctgaagaaccgagagtgcgagaggaccgacacgctgatagagacagggaaatatcacgtgaaagaggtagggacaaagacagagaacgggagcgatcacgtgaacattctcatgaaagggtcagggatcgcgatcatagggaggataggcaccacatagaccgggataggaacagggacagagaccgagacagggaaagagatagagatcgtgggcgtgatcgagatagaacacgggaccgtgatcgtgagcgagggaaggaccgtgatcgggatcgagaatatgatcgacatcgtgagagggatagagattatgaagttggtgaccctgatcgaggacgctcacgttatacggagtctgattatgatcgtgttgaatctaaacatggggaaaggaatcatgactattaacctg

SEQ ID NO: 42507 - DNA, 451 bp, Glycine max
  unsure (1)..(451): unsure at all n locations
  Clone ID: LIB3093-032-Q1-K1-E3
ggttacttgaaaatctcgaatcgctaaatttggattaagttttcaaccgaaccgcggaaccggttgctcgacctggctaactctcaggcaagtggctcggacgctgattccagcaacacgcggctggtggttgcactgtatgacgccctaaactccggcgactccaacgccgtcgtcaagatcgtcgccgccgatctcgagtggtggttccatggtccgccctctcaccagtttttgatgcgcatgctcaccggcgactccgccgccgacaactccttccgattcgttccgcagtccatcgccgccttcggctccaccgtcatcgtcgagggctgcgactccgcccgcaacattgcctgggtccacgcctggaccgtcactgatgggatgatcactcaaatcagagagtacttcaacaccgncctcaccgtcactcgcatccacgattccg

SEQ ID NO: 42508 - DNA, 396 bp, Glycine max
  unsure (1)..(396): unsure at all n locations
  Clone ID: LIB3093-032-Q1-K1-E4
gccacgcgtacgatgaattcaaaaactaagactaatttgtagagcttcgcttgattcctgaggagcaggcatgtcgaacacatgcggaaactgtgactgcgctgacaagactaactgcaccaagggaaacagctatggtgttatagtagagactgagaagagctacatcgagactgttgacatggatgttccagcagctgagcatgatgggaagtgcaagtgtggcactaactgcacttgcacggactgcacttgtggccattaaggaatatgtctgaaaatgtaattgacatgtgttaggcaatacatatctncaaataatgtaatcttcgtatgaataaatgtgtgcctgtatcctacttcatgatctgtgtagtcatgcagtctgaatcatgt

SEQ ID NO: 42509 - DNA, 451 bp, Glycine max
  unsure (1)..(451): unsure at all n locations
  Clone ID: LIB3093-032-Q1-K1-E5
gtcaaaccctctcctcgccgtcatcgtcgcatcattggccaccatcagtttctccggctacggggtatgctgttagctatacttcacttacctgctcgtacttctgttctttatcatgaactgtgtactctattctagtgactgcaccacccagttataaatcacatggtttatgttttatggacctaattcaattttgtcaaattgttatggttcagaactcgagaaacagcacataatcaaacgtgtctgcgtaacatcttcgcatttgttaccattgaatttaatcattacctgactttgacatttgctaaaacctcgctgaaatccattgttaagctactctttagcgtgttatacaaaattctcacctttaatcatatcagaccatngttctttaataacatcaactctagatgacgatgatctaccactattataatcgctataa

SEQ ID NO: 42510 - DNA, 346 bp, Glycine max
  Clone ID: LIB3093-032-Q1-K1-E6
ctcaaacctaccacctgtctttaggattcttgtacttattaaccaccctgtgatcgcagacgcaacactctcgctggacacttcctttcacatatggcttctcacgacagcatctacgctcttccaaccttcgcttatgatctcgactacaatcacctcaatcgcactcccgatgatcctatcctcggagtaactgtcgcttatgacaaagatccaagtccatttaatctcaacttgtgatctgacgcttaccgaactgatgaacgaaaacctaccgttgtgaatgtacagaggccagttgaacagcaactcataaatgacgtttcaatgcacagggaatatattc

SEQ ID NO: 42511 - DNA, 451 bp, Glycine max
  Clone ID: LIB3093-032-Q1-K1-E7
gaaagacatgaaattcaaatgaagaaagccaaactaattggcatgcttgatgaggtggagcggaggtacaggcagtaccaccagcagatggagatagtgggttcatcatttgagcaagctgcggggattggttcagcaaggacttacactgcccttgcattgcatacaatctcgaagcagtttcggtgcttgaaagatgcacttgcagggcacgttcgtactgcgaataagagcttaggagaagaagattgctttggaggtaaaatggaaggttcgaggctcaaatatgttgaccatcatcttcggcaacagcgagctctccaacaattgggaatgatccagcacaatgcttggagaccccatagaggattgcctgaaagatccgattctgttcttcgtgcttggctcttcgaacacttcctccagccttatcctaaggattcggacaagc

SEQ ID NO: 42512 - DNA, 471 bp, Glycine max
  Clone ID: LIB3093-032-Q1-K1-E8
tggaccgacccgtccgacagcataagccaaattttgagtaaactagtgtgcacactatcccatgcctagtgggggtggggatcctctcgttgttgggggagtaattggggatgtattggatccttttgaatattctattcctatgagggttacctacaataacagagatgtcagcaatggatgtgaattcaaaccctcacaagttgtcaaccaaccaagggtaaatatcggtggtgatgacctcaggaacttctatactttgattgcggttgatcccgatgcacctagcccaagtgaccccaatttgagagaatacctccattggttggtgactgatatcccagcaacaacaggggctagtttcggtacgtatatgatgtttttccatttttaaaacctataattgtctgtgcttaaagttaaacctattcaaaccattatttttaatttaaaattagtgagttttattta

SEQ ID NO: 42513 - DNA, 312 bp, Glycine max
  Clone ID: LIB3093-032-Q1-K1-E9
cgcaaataattgctgatgctaaagggtgaacatgtttaccctgataatctctaacctgtatagggacgagaaacatcactattgagcagaaaaataaatgggattccagcttattcatgaaattgctgaagaattacaatatacctgattattgagtatcctacgaattttcgatgcatatgctattgatataatcattactcacattgtcatatatattactattatctttggatgtacctataataatgcgatgacactgagattctaacatatacatataataattacacatatccttttcaagaaata

SEQ ID NO: 42514 - DNA, 454 bp, Glycine max
  Clone ID: LIB3093-032-Q1-K1-F1
aataaaaataattgtaactcatgtctaataatgcactaataactctgtaacaccaccttcatggtggcgattccagttcaaagcgactcaagcacttgttcgactcttttatcctacgcactcctccctgcttatcctgcgcatctttcacctagatcctccccttcactccttcactttcctatttcagtgggaaagaatcatgagttgtttcagctgttgcgaagaggatgacctccataaggctgctgaaagtggaggaccctatgttgtaaaaaatccagcagggaatgatggaaattatcatgcttctcaaactgcaaagcagggcactcagcctgttaaacctcagcccattgaagttcctaatatatcagcagatgaactgaaagaagttacggataactttggtcaagattctctgattggagagggatcctatggaagagtatat

SEQ ID NO: 42515 - DNA, 465 bp, Glycine max
  unsure (1)..(465): unsure at all n locations
  Clone ID: LIB3093-032-Q1-K1-F10
gtggtgttgctgttgcaaattgcaacactcagtcagcactgcaccactgcatttcatttccgagcttagctacaactacaagcccacgtcgctttcataaaaccacacccacctgccaccatcactttccccaaaacgcaacatcatcaaaacttaaactcagagaatcagagagagagagagagagaaatgagtgaagaagccaaaaagaacttcgccggagctctaacggcgaggcccaactccgatgagccgaaaccggcaccggtgccagctgttcccccgaagaaggtcatcatcaagagcgctgatatgatccccgacatgcagaaggaggccgttgatatcgccgtcgccgcgtttgagaagtacaatgtggagaaagacgttgcggagcagataaagaaggagttcgataagaggcatggccccacgtggcattgtatcgntggacgtaattttggc

SEQ ID NO: 42516 - DNA, 236 bp, Glycine max
  Clone ID: LIB3093-032-Q1-K1-F11
ggtcttgaattaccggtcgacggcgcgtacgtcctgaacctctgcatgacgagtcccaagactaccatgctatgcgaaggaccaagcttaggggtgggtgccctgctgcagctgtgactcggggatctgcggtcaactctgaaagccctgactgactgccacaggcttctacatgctctgaacttggatcgcatgcgtccttaaaaggatctagcccttatggtaatgatgatccc

SEQ ID NO: 42517 - DNA, 384 bp, Glycine max
  Clone ID: LIB3093-032-Q1-K1-F12
cgcccactcgtccggtgttttttcaaggcaggtctacttaagctaccggcggacacggctctctcgtcggaccctgtattccgccctctcgttataaatgccatcatcacgaagatcccatctttgctatttacgctgaggctcaccaaaagctctccaagcttggatttgctgatgcctaaacaacgtttaggggattgttgaagaggcatggtgcccataatatttctctaaaaaattgtctggccatggtttttaatgccaatgtcggttccccagattttacatagcttttgaatgtatcttgctggacgtaactatgattcgtaagctagtcagtcgtttctatttgtccatgatacttatggtaaattacattgttca

SEQ ID NO: 42518 - DNA, 456 bp, Glycine max
  Clone ID: LIB3093-032-Q1-K1-F3
aatacacatcacggcaactcatgtctaatggtgcactaatcactctctgacaccatcttcatgatagggattccagttcagaacgactcaggcactagttccactctttaatcctacacactcctacctgcttatcctgcgcatcttacacctagatccttcccatcactccttcactatcctattccagtggcaaagaaccatgacttgcaacagctaacgcgaacaggatgacctccataacgctgctgaaagtgcacgaccctatgttgtaaaaaatccatcatggaatgatgccaattatcatgcttctcatactgcaaaccaaggcactcagcctgttaaacctcagcccatcgcagtttctaatatatcatcagatgaactgaaagcagttacggataactctagtcaagattctctgattgtacagggatcctatggaagagtatatta

SEQ ID NO: 42519 - DNA, 398 bp, Glycine max
  unsure (1)..(398): unsure at all n locations
  Clone ID: LIB3093-032-Q1-K1-F4
cccacgcgtccggtcaagggcagtgatttcaacaacaacaacaactcatcaaaggcttttggtgatgatttcaatgatgggtggaagatcaccaattccaatggaccccttttctctatgcctcacatcaacatcaacaacactcttgaagttggaggcttcaacaagggaggaggaatctattccaacaccaacaccaccatttcctcctaccatcctaataaccttaacaacaacgctgttggaggcttcaacangggaatctattccaacaccacatcctnaccctattctaacaacaaccaccaccaccttgacgacaacaacaacctcaacagaaataatctcaagggcttcatgacatattttaagggtgaagatcagtttacacacccaaa

SEQ ID NO: 42520 - DNA, 450 bp, Glycine max
  Clone ID: LIB3093-032-Q1-K1-F5
aattattttttttttttttctaatggattggcggcaattccaattacccaagggtcagcggcttaaggaaacgagtcgccaaccggatctggactttcaacgcaccttctctcacttcaaggaggggagcatacagtatcgggtcagtgtacgacaagaaccctgatgatgagatccacactgggcacgtcccagacgatgtgatccaggcggcaacacaatccggcaaatactgtgccccacatccacagactggggtatttgggccccccagaggaagtgaccaaactgcttctgccattcactctgatgcgctggaggagaatgcctggtttcgccccaccagtctcgaggatttcgagaagcctcacacccttgcttaacaaccattggaggacatcatattataatactaaattaaataaacactgagtcagcctctcaggtgtg

SEQ ID NO: 42521 - DNA, 55 bp, Glycine max
  Clone ID: LIB3093-032-Q1-K1-F6
atacaccattctctctctctttctgatctatttaacgccatttcaacatacctat

SEQ ID NO: 42522 - DNA, 452 bp, Glycine max
  Clone ID: LIB3093-032-Q1-K1-F7
gtcttacctttccattatcaaaatggctgtttcggctatcacaggagcgaggctaaccctagggatagggttggcgatacctctttcctctcccacgcgctctcgaaccgtcgcaatggccgtatccgtcgaccccaagaccgacaacaaactcactcttaccaagtccgaggaagctttcgctgctgccaaggagctgatgcctggaggtgtcaactccccagttcgtgccttcaaatccgtgggtggtcaaccaattgtgattgattcagtcaaagggtctcgtatgtgggacatcgacggcaatgagtacattgactacgtcggttcttggggtccccgcatcattggtcacgctgatgatcaagtgctttcagctctggttgaaaccatgaagaaaggaactagctttggtgcaccctgtctgctggaaaacactttggcagagctgg

SEQ ID NO: 42523 - DNA, 387 bp, Glycine max
  Clone ID: LIB3093-032-Q1-K1-F8
cccacgcgtccgcccacgcgtacggtttgctctataaacctcacctccctctctcggggagggtatctctctctctctctagagcgcaccgcacaggaccgatggaaacacaatgatccaaccctaacccaagcgcctcttacatacaaggcctaccattaccatcttaattgctgttccatatgctgtcaatgatctgtctcatctatggtgataacctcctattaatgcgcatatatgtcaaaaacaattcactgcattgtgattgattcctaaaatcggtatcgtgaaaaccactaatcagcgacactataacacggcttaccttcaatccgagttgaattcaccatgggttctccatacaattgaggtcaaccctgtgtattg

SEQ ID NO: 42524 - DNA, 313 bp, Glycine max
  Clone ID: LIB3093-032-Q1-K1-F9
tcgaattgacagagagtcagaagaaaaagtggaacgggtgtgtgctcctcaaacagatgatattgccaaaaccgctagcggcgaagctggctcaaatgatactgcaaatggatgatacaagctgttcccgcatacaagtcatgctgctgaagatcttctgcacaattatggtataaccgtcctcgaattactcgtgaacgctctcgccaaagctctcggtcatactgaatgcaacctgataccactgctaacttccatggagaactatgttacattacactactgagactggcataccaatctacacccaatc

SEQ ID NO: 42525 - DNA, 453 bp, Glycine max
  Clone ID: LIB3093-032-Q1-K1-G1
cggatctcggtgttgccaatgcgcaccaggtgcagcatctcagaaggtcacgcccaagaaaggctaggcctcagattcctggacctcctacttcaaaaggagaaactatagagaacaacaagaaaattggtctttgggcagtgaagttaccttcagcagattcaattgtagttcgacgaacgctagggattctaacagaaaacctccatggtctccctgggctgaacgagagtgctgagacagttgagaaaagggaagccttctggtcatctgtgaagccagctcattttggtgtgaaaataggctcaaaatctttcttgggcattctccgaatcatcatggttggagttttcattggtctttatggaagtattggttttggaaagcagcttcttttgaaatttcctgaaatattcagccttggctggttcatgaagaatggcccctctgaag

SEQ ID NO: 42526 - DNA, 272 bp, Glycine max
  Clone ID: LIB3093-032-Q1-K1-G10
ttttcctttgtttctatggctcctgcagatttatatttccgatgcttagttgatgacctggcgggggccaccgaccactatgctctctagaaagccttctctcaatttggcgaaatcgtcgaatcaaaggtcatcaacgatcgtgaaactggaagatccataaggtttgtatttgtgaccttctccacagagcatgcgatgagagacgcaattgaaggaatgaactgccagaacctttacggtcgttatataaccgtgaacgatgctcaatc

SEQ ID NO: 42527 - DNA, 404 bp, Glycine max
  unsure (1)..(404): unsure at all n locations
  Clone ID: LIB3093-032-Q1-K1-G11
gccatgccaatggtttatgggtggaagttgctccgtatagggaatcgggtttccctaagaggcaggtgctgtttattgatcaaacgggtgatcaaacaactcttgtttatagttcaaggtttgggggtcccgttgattgtcatgtgtcctgngattcaaagctgcatggttctatcaatttgaacaatgggaatgaattgcttaatttaaggagagatgtgaatcatgtggttggacttggacctactttggatgataaagttcatgaaaatacaggaactgatgatgacattgaaagcgagatgcatgaagacacagaagaaatcaatgcattgctttactctgacagtgatggttattccacttaagatgatgatgatgatgaagttactagcacaagacat

SEQ ID NO: 42528 - DNA, 397 bp, Glycine max
  unsure (1)..(397): unsure at all n locations
  Clone ID: LIB3093-032-Q1-K1-G12
gcgtccggggcagcactcagtctttacttcttccagcctaaagtccccccttcttccaattcaccaacgaacgcagagctcctgccccttcaccctgaaatcccttttgtatgtgatcataggacccttcttgtccctcgtaatatgtctctttgtcaacctcgatgcttgccgtgattgcttgggtctattcttggtgggtcaccgccgccgtgcctcttccggtgacctccatgtgtcccaagttcaacagagcggtggttctgacggtggtgtacgccacccncattggagggatcagcacttcacaatttgctctgatacaatttttagaatgtaagtttaggcctaattcaaccaaaagctagctctaagtattctaacttggctttacttt

SEQ ID NO: 42529 - DNA, 286 bp, Glycine max
  unsure (1)..(286): unsure at all n locations
  Clone ID: LIB3093-032-Q1-K1-G2
cgaaaaccctaggtagagagctcttcctccgtttctcacagcaatggccgccgcagcacgcccgctcgggaccgtgcaggccctcgacggtgacatggcaaccgatgcctncggcaccggtcccatccctgacctcatgaaagcctttatccggcccgacatcgtcaatttcgtacactcgaacatcttcaagaacagccgtcagccatacgccgtcagtccgcgggcctggtaacaaaacttcggccaaatcttggggtcccggccaaccgcgttccggaatccc

SEQ ID NO: 42530 - DNA, 372 bp, Glycine max
  Clone ID: LIB3093-032-Q1-K1-G3
gagagagtgttcttcgtttgctaccttctcccagaaatggttacgttcaggtttcaccagtgccaggtggtcgggagggctctcccaacggaagcagatcagcatccgaagatctaccgaatgaagctctgggccaccaacgaggttcgcgccaagtctaagttctggtattttttgaggaagctgaagaaggtgaagaagagcaatggtcaagttcttgctatcaacgagatttttgagaagaacccaaccaagattaagaactacgggatatggttgcggtatcagagtaagactggttaccacaacatgtacaaagagtaccgcgataccactctaaacggttcaattgaggcaatgtacaatgaaaat

SEQ ID NO: 42531 - DNA, 161 bp, Glycine max
  Clone ID: LIB3093-032-Q1-K1-G4
acgtttatactcattttttttccttctgattacaatttcaatcactactattataactgtgtcaggcttttgctaatcgatatttcaacccttaaatttatctatctgataattaaataatttaggttaaagccaaaccaaaccaaactaaccccttatcc

SEQ ID NO: 42532 - DNA, 452 bp, Glycine max
  unsure (1)..(452): unsure at all n locations
  Clone ID: LIB3093-032-Q1-K1-G5
aagtctttgactttgaagggaaagcctcattttgctgacttcagtttggtgccttatgattggggtggctttgtgcatccatggattgaggcactggccaagaacaaggttggcttggaggagcttaggctcaagaggatggtggtctcggatgagagcctggagctactctctcggtctttcacacacttcaagtctttggttcttgttagctgtgaagggttctacactgatggccttgctgctttagctgcaaattgcaggtttcttaggcagctggatctgcaagaaaatgacgttgaagatcacaaaggccagtggctaagttgctttcctgacaactgcacatcactggcttctcttaattntgcttgccttaaaggagatgttagtttgggagcactagagagactggtggccagatctccttacctgaagagtttaaagctgaa

SEQ ID NO: 42533 - DNA, 92 bp, Glycine max
  Clone ID: LIB3093-032-Q1-K1-G6
gaaagtgcatgaaactagcatttacccagagtcagtcatatgtactcctatgggcactgtgcctaggactggggaggtgatggagaagtctg

SEQ ID NO: 42534 - DNA, 156 bp, Glycine max
  Clone ID: LIB3093-032-Q1-K1-G7
agcttgagctgctcttgtactcattcttagcttaatatcatccaagagacaccctaagacacggttcacagactctctcaaagagttacaagataaatcatcatggatttaccaggatgtgcgtttgtgcagacacttaatgtagcaccctgtcat

SEQ ID NO: 42535 - DNA, 371 bp, Glycine max
  Clone ID: LIB3093-032-Q1-K1-G8
acgcgtccgcttatacacactcattttaaggctgttatatatatttctgttattgaaacttaggttgtcagagctgctgaaggtcgccttcctgtatttttggatggtggtgttcgccgtggaactgatgtcttcaaggcattagcactaggtgcctctggcatatttattggacgccctgtggtgttctccttggctgctgaaggagaggctggtgtaagaaacgtgctgcggatgctacgtgaggagtttgagctaaccatggccttgagtggttgcacctcactcaaggatatcactcgtgatcacattgtcactgattgtgaccaaccttgcattcttccccgcgcattgccaagattatgaaaaat

SEQ ID NO: 42536 - DNA, 425 bp, Glycine max
  Clone ID: LIB3093-032-Q1-K1-G9
agagacttgatattacagttggttgagagaattatcacatctcctaaagctcgttctatctggctgaatggggctgtcagaaggggggagcgtgttgtgcccccatgggcacttgattctctattgagagttactttccctcttccttcagcccgggtcaaggccactgaaagatttgaagctgtttatccaacattaagagaagttgcccttgccagttcccctggaagcaaagcaataaagcatcttgcacaacagatactaagctttgcaattaaagctgcaggagaagctaattctgacctatcaaaggaggcaagtgacatttttatttggtgtttgactcagaaccctgaatgttacaagcaatgggattttctttatatggataaccttgaagcaaagtgttgtgtattgagaaaact

SEQ ID NO: 42537 - DNA, 421 bp, Glycine max
  unsure (1)..(421): unsure at all n locations
  Clone ID: LIB3093-032-Q1-K1-H1
ggagtctccttaccggcccggtcaccatcctcggcggcgtagtcgtcgccatcgccgccgccgacgttatcttcgtcaagaatgatccattcctcaaaccagaggagaggaactatgaaaatcagcctgctaccaagtaggagaaaagagacaacagaagtttgcgttttgatgtcatttaaaccctgatttatgagctctgtatactgttttgcaagatacgctctcgctagttaataagattgagtttctgaatgaagtctggactctggagcatgggccctcagtttagaactaaccttccaatgttctagaaaactggttcatacttcagagatccttacttgtctcttttgtacaatgtcaactgcaaatgcttaatgtggtttctaatcttccatntcttttcgttatccctata

SEQ ID NO: 42538 - DNA, 327 bp, Glycine max
  Clone ID: LIB3093-032-Q1-K1-H10
taatcttccgatccgcgcgtacgatgcgttatgcatgatattaccctttcagctttaaattacaccagcctccattcaagacttgtccgggttttttctgcccactgttatccacttgactcttatcttaatcaactcacaccttcagtccatcctgctcttgaataccttccatctttacaacatcacaataacactgataccctgtctgcccaagcaccagtatatgcagtacttaccaatgtacctatcatattgcctcttgattgtgatcactacatatacatcatctctgccttgagaacagctataaactccatgatatat

SEQ ID NO: 42539 - DNA, 371 bp, Glycine max
  Clone ID: LIB3093-032-Q1-K1-H11
ggaagaatcactcccttatccatttgcacaccaaaccatggcctcaaccaacgctctctctggaggctccattctacgctcttccaaccgccagtctatgacccgaagagcgaaccatattggaagagtaaattaccggaaaccgaataaccgtttctccgtgaaagcctacgccaaagagattgcctttgaccagcattcccgctctgctatgcaggccggcattgacaagctcgccgacgctgttgggctcactcttgggcccagagggaagaatgttgtgttggatgagtttggaagtcctaaagtggtcaacgatggtgtcaccattgctcgcgcaatcgaacttcccgatcctatggagaaatgct

SEQ ID NO: 42540 - DNA, 414 bp, Glycine max
  Clone ID: LIB3093-032-Q1-K1-H12
cggccacgcgttgtttttccatggccatctgatcaaacttttcttgattctctctctcaggttgtgctattctgagtgatgggtatgccctgccgctgttcccacacctcccacatcactgaaatcatcatcaccagcttcttccgccacaagtcttaaattacaacaatttccctcaattattcatcaaccaaccaccttaatagccttttccaatggttccttaaagatccaacttggtcggagtaaacatggcggctagtggaagttccttttccaacatcactagcttccttcgcaaccaacaaccctcttcccaacctctcgaatcttcttctttcctctttgcgtcttcaaattttggttcaagttccaaatccattgtgagttttgaaaccaaaagaaggaaagggt

SEQ ID NO: 42541 - DNA, 459 bp, Glycine max
  Clone ID: LIB3093-032-Q1-K1-H3
cggacgcgtgggggaaaattagcctcacaaaagcaaagatcaaacaaaccaaggacgagaacgcgatgttgcttgaacttgcacttggtttattggttttggctctgtttctgcacttgcgtcccacacccactgcaaaatcaaaagcacttcgccatctcccaaacccaccaagcccaaagcctcgtcttcccttcataggacaccttcatctcttaaaagacaaacttctccactacgcactcatcgacctctccaaaaaacatggtcccttattctctctctactttggctccatgccaaccgttgttgcctccacaccagaattgttcaagctcttcctccaaacgcacgaggcaacttccttcaacacaaggttccaaacctcagccataagacgcctcacctatgatagctcagtggccatggttcccttcggaccttactggaagttcgtga

SEQ ID NO: 42542 - DNA, 154 bp, Glycine max
  Clone ID: LIB3093-032-Q1-K1-H4
cccacgcgtccggttagccaaaaaattccatggttaaaaccttccggggactgatacgctagatggttggaatctgaattgtcttgcttgaaatggctgcttgctaaggcatgtaactctttttcagtatggctgagtctggggcattctttaa

SEQ ID NO: 42543 - DNA, 448 bp, Glycine max
  unsure (1)..(448): unsure at all n locations
  Clone ID: LIB3093-032-Q1-K1-H5
tttagattaaggaagtggaataaccaagaacaagagattttaaaaaaagaaaaacaaattaagaaagcatgagagagaatagatagaggatgatggtgagcacatcctctgtttccattcccagtttgttcttttcctcttcctcccattgaagcattttttcacaagcccgtgattttttcgccatctccatcatcaaatgattttctggttcgggttttgattgatgctcggaagatccgatgctgctagatcgaatttgacaaaacccacttcgtgtctgatcgaagcaacaactgggttctgtctgaattttgagataagatggaatcggatcttggcaagctcttcattgggggaatatcttgagacactgatgaggaacgtctaaaggaatattttgggaaatatggtgaggtgatagagactgtgatcatganggatcgag

SEQ ID NO: 42544 - DNA, 456 bp, Glycine max
  Clone ID: LIB3093-032-Q1-K1-H7
cccacgcgtccgaagaaaactaaggaaggaaggaagagtgagcgtgaaagatgccttgggcgaggctttcagggtctccaaggctcgacgttgctattgacatgggcaatccatttctcaatctcactgttgatggtttccttaagatcggagctgtcgcagccacgcgatcagctgctgaagatacttatcatattatccaaaaggggaatatctcaagtcatgatttcgagaaaacgttgaagaagatgtgcaaagaaggtgtatattggggaactatagctggcgtttatgttggaatggaatatggggtagagaggatccgtggcaccagagattggaagaatgccatgattgggggtgcagtaactggggccctggtatctgcagccagcaacaacaagaaagacaaaattgcaatagatgccattactggggcagcaattgctactgctg

SEQ ID NO: 42545 - DNA, 364 bp, Glycine max
  unsure (1)..(364): unsure at all n locations
  Clone ID: LIB3093-032-Q1-K1-H8
accgtacgcgtccgcccacgcgtccgnattgttaaagatggataccaatggaggaaatatgggcaaaaggtgaccggagataacccttgtcctagagcatatttcaagtgctcttttgctcctagctgccctgtcaaaaagaaggtaaatatatataatcaaccaagtgctaactagtaactaggaaatggtttggtttgcttactcacatgttagtagggaaatggatctcaagctaagtttgtttagaacttggattggttattcaagtgcaaagaagtgtggatgatcaatctgttctggttgctacttatgaaagggagcacaatcatgctcaggtttcttcccaaatggaaacaacatc

SEQ ID NO: 42546 - DNA, 443 bp, Glycine max
  Clone ID: LIB3093-032-Q1-K1-H9
gggcaatgaaaataagattgccctaagatttgacaaagtattttggcctaatgtagaactcgggggcactgttgctccgacctcttatacctgtggctattttctcaatcttcacaaagcaacaggccatcctgttcttgtctacatggtagctggaaggttcgcttatgacattgagaagctatctgatgaagcagccgcaaattttgtaatgcaacagctcaagaagatgtttccaaattcttctaagccagttcagtatcttgtgtctcgatggggaacggatccaaactcccttggatgttactcgtatgatttagttggaaaaccactcgatgtgtatgacaagcttcgtgcacctttgggcaatctattctttgggggaaaagctgtaagcttggacaatcaaggatctgtgcatggagcttactcagctggggtca

SEQ ID NO: 42547 - DNA, 286 bp, Glycine max
  unsure (1)..(286): unsure at all n locations
  Clone ID: LIB3093-033-Q1-K1-A1
tacatggatgactcgtataatgtcggagtcattggaagtaccttnctagcacagacgagtgaaaacaaacatcagtccattgtacacactaggggaaacttttcagagtgcagatctgcagtacttacgctgctacagacagggaaagaatcatgttcctatcaacattgtgacataggatcaactctcataccaaagcttcaggggaaattattggccacggacaaatgcttttacacatcatagttgttcggattgaagtcaagggcctatctgaccaagttga

SEQ ID NO: 42548 - DNA, 431 bp, Glycine max
  Clone ID: LIB3093-033-Q1-K1-A10
cccccaccgacatggcggtactctttttggccgccaactccgccgccaagagattgtctggtggaaaggcgcgtgttctgccggacaactgtggcggcaaagcatggcaacaacgggaagaagaagaagagagttcaaaagatgaaagtttaagtgtgattccaaggttgagtttggaaggagtggagtcagggtttcagtataggttaaattattgtaggtcaaggaagcctgttttggagactataaatgaggaacctgttaggctaaggtgatcatgtaatgaaactcattcgtttatgcatcagattttattttatttttagcttcaagagagatttaattagttgaatcatacaacacttcaaaaaataaatagttgagatggtgtctcattagcatcaaatttgtacaaaactcatatacaaaca

SEQ ID NO: 42549 - DNA, 456 bp, Glycine max
  Clone ID: LIB3093-033-Q1-K1-A11
cccacaccgacatggcggtactatatctggtcgccaactccgacgccaagagatcgtaggggggaaaggcgcgtgttctgccggacaactgtggcggcaaagcatggcaacaacgggaagaagaagaagagagttcataagatgaaagtttaagtgtgattccaaggttgagtttggaaggagtggagtcagggcttcagtataggttaaattattgtaggtcaaggaagcctgatatggagactataaatgaggaacctgttaggctaaggtgatcatgtaatgaaactcattcgttaatgcatcagattttattttatatttagcttcaagagagatttaattagttgaatcatacaacacttcaaaatatgtatagttgatatggtgtctcattagcatcaaatttgtacataagtgatatacatacaagtttgtgtgagatacatattgact

SEQ ID NO: 42550 - DNA, 363 bp, Glycine max
  Clone ID: LIB3093-033-Q1-K1-A12
tcccacacatacattgccagcactctgttttattataaactgctccaacatgatattgagttgggatattacgcttaatatgacgactaactttctcggtatatcattcaaccagctggacaaactagaactctcaatgcttgatgaaactttaagtatattccaaatgatgaccatggtggagaggaggatgaacttgattactacttcaattatcatatgtcaacttatcctgactcttacaccatgaataagaaacatgattaacaagacttatcctacgatgacaatgatgcagcaatgactcagactcccttgaatcattatttacttcagatatatatattaatgaaccatactcat

SEQ ID NO: 42551 - DNA, 315 bp, Glycine max
  Clone ID: LIB3093-033-Q1-K1-A2
cccacgcgtccgggttgtaacagtgatgaggtggacgaattgacaagaatgagatatgcttgtcctgggtggaaggaaaaaataattaattctgatttgaaaagaaaagatggtttatgccctctaacacctgaggagactgcccttacgcttaaggctcttgacattgatcagaacattcaaatctacattgcagctggggaaatatatggaggggaaaggagaatggcaagtctagcgaaggagtacccaaaattggtcacgaaggaaacgctgttggagccatccgaccttcagttcttccaaaatcattca

SEQ ID NO: 42552 - DNA, 216 bp, Glycine max
  Clone ID: LIB3093-033-Q1-K1-A3
atatagtacaagcgtcagaatgtgccgttgtggctcacattatcgacgcggcataccacgtggtcgacgatgaccacgacggttaattcagcctctacgacctgcgctcattctacgctggagtctgcggacaacgagaccacgtgatccgcgcattgatgacgctggtcggcactaccttggactggctcgtggagtactaggagttcgagcgcg

SEQ ID NO: 42553 - DNA, 292 bp, Glycine max
  Clone ID: LIB3093-033-Q1-K1-A4
ctcagggttacccgcgtgagcaatatcaggaatttcagtatttcgtggtgatagactttgaggctagctgtgacaaggataaaaatccccaccctcaagaaataattgagtttccatctgttatagtgagtagcatcactggccagctggaagcgtgttttcaaacatatgtgaggcccacctgcaatcagcttctgagtgatttctgcaaggatctgaccggcatccagcagattcaggtggacagaggtgttacattgagtgaggctctactaaggcatgacaaatggct

SEQ ID NO: 42554 - DNA, 248 bp, Glycine max
  Clone ID: LIB3093-033-Q1-K1-A5
cccacgcgtccgtgaataccaatgcaggctatcaaggcaagaaaaaggttatttgatggcggaatttcagcagacaatagactcgtataagaaacccatgatcaaaggccgattttctaatgacatgaacaactctccatgaatgagaagtaggagctcaacctctttttagcttgttgaaacttgaaagtaatgctttatgagattgtgtttgattatttttcattggaattggttttcgttaaatt

SEQ ID NO: 42555 - DNA, 260 bp, Glycine max
  Clone ID: LIB3093-033-Q1-K1-A6
gaaaagggtaaggagatgaaagaaaaagctttgcagtggaaggaattggcaaaaagtgctggttttggccctgacggatcttcatttgctaattcggataacatggttcgagatgttcttctgcgcaaaaatgttaaatattcgcattagaagaactcaaatattttaacttactccattgacgtgtgaagactctatatgttaataaccttatctacatgggaaatgaaatgtaccaagtaccaactgatgaattggat

SEQ ID NO: 42556 - DNA, 245 bp, Glycine max
  Clone ID: LIB3093-033-Q1-K1-A7
acgctatagtacaagcatcaaaatgtgcccacgtttctgacattctcgaccgacattccacattgtcttattttaccacgacggcggaatcagcttctacgacctgcgctcattctacgcttgacttcaccttacaacgagaccacgttacaccgttcctttataacgctggcctacacccacttcggctgactccaccagtactaggtattcgatcgcttcttctccgatcattgcaaacccat

SEQ ID NO: 42557 - DNA, 310 bp, Glycine max
  Clone ID: LIB3093-033-Q1-K1-A8
gaaaagcgtaaggacatgaaagagaaagctttgcaatggacggaattgacaaaaggtgctggttttacacctgtcggatcttcattagctaatacgtataacatatttcatgatgtatttctagtcaaaaatgttaactattcgaatcagaagaactcacatattttaacttactctataattatgtgaatactcatttttttaataaccttaccttcatccgacatgaaatgtaccacataccagcttatcatatgcataatctactaaatctttacacattcgttctaaaagatccaatcttacatac

SEQ ID NO: 42558 - DNA, 360 bp, Glycine max
  Clone ID: LIB3093-033-Q1-K1-A9
gcagacgacaggtcctgctactgcaaattgccgtcttggccttcattaccgctccgggtgggctaccacgctatgggatcgatcagattcctttcctcgtccattaaattccatgattaggtcatgaagcaccgtttctcgagcagtgtctaatgacttaactgcgaacccctagctctacatctgactaagcacacgttctatcgcatatacaacgcttctctctacttcacatctgatattgagaagcggtaccacgcgaaatacggttatagagagacgatacctgttgctgcacacgatgttgctatctcaaaccatgctgttctactgaccgcaattacattgttccagattgca

SEQ ID NO: 42559 - DNA, 389 bp, Glycine max
  Clone ID: LIB3093-033-Q1-K1-B1
tgaagatgaccaggcagagagcaatgccaacttatacgaaggaagccttgatggcggcgaagctcttggatttggtcctctcttccccactgaaagtgaaagatctttgatggaaagagtcaggcatgagttgaagcatgaactaaaacagggttacaaggagaagattgtggacataagagaagaaattctaagaaagagacgagcggggaagcttccaggggacaccacatcccttttgaaagcttggtggcaatcacattctaaatggccttaccccactgaggaagacaaggctagattggtgcaggaaacagggttgcaattaaagcagataaataattggttcataaatcaaaggaaaaggaactggcatacaaataacccct

SEQ ID NO: 42560 - DNA, 391 bp, Glycine max
  Clone ID: LIB3093-033-Q1-K1-B10
acgcaagttgcaagagccatatgcccataccgtaatgctctactagtgtacttgatctcggaacggcaattagattatggcttgccataaaatgaggttagccctaataaggatacactgtccaaaagatgacattctatgactgggaaagctagtatctgcatattcttcatacctaacaatgtctgtatgccttgattatcataaatcaatccctttcttggggaactcttgacatatatctagatctgaataactatagtccaaaggctatcacacacagagccaaggatctgactaccaacaaatgaaatatctagcccaatcatgatgcgagacaatgagagtagctgtcccactaatctacaatatcaacactagtatgctactc

SEQ ID NO: 42561 - DNA, 467 bp, Glycine max
  Clone ID: LIB3093-033-Q1-K1-B11
ccagatcccacctccctcccttcaccaaatccccaaaaccgagaaacacctcaacgagtcggcgtctaagacgcttcatttctcatacccctccgccgttacttccttcgtctcctccctcaccggcgacgccgccgacaacaaacaaccatccccggcggccacgaccacgacctcccactttcagatcacgagcctctctcacgtgtcgtccgcggggaagcctccgctttcgtcttcctctttcaagagaaagtgcagctctgagaatttaggttctggaaagtgcggtagctcctctagccgctgtcattgttccaaaaagaggaaaatgaggttgaagagggtagtgagggtaccagctataagcttgaagatggctgatattccaccagatgattattcttggaggaaatatggacagaaaccaattaaaggatcgcctcatccaaggggttactacaagt

SEQ ID NO: 42562 - DNA, 317 bp, Glycine max
  Clone ID: LIB3093-033-Q1-K1-B12
cccactcgtccgctgacgcgtggatttttttttttttttctatcatcacataatccaggagggttctaaaatcatgaaattctctaccactcaaactattcttatattgtaacctatatcacatgatactccaaacttcaacaaacatccatgcgtcttaatactaccacaaccttcaacttaatatcacatatctctattaattctcttccaaatataagacttccataacctataactatttttagagaatttgcccctttaataatttaagtactactacgtactcaacctattctagacactgtcattactcc

SEQ ID NO: 42563 - DNA, 373 bp, Glycine max
  Clone ID: LIB3093-033-Q1-K1-B2
ggaggaaggcagcggcggacgttccggctggacacgtggcggtgtgcgtggtgcccagcaggatgaggttcatcgttcgcgccacgcatctgaaccacccgattttcaagatgcttcttgtgaacgccgaagaggaatacggcttctgcaaccacggtcctctcgctataccctgcgacgagtcactcttcgaagagcttcttcagctcgtgtcccgacccgtacccgtacccggattctgcacgctcgaggatttccagagacgctgccacatggatgattgcactggctttgacgtcgtatgagaatcgtagcacgtgcttcgtgacgagccaatttgctgaaaatacatttaatcgtaatcactaactac

SEQ ID NO: 42564 - DNA, 371 bp, Glycine max
  Clone ID: LIB3093-033-Q1-K1-B3
ccgagccacgacgtcacgcgtacgcgtccgacttggtgtatggtgggggcagcgttgggctaatgggcttaatatctcggagagtgtatgatggaggctgccatgtcctagggatcattccaaaagctctcatgcctctcgagatatcaggtgaaacagtaggtgaagtgagaattgtttcagatatgcacgagcgtaaagctgccatggctcaagaagctgatgcatttgttgctctccctggaggatatggaaccatggaggagctgatggagatgataacttgggcccaacttggaatccataaaaaaccggttggtctactgaatgttgacggttactataaactgttgcttgcattatttgacaat

SEQ ID NO: 42565 - DNA, 429 bp, Glycine max
  Clone ID: LIB3093-033-Q1-K1-B4
ccgaattccggtcgaccaggcgtccggtcacgcgttcgaacatgcctattctacttctcatttcaactcttttgcaattgcgatctttggttcggttttttttactcttggtaagcgtagttcggtgttggagaaccagcttccagttccagaatactgctgaacagagttcggcttcgctttattgggactcagttgtgtttctactaggttatcttctctgaattgcaaatgaatgatcgttgaaaaaccatgaagaaggtgaggagaaagatcggcaagtatgaggtgggtcggactattggcgaatgcaccttcgccaaggttaagttcgcaagaaactcggagacaggggagagcgtggctattaaagtcatggctaagaccaccattctccagcacagaatggttgaacagattaaaagagag

SEQ ID NO: 42566 - DNA, 362 bp, Glycine max
  Clone ID: LIB3093-033-Q1-K1-B5
cccgttctgcatcttgatgtgaagccagagaatatactcttggatgagaattacaagggtcttgttgctgattttggtctctcaacgcttgttggaaaggatgtgagtcaagttatgacaacaatgagagggacaagagggtacttggctcctgagtggcttttggaaagaggggtgtcagaaaaaactgatgtttacagctatgggatggttctgttggagatcattggagggagaaggaatgtgtcgagggtagaggatccgagggacaggaccaagacaaagtgggagttctttcccaagattgtgaatgagaaagtgaaggaagggaaattcatggagattgtggatcgtaggttggt

SEQ ID NO: 42567 - DNA, 435 bp, Glycine max
  Clone ID: LIB3093-033-Q1-K1-B6
cccacgcgtccggccaaccagtccgtcagtctactcctgcttccaaacgccccctcgctcggtgccctctccacacgcgccaccacctgctgcctcagcgacccgaaccgtaactgcaccaaccatacggacaaggaaaccatcttgctcgacggctgctacttagaacactggctcgtagtcatcgagaagcccgagggcgaccatacccgcgatgacatcatcgatagctacattgaaaccttggacaaggtcatcatacgtgaacaggaagcgaggatgaagatatattcggtttcgactaggcactactatgcgtatggagctctagtgtcatgaagagctttctatcaagcttaaagaatcgcctggagttcggtggatgcttgctgagtcttacttgaaatgtaaagaaaaggattatggatgtgagcc

SEQ ID NO: 42568 - DNA, 378 bp, Glycine max
  Clone ID: LIB3093-033-Q1-K1-B7
cccacgcgtccgtctgaatctgaaacctccgtgttggtgttgcatatccaaaccggaattgggaaattgaattgttgaagggaagaagatcaagatggttctggcggagttaggtgggagcatttcgcgtgctctccagctgatgagcaatgcgacagtaatcgacgagaaggtgctcaacgattgcctcaacgacatcactcgcgctcttcttcaatccgatgttcaattcaagcttgtccgcgacatgcagaccaacatcaagaacattgtcaacctcgacgatctcgctgccggtcacaacaaacgcaggatcatccaacaagctgtgtttaacgaactctgcaaaattctggaccctgggaagccctctttcac

SEQ ID NO: 42569 - DNA, 443 bp, Glycine max
  Clone ID: LIB3093-033-Q1-K1-B8
cgtacgctttcactgtgttatcaggtgcagctcacgttgattctgatatgggtactcacagggataggcagtggataaagcattgacatgattaaacactatcttttagatatgtctgcttctgctaaatagcttttgaaacttcagttagcaatattattatacttctacaatacataaatcctgtttggataattgtttggataaacacttatagaagtaaggtaaaatgaattgagcttctctcgtaagttaaaatcaacttatgcacttaacttttataaaagatttttcatttaacttttctgaaggccgaagtacataagttgattttagtttatgagaaaatcacatttcattctactttcttgtaagtatttatagagaaatttatcttaacaggatcatagtgcatgtacttatgaaataatctaatgtatgcc

SEQ ID NO: 42570 - DNA, 361 bp, Glycine max
  Clone ID: LIB3093-033-Q1-K1-C1
ggagagcgtgccagaatggcttcttttgttggagccatggctattgctgacttagtgaagagaaccttggggccaaagggaatggataaaattttgcagtcaacaggtagaggacgtgaagttactgtcacgaatgatggcgctacaatcttgaagtccctccatattgataacccagctgctaaagtccttgttgacatatcataagttcaagatgatgaagttggggatggaactacctcagctgttgtgttggctggtgaacttttaagggaggcagaaaagctggttgcaaccaagattcatccgatgacaataatatcaggttttcgaatggcatcagagtgtgctcgtaatgctt

SEQ ID NO: 42571 - DNA, 460 bp, Glycine max
  unsure (1)..(460): unsure at all n locations
  Clone ID: LIB3093-033-Q1-K1-C10
cccacgcgtccgctcacgcgtccgctctgaggatcaaaaacttttgagagaaaaggtggagggcctgagtggagatgctggaattgagcgtatggaatctgcattatctgaaacaagatctagatactttgtagtgaaggatgacggaagtccagtgaggtctccaatgattccatctatgcccacaagcccaacttcgatttctactgctgccagctcaagtgaaagaaatatttctaatgagagtcatcataggtcaagccgagtagttcgctccctctataaggaaacaaatacttaccctggagagtctagcttctctgaacccataaccagttcagatagtcagcttggcacatcctctgagaagttgctagcagagaatgaggttctcgtaaatgaatntcttcacaagcatcaccataatgtagctgatggctttgatgtctctaatcacgtt

SEQ ID NO: 42572 - DNA, 361 bp, Glycine max
  Clone ID: LIB3093-033-Q1-K1-C11
acgcccacgcgtccgctcacgcgtccgctctgaggatcaaaaacttttgagagaaaaggggcagggcctgattggagatgctggaattgagcgtatggaatctgcattatctgaaacaagatctagatactttgtagtgaaggatgacggaagtccagtaaggtctccaatgattccatctatgcccacaagcccaacttcgcttcctactgctgccagctcaagtgaaagaaatatttctaatgagagtaatcataggtcaagccgagtagttcgctccctctataaggaaacatatacttccccttgagagtctagcttctctgaacccagaaccagttcagatagtcagcttggcaca

SEQ ID NO: 42573 - DNA, 389 bp, Glycine max
  Clone ID: LIB3093-033-Q1-K1-C12
ctgactttctggcttctgggttttctccctttggtcggttgagctaacagtggcatgagtcatcatcacaattaggttcaaaaaccaccactctgtgtgtttttttccttgtgtttctctcccatgtgtctccttctttgctgagaattgttgtggcagacaagggagtagcttcttctttctaagttgacatatgcacatggcttctcttggggatataggacttgcagcagcaataaacatccttagtgcatttgccttcttactggcttttgccatacttcgaattcaacctataaacgatagggtgtattttccaaaatggtatttgaagggtttaaggagcagtccattgcaagcaagggtatttgtgagcaagtttgtcattt

SEQ ID NO: 42574 - DNA, 376 bp, Glycine max
  Clone ID: LIB3093-033-Q1-K1-C2
tccgacccagagcgtccggtgcgactctgtgcttagctaacgttaacagtgacttaagatggcggattctgcagatgtcgcccacgatgttgtgtccctcctgtcttctcctcaaagggactttcttcttcgcaacaacggccatcaggttaaaattgacagcttgaagggtaagaaactcggattggatatttcggcattctggtgcgggccatcgtatacatttacgccgactatggtggatgtgtacaatgaagctgcaaaaaaaggtgacttccagatcgttttcattacggctgatgaatatgatgagtccttttacggttactgtcacaagatgccatggcttgcaatgccattttctgatttagacaca

SEQ ID NO: 42575 - DNA, 408 bp, Glycine max
  Clone ID: LIB3093-033-Q1-K1-C3
agcttctattctattctatacctctctttctcattgttattagttgtatagctttaaatttgctgtgcgatttacattgcatctaataaagtaaagtggttactgacacagagaagcatatatagagaaagaaagaaggccctgccctatatagctgaagcaagatgatggaaaacggtggcaaacagacatttgaagtctccaatgacacgcttcaacgagtaggttccaagagctttgatgatgatggccgtctcaaaagaactggaactatttggactgcaagtgcccacataataacagctgttattggttctggggtgctatctttggcttgggctattgctcagctaggttggattgctcgtcctgtggtgatgattctattctctattgtgacttattata

SEQ ID NO: 42576 - DNA, 347 bp, Glycine max
  Clone ID: LIB3093-033-Q1-K1-C4
ctctggcgaactattcgatcactctctctctctctgttacacgctgtcatgctctccttgagttgcgccaatggcgtcgcagctgctacaatggccggggccctgacgacgacaggcatcagtagagacggcaacatcgacctgttcactaccaatgccgcaggaaaagccgaccaagatgctgacttagattcagagagcatcatgaagcgcatcaaagagctcgtgccaagacctacgcagaccctggctcgaaccaacgacctgagcctttacggactcgccatggccatggactgccaggtggtctgtgacgtgggatgctacatgtgaataacgctatagct

SEQ ID NO: 42577 - DNA, 393 bp, Glycine max
  Clone ID: LIB3093-033-Q1-K1-C5
gaacgttcaagacctcatgagcgtgttgctttccttgcttgaaggaaaaactattgagggcgatgaatgttgatattgtcatcaaatcctttgtattgacagtaattcaagcaggaactgaggcaagcattactactcttatatgggcaacaagtttgatattgaataatcctagtgtactagaaaaacttaaagcagaactagacatccaagttggaaaagagagatacatatgtgagtctgatttaagtaagttaacatatcttcaagctgtagtcaaagaaactttaagattgtaccctccagctcctctctcaagacctcgtgagtttgaagaggattgcactataggtggctacactgtcaaaaagggaactcgtctaattacaaatc

SEQ ID NO: 42578 - DNA, 404 bp, Glycine max
  unsure (1)..(404): unsure at all n locations
  Clone ID: LIB3093-033-Q1-K1-C6
tcggncaggcgtacgctgcgctctgtacaaggctctactctactgctacaccttctgctctagaaaattcagtggggatgcatggcttcggctactctctctgtagccaaaccagcccttcaggcaaatgggaaaggcttctatgaattctctggcctccgcagctcatcaggcttccttcccttttctagaaaatcttcagaggatttccattctgtcattgccttccagacctatgcagttggaagcagtggaggatacaagaagggtgtgacagatgcaaaactgaaggttgccataaacggatttggaaggattggaaggaacttcttgaagcgctggcacggtcgcaaagactccgctctagatgtcattgccatgaacgacaccggtggcgtgaaaca

SEQ ID NO: 42579 - DNA, 458 bp, Glycine max
  Clone ID: LIB3093-033-Q1-K1-C7
ctctaataacatttctaatctcattctccttctgttcaaacactctctctcatggcatcagataagacgattaggatcggcatcaacgggtttggaaggattggccgtttggtggccagggttgcccttcaaaggaatgatgttgaacttgttgctgtcaacgatcctttcatcaccactgattacatgacatacatgttcaagtacgacaccgttcatggccagtggaagcattttgatgtgaaggtgaaggactctaagacccttctctttggtgagaagcccgtcaccgtttttggaatcaggaaccctgaggaaattccatggcgtgaggttcgtgctgattatgttgttgagtcaactggtgtattcactgacaacgacaaggctgctgctcacttgaaaggtggcgccaagaaggttgacatctctgccccaagcaaagatgcacccatgtt

SEQ ID NO: 42580 - DNA, 427 bp, Glycine max
  Clone ID: LIB3093-033-Q1-K1-C8
cccacgcgttcgtggaaataggcctagtgcaactactcaagaaactacttcagtggtggggatagatggcaaacttcttcaatcttttagacaatgtattttgaaactcttaaaattggaagggtctgattggttgtttaaacagaatgatggggctgatgaagatctgattgatcgtgttgctgcaagggagaaatttcgttatgaaattgaaaccacagagatgaaccgcaatcatattggagaaactcgatatctttcttctgatgggaagtcttgttcttcaatgaagaataatgaagctaattggtctagtttttccgtaacctcaatccctaactgtggagatggatgtgtatggagagcagacataataataagctttggggtgtggtgtatcaaacgtgttcttgacctctcattaatg

SEQ ID NO: 42581 - DNA, 395 bp, Glycine max
  unsure (1)..(395): unsure at all n locations
  Clone ID: LIB3093-033-Q1-K1-D1
cccacgcgtccgagaagatggagatgtatcagatctggagcaggagaatagcgttgggagcgttcgcgtttgttctgcttttcctatcggcctcagcagacgacgtcgttgtgctctctgaagataacttcgagaaggaagttggtcaggacagaggagctctcgttgagttctatgctccttggtgtggacactgcaaaaagcttgctccagaatatgaaaagcttggtagcagcttcaagaaagccaaatctgttttaatcggcaaggttgactgtgatgagcacaagagtttgtgcagcanatatggagtctctgggtacccaacaattcagtggtttccaaaaggatctcttgaacccaaaaagtatgaagggccacgcactgctgattca

SEQ ID NO: 42582 - DNA, 324 bp, Glycine max
  Clone ID: LIB3093-029-Q1-K1-D11
cctggcttcagcaaaggatctcaaagacttgaatatattctcaaagatggatgtatatgctgtgctttcactctccggcgatcaaaagaccaagactcccgtccacagaaacggcggcaccaacccaacatggaattttccggtcaagttcacttttgatgaatcggtggcgcggcagaaccgtttggccctcgaaatcaagatccgctccgagcgcgccctcgccaccgattaggacatcggccagattcacgttcctctcatggaactccttaagcaacctggcgacggtaaattctttcaacacgttagttaccagttcag

SEQ ID NO: 42583 - DNA, 285 bp, Glycine max
  Clone ID: LIB3093-029-Q1-K1-D12
gggtaaccctggggagtttaccatgttagagcttgctcaggttgtaaaagaaacaattgattcaagtgctacaatagaatacaaaccaaatactgctgatgatccacacatgaggaagccagatattagcaaagcgaatgaactgctgaactgggagccaaaaatgccactgagagaagggttgcctcttatggttaatgatttccgaaatcggattctgaatgaagacgaaggagaagggatgaaataagcataatagcaaaccctgtatgtatatggagatga

SEQ ID NO: 42584 - DNA, 452 bp, Glycine max
  Clone ID: LIB3093-029-Q1-K1-D2
cccacgcgtccgcccacgcgtccggagtttacaggtcttgatgttgaaatggagattaagaagcattactttgaggttatggatatagtcgatagattgtttgtcgcaatgtttgacagtttgaaccagaattgtaagaaggatctggaagctgtcgggtctcagtatccatttgaacctttgaagtatctgcggacgacactacggcttacatatgaagaagggattcagatgctcaaggatgttggagtagaaattgaaccttatggtgacttgaatactgaagcggaaaggaaattgggtcagctagtctcagagaaatatggcacagagttctatatccttcaccggtaccctttggctgtaaggccattctatacaatgccttgctacgacaatcctgcatacagcaactcgtttgatgtctttattcgaggtgaggagataatttc

SEQ ID NO: 42585 - DNA, 458 bp, Glycine max
  Clone ID: LIB3093-029-Q1-K1-D3
ttttctcaatgtttcgtcaccaagaagttaccttgtgaagaaaaagcatgtgaaatttagcaaacacatcagtgctgctgctgttgcaacaacaacaacaactgaggaaattcaagagtacaaattccgcgtcttaataccttttccatgatctacttttgtctttccttcacttcacaatgatagtgtcacctgcaatgggaaaaaagagcatggaaattaaataatgaataggtgatggggatggtattgaagttgtagtgtttgtgctttaagaattttttgattctccagaataaaagttaattgtggataacattattacaataccattatctacaatcattgtttacaggtacaagcttgcatcatgggctaaagttgaaatagggagggctgctgtctattggaaaaccatgaatggccttccttcttttttaagagaaaagcttaaactt

SEQ ID NO: 42586 - DNA, 368 bp, Glycine max
  Clone ID: LIB3093-029-Q1-K1-D4
ggaggagctagtgtggcttagtcgctaaatttgttacgataaagaaattaattcagcaacaaatacaatgggttctcttatggcaggatgggactctctgatcttggatcctgaatcagctacaatagagaggaatcgatcactcaccaaagaagaaattaatgcttactggagagtaaagaaggagacagagttagaacacctcagagctatgtccaaactatctgagactattcaggcccgaaaatttgaggattcagagaattctcataagtcaagtaccgtgaccttggccagcataaaagagtccttaagcatggacgttgaccagaaaagtttagagcaacttatcaagaaaaatggctggt

SEQ ID NO: 42587 - DNA, 448 bp, Glycine max
  Clone ID: LIB3093-029-Q1-K1-D5
gtttttgaagtatagagatggcagagacattcctatttacctcagagtcagtgaacgagggacaccctgacaagctctgtgaccaaatctctgatgctgtcctcgacgcttgcctcgaacaggacccagacagcaaggttgcctgcgaaacatgcaccaaaaccaacttggtcatggtcttcggagaaatcacgaccaaggccaatgttgactacgagaagatagtgcgtgacacctgcaggaacatcggctttgtctcaaacgatgtgggactggatgccgacaactgcaaggtcctcgtcaacattgagcagcagagccctgatattgctcagggtgtacacggccacctcaccaaaaaacctgaagaaattggtgctggtgaccaaggtcacatgtttggctatgccactgatgaaacccctgaattgatgccattgagccatgt

SEQ ID NO: 42588 - DNA, 263 bp, Glycine max
  Clone ID: LIB3093-029-Q1-K1-D6
cagattttgggcttgccaagttgaggaaaaaagaggacatggagaccatgtctaggaggaggggcacaccatggtacatggcaccagaatggatcactgcaaacccaattacctcaaaggctgatgtgtatagtttgggcatggtgcttttggagcttgagattgggattaggaactttgagatccaaggttctcagtttaggagtgatgagtggaacttacttagatgctccttggataagatgtttaaggagatcataatg

SEQ ID NO: 42589 - DNA, 180 bp, Glycine max
  Clone ID: LIB3093-029-Q1-K1-D7
cacacgccaccgaaaagtaaacgctggtattacaagagcatccaaaccgcatatggaaatgggagagtttatgacacgttactcactgcttacctaggttcatggatcatgaacagacttcttgactattgatatgctggtcctacctctattcgctctcacccaagatgcaagcgtgat

SEQ ID NO: 42590 - DNA, 336 bp, Glycine max
  Clone ID: LIB3093-029-Q1-K1-D8
aaaagaatggcgtccatgtttggcacatcttcgatggccttcctctcttcacgatgccactgtgcccaatcccttgccaccaattctccctctctaaccacagtgcaggtatatgggcgcatgttttgcataggaaatggatttcacggcgtcaaggctacaagtgttgctgccactcaacgtaactctgctcaacaggctcaaaagatcgcttctaaccagagcctatggctcctgtacccattatctactataacgggacaggatgagatgtagctctgccatgctctaaatgacaatgatcccaagattggctgtgtaatgatcatggtggac

SEQ ID NO: 42591 - DNA, 330 bp, Glycine max
  Clone ID: LIB3093-029-Q1-K1-D9
atcacgcgtacagtatacacattgatttcaaatgtacttcgtgacattttatgctggttcagggtggctagtggtccagcatcggcttttgagattggacaaagggcttaagagcgttcgatcatggattacaactctgttcacaagtctagcctgtcaaattcaatacttcactggaatggggcttatagcaaccggattgaagaaggatcaaatgttcgatggtgacatatgtacactctacatgagtgggtatactacaatggatgttaaagttgattcatattctcatatatctacaatagtgactcgtgaatgatatatttgcat

SEQ ID NO: 42592 - DNA, 358 bp, Glycine max
  Clone ID: LIB3093-029-Q1-K1-E1
atttggaacaaacaacaatagaggggttgtggtgctctgtgtgctgcaatttccttttgagcttgtgtttgattcatcaaatcatcaaagatgactgtaggggcaggaatatctgttgcagatgggaacttgatggtgttggggaacaaagtgctgagccatgtccatgacaaggttcttgttacccctgcatgtggtggtgctttgctcaatggggcattcattggggttcaatcccatcacaagggtagccgcacagtctttccaattggcaagcttcaagggttgcgatttatgtgtgttttccggttcaagatgtggtggatgacgcaaagaatgggcacttgtggacaagata

SEQ ID NO: 42593 - DNA, 277 bp, Glycine max
  Clone ID: LIB3093-029-Q1-K1-E10
gtgagacaacatgactgagaggtccacataccttgcctggctcaaggttacaactctgattggtgcacttgaccagattagtgagcccaagaggccctgtgacatgcaacatatgctgcaactatatgaagtgtatcattaaaggacgcttcggatctgtaacagggtgatgtgttcacatacgggataggaagcttggcatggaattcacagacgcacgaactagtctgactactgaagattgggaatgccttttacaacatgatcgtctcacaga

SEQ ID NO: 42594 - DNA, 211 bp, Glycine max
  Clone ID: LIB3093-029-Q1-K1-E11
cttcattgaaacaacggacggatagtgatggataacaatgctgaatctgagaatccgcaacggaaacggaaactgattgtaattcacgtagggtagtacctccgctacatcatcttaggcagctcatatcaagtctatctcaagtacactgttcctatacaacccattgctctcttctcatacttcatcattagctgtgcaacgaattctg

SEQ ID NO: 42595 - DNA, 220 bp, Glycine max
  Clone ID: LIB3093-029-Q1-K1-E12
ctcacgcgtacgaactcacttccacacgtggttaccaagaatacttgttcgtccaggaagaggcagcttatacggatttcactactgaatcggatgaccctcgtctgacgaatttctatacatgtagcacacagtctcgatctcgtgaactgtggacactagatcacaatctactcttggccaataacggactagctcgttacttacgataagatagaca

SEQ ID NO: 42596 - DNA, 376 bp, Glycine max
  Clone ID: LIB3093-029-Q1-K1-E2
atacacacttggctgaggaaggtcggaaaagaaaatggagttgttcttctacacggtgttcggtggtttggccgcggttgtggcagttatggagctgagcaagaacaacaaggatcgaatcaacacctcttccgcattcaattccttcaagaacaactacctcctcgtctattccctcatgatggctggagattggctacaaggtccatatgtctactacctttacagtacatatggatacgggaaaggggacataggacaactcttcattgctggttttggatcttccatgctctttggaacaattgtcggatctctagctgacaaacaaggccggaagaaggcttgtgtgacttactggataacctacattttg

SEQ ID NO: 42597 - DNA, 199 bp, Glycine max
  Clone ID: LIB3093-029-Q1-K1-E3
atcaaatccgtggattccgacggcgacggcaacgtcaacttccccgagttcaagcggatgatgagcaacaatcgcgaaaatgctagcaatgctgaagaaaaaacagattaggccctttggatttgaattttatagataggctaggcactttcgctgcacaatctcttgactaataaatctaggtctgttatgatccgct

SEQ ID NO: 42598 - DNA, 410 bp, Glycine max
  Clone ID: LIB3093-029-Q1-K1-E4
cccacgcgtccggaagagagtgaaagagaatatctgagactctgattctgagagtcgagacgagtgagtgagtgctgcttcttcttctgaatcaaatcattcatcactctctggttctgatttttctgacaccaaaatggtgaatcctcgaattccacgttcaaggatcccaactttcacacttttcacttctgctatctccatcgctctgtgcattttcttcgttctctctattctcttcactgcccattcttattcctcccatcaacaccacaacgcgggttctgacggcggtgttgcacatggatttgagtcgattaggagatccgtcctagctctgaaaacagatcctctcaagcctcggttggaccagattcgtaaactaaccgatgatcatcgctctttggctc

SEQ ID NO: 42599 - DNA, 408 bp, Glycine max
  Clone ID: LIB3093-029-Q1-K1-E5
ctcacgcgtccggccacgcgtacgcccacgcgtacggtgaattaaagtatattcacatgtgcgtttctctgactaacaggattgaaagatgggtcaagcattcggtcgctaccaagtcgatcagacaaatgtggctatcaaggagcattttcgaaaatccgatgatgtactagagcctagatgtcactgtctgccatagtgtcttgggtaccaaaacgctggtattctgacgctgcaagttcagcaacttgatgttcgacgtgagaccaaacccaaagacaatgcctatgtcaatgttcatgcctctgcggaataacgacctgaggctgaaaaagcatctgatgcattctataagcttaccgacaccaaggatcatatgcaatcatacgacatagatgtcatcatggc

SEQ ID NO: 42600 - DNA, 325 bp, Glycine max
  Clone ID: LIB3093-029-Q1-K1-E6
atcatgacatgtacatgaaggtcaagggtaacgttttcaagaacaaaagagttttaatggagagcattcataagtccaaagccgagaaggcaagagagaagaccttgtccgatcaatttgaggccaaacgtgccaagaacaaggccagcagagaaagaaaaattgctcggagggaggagcgattggcccaaggtcctggagaaaaagtatccgctgcacccagtgctacagctgctacagcatcacagccagcgcaagcaccaaagaaatctaagaagtgatccacatattctgatattggcttgtagaatttttgggtctggca

SEQ ID NO: 42601 - DNA, 413 bp, Glycine max
  Clone ID: LIB3093-029-Q1-K1-E7
gacgagagagtcgcaggtactgcatttgttgattacaaatcactacttatgtctcagaggaggcttgggaaaaggattggactgaccgatggatttgcagcctctacaccaatagaggcagccattgtcaagcatattccaagtacactgactctgtttaacgaggctattgatgctcatacctgatcgtacgatgatcaaccaagttggagacgaaagaatgcatggctatatagaagatttcagatgcgatcttcctaccgatctacgatacatgacgctcattgaaagtaaacatactgcacacataaaccatcatagcataattgaaattcatgacataattttgccaatcgacagggcgaacttcaatgacgtgaatatcgtgtactagatgatcgacaccgatctga

SEQ ID NO: 42602 - DNA, 364 bp, Glycine max
  Clone ID: LIB3093-029-Q1-K1-E8
acaccacacccttcttcttcaacttcaactacattacatgttctctccggctctccgattttctctttgagatccaaaagccttcctttttcgcactctcaattctccattctaatctctagaatccgcttcttcaattcccagctttctccacaacaacaaaacgaatcttattcggctctcaaatcccaccaccatttccttcttttctttctgtctctgtttactatattttattcattcccttttgccccgttagtgatcatcgccacaagattagttttttccgctgattcccagcttagttgattagaataactcgttatccaacgtgatctgcaactggggcatttacagaatcatt

SEQ ID NO: 42603 - DNA, 349 bp, Glycine max
  Clone ID: LIB3093-029-Q1-K1-E9
cattattgaaccaccggtgggaacgagatggattacatagctggatctgactatccacagaggaaagggaaagggattgtcaattcacggatggaagtacgctcgctacaacgtcttacgcaaccatactcaagtctatgtgaagtacgctgccactatccatcacgatgctctgagctcatactgcatcgttcgctatgcaacgaattcggagactaaagattgactgaccataaatgaagattgggaatgactatgacaacaagatcgacgacgagacgacactcatggaaatcaagcttgtctgtcacatggaacatgataacataattaaaaataatgacataat

SEQ ID NO: 42604 - DNA, 237 bp, Glycine max
  Clone ID: LIB3093-029-Q1-K1-F1
cccacgccaaagaaaggtaaacactgcattactaggagttttcaaatggcactagggaaaaggtagagtttgtgtcacgggaggcactgggttcctcggatcatggatcatcacgagactccttgaagatggatatgctagtaataccactatcagatgtgactgatgactcatgaaagattgtagctttctcacaaacctacctggtgcatcagaatagcttataattttcaatgc

SEQ ID NO: 42605 - DNA, 315 bp, Glycine max
  Clone ID: LIB3093-029-Q1-K1-F10
gtctggatggcggcatcgcgaatcgtggcccatcctacgccctatccccaccgtcaatctccgccgtcagatgccccgacgttcctgaacctcacacttaatccaaaacggtaccgtaacctcggcattcgcgcctactttcgcggtcacgaggagaagaacacgtacgatctcgccgatcaaccccactccgtctagttgcgagccaccagcaccccctacgacgtcggttcccgagatctgctgtctctttcagcggcctttgtctacaactcagttatctgcttcgatatacgatagctctcgcctttgaga

SEQ ID NO: 42606 - DNA, 358 bp, Glycine max
  Clone ID: LIB3093-029-Q1-K1-F11
cgcgtcgttccgtactagtgtcaccgctcgaatatcttgttgtttggagcgatccgagataaactgtgtaaacatgtggagctaccagtacctctgtacaggtgatgagcttgtgtttgactcgattcggaacacggctactgagattggaatgctgcgggatgatgttgtgacgcgacacagaacaggtgctgctgctgtacacctggaaaaccccctgcatattttggccttcatggactatggccttattacaaacatggtttatacctatgtaactgtgattcaaacaatcgttctcaggcatctcagatttttcacctcacttttagcttgcagaggaactggcccacacttt

SEQ ID NO: 42607 - DNA, 327 bp, Glycine max
  Clone ID: LIB3093-029-Q1-K1-F12
atgcataggaatttaataaaagggatcttaattataaagtggtaggtattgataacataattcaaattaatacatgcatagaaaatatagaatatccaatccaatattgcttatttatattatttttttgatattggagtgcataacataaaggacaaaatagggattaataattcatattaatataataaatttcgatcgatttatcaaatagatatctatttgattatttcaaaaatattattattggaaattttagtaaagtaactaagaataataattaggaatttcatatttctaaattaatgtctaattctacatttaaaa

SEQ ID NO: 42608 - DNA, 299 bp, Glycine max
  Clone ID: LIB3093-029-Q1-K1-F2
ggcgttgttgcagctgaagaacttgctccatatcttgatatagattccacagagggaattaaggatgatgaatcctatattttacctgtgctcttacgatttgatggtcaacctgatgttgatgaggagggaaatattctgtataggtttccatctttgcagaggacagcttctcaaaagagtaagagaaaagaatatgttggaaggagatgggcagattgcgttggaattgagaagtttttcaaggagaaaaaatggcaattcaagtaaactggcacgccagagagagcaatggtcat

SEQ ID NO: 42609 - DNA, 254 bp, Glycine max
  Clone ID: LIB3093-029-Q1-K1-F3
tccggttcaaccacgcgtccgccacccttccgaaaaaaaaaaaaaaaaaaaattaaataatataaaataaaaaataaaaaaaaagggccggcccttttaaaggacccagcttaacttcccctttcttccaacttcaatgcccttcaatagggtcccttaattcaaattaattggccggcatttacaaaattattacttggtaaaaccctggggttcccaacttaaactccctgtaattaaatccccttttttca

SEQ ID NO: 42610 - DNA, 464 bp, Glycine max
  unsure (1)..(464): unsure at all n locations
  Clone ID: LIB3093-029-Q1-K1-F4
gtttgtgggagtactgcttatgttgcacaaacatcttggattcaaaatgggaccatcgaagagaacattatctttggtttaccaatgaacagacagaagtacaatgaagttgttagagtttgtagcttggagaaggacttggaaatgatggaacatggggaccagacagagattggagagcgcggaatcaacctaagtgggggtcagaagcagcgcatacagcttgccagggctgtgtatcaagactctgatatatatcttcttgatgatgtttttagtgcttgtgatgcacacactggcactgaaatattcaaggaatgcgtgaagggggctctgaaaggcaagaccgttattcttgttacacaccaagtagacttnctacataatgtggatcttatagtggtgatgagggacggaatgatagtccaatcggggaagtacgatgatctacttgcgtctggaat

SEQ ID NO: 42611 - DNA, 449 bp, Glycine max
  Clone ID: LIB3093-029-Q1-K1-F5
cccacgcgtccgcccacgcgtccggcaacacccaatctggggctgctaaggtttcaatattaatgattggtcagcaagccatagtagatgcttatctttgccttacacatttgactgcaggaatactagttgaatccctgttcaatgcttttgcaactgctgcatttttcaagtttgtggttttctcaatatttgagatgagatatctccttgccatctggaaggcaagtaggcctttgagcaatggtgaaggttgggagacaatgagacgtgaattgtcagttttatacagccgtttctatgggatcctattgggaggcatactgctcatgtatgaattccacaatcatttgagacctattcttcttcttgtatactcattttggatacctcaaataatcaccaatgttattcgtgactcgcgcaagcctttgcatcctcattatatc

SEQ ID NO: 42612 - DNA, 382 bp, Glycine max
  Clone ID: LIB3093-029-Q1-K1-F6
ttagacgccgcacgccagcaccgtcactgtttcaatcctcgaactgtgtcttcttcgctttctggtctttttattacgttttgttcatcgatccatcgccaaacatgccttccagtcacttgcttctcgaggaacctattaggatggtctccatccttgagccatccaagcctagttttttctctgcaatgacaaagattgatggtaccctgcgacctaaatctagatccgtcgaaaccatttctggttgcctcaaggctggcatgtctagtgctcgttttgacttttcatggcatgaccctgagtaccaccaggagactttggagaatttgaacgctgctatcaagagtactaagaagctctgtgcttgtatgctggacac

SEQ ID NO: 42613 - DNA, 395 bp, Glycine max
  Clone ID: LIB3093-029-Q1-K1-F7
actttttctacttaccttcactgttaatccatatacgatggcagtcatggcaaccagaaccgtgtcttcaaacccaagactctcatactgcaacggaaagcccgacacatattcttcccgcgttgcgcccaccaccaaattatgactcatccaaacacggcacaatttccatgttcctaacctcactgccctacgacctacagtccttcaaattccagcccatcaaagaatccatcgtgtcacgggaaatgacgcgccggtacatgaccgacatgataacctacgcctacacctacgtcgaaatcgtctgagccggttcggccgggctgtactgcgcgtacgagctcagcaagaaccccgccgtgagcgtggccatagtcgaacagtcagtgagc

SEQ ID NO: 42614 - DNA, 294 bp, Glycine max
  Clone ID: LIB3093-029-Q1-K1-F8
cccacgcgtccggtttcaccgcacgaatatcttgttgtttggagcgatccgagaaaaactctgtaaacatgttggtttaccaggacctccttacaggtgatgagcttctctctgactccttccgttacaaggaaattgagaatggaatgctgtggcaagttgaggggaagtgggttgctaaaggagcagttgatgtagacattggtgccaacccttctgctgagggtgtaggaaaagatgatggaattgatgatgcagcttgtaaggttgttgacattgtttacacattcagac

SEQ ID NO: 42615 - DNA, 292 bp, Glycine max
  Clone ID: LIB3093-029-Q1-K1-F9
atcaatcttaccacatcttgctgagactacttagtctaatagaggctctacatggcagctagagagttcatctttgtggagcttctgctggttctgaatatggccgctgtattggtgttaaactatttcgaggtttaatacttagcttagcagtcggctgtatcatattgcgacacgacagaggacaattgatgttaccctacaacttgaaaacccgctgcatattttggacttcatgggctttggcctaattacaaatatggttcatacccatctaactgtgattcaaaca

SEQ ID NO: 42616 - DNA, 406 bp, Glycine max
  Clone ID: LIB3093-029-Q1-K1-G1
cgtccccttggccggccccttggggaaaagtttccattgtcagggctgaaggaattgctcaagaaagggttaggtttaggcgacatggcgttcaacgccggcgagggagccatcacctggttccccggcacatggccgccgccacacgcgccatccgccaccgtcttagacttgccgacctagccatcgatgttcgtgacactcgcattcccttctcctgcgccaacgccgatctccagccgcacctcttcgacaaacgacgcgttgaaacactccataaattagacattgactaccctaacctgatgcataaatggacgcattattttgagagtggtaatccgaattgcgttgcgataaacgcgcacagcatgagttccgcgaaaaacttttggaagtggcggag

SEQ ID NO: 42617 - DNA, 358 bp, Glycine max
  Clone ID: LIB3093-029-Q1-K1-G10
cggacgcgtgggtttttttttacataaattccaaaatattaatcaaataataataataataatgaaagtgccgctaatctgtgacttaatttacaagaccagagaaaatatacagaacaaacatcaacaataaggtaacatctggcatcatgttatttacagccatataggatatggccagattaatagatcttatggcatggttgatccattgtagactccaattgcttcatgaatgcacctaatcaaatgctttcaaagaccatcataggcaccaccaacgcttatgtgagctctgctcataggaacacctattgctacataaattgcatcattcaatttgcacgaatgctgcacc

SEQ ID NO: 42618 - DNA, 359 bp, Glycine max
  Clone ID: LIB3093-029-Q1-K1-G11
tgaaggcgaaaaagcagaagaggcacaggacgattttgacgttttacactgcttgcttcggttttcggaagccttacaaggttctatgtgatggcacatttgttcatcaccttcttgtgaatcgaataacccctgctgacacggccattggcaatgtcctcagtgctacgatcaagctctacacaacaagatgtgttctagctgagttgaaacgacttgatagctcgtattctgaggctctagaggcatctcatatacttatagttgcaagatgtgatcatgataaacgttatatcgcatatgcttgcatcatggaagatgttggagaaaaaaattcttagcatttctttgttgctaat

SEQ ID NO: 42619 - DNA, 357 bp, Glycine max
  Clone ID: LIB3093-029-Q1-K1-G12
cccacgcgtccgggacaagcgaagaatgcttcatgttgtatatcgtgttggggacttggacaggaccataaagttttatacagagtgcctaggaatgaagctcctcagaaagagggacataccagaggagaaatatactaatgcctttcttggatatgggcccgaagactcacactttgttattgaactgacatacaattatggagttgacaagtatgatatcggaactggatttggccattttggtatagctgttgatgatgttgcaaaagcagtggaactaatcagagctaagggtggcaaaataactagggagcctggtcctgtcaagggagggcgttcagtaattgcatttat

SEQ ID NO: 42620 - DNA, 390 bp, Glycine max
  Clone ID: LIB3093-029-Q1-K1-G2
cccacgcgtccgctagaacactagtttgttgagcactgcgatgaggaagtggacggttgcttccgctctccttcttctctctctcctctttctctttgcagatcaaggtcgaaagtttcaggcgaatgccgagggagattccgacgagcttgtagatccacccaaggtggaggacaagatcggtgctgtgcctcatggcctttcaaccgattcagatgtcgtcaagagggaggcggagtcgatctcgaagagatctctccggagcaacgcggagaagtttgagttccaagcggaagtgtcgcggcttatggatatcatcatcaattctctctacagtaacaaggatatcttcctcaaagagttgatttccaatgcttctgatgctttgga

SEQ ID NO: 42621 - DNA, 454 bp, Glycine max
  unsure (1)..(454): unsure at all n locations
  Clone ID: LIB3093-029-Q1-K1-G3
cccacgcgtccgcccacgcgtccggcaccacatcgccacacaaagcctcaacgaagtgactattcagctcaatatgtcgatgctttctccaatgcccatcactcttctttaactataccagaattaacacaattccaactcctccagaatgatccccaagagaaggttggttcctaatatcatctctaattttttcttcttcataatttcactcttatagaataataacaaaagaagtaataaaaaatgaaaattgcgtcccgtcctaaccgttggactacaaacgcttgtcatgttacttagcattactttttgaacttaatataaaaataatcttgaataagtacccagattattagttatctgattcacttctgattttgagactttgagttatacaaattatgtttntcttttaaataaccttcgtatgggctagatctcgtatttattt

SEQ ID NO: 42622 - DNA, 290 bp, Glycine max
  Clone ID: LIB3093-029-Q1-K1-G4
acgccacgcgtacgctttaacaacaccaccaacaatgggagcacgaaagagactctcttcttgcgaacctgcttcttcttctcctgccgcaacaaatgaaaacacaaacacaactgccaaacccaccataacagaccctccaatcgcgcctcccaaatggggtcttcttctgaagctctctctctatgtgctcccttacttgtacctactctatcaccactaccccatcgagccggagctccgaagttcgatcctcatcaacgccggaatgagcctcgaggggctcttcg

SEQ ID NO: 42623 - DNA, 454 bp, Glycine max
  Clone ID: LIB3093-029-Q1-K1-G5
ctttcgcaccttgcagaatcaattatctctctcaatcgtctttcatggctcgtaccaagcaaaccgctcgcaaatccaccggtgggaaggctcctaggaagcaactcgccaccaaggctgcaagaaaatctgcacctaccaccggtggagtcaagaagcctcatcgctatcgtcctggaactgttgctcttcgtgagatccgaaaataccaaaagagcacagagcttctgatccgcaagctcccctttcagcgtcttgttcgtgaaatcgcgcaagacttcaagactgatttgaggttccagagtcacgcggttcttgcgcttcaggaagctgcggaggcttacttggtgggtttgtttgaagacaccaacctttgtgcgatccacgccaagagagtgaccatcatgcccaaggacattcaactcgcacgccgcatccgtggagaacgtgctta

SEQ ID NO: 42624 - DNA, 340 bp, Glycine max
  Clone ID: LIB3093-029-Q1-K1-G6
ggaatatgccagatggcatgtttgatgtgactcatcacttattccttggtgcatgaatgcacgcatggtttgctgcagttgctgatactcgctatgctgtggttgttcctctgattggtgttcagggattaagatgggccttatacaacgataaatggcaggctcgagttaatcagttaaagcctctttttgagggtactattcattcaagcatgctaacagtggacaactgaacatatattctgaacatacttgggtacatggatacagtggctcgtgatgatttgggtaaagatgttatggacaaataagtggtggataatgtgtgggacagaatatc

SEQ ID NO: 42625 - DNA, 452 bp, Glycine max
  Clone ID: LIB3093-029-Q1-K1-G7
gatcattccaatatgggcaacagaattgttatgggaaattcccttctctttatctctttcttcatcttcagctttagtttcttggaggctcaaaaggctccagcagtttatgtgtttggagactcacttgttgatgttggcaacaacaattacttgagtctctccattgaaaaggcaattcttcctcactatggcattgattttccaactaagaaacccactgggagatttagcaatggcaagaatgctgcagatttaattgctgaaaacttgggcctacctacttctccaccttatctctccctagtatctaaggtccacaacaacaacaagaagaacgtatctttcttgggtggtgttaattttgcctccggaggtgctggaatatttaatgcctcagataaaggatttaggcaatcaatacctttgccaaagcaagtggactactactc

SEQ ID NO: 42626 - DNA, 465 bp, Glycine max
  Clone ID: LIB3093-029-Q1-K1-G8
cccacgcgtccgcccttccatttcaactccttctcgcgcgatagattgctctttctcctctgctcctccctttcccattcctcctttccctctcccctccgctcccccaatttcccccaaactttctccctccgccgcttcgccgccgcccctctcgctcgccctccgccgccgcctccgcccctggacgccatggcccagaaaatcggaaagtccacgcgccgccccggctcgtcctccaaggcccgcgtctacgccgatgtcaacgtcgttcgccccaaggaatattgggactacgagtccctcaacgtccagtggggggagcaagatgattatgaggtggtgaggaaggtgggtagggggaaatacagtgaggtgttcgaaggtgttcactgcacggacggtgagaaatgtgtcattaagatcctgaaacccgtgaagaagaagaagatcaagagggaaatc

SEQ ID NO: 42627 - DNA, 334 bp, Glycine max
  Clone ID: LIB3093-029-Q1-K1-G9
ctaatactggacaaatggaggcaaacaaacctgagaggtagaaaattactgagcctaagactccatatcatccgatgattgatgacgacagacaactatcccatgtacgaagaagttttgatgcatatattgatgatcaacatcacacgatgcatgctgaagccatatggagtgctgtgaatgatgtagacttcagtagcagaagaagcactggacaatctggtggttgaacatcatctgaagatgtatcagaaacattggagcatgatgacgatgataggaacttgagttataaagagcacagaaaggcccactatgatgaatttcttaaagt

SEQ ID NO: 42628 - DNA, 259 bp, Glycine max
  Clone ID: LIB3093-029-Q1-K1-H1
ctgtctcttaactttgatactatgctcacggatttgatctgtttcgcgtacaggaactcatacgaatgaatactgcactgggcaagggagcagcgagtgccctataagaatcactgaaccctgttgatgaccgagtggttggatagcggaaggcttctcgttagcctgagaacagcatatcactcctatatggagatgcagagcctgatagaccccatcatgcctaaaagaccactgagcgctatcttcgtgttccttg

SEQ ID NO: 42629 - DNA, 360 bp, Glycine max
  Clone ID: LIB3093-029-Q1-K1-H10
tggactcatcaatttggattccagacctcatcgaaatacagatagcaaatggtacatcagcccagaggaatggagcgaaggaacttatcctacttgggcacatggtcccggctatgtggtctcacatgatatcgctaggacggtgtccaagaaattcagagagaaccatttgaagatgtttaaactagaagacgttgcaatgggaatctggatcgctgacatgaagaaggaaggtctagaagttcgctatgagaatgaggtcagagtgtaccctgaaggttgtaaggatggttatgtggttgcccattaccaaggccctagggagatgctctgtttgtggcagaagcttcaggtagataa

SEQ ID NO: 42630 - DNA, 215 bp, Glycine max
  Clone ID: LIB3093-029-Q1-K1-H11
gaggagacacaccttcagtagcagcagtcatggttctcaaaaccgaactatgccgattcagcggtgccaagatctactcagggtaaggcatcagatttgttcgtggtgattctcaggttttcctgtttgctaactcgaaatggaagaggtatttctacaacaggttgatatcatcaaagctcacctggactgcattgtacagaaagcatcacttg

SEQ ID NO: 42631 - DNA, 202 bp, Glycine max
  Clone ID: LIB3093-029-Q1-K1-H12
gaggagcctcagcttcaactgcagacgccatgtgtatcactacagaacgatgcacatgcatgacatccaacttttacccaaggaagggcctaccatataagcagagaccatgataatgctttgatggagtctaactacaacgcgcaacaaggctctcaacgaactgactgttcacatcaatgtgtacatgctctgtacagtg

SEQ ID NO: 42632 - DNA, 205 bp, Glycine max
  Clone ID: LIB3093-029-Q1-K1-H2
acgagtgatcgaagcttcacatcagtccatatccagtttatggtttccgatccatagcctacctttgacggatcgaaaccttaaatttgggattaggtttgagcaatctggttggtagaacctttggtcttagagagttaagtcttatgtctggattagacgatcaaattcttactgccttggatccttttggtgatgcaaatgc

SEQ ID NO: 42633 - DNA, 460 bp, Glycine max
  Clone ID: LIB3093-029-Q1-K1-H3
cgacaacgtcaaggctaagattcaggacagggtgggaatccccccagaccagcagaggctgatgttcgccgggaagcagctcgaggacggacgcacccttgctgactacaacatccagaaggagtcaactctgcacttggtgttgcgtctacgtggtggtatgcagattttcgtgaagactcttacgggtaagactattaccctcgaggtggagagctctgacaccattgacaatgtgaaagccaagattcaagacaaggaaggcataccaccggaccagcagaagctgatttttgctggcaagcagctcgaggatggaaggaccctcgctgactacaacatccaaaaagaatcaacccttcaccttgttctccggctccggggggggttttaagctcgtagggtaaaggtggaagtgttcccaaaacatttgaagaactttgaatgttaatgggtctgg

SEQ ID NO: 42634 - DNA, 224 bp, Glycine max
  Clone ID: LIB3093-029-Q1-K1-H4
cccacgcgtccaggcttctatttatgtctcgttccgaatcacccctcaccagtccatgctggggttgagggccaaccacatcgtgggctgacgcacgctcgatgactacaacatgccatccgactctacacagaacttatggctgcgtcatatctataccctgcagtttctcgtgcttacatttacaaatgatacttcaacggctcagacgtgcaacggtcaca

SEQ ID NO: 42635 - DNA, 266 bp, Glycine max
  Clone ID: LIB3093-029-Q1-K1-H5
cccacgcgtccgcttaagcttccgacgaatttggtctttctaccatttgatattgaagcgctgcttccaacagttagcagtgggataatcttctatgtggtcaataacttgagtattctttaaccgactctgacttgaacctgtacatggatcatggctagtgtctctctacatcaatactgtgaagaattttttaaccgtagtgcatttctctgatgatacagcccttattacagggagtacttattgatttgcatccctgacag

SEQ ID NO: 42636 - DNA, 315 bp, Glycine max
  Clone ID: LIB3093-029-Q1-K1-H6
cttaattgccttaaggaacgttcgagaccacagaggtttctatagtcttcttctgaggagagcttgtcttctcttgctcattcatctcacttccaattaacgaacacgctttccaccaatttgaatcaccaacggctcggtctttctgcaacctcaaggttcgctctgctcttgaagccgacggattcttcaacactgtcaacaggcttgggtacacaatagcgacacaaagaccaacaagaggaagagcaagcttcatcaacggcaagtcatgggaagacaaggtacttcgaagaagtgctgaaaacgtttcaa

SEQ ID NO: 42637 - DNA, 269 bp, Glycine max
  Clone ID: LIB3093-029-Q1-K1-H7
agcgcacagctgtcgtggggcgactcgctgtctggatcgggacatagacagatagggtctccgtgcggtcgctgtcattggtttggcgttcaattgatgaagaacaatgtcggtgacagcgcgtgttagtgatactgtaatagccattacggataagctcagaggttaaattggccaaactaaagttaaacgttattggcctcggaaaggtcctgaatgggctgatgatgagaacgaagaacatgctgcccctgccgatattagaccct

SEQ ID NO: 42638 - DNA, 137 bp, Glycine max
  Clone ID: LIB3093-029-Q1-K1-H9
ctagagtcatcttgctgtttgtattctggctcagatggatacatagtgtctgatgacggacgaggtaaagggcctcctaatgcttaagaccatggcactgattgactctggcatactcactctggctgatgacttga

SEQ ID NO: 42639 - DNA, 287 bp, Glycine max
  unsure (1)..(287): unsure at all n locations
  Clone ID: LIB3093-030-Q1-K1-A1
gccacgcgtgcaggttctaagggctgctatacatactacggtacatactcaggaanatactcgggttgatgttattgtgggggggccatttttaagcccccttccaattcgccctccaatttaccctaatttaatacaaatttttatacaaaaatttgggcaacaagagggacttcctgagtaaatacatccttgaatacaacaaggttcccaagattgttcccaatgagcatcccattgcacagcccatagcgaatgctgtatacattgatgaaaacattgataac

SEQ ID NO: 42640 - DNA, 264 bp, Glycine max
  Clone ID: LIB3093-030-Q1-K1-A11
acggaaattttaaaaatgactgggataaacttaagaattcaattattgaaattgaataagcgaacgatttaattggattggtcgaatggtatcaaaaaaatggagtactaactcccatttcttatttattattgaattaaccgatcaacttgctttgttatcgaacatttctttttgatttcaaaaattttccggaaaaaatttgaatctatttttatatgcgaatcaatcctactacttctggtcctgaggtttctgcgcttg

SEQ ID NO: 42641 - DNA, 252 bp, Glycine max
  Clone ID: LIB3093-030-Q1-K1-A12
cccacgcgtccgcccttctccaacaagtcttttaaaaactcttccatgacttgcaaccggatggcatcgtcaccgacatgttccacccttggagtgtcgatgctgctgctaaactcggcattccgaggatcatgttccacggcgcaagttatctcgctcgctccgctgcgcactccgttgaacagtacgcaccccacttggaagcaaaattcgacaccgacaagttcgtgttacctgggttacccgataact

SEQ ID NO: 42642 - DNA, 397 bp, Glycine max
  Clone ID: LIB3093-030-Q1-K1-A2
gctactcttgcaggttcttattactgctatacatactacggtacatacattggaagatactcaggttgatgttattgttggaagcctatttgtaagcacatttcagatcacccttcagataaacctaaatgtaaacaaattttattaaaaaaatttggacaaaaaaatggattccttagtaaattgcaccctcaatacaaaaaagtttccaaaaatggttccaaagatcatcccaatgaacaatcccttgcgaagagtatattcattggtgaaaacatcgataacaaaccgaaaaaacattctgattcttaccataaagccttcgcaagaacctcgactagattcatggataaatttattgatggtgctatattcgaaactgtattcacgattgatt

SEQ ID NO: 42643 - DNA, 414 bp, Glycine max
  Clone ID: LIB3093-030-Q1-K1-A3
accaaaacgaaaaaacaagcgtcatcaccttcttcactccctgtttctgttggttccatccctgcattcacaccttgatccgtgatctcctaatttctcacttgaaagtatgaagcaagaatagataagtaatggcaggagcagaagcaagggctctgtggcagagaactgctaatcgttgctttgtccaagaagatgcaaaaagagctcccaagttggcttgttgccaatcttcatgtgcaacatcaaaatcagttgatgctggacctgccagtacagcagatgaatctgatcatactacagttaatgttacccattttaacaggaaatcgtcaatttctaatctatcaccagactctaggtggtggttgcatttgcaacctaattatgggtatcaaaagggtttaacatatg

SEQ ID NO: 42644 - DNA, 202 bp, Glycine max
  unsure (1)..(202): unsure at all n locations
  Clone ID: LIB3093-030-Q1-K1-A5
ccgttgantattacaatgacaatggtgccagggttccggttcgtgtccacaccgtgctgatcgccacccaacacgacgagactgtcaccaatgaccaaattgctgctgacctcaaagagcatgtgatcaagcctgtgatcccagagaagtaccttgatgagaagaccattttccacttgaacccttcaggccgttttgtcat

SEQ ID NO: 42645 - DNA, 264 bp, Glycine max
  Clone ID: LIB3093-030-Q1-K1-A6
atgatcttctgagcttgaacagttgttgtggtccggggtcacatggagaaaagcacagaagcccaagatttccctatcgcaaaggctgccatttcattcttgcaggataatgtcccatcatcctttacttttcctggatggaacaaaggtcgcattgtttgtcagcagtcacagctgagacgaattctctcgggcactgaatcatcttctagtaggaaaaaaatggataaattagtatctttaagtaataccccattgactact

SEQ ID NO: 42646 - DNA, 285 bp, Glycine max
  unsure (1)..(285): unsure at all n locations
  Clone ID: LIB3093-030-Q1-K1-A7
ncncgcntgcaggttcttatggctgctatacatgctacggtacatactctggcagatactcaggttgatggtattgtggggagcctatttggaagcccatttcagatcgcccttcagattgaccgtaaggtgtacaaatttttatacaaaaatttgggcgacaagagggacttgctgattgaattccttcttgaatacaacaatgttcccaagattgttcccaatgttcatcacattgcacagtctatagcgaatgctgtatacattgatgaaaacattgataac

SEQ ID NO: 42647 - DNA, 380 bp, Glycine max
  Clone ID: LIB3093-030-Q1-K1-A8
aggttccatccctgcattcacaccttgatccgtgatctcctaatttctcacttgaaagtatgaagcaagaatagataagtaatggcaggagcagaagcaagggctctgtggcagagaactgctaatcgttgctttgtccaagaagatgcaaaaagagctcccaagttggcttgttgccaatcttcatgtgcaacatcaaaatcagttgatgctggacctgccagtacagcagatgaatctgatcatactacagttaatgttacccattttaacaggaaatcgtcaatttctaatctatcaccagactctaggtggtggttgcatttgcaacctaattatgggtatcaaaagggtttaacatatgaacagttaaatgcatt

SEQ ID NO: 42648 - DNA, 390 bp, Glycine max
  Clone ID: LIB3093-030-Q1-K1-B1
cggacggaacccagtgctattttcacttcatttcattagttgtgataatatcaaactaagcgcgaacgctgtatacctgcgcggagtatctcgcactaacaaccctcactctacgaactcgacaacctctctgttctcccgctatgcatgacgggtggcgagctatagccctaagatccaacacatttgcatgtccgacggtattctcacaacaacgctgtcgtcgacgtcgccgatgtcgctgacatctcgcttcgttccccatgtctctgtgttggagcaggaggaggacaccttctgcgacggagaccgacccagcttctcccgcgaccttaaactctttgacgggaatctccccttcaatgtcgacagtgcgcggctcgcggagct

SEQ ID NO: 42649 - DNA, 73 bp, Glycine max
  Clone ID: LIB3093-030-Q1-K1-B10
cccggtcggcccagcgtccgttcaaactccgtctttccgaatcctctctttgtgataggttctggtctgctcc

SEQ ID NO: 42650 - DNA, 161 bp, Glycine max
  Clone ID: LIB3093-030-Q1-K1-B11
cggacgcttgggttgcagtcgcaaaggaaaaccctagctagtagtctcagttcgtttgagacgaaaaaattggcagagggtctcgttctccacggaaccatgcgcgcccacaccgacgttgtgacggcgattgccactcccatcgacaacttcgacatgat

SEQ ID NO: 42651 - DNA, 128 bp, Glycine max
  Clone ID: LIB3093-030-Q1-K1-B12
gaaaatcaaaccttctcatcgaaaaagtcacgtaacaaatttttgcattctagtaaccggacgacatatttatagacgtggtgcaatctctaaaaaacataactattactaccattggcaatatatga

SEQ ID NO: 42652 - DNA, 463 bp, Glycine max
  Clone ID: LIB3093-030-Q1-K1-B2
ataacactcgatccagcacataacaatggaaacgcagctttacgtgttttctctctagattctgctcttaaacgccgtcgttttcaaactctttttttccccttcgcttctctgtctttgtaaccgaaaggggggaaaatataattaacaccgatttcgcgaccaattcttcttctgcgttgaattgggacaacgagaaattggatctcagtttttggcaggaaataaaaattgcatttgagtgtaaaataacagagtatagtgtagggccttgttcttgatactgtgctaaatttgttggatggcggagaaatcatgcatcaagcgccttcagaaagaatatagagccctttgtaaagagccagtttctcatgttgtggctcgtccttctccaagtgatattcttgagtggcattatgtgttggagggaagtgaaggaacaccttttgcaggtggatattac

SEQ ID NO: 42653 - DNA, 211 bp, Glycine max
  Clone ID: LIB3093-030-Q1-K1-B3
gacaaatcacacgttgtaaccggtgtcatgggaacttatggttactgcgccccaaaatatgcgatgactggacagctgactgtgaagtctgatgtatatagttttggggtagtcttcttggagctgattactggccgtaaagccattgacagcactcgaccccatggagaacaaaaccttgtcacatgggcacgtccactgttcagtgacc

SEQ ID NO: 42654 - DNA, 324 bp, Glycine max
  unsure (1)..(324): unsure at all n locations
  Clone ID: LIB3093-030-Q1-K1-B4
gcggacaaagtacgacttncaacccatatcataatcttttaaaaactcttccatgacttgcaaccggccgccatctttaccgacatgtgccacccttggagtgtcnatgctgctgctaaactcggcattccgaggatcatgttccacggcgcaagttatctcgctcgctccgctgcgcactccgttgaacagtacgcaccccacttggaagcaaaattcgacaccgacaagttcgtgttacctgggttacccgataacttggagatgacgcgcttgcaattgccggattggcttaagtctccgaatcagtacactgaactgatg

SEQ ID NO: 42655 - DNA, 167 bp, Glycine max
  unsure (1)..(167): unsure at all n locations
  Clone ID: LIB3093-030-Q1-K1-B5
aacacacatcccattantgattccttcttataatcttttacactccacctctctcaataaactgtgcggctctttctcaaacccatttgcataatctatatcaaaacacacaatatctctcatactgatcaaaaaaaaaaaatacttcattctcctgattcaccata

SEQ ID NO: 42656 - DNA, 371 bp, Glycine max
  Clone ID: LIB3093-030-Q1-K1-B6
gtaatcctaaccaacactcacacatggtttgtttttttttggatccatatccatagcaaggagggcgattatttgccaaatcgcgagttcccttttctttaaatcaaacaatcaatttagcttaagcaacatcgcaaatggaagcaatgacaagggtttcagcacaaccaacaacaacaacttctctattatacccaaccctccttttacttctgcttcttcttcttcttttgaccctaataatccccgccccactgcaaatcacactttccaattattctttcaaactttaaagttcttttacaactaccaatattgttcacaagattttaaccattctaccatcaaaaacttctaaaaatttttaaatt

SEQ ID NO: 42657 - DNA, 250 bp, Glycine max
  unsure (1)..(250): unsure at all n locations
  Clone ID: LIB3093-030-Q1-K1-B8
attcaaggaaacatacgaggacattcaagaactcattgactccctctaatacttcagagcataagagggaactaattatgttgccacatctaatgccatatttcatgatatctctcatgancctttttctttcctttttaccttcctttttacccctcatcatttcccttctgagccacactttcaatccaatgtcccattcattcaatctttcatatactttactaaaactctaactttaaatttgcgg

SEQ ID NO: 42658 - DNA, 420 bp, Glycine max
  Clone ID: LIB3093-030-Q1-K1-C1
cccacgcgtccgattttctgtaaaaaaaaaaaaaaaatcatgttcggatattcgggtatcggggtgggaggaaggaaagacactcccgccacggaaatttctgtggctctgtgctttgagactgaatctcatctacagtgacaacatcgatcttcttccacagtttccactttccaccaccaaatctacgttagggttcgtcttcatttcaaattcaacaacttcgccaaccacgccatggcaactcttcaatcactgcgaccttctttccgtccatcaatcccatccccaaattctcacactttcccagccactccctttaattattcccccaaatcgattggctcaaagggtggcagtgttaccgtaagacactctatcgtttctcccagggtttcggtttccaattcggagtatagt

SEQ ID NO: 42659 - DNA, 211 bp, Glycine max
  Clone ID: LIB3093-030-Q1-K1-C10
cccctcccatcatgatatacactcctaaacaacatccaactttcttgagcgatcccaagacagctcactccgcttaaatatataaaaagcgcgggcccattctctttccctactttcttttacttttcatgtccccttaagaaaaacccaattccatttcaatcccttttttctttttttgttcttgctgctgattttatcaactaatttt

SEQ ID NO: 42660 - DNA, 235 bp, Glycine max
  Clone ID: LIB3093-030-Q1-K1-C12
cccactcatacgtatcttaccactttctattctaaattcactctcagaaattataatcgcgcggctatctaacactgaatcagctcactattttacagataaagatgccacccgaaatgatgttaatctctccgattacaaaagaaaagtccttcttcttgtcaatgttaccttacaatgcagcttgactaattcaaactacacatagcttaatcaattgtattgaaaatacaaa

SEQ ID NO: 42661 - DNA, 423 bp, Glycine max
  unsure (1)..(423): unsure at all n locations
  Clone ID: LIB3093-030-Q1-K1-C4
atcatgatttagacgcctaaacaacaacaaactggccagggccgtccccaaaaaggctaactggtctgaaaaatttcaaaatcctgttagattctctttcctactttcttttacttttcatgtcgtctgaggaaaagccaagttccatntcattcctttttttctttttttgttggtgttgctgatttatcagctaatttgaaacctccactgtgcagtgatgtttctaataatgacctctgtggaacaataccagtagatggcaactttgaatccttcccgatggaaaggtatatatagtaactattgcaattcttgcctcattagtcttgctgataataacatactcttaataagtccaatgacctttggatcaaacacgtgctggtgaatatgccagtttaaccatttagaacttacaac

SEQ ID NO: 42662 - DNA, 450 bp, Glycine max
  Clone ID: LIB3093-030-Q1-K1-C5
acgaccacgcgtccgattaactgtttccattcacctgaaaaagaacaccgtaaccctcttcaccggtgtggctttttatacacgcctgatctctctttcttcttcaatccatcgtttctcttcaatcgatcccactcaagcttttgcaagagtctccagcgtgtcgttctcaaagctggaacagctgtggttactcctactgatagcatactatcattgggaaaacttagaactctctcctatcaccttaaatagctaaataacacctattatgatgttatattagagacttcaggagcatatcctcttggccggcaaagactaagatatcgaacattggtcaataccaccttttcagatcttcaaaatccacaaagagatctttatcggaaagcatttgcagctctaccacaaagtactctcatcgctctctatgatatcatgtttagt

SEQ ID NO: 42663 - DNA, 397 bp, Glycine max
  Clone ID: LIB3093-030-Q1-K1-C6
caaaaccagagtggttctagtaatccggtgcttctataggatgggaactagttaatggcatggcgggcgaatatctagcttcggcgctgaatcccccttatcaagagaggcaggaaatgtgcctgaaactgggtcactctctattgttgtgcttggcgcttctggggatcttgctaagaaaaagacatttcctgcacttttccatctataccggcagggattcttaccagcagatgaagttcacatttttggctattcaaggacaaaaatatctgatgatgaattgaaaaaccggttgcgtggctatcttgttccaaacaaaggtgcttcttcccaactgttggaagatgtaaagaagttttacagctgatcaaatatgtaatggctcttattattc

SEQ ID NO: 42664 - DNA, 451 bp, Glycine max
  unsure (1)..(451): unsure at all n locations
  Clone ID: LIB3093-030-Q1-K1-C7
tcctattttttgtaaaaaaaaaaatttaatcatttcggatttcntttatccccgggatttttaaaaacagtccccccactcaaatttctgtcgctctttcctttgaaactgaatctcatctacagtgacaacatccatcttcttccacagtttccactttccaccaccaaatctacgttagggttcgtcttcatttcaaattcaacaacttctccaaccaccccatgccaactcttcaatcactgccaccttctttccgtccatcaatcccatccccaaattctcacactttcccaaccactccctttaattattcccccaaatctattgcctcaaaaggtgtcatttgttaccttaaaacactctatcctttctcccaacgtttccctttccaattcccagtttctacccaaattcctaaaaatctctttacgtttctattttcacttcc

SEQ ID NO: 42665 - DNA, 444 bp, Glycine max
  Clone ID: LIB3093-030-Q1-K1-D1
ataagcttgtccaggttagtctttctcagaatcctatagtgaaggtgaagttagaggatatgatggctgctactagtaatttcagcggggagaatgttcttttcgcgacgaggaccgggactacgtataaggctgatcttccggatgggtccacgctcgcggtgaagcggttgagtgcgtgtaggatcggggagaagcagtttgggatggagatgaatcggttggggcaagttaagcaccctaatctggcgccgctgttggggtactgcattgtggaagaagagaagttgttggtttacaagcacatgtcgaacgggacattgtattcattgttgcataagaatggtggcggtgcattggattggttgatgaggtttaggattgcattgggtgtggccagggggctcgcgtggctgcaccatggctgccaccctccgattatac

SEQ ID NO: 42666 - DNA, 131 bp, Glycine max
  Clone ID: LIB3093-030-Q1-K1-D10
tctttcaaaatgcaaacatccttaactttctctacccccaacattataccatccccgcccacattttataacacccatattaccatcttttctaccaaattaaaaaccccccactcctcacctcattactc

SEQ ID NO: 42667 - DNA, 345 bp, Glycine max
  Clone ID: LIB3093-030-Q1-K1-D11
cccacgcgtccgatctcgaatacccactaactcacgaaagccgggatctttcacaaaggggaggcctattctaagggtgcgtaaccgcatggataagctcacactaacccgtcaatttgggatccaattcggttccttaggacgtatcgggaaggaattttggaatgtaataatatcgattcatacacatacagaagaaagggttctctattgattcaaacgctctacctacgaaatatggatagagaaagatgtaaaaaccgaggatttcacatattactttttctcgaaaaatcgatcttatttttttcgcacttttcgctcaatgattaaaatggttcatat

SEQ ID NO: 42668 - DNA, 458 bp, Glycine max
  Clone ID: LIB3093-030-Q1-K1-D3
ttggatcttatcctgttgaaccacccccaacttttttaaccatggccctcctcaatcactggggggatgacaccgtcgccggtcctcgcccggagaacggccttggcaagctccgaaagcaccacaccttcgctttccgatctgcctccggcaaggaatcagacagcggaagcgtgaaatcgtacggtgaagatttgccggaagatgcggtgagagtgacgcgaagtatcatgatcgtgaaaccacctggtggtaaccagagtccgagcggatccgctccggcttcccccgccggttctactcctccggtgtctcctttttcgggagctagagagtccttccgttttcggagaaggtcgacatcagatgcgtacgagaagacaggccagaacaaaccaagctcttcttctcctttcgatgtgtgacaaatgagcccgaccactatctcctccatatat

SEQ ID NO: 42669 - DNA, 436 bp, Glycine max
  unsure (1)..(436): unsure at all n locations
  Clone ID: LIB3093-030-Q1-K1-D4
aagagttctttcaaaatgcaaacagccttaaccttcgttgcccccaacgttgtgccattggcgcccacaaagagtgtctcccatattaccatctttcctaccaaattgaaagccccgcgctcctcacctcgttactctccgattagggttgcaaccgtggagcccgacacttcaactgtcgactacaactctgcgttctcagtgtttcctgcagaagcatgcgaaactgtaggaggggaagcctgcatggcggagatgtaccctgaaacgaagctacagccagaggctaagactccacgagtcgttacagagaacgttgagagagagtatcttgaatacgatgatcctaaaacggtatttcgaggagaggcttgtgatgatcttggaggaactntctgtgagaccgagtatcagaaggtgtctactagagaaatgt

SEQ ID NO: 42670 - DNA, 357 bp, Glycine max
  unsure (1)..(357): unsure at all n locations
  Clone ID: LIB3093-030-Q1-K1-D5
gagaagcgtacanactcgcgaacgttaacggctgtggccactcacacctttgcaacatccctgattgtgttacgattcacgacgggtgctgaacctcctgcttatcacctatctcgctatttcacttgcgaacatcataccctacacatcagaccgcgctaaggctaacatcgttgaaccacaaccctctgcatgcacagccgacagatcccccgactgcgccactacgtgcaagcttataccctttcggacaggacacagctttgacctccacccattcgaacccagatatacactaatgatcagaagaatcaacattccccacaatagaatgtgcaaggctcattccgatggtga

SEQ ID NO: 42671 - DNA, 328 bp, Glycine max
  Clone ID: LIB3093-030-Q1-K1-D6
cacagacattgaaaaatggctctaacacttcgctcttcaatttcccttgtcaaccagaaagagaccgggctcctaaaagccaaagacgaggttcccaccaaagtgttttactttggaaaaaccaacccatctttccgtctcagagcaaagagttccatgcaacaaacacacgtcacacgaaacaacagctttaactccgaagtaacgatgataaacgagaaaagggagaaggttcacgctccatcggttgcacataaccacaatgattcaatgagagtgccagtgtttgtgatgctgccattggacactgtaactatgggagggactt

SEQ ID NO: 42672 - DNA, 300 bp, Glycine max
  Clone ID: LIB3093-030-Q1-K1-D7
atgttcttttcacgacgaggaccgggactacgtataaggctgatctttcggatgggtccacgctcgcggtgaatcggttgattgcgtgtatgatcggggagaaacagtttgggatggaaatgaatcggttggggcaggttaggcaccctaatctggcgccgcttttggggtactgcattgtggatgaagaaaaattgtttgtttacaagcacatgttgaacgggacattgtattcattgttgcataagaattgtggctgcgcattggaatggtttattaggtttacgattgcattgggtg

SEQ ID NO: 42673 - DNA, 86 bp, Glycine max
  Clone ID: LIB3093-030-Q1-K1-D9
ccccccacccacactaccccacacttccaccaaaatcaacattttttataaaaaaaaaattataaacacccgcctttttttaaaaa

SEQ ID NO: 42674 - DNA, 452 bp, Glycine max
  unsure (1)..(452): unsure at all n locations
  Clone ID: LIB3093-030-Q1-K1-E1
aaagcaggttttggcaacaaaaaccccccttttaaccttggcaattggatctttccacctgggggaaagccttgtgaaacataaggtttttccagaaaggtggaatttgactagaanggatgtttggctgttgagtttatggagggtcaagctctttgttgaatagtgtttgtgttgcctttatctgcaacttttaattgaaccaatcctaccctttttatgaacatatgaaaagatcggttttttgtggttcctccactcattgttgttgaagggtctcgcgaaatcaatcaagttttgagacctgttttctggtagaggtgtaagtacaagatcttaataataaggattttgtacaaaggaaaagttgagaataagatgggggaagatggttattcttggattatgaggacaaaattttcacacactgtctgccatcgtttggatcctgc

SEQ ID NO: 42675 - DNA, 343 bp, Glycine max
  Clone ID: LIB3093-030-Q1-K1-E10
cggacgcgtgggtcctactgctgcatggcttgcaaagctcacaacacaagactttgcccactgtgaacttccttcttcccatcttttcacagatgacccttctaccattcaggttgcttgcagtgttcttctcactggtgccatcactgtcttcttctttcgctctgtccagcgccgtgcaaagcgtgccaaagaattgaaatttatgtcttcaggagtgaataagtcattggataacttgaaagctataagttcaagttccatcaaagccaagagtccaccttcacctgatcaagcattgttaggggcaattatagctggtgtgattgctgttgttctctac

SEQ ID NO: 42676 - DNA, 165 bp, Glycine max
  Clone ID: LIB3093-030-Q1-K1-E11
ctcacctcttcttcctcctatacttcatcatcaaacctttctcttactttctatatgggggcgctctcttcctacggcacttggacacctgtataagcgcaccaaaaccttcaccgaagaagccaataaaaaatcccaatccctgaccccttcctacttccggat

SEQ ID NO: 42677 - DNA, 434 bp, Glycine max
  unsure (1)..(434): unsure at all n locations
  Clone ID: LIB3093-030-Q1-K1-E2
gtttcgttttttcggcccctgtacctgctagggtttcgttgttggctagtttcttgggggagtgtanttgatagtggtgagtttctgtggtttttggagtggttgcagatttggtactttagggtattgttgaaggagagagtgtaaatgaataaaccaacaagcgacgcaattaatatggggaaaaggagcctggagggtggagaagatgatcagcccgaacgaaagaggcctgctcttgccagtgtaattgtggaagctctcaaggtggacagtttgcagaagctttgctcatctttagaacccattcttcgtagagttgtcagtgaaaaagtggagcgtgctttggcaaagttaggtcctgcaagacttagtggaaggtctcctcctaaaatgattgaaggccctgatggtagaagcttacagctgaaatt

SEQ ID NO: 42678 - DNA, 265 bp, Glycine max
  Clone ID: LIB3093-030-Q1-K1-E4
cccaagccctatacaaccaaaccctaacacacacccatttgattcagtttccatggctagccgcaagggtgcatttttggctgcagtgctctgcatggttgtggtgagtgcacccatggcacatgcagctatcacgtgcgggcaggtgacgaatagcctgatcaattgcatcggttacctccagaacggaggaacgccgccgtcgggatgctgcaacggagtgaagagcctcaatgccgccggcaagaccaccgtcgaccgccag

SEQ ID NO: 42679 - DNA, 299 bp, Glycine max
  unsure (1)..(299): unsure at all n locations
  Clone ID: LIB3093-030-Q1-K1-E9
cccactcgttcttacataattccatattttatttacaaatatgcctataaaaacatcccgccgtctttattactaggagtgttaactacactaacttcttntctttaaattcttaatcatatttcaaatgctactacttatacaccatctaagttccctccaaaaccttttaaattatactcatatttaaattcttctttctaaaaacctttattttaactactattttaattatgaccttccatactttttttttaaattttcaaatacttatcccaaataaaacatatacttttatc

SEQ ID NO: 42680 - DNA, 270 bp, Glycine max
  Clone ID: LIB3093-030-Q1-K1-F12
gacccacctacgatattttatctccactcactcatttttttaacatttgctctctatcctactccgcccggttattattaacgcatggctctaaactcttgtccttaatgatgcacatcttctataatcatatgagtattaaaatgctattaaaactttaacacctaaattaccccaaaatctcctgaggaaaattatatcttcaacatcttcttcaaatttgaacaaacaaaaaaacttgattctacacaaccaacaaattattactta

SEQ ID NO: 42681 - DNA, 463 bp, Glycine max
  Clone ID: LIB3093-030-Q1-K1-F2
agtgaagctgttgagcttttttgcgagtccatttggcaaaagggttgaatgggcattgaaactgaagggtgtggagtatgagtacatagaacaagatatcttcaacaagactagtctccttctccagttgaacccggttcacaagaaggttccggttcttgttcatgcccacaaacccatcgctgagtcattcgtcatcgttgaatacgttgatgaaacatggaagcagtatccactgttgcctcgagacccttatcaaagagcacttgctcgattttgggctaatttcgctgagcaaaagcttttagatgcagcatggattggtatgtatagcagcggggatgagcagcaaaacgctgtgaaagtagccagagaagcaattgagaagatagaagaagagattaaggggaagaaatattttggaggggagaatataggataccttgacattgcacttggatgg

SEQ ID NO: 42682 - DNA, 150 bp, Glycine max
  Clone ID: LIB3093-030-Q1-K1-F4
agataagactgcagcagcagaggggtctaagcccagagcttttgaaatataaaggtcctgtgcgctgtgctcgcatgattattagggaagaaggcttctgtggtctttgggctggagttgctcctactgtgatgcgtaatgggacaaatc

SEQ ID NO: 42683 - DNA, 456 bp, Glycine max
  unsure (1)..(456): unsure at all n locations
  Clone ID: LIB3093-030-Q1-K1-F5
catggagatacctatcaccttataactaagaactgcaatcattttacagatgatctctcttagagagtgactgggaaacaaatcccaagttgggtgaatcggcttgctaagctaggtgctttgtgcagctgtctacttcctgaaagtcttcaagtaacaagtgttatacagctacctgaataccatgaatgctcggaagatgaatttgttgaatctctttcacctgccacaccccgtgagtcaacagaaatagatgaggagcaagaaaaacaccttcttttgccatcagatagaactgaggatgttcatttcggtaaagagactcaagtgaaataagcggtgtctttgaggtgagaaataacacaggctgtcttcgcattgaatatttatccattagatttgcagngattcttttttctcaaagggttctcattcttgcatggctttctacattct

SEQ ID NO: 42684 - DNA, 154 bp, Glycine max
  Clone ID: LIB3093-030-Q1-K1-F6
cgccgagcaacagtgaatttggccaccataagagcgcgcgcgcaaaggattagagtttcgaagatagcgattttggagcttccatttcgatttcgacttcgacttgcgcacaatcagttactttcgcttctcttgctgtagttcttaataatgc

SEQ ID NO: 42685 - DNA, 291 bp, Glycine max
  Clone ID: LIB3093-030-Q1-K1-F7
atgggaggagttgctgagggttaggaaggagcaagaggacgtgttggttccgcttatcggacgcgggaatcaaaggcgaggcacttaatgtggctgattaagagacgatgatggcttcgttgtttcctatgttgacacgttgttggatttggaattgcctgaggagaaacggaagctgaatgaaaaggaactcgtgacgttgtgtagcgagtttttgaatgcgggtaccgacaccactttcacggcgttgcagtggataatggctaatttggtgaagtacccgcaccttca

SEQ ID NO: 42686 - DNA, 172 bp, Glycine max
  Clone ID: LIB3093-030-Q1-K1-F8
aacattatatcttctacaaacagcttcttctcaattaacccctttacaaaacttccctttttgttattcccacaaacccattcttattcattctcattcttaatacttattaaacattaaatcctttccacttttcctccaaacccttattaaaaacaccttctcatttttt

SEQ ID NO: 42687 - DNA, 429 bp, Glycine max
  unsure (1)..(429): unsure at all n locations
  Clone ID: LIB3093-030-Q1-K1-G1
cattgtctcaaaaaccttctctttcaacaaaacctacaacaacaacaaataaagagaaattttgtagaacaatggaggcatcaaagatgaagtttttcttggttttggtgattgccatgttggcgatggtagcaactggggtttcagctgctgaggcacctgccccaggtccttcatccgatgccaccaccttctttgtacccactgctcttgcttctctctttggtcttgcatttggccttctcttctaattaattcttcaacaacctttggttatttgttacattacatatatggaattcactttgttcagaagtggttgnggtttgtgtttccgtcttctctttttttccaactcagcttgagtagtggttggtcactactctcttgtgagtagaaaggtttatttttttgaggatgcattgaatt

SEQ ID NO: 42688 - DNA, 362 bp, Glycine max
  unsure (1)..(362): unsure at all n locations
  Clone ID: LIB3093-030-Q1-K1-G10
cgtaccgcctcacgccgnntccgcccacgcccgtccgaaactcctatcttctacccttccctnnttgttctcaaaaccggtatgggccttatctctccacaaaacgcgaagaccatcgtctactnnntccgcagcttctcttcgcacctctccaaccctcaaactctccgaaccctcgacaacctcntgctgttctccccaatgcccttctcctcgtcccctctccnctcaacccctaaactccannaacccatttccaatttccgccccgttttcctcaaatacaaccccgctgtcgtcgtccgtcgcccgttagtcgcttgtcgatctcgctttcgttcccccatgtcctctgtgtttgg

SEQ ID NO: 42689 - DNA, 283 bp, Glycine max
  Clone ID: LIB3093-030-Q1-K1-G11
cccacgcgtccggtaaaaaggaaaggttaaggatgcaaggcacggaaggagagtggctgtatgccttatcatcaccagacatttataaaacctctttcccttccctcaaatcgctcatactcttccaatcttttaattttactttttttttacctttctccctccctcaataattccaaacaaaaaacaagaacaacaaagttttcgcgattgcatccaaacggatcttgaaagaactcaaggatcttcagaaggatcctcctacctcttgcatcgcccctcc

SEQ ID NO: 42690 - DNA, 430 bp, Glycine max
  unsure (1)..(430): unsure at all n locations
  Clone ID: LIB3093-030-Q1-K1-G2
ccacgcgtncgnccacgcgtncgaaaaaataaaattaagaaattttcatggtaaccattcgtgcagatgaaattagtaaaattatccgtgaacgcattgagcaatataatacggaagtaaaaattgtaaatacgggtaccgtacttcaagtaggcgacggtattgctcgtatttatggtcttgatgaagtaatggcgggtgaattagtggaatttgaagagggtactataggcattgctttgaatttggaatccaaaaatgttggtgttgtattaatgggtgatggtttgatgatacaagagggaagttcagtaaaagcaacaggaagaattgctcagatacctgtaagtgaggcttatttgggtcgtgttataaatgccctggctaaaccaattgatggtcgaggagaaatttcagcttcggaatctcg

SEQ ID NO: 42691 - DNA, 212 bp, Glycine max
  unsure (1)..(212): unsure at all n locations
  Clone ID: LIB3093-030-Q1-K1-G4
cggacgcgtccgcccacgcgtncgagctgatggatatgtagcatttgctgatgatgcagatgtgctgaaaggttcttgtggcaagtcacttgcttctttccctcaagggtgtttctactctacagcagttggaggattgagatgctatgagaatccaaagaataagattactgcaatacctgctgaggaagaggaaatctggggtgcattct

SEQ ID NO: 42692 - DNA, 445 bp, Glycine max
  Clone ID: LIB3093-030-Q1-K1-G5
ctctactttatcaccatggatatggatatgcaccctatggcccctattcgccagcagggtctgcagtgccaaccatggggaatgatggtcagttgtatgggcctcaacactatcagtaccctccatattttcaaccgctaacaccaaccagtgcaccattcacacctactcctgctgtccttcctcagggtgaggtttccacctctgttgctgctgatcaaaagcctcttcctgttgaagcagccaatggaaattctaatggtgtctcaaatggtggcaatgcaaaaggtcgtggtccaacctcaggttatcaagatccaagatttggttatgatggagttcgctcacctatcccctggctagatgccccactattttcagatgggcaaccaaagcctgtaagtagcacaaccatcacttcttcgatatcaggtggcaacaacac

SEQ ID NO: 42693 - DNA, 182 bp, Glycine max
  Clone ID: LIB3093-030-Q1-K1-G7
cacactacctaaaacaccactttattattttccaacctacaacttatcaacatttaccgcacgcattttataacacctttaactaatactactatcatttaacataatcaatttaatcatacactatatcatcattaatacaatttttcatataaatttattaaatttatttatattatttt

SEQ ID NO: 42694 - DNA, 343 bp, Glycine max
  Clone ID: LIB3093-030-Q1-K1-G8
cataactactgtaactggcttgagagcaaaatctagtgtaactgagtgttgggcaacagcccgggttagacaattcttacttgcccgggtttacgttgcctccatattatatggttactttttgaagtcagtttcattgaggtaccacctagaacgaaatctctctttggccaatcatgatcttcaccttggtcataggacttccgttatgttttcttatggattcaaagatgccatctttggccacttaagtaatatgccatccttagggcaagggttaataaagccggaagaggaaattgaggacttaaaatgttatgttatgagctttcattccggatca

SEQ ID NO: 42695 - DNA, 329 bp, Glycine max
  Clone ID: LIB3093-030-Q1-K1-G9
cccacgcgtccgctaaaccctaaacaactctttctcttcttccttcgctcgttgttctggctcgcgtagatcgacaatggcggagacagaaacgtttgctttccaagctgagatcaaccagctcctcagtctcatcatcaacaccttctactccaacaaggagattttccttcgtgaactcatcagcaacgccttcgatgctttggacaagattcgatttgagagtttgacagataagagcaagctcgatgctcaaccagagttgttcattcatattattccagacaagactaacaatacactgaccattgttgacagtggtattggca

SEQ ID NO: 42696 - DNA, 351 bp, Glycine max
  Clone ID: LIB3093-030-Q1-K1-H10
acgctttgtgaacttgtccattcaacttcttactacttaccataaagagctatctcactgcggtcgggcttattagaacaggaaggtggtgttattagccttacacaacacctaccagatcacgtacgcgttgaattgcgctctggataactttttcccgagcccaattttcaagctcgttatgatccactccaggcccaccgtcaccttcgctgtgggcttctccggccctgtgtttgcaggagccgctgaggtcttgcctattgtagattccgatttgagaaagattggcgccagagttctccaaaccgctaaacaactttgcatcaacaaatccgcaaatgatgtgac

SEQ ID NO: 42697 - DNA, 358 bp, Glycine max
  Clone ID: LIB3093-030-Q1-K1-H11
aacaaagaaaaaaaaaaacccttagccaacacaaccatcatggccacctctgctattcagcaggcagcattcactggtcaaactgctctgaagcagctcaatgagttcgtccgcaagaccggtggcgccggcaaaggtcgcactaacatgcgccgcaccgtcaagagtgctcctcagagcatttggtatggccctgaccgtcccaagtacttgggtccattctcggagcagattccatcatacctgaccggagaattccctggtgactacggatgggacactgctggattatcagctgacccggaaaccttcgccaggaaccgggagctggaagtgattcacagcaaatgggcaatgc

SEQ ID NO: 42698 - DNA, 386 bp, Glycine max
  Clone ID: LIB3093-030-Q1-K1-H2
gtacttgtgagtgtatacccaacaaaaactaagatcaacatggactactacacccgcgtttcagaagttgagagggaacctatcatggagtattccacaccacgaccaatgatgggcaactaccaccaccctaatgctcaccgtgtcctcaacgagaagattgtttatgaagaggatgtgattggaggatcccgccacaaccacatgcatcaccaccaccctgagactcatgagagagtcaaggtggtggagtatgaacaagttcctgagaggcgcgttgtctatgaagagaaagttgcttatgacaacgatcgttactactctccaaggtattgaaattggacaaatggaagaacacctataacgtgttatcatgtggcttttta

SEQ ID NO: 42699 - DNA, 436 bp, Glycine max
  unsure (1)..(436): unsure at all n locations
  Clone ID: LIB3093-030-Q1-K1-H3
cgtccgaaactttcaactcttttctccttcgcatggaagccaaatccaatgacagccgcactttctctatcaattgaatgggaaatggcgaaatgctttgccctccatcaacttctccctgcatgagttcttggcaacattctaaatctttaagagatagcgaagaaggtgcaaatggttctccaagatgaagcagttattatgcaaagtagagtttgatggttagtggttactctgagggtgagttaataaaaaagtttggtaattgctttctctctctccctgtatctcatactctcggngttatacagagacttttttgtgcttttatgagcagatttggatggtggaacttaattcaccctttaatntttccttataaaagtgcaagacaagttttatgtgcatcatcatcttatatatatatgctctacac

SEQ ID NO: 42700 - DNA, 350 bp, Glycine max
  Clone ID: LIB3093-030-Q1-K1-H4
cccacgcgtccgaaagactaaagagagttgtggtgtggtggtggttgtcgtttttgaaatgggggcgtcgtcttcagagaagcaagtggtggtcatcggcatacacgacagcgagcagagcacgtacgcgttgaattgggctctggataactttttcccgagcccaattttcaagctcgttctgatccactccaggcccaccgtcaccttcgctgtgggcttcgccggccctgtgtttgcaggagccgctgaggtcttgcctattgtagattccgatttgagaaagattggcgccagagttctcgaaaccgctaaacaactttgcatcaacaaattcgcaaatgatgtga

SEQ ID NO: 42701 - DNA, 382 bp, Glycine max
  unsure (1)..(382): unsure at all n locations
  Clone ID: LIB3093-030-Q1-K1-H5
cttttcttctaaacaaactcttgagattctctaattccgttccttccgtaggcccctanatgcggggatgaagaaccccaggaagaagaagaggccgaagccggcgcaaaagaaggtacttgaggagaacaacaaaggtgttgttgttgctgggaatgaaaacgaagaagaagagaagagaaaacgcagcgttttggaggcactggttgaggctttctccttgtcttcaatcagggaagcttccatggcctatgagattgcagggggagatcccgacagggcttcggagatcctgaggaagggttcttcggacagattcgaggattcggtctcgtgtttttcttatggntcttcttctagcggcggaagcagccgtgggggc

SEQ ID NO: 42702 - DNA, 244 bp, Glycine max
  Clone ID: LIB3093-030-Q1-K1-H7
ctcctgcatatattgctccagaagtattgctgaaacaagagtatgatggcaagcttgcggatgtctggtcatgtggagtaaccttatatgtgatgctagtgggagcatatccttttgaggatcctaatgaaccaaaggactttcggaagacaattcaaagagttcttagtgtccagtattccattccggacggtgttcaaatatctccagagtgtcgccaccttatttcaaggatctttgtttt

SEQ ID NO: 42703 - DNA, 303 bp, Glycine max
  unsure (1)..(303): unsure at all n locations
  Clone ID: LIB3093-030-Q1-K1-H9
gggcgtggtgccccagcccaacggccgctggggtgcgcagatttacgagaagcaccagcgcgggtggcttggaacgttcaacgaggaaaacnaggcggcgcgtgcgtacgacatcgccgcgcagcggttccgcggcaaggacgccgtcacgaacttcaagccgctcgccggcgccgacgacgacgacggagaatcggagtttctcaactcgcattccaaacccgagatcgtcgacatgctgcgaaagcacacgtacaatgacgagctggagcagagcaagcgcagccgcggcgtcgtccggcg

SEQ ID NO: 42704 - DNA, 343 bp, Glycine max
  Clone ID: LIB3093-031-Q1-K1-A1
caaagttcccattgatcattatatttcttttgattgtcttatatgccataccagtcattgcggccattttggctctgtatatacttgttaccattctgtttgctctcccatcatttctcatcttgtactttgcatatcctagtttggattggcttgtcagggaaattatcacttgagatcaaagctgtatttcttctgctttgcaagcattatgaatgtaactttgcctcaccttgtggccccttcatccagtgtcttctacttcgtaattggtcaacatctccatttgcagctgtatcttttatcttatattatgccagcattagacctctgattgacttgt

SEQ ID NO: 42705 - DNA, 340 bp, Glycine max
  Clone ID: LIB3093-031-Q1-K1-A10
tctatatcactctacaccttcctcttcgcaatttgtgcgcactccgacaccccctcggccgggtcatattctgggatccccgacacaaaaacactatattgctccctcctctccgtcagcttcagcgaccgtattctggtccctcctctgcgagaagtgtactatgacgggctaatcttcaacatcacccacaggtatgtcccctagatgccggtgtcctactctactgaagagctctgtcaacacttcctgtggctcgaaaagagcatgaattaatggcttgtgcgctaacaaatatcaacatgaaacttttacaccacccatttacctccatacttta

SEQ ID NO: 42706 - DNA, 406 bp, Glycine max
  Clone ID: LIB3093-031-Q1-K1-A11
gcataggttgcgttatatattgtactaattagcacaacaccatgaggatgaagattgttgtgatgctattgctacctttgatgtttgcactgttttcatgcacgagttctgcaaatacaactacatgccccatggacttgaattatgtgctgagaatcccatggaacacttctgcttgccacaacttccaacaaactttggcggctaaaaatggaaccgatgcaaacacttgttgcatatctctcttgtccctcttcggcataggacttgcacagcatctcaaggagacttctaaagtccaactcaaacttgcactgcttctcatcaaattcaataagttttctttttccacaactgtaactgttgacattagtggactccacattggtgaataacatctgtgaca

SEQ ID NO: 42707 - DNA, 315 bp, Glycine max
  Clone ID: LIB3093-031-Q1-K1-A12
cccacgcgtccgtccatccatcccttgactaattaattatccctcacaactaccaggggccgaagagaaacaccacaagcaccgcctcttccaccaccacaaggacgaggataataagccagtagaaaccgatactggttacgacaacacatcatattccaagccttctgatgactatgactctggtttcaacaagccatcgtatgagtcttctggcggtggctatgaaggtggttacaacaaaacatcttattctagtgatgagccagcttctggtggtggctatgaaggtggatacaagaaacagtatttggg

SEQ ID NO: 42708 - DNA, 375 bp, Glycine max
  unsure (1)..(375): unsure at all n locations
  Clone ID: LIB3093-031-Q1-K1-A2
attcaattccaattcctcctccgaggtcgatcgcaacttcgacgattcctatgttgccaatgagatattcccaaattccaccctcgcaccctggaacggggattccgattccgacaccaccgccaccaacgcccccgtggtggcgatggccgaggccgaggccgaggctgtggtggaacaagaagaggaacagaaaaaaatggaagaagtggaagagaaagatgatgatgaggaggatgagggggaggaggaggaggaggaagaagaaaangaaaaagagaagagattggtgtggtggaagagtccttttggggtgagattggtgaccttgcttgcttcctgtggcttttgcgtgcgcgtgttttggacttttct

SEQ ID NO: 42709 - DNA, 395 bp, Glycine max
  unsure (1)..(395): unsure at all n locations
  Clone ID: LIB3093-031-Q1-K1-A3
gccacgcgtacgattttcttggacggaaaggtcatgttaattntcttattgcgtantttcaggttttggcgtctaatttgcaatgtgcaacggaaaagcagtatctctataattttggcgatcgttgtcccaattacagttgcaattctacttttcattgttggcgtctacttcctacgtaagagggcaagcaagaagtataatactttcgtccaggattcaattgcagatgatcttacagatgtcggtgatgtggagtccttgcaattcgacttgcctacagttgaagctgccacaaacctaattctcggagaacaaatggcaagggttgggggtataggtgctctacgcagaatctggaaagtgcatacctctgagggtgaagtagataactg

SEQ ID NO: 42710 - DNA, 374 bp, Glycine max
  Clone ID: LIB3093-031-Q1-K1-A4
tctctctctattctcatttcaatccccttcttcaacccctctctctctctccaaaacgccgggccaaaaaatggctcagaaggccgagaaaaacgacaccgactttaaggtccccgaaaccatcatcaccccctgcaccaccaccaccgccacctcgattaccgaaccttctagattcttcgacgcaaccacccccgccacgtcatcgcgctcccccaagcgatccctccccctcgacgacgaatctcagacggaccaaacggcgtcgtcggagcccaaacgcgtcgtgagccgctgctactgctgtcggggcggggctatgattcggcgtgggacttttggcacacgtctcacgcacatgtctacatcagcga

SEQ ID NO: 42711 - DNA, 458 bp, Glycine max
  unsure (1)..(458): unsure at all n locations
  Clone ID: LIB3093-031-Q1-K1-A5
gacgccgtcacgcttgtctacccatggttcnngtgatgganntttggcatcaacctataccccatacgagnngcaattggatatgttgttcgactggcaaacaggaaattggggtctcaccataccttcctcttgggtcntgtttagaaattttggagaatcagacgggtcanagcaataccttcacaaggcgttgagaaagacatcaggttcagctatttctgggtccgatgtgctaggcttctttctgtaacacttttttcaattcattgtgctggttgtctctattacatgctagctgatcgttacccccaccaaggaaagacatggatatgagctgtgaccaaacttcgaaacagctcgataatcattggcatactggcctactccatacactgagtatggactcacccgcacacctaaaagacttatattttactgctttaccttcctacagt

SEQ ID NO: 42712 - DNA, 331 bp, Glycine max
  unsure (1)..(331): unsure at all n locations
  Clone ID: LIB3093-031-Q1-K1-A8
attcaattcattatttttggttgaaaagatcaagtggagatcggtcatcanacgaactcgcaggggatgacaatgaggttgaatatgatactnaanaggaaaaacctttcataagtaatacccgcaaaacgaaagttgacaaagttggagtggagaagtcttcaatgtcaagcaatccatcaaattctgccagtaatagtactagtattcacgaaatgctcaaggaatttttccagcaccacttaagtatggagatgcattggagggagatgattgaaaggcgtgcttatgaaatacaaatgtttgaacagatgcttatcatgaaacttaa

SEQ ID NO: 42713 - DNA, 305 bp, Glycine max
  Clone ID: LIB3093-031-Q1-K1-A9
attccattctctctgtgtatttccctacctctcccttcaagatgcagatcttcgtgaggacgctcaccggcgggaccatcacccttgaggtggaaagctctgacaccatcgacaacgtcaaggccaagatccaggacaaggaaggaatccccccggaccagcaacgtctcattttcgccggaaagcaacttgaggacggccgtacccttgctgactacaacattcagaaggagagtactcttcacctcgtcctccgtctccgtggtggcatgcagatcttcgttaagacactcacctgcaagacc

SEQ ID NO: 42714 - DNA, 317 bp, Glycine max
  Clone ID: LIB3093-031-Q1-K1-B1
caaccttggaataaaaggtgaaaaaaaacagcaactttaacctaagacaagagagtagtatgtaggaagtttcaccttccttggagattccaactcacatcaaaatttgaggaagatctcaaccacttcactttccaagaggaggtgaggcatcatggctcaaaatggaagtggggatagagtagtggtggacaatggttttgaatccattgatgatgcatacgatcatgaacacaagctgagtcaaaagggtagcaccaaggtcaaggaggaagaggtttctgtggagagggtgttccagcaccttctggtcctat

SEQ ID NO: 42715 - DNA, 142 bp, Glycine max
  Clone ID: LIB3093-031-Q1-K1-B10
cccacacacccacccacacgtacactgactcatcttctaccaccacctcaaacccgtggtggtgaaaataacgggggatgacgacaacgctcgaatcacttatcttttccaaactacacgtgaatggcgtcattcttgtttt

SEQ ID NO: 42716 - DNA, 63 bp, Glycine max
  unsure (1)..(63): unsure at all n locations
  Clone ID: LIB3093-031-Q1-K1-B11
cacgcccgtaccggaggggaattaattnctcaccttcgnnccgtcatcccccacgggcggcga

SEQ ID NO: 42717 - DNA, 283 bp, Glycine max
  Clone ID: LIB3093-031-Q1-K1-B12
cccacgcgtccgctttctttccgcttctgaatccgtgccctagcttcttcctcctgcgccgttgcaacagggcacacaaccttcgtcacaaacccaattcgcgagggatcggattcgccatcatggggaagaagaagaagagagtttcctcgaaggtgtggtgttattactgcgatcgcgaattcgacgactagaagatcttggtgcagcatcagaaagccaagcacttcaagtgccatgtctgccacaagaagctcttcaccgccggcggcatggccatcca

SEQ ID NO: 42718 - DNA, 323 bp, Glycine max
  Clone ID: LIB3093-031-Q1-K1-B2
tcagattcgaaaagcttcagctgaacaactgtaccttgtcctcttggaaaatggggatcttgtggctgaagacaagattgataaagcacttgaaattatttctgagacttgctgggatggagatatggattcagctaaacaccaaagattaaaattctctgagattgtaggtctggaggttgggtcacttggcaacaatagtgatggaacatcaaggaaaaccagcagtaagaagcctacagacttggatgaaaatgcatcatattcctcattagttgaagcatccgggttctaatttttgttgatccaatcaggttgtgtga

SEQ ID NO: 42719 - DNA, 385 bp, Glycine max
  Clone ID: LIB3093-031-Q1-K1-B4
tgttgttgtaactcgttcttcttcttttgttgttctgtgtttgtgtttgttttttctctcacgctgaaaatgtcttgctgcggtggtaactgtggttgcggaagctcctgcaagtgcggcaacggctgcggaggctgcaagatgtacccagacttgagctacactgagtcaaccaccaccgagaccttggtcatgggagtggcacctgttaaggctcaatttgagggtgctgaaatgggtgtgcccgctgagaacgatggctgcaaatgtggaccaaactgctcctgcaacccctgcaattgcaagtgaggtggaacaacttaacaaatgcctatagatatgaacataaggactaaactagtatgtgatgttcgccttggttggt

SEQ ID NO: 42720 - DNA, 300 bp, Glycine max
  Clone ID: LIB3093-031-Q1-K1-B5
gcgcagattagtaccacaaaaatggagaaatagaataactgaatatcgaatagcttaaaataaggagttgggccaaatgcaatggatatgaaaaaagccaattaattctttacaaagaacaacaagtaaacgcattagataaataaatttgaaaacattgtagatgcgatcttttatcctatatttctatcaattatgcagataagaaagactcatatatttatggatgtagatccctattttaagtaaaaaaaaaaccaagtgatttcttctaattacaacaccgtataaaaaagaatt

SEQ ID NO: 42721 - DNA, 295 bp, Glycine max
  unsure (1)..(295): unsure at all n locations
  Clone ID: LIB3093-031-Q1-K1-B6
gctatcanaaatttggggatagggtgaagcattggatcacattcaatgagccacatacatgggccgcgcaaggatatgatgttggtctacaagcgcctggtccatgctccattctccttcacctgttttgtagagcggggaactctgctactgaaccttacattgttgcacacaatgtcctactctctcatgcaacagtagcagatatttataggaaaaaatataagaaaatacagggaggatcactaggggtagcttttgatgtcatttggtatgagccactaacaaataccaa

SEQ ID NO: 42722 - DNA, 276 bp, Glycine max
  Clone ID: LIB3093-031-Q1-K1-B7
taattcctgataagggaaattctctgactgcggcatctgataatcttcgtcgttggtgtaaaaataaaggtcgcgctcaaccaaattgcccaacttccataaccacattttaaacttattacccttttccccccaacaattatggatgccatccaatcttttcaacaccacacactttgcaaaaacttcacaacacaaccttttgttctctcttgtccgcactcatacaacactttgatccccaaaaaaaatctttttcttttataaattcctttc

SEQ ID NO: 42723 - DNA, 385 bp, Glycine max
  Clone ID: LIB3093-031-Q1-K1-B8
gagattttgttttgctaaattttggtcctttttatttatagaagcttcatattatgggggcgaggcatttattggcctattcaaaacttcatactatgttgaaggttgcaccagaagcattcgatagttacagttactagttaggactgacaacagtcagttagttggaagttagttcttggaagccttaccccctgtacgccaacacacatgtatatttctgtattttctgacaactgtaacaattcaatactcataataagaatttcagtttcagaaacaggatccctctcaaatctctcatttcttctttgtatctttctttctaatataacataataaaacaaagctgtacgtattaattcttatcaatatagactaacat

SEQ ID NO: 42724 - DNA, 202 bp, Glycine max
  Clone ID: LIB3093-031-Q1-K1-B9
attttattactcttaaacttactctgcccattacagacacactccgtaccgcacacctgcggggcatattctaccctacgtgactacgaaacgctagagggctcactatgcctacacaggatgcccaaatgcagtgagcgccgttcatgacaaaaaacttacaatgagagggtaatcttggacatcaccaaatggtctgacc

SEQ ID NO: 42725 - DNA, 324 bp, Glycine max
  Clone ID: LIB3093-031-Q1-K1-C1
atcttgacggtcgtcgggttgaggtaaaatttgcaattgaaagatcccatggatttggtggtggcgggtttggtggatcttatggcaatactccctatgatgctggagctggcactgggcatccaggtagttatggcaacactccatatggtgctgcaagtggtgggtatgacaatactggtggtggcaatgctgctggagtttatggcaggggtgaagatggtggaggtggcaattggccgagtggtaattttgggggaagcagctttggtaataactatggcgatgctggtgtctatgctggcaattctgtggagtatacac

SEQ ID NO: 42726 - DNA, 400 bp, Glycine max
  unsure (1)..(400): unsure at all n locations
  Clone ID: LIB3093-031-Q1-K1-C10
gttttgaatagggtagttggtagttatagttgttgtcccagatatggaagaagcggggttaggagattgttgttcctcgaattcgacgattacgaggaagagcgataagcgaaagcagcaacaccaacaacaagagaagccatacagaggaataaggatgaggaagtggggcaagtgggtggcggagattagagaacccaataagcgttcgaggatctggctgggttcttacgccacccccgtcgccgccgcacgcgcctatgacaccgccgtctttcacctccgaggcccttacgctcgccttattccaattgtgcanacacactttgaccacacagcacattcgcgttcatcgaaaagcaccagtcggccgatcaccctcaacgccttacatctgtct

SEQ ID NO: 42727 - DNA, 408 bp, Glycine max
  Clone ID: LIB3093-031-Q1-K1-C11
ggaagtttaagcaaacaaaaccctttctgctcctgctttctttgttcaaattttgtgtcaggatggaaactcgggtgaagcacacacttattgtcaaagttatggttcgtactggatccatatgacaagtgacccatgttatagtgaagtttttggatgatcataactcccacatcatgacgaatgtgaaaagacctgtgatagaaggacacattctcaccttacttcactctgaaaggtaagcaagaatattgcgctatatggtctcttatttttgactttcctccaaattcaaactaaaaaatttttctttattataaataataaactaagcgtatgacctattatgttgatcatatattcaatattctgattttatttaacttcaataacatcttgttattatat

SEQ ID NO: 42728 - DNA, 369 bp, Glycine max
  Clone ID: LIB3093-031-Q1-K1-C12
aggcagcaaaggtaatcatgatgtggaacagcctgctggctctctaaagtcatattgttcagtacgttttgtcacatccaagtgtagaatttgtggcaatatcatatgccattgtgaaaatcctagcaattcaacacaggtgtcatcagacatatcatccgaaggatctgaaggaagggacctaattgcacgtggtgccgattcattgagacaggattgccggactaaatgtacatcacctatggagaagaaatctgatcttgattctgatggagctgtaagttctttggacagtgaacatgtttctattctacatgactctatatgtgcttttgggagatgacatgctgttgccgtcagctttctaaa

SEQ ID NO: 42729 - DNA, 311 bp, Glycine max
  unsure (1)..(311): unsure at all n locations
  Clone ID: LIB3093-031-Q1-K1-C2
gcgagattatgtaccgtgttactgaaganagtttgatggaccgcctatctactataacccatctggcctgcttattgattccgcaagagggcactgtgttgacaattcatggatccatggatgaaattgtacctgcagaagatgctttagagttcgctaagttcatatctaatcatgaattgtgcttcatagaaggagctgatcatgaatatacttatcatcaagatgagttgaccagcttagttttggaattcatcaagattcatattgacaaagacaaagatacatcgaagcaggcacgaattggaaga

SEQ ID NO: 42730 - DNA, 410 bp, Glycine max
  unsure (1)..(410): unsure at all n locations
  Clone ID: LIB3093-031-Q1-K1-C3
acgaatccactgatgggctggacatccactngggacccctactctcatgttggtgattctgccgtgactggggatagcgaacaagcagcaaaagcatttgcagagaaacatggttgggagtattcggtcaagaagccccacacaccattgctgaaggttaaatcatacgcggacaattttaaatggaagggcccccccaaatctggtgaagagtgatttgttggtttgtattcatgttaatgtattccgtcttccggagtttcaacgtgcagcagtttttctctgcatattttcttggaaaaacaaaagttaagaatactgtgaaaaaagatgatgctggtaaaaaaaaaaaaaagcgcgttaagacaactagacctgctgcagatattaatagactaaatatatgcgcg

SEQ ID NO: 42731 - DNA, 371 bp, Glycine max
  Clone ID: LIB3093-031-Q1-K1-C4
ctggtttatagatctctgtgaagtcgctttataacactcaacctaagatgcagaacgaggaaggacagatcaccgagctttacattcctaggaagtgctctgccacaaaccgattgattaccgctaaggaccatgcttcggttcaggttaacattgggcatgtggatgagaatggcgtctacaatggccatttctccacttttgctctctgcggcttcatacgtgctcagggtgatgctgacagtgccctagatcgcttgtggcagaagaagaaagttgaagttaagcaacagtagacacccatgatattgtcttgttgataattacctgtaaaattagactatatgcgctgacaactattaatttgtgat

SEQ ID NO: 42732 - DNA, 267 bp, Glycine max
  Clone ID: LIB3093-031-Q1-K1-C5
cgcacttatacctctaagattatggaattcgtgactgatcacctgaagacggaaatggggtggggtggttgactggtcggatatgcaaaacatatcacgatgcggcgcttaaagggacttaagcctttatttgcttccatattacgatgatgtgacctgcgtatatataaccagccaagaggccttgaatatcctgaacttcttgctagagagactgtgtttcagcgtagcgaaatagaagcactttaccagctcttcaaaaagatt

SEQ ID NO: 42733 - DNA, 287 bp, Glycine max
  Clone ID: LIB3093-031-Q1-K1-C7
cctatttctatcgcttgcaaagatgtgtaattgaatttgcatcatggttcgtatactgtagtgtgtatgctaaccaggtgggtgaggaaaaacacgaatcgtcctgtttgtgtatcatgatgtttctagtttccccactttcccctttttagtttgtggagcggggaatgtcatttgtgtaatattataattgtttaagttgtttagccaaaaaaaaaatataaaaaagtaaatgaaatcataaaaagcacggacgtagcttgctctgaatgctgatgggatacaaa

SEQ ID NO: 42734 - DNA, 366 bp, Glycine max
  Clone ID: LIB3093-031-Q1-K1-C8
cacaaatgaagatgctgcaggagagtcctcaactcagtcccaagtcccaaatgatggtactgtgagcatcaattgggactcaactcactttatcttcctcatcccaaaatacttgtcccattctagtttttggccctgtgcgactcttgattttgaaagggtttttttggaggggatggtaggataggttgattcctttctacggtgactgagatcgatttttgtagcaattgaatcaaatatggaaataaataacaattctttggaattattatggcctaaaaagataaagaatattaacgagaactaatttttaataaataaaaattataattttaaaaaaattataatttttatttttaaaat

SEQ ID NO: 42735 - DNA, 315 bp, Glycine max
  Clone ID: LIB3093-031-Q1-K1-C9
cttgcgcataagccttgggcttgagccatgtttcctagttccttaaacaatcaacgctattgggttttcattttcatcatttattcttcttttccccccaacccgcttcacagaatatcagaccaacaaactaactacatgctttgtcccctaaacttaacaaaccaccaagaatgattctattccttttttcttggcaatcaacccattaaagaaaaccattttcatcatcaccttgttgtgtcttgttattgaaagatctaaatgttaagcttgttgatcaaaaaggtatgtcggttatatgccttttattct

SEQ ID NO: 42736 - DNA, 395 bp, Glycine max
  Clone ID: LIB3093-031-Q1-K1-D1
ctctctctcttcggagctcaatttggccgtcaatggcggcctccgaggctctcaacggcacaaccaccacctccatcaggcacgcgttcggcaacgtcctcgcgttcttcatacttctcatgatcggcgttctcgccttctcgatccgtctcttctccgttataaagtatgagagtgttattcacgagtttgatccttatttcaactatagagtcactcagtttttgacaaagaatgggatatatgatttctggaactggtttgatgatcgaacttggtatccccttggtcgtgtaattagggggactggttctggtgactgcagagccctatgggtctgatcatacaacctctagtgaactgtgggtatgactatatttgcttgtatgcactat

SEQ ID NO: 42737 - DNA, 321 bp, Glycine max
  Clone ID: LIB3093-031-Q1-K1-D10
gatggtgcgcgtgtgatttatgttgagggtgtagacataccacttattgctgtgaaaagagatggtggctacaactattttacaactgatctagcatcactttggtatcgtctaaatgaagaaaaacttgaatggattgtatatgttacagatattgggcagcaacagcactttgatatgctatttaaggcctataggcgtgcaggttggttaccaaaggatgagaatgcgtatccaaaatgtactcatataggttttggtcttgttcttggggaagatggaaaacgatttcggactcgcagaggagtgtcatagtgatac

SEQ ID NO: 42738 - DNA, 304 bp, Glycine max
  Clone ID: LIB3093-031-Q1-K1-D11
atatcttctcttgagaacaagttattgttggcagggtttacagaaccacaaattttggaatgatctgtaatcaaagctaaaaagccttcatagaaaattgcttcgtcttttgcgctaaagaaggtgattaggagttcacctaaaatgcaaattgattttgattcaaatctgattgatgaagatagtctttttactgaggaagatttaaagaaaccccaacttccacctcgtgattgtgaaattgggagcacatgaaaagcctgcataaattacacctgtgggagggctgaagaagaggaaaaag

SEQ ID NO: 42739 - DNA, 379 bp, Glycine max
  Clone ID: LIB3093-031-Q1-K1-D12
cccacgcgtccgcgcggcttcaaccttgtagttattctctttcttcttttttagcggtccgtctcttgaaaaatctagatctcgttcttccttgatctacgttacgcttttagtgaccggatctgtatggatctgaaccagatctacacgccgatggtggttttggcctggtctttcatagatctgatgcatggaggctcagatctactgtacagaggtgtgcgattcatgttcgtctctcttttggaatctgtttcgtagaaagtcgtttggtcttccatgtcgcatggcacttgaggtatttttgaatctgaatatcataaaaccaatcgcgtcgtgtcacgtcacctgacgatatatatgataacaatgctctcgt

SEQ ID NO: 42740 - DNA, 308 bp, Glycine max
  unsure (1)..(308): unsure at all n locations
  Clone ID: LIB3093-031-Q1-K1-D2
cccacgcgtncgtgctgactccttatttcctagttccgtctttcctttgcacaacacagcgtgcaccgtcgcctatagctactctctcttccttcaattcaattcctcaactctctagctcttatggaaactcaacaccaacaacccaccatcaagtctaggttcagacgcatctgtgtctactgtggtagcagccctggcaaaaaccctagctatcagctcgctgctattcagctcggaaaacaactggtggagaggaacattgacttggtttatggagggggaagcataaggttgatgggtctaat

SEQ ID NO: 42741 - DNA, 402 bp, Glycine max
  unsure (1)..(402): unsure at all n locations
  Clone ID: LIB3093-031-Q1-K1-D3
aacatgttttgtccaatgctctacaagaaatgttacttgctagatgcggtgtacggacagattatttctttcccggacgcacacaaggncaaggaatatctgaacgaccacaagtaatttctcttttccttcgctcctgctcctgctgctacatctggtgctccagcaactgcagccaaggaggacgaaaataatgaagaaccagctgaagagtctgactatgacatgggtttcagtctgtttgactaaattaactaatacttttgttgagtttgctttgatagaatacgtgaaaatgttacctatttagtctatttattctgctttaatcatgtacatcaacagtttaatccaagtataaacttacatttgctcttatgttaatcaaaaccatgctctttt

SEQ ID NO: 42742 - DNA, 393 bp, Glycine max
  Clone ID: LIB3093-031-Q1-K1-D4
ccgggcgccacgcgccgctcttactttcaaacccactctttccccataaccctacccactccccctcgcgccgccgcgaaacggcctcttctcgtgttctccaaaaacccaatttccgacatcgtctcctccaccttctcacgcgccgaagaaggcgcgtgggacgacgagaagccgcgcgaggagtgcggcgtggtcggcatatacggcgaccctgaggcctcgcgcctctgctaccttgccctccacgcgctccagcatcgcggccaagaaggcgccggaatcgtcaccgtcaacaacaacgtcctccaatcaatcaccggcgtgctcgttcgagtttaacataaaatgacagtcccgagcttcatgcactcgtatcatgcgcatcatgta

SEQ ID NO: 42743 - DNA, 183 bp, Glycine max
  Clone ID: LIB3093-031-Q1-K1-D5
atcatatctttctcaaactagaagaaatattcttccatacataatcggaaatttcacattggtggaggtgaaaaactgggctgtgcctccacctactctttacaatgccctaattacatatgccctctacgtcattccaaatgctcttgattccaacaacattgtttaaaacgtttatgtaaa

SEQ ID NO: 42744 - DNA, 310 bp, Glycine max
  Clone ID: LIB3093-031-Q1-K1-D6
gctcaccccaactttttttccagtctccatctccatctccatcaagtgtaactatggctactgaaaaggttttggttgatgaaatcacttacccttccaagatcactactaccaagcccctatctttgcttggccatggaatcaccgacatggagatccactttatccatgtgaaattctattcaatcgggatttatttggagcctgaagtagttggccacttggagcagttcaaaggaatatctgcaaaggagctggaagagaacgatgagttcttcaatgatctcattttgtcgtgaaagtataactg

SEQ ID NO: 42745 - DNA, 398 bp, Glycine max
  Clone ID: LIB3093-029-Q1-K1-D1
ggcactgtggcagaagtcttaggagtgtaaaacagagacgcaaaatgaagacgattctatcgtccgagaccatgaatattcccgacggcgtgagcatcaaggttcacgctaaggttatcgaggttgagggccctcgtggaaaactcgtgcgagacttccaccatctgaacttggacttccaacttattaccgacgatggcggtaaaaggaagctcaagattgattcttggtttggttctcgtaaaacctccgtcgccattcgcacacgcctcagccacgttgagaatttgatcaccggcgtcaccaaaggataccgatacaaaatgagattcgtgtacgctcattttccgatcaacgctagcattggcaacaacagcaagtccatcgagatcagaaat

SEQ ID NO: 42746 - DNA, 461 bp, Glycine max
  unsure (1)..(461): unsure at all n locations
  Clone ID: LIB3093-027-Q1-K1-E1
aaaaattctaaagacccaatctcaatacctcaaactctaaacactgcatatttaattatcatgccaccacccacccttctcccatccctcactctctcgacgaaaccctaagcttcccctttcaatctcatcagatcctttcgtggttgcgcgaaaccctaattttgaatctgcaaacatgtctgcagctatggatatgtcgctcgacgacataatcaagaacaacaaaaaatctggatccggaagttcccgtggccggatccgaccctccggttccggaccttctcgccggttccccaaccgtgccgncaaccgcgccgctccttatgccaccgctaaggcgccggaggcgacgtggcagcacgatttatatgcagatcagcaagtggctgcggcggggtaccctgctcaaggtggtcgtgcggcttccatagaaactgggactaagctntacatttcaa

SEQ ID NO: 42747 - DNA, 201 bp, Glycine max
  Clone ID: LIB3093-027-Q1-K1-E10
ggcatatatatgtatacatatacctataccccgtgcttatagattatagatggagaagaaatgggcattgttctgcatgagccatatcatgccctatatatatatttttaatgtaatgaacagatgatgggttaattttgatttcatatacaacttaattgttgtgcagaaaatgtcctgatgcatcgtgagatgtttttc

SEQ ID NO: 42748 - DNA, 448 bp, Glycine max
  Clone ID: LIB3093-027-Q1-K1-E11
ggaagacatgggaaaagcttgggtaggcctggtggtattgctgtgtttgattgtcacggccatcgccgaacaatgcggtcgtcaagctggcgggcagacatgtcccaacaacctatgctgcagccagtacggttggtgtggaaacaccgaagaatactgttccccttctaagaactgccagagcaactgctggggaggcggcggcggtggcggtggcggcggcggcggtgaaagtgcttctaatgtccgcgccacatatcattactatgagccagagcaacacgggtgggacttgaacgccgtgagtgcttattgctcaacttgggacgctagcaaaccttactcatggcgcagtaaatatggctggaccgctttctgtggtcccgttggtcctcgtggccgtgattcttgtggaaagtgcttgcgggtgacaaatacaggaacagga

SEQ ID NO: 42749 - DNA, 432 bp, Glycine max
  Clone ID: LIB3093-027-Q1-K1-E12
gaattgctagggaagactggtggtttggttgatggcaggcattttgtcaatgaagcggctattgtcagaagtgtgaaattaattgctgagagtcttgcgaggcatatctatggacatcaaggaaagaacattcagatctttgcagacaacagtaacttggctgtcaatccttcttatgttcaatcatggttagatgttttgtcccaaacgcctcgagtagctccatttttgtcaaaaggtgatccttttgtaatggcactgaaaaaggaattagaagaccatactgatgaggtaaatctacatagagatgtgcttgatgggatgttcactttctatgattcaaccagggcaaagctgaacatatatcaggttgccagtgtcacatttgacttgctgttgcttctagtgctgggatcgtatttgattgtgctc

SEQ ID NO: 42750 - DNA, 418 bp, Glycine max
  unsure (1)..(418): unsure at all n locations
  Clone ID: LIB3093-027-Q1-K1-E3
cttatcacaaatgacaagtttgtcagtgtgtatcaccgtgtcttatcacagaacacaggcccaagaatatctgtagcaagcttctttgtaaattcgcatgatccagctgagggtacatcaaaggtgtatggtccaattaaggaactgctttcagaagaaaacccaccaatctaccgagacactaccttaaaagagtttttggcatattattatgcaaagggccttgatgggaactcttccttgggccccttcaggttgtgaatcgaacaagggaatatactcttcattctcatcgatcgtatctggatataatttatccaaacaacaagcctctacttttattgagaatgtttaacaatttgtttgttaaaaagacattaccgnctataagaaatatgaaacacttacattattnatt

SEQ ID NO: 42751 - DNA, 281 bp, Glycine max
  Clone ID: LIB3093-027-Q1-K1-E4
ttggaacagaagagacgaagcatgcgaatgcggaaaatgaggttgaagtgcggcagacgcggaatctgtagaattccaggttggaaactattgggaacagggtaacacgagatccgttaccagtgagcaaacgatgaggctaacgcagtagctggacgatacgtggtgagagaaaatagacgtgccgaagcggaacaatcatggggatcctagacgagcttgatcggatacgagagacgctgataagagctgatgtagatacgatgagaggctcatatgta

SEQ ID NO: 42752 - DNA, 106 bp, Glycine max
  Clone ID: LIB3093-027-Q1-K1-E5
cacacgcgtacgttcaggccgacagggatatcagcgctccacttgcatgatctggctgactgggacagaatcgcgagctatagaaaagacgcacccaactgggagt

SEQ ID NO: 42753 - DNA, 482 bp, Glycine max
  unsure (1)..(482): unsure at all n locations
  Clone ID: LIB3093-027-Q1-K1-E6
gaatttcacgagtaataatttgattgattttggaaattttaagttttagatagctcatgagattcaattttctcacaattttcatcttattttatgacccatgttgatttgaacataattgacgcagttccatagttttcacgaaaattgaattagttaagttttagtgcttgaaaattcaaaattgtgtttcaaaattaaaaatgatcagattttttttaagaataaactagtaataaaataattacttaagaaattaatttatattttaataaaaaattaaattataacctaaaataaaataaagattatatgaataatttaacttaaattttgctagctgacacttcagctgtttttatataggcgttagtcttctctttggtttggccttttcaaacccaaccctcgcatggtatggttaacgtaacccanatcatatagaagacataagagattcagcaatacattgtcttcaccta

SEQ ID NO: 42754 - DNA, 464 bp, Glycine max
  Clone ID: LIB3093-027-Q1-K1-E7
tgctcaccaacagcatatcttctttttgccttctcactccaacaattccctaatcccaaactcttcactcttcttcaccctcttcttttgctttcacaccaatctcagacaaaaaaaaaaaactaaaaaaaataattaagaaaccctagaaccgtgtttgggtggaggaaaacatggccaccaccaccaccagtctcggcggcggcgtcggcgtcggcggagacgaccgcgtcctcgccacggctcagcagatcgtgaagagtctcagggcggcgaaagaggatcgcgaagacatgcttatgatcttctccgccttcgataaccgtctctccggcatctccgacctcatcaacggcgacgattcgaagtcttctgatgaagaagacctcgaccgctttgaagccgcggagaaagtgattctcgctgatgcctctctctccggcgagccttcgcgtcaatccacg

SEQ ID NO: 42755 - DNA, 410 bp, Glycine max
  Clone ID: LIB3093-027-Q1-K1-E8
cccacgcgtccgcccacgcgtccgcacacttgaggcctgcagagtacaagagatcaagggtgcccagaaaccgtaggactgtcaaccgtgcatatggcggagttttgtctggaagtgctgtcagggagaggattatccgagctttcttagttgaagagcaaaagattgtgaagaaggtcttgaagatccagaaggcaaaggaaaagcaagcctcaaaggcttgaatttgaacaacacaatgagacatctttttggaggacttttaggtttgagtggttatagttaatcacaaattttattagagttgtcatgttaattgtcttttattattttgcctgtttgaactctttctagagcaagtgttaactttgtcgacaatgtcattatgatacagttttggttctcaaaaa

SEQ ID NO: 42756 - DNA, 457 bp, Glycine max
  Clone ID: LIB3093-027-Q1-K1-E9
gttttccaaaaggagaactgggctgcgcaagaaagccaacgaaatctgtgtgctctgtgatgctcaagtagcactgattgtgttcaatgctaaagggaagctttttgagtattcttctgaatccagcttgcttcaaagtcaaactgaaatagtactcgggaaggtttttaaattgtgcggccgtgattacaatttcgttgcaatctttggtattgtggaaaattaagaaaaatgcagctgatgttgtaacaattgcgattatgacgcggttgtgatgagttgaaaaacttgatgctgccactcatggtcacagacggtgtttccaaaccttggtgcagtaaaaagaaatgaaatagtagtaatatacatttccatacaatttcctagctaatttgttattgtgttttcattacctttttttatttattttttcctattttgggtttaatgcattcta

SEQ ID NO: 42757 - DNA, 445 bp, Glycine max
  unsure (1)..(445): unsure at all n locations
  Clone ID: LIB3093-027-Q1-K1-F1
aaggtcgccaaccccatcgtcgagatggacggagatgaaatgactagggttatctggaagtcaatcaaggacaagctcattttgcccttcttggagttggacatcaagtattatgacttaggccttccttaccgtgatgagaccgatgataaagttacaattgaaagtgcggaagcaactctcaagtataatgtggcaattaagtgcgcaactattactccagatgaagctcgtgtgaaggagtttggtctgaagtcaatgtggaagagtccaaatgggacaattaggaacattttgaatggaactgtcttcagagaaccaattctttgcanaaacattccccgccttggtcctggttggacaaaggcaatatgcatttggaagacatgcgtttggtgatcaatatcgggcgactgacacagtaattaaaggagctggaaagctg

SEQ ID NO: 42758 - DNA, 446 bp, Glycine max
  Clone ID: LIB3093-027-Q1-K1-F10
agcagaaggaggagaagcagaaagaggagacgaagcaatggcgccggagaagccccgaaccgggtcgaggaaccctgatttggtcaggggaattggcaaatattcgaggtcgcagatgtaccacaagaggggcatctgggccatcaaggccaaaaacggcggtgttttgccccttcacgatcccaagcccaaacccgaggccccggcccagaagccgtccaagttctacccggccgatgacgtgaagaagcccctcgtcaacaagcacaagcccaagcccgcaaaactcagggctagcattactccagggactgttctgatcctgcttgctgggaagttcaagggaaagaagggttgtttcttgaagcagcttccatctggattgcttcttgtaacaagtccctttaagatcaatggggttcctctgagaagggtgaaccaatcgt

SEQ ID NO: 42759 - DNA, 457 bp, Glycine max
  Clone ID: LIB3093-027-Q1-K1-F11
cccacgcgtccggttgggccttccctgaatagtgtttctacttttaggccgcctccaatgggtgcatatcagggttttcagggttcagatggaaattactataaccagccctcatcaatgcctatggccccaatatctcgacaataaaattcccagtcctagatcttttcggcgtaaggttgcttagaaaaagccttcatacctccacccataaccttggtatggtaatctgattcttctacagtctggtgtgcacagtaagtgctttgtaactttagttgttggctggtactaatctcctggagctagaataatttcattgtgttacaccgaagataacgggtttgtactattgttgagtagggtttatttatttctttatttatcttactgtaaaacttagcatattattattgccttgtggcttattagatgtgtggttttagagggttgtagg

SEQ ID NO: 42760 - DNA, 436 bp, Glycine max
  Clone ID: LIB3093-027-Q1-K1-F12
cttctatctggttgaatcagttttactacatcttcggcttcctctgcttggtcttcgtcatgctcatcgtcacttgtgctgaaatcaccattgtgctttgctacttccagttgtgcagtgaggattacttgtggtggtggcgatcatacctcacatctggctcttctgctctgtacctctttctttacgcaacattttacttcttcaccaagcttgaaatcacgaaattggtatctgggttattatactttggttacatgcttatagcatcctacgccttctttgttgtaaccggaaccattggattttacgcgtgcttttggttcactaggctcatctactcctcagtcaagattgattagttatagcaaccagtggtttttggataatctactacacttcttgaaggacgaaggaccggttgtgtaaggatttg

SEQ ID NO: 42761 - DNA, 419 bp, Glycine max
  unsure (1)..(419): unsure at all n locations
  Clone ID: LIB3093-027-Q1-K1-F2
gcgagaaatggcgatggcaatggcgcttcgcaggctttcatcttcaattgacaagcctctgcgccctctcttcaatgccggttccctctactacaagtcgtctttgcctgatgaagctgtttacgacaaggagcgacccggagttacatggccgaagcagttgaatgctccacttgaggtcgtggatcctgagattgctgatattattgagcttgagaaagctaggcaatggaaggggctagaattgataccgtcagagaatttcacctctgtgtctgtgatgcaagcggttggatcggttatgaccaacaaatacagtgaggggtaccctggtgcaagatattatggtggaaatgagtatattgacatggctganacactgtgccaaaagcgtgccctagaagcttttagatgggatc

SEQ ID NO: 42762 - DNA, 474 bp, Glycine max
  Clone ID: LIB3093-027-Q1-K1-F4
ggaagaagacttcgacatccccggcggcgaggaaatggatctcggcgaagacgaggtcggcgaggagagggagatcggctctggcggcctcaagaagaagctcctcaaggaaggtcaaggctgggaaacccccgaagtcggtgacgaagtccaagttcattacacggggactttgctcgacgggactaagttcgattcgagccgcgacagggattctcccttcagcttcacgctcggacaagggcaagtaattaaaggatgggatgaaggtattaaaaccatgaagaaaggtgaaaatgctattttcaccatccctcccgagctagcttatggtgaatctggttcccctcctactattcctcctaatgctacactccaatttgatgttgagctgctgtcatggactagtgtaaaagacatatgccaggatggcggtatatttaagaagataattacctgaaggggagaaatggg

SEQ ID NO: 42763 - DNA, 440 bp, Glycine max
  Clone ID: LIB3093-027-Q1-K1-F5
cccacgcgtccgcgaaaattgaaatggcgctgaggctgactactgttgtttcaagtgttggtgcattcggggaaacccaggtttaggttcagaaccagaagtgttgctgccacagttagaaacatggccttcagtgcaacctccaaggtaattgattcccatctccacgtgtgggcttcacctcaagaggctggcagattcccttattctcttggacaagaacctactttaccaggaaatgccgagtttttgctccagtgtatggaggaggcaggagtagatggtgcactcattgtgcagccaattaatcataaatttgatcatagttatgtcacaagcgttttgaataaatacccaacgaaatttgttggttgttgccttgctaatccagcagatgatggaagtgggcttaggcagtttgaagatcttgttttgaagga

SEQ ID NO: 42764 - DNA, 347 bp, Glycine max
  unsure (1)..(347): unsure at all n locations
  Clone ID: LIB3093-027-Q1-K1-F6
ctcaaatttccttttgcttcctagaaagagttagttcccggaagcttctctctttgcactggcatgatttgatctccgccgtggattcgtgatggtgattttatgaacttcctcctctgccccctctttccttttctgattatcattatttttatatttaactagagagagagactcatccttccttcgagacatgagatgaggccgatgcaactgccaccgncttccgcttccggggccaaccctgcccctgcaaccaccaacaacaacaacaaggagcagcgtccccagcgccgncgcatggacctcacgctgncgctgncgcagcgagacaccaacttggcggt

SEQ ID NO: 42765 - DNA, 447 bp, Glycine max
  Clone ID: LIB3093-027-Q1-K1-F7
cccacgcgtccgcccacgcgtccgccacatttctctattttctagtatttggcacatagtgcattgtttgggccattattaatcaaccaaggaaaaacaccaccttttggcttcttctgctgttccaactgtgcattttgtgtgctgtttctttcacaaacaagcagcaacagcagccagaatgagaatggggaacctcttctggcttggcattgttgcagcacttgttttcagcttctgggttgattccttttctgcctatgaatatcaccacttcaatgaaaccgagttctctttgttggagtctcaagaacaggtacattcatccctccttgggagaacttctctcatggttggactcacagttattcaaagtgctgctggcaaaggagcagtttgcttggatggaacattgcctgcttatcatttgcattcgggatatggatc

SEQ ID NO: 42766 - DNA, 451 bp, Glycine max
  Clone ID: LIB3093-027-Q1-K1-F8
ccgacctgatgtgtctactgtttgtgttggattagcagctagtatgggagcttttctgctgagcgcagggacaaaaggaaagagatacagcttgccaaattcaaggataatgattcatcaaccgcttggtggtgctcaaggagggcaaactgacatagatattcaggctaatgaaatgctgcatcataaggcaaatctgaatggatatctcgcctatcacactggccaaagtttagacaagatcaaccaggatacagaccgtgactttttcatgagtgcaaaagaagccaaggaatatggactcatagatggtgtcattatgaatcctctcaaagctctccagccattagaggctgcagcagaaagtaaagaccgggctagtgtttgaacatgagaatgttgcactttaatttccaaggtataaaaaatcatagtggtagactgtaagatg

SEQ ID NO: 42767 - DNA, 457 bp, Glycine max
  Clone ID: LIB3093-027-Q1-K1-F9
caattattccacaaaatttccctcaattatttctcaccatcatcaccgcctttccttctctcaggaaaaaaaaaagttaatttcttgaacccaatggcttcagagacagaggtgccggatattatttcctctgttttcgaaaggtttcaacaaaacagagacatgtctctgtttctgcccttcctcttcggcttctctgacgccaccccaggacgaaatagcgacgacccagatcacgaaactgctcccacagaagccccacaacgtcaaagaataatcttggtgaaccccttgactcagggcatggtggtgatcgacggtggttcgagcctcgaggctctgtttcgcgaattcaccaacggaaaaggtggtcgaccaccggcttctaaagagtccattgaggccttgccgagtgtggaaattggagaagtaacgaagatttcgagtgtgtggtttg

SEQ ID NO: 42768 - DNA, 413 bp, Glycine max
  unsure (1)..(413): unsure at all n locations
  Clone ID: LIB3093-027-Q1-K1-G1
cccacgcgtccgccggtgaatctcctagaattgttgccacgatggataataatgacggcttcaatgttttggtctatccccatgcggactacgcattcatagtggcactacttatgattgttagcgagatgaaacattattttgacgaaatggtgtatttggccgccggaatggcaccacttggagttggtatgaattaaaggagctcccaagtaattttactcaattatggacctatttaaaattaaatcatgggcttgatttctgttatagaatagatagggtttggttttcattttcagaggaatgtttatttccacctcattgcatgaanttgagagaacanaaaagcgttaacaaagtctggttggatggatgatgccaaataacatttgcatcttcaatgagccacg

SEQ ID NO: 42769 - DNA, 371 bp, Glycine max
  Clone ID: LIB3093-027-Q1-K1-G10
cgtttatcatctggtccacgcctctgccaaagagcttgtggaactgggtgtatacgctgtgagtgcctgccacctggcactgctggaaaccaagaactgtgtccctgctatgcaagtttgactactcatggtggcaaacgcaagtgcccttagacttaattggaccactatcctatgcatgcctttgatttatattataaaataaaaataatactatatataacatgttaattgcttaatatgtgctttaagagtaaagaatcacatcgtgaaatcaaattacccctttctcaatacgtgttgaatcatcgatcttggtttgtaattaggttgtatattcacaaaattaattagtatattgtgatgtgatt

SEQ ID NO: 42770 - DNA, 321 bp, Glycine max
  Clone ID: LIB3093-027-Q1-K1-G11
accaaactcaaacccatgtcaatttcagtgactcaatttgaatttcgggcaatctgattttggcttctctggttacaatgttgcacattgctttagctgcaccggtctctcccaccgtcgtcgcttttcaccgcggagcgaagcaatggagcgcgctaattccgaattttcggagaagcaggggaatcggttcgtccgtgttctcaagttctctcaggaaacgattgcaattgcggtttttcgtttcgggagaaaatgccggcaatggaggtgttctggaggaaatatctgaacccgaaaaggagcctacgaattttgcgt

SEQ ID NO: 42771 - DNA, 404 bp, Glycine max
  Clone ID: LIB3093-027-Q1-K1-G12
gcttattctctcgcattccgtggagatctagtgcttctgctgcaagacctcgctgaaaatgagggtttcgattcggaggtagacgaagatgttcggaagggctccgaagaaaagcgacagcaccaggtactacgaaatcctcggcgtttccaagaacgcttcgccggatgacttaaagaaggcttacaagaaagccgccattaagaaccatcctgacaaaggcggggatcccgagaagtttaaagagcttgctcaagcctatgaggttctgagtgaccctgagaagcgcgagatttatgatacatatggagaagatgctcttaaggaaggaatgggtggtggtggcggtggccatgatccatttgatatcttcagttcattctttggtggaagtccgtttgggt

SEQ ID NO: 42772 - DNA, 461 bp, Glycine max
  Clone ID: LIB3093-027-Q1-K1-G2
gtgatatggcttgtaattctatctcccaagcagcttcaatgggcacacaaatatgcacccaaatagcttccatattctcaaagcccacccatccatacccggccccactagaccttttagtcaccgaactcacctccgttgcctctcaaaaaggcaacgtttttctatacggcgtgggccgcgagggcctcatgctcaaggccctctgcatgcgcctcttccacctgggcctctcggcccactttgtcttcgacatgaccacaccccccatagccgccggcgacctcctcatcgcctctgccggccccggcggattctccaccgtcgatgccctctgcgcggtggcgcgctccaacggcggaagggtgctgctcctcactgcccagcccgagacaaggtcttgcgtgaaacacgccaacgctgtggcttacgtggcagcgcagaccatggccgatgatgcg

SEQ ID NO: 42773 - DNA, 396 bp, Glycine max
  Clone ID: LIB3093-027-Q1-K1-G3
cccacgcgtccggtttttgagaacattcgaataaaagttggacctttgcaacctctagagatcagtctaggaaaaaaggaagacaaagaaccgagtaccaaggatcctttcttcatctggttttatgttgatgaggaaatagctgttgctcgaggcaggagtggaggaactgcattttggtgtcggtgtcgtcgtgccaataactgattgtttttaactttctttccttctctacttctgagttttgatggaaagatacatgtatatatgtaaacatttaagttcagttggtggtaaacatatttgtacttgtttattgtatagctacttgtttgcataaattccaggaactaaaatatgtaattaagttgtgtttcacgataatcctactgtcgt

SEQ ID NO: 42774 - DNA, 470 bp, Glycine max
  unsure (1)..(470): unsure at all n locations
  Clone ID: LIB3093-027-Q1-K1-G5
cccacgcgtccgtaagtgcccatttcttcttgtagtggttattagaggatttgctcgctatcatatcacagtatatatcttcttatttgtttaatttttatgtttcttaggtgaattactcaagagggctcgacaatcccacaaagtagaaaaagaggttatgttatggcgggcaaaggtgttagttcggtggctaaggcggtagcagaatatcagtatccttggcgtgagaagttggggaaatataaggatgagcttgccaagggtgtgtggggatactgggagctgggggcatggaagccgctgagtatcagtgctcggcatcgtgctagaattcgcaaggaagtcctccttgctggggaagattggccctacgatcctgaaaggaaggagatgaagaccaggaggaaaggacacaaatgtgataggatttctgccgaaaagcgcgcanacacagcgaagttgatgga

SEQ ID NO: 42775 - DNA, 469 bp, Glycine max
  unsure (1)..(469): unsure at all n locations
  Clone ID: LIB3093-027-Q1-K1-G6
ctttgcagtgatgcagaatctctagatgttgaacctgtgaatgaaggatgctccacttcttttgaagaggttgtagcagaaagaattcatagggccagtgtaggaggcttgcatgccttgcttccaatggctaagtatgatgctaggtttgcttcttttctctctgtaaattaattggtgatgtctaccaataattttctttcagagataagaaattttttaccactgttttctcactgtcattcatggcagaatatgaactttcttataagctgtggacgtaatcctcttatggaagatcttcctatagtacaatacagataatggtttaattcatatatatgttatcctgtcaattgaaaaaataagtgatgctaggatgtttcagtatgtgttatatcagggtagttaatcacactggatttctgtcacatggcctncccatgatgcataagcagatgtgtggtgt

SEQ ID NO: 42776 - DNA, 372 bp, Glycine max
  Clone ID: LIB3093-027-Q1-K1-G7
cggaccgacccacgcgttcgcatgtgctatacttctacttaaactactagttgacttcaacaaccgggatcacgaatttcttggcgacttacgaggctaaactacatatgatcgtatcgatatcttccaattgcgcctgctgatcttcccgaacgaaatcatctttcctttcacgaaccttgaattcatttgagactcatcttcaacagtatatattccatcgcatagtacaacatgctattacgggtaatccattattgacaatccgatgcatcatggcaaacggtataactgattttcaactgtgaactgattgaactaccttgtaccgcagactacaagaaaagcctgtcccggttcaacgaactatgc

SEQ ID NO: 42777 - DNA, 437 bp, Glycine max
  Clone ID: LIB3093-027-Q1-K1-G8
cttggtttccaattgcgtgcacccatgtcctcttttctctccttatcactctctgcgccctccctccacgattcttccttcctccatggaacaaagctctttcccttttctcgaagagtggcaccacgccgcttcaactcttcctctgccaagtgctccctcgaccacatccccaaacagttcagaaaggaaaatctcaaagatggattgatggaaaactacaagaatgcacctcaatctctatatggcctttctccttcacaaatggacatgttcatgacagaagataatcctatccgtcagcaatctgaaagagttacagaggaaagcatctcgtctgccaagaattatatggataatggtggaatgtggagtctatctggcatgggaaaaagtgatgcttcaaaatacagcatgagtgttagtatgtatcgagg

SEQ ID NO: 42778 - DNA, 455 bp, Glycine max
  unsure (1)..(455): unsure at all n locations
  Clone ID: LIB3093-027-Q1-K1-G9
ggaagaacgaacctgtttaattcccccaaatcggaagttgatcctgagaccctaaatagccggtaacgttgtgtctatgtttttgaattatggacgcgaaggatatcctgggattgcccaaaaactcgttcccatctctcgagaagaaatctcgtcctcccaaagagtctcaaagaaaaccagatggcatttcgcgcgaggtgtatgcgcttacgggcggattggcctctctcatgcctgcaattgaagcctctcagttgaagaaaaagcctcttcctctcgaaaaaatcacttggcagtggcttcctttcaccagttctgctcgtaaagataatcttcatctttaccattgggtacgagtcatcaatggtgttcctcctacggnggactattcttttgccaagtataataagtccgttgatgttatcaaatacacagatgaggagtatgacaag

SEQ ID NO: 42779 - DNA, 282 bp, Glycine max
  Clone ID: LIB3093-027-Q1-K1-H1
gcctcgcgtacgaccattgtatatgtatagtgctacagaaagggtatgggacatgtacatgcgctgtctaatataggacatgagtttagctgctccatgacatatcatctgaaaacaactccactatcgtatatggtaatcaagaattatgcaataatagaactattgatgaataggaggggataatgagacaaattccaacaatcaaacgagcgacaattatgaagatatgcaaggacagattatcatgtgtgcccacttcgataattcactgcaagcgat

SEQ ID NO: 42780 - DNA, 359 bp, Glycine max
  Clone ID: LIB3093-027-Q1-K1-H10
cccacgcgtccgctctagcatcttccttttatgttgggacaaccagggttcgtatactgccgcatgcatatgatctttatagagcgcacagttctgcatggtaccttgatttatcatatatatatgcaaatcatagaatggatttttattccacagcctgggacatcataatccctagtggtggtattaagtttgctctccttgtatactttcagcagagattaggcagtcggtgcattcttccaaagaggttcagagaaagtactgcttatgagaaagtaccggttattggcaatgacgatttatgatgcattgactgcactttgtaaaatgatttttatccccggacattttttatt

SEQ ID NO: 42781 - DNA, 459 bp, Glycine max
  Clone ID: LIB3093-027-Q1-K1-H11
cccacgcgtccgcccacgcgtccgcccacgcgtccgcccacgcgtccgcttcgagtgaggtatttgctgcttctgatccttgctcagtttaattctaaattaccaatttcaacattaacttgtgattgcataaaccataagcgaaacgattctgaagcgcgtttgtttatgggacagggaaatggctcccaaaccgcctagtacgggtctgtttgttggactgaacaagggtcacgtcgtcaccaagaaggaattgcccccacgcccctcagatcgtaaggggaaaacaagcaagagggtgcactttgtgaggaacctcataagagaggttgctggttttgcaccctatgaaaagcgtataactgagttgctgaaggttgggaaggataagagggcactgaaggttgcaaagagaaagcttggaacccacaaacgtgcaaagaagaagcgtgaggaaat

SEQ ID NO: 42782 - DNA, 333 bp, Glycine max
  Clone ID: LIB3093-027-Q1-K1-H12
ggaaaacactggtccaatcaacattgggaacccaggtgaatttacgatgattgaacttgccgagaatgtgaaagagcttatcaatccaaaagtgcagataaatatggttgagaacactcctgacgatcctcgtcagagaaaaccagacattacaaaagcaaaggaattgctgagatgggaaccaaaggtcaagttgtatgatggccttcctctcatggaagaggatttccgtcagaggcttggagttcccaagagcaactaagctccttttactccttcatttcttatcatataatcataatgaatattttgatagtaacggggatgtggatg

SEQ ID NO: 42783 - DNA, 403 bp, Glycine max
  Clone ID: LIB3093-027-Q1-K1-H2
gccagaacagaaatcgcatataaaatgcgaaaagaaatgaattcaatgttcggagatctgcgcaggatctctctccgtcgaactttctttaccccgtcctcataacatatttcagatccgaaaaccagatcccgcgaactctgaagatctctattctctttccctcacctttccactcaaattcccctttccactttcccgagaaaattaactttttccgtcaattttccctccacctcttccttcttcctcacaatggctctgagcttcaacaatcgaagaatccctctcgctcttcgcattttccttctgttctccttattcttcagcctctcaccgaccttcgctcaggattctctcgttcagaacgcgaaggaagattccggcggatctgtggatctcg

SEQ ID NO: 42784 - DNA, 470 bp, Glycine max
  unsure (1)..(470): unsure at all n locations
  Clone ID: LIB3093-027-Q1-K1-H3
cccacgcgtccgcccacgcgtccgcccacgcgtccgcccagttttgtcctttaaagctcccattatagcttccaatttctctgtgatccatatggctcttgaacctctcaggttttagaagctcagctaagcacaatagagagtttaattaggccattaacatatcatatgggtgtgactaagcctcatgtgcttatgctgttgatcatcatggttgtctcaattgcagagaaaccatcagtaatagaaggaagggctctttccttgatatctggtcaagggtactcanagatttttgcaacgctgggactngtatgcaagtgttgtgatggggttggaggtgcctgcactagtacatggacagaatcttgcaataacttgcagtggttaccttggaaatcacactagttaattattttctgtatctttccttgtattccattagctggatattgagttttgaaatatta

SEQ ID NO: 42785 - DNA, 449 bp, Glycine max
  Clone ID: LIB3093-027-Q1-K1-H4
tggatctcccaggccccgaggaaggcctaaaaagagttttactgctgcgggggctccggcgctatctgccgttgccggtgcagcgcgtggtcgtggccgcggacgtccacgtggggtcttcccggtggttaggcccggccggcctcagaagctcgccgtaggaaggtccaagaatcctgtaagaaggcccgtgggccgccccaagggatcgacagctgctgcaatcacagcacataaggctgctaatgaagatctaaggaagaagcttgaacactttcaatcaaaagtgaaggagtcccttggcacgcttaagccttattttaaccatgaaagcccagtcactgcaattgcggcaattcaagagttggaagtactggcaactttggaccttaaagcgccattgagggatgagacccagcaacagccaccggcactgccacagacacaga

SEQ ID NO: 42786 - DNA, 150 bp, Glycine max
  Clone ID: LIB3093-027-Q1-K1-H5
ggagcctgtgtaatggcgtagttagttcctagacttgcataattggacattatcagacttgtacctttttccccctttgtttccctcagactaatgctccctttcgtaaatttgtggaacgacatcatgtgccaagatttgcctatggcc

SEQ ID NO: 42787 - DNA, 492 bp, Glycine max
  unsure (1)..(492): unsure at all n locations
  Clone ID: LIB3093-027-Q1-K1-H6
gaaagtgagagagtccaattatgcgaacgctttgtgatgcttgtgagagtgcggcggctatagttttctgcgccgctgatgaggctgcactttgtcgtgcctgtgatgagaaggttcacatgtgcaataagctagctagtaggcatgtgagggttggtcttgcaagtccaagtgatgtgccacggtgtgacatatgtgagaatgcaccagctttcttctattgcgagacagatggaagttccctttgtttgcagtgtgatatgattgttcatgttggtggtaaaagaacgcatggaagatatcttctgttcaggcaaagagttgagtttccaggagataaatctagtcatgctgaaaatccggcttcacaagcattggaaccaggtgaggctaaaagaggaccaaatccactttccaagctanaaaatgggagagaagcaacanaatcacaggatgcctatgggttcaacaccaggacctgatgctgatggg

SEQ ID NO: 42788 - DNA, 372 bp, Glycine max
  Clone ID: LIB3093-027-Q1-K1-H7
gtatgtccctacttcagaagggcctgtgctgtgtctatgacatgggtaaccataataatgtgggctcactgaacctctcaatcacaaattaccatgccgcaaaaccgctatccaaaacagccacatattctcctctccaatacgtgacacgtggcaaaccccggaggaggatgctgaaacctatatccgcagctcttcccgatccaacgacgcttgacctcacagaaaataacgtgaaacaggttttagacgacgctcgaaaggagctgggtcaaatctttgacacctctgtaggtatgacaggagtggttgaactagctaacttggatgggccttatgagaaaaatagccttagtggtcggttttggcaca

SEQ ID NO: 42789 - DNA, 394 bp, Glycine max
  Clone ID: LIB3093-027-Q1-K1-H8
cccacgcgtccgcacattcttcatcacttcattcaacatttctggctcccttagctagttgggaccaatggctgctgcggttagtgctgcagtctcttttccatccaccaagtctacctctctcccaagcaggaccttcatcattaccccagacagagttgttttcaaaaaggcttcattgcaatacagagatgtttgtagcattggaatggcagtttccatcagagctcaagtcaccactgaggctacattcaaagacgtaaaagagtccaagaaacatgatgaaggtgttgttgtgaacaagttcaaacccaataccccttacgttggtagatgcctgctcaacacatagatcactggtgatgaatctccatgagaaacttgtcacatggtc

SEQ ID NO: 42790 - DNA, 455 bp, Glycine max
  Clone ID: LIB3093-027-Q1-K1-H9
cccacgcgtccggtttgtgctgagtttggtggatctgttttcaaacggcttgttggagaggcgctttcaaggttagatgctgtgataaggcatccaaatgcactacattctgataacataatggcatatgacaatgctgtttcagctcttggaaaaatatgccaattccatcgtgatagcataaatgcagcacaggttgttcctgcctggctaaattgcttgcctataaaaggtgatttaattgaagccaaggttgtgcatgaccaactttgttcaatggttgaaagatcggatagagaacttataagtcccaacaatcaatatctttccaaaattgttgcagtttttgccgagattttatgtgcgggaaataatctggcaaacgaacagactgttagtcggatgattaatttattgaggcaacttcaacagactttaccaccttctacacttgc

SEQ ID NO: 42791 - DNA, 419 bp, Glycine max
  Clone ID: LIB3093-028-Q1-K1-A1
gctttggaagcctgcttcggttaccctctgaacagttaaaggaaattgcttgtggtcttgaagcttctgaacaatcgttcatttgggtggtgaggaatatccataacaacccatcagaaaacaaagaaaatgggaacggaaactttcttccggaagggtttgagcagaggatgaatgaaacgggtaaagggttggttcttagaggttgggctcctcaattgttgattttggagcatgttgcaatcaaagggtttatgacccattgtggatggaactccactttgtaaagtgtgtgtgcgggagtgcctatgattacgtggcctgtctcggccgatcaattttcgaatgagaaggtgataactgatgttctgaagattggtgttcaagtgggaagcagagagtggttgacgtggaattca

SEQ ID NO: 42792 - DNA, 322 bp, Glycine max
  Clone ID: LIB3093-028-Q1-K1-A10
cggaactttctcagattgacacacaccatgaaggaaagtggtttcgagaataatgatacaaagcatgctgctgctgatgcgttgtttctatattcaaaatttgcaatggcatgcattggatgtaaggctcgtccatgtgattcgaggtttcatttgatgaacgagatttcaggtatgccctattctctaaatagggagtcaccacagaatgcatcatctgctgatgcaatgggtgagtcatgcagcacaggaacagcatgacttgatagatcagacagttttcgtgcactctagttgagagtggactgtgaccaatgttttt

SEQ ID NO: 42793 - DNA, 111 bp, Glycine max
  Clone ID: LIB3093-028-Q1-K1-A11
actcggtctcaattcgacccacgcgtacgcgcactcctagtggcaagtacatcccaccctgctttcatcatcccggccatcgcgcttctgggcatgcccctattgaaaccc

SEQ ID NO: 42794 - DNA, 270 bp, Glycine max
  Clone ID: LIB3093-028-Q1-K1-A12
acgcgcacgcttagggtcaagcatctatcgtctgatgctctcttcaactcgatcctattgctactaggcatgctcctgttgatacctaggacggattctcaacatgatgcgatgcaatttttgaatgaatggatgacttattgactcatgcgtacaaacatcaggcagctatatcaagtttactcaaggttgcaagaatatactggacatgatcaatgatgtactaatcttgataagtatgtgcgaatgctgcatacgaccagcgtgtca

SEQ ID NO: 42795 - DNA, 324 bp, Glycine max
  Clone ID: LIB3093-028-Q1-K1-A2
gctgagagagcgcgctgcggcagcaagtcctatcagtgtaagacagatgctcgtaatgaagacgatcttgaacaatgagacaatgaatattcccgacagcatgagcataacggatcacgctacagttatcgaggtagcgggaactcgtgtaaaactcgtgctagacttacaccgtctgaacctggacttgcaacttattaccgacgatggccgccaaaggaagctcaagagtgacacttggcaaggatctcgtaaaagctccatcgtcattcgaaccgcactcaggcacgtttagaatctgaacaccctaataaccaatggata

SEQ ID NO: 42796 - DNA, 397 bp, Glycine max
  Clone ID: LIB3093-028-Q1-K1-A3
catgacttgattcaggacatgggcaagcgaatagaccaagaatcctcagaagatccagggaagcgaaggagattgtggttaacaaaagatataattgaagttttagaaggcaactcgggaagtagagagattgaaatgatatgtctggatttatccttatccgagaaagaagcaacaatagaatgggaaggagatgccttcaaaaagatgaaaaaccttaaaatacttattattagaaatggtaaattttccaaaggtcccaattattttccagaaagtttaagattactggaatggcatcggtatccttctaattgtttaccatctaattttcctccgaaggaacttgctatatgcaagttacctcaaagttgcattacgtcatttgggttccatg

SEQ ID NO: 42797 - DNA, 309 bp, Glycine max
  Clone ID: LIB3093-028-Q1-K1-A4
agcaaagcaaagcagagccaacaacatgaagatcaaaaccaacatcaacaaccacaagaagaagaagctggcaaattagaagaatcttcagttgaaagggaagaacacacaagaacaaagagaggaagaaacgcgaatgaagggagaattagagttgccaccagggttcagatttcaccccactgatgaagaattggtgaatcactacttgtgtaagaagtgcgcgggtcaaccaatcgcggttcccatcatcaaagaggtcgatttgtacacgtatgatccatggcaactttcataaaatgggtacta

SEQ ID NO: 42798 - DNA, 276 bp, Glycine max
  Clone ID: LIB3093-028-Q1-K1-A5
gcaaactaattgccgttgagctctttgaagagccagcgtagcgaacgacattggtgaatccagaggtgctgatcggcgtatacgacagcaagcagagcacgtacgcgctgtatagggcttttcatgacttattcccgagcccaatctgaaacgctcgtactaatgcgctcgaggtgcatcgacaactatcgactggcgctaaccgctcatatataccaatgggatatttcccaaaggtgcctctgatttgtcagatagtgcacgctgactgctatg

SEQ ID NO: 42799 - DNA, 412 bp, Glycine max
  Clone ID: LIB3093-028-Q1-K1-A6
cccacgcgtccggataaacttaagaattcaattattgaaattgaataagtaaacaatttaattggattggtcgaatggtatcaaaaaaatggagtactaactcccatttcttatttattattgaattaaccgatcaacttgctttgttatcgaacatttctttttgatttcaaaaattttccggaaaaaaatttgaatctatttttatatgcgaatcaatcctactacttctggtcctgaggtttctgcgcttgaaaaaaaaaatctgggacgtatcgcccaaataattggtccggtactagatgtagcttttcccccaggtaagatgcctaatatttacaacgctctgatagttaagggtcgagatactgttggtcaacaaattaatgtgacttgtgaagtacagcaatta

SEQ ID NO: 42800 - DNA, 416 bp, Glycine max
  Clone ID: LIB3093-028-Q1-K1-A7
cccacgcgtccgctttttctttttccatgtctcaaatgatcagaaaatcaatggaatgaagaaaatgactatccatctatctatgtagtcttgctttcaataatatctacctagatattatattatcatctcttttcccagcacaagcaccggttatagaggctagcttctaacatgctgctttttggttttatatatatttgttttggcagtacctgcttcctcaaaactactatcggttttggaatttgccccaggtagctagtttaggacacacgatttttttatctcttcaaaaatgatgtctgaagaaaccttttctgttcctcccaactccaccattagagccacctccttggttcatcatgttcatgttcaacccccaagcccaaaccctaattcaaatccagcttaga

SEQ ID NO: 42801 - DNA, 287 bp, Glycine max
  Clone ID: LIB3093-028-Q1-K1-A8
cccacgcgtccgcttaatcttacgccatgaattaaaggaactgaagatcaatacgatgtcaggagcgagtgtccatgtatctatgtagatggactcttaatgagaactacctacacattatctgatcaccgtgctcaccagctcatgcatcgactatgaatgctcgcttctaacatgctccatgttgaagctatgaatatatgattatacatgaagcaagtattctactatacttttggatacctaatttgcacaatgtaactagattacatgaatcgaccaatttg

SEQ ID NO: 42802 - DNA, 344 bp, Glycine max
  Clone ID: LIB3093-028-Q1-K1-A9
ggcgctcctagtggcaactacatccgaccctgcttccatcaacccggccaacgcgcttttgggcatgcccgggtggaaacccggtccccatttccaggatgatatgaagagctatgtgaatgaaggggtgagggtgttggtacatgggaagagcatagttgcggaagatgagttggacaagaggtgggaagaagttactggggaggttattgatgaagtgatcttcttcagcaagcacactgctgcctccaacaagcctgccctgactgttcaccctattggagttcctcatttgcgccaaggcgatgttcccccccaaggcggcagacctggatgggcagctc

SEQ ID NO: 42803 - DNA, 420 bp, Glycine max
  unsure (1)..(420): unsure at all n locations
  Clone ID: LIB3093-028-Q1-K1-B1
ccttggagaccccaacgtggccttccagagcgtgccgtttcagttcttcgggcttggctctttgaacattttctccatccgtacccaagcgatgttgataagcatattttagcacgccaaaccggtctctcgagaggccaggtttcgaattggtttattaatgcaagggtgagactatggaagccaatggtagaagaaatgtacttggaggaagtgaaggatcctgagaacaacatagcttcctcagaaggggctactgatcaagacaatgatataaacccaaataatgttcaataccctccacctnctttatcatcaagatcagaggatcagaagccatcactggttcgaattgactccgagtgtgcgtnctccatcatcaacaaccacagtaccccagattacaaaaacgatccaaag

SEQ ID NO: 42804 - DNA, 297 bp, Glycine max
  Clone ID: LIB3093-028-Q1-K1-B10
cccacgcgtccgcccacgcgtccgtttcgttattctcttattcatccttctcttctgaataatccagatctctttctgcccttttctccgtcacgcttttcgtgaccggatctgtatggatttgatccagatctacacgccgatggtggttttggccgggtctttcatagatctggtgcgtagaggctcagatctacggtaccgaggtgtgtgattcatgttcgtcttgcttttggaatctgtttcgtagaaaagtcgttggtcttgcatatggcatggctcttgaagtattttttt

SEQ ID NO: 42805 - DNA, 358 bp, Glycine max
  Clone ID: LIB3093-028-Q1-K1-B11
cccacgcgtccgcccacgcgtccgtttcgttattctcttattcatccttctcttctgaataatccaggtctctttctgcccttttctccgtcacgcttttcgtgaccggatctgtatggatttgatccagatctacacgccgatggtggttttggccgggtctttcatagatctggtgcgtagaggctcagatctacggtaccgaggtgtgtgattcatgttcgtcttgcttttggaatctgtttcgtagaaagtcgtttggtcttgcatatggcatggctcttgaggtatttttttgcaggtacaacagagaatcgatgacaagaacgcaaattcgacggtagatccagccgattcc

SEQ ID NO: 42806 - DNA, 264 bp, Glycine max
  Clone ID: LIB3093-028-Q1-K1-B12
gccagtcgaaccccctcgcttattcggcatacacatcgtctggggctagccaccgagtgcagtgcaggcatcggaaaataatggcagagacagatctcgtcgcctcttcagatggagaaccctcgcaatcgctggcgtcgattgcggagaatcttcagcgttctgccattcaatctgctcgaactgtgcaacatagctcttcaactcatttccgagcctttcagaattttttaccagaagcagtatcacagaatagaacatatg

SEQ ID NO: 42807 - DNA, 75 bp, Glycine max
  Clone ID: LIB3093-028-Q1-K1-B2
caatgttgaccaatacgtggacgctctgaacgtgcttgagaatgaactacagctcacatggttcaacataggata

SEQ ID NO: 42808 - DNA, 289 bp, Glycine max
  Clone ID: LIB3093-028-Q1-K1-B3
gaacagagtctcctctctacaccttcgctgcgctgcagctcacaactgcaacttcgcacagatatacatatatattactctatggtcacacatagttaattgtatatattactactacgtagctggcttttaataggtcgtatgtaggagtaatcgatgaattcctgcatatatcgatgaagccgatttatgagattgatgttcctgtaatacgactattaccaggaaaagcgcgaagcgaaagcagcagcacctactgctcgagaagccatactgaggaataatgatg

SEQ ID NO: 42809 - DNA, 170 bp, Glycine max
  Clone ID: LIB3093-028-Q1-K1-B4
cttacatggctctgcatttgacatttgagaaaggaatggtggaactttcattctgggattgtgtggggtcaagagaggagatagccagactgtcatagtttagataataggtgcgtgcctaacggtacatgaataggtcccatctgtggcaattagctctgcagatgcga

SEQ ID NO: 42810 - DNA, 413 bp, Glycine max
  unsure (1)..(413): unsure at all n locations
  Clone ID: LIB3093-028-Q1-K1-B5
cccacgcgtccgctccttccacgaggaaaacatagtgtctccctcctcagatctaaaatctactctctttttcccttcacacggaactgtgacgatgtcgagcgacagcgacgaagacgagcttctccagatggcgctgaaggatcaagcgcagcgagatgtcaactacggcaaatcctcctccaattcccggaagcctgtcgccaactacgttcagcagcccaagaaacccgctcctccgccgaaacagtcgctgggcaaaggcagagtcgccgccgacgacgatgattccgaaatcgagatgctcagcatctccagcggcgacgaggacaacgtccaatatccggttgctgcctncaggaacaaaggcgccacggctgccgcaggcggaagaccggtgcgcgaagacgatc

SEQ ID NO: 42811 - DNA, 386 bp, Glycine max
  Clone ID: LIB3093-028-Q1-K1-B6
gggaatcttacgagttttggagctaaacacatttgtgcaggacacatatacactttttaaggctatcattttgtgagacactggtgctaatcgatgtctttgtactctttagccttgcctttttcacaatgtgtaccctttgatctaacattgaagatacaactctcactatactgactttattatatattatgcaatccctttgctacttatagctttgatttgtgagaaggacattatctaatcgtgatcaaggcagaacgatggatcatatcactactgaggccactgtttaccgatgctcaattggtccttctggcattattgatcggacaatagctttcaggggtctttattgccagtctatctcacattgtaggcaccac

SEQ ID NO: 42812 - DNA, 422 bp, Glycine max
  Clone ID: LIB3093-028-Q1-K1-B7
ctcaactttcctaactttagcaaccatccaagaagttgatcagttccttgtctctccttgaattataaaaccattcacagtcttgaacccaatttcactctttgcacctcaaacaccttataagcctcaatttcacaaccaaaaatgcaaagttcaatctcacaatctgagatttgcatcactgattaccttctaccccaagaagttccatctcaatttcaatttccagatatgagcaacaataacataccaatgaaccataccaaccttcaaatgcctcaaatcacatctttctccaagccttcaaggtcctcatcaaatctaagcaaccgcaaaccgtccttgagatacatcacaatccctttcataacctcaggtcttacaacaactatgtcacaaacaacaacaacaacaacaatagc

SEQ ID NO: 42813 - DNA, 463 bp, Glycine max
  Clone ID: LIB3093-028-Q1-K1-B8
caaaaccaaattgctttgcactactaaaaaactatcgtcttgctttccaagcaatcactaccatggggaactgcttggtgctgcaagagaacgttgtgaagatcgtgaaaaccgatgggaaagttcttgaatacaaaacacccatcaaagtggaagaggttctgatacaattttcaggccatgcagtatcagaatcactcacagtgctgcggtatcttgagccacatacaaaacttcttagagggcagttatattacctagtgcctctgccaccaccatcaccaaaaaccaacaagaaggtgaggtttgcggaaccagaagtccaagatgtacataaaagcaacgtggttaggattaagctggttattagtaagcaagagctgcagaatatgctgcagagtgaaaggttttcggtcagtaagaatgtgtctctagttcatgaggatttgtcttaaaagggtac

SEQ ID NO: 42814 - DNA, 422 bp, Glycine max
  Clone ID: LIB3093-028-Q1-K1-C1
agaagatggagatgtatcagatctggagcaggagaatagcgttgggagcgttcgcgtttgttctgcttttcctatcggcctcagcagacgacgtcgttgtgctctctgaagataacttcgagaaggaagttggtcaggacagaggagctctcgttgagttctatgctccttggtgtggacactgcaaaaagcttgctccagaatatgaaaagcttggtagcagcttcaagaaagccaaatctgttttaatcggcaaggttgactgtgatgagcacaagagtttgtgcagcaaatatggagtctctgggtacccaacaattcagtggtttccaaaaggatctcttgaacccaaaaagtatgaaaggccacgcactgctgattcacttgctgagtttgtaaataccggaggaggaacaaatgtg

SEQ ID NO: 42815 - DNA, 317 bp, Glycine max
  Clone ID: LIB3093-028-Q1-K1-C11
acgcacacgcttgcgctgggatgttaacgagctatttagagcctaggtgcacgtcattctctacggaagctaccggtaaacgtttaacaagccatctcgtagctactactacgaacgttattgctgccataatcaatctggtctgtcagtgcgaacgttgacgatggagctgatactggagggtgctgcacgtcctaagtcgaatacgtgactagagaacccacctactgaccgtagatgaacttaactggtaaagattctatcatgtttgaaaattcattcgaagaatagctcgctactgactatgcaattatgca

SEQ ID NO: 42816 - DNA, 362 bp, Glycine max
  Clone ID: LIB3093-028-Q1-K1-C12
acgtagtgcaccgtgagggttgtgaagcatgcagagtagagccatggtgcacgtttctttctaccgaaacgatgggaaaacgttcaagaagcctcgtcgtccctacgagaaggagcgtttggacgccgagttgaagctggtcggtgagtacgggcttcgctgcaagagggagttatggagggtccagtacgccctgagccgcatccgtaacaacgccagatacctattgacccttgatgagaagaaccctcgccgtatcttcgagggtgaagcccttttccgaagaatgttccgttacggactccttgacgagacacataacaagctggattatgggttggcttttaccgtcgaaaactttt

SEQ ID NO: 42817 - DNA, 321 bp, Glycine max
  Clone ID: LIB3093-028-Q1-K1-C2
ctttgatctgggtgagagaaacgcgtatcgatggattgggttcagtactggtctcacacggtttgttctaacaatttgtactgactgtgtattgatcgatacgggtcgctctcacctaggccagagttgcccaaactttgataacaccattcattcatcaaaagctccactgaatttacatttagtgaagtcaaaaaggggggtgaattcagaatggaagcccgaattggaaaagagtggtggataacatgaagatttgactgagaatgctgggctgacaagttcaaatagggaattaggtatgcattacccaattctact

SEQ ID NO: 42818 - DNA, 389 bp, Glycine max
  Clone ID: LIB3093-028-Q1-K1-C3
cccacgcgtccgtcaacgtcgtcggtcttcccttcaggtttcgcaattcgcaatccaaagcagcttcaacctttcgtttcaatgtcactgtcttcgaagctaccgttgcatttctccggcaatgccagattcaaccgcaaccacccaaccatgttcaaaattcgagcctcaaattcaaactcttcatcttcatccaaactcgtcttatttagctccactatcgtcgtcacaacagcggtagcgaatcgcgtgctctacaaattggcccttgttcccatgaaagagtacccctttttcctcgctcagttcataacttttgggtatgtagttatatatctctcgatcttgtatttccggtaccgggcgagaattgtgaccgatgagatgct

SEQ ID NO: 42819 - DNA, 185 bp, Glycine max
  Clone ID: LIB3093-028-Q1-K1-C4
ccggattccggtcgaccacgctcgtcgctgcgtgaaagacaaccttagttttaccctacaattacaacatttagttttcgttactgcacagtcaacctcaagatttctgaaggaaaatttgtttagcatgctagtgatcagaatccaaagttttctgactataatatacattttttttacccaca

SEQ ID NO: 42820 - DNA, 238 bp, Glycine max
  Clone ID: LIB3093-028-Q1-K1-C6
aaaaaaaaaagaaaaaaaaaaaaatattacctttaaaaacaaaaaaaaataaaaaaaaaaaaggcaaaaaaaaaaaaaaaaatatgaaaaaaaaattaaaaataaaattctaataaggggcgacccttttaacggttccaatcttacgtacccttccttccaacgtcttaatatcttattggtcgaccctatattaattttagtggccatcgatttaaaacgttgtccactggaaaaa

SEQ ID NO: 42821 - DNA, 355 bp, Glycine max
  Clone ID: LIB3093-028-Q1-K1-C7
gaaggacgttgccgttgagggcttctgcatgagccgctgtggcacccacggctctacccggaacgttaaaagtaatgcccgaaccgcatatatctgggttggaaactccgaaacacagtgccccgggcaatgcgcgtggccattccaccaaccgatttacgggccccagacgccgccgttagtttctcctaacggcgacgccggggttgactgaatggttattaacttggccacgcttctcgctggcacagttaccaaccctttcaacaacggttacttccagggtcccccaacggcgccgttagaggccgtttcggcttgcactggtgttttcggaagtgggtcgtacccgggt

SEQ ID NO: 42822 - DNA, 330 bp, Glycine max
  Clone ID: LIB3093-028-Q1-K1-C8
cgtggcagtggtagttgccaaactagtagcatgaagtaagtcacgtttttctccgttttcatgtcatcacaatattaaagctttgagtttccttcagtatgggggacacttacgttttggccacaccgaagcgcaaccgttccgatgacgtggacggcggcgaggcgaagaagctgctgttgcagcagggcgaggcagacccggcggcggcgctggcgagcgcgcggcacgagttcggggagcacggcggggtgaacatgtcgatcgaggcgtctgcgacgttcacggtgatggagccggagacgatgcggcgcatgttcgccggagaac

SEQ ID NO: 42823 - DNA, 370 bp, Glycine max
  Clone ID: LIB3093-028-Q1-K1-C9
acgcttattattttggttgacgttgcatttgcagagcacatggaaagcaaaatatctgatctttgtccctcgcttgcactgagtaggcaatggcggatgaagcacagtactcatcgggacccgattccgcgcccctcaagcgcaagtacgaagaccaaccctacggcatcgagcttgccaagcagcgtgctcaagaagtcgccgcacgccttctcaacgccgttcctccttcgccactcgacgccaagcgtcccaaacccgacaccggcttcgattctcttgatttgaaacctctgtattccgcatctcctacatccgtttcctacggtcaccaaggttccagcaaggaagattgatatccctaatggca

SEQ ID NO: 42824 - DNA, 338 bp, Glycine max
  Clone ID: LIB3093-028-Q1-K1-D1
cccacgcgtccggccgtttccagaaaaagaaaataaaacataattttgagagatagaaagaaataaattaagaaaggaagagagtgttgtgttactgtggagtgagaggagagagagaaatgccaagtgtggctgtgaagctctacagcgtgttcttcaagttcctcttgaagcaccgtctgcacaaccgaatccaaaccactttcgaacccttcgacccgttcggcgtcacgacccgacccgaagaatccgtcgctccagcgaacccttacttctccgacggcgtcgccactaaagacatccacatcgaccccttaacctatctctacatccgaatc

SEQ ID NO: 42825 - DNA, 332 bp, Glycine max
  Clone ID: LIB3093-028-Q1-K1-D10
agaagacccatctttgggagagaaaaaatggtagtagtagcacctgtcctgtcgtcactcggaaacgaaaccctagaatactagcattgcaaatccataaatacccctccctcttagcctaataaaatctatttgcaaatccaataactaaacgaaacgaaaacactttctctccgattcttagcatccaatcagaggttccatttctcttccttctttcgcaccgaagttccaatcggtaaattgcttctctctttcgtcaatcttcattccttctctctgaacaataactgtaataacgctcatgctgcgtgagctaagggtaagggttt

SEQ ID NO: 42826 - DNA, 186 bp, Glycine max
  Clone ID: LIB3093-028-Q1-K1-D11
ataagacccatctttgggagagaaaaaatggtagtagtagcacctgtcctgtcgtcactcggaaacgaaaccctataatactagcatcgcacatccataaatacccttcccttttaacctaataaaatctatttgcaaattctataactaaacgaaacttaaacactttctcttcgatgcttaaca

SEQ ID NO: 42827 - DNA, 306 bp, Glycine max
  Clone ID: LIB3093-028-Q1-K1-D12
agaagacccatcttcgggagagacaacatggtagtagtaacacctgtcgtgtcggcactcggagacgaaaccgtagaatactagcatcgccaatccgtaagtgcccctgcctcttagcctaataaaatctattggcaaagccactaactaagcgaaacgaagacactttctctccgagtcttagcatccaatcagaggttccatatctcttccttctgtcgcaccgaagttacaatcgatcaattgcgtctctctttcgtcaatcttgattccttctctctgaacaataactgggataacgctcat

SEQ ID NO: 42828 - DNA, 376 bp, Glycine max
  Clone ID: LIB3093-028-Q1-K1-D2
agaaaactagacctggtcctgcccaggaagctgttaaagctagagccatgagagttcttaagcaaaaacgaatgtatgaaggccagcgtgacatgctgtacaatcagacgttcaatctcgatcaagttcaatttgctgctgagggcattaaagatgctcaacaaactatgacagctttgaagtctgccaacaaggagttgaagggaatgatgaaaactgtgaagatccaagacattgataacttgcatgatgagatgatggacctcatggatgtaagtaatgaaatccaagagactttgtgtagaagctataatgtgcctgatgacattgatgaggatgaccttatgggtgaacttgatgcattggaattagacat

SEQ ID NO: 42829 - DNA, 362 bp, Glycine max
  Clone ID: LIB3093-028-Q1-K1-D3
agaaaacgccctacctaaaaccctaatcgctcataaccctacatatggcgtgatcgtcgttgattcgcctccgccgcaccatcgggacactctcgggcatctcccactccttgtgcgcgactcatgcggcgtctgtttcctcccccatcgggtgcggcgtttcatggagtatgcagtcaccgacgaacggtgtggatcagtcccgtacattcaggtcaagctcaatgtcactactatgttttcgatactcgcagctgcagaacaacattcctgatgagactggtcccgataccattctattcgaaggctgcgattacaaccattggctcatcgacatggaatttacagacaacaactaaccc

SEQ ID NO: 42830 - DNA, 362 bp, Glycine max
  Clone ID: LIB3093-028-Q1-K1-D4
cccacgcgtccgcgccgccgcagcagcacactccgaggttgcagggtgccaatggcggccttcgaccactttgggaacatgtacgacgttgcattcaaaccccgcttgcttcaaaccctcatcagagaccacctcccggacgagaaacgccctttttcgaacccttcagaactctccaaggtcgtttcgttgatcaaaacgcactctcttctctgcgagtctttcgcagattccacgcgccccaaactcatcgaagcatggaaatccgcactcgcttgctggctcaacctcatttactccctcctttctaccaccatgccagataaatgctgggcgggtatctccctgtcggggctacttgt

SEQ ID NO: 42831 - DNA, 363 bp, Glycine max
  Clone ID: LIB3093-028-Q1-K1-D5
cttactagaacgaaaaataaaagaagagcaattttccctcaccaaagaagaagaagcaaacaatggccgatcaacttaccgatgaacagatctccgagttcaaggaagccttcagcttgttcgacaaggacggcgatggttgcatcacaaccaaggagcttggaactgttatgcgttcattggggcaaaacccaactgaggcagagctccaggacatgatcaatgaagtggatgctgatgggaatggtaccattgacttccctgagttcctaaatctcatggccaggaagatgaaggacactgattctgatgaggagctgaaagaggcattccgggttttcgacaaggaccagaatgggttca

SEQ ID NO: 42832 - DNA, 378 bp, Glycine max
  Clone ID: LIB3093-028-Q1-K1-D6
ggccaccgttccagggcagctcgtgtgggagatcgtgaagaaaaacaactcctttttggtcaagcagttcggaagggggacccagagcgtcgaattcagcagagagagcaacaatctctacaacctcaattcgttcaagtactctggtttggcaaacaagaaaactgttacggtacagcctgagggtaaagatcaggctgtgttgttggctacaacaaagacaaagaagcaaaacaagcctgctgcattgcttcacaaatctgtgatgaagaaggagttcaggaggatggcaaaggctgttgaaaatcaggtggcagaaaattactacaggcccgatctcaagaaagccgccctttgcaggttgaatgctgttcacag

SEQ ID NO: 42833 - DNA, 343 bp, Glycine max
  Clone ID: LIB3093-028-Q1-K1-D7
gccacgcgttcgaccactcgtccgctgagatttaggaaaaatctccatctctttctagttcaagctcgtcgatttgtgagaaccatgtgatcaactgtgtatggcttgtatcgaataatgcttcataagaagagttgagtattaagattactcattaaaccatcctgttgctacgaaaattcagggctaatcttttggcatacaagtatctgcggctactgcaaacaaagtcctatcttcactgggcttctgaagtcatatgactttggatgtatgccaaagtgtaagccttatggtttgtcagatgctattgcaaatgctgaaaagctgtcttgaatatctt

SEQ ID NO: 42834 - DNA, 165 bp, Glycine max
  Clone ID: LIB3093-028-Q1-K1-D8
ggctatcgttcgatggcagctaatgttcgatttcgtgaagaaaaacaactcctttgagtcgggcatttgaaaatgtgtaccgatagcgatcaaattcagtacatatagcatcactctctacatcctaacttcattcaagaactctgatttgtcaaactataaaac

SEQ ID NO: 42835 - DNA, 353 bp, Glycine max
  Clone ID: LIB3093-028-Q1-K1-D9
ttcaccttgaagtatcctatagagcatggcatagtcagcaactgggacgatatggagaagagttggcgtcacacattttacaatgagctacgtgttgcccctgaagaacaccccgtacttcttaccgaggcaccactcaatcccaaggccaactgagagaagatgacccaaattatgtttgagactttcaatgtgcctgccatgtatgttgcaattcatgctgtcttgtctctgtatgccagtggacgtactacaggtattgtgcttgattctggtgatggtgttagccacacggtgcccatatatgaagggtatggctctttctcatgcaattctttggttgggacctttgt

SEQ ID NO: 42836 - DNA, 133 bp, Glycine max
  Clone ID: LIB3093-028-Q1-K1-E1
gctccgtactatgaattgaaacgaagttcagcttcgcagggaggaagaaggtagtagagtggtccggcgacagtccaattattttcggagacggcacggtggtcacgtttaattagccaattgcgtacacttt

SEQ ID NO: 42837 - DNA, 286 bp, Glycine max
  Clone ID: LIB3093-028-Q1-K1-E10
ctctaacctacctctttttcttctctctcaacaacttcaccttcttcctcctcgatcatgtctcacttcaagggcaagtaccatgatgagcttatcgccaatgctgcgtacattggcactcctggaaagggtattcttgctgctgatgagtcaacagggacaattggcaagcgtttggccagcatcagtgtagagaacattgaatccaacaggcgagctcttagggagctgcttttcactgctcctggtgttcttcaatatctcagtggtgtcatcctctttgagg

SEQ ID NO: 42838 - DNA, 369 bp, Glycine max
  Clone ID: LIB3093-028-Q1-K1-E11
cttgaggatgttatggaagaggggggaaacattgtggactaccatggctgtgatttctttcccgagcgttggtttgattgcgtggttgtacttcaaactgataacaccgttttgtatgaccgtttgagtcggagggggtacaaagattcaaagctttcgaacaatattgaatgtgaaatcttacaagttctgcttgaggaggctaaagaaagttactcataggagaaactgattgcaatgaagagtgataatatagaagacattagtagaaatgtggcaactctgacagattgtgtcagatattggtcttttgccctcacaggtcttgacaaaaaaaaatgaggtacttttgtattatactcatttttg

SEQ ID NO: 42839 - DNA, 250 bp, Glycine max
  Clone ID: LIB3093-028-Q1-K1-E2
actaaccacgatgaattgaaacgaagtaaagtgccacttggtgctacaaagtagtcgagtggtccggggacattccagtaattgtcagtgacggcactgtggtcacgtataaatagcgaattgggtacactctgtcaagtagcggacaaatagagagctcaagctaagtgtgaggatgcttgacaaacctaaatacatgtctcatctatgaaaccaacaacactgagtgaagaatgcatatcaaacccat

SEQ ID NO: 42840 - DNA, 375 bp, Glycine max
  unsure (1)..(375): unsure at all n locations
  Clone ID: LIB3093-028-Q1-K1-E3
cccacgcgttcgcccacgcgtccgccgcaacagagagtagaaaagatggcgcggttgatcacagtggtgtggtgcgcggtggcggtgctactgtgcgccgcggcgggcgcgtcgtgggtggaggaggcggcgaacccgatacgaatggtggcggnggtggaggcggaggtggttcgggtgatagggcagtgccggcgcgcgctgaagtttgctaggttcatgagcaggttcgggaagagttaccgaagcgaggaagagatgagggagaggtacgagatattctcgcataaccttaagttcatccgctcccacaacaagaaccgcttgccctacactctctctggtaatcattttgctgattggacttgggaggag

SEQ ID NO: 42841 - DNA, 306 bp, Glycine max
  Clone ID: LIB3093-028-Q1-K1-E4
gccacaggctccttttgatcaggttaaacctgcacttcctgctcttgcccgtcttatccattcaaacgatgaagaagtattgactgatgcatgttgggcactgtcatatctttctgatggcacaaatgataaaattcaagctgtaattgaagctggtgtttgtccccgacttgttgagctgctgctgcacccatccccttcagtgctaattcctgctcttcgaactgttggaaatattgtcactggagatgatatgcagactcaggttatcatcaatcaccaggctcttccttgccttcttaatct

SEQ ID NO: 42842 - DNA, 423 bp, Glycine max
  Clone ID: LIB3093-028-Q1-K1-E5
cccacgcgtccgctcattttctagcttccaaaccctaacactcctcttgctcttcgatcatgacctctccacaatgccgccgaagttcgacccctcccagatagtcgacgtcttcgtccgcgttaccggcggcgaagtcggcgcggcgagttccctggccccgaagatcggtcccctcggtctctcccccaagaagatcggagaagacatcgcctaagaaaccgccaaggactggaagggcctccgcgtcaccgtcaagctcaccgttcagaatcgtcaggcgaaggtcactgtggtcccctccgacggcgtcctcgttatcaaggccctcaaggagcccgagcgcgaccgcaagaagaccaggaacatcaagcacaacgggaacatctcgctcgatgacgtcatcgagatcgctaggggtat

SEQ ID NO: 42843 - DNA, 395 bp, Glycine max
  Clone ID: LIB3093-028-Q1-K1-E6
gcagcatgtatgtagatgtctaatgggcttgtttctttcgctgaggaatcggattgatcatgattcattgatgtattgctcggtttgttatgaaaatttatcttaaggggggtctattattctcctaactcaaaaaaaaaaaacaaaaaataacaatgacaaaaaaaataaaaacactaaaactataccccaagaagatcagaaaaaacaatccactaagaaaccgacaaagactgaaagggcctgcgcgtcaccttcaagctcaccgatcataatcgtcaagccaatgtcactgtaatcccctacgtcgtcgacctcgttatcaaggcctttaaagagcccatacgcgaccgcaagatgaccactatcatctatctcaactgcaacatctcgct

SEQ ID NO: 42844 - DNA, 381 bp, Glycine max
  Clone ID: LIB3093-028-Q1-K1-E7
ggcagaggagggaattaactttgtggtgaatgctaatatcgggcatgatcctttacattctgtcgataggcttcgggaggaaaataatgctattgtcttggctgtaggagccacaaaaccaagggatctcccagtacctgggcgggagctgtcaggagttcattttgctatggagtttcttcatgcaaacactaaaagcttgcttgatagcaatctccaggatggtaacttcatttctgctaagggaaagaaagttggggttattggtagaggtgacacgggcacatattgcatatggacatccattcggcatgggtgtagtagcatttgaaatctggaacttcttccttagtcaccacaaactaaggccccaagcaaacc

SEQ ID NO: 42845 - DNA, 400 bp, Glycine max
  Clone ID: LIB3093-028-Q1-K1-E8
ctttctccaaacctacctttctatcttttctttttcatcggagcattatttgataccctcttgagtcctctctgcagcaacgcatttttcctcattctcttaaacaatttaacttctcctcgtttgatctgcataaaattgcattaatataaaaaatgaagaagtttgtactaaagttagatttgcatgatgacaaggataagcagaaggccttgaaaacagtttcaactctttcaggaattgatgccatagccatggatatgaaagagaagaaattaacagtgataggaacagttgatccggtaactgtggtgagcaaattgcgcaaatactggaaggcagacatagtagcagttggaccagtgaaggaacctgagaagaatgaggatcccaagaaagc

SEQ ID NO: 42846 - DNA, 343 bp, Glycine max
  Clone ID: LIB3093-028-Q1-K1-E9
cccacgcgtccgcccacgcgtccgctctctttctctttctcactctcctctgatatttctatattttggtgctctgtgtctctacgatctggatccaacggtccaaaatgttcggggcttgtgctgcttgttttcccaggttttagagctccaaaccttcagatccacctcattcgtctccagatcttccttccttgataacgttttcgggttcgagaaggcacttgtttgtttgtcgtacgaaatggagactaaaccgagttcggtgatggttacgctcagttacggcgcgttgacgtgcgccgcggaagttctcgcgactttgctagcttctgctgtcgtc

SEQ ID NO: 42847 - DNA, 261 bp, Glycine max
  Clone ID: LIB3093-028-Q1-K1-F1
agaagcgggaggactgcttacgttgcgcggacacgaagcattgacaccgggaccgtccaggagaacattatggaaccctgaccagtgaacagacataggcacatttaagttgtcagagagtgccacatgaagagcgtcttggacatgatggcacatgacgaccatactgagattgtagagcacggcatgaacctacccgagggtcagaagcagaacatacacatggtctacgctgtcgatgacgactataatctatatgtt

SEQ ID NO: 42848 - DNA, 312 bp, Glycine max
  Clone ID: LIB3093-028-Q1-K1-F10
aatttggttgccatgtataaaaaaatccatagaggggacttcaagtgcccaccgtggttctctctcgatgcgagaaagcttgttacgaaactgcttgatccgaatccgaatacgaggattagtatttctaaagtgatggagtcttcttggtttaagaaacaggtgccgaggaaggtggaggaggtggttgagaaggtcgatttggaggagaagattgagaatcaggagacgatgaatgctttccacataatctacttgtcggaggggttcaatttgtcgccgttgttcgaggagaagaggatggaagagatg

SEQ ID NO: 42849 - DNA, 153 bp, Glycine max
  Clone ID: LIB3093-028-Q1-K1-F11
acgcatacgcttgcgatgtctacatgtaccgatctatcgttcttcatgctcgtacactctcaagagctaggtgccacaatactgtggaccaatcacatgcccatctaatacaactaccatgtatatttaaactatactgatgaagccctccaa

SEQ ID NO: 42850 - DNA, 386 bp, Glycine max
  Clone ID: LIB3093-028-Q1-K1-F3
acgcttcttcttatgcgattgactagtgtccaccacggtgacccatttctgaatctactgctgtggagctgatttgttcactctaatatgtgtacagtgctaaagggtaaactttggaacctagcttcctagttgaatcatcagaagcttatatgtcgaatccatatttttctggacgtttagactgtctttgatttccctgggaaatgatgatgatgctcgaagatatgggattttgaggggatgtcgatatgaatgctgcacccctcggagaaggggatattaccagacggcaaactgaaccagaggtgatagttgacgacgattatagtgatgaataaatcgatgtcaaatacctccacaggacgatgtggatggacaaaatg

SEQ ID NO: 42851 - DNA, 210 bp, Glycine max
  Clone ID: LIB3093-028-Q1-K1-F4
cccacgcgtccgggctttgatacagttttcaggttgagtttgtttcgttagattagacacttttggtgatgttatggaccaccaccttttggttgaaggatacttcagcactgattttaattatgccttgcattttggtacatggaaatcatttgttgacttatctaaaaaaaaaaaaaaaaaataaaaaaacaaaaacaaaaaataaaa

SEQ ID NO: 42852 - DNA, 402 bp, Glycine max
  Clone ID: LIB3093-028-Q1-K1-F5
gtcgaaccattgcctacccctgaagagatagaggaaaaatcaaggccgtacacatgcttggatgctgtaacttgtcgatgttgttgatggtttttgtacaagtagaagtctttccgtctagtagtttaatcgtgaaaactcataagtatgtcgatgtacccttttgctttagatgggtaggtgttatctttaggcaatttgcttcatgacatcttctgttcttcattttttccctaaattttggaggtagagttccaagttagatgtacagttgcagtgctattgcgttgttatgtttttactgtttagtctgtaaacctggatatccagctattatcaaaccgactactgcctggaacgctagagacagagaatttattttagttaggtgcatgccatggt

SEQ ID NO: 42853 - DNA, 464 bp, Glycine max
  unsure (1)..(464): unsure at all n locations
  Clone ID: LIB3093-028-Q1-K1-F6
cccttctccaacatgccaaacgacagcgttctgagtcttttcttgttcgttaccctcttgacatgccttctctgtgctaattcccacgatgaccatatcttcctaccgagtcaactccatgacgatgactcagtgagtcgcactgctaccgacccaaaccttaactacaagccggtgatcggaatcctgacccaccccggcgacggtgcctctggccggctcagcaacgccaccggggtttcttacatcgccgcctactacgttaaattcgtggagtccggaggtgctagagttattccccttatctacaatgagtcacctgagaaccttaacatgaagctcgatttggtcaatggagtgctcttcactggtgggtgggctgtttctggtccatatttggatactcttggaaacanttttaagacagctttagagaaaaatgatgctggagaccatttcccagt

SEQ ID NO: 42854 - DNA, 235 bp, Glycine max
  Clone ID: LIB3093-028-Q1-K1-F7
cccacgcgtccggccacgcgttcgggggttcatagatttagggaatcgattactatactagtaataaattgtacaaaaaataaaaatataaataatataaatataaaaagaacaaacacaaattttatgggaatagtcgcggtatttaaaataaaaaatggaagtagaccaattaaaaaaggaaggagatgtttgaataaaaataatttcccttcaaggtcttaatttttgagaa

SEQ ID NO: 42855 - DNA, 469 bp, Glycine max
  Clone ID: LIB3093-028-Q1-K1-F8
cccacgcgtccgaccacgcgtccgggggttcatagatttagggaatcgattactatactaggaataaattgtacaaaaaataaaaatataaataatataaatataaaaagaacaaacacaaattttatgtgattagtcgcggtatttaaaataaaaaatgaaagtagacaaataaaaaaggaaaggagatgtttgaataaaaataattccccttcaagttcttattttttgagaggacaggacaatatgaatgttttattatgctctatcaacacattaaaaagattatatgatatatctgctgtggaagtaggtcaacatttctattggcaaatagggagtttccaagtacatgcccaagtacttattacttcttgtgttgtaattgctctcttaatgggtttagccattctaattattcgaaatctgcaaaccattcccgttttcggtcagaatttctttgaatatg

SEQ ID NO: 42856 - DNA, 350 bp, Glycine max
  Clone ID: LIB3093-028-Q1-K1-F9
cccacgcgtccgatggcttcatgtaccgcaccttcctccctcatgctcgtccactctcaagacctttctccctctcttcgctccttctctcacaggcccatttctagaaccaccttctctctctatcctctccttttgaagccctccaaatggctccacatagagcccaaatccaggacttgccatgccctcgtcgccgctttgtctgcagaggtccaagtgcccgaaactttcgacgacacggaggaggacgacggtgctgatggctccaccggcaccaacaccgtccccaccaccaagcctaagaaaggcaaggccgcattgcctctcaagagggacaggactagatc

SEQ ID NO: 42857 - DNA, 294 bp, Glycine max
  Clone ID: LIB3093-028-Q1-K1-G1
gatcaccaaagtacttgtgagtgtctacccaacacacactaagatcaacatggactactacacccgcgtttcagaagttgagagggaacctatcatggagtattccacaccacgaccaatgatgggcaactaccaccaccctaatgctcaccgtgtcctcaacgagaagattgctcatgaggaggatgtgattggaggatcccgccacaaccacatgcatcaccaccaccctgagactcatgagagagtcaaggaggtggaatatgaacaagttcactgaatgcgcatagtcta

SEQ ID NO: 42858 - DNA, 268 bp, Glycine max
  Clone ID: LIB3093-028-Q1-K1-G10
acgcgtacgcttccgcttgagtgctgatcgacgtttagtattatagattggtcagtctttatcgcgaacggtcaatttactcagacatgccgactatcaaatactgaacacattatatattcagaataatcatccacagagatccaccatcgaacgcttggctctttaactcggactaacttatcaccagattaccatatctttcggcattactcttccatgcttccctctttcatcataaatggaatccaattcttgtttctatgct

SEQ ID NO: 42859 - DNA, 181 bp, Glycine max
  Clone ID: LIB3093-028-Q1-K1-G11
tcgctaatattggataaattgaggcacactagcctgtgaggctgaaaattactgatcctgggacggcatatcatcctatgatggatgatgactgttctacatccgttgatcgacgaagctttaatgcatgtattgatgatcaaaattacactagcgcatgctcaagcaatatggattgctc

SEQ ID NO: 42860 - DNA, 358 bp, Glycine max
  Clone ID: LIB3093-028-Q1-K1-G12
cccacgcgtccgggacaagcgaagaatgcttcatgttgtatatcgtgttggggacttggacgggaccataaagttttatacagagtgcctaggaatgaagctcctcagaaagagggacataccagaggagaaatatactaatgcctttcttggatatgggcccgaagactcacactttgttattgaactgacatacaattatggagttgacaagtatgatatcggaactggatttggccattttggtatagctgatgatgatgttgcaaaagcagtggaactaatcagagctaagggtggcaaaataactagggagcctggtcctgtcaagggaaggcgttcagtaattgcatgtatt

SEQ ID NO: 42861 - DNA, 407 bp, Glycine max
  Clone ID: LIB3093-028-Q1-K1-G2
cccacgcgtccgcataattcagctgctgcactgcaaaggtttggacagtgttacgtgcttcacgaaacatgacctctgctcacgaccttactgataatgaagatgatggacagcagcagtcagaatcaccaatgcagcccccatctgtaaatggaatatctgatccaggtattagtacccagaatgtcaatgtacagtatgcagcacctggccagcttggaactgggcatgcaatggtaccacatgtgtatccatatccagatccttactatagaagcatctttgctccctatgatacacaaccttatcccccacaagcctatagtgggcagccaatggtccatcttcagttaatgggaattcagcaagctggtgttcctctgccaactgatgcagttgaggagcct

SEQ ID NO: 42862 - DNA, 383 bp, Glycine max
  Clone ID: LIB3093-028-Q1-K1-G3
ggacagggcaatttccgatcaagaataaaatgggggagaagtttttagctgtagcaactaatacgcctttttatgacgatgatggaagcttagttgggctaatttgtgtctctattgatttgcggccctttctcgaaatgaaagttccaatgcctagtgtaaggaacatcgagtcagattcagattcaggtggaacccgacctagaagtagcattacaaataaacttggccttgacactcaacagccgcttcaagcttctatagcttcgaaaatttcaaatttggcatcaaaggtgggtaacaaagttaagtcaaggatctggacgggagaaaacaatttggatcgtgaaagtgggagtggtgaaagtcatcattctgagcat

SEQ ID NO: 42863 - DNA, 473 bp, Glycine max
  unsure (1)..(473): unsure at all n locations
  Clone ID: LIB3093-028-Q1-K1-G4
cggtcgaccacgcgtacgcttttctctcgtcctcgcggatggagagagagaaagtttgagagaaagagcggtggttggtggttgtggtttggtgaagttcgattcgatgcgatgcgattgcgttggggattttgattctctctctctcactgtgcggtctctaattcgcttggtgcangtcgggaaccggttttcgcgcggaatggaggaacggtcgccggcggcgaattggatcccgccttgcatcaactgaatcggaggccgcggtgaagctttgcctcgttttccgctcagatctcatctgcgagattctaccaccagtattttttaaatttattttaatctctgcttatcagatccgaaacgcttctagatttaagtttatcgtctctatgcagaaagggggatttatgcggtagatcccgatgcattggatctacatctaagaaaaattagtttagttaaaaaaatta

SEQ ID NO: 42864 - DNA, 343 bp, Glycine max
  Clone ID: LIB3093-028-Q1-K1-G5
cccacgcgtccgcccttccattacaactccttctcgcgcgatagattgctctttctcctctgctccttcctttcccattcctcctttccctctgccctccgcatcccccaattgtcccccaaactttctccctccgccgctccgccgtcgcccctctcgctcgccctgcgccgtcggcttcgcccctggacgccatggcccagaaaatcagaaagtgcacgcgccgacacggctcgtactccaaggcccgcgactactccgatgtcaacgtcaatcgccccaaggaatattgggactacgagtcccttaacgtccagtggagggagcaagatgattatgacgt

SEQ ID NO: 42865 - DNA, 392 bp, Glycine max
  Clone ID: LIB3093-028-Q1-K1-G6
cccacgcgtccgatcttatattgcaagacctgcgtgagcgaatgattgatatgctgtgtctggttctgattcggcgaggcctcttacggctggagtcggaattggaggaaggacaacaccattaacaggctcagatggtgtatgatggcccatgaatcacgctctctggactcagacaaaaccgtcaatgctggattctggatcattgaaggccccaaaactgtacaggattcggccaagatggagcttgaataaattcatgacaacattcgaagtccgaagaacaaaatcgacttacacatggataacgttcagaggcttaagatacatcaaataattaaaaacgctaaacttggaatttaaactacgagcaagagaatgaacttgctaac

SEQ ID NO: 42866 - DNA, 395 bp, Glycine max
  Clone ID: LIB3093-028-Q1-K1-G7
ctgacgcatggtatccctccagtccagctgtaattgatcagaggattcaaggcaagtctgaggtgatacctgagcatcaagtaaccagtttaggtagacattttgaaagtgaccatgattcatcaccttctcctgtcaatgcgtatggtgacaaaaatatgatatattccaaagaactggttactgtacctgaaatggatgatgaactagctatggtacctgtacaccagatgccaaagcgatctgagatcgtacagcgtcgaatactcaggcctttgactgtatatgaagtctacacactggttcaagcactcgagaaactaggaactggaaagtggcgtgatgctaagctttgtgcttttgataatgcatagcatagtgcatatgctgatttg

SEQ ID NO: 42867 - DNA, 268 bp, Glycine max
  Clone ID: LIB3093-028-Q1-K1-G8
aataccgggccgaccacgcgtccgctcacgcgtccgatcctacatgtcaagatgttcttgagcgaaagattgatatcaggtctaggatgctacctgagcaatgactagcacagctatgtacacaattcgaacatggtcatcaataatcactggctcctatggaatcagatggccccagaaacacgacctattccatcaaactaaatactgaacgctagatgccagataatcgaataactcaatcctgtacaccgaatctgcacaacaa

SEQ ID NO: 42868 - DNA, 298 bp, Glycine max
  Clone ID: LIB3093-028-Q1-K1-G9
cgcgtacgcctacgcgtacgcttgagggctgttcgcaatctggcttcaggggtaaaaagtctggatcctgggcacgcaaaatactaggagaagccggagttcagagacttcacaaatgttctaaagaaaatcagtatccagattgaaccacaaaagaaagcttggcacacgaactcggacttacttatcagcaggttgccaaatggtttgtcactacacatgggatcttccggcattcatcacaaatggaaaccaagtcatgtcttaatgctttacagcaggttactgatggcagaac

SEQ ID NO: 42869 - DNA, 163 bp, Glycine max
  Clone ID: LIB3093-028-Q1-K1-H1
gtaatacataagtgcttagagagagagagagatagaggtcaggcgatgacagaggtagcatgaggtgcggtgaaaacagatcgactgcggtcccacagacggtaagcgcaacatgacaatggatgctactgtacagtataagatacaccgaagttgtggaatc

SEQ ID NO: 42870 - DNA, 359 bp, Glycine max
  Clone ID: LIB3093-028-Q1-K1-H10
cgcacgcgtccggtacaagcgaacaatgcttcatgttgtatatcgagttggggacttggacaggaccataaagttttatacagagtgcctacgaatgaagctcctcagaaagagggacataccagaggagaaatatactaatgcctttcttggatatgggcccgaagactcacactttgttattgaactgacatacaatgatggagttgacaagtatgatatcggaactggatttggccattttggcatagctgttgatgatgttgcaaaagcagtggaactaatcacagctaagggtggcaaaataactagggagcctggtcctgtcaagggagggcgttcagtaattgcatttattg

SEQ ID NO: 42871 - DNA, 108 bp, Glycine max
  Clone ID: LIB3093-028-Q1-K1-H11
acgcgcacgcttgtgacaaatgctatactgaatctttatatggtaggcatatacgcacgtagccgaggcatggggatgagtgactacccaagctaaagctgctgatgc

SEQ ID NO: 42872 - DNA, 393 bp, Glycine max
  Clone ID: LIB3093-028-Q1-K1-H3
ccaaaccctcggcggctgccatacccgctgcgtgctctgttgtgtctcctcttctccgcttggcctctctccttcgccgttctttttagggctctctcaactcttctattagctgcttaaaccgtggcttacgactcagattccgatttagggcttgcgtttctggattctgccttccatgatgaaccagatctcgtgcctgatcatgcatcatggccactgtcgctagtcctgctgatcaagccactgatcagcctgctgagctatcgctggaaacatcagcccgaacctttggagattcctgagccaaccaataaggccactgggaatgactatggatcacttgattcaagaaatgcttctagtggtcatatcccattgcatgatccgtct

SEQ ID NO: 42873 - DNA, 396 bp, Glycine max
  Clone ID: LIB3093-028-Q1-K1-H4
ctaaattctaaacactccttcgacctataatacccttctctatagtcattgttgaagctcggaagcaaaggctaaagtagatgagattctcctcaagcaaaacctagagcttccacactcctccactacttagaatattaaaagccccttccttcatcaaggtactactgttccatcttccctcaaagattggaacaacaacaggaacatgggtactctaacaactgttcctgtgctcccttctaagcttaacaagccttcgctttctccgcgttacaattctctttttccctactacggaagacgcgtcgggaagaagaacatagcaatggatcctgttgctaggttgttcgggccagccatatttgaagcctaatagcttaaggatttattctt

SEQ ID NO: 42874 - DNA, 372 bp, Glycine max
  Clone ID: LIB3093-028-Q1-K1-H5
gagaagtcaattgagcttttgattcggtttacccgggctgggaagtctgcttcttatgctggtctcatgggggattcctttgggaattatggaaaagctctggtgcagatatgtgttataatcaataacatcggtgttctgattgtttacatgattataattggtgatgtgctctctggaacatcttcaagtggagatcatcactatggtatccttgaaggatggtttggtgtgcaatggtggacaggccggacatttgttgtactttttactacacttgccatatttgtacctcttgcgagctttaagcgaattgattcattgagattaacgttctgcctttcagtcgcacttgcagttgtttttctagtc

SEQ ID NO: 42875 - DNA, 52 bp, Glycine max
  Clone ID: LIB3093-028-Q1-K1-H6
ctaaattctaaacactccttcgacctataatacccttctctatattcattgt

SEQ ID NO: 42876 - DNA, 398 bp, Glycine max
  Clone ID: LIB3093-028-Q1-K1-H7
ctgcttgccttccaaaaacggtggtggccctaagcaaagttgtggcgattacaccagggttggctaagaactcgttccaacccttgtgatttcatttctgatttttaagattgtgatatgatggaatcttatttatgtcaattggtttagtttaatttccatatgttattgttttttttaatattaagtcaggtcccagataatttgcatcagttcacactcatgagtcacctgatcaagagctagacccggttttattgtatgtatcactgtatgtaatatctaatgatttcggctcatacttctgttgcggttgtattgtcggtgtgtatcatgtgtgccattagtttatttgatgctgataagaatcattccatgttagatgggaaataatatta

SEQ ID NO: 42877 - DNA, 181 bp, Glycine max
  Clone ID: LIB3093-028-Q1-K1-H8
aaaaaaaataagaaaatgaaaaaaaaaaaaattaaatatattgtaaaaataataaaaaaaatgggaatgggtaaataactgataaataggacggcttttttaagggttccaagtttacttctaatgcttgctaaataataacattcctattgaggcacctaatttcattgaatcggccttc

SEQ ID NO: 42878 - DNA, 360 bp, Glycine max
  Clone ID: LIB3093-028-Q1-K1-H9
cccacgcgtccgggaatgctggactgggcctttttgagcaggctcatttgcttgtttctgaaccttctgagaaggagaagttgaaggcttgcattgctcaggccagggaacatttgcatctagaagataacccatcacaagctttacaaccttcagataatcaggcaaacagaggatatctttttgaggggcaccttacggttgatcctgagccaccacagcctcaatggttggtgcagtcaaaccttttgaacacaactgctacactctttgctggtggatcctttcaagctccaacagcaaatgaaaccactcaagaagatgccccaaatatgcttcaagatcttctaaatagattgg

SEQ ID NO: 42879 - DNA, 176 bp, Glycine max
  Clone ID: LIB3093-029-Q1-K1-A1
gacacgtctagtccattgtaggttcaactcttgttctatcgcaacattgacagtgatggaagggatcggcaactgcaaacccaggcccgattgacagaagaataacaagagcaatgtaaattaaaggccgaggaactcgaaatggcattagagaacatctctgaggtctgacttgc

SEQ ID NO: 42880 - DNA, 262 bp, Glycine max
  Clone ID: LIB3093-029-Q1-K1-A10
ataagacgaaaatgttgacagaaaggataatgcatgaatgcatcatgaagttattgggtcagtatcacgatccggatgaagaagatattgaagctttgtgcatgctgatgagtactattgtggagatgattgaccatcccaaagccaaggaacatatggatgcatattttgaaatgatgagatcattatcaaacatcatgaatttatcttctaggttgaggttcatgttgaatgatgtcattgatttgagacagattaaatg

SEQ ID NO: 42881 - DNA, 257 bp, Glycine max
  Clone ID: LIB3093-029-Q1-K1-A11
gtctaaggattacgtatatagaccagcctatgcctgattgcatgaagcagtacttgggacggattcagagtccgcatggggaagatatagtagcagcgtgcatgctcatgactactgttgatgagatgattgtacattctaaagccaaggtacatatcgatgcatattacgaagtgctgagatcattatctaagaacatgaatgaatcgcctacgttgatgttcatgttgaaggatgtcatcgatttgagaaagaat

SEQ ID NO: 42882 - DNA, 302 bp, Glycine max
  Clone ID: LIB3093-029-Q1-K1-A12
ttggagttgtgacaagaataattgaagaacatggttaatttattctattcatcatacaagatgaactgatgataacaaggagggattctcaactgcatgccatgcatctttgtttgccatcctagtctagattaagttgtgctcccagactacaggcagctatacaagtctcgatgaggtttgtgggttaatatgtgaattatcaattatgtaagaatggtgaagatttttttgtatgtttttcaccatatatgtatcatacgaaagcgtgtcttttcaaaagatctagacttatgtaccaa

SEQ ID NO: 42883 - DNA, 344 bp, Glycine max
  Clone ID: LIB3093-029-Q1-K1-A2
cacagaacaagctggggtggggcgacgcgctgcctggaacgggacagagacagagagggttccttccggtcgctgtaattggtttggcgttcaattgaggaagaacaatgtcggtgacagcgggtgttagtgatactgtaatagccattagggataagctcagaggtaaaattggccaaactaaagttaagcgttattggcccggtaaagttcctgaatgggctgatgatgagaacgaagaagatgctgcccctgccgatattagaccctccaaggaagctgccttggagaaagcctttcctcgtcacgaagaaaacgcttgtattgtcagaaaagacgatcgt

SEQ ID NO: 42884 - DNA, 286 bp, Glycine max
  Clone ID: LIB3093-029-Q1-K1-A3
cccacgcgtccggcaggtgtacaatcggtgagccttgacggaagcaaggacttggtgacagtgaagggaacaatggacgtgaatgagatggtgtcgtacctgaacgagaagctgatgcgaaacgtggaagtggtgcctccttcgaagaaagacgacgagttgaaagagaaagaaggtgacggtggcgaaaagaatgagaaagagaaagactgtgctcatgagaataatgataaagacgttgctgcagctgccgatgttattaacaaaatggactatatgcaccaga

SEQ ID NO: 42885 - DNA, 227 bp, Glycine max
  unsure (1)..(227): unsure at all n locations
  Clone ID: LIB3093-029-Q1-K1-A4
ggtgggggatatcgaagggcacttttgaggctgatgaaagtcttttcacggtcatggggactctcgatggagaaatggcttcatttgactttctaaagagttcaatgganncatgttcaacgtggagggagaccggtgaaaagagacgggagatcaagaaagtgcttttcaaaggtgtttgatttgaaatggcgacggaaaaaatcaatgcttgaggaaattatcac

SEQ ID NO: 42886 - DNA, 454 bp, Glycine max
  unsure (1)..(454): unsure at all n locations
  Clone ID: LIB3093-029-Q1-K1-A5
gctctgtttctgtctctgtgtttgcggctgaggattccgaacgagcgaccttcttcgtttctcgcaaagtttaagtcatcatgggtaaggaaaagactcacatcaacattgtcgtcattggacatgtcgactctgggaagtcaactaccactggtcatttgatctacaagcttggaggtattgacaagcgtgtgattgagaggttcgagaaggaggctgctgagatgaacaagaggtcattcaagtatgcctgggtgcttgacaagctcaaggctgagcgcgaaagaggaattaccattgatattgctttgtggaagtttgaaaccaccaagtactactgcacagtcatcgatgcccccggacatcgtgactttatcaagaacatgattactggtacctnccaggctgattgtgctgtccttatcattgactccaccactggtggttttgaagc

SEQ ID NO: 42887 - DNA, 236 bp, Glycine max
  Clone ID: LIB3093-029-Q1-K1-A6
gtgtatgatgaatttgttctccataatctaagagataatagaatagacagtattggaagtttcgacggcaaagtgccaatgtgctcctatgattatgttccaagcttggttttgccatattgtaattaagctaccttgcacttgcttgcttgtatgaatgtaaattatgttaatggtttcagaaccttggctatttaatgtatggacacggctgagattgtgaatacttctggtgg

SEQ ID NO: 42888 - DNA, 421 bp, Glycine max
  Clone ID: LIB3093-029-Q1-K1-A7
ataaactgatcacgcggactgtctagcctcagggctactaaacaatgcacaacgacagctatgaaaggactatatctaggacggacatctaattgtatgccatgcatgtgagagagagatagaagcatatcttaagttacgtacgtagacaaccagaaattgaacctgatcgaacgaggactgtagcctaatcatgctattatgagttatgacctgatgatcaaaaactgttcgcatgaatcatagcagatatgtattacaatgaagcgcttctactatttcaaagtcaaattttggaccaatacgcctaggtctacacctggactgaaagatctacataaactgcaatttttaggatctgacaaggtgacctagtcttcatgctcatctacatgtactctctgtatagatacaactgtat

SEQ ID NO: 42889 - DNA, 360 bp, Glycine max
  Clone ID: LIB3093-029-Q1-K1-A9
ataagacgaaaatgttgacagaaaggataatgcatgaatgcatcaagaagttattgggtcagtatcaggatccggatgaagaagatattgaagctttgtgcaagctgatgagtactattggggagatgattgaccatcccaaagccaaggaacatatggatgcatattttgaaatgatgagatcattatcaaacaacatgaatttatcttctaggttgaggttcatgttgaaggatgtcattgatttgagaaagaataaatggcaacaaagaagaaaggttgaaggtccgaagaagattgaggaggtgcacagagatgcttctcaagagaggctggcccaagctagtaagctgggtcgtg

SEQ ID NO: 42890 - DNA, 264 bp, Glycine max
  Clone ID: LIB3093-029-Q1-K1-B1
gtaatcctagtgaacacttatcaggactcggaacccgatgcctagagagcggctgatacgttcaccatgataccaattgtgccgctgaatattccctctgctatactggaccgttaagatcccgcagatacttgcaatggcggagatctcttgtatgcttactatgatgacgatgaacgggtgtactcacactctgagttatctgccgatgatgggtcattcgctaccctatctgtgttagctgattgacagatgaatgagctt

SEQ ID NO: 42891 - DNA, 357 bp, Glycine max
  Clone ID: LIB3093-029-Q1-K1-B10
cccacgcgtccgattgaatttcaatttccctaggggcttaatatctccccgcatttgtgccgagcctcattattatcatagtagatattcattccccttatctttctctcttctctctccccgcccaaaccctaactccctaccctattccgctttctctcatccatcatgaaaggaggaaagtccaagaccgaatctaagagagccgatgccaaacttgctgtgaataagaagggcgccgccaccaagactaggaaacccgccggaaaggggaaggcagcgaaagatcctaacaagccaaagaggcctccaagtgctttcttcgttttcatggaggaattcacgaaggtgttcaac

SEQ ID NO: 42892 - DNA, 234 bp, Glycine max
  Clone ID: LIB3093-029-Q1-K1-B11
gaaaaacctacagagagtatggtggttttgaagatcaaactgctctgtgacggttgcatcgggaacattctaagaatcattatgaggttcaaaggtgtactatcggtgagccttgtctgaagcaaggactcgtagacagctaccgtaacactggacgtgatagacatggtgtcaagcctgaactagaagatctagcgaaacatagccgtggcgcctcttgctaagaatgacaac

SEQ ID NO: 42893 - DNA, 142 bp, Glycine max
  Clone ID: LIB3093-029-Q1-K1-B12
gccacgcgtacgaacaggctgggcattacgcagatgcaagagcaatctatccttcacatcgggtacaattcattgattacaagagctgctatcacgtacctaacttgggacgtcggcactgagagcggactagctgacaaat

SEQ ID NO: 42894 - DNA, 374 bp, Glycine max
  Clone ID: LIB3093-029-Q1-K1-B2
tttcgcttattttattatcgttttcctttctcccgagtgttctcctttcttgcttccttctccggccatctttatcctgatggcgtcgtctctgggaattgcttgcggtggaaacaacgccaaattagggatcccaaagcagcggtgtggttcggttcttcagccgccgtgctccctcgctatggggcgctcgacggcgagggtggggaggatcacggctgcgatggccacggccacggcggtgatgaccacggccacggcgaaggagcaagagactaccactccgatgatgatggcaatggagctgttcgggaaacgcgatggaggagccaaaaacgacgcttgtgaaggacaagaaaagcttgacaagtgga

SEQ ID NO: 42895 - DNA, 331 bp, Glycine max
  Clone ID: LIB3093-029-Q1-K1-B3
ggcagtcagcattccatgcaaatgctccagttggtacttcggatttaaacaatggcaaggacaacgcaattcaagctgtctgagcttgtaaggtccggtgaagacagcagcagaattaagccttcttttggtcatttttcatttggactatcatatataattttggtttcctgatccctatcattttaatctttccattagtagccaggtatatatgggggcacttatatcaggtataacacaattttgaaaaaacacttattcaaactgaacacaagtaactcttatataaagaggttgtgtctctataggttgggatatttttagagcc

SEQ ID NO: 42896 - DNA, 84 bp, Glycine max
  Clone ID: LIB3093-029-Q1-K1-B4
ctcaaacggactgacgtcctattacgttatgacctagtctggcccaatctttgacggcacagggggcatccattcggttgtatg

SEQ ID NO: 42897 - DNA, 424 bp, Glycine max
  Clone ID: LIB3093-029-Q1-K1-B5
aaagagaaatggaggagactctttctctcagtctcatccacgtaaacaactcattggttttcaccaatagactacacatcatcctccatttcactgctctatgtttcttggtttactacaggctttgtttcttctttcagaatccacaaaccagacgaggaactactttgttcccttggcttcttgtttttgcctctgaaatcattctctccttcatttggattcttggtcaaggtttccgctggcaccccatttcaagaactgtgtttcctgaaaggttaccacaggatgacaagctccctctcattgatgttttcatatgcactgcagacccaactaaagaaccaactttggatgttatgaacactttgctatcagccatggcgcttgattacccgccagagaagcttcatgtgtatggttc

SEQ ID NO: 42898 - DNA, 454 bp, Glycine max
  Clone ID: LIB3093-029-Q1-K1-B6
gtttttacggctagaagaatgtccagctcatcggaatatttggtattttccggccaccacccggcgaactctccggcggaaaagtccactttctctcagacttgtagtctattgagccaatacatcaaggaaaagggtaccttcggagaccttaccctcgggatgacttgcactgccgaaacaaacggttcccctgagacatcgtgtcactctgcaacaaccatggagttgtttcccacgatcatcacgcaacggaacccaactactgtggatttcctatctccccagactgcttatcctcaccactcagaggttccaatcatggttaaatcaagtgcttttaagtctatggagaaggagcctaaagctgctcagttgacgatcttttatgctgggcaagttgttgtgtttgatgattttcctgctgaaaaattggaggagataacgtcattag

SEQ ID NO: 42899 - DNA, 387 bp, Glycine max
  Clone ID: LIB3093-029-Q1-K1-B7
ctcggtctcgctcttctactcatcaagcacagagttacagactcaccgatcttccgattctctttcgtcttggtttatgagctcgaaggagagacccactcttggtggcacgcggattaagacccgcaaacgaaatattgctgcgccgctggaccctgcagcattctcggatgcagtggttcagatttatttggataatgctggtgatctggaacttattggtaagagtattgaatcttcagaccttaacttttcaagatacggtgacaccttttttgaagttgctttcactgggggtcgtacacaacctggaactaacaaggctgatgaaggggaccgtcacccatactctataatagaatgtgagcctaaacgtgaagtcatttt

SEQ ID NO: 42900 - DNA, 256 bp, Glycine max
  Clone ID: LIB3093-029-Q1-K1-B8
gtttttcctttcgggattggcatctatggcttctgaagtaatagagtaccgatgctttgtcggtgggcttgcttgggccaccgacagcgatgctctcgagaaagccttctgtgattatggtgagatcgtcgaatctaaggttatcatcgatcgtgaaactggaagatcgagagggtttggatcagtgaccttcgtcttggagcatgccatgaacgacgcagtcgaaggaatgaacggtcagaacctagacggtcgt

SEQ ID NO: 42901 - DNA, 193 bp, Glycine max
  Clone ID: LIB3093-029-Q1-K1-C10
ctacatccttgatcgccacagtcattttctatcatcatcactttcgatgagaactgtgcttgtgctatataacttaagagttctccagattattatagtgtatacgcagctatatcgtataaggaaatcgacttagattgtgaagtgtgacctctatgatatgcattgaattgatatcgctgtacatcgcttg

SEQ ID NO: 42902 - DNA, 356 bp, Glycine max
  Clone ID: LIB3093-029-Q1-K1-C11
aaaaaaaattagaaaacaatatagatacgatcttttatcctataattttatcaattgtgcagataagaaagactcatatatttatggatatagatccctatttcaagttaaagaaaaaccaagtgatttcttctaattacaacacgtgtaaaaaagaagtattggatatcatagataatctctttatcaagaattatatatcggaggatgccattctagatatggaaaactatatgaatcgaacgtatttcgattgaatggtaatctatagagaaatactaaatcgttacatatcgaatccatacatctggttcactgcaaaaactgtgacgttttatgactcatataggggtaac

SEQ ID NO: 42903 - DNA, 262 bp, Glycine max
  Clone ID: LIB3093-029-Q1-K1-C12
cggacgcgtgggggtgcaggctgtcgcaagtgattggatggcatctgctcgcgctccgtccaggatgaccgaacttatgtcaacgcagattctgatgctcagaataagcctggcagcaaccacgacaccattatttacaccgacgcgcctcataggatggagaggaatcttccagatccttctagaaccaacaggaatgcttctaccaatgcgattgaagagatctacgactgaatcccgagcttgcactaggactgcatgc

SEQ ID NO: 42904 - DNA, 213 bp, Glycine max
  Clone ID: LIB3093-029-Q1-K1-C2
ctatacttcttcaatacatataatgtcaatgacaggtgtagttagagcttgctaatcagataccatggacggctacgacagctatgacttttggaaatctcaatgctcagctcgaggcttgaatctggtttggacaatctggctctgaatgattacttcattcggagcaacagatacagcttcaataagcctgatcagatgacgaactttgat

SEQ ID NO: 42905 - DNA, 454 bp, Glycine max
  Clone ID: LIB3093-029-Q1-K1-C3
cccacgcgtccgcccacgcgtccgctcacaaagacacagagtgcgttcgttgacgacaaacacacacaaacacacaacaaaagctcgccggaaaatctttctccggcgacctggaattccgacgaaggtagttgcggctccttcgtcccgaaactgaggccctcaaagtataaactttggtggtggtgggtaggatctggcggtgtatgatgggatcttgcatatgcccgttggagactccggcgaggttgctttggaccacaagcttcttccgtcataagcttatgatcttctaataattaataattcacgcacacaaacaaacaaacaaacaaacaaaaaacacttcataacaacaacaacaacccttctgaaattctcaacacaagtttcaaaaaacagagtaaaagaaacagagcaaaaacacacacacaaaaacacaaacacagacacc

SEQ ID NO: 42906 - DNA, 356 bp, Glycine max
  unsure (1)..(356): unsure at all n locations
  Clone ID: LIB3093-029-Q1-K1-C4
agaagatggagatgtatcagatctggagcaggagaatagcgttgggagcgttcgcgtttgttctgcttttcctatcggcctcagcagacgacgtcgttgtgctctctgaagataacttcgagaaggaagttggtcaggacagaggagctctcgttgagttctatgctccttggtgtggacactgcaaaaagcttgctccagaatatgaaaagcttggtagcagcttcaagaaagccaaatctgttttaatcggcaaggttgactgtgatgagcacangagtttgtgcagcaaatatggagtctctgggtacccaacaattcagtggtttccaaaaggatctcttgaacccaaaaag

SEQ ID NO: 42907 - DNA, 312 bp, Glycine max
  Clone ID: LIB3093-029-Q1-K1-C5
tggggttacagttcccgtgtgattgattcgattgtccacattgcatccgcggcttaaagaattgagtctgagcttggatatcatcgctacaccgttccaaatttttatcttaatcgagtttattttagtgcgaattcggaataaacactatgtgttgctgtgagaagatatcattgaaaaacagtgcactatgttgagttggtagacggccttataggttcttcctctcgcaagggacgattgactattctgtttccggtatcataatcatctagtataagcaacattttgttttccaaaaacaaaaacgct

SEQ ID NO: 42908 - DNA, 434 bp, Glycine max
  Clone ID: LIB3093-029-Q1-K1-C6
gagagactcatcagttctcactcgtacggcgcttttgctttgctttgcttcatttctttcatcgtcatcataaagttcgttcctttctcagttttcacccatacccagatgagtaacagcaccatctcggatctgtgtccctcctttgagtgaaaaaggttcaatctttggtctctggggctgttggggttccgtcattgaagaagaagaagaagaagggtattattgttattataatcatgtacccgaggctcatacaccctcacgatgggattgtgacgcacgatgagttgcagggtggtgctgcttccaacctctctcacgctcacaagggtgacccttgtctcgttttaacggctgatcccaagcctcgtcttcgttggactcaggacttgcatgaacgcttcgttgatgcggtcacgcagcttggtgga

SEQ ID NO: 42909 - DNA, 444 bp, Glycine max
  Clone ID: LIB3093-029-Q1-K1-C7
tgataagcaggataggtttgtgttttcatcaattaaggccttggctgtggagttaacaagagaagcacatgcttatagggaaaagaaattgcccaatagggataacaagattgaccgtggatttgatcagaggcctgatttgtggcctccggcgaatagggcggataagctgtcacttcggaatcccttgctccggcatgagaagatgggatgtggttggttgggtgctatatttgagtgggagggtgttctaattgaagacaaccccgatttagagaagcaagcttggctggcactctcttaggaagaaagcaaaccctttccttctgcttttatcctcaagagaatagaaagcatgaagaatgaacaagcgatttcggaagtgctgggttggtctaaggatccggcacagctgagaagaatggcttattgaaaggaagaaat

SEQ ID NO: 42910 - DNA, 131 bp, Glycine max
  Clone ID: LIB3093-029-Q1-K1-C8
ggcacgcgaccgcgaggctgatgaaatgctttccagggggtgcaatgatcagagctgtgctgcatcccaggtgcttacatctaagattcatggggcagcgcaatgtgcgacagtgcgtgccagtgctctag

SEQ ID NO: 42911 - DNA, 454 bp, Glycine max
  Clone ID: LIB3093-027-Q1-K1-D9
ctcagttctctcgttagtattcttccaatctccgtcgatcaccactaacaccaccatgtcgtggctcctccgatccaccaagtcaaaactcctctcttcctcatcttcactttctagaaccttcccctctctctcacgctccggccccacacttgacctccctcagatcggagccatctctcccctccccgatctcttccaccgcaacaccgctaccatgcctttcgcgaaggaaaacgcttccggtggaaacttggccggtcttcccaaagttcctgcgaatacgcttggcagtgactctaatgcgatcaattctccgaggtacaaagcttctggactggacacgaatgtgctggctggagctagatgtgtctctggagtttgggctgcacagggtccaatgcgattggtagtcaataccgtgatggctagaagtttgaaagaagtatggaac

SEQ ID NO: 42912 - DNA, 439 bp, Glycine max
  Clone ID: LIB3093-024-Q1-K1-E12
ttcatctatctggatattctccactaggttcaccagcagctctcaaaagtgataggcttaagaatcctgttgtcacagagattgcagagagattggggaagacaccagcacaagttgcccttcgatggggcttgcaagcaggtcatagtgtgcttcctaagagcactaatgagtccagaatcaagggaaattttgatatctttgactggtctattcctcaagatttgatgaccaagatctctgaaattaagcaggaaaggctagttaaggccagtttttttgttcacgagacctatggtgcctataggagcattgaagacttctgggatggtgaactctgagcaatatgcatctttgagacgttgaaaaatacattgctcctagagcaaatttattctgccttatacccactagttgtagtgattcaagtgagattttg

SEQ ID NO: 42913 - DNA, 450 bp, Glycine max
  Clone ID: LIB3093-024-Q1-K1-E2
gttacgtcttcacaaacccttggatcacagtgttagggttcttcaattttctccgattggcgtcaaacatcacacaccacccaccaactatacgtcagcattgaaccctaaaatacatgactcagaagcagagaaccagaatcccagattccatggaaacccagtacgaggagagtgagaaagacgagtcttcctctgcttatagttcctcacaagacgaggaggaagagatagagactgagctggctgatgtaacgtatgaggagttgcagaaagcacgctcgaatggggcacatgcatttttccagatacccaaagaagacataaaattaaaaagggctaacatgaataggccaatggaagctagtagcaagaagccagttactgtgtttagagaggtcatgcaagctccaaagaaggttgacgtgatccacgatttgaatctctttg

SEQ ID NO: 42914 - DNA, 398 bp, Glycine max
  Clone ID: LIB3093-024-Q1-K1-E3
cccacgcgtccgcccacgcgtccgcccacgcgtccggcaaaaacccaacacaccacactcgggcaatcaatcaatggcggaaccttcctcctcgaagcccgccgtccctctcctgaaggacgagctggacatcgtgatcccgacgatccgcaacctcgacttcctcgagatgtggcggcccttcttcgagccctatcacctcatcatcgtgcaggacggagaccccaacaggaccatcaaagttcccgatgggttcgattacgaactctacaaccgcaacgacatcaacaggatcttgggtcccaaggcctcctgcatctcgtttaaggattctgcttgtcgctgctttgggtacatggtgtctaagaggaagtacatctacaccatcgacgacgact

SEQ ID NO: 42915 - DNA, 452 bp, Glycine max
  Clone ID: LIB3093-024-Q1-K1-E4
ggaaaagaatggaggccatttgttccaagcaccttatgacatcccttgtcataattcttgcttctagtttgaccttatcacagggtgccaagaaaggcagtgacagtgaaaggccataccaagaagcgagcacggtgttcattagaacatcttgcagctccacgacctatccaagactctgctacagctccttagtgaagcatgcagacttgatccaaacaaaccgtgtggttctgacaggcacagccctgaatgtgacccttgcgtctgccaagtcgacctcggcaatgatgtcgacgctggcaaagaggcaaggcctgaagccaagagaggttgcagcgatgaaggactgtgtggaggagttggctgactctgttgatgagctcagaaggtctatttctgagatggctcaactaacaccctccaattttgagatgacaatgagtgacgta

SEQ ID NO: 42916 - DNA, 444 bp, Glycine max
  unsure (1)..(444): unsure at all n locations
  Clone ID: LIB3093-024-Q1-K1-E6
cccacgcgtccgtttctctctttgaccaattctaaacccaaaacaaaaaataaaaatggagggggatctgaagcagaagctgttgagaagaagaaaggaagaggaagaagaagaagaagaagagttatcattggccaagagggtgtggaatgagagcaaggttatgtggatagtggcggcaccagccatattcacaaggttttccacctttggaatcagtgttataagccaagcttttgttggccatattggttctaaggaattggccgcttatgctctcgttttcaccgttctcattaggttcgccaatggtgttctgttaggaatggcgagtgcgttgtcaacactttgtggacaagcatatggngcaaaagaatatggcatgaagggagtgtatcttcaaagatcatggatagttttgttcttaactgcaagctggcttct

SEQ ID NO: 42917 - DNA, 441 bp, Glycine max
  Clone ID: LIB3093-024-Q1-K1-E7
cccacgcgtccgcccacgcgtccgcggacgcgtgggtgaagattacatggcaagaagctcaaggtctgctccgaccccctcctagccacattccaagtattgtggtgattgaaggttttgaatttgaggaatatgaggaagctccagtgcttgggaagccaacaatttttaccagtgatagtgtgggtgaaaagatccagtgggctcaatgtgaagattgtttcaagtggcgcaaattgccagcaagtgcgcttcttccatcaaaatggacgtgttctgataattcatgggatccagaaagattttcttgttcagctgcgcaagagctgacagcagagcaacttgagaatttgctacctccttgtaattcagctgttcccaagaaaatgaaggccaccaaacaagatcccgataatgctgaaagctttggaaggacttgac

SEQ ID NO: 42918 - DNA, 411 bp, Glycine max
  Clone ID: LIB3093-024-Q1-K1-E8
acccacgcgacgaacagcatacgcggcagcgacggttacccttcaacaacaacactttctctgcgtgaaatgtgtctggtggcgaacgaggatttccagcacattctgcgtgtgctgaacaccaacgtggatgggaagcagaagataatgttcgcaatgacctccatcaagggtattggaaggagattcgccaacatcgcttgcaagaaggctgatgttgacatgaacaaaagggctggtgagttgactgctgctgagttggatagtgtgatgactgtggtggcgaaccctatgcagttcaagatcccagactggttttttgacagaaagaatgattacaaggatggcaaatactctcaagttgtgtctaatgctcttgatatgaaactcaaggatgatcttgagagactc

SEQ ID NO: 42919 - DNA, 448 bp, Glycine max
  Clone ID: LIB3093-024-Q1-K1-E9
ggaagagagcaaatttgcacacctacaagtacaaggaagttactttcttcgtttgatggtgaattatctcattgttgttcccaacatgtttctcatcacaaggcatttaggtttggagttacttttaatgtgtgaatcaaattaaggtttctgacaattttgtactgaaaaagaaaatttggaaaattgtgcaaaccaggtattgaaatttgtagtcaacaatcactaatttcaactataatacactgctatttatgcagataattatgtggatgtaccatgattagataagattactaacctacaaaacttcggaaacctttgcaacagcccaattgtcttctattgtttgtcagcagaaagacatctgaaatcacgtgtgaaccaatatggccatacatgaaatccacacttacatacacattccttcatggctagaggaacacct

SEQ ID NO: 42920 - DNA, 454 bp, Glycine max
  Clone ID: LIB3093-024-Q1-K1-F1
cgcattcacaaataaggttgaagaggtcactgccggaagaagggagcaacaccatctttcattttccggcgatctcttgtttcttccatcatcaccgttttccggcgatccctaatcctcgcaaacagaaatgacgacatcaaggcgccttgcggacaggaaggtggagaagtttgagaagaacatcacaaaaagaggatttgtgccagacactaccactaagaagggaaaagactaccctgttggcccagtgctgctcggtttcttcgtctttgttgtcattggatcatctctcttccagataatcaggacagcaacgagtggaggcatggcttaaatggagctttgttttggattttgtgtcatcttctctttcttagcctcctcgtagaaaatgctaatacttctctacatgtactgtacttgtactaaaccctgttcctgttcatgttta

SEQ ID NO: 42921 - DNA, 412 bp, Glycine max
  Clone ID: LIB3093-024-Q1-K1-F10
cccacgcgtgcgctcataaatgaatatgattcaaaatcagcatatactgtagatggtcctgcaccagtgtctgcctctcttccaaaatctgctcaaacttccagggatattgatttgtctcctggccaaccattacaatctaatcaaccaactggcaaccttggtgtcattggaagaagaaatggtgctgagcatggagccattggtgataattatagtgggtcgaatgttagttctggtggagtgcgtgatcaattatataatttgcaaatgcttgaggcagcccacttcaaaattccactacccaaagactcggaacgtactacgacttacactcctaagcacccagcaattacacctcccagctatgctcaagtacaggcacctattggtaataatcctgctttttggg

SEQ ID NO: 42922 - DNA, 443 bp, Glycine max
  unsure (1)..(443): unsure at all n locations
  Clone ID: LIB3093-024-Q1-K1-F12
cagaaatggccaccacttctgcttcattcgcgagcttctccgtcatcttgcgaccttcttcgtccaatccccaattcttcctcttcaacgtcgctccccgaaccggaacctctcattcccgaacccgttcgactcggttcaggtgctcggccggtcagaccgggttcttcacgaaactagggcggttgataaaggagaaggcgaagagcgacgtggagaagcttttctcgggattctccaagacccgcagcaacctcgccgtcatcgacgagcttctcctctattggaacctcgccgacaccgatcgggtcctcgacgaactcgaagaggctcttttagtgtctgattttggtccaagaatcactattaaaatagtggagaatttgcgcgaggatatattttcagggaagcttaaatcanggaatgagataaaggaagcactg

SEQ ID NO: 42923 - DNA, 412 bp, Glycine max
  Clone ID: LIB3093-024-Q1-K1-F2
attcggacggaacctccgccggttcttccgacgaggacaccggcgggcagacttgtcacgagtgccggaggaatgaccgcgaccgagttacttggtgtcaacggtgtgataggaggggatattgtgatagctgtttatcaacatggtactcggacatttcattggatgaaattcagaggatatgtcctgcttgccggggtatatgtaattgcaagacttgtttgcgaagtgataattcaattaaggttcggatacgcgagatacctgttctagataagttacagtatctccatgtgctgctgtcgactgtgctacctgtggtaaagcagatccactgtgaacagagttttgaagttgaacttgaaaagaagttgcgtggtgctgaaatagatcttccaagataaaattgaac

SEQ ID NO: 42924 - DNA, 391 bp, Glycine max
  Clone ID: LIB3093-024-Q1-K1-F3
gatggcttcaaagttgcagaagttgcaggccacagcatctcaagcgtctcaatttgtatcgagtcgtggaactaactactacaagcaattgctggaacagaacaagcaacacattcaggagcctcctacagtagagaaatgcaacctgttggcaaagcaattgttttacactcgccttgctagtattccgagtcgtaatgagtccttttggaaggaacttgattatgccaagaatttgtggaagaacaggaaagagctaaaggttgaagatgcaggaattgctgctttgtttggcctcgaatgctttgcatggttttgcgctggtgagattgttggcagaggatttactttcaccggttactatgtctgataataaaccacttggaaagtg

SEQ ID NO: 42925 - DNA, 454 bp, Glycine max
  Clone ID: LIB3093-024-Q1-K1-F4
cccacgcgtccggagaaaaagagattagagagagagagagagaggagacgaatgagacacgagagctgaacataaaggtgaggttacgtgtatctcttgaagtagtgccatgccaccccatcaataataagatcactcaatcaccaatgcatcatcgttgttggaattccagcgctgtgtttggaaattggaactggaggggcttcaggtgccataatctcaaccttagataacagattattgcacagcaaaaaccttgtaaaaggagaattagaatcacctctctctaaggatgttggaaggaaaggctatggtgaaagaaacagacatgtcaaccaagatgcagatccatgccatggcctctgcttctcaagcccttgatctctacgatgtttatgattgcatctctattgctgcccatatcaagaaagaatttgatagtgtgtacgggaaa

SEQ ID NO: 42926 - DNA, 360 bp, Glycine max
  Clone ID: LIB3093-024-Q1-K1-F5
ggaactcatatacaataaatataaagctttcttgcctgaatgaagactacatacataggggggtacatgcaataagaccgggatatattggcaaccgataattcattgacacaaccaagacacctttgcataaaacggaacttaaggccgtcactaatatactgactacatggacaaacttcgtatatatttactgagggtcgctttattttaaaatataaatgattacatgctttgatgataaagagaggccgtgatacatgcacgaataaacacatatactattgtagaatgaatgctataataactgtcgcataccaccatcgttgtttgtttcattaattaacattctttatgcgt

SEQ ID NO: 42927 - DNA, 430 bp, Glycine max
  Clone ID: LIB3093-024-Q1-K1-F6
ctcaatctctctctctctctctctctgaattttctcctctctccgattccttttattaatgggagtttactcgctccttttcctttccctgaaaacatttcctcgtcgtattgatgtcggaaaagggccggccacttccaaaatttggtgaatgggatgtcaatgatccaacctcagctgaggggttcacagtgatttttaataaggccagggatgagaaaaagacaggtggtaacccagattcaccaggaaagactgccactgatcctcatagcaaacctgctgtagagcctggcaaaactcaaactaaaaaatggttttgctgcatgcaaaacccttctgccgaatcatagcatagcaatggttgctcctgtgaaaagcctgaacagaagaacaatgtttgtgtaactagtgtcacagtattttctct

SEQ ID NO: 42928 - DNA, 378 bp, Glycine max
  Clone ID: LIB3093-024-Q1-K1-F7
cgcgtacgatttatttttttcaattccgacttttattttttagaagaggcaaaaacaatcttgtaacggtaaaattttacactggcactaaaataccttaattttgattacaaacatatatttatataaatgttatttaacttgactacttgctcagaaattaaatctaaaaatgttaatttaataatctttttcaaatgaatatatactcatattgcattccctatacttaatatacacatttcatatatatcttataaaaatgtttgctgtcactacacattttaaataataaactaatttaataaaaatgctgaaaatttctagaatttttattttaaaatataatgccaaataaggtaaaatatttttttttta

SEQ ID NO: 42929 - DNA, 366 bp, Glycine max
  unsure (1)..(366): unsure at all n locations
  Clone ID: LIB3093-024-Q1-K1-F8
ggaaaacactggtccaatcaacattgggaacccaggtgaatttacaatgattggggttgccgagaatgtgaaagagcttatcaatccaaaagtgcagataaatatggttgagaacactcctgacgatcctcgtcagagaaaaccagacattacaaaagcaaaggaattgctgagatgggaaccaaaggtcaagttgtatgatggccttcctctcatggaagaggatttccgtcagaggcttggagttcccaagagcaactaagctccttttactccttcatttcttatcatataatcataatgaatattttgatagtaacggngatgtggatgaacctgttaagtgttaagagatgttntatattg

SEQ ID NO: 42930 - DNA, 411 bp, Glycine max
  Clone ID: LIB3093-024-Q1-K1-F9
cccacgcgtccggtcgcgacgcgacttcctccgactaggcaaccagagtgcttataaaaggaatagtagtaagcacattcatctcccctagatatgaactcagttgcaaggcgtttatcaagcttagtcagacattcaggtttcacacctgaacccttcaataatgggcatcatcaaatgcagcagctccagcaatgcagaggcataagagtgaaggtcatgggtgggaacttggaagcagcattgggattgatgcagcgtaagatgcaatcaagtgggattgagaggatgataaagcacgaacaaagattccatatcaaaaactctgagaagcgtgttttagcccaaaagaacttggagcggaagattcgatctgaagatcttgctgagaaacttatcgccattatgatc

SEQ ID NO: 42931 - DNA, 386 bp, Glycine max
  Clone ID: LIB3093-024-Q1-K1-G10
atcatcccttgttttctactaacattggctgctggtgacactgtcaaatccgtgggtctagaatcttctgccgctgaaggagtatcttccaacacggaggaaaaccacctggttcagaccaatttgtctgatgggtcatccaacaagtctgtgccagcatctggacttaatgcagcgattcctagtgcaaatcatattaccatcttctataatgggagtgtttgagtctatgatggaatctctgcagagaaggagcatgaaataatgcttattgctgctgctgctgtcaagtctactgaaatgaagaagattgtgacccaaactacccttattttacccgtaccctcttgtcctttttctccacatggaatcactaacaatattgc

SEQ ID NO: 42932 - DNA, 433 bp, Glycine max
  Clone ID: LIB3093-024-Q1-K1-G11
cccacgcgtccgctctcgtgttctggctgcgttttctcaattcgttcccaaaacgcattggcacccacacgacggtgcagcctccctgtagctgcctcacctcaccactgcagcctcctcgccggcgaaacctccatttccggtggcgacgaacgtttaatttggccagctcctcctggaatcgcgatggtgacgcactgagaccagtggcgacgaagacacagtaagcagccggcagcggcgacggagacacactgctgaggtgacaaaagctatggcctcaaagctgcttttgaagagaaggctctttatgtttttgcaactgtcacaaccttctttttcttccattcatgcagccccaatcctttctgtaaaagcttcagaattcatgttcccctacaaggagaatgcccttcttcctcctctctcttct

SEQ ID NO: 42933 - DNA, 414 bp, Glycine max
  Clone ID: LIB3093-024-Q1-K1-G12
ctcgatcgtatggagcatagtgattacggagacaggtaccgtgaattaccccatggagtggatcacgctctaggctgcatgaatgctgctggtctcacagccgaccatcccatcatgagtacaacagacttttggacctcccatgagtgtatgcgtttaccttatgagcatgcacttactatggaggattctactcctgggcatcattatgattgctcacactcacatgctatgggtaggggaacgtagacgccaacttgatggtgctcatgttgaattcttgagacgagttgctaatacacttcgcattaaggtgagggataagatgcgatcccgatgaacttgctaagctgctagatattctgtaccctgaaaacaagcctggaagaattacagttattgtgagaatgggag

SEQ ID NO: 42934 - DNA, 434 bp, Glycine max
  unsure (1)..(434): unsure at all n locations
  Clone ID: LIB3093-024-Q1-K1-G3
cttcttgagggtaccctattgaagccaaacatggtcacccctggatcccaatctgctaaggtttcccctcaggtggttgccgagcacactgtcagagcccttcagagaaccgtgcctgctgcagttcctgctgtcgttttcttgtctggtggccagagtgaggaggaggcatccgtcaacctcaacgccattaaccaggtcaatgggaagaagccatggtcactctctttctcctttggaagggcacttcaacagagcacccttaaggcatggggcggaaaagaagagaatgtgaagaaggctcangaagcccttttggtaagagccaaggctaactcagaggcaactctgggaacctacaagggtaactcacagcttgctgatggtgcctcagagagcctccatgtttcgaactacagctactgatcaatcga

SEQ ID NO: 42935 - DNA, 329 bp, Glycine max
  Clone ID: LIB3093-024-Q1-K1-G4
cccacgcgtgcgacggcatggaagtggcacatattgatggctccacaaggatgggttcggggtttggggcgatgatgatatcagggcacaaggcggctcatttggcgttgaaggcgttggggaggaacaatgcaattgatggaacgtgtggagttggaagggaagaaccccagcttattttcgcttctgcagacactgaggaaattgttgatgcttaaacttacttttaaattacctagatatatagcttaacttttcttttctttctgatggggccctacttaattatgattgtaatttgggaataaatgaacaacatgtgaattatg

SEQ ID NO: 42936 - DNA, 388 bp, Glycine max
  Clone ID: LIB3093-024-Q1-K1-G5
cccacgcgtccgcccacacgtacgaaccaacacaacatcaactccgccccctacggcgccggctggcgcgccctacgccgcaacctcacctccgagatgctccacccgtcacgcgtcatgtgcttctccggtacccgcaagtgggtcctacacaccctcctcacgcgcctcaaatcagattcacaatccaacgattcaataaaagtcattaaccacttccaatactccatgttctgcttgcttgtgtttatgtgctacggggaaagactcgacgatgggaaagtcagagacattgagcgcgtgcagcgacaaatgctcctgcggattataaggttcaatgtactcaatttctggcccatagtcacgcgcgtattgatcttcaaactat

SEQ ID NO: 42937 - DNA, 388 bp, Glycine max
  Clone ID: LIB3093-024-Q1-K1-G6
gcgcctacgcatgcgaccatacggacgaaccatatcatcatcaattcctcccaatacggctcgggctggggcgccctatgccgcaaccacacttccaagatccttcaacacaaacgcgccatgtgcttttactgtacccgcaattgtgtcctacacaccctgctaacacgcctcatatcatattcatcaatccaacgattcaataaaagtgttagaccacttgcaatacttcatgaaaagtttgattgtgtctatgatcttatgtgaaagactcgatgatgggaaagaaagagacattgaacaagtgcaatgacaaatgctcctgctgattataaggttcaatgtactcaaattttggcccctacaaacgcacgttttatttttcaaa

SEQ ID NO: 42938 - DNA, 413 bp, Glycine max
  Clone ID: LIB3093-024-Q1-K1-G7
cggacgcgtggggcaaaattgatttctgtacttcgggctcctaaatccaaggaagggtatgctgctattggtggtggctctcctttacgaaaaattacagatgaccaggcacttgcaattaaaatggctttggaagcaaagggcatctcttcaaatgtctacgttgggatgcgatactggtacccatttactgaagaagcaattcagcaaattaagagggacagaataacaaggcttgtggtactacccctttatccccagttttctatatccacaactggatcaagcatccgtgttcttgagcatatattcagggaagatgcctacttgtctaagctccctgtttccattataaactcttggtatcaacgagaaggttatattaagtcaatggctaacttaattcagaaaga

SEQ ID NO: 42939 - DNA, 322 bp, Glycine max
  Clone ID: LIB3093-024-Q1-K1-G8
gcgctgcaatacttcttgcactcggttttatcttttacacactagcaaatgcacagtggtcttgtaattacagtatgatgggtgttattatgatttctggagcattgggcatcgattcttttctgggaaatcttcaagaagcaatatttaccatgaaccctgagaccacacagatggagatgctcttttgctcaactgcggtgggtttgcctttcttaatcccacctatgcttttcacaggagaattattcaaagcatggacttcattgttcacagcatacctatgtgtatggaaagctatgttttgaacaatggccacatt

SEQ ID NO: 42940 - DNA, 399 bp, Glycine max
  Clone ID: LIB3093-024-Q1-K1-G9
cttctcttctccatgccactgaaagcttgaaacccacatagctagccatcaatggaatacagcaattgggctgaatctcttcaaaccgaaacccctctcccttctttcccacaaccctcatcatcatatcctcctacctattacccctcttaccctcaaaaccctaaccctaacccttcttcttctcttccccttaaccctcccggggttgatccccaaaccccattgaaccctattagctatgcggctcatgaacccgttcctggtttggtctacgctcagagccttgttggggatgattcatcttctgggtattgcttggaccataattgggttgccagagaggctgttaggcaatttggtactgaccctactctttatgcacctggcatctctttg

SEQ ID NO: 42941 - DNA, 431 bp, Glycine max
  unsure (1)..(431): unsure at all n locations
  Clone ID: LIB3093-024-Q1-K1-H1
gttgggccagtgtttgtgaaactactgtatgggagtggttggaagatatatctcaaaatcagattcataaaatactgcgggggcttcctactgtacggtcattgattgcagttggggctggtgctgctaagctggtttcatcaccagtacagagctacaaaaaggagcggagagtgctcaagggcgtgcagagaggtacaatggcatttcttcgaagcatttctctggaagctgttggacttggagttcatctagctgctggagcccatgatattcttctccaagcagaaagtattcttgcaagcataccttctccagttcctctgcctgtaaaagacaaatcgaanacagatgttcgatctaatcaacctaaagatgctcaagaaggaattcaacaagcttatgaaagtcttagtgatggcttgggaaaa

SEQ ID NO: 42942 - DNA, 103 bp, Glycine max
  unsure (1)..(103): unsure at all n locations
  Clone ID: LIB3093-024-Q1-K1-H10
actgtgtcctgcaaaatttatagttttaatataccaaatattganagctgatttggactcggttatatatgactgtttcccttatctaaaaagcaaattccgt

SEQ ID NO: 42943 - DNA, 409 bp, Glycine max
  Clone ID: LIB3093-024-Q1-K1-H11
cccacgcgtccgtggagagtttgaagattcctaaagccacatggatggctgataaagaacccagctgctggcctggtacctggacaactgctgcaccggaacattccaggggtgatcatgccagtatcatacaggtaatgttacaacccccaagtgatgaaccactgactggcaaaacatcagattcaaatgccttggatttcagtgaagttgatattcgtcttcctatgcttgtgtatgtttctcgtgaaaaaagacccggctatgatcacaacaaaaaggccggggccatgaatgcccttgttcgagcctcagccataatgtccaatggccctttcatacttaatcttgactgtgaccactacatatataactctcaagcactgagagaaggaatgtgcttcatgat

SEQ ID NO: 42944 - DNA, 395 bp, Glycine max
  Clone ID: LIB3093-024-Q1-K1-H12
cccacgcgtccgcggacgcgtgggttccaagctattcaaatttcaaaacaaggaaatggagtcactacttcccaagtcaatctacggtggcatcaagagttacttgagaaggcggcgctaccggcgtcttcacggcggcgccaccgtcgttagaaggaagatggcgatcatccgcttgagagggccacgtaggtattggaggatcagagcagttccaaggcttagatgggtgatgagatcaccattgacgattttgacaaagctcaagaatgcttatatgaactttatgttgaagctgtcagggaacgtacgtgctatgaacagtgataacatctttgaagtgaaacggattccaaaggctcgtcaagtgtctaagggctattctcgtgatgaat

SEQ ID NO: 42945 - DNA, 425 bp, Glycine max
  Clone ID: LIB3093-024-Q1-K1-H2
cccacgcgtccggttttaggtagttggatgtgttgagatccactgctgcagaatccaattggtgaccctaaatccaagttactatgactgctcagacccaagaggagcttcttgcgcaacacctcgaacagcaaaagatccatgatggtgaacctgttgtcgaggatgatgatgatgaggaagaggatgatgatgatgatgatgatgaggatgatgaccatgccgaaggactagaaggtgatgcatctggtaggtcgaagcagaccagaagtgaaaagaagagtcgcaaggcaatgcttaaacttggaatgaaacctgtcacaggtgtcagccgagtgacagtcaagacgagcatgaatatcctgttcgttatctcaaaaccagatgttttcaagagtccaacatctgaaacttacattatattt

SEQ ID NO: 42946 - DNA, 453 bp, Glycine max
  unsure (1)..(453): unsure at all n locations
  Clone ID: LIB3093-024-Q1-K1-H3
cccacgcgtccgctctgaactctcaatccacaaaaaagcaacatggcttcaattcgcgccttcttcacagccattgcttttgtggctcaatcatttcaaaactacatgatccagagtctgcacaaactttacaagcattatggatatgctgctgaagtgaaggacaatgaagagaaagaaagtgattattgttctgtgtgtctaagccaaatttgtaaaggggaaaaagctaagtctcttcccgtgtgcaaccacagataccatgttgattgtattggtgcttggttgaagaatcataccacatgccctctttgtaggaacaatatcactgatcatatcacccaaaaacataaacaggtgaagagcttangagaatctttgttcaatctcattcagagtttctctgatctattggtagctattctctacatgatgcttncatctaccatcact

SEQ ID NO: 42947 - DNA, 443 bp, Glycine max
  Clone ID: LIB3093-024-Q1-K1-H4
ggaagcttggggtttgaatctaatcgaatctaaacgattcatcgatcgatcgatggctctggtacgagttgaactgaagcatgcggcggacggcgtaccggaagctaattgctacgccaagcccaccaagcaaggcgagggcctacgccactactattctctcaacatacacgagcatcagctcctttttcgccaaaagactcataacctcaaccgtctcgaggctcagagaaacgacctcaattctagggtgaggatgctgcgcgaagaattacagcttctgcaggaacccggctcttatgtcggtgaagttgtcaaaagaatgggcaagaacaaagtccttgtcaaggtccaccgcagaggaaaatatgttgatgacattgacaaaaatattgacattacaaagattactccatccactataggtgcactccgcaacgaca

SEQ ID NO: 42948 - DNA, 322 bp, Glycine max
  Clone ID: LIB3093-024-Q1-K1-H5
cccacgcgtccgctgtttacgctatttatcttttagcactacgatactcatagaatatgctggttgtctttcaacctggtgaagggatatgttgtaactataaaatgagtcactgtctgcgcttagttagaagatattagaattatgcatctatctgtcttgcaagatgtcctgggggcatgaaatatgcacatgcgatgtttatacaactgaatattctgtacgaatttctatcctttggaaataaatatatatggtctctattgggtgtaataacaacttgatggaagaatcattttatatccgctatttgtacgaacaa

SEQ ID NO: 42949 - DNA, 330 bp, Glycine max
  unsure (1)..(330): unsure at all n locations
  Clone ID: LIB3093-024-Q1-K1-H7
cggggtacctaatatngaacacgaatcgtttctctcatctacctttgcacttgcatgacaatatcgcgaactgcgaactgcatctcaagatataacatatatactacatactatatatactatatatgatatcatgtattacattcatgcgtcacaccatacgataatgtttatgtaattacataggtagactggtgtttgaataagggtacgttggtaagttataagttgttcgtcccatatatgtgaagaagcacggtttaggcagattgttgttcctgcgaattctgacgattaccgaggaagagcgataaagcgataagcagcaac

SEQ ID NO: 42950 - DNA, 441 bp, Glycine max
  Clone ID: LIB3093-024-Q1-K1-H9
tctttatataataatataaataattttaaaaaaataaaaaaaaaaaaaagaatctgtataaatataaaaataatatatataaggtacaaatagtaaatcgaggtacccattttatgataaactttccttccatttttgttcctctagtaggcctagtatttccggcaattgcaatggcttctttatttctttatgttcaaaaaaacaagattttttagatacagaaaacaaagtaaaattctggggttttttattccccaattataatactaaattcaaaaaaaggagagtaatgagtataatctttcgctcagacgatgtactgatatattctatggcggaggttcgaaaaacaagcaattttattgtgggccggtttcactttgttaggttcattggggttatttgtcgttgcaatttccacttatcttggtatggatt

SEQ ID NO: 42951 - DNA, 362 bp, Glycine max
  unsure (1)..(362): unsure at all n locations
  Clone ID: LIB3093-025-Q1-K1-A1
cccacgcgttcggagggttttcttcttccaccccgtctaatttctctcttctctgaagctatcagaggctagagttctcctattcagtatctcatgtgcttcaaagaatggctgttagctntactgggcttgacatagaaggcagagaccagacagaagagaacatgacaatatgacatctatctagtggagtaataatttatttgtgatggatgaaactgaagtggaaaatcccatattcatggaaattaattctgaagacacgagaaatgaaaatcaagagtttgcatcagagaaaggagaaagtagcagtgttgttttctcaagagaagcaccacttatgtaggaaagagtcaagaatg

SEQ ID NO: 42952 - DNA, 151 bp, Glycine max
  Clone ID: LIB3093-025-Q1-K1-A10
cccactctttcttgttttgatgctgtgctttcactgaaaaaggatctctatctacgggggagcggaataaaacccttctctctccaattaaaagaatggcttcatatcggaaacttcacacttttgatgatgtttcaaaccacaaccatac

SEQ ID NO: 42953 - DNA, 402 bp, Glycine max
  Clone ID: LIB3093-025-Q1-K1-A11
ggcagtcatcgttctgcttaagttcatagagagtgtgtgtatgatgcagcagcagcagaacgtggcattgatttggaatgggtacgggtagtgttgtcagctgatcctggggctagattggaagatattgaggatcaagcaccacctctgaggaaggaacatcgccgtgttccaagtaccgtggcaatagaggaagtaaaggctgcggcagctaaaggggaagcacctcttgaactccctttgaaaggcgctggtcaagattcttccgatgcacaaccaagggttaatggacttaatcccaaagctagcgatgccttgtctggtgaactttgggaggcaaagaaggataggatatgcaaggcttccatatatggaaagttacatggttgggacttgcgatct

SEQ ID NO: 42954 - DNA, 221 bp, Glycine max
  Clone ID: LIB3093-025-Q1-K1-A2
cgattttctttgttgtttctatttccttgattgttcatgacagcctatttttttgtgtatggctagaagaaaagctggacggtaatatatggtgtggccaatgtatcagtttgaagagagctttttctatttttttggggtaatgttcggatgttgtgtgaaagatagatagataaaattaaatgtcttgatgcgtatttacttcttaaaaaaaaaaatag

SEQ ID NO: 42955 - DNA, 228 bp, Glycine max
  Clone ID: LIB3093-025-Q1-K1-A4
aaccataccaatgatttctttctcatcatttctatcaatagtttattatgtcaccccttttattgaatatcatcccttacgctattattttattttatctacaacatttaaagatacaaccaatgacttttaaaaacatctcaacatcattctcctttaaattatattgaaaaacaccacattctttaaatttattcaataaccctcccactaaaacggacctacatt

SEQ ID NO: 42956 - DNA, 136 bp, Glycine max
  Clone ID: LIB3093-025-Q1-K1-A7
cccacgcgtccgcgccctttttttttttttttctcaaatagtccacctttccttgtgaagagggcataacatgtgcttctataggtttatctactactattgcaacaacttttgaaggattagtttcctcctttgc

SEQ ID NO: 42957 - DNA, 159 bp, Glycine max
  Clone ID: LIB3093-025-Q1-K1-A8
acacccttccgaaataatttattcaattccaaccttttaaatgacagcgatcaacctaacaatccaaggagggaaatatacaaatcacaccctcccttcatacttctcaaataatatcaaaataaatcgccttctaacatcccacttctcatttattat

SEQ ID NO: 42958 - DNA, 395 bp, Glycine max
  Clone ID: LIB3093-025-Q1-K1-B1
cggagataagattaaagattcaacaatggcctctgcttctgctactcttctcaagtcatctgctgtgcttgacaagtgcgagtgaatcacatgccagacccttcgccaacctctcgtgagatgtaacccttcctcagcatcagctctcaccatcaaagctgctttctatgctgtcgagctcgtgaaaaccgccaaaacagtggcctcaccggtgcgtggtattttggcgatggatgagtcaaatgcaacctgcgggaagcgtttggcatctattgagttagagaacacagaagcttatcgggaggcataccgtaccctacttgtgacagtaccagggcttggtgaatacatctcctgggccattctctttgacgaaactctgtatcaatccactg

SEQ ID NO: 42959 - DNA, 232 bp, Glycine max
  Clone ID: LIB3093-025-Q1-K1-B10
cccacacgtacccacattcatagcttaaatttacaagtgaacacactctttttcgggcatggtagctatcactcagcagaaaaatataaacctctacattacttctattacaaaacgcatctattgcacctatcttatatgtatttcaccaaatcaacacaaacatctcagtcctacacaatgacttcatcgttccccttcatacggataaacaagtacagtacataaggtt

SEQ ID NO: 42960 - DNA, 242 bp, Glycine max
  Clone ID: LIB3093-025-Q1-K1-B11
aactcacatatcaaaattgaaattattaaataatttgtctgctattcattctctcgacagcggtggctactaccataacagatcatgaaccctcatcacttgccccgcacgtgctcgactacaccacctctacattctactactacacggaaaaagataacgatgatctttttcacgatcaaaacaaatcctccatctaatggctgcggttaccaacggttaaccattactgcacccaacct

SEQ ID NO: 42961 - DNA, 285 bp, Glycine max
  unsure (1)..(285): unsure at all n locations
  Clone ID: LIB3093-025-Q1-K1-B2
gccgccgtggccaccacctctattgctggggtcgcgttcgacgccgacgacatccttatccgtcaggtggtgccagatgttggcgaancctaatatgatgacaacctgctgaacgccgagcaccacttcgcgagcttcaaagccaagttcgccaagacctactcctccaaggaggagcacgatcatcgcttcggcgtcttcaagtccaacctccgcagatccaggctgcacgcctagctcgacccctccgccgtccacagcgttaccaaattctccgatctaact

SEQ ID NO: 42962 - DNA, 359 bp, Glycine max
  unsure (1)..(359): unsure at all n locations
  Clone ID: LIB3093-025-Q1-K1-B6
cccacgcgtncgattttttttttgtttctgagcctcccctcccctctctctaagatccccggattgcttgtgaatgctagaaaccctatacagattcgattggatgcgctcccatttcacatcaagggcgagcgcattcggttcttgcaagcaagcctggtactaccgctgcctcggcctcgacccctgaatttgaaccattcatcaccacctttcttcattcattcacggttttccttttcgactcgatttgttgttttttttgttttgtttccttgacgatgttgacgatgagcaagcagaagaagaaccagaacgcgaagaggctgttgataagcatcaatgtgctggtgagcgcg

SEQ ID NO: 42963 - DNA, 370 bp, Glycine max
  Clone ID: LIB3093-025-Q1-K1-B8
gcaaaacctgtgatcaacaatggtttttatctccaattcaccacctacttcaaatggcggggttgaaaacacccaaactcctaaaaccacgcgaaacacataacccggcgtcaaacgcctcatcatcagcgtcactgtgctcttctcattcatcctatgttctcctcttctgcggaaatccgttataatctaccgcgcgccgctcccgttcgatcgaatcgactccttctccttccaaatcgaatccaaacccttgtccttcccatgccgttttctagccatattcatccgcttcgatttcatggtttcaaacagaaatgtatgagccgcgattgagagaaaaatgtctgacctaaatcacggcagctat

SEQ ID NO: 42964 - DNA, 430 bp, Glycine max
  Clone ID: LIB3093-025-Q1-K1-B9
cttacacactctttatctctctctttctctctctcagaattttctcctctctccggggccgggtattaattggagttttctcgctcctttttctttccctgaaaacatttcatcttcgtcttgatgtccgaaaagggtccgccacttcccaaatttggtgaatgggatgtcaatgatccagcctcagctgaggggttcacagtgattcttaataacgccagggatgagaaaatgacaagcggcatcccatagtcaccaggaaagactgctactgatcctcatagcaaacctgcagtatagcctggcataactcagactaaaaaatggttttgctgcatgcaaaacccttctgccgaatcatatcatagcaatgtgtgctcctgtgaaaagcctgaacataaaaacaatgtttatgttttactagcgtcac

SEQ ID NO: 42965 - DNA, 317 bp, Glycine max
  Clone ID: LIB3093-025-Q1-K1-C1
tcccggaaagtcacgtgcctcgttcaagcgcgtgatggatctccgcttcatggagaaaaacaacgcttcgggtgcgtcggtttacgggataagcgtgttcgacccggagagcatgacatgggaccgggtcgacccggtttcggattacccgtccgggctggcgctgttctgccagcttgcgagctgcgactggaagcttgtgctgatgggagggtgggaccccgcaagttacgagcctctgacagcagtgtttgtgtacgattttctcacaatcgagtgggcggcggggaaggacatgccggagaagcggtcttttt

SEQ ID NO: 42966 - DNA, 379 bp, Glycine max
  Clone ID: LIB3093-025-Q1-K1-C10
gcctcccgtacctaactgtacagctttacataccacaatatcacactctttcttgaggatggtgtccattatgcagctgtataataaaaactactccatttctacatatggaaaagagctccagtcccaggtttctgagaaagatacttacaggtgcacagtgtactgacaagtaactccgacagagcttgctgtacctcttgttatcgatgatcctgaaatcaacagtaatgcttccattctactcaatgggctctgttggacataaaaaagaagcaggtatgactcaaaatagctacatacagctcctggtaatttgaacaatttccactatataaccacagaccacctccctcacaatgtggctaaatgtgatata

SEQ ID NO: 42967 - DNA, 404 bp, Glycine max
  Clone ID: LIB3093-025-Q1-K1-C12
tccaatttaaattttaaaaatgacttttattaacttaagaattcaattatcgaaggtgaattatttaacaattcaattggattgttcaaattgtttcaaaaaaatggagtacttactcccatttcttatttattattgaattaaccgatcaactagctttgttatcgaacatttcttttctatttcaaaaattttccggaaaaaatttgaaatctattttatttgcgaatcaatcctacttcttctggtcccgaaatttttgctcttgataaaaaaaatctggtacttttcttccaaataattgggccggtactttattatactttttccccaagttatattcctaatatttacaatgctcttatttttaatggtttaaatacttgttgttaacaaaataattt

SEQ ID NO: 42968 - DNA, 416 bp, Glycine max
  Clone ID: LIB3093-025-Q1-K1-C2
cttgcattcagttagactttgatagtttgattagctctaataaggttaaggaccagagagagaaagagaaataagaagaaaaacacaagatgggttattggaagtctaaggttcttcccaagatcaagaaggttttcgagaagaatagcaccaagaaagctgctgctgctgaggccaccaagtcctttgatgagtcaaaggaggaatacaacaaagcctttgaagaaaagaagactgaacttcaaaccaaagttgttgaaatatatgaggcttcatcaactgaaatcaagagtttggttaaagaacccaaggaagctggtttgaagaagaactccacagaagtccagaaattcctagaagagctggttaaaattggtaaagaatatttgtagcccttttataagtttttatttatc

SEQ ID NO: 42969 - DNA, 174 bp, Glycine max
  Clone ID: LIB3093-025-Q1-K1-C4
attggtcaatgtgtctcttggaatcaaaggtgtgccagggaattctacttttccaaggttacgttttgtttctttcaaagggtgaaaagcctgaaaattgcatttttccaaaatctggggtcttgcttaatacctggtgcctgggttttctatctgctaagtatctccttgttc

SEQ ID NO: 42970 - DNA, 426 bp, Glycine max
  unsure (1)..(426): unsure at all n locations
  Clone ID: LIB3093-025-Q1-K1-C6
ntccgcgacgcgtgggctaatattctatgataagtgatagtgggcattttcaggctatttgctatgatgctcttaggtagtataaaaatactactatactaatgcgagtgtttcgacgtcgtttcatcaaaatccaatactcgagctttcctaaggcaggtattgggaagtgtcaccgcacttctttcttttttttctgtagcgatttctagcgttttgtatatatagaaagtccaatagaactggaaaaggctgaagaggtagaaataagacacctatgaaatagttgatggtgcagtgatcaaaagaatggcatgtagcaaaataagcaaggctcttttcaaccttagttaaggtgatgatgtttgataaggacttataggggttggtttctaatgtaaaattatacctaagttttgggggtag

SEQ ID NO: 42971 - DNA, 296 bp, Glycine max
  Clone ID: LIB3093-025-Q1-K1-C7
cttttattaaaattaagattttattttagttttgaaaaaaacaaaaaacaaataaggagagggctacaaaaaaaatgggtctgccaaattgcaaagaccaattctactgacgcatccttacgaagttacaaaacccatatattcctaccttaaataaatccactgcccgactttttacaacaagctaacttgaaaaaccaccccgtatcctaacttaaaatctttttataaaatgccttttttgccagatagtgatatagcatataggtccaaacccatctgctttcctaacaatt

SEQ ID NO: 42972 - DNA, 435 bp, Glycine max
  unsure (1)..(435): unsure at all n locations
  Clone ID: LIB3093-025-Q1-K1-C8
ggaaaactttggacaaaaaatggagtgctacacaaggccaaacaggagtgacatggacctgtcagcagaggaagaagccaccatagaagcaaagaccagagagtactttgatggagtcgcaccacaacgccacacaaagcctcaacgaagtgactattcagctcaatatgtcgatgctttctccaatgcccatcactcttctttaactataccagaattaacacaattccaactcctccagaatgatccccaagagaaggttggttcctaatatcatctctaattttttcttcttcataatttcacttttatagaataataacaaaagaagtaataaaaaatgaaaattgcgtcccgtcctaaccgttggactacaaacgcttgtcatgttacttagcattactntttgaacttaatataaaaataatcttgaat

SEQ ID NO: 42973 - DNA, 348 bp, Glycine max
  Clone ID: LIB3093-025-Q1-K1-C9
cccacgcgtccgataagctctggtatgacgttgtggctggcccttaacctgtgcggggccgggtcatgctcagaaaactcaccaccctcaaaactattgatgaaggagaaagtagcatgctgcataagacgttgtcgatgccgtctacaccaacaaccccgatgactccgactactccatcgacaccggtatcggcccgtaaagctgacaacgtttggaggagcgtcttccatcctgggagcaactccgtcacaaagaccatcggtgctcatatgtttgacaaaccacttcccaacactcccactgtctatgactggctttacagtggggagaccagaatcaggcacc

SEQ ID NO: 42974 - DNA, 352 bp, Glycine max
  unsure (1)..(352): unsure at all n locations
  Clone ID: LIB3093-025-Q1-K1-D1
aggatgatgatttgtggggatctatagctgctcctgctccaaaaactgcaagacctttaaatttgaaatcagctcaaactgatgatgatgatccttgggctgccattgctgctccagcacccacgaccaaggccaaacccttatcgactggcagaggtaggggagccaaacctgctgctccaaaattaaggtgctcagcggataaaccggacatcataaggcatgtaatccaaatttccaaggaaccaaaggaacagtgaaagagctaatcttagtgctagttgcccttttcttatggtggcagtgatcatgttaaaatacaaaacccgnctctatgatatatgaattacat

SEQ ID NO: 42975 - DNA, 434 bp, Glycine max
  Clone ID: LIB3093-025-Q1-K1-D10
ggatgctggaactggttttacagctcaagtttacaagttgtcaacctttttcttgcacaaggaatggataatggagcagtgggataaaaacttttacattacttctattgcagggagcaacaatggcagctctcttgtggtgatgtcaaaaggtacgcagtatactcaacaatcctacaaagtgagtgaatctttccccttcaaatggataaacaagaagtggagagaaggttttcatgtcacttcaatggccactgctggaagtcgttggggtgttgttatgtctcgaaatgctggattcagtaaacaggtggttgaacttgattttctctatccaagtgagggcatccataaacgttgggataaaggttataggattacagcaaccgcagctacattggatcaatctgctcttatattaagtattccgagac

SEQ ID NO: 42976 - DNA, 91 bp, Glycine max
  Clone ID: LIB3093-025-Q1-K1-D11
cgatcccgttactagtttaacagcttaagctttcaagaggtcctccttctttctgcacatggtacacctaactcttcttatctaatacaat

SEQ ID NO: 42977 - DNA, 428 bp, Glycine max
  Clone ID: LIB3093-025-Q1-K1-D12
cctctctatatttccgctttcacttattctctctcaccctccaactatgagttactacaaccagcatcagccacccgtcggtgttcctcctccccaaggttacccaccgccggaatcttacggaaaggacgcgtaccctccgtcagggtaccctccacagggaggataccctccgcaggcgtatccagcacaggggtaccctccaccctacgcgcctcctcagtacgctcagcctccgtcgtaacaacaccataattcatctggcccgggttgcttagaaggatgtttggctgctctctgctgctgttgcctgttggatgcctgcttttgagaaagaaaagagaggttgctttgcacaaattggatttgaaactgtgttttgactgtgaacatgaccattatcgctcttagtttttattattttctat

SEQ ID NO: 42978 - DNA, 261 bp, Glycine max
  Clone ID: LIB3093-025-Q1-K1-D2
cccacgcgtacgtgtagacatctattgcgactgctgttgcaaactcatcatcaccatcatacttgcgtgccgttggtactgatcatattcatacttgctctggagatggtgcataacttgcaagagaacatgtcataccctctagatgatctctcacgttctattgccatacttgctgaattagaatcaggtggctcacaaatgaatcatgctcactcaggaagggaacgcaaaattcaaaggaccctactggacttgctc

SEQ ID NO: 42979 - DNA, 379 bp, Glycine max
  Clone ID: LIB3093-025-Q1-K1-D5
ggaaaacatggctttactttcataagtcctaaaccatttgccgcttgacctaatttcacccggttggctaacagctttcttctgcttcttccttatactccttcagctaataagaagaaacaaatacaatctgccaccatccccaccaaagatacccataatcggcaatcttcaccagctaggcacactgtcccaccgctcctttcatgcactctcacacaaatatggccctctcatgatgttgcaattgggtcaaattccaaccctactggtcttcatcagctgacgtggccagagaaataatcaaaacgcatgatgttgttttttccaaccgccgacaacctacagctgctaaaatctttgttatggatgcatggat

SEQ ID NO: 42980 - DNA, 182 bp, Glycine max
  unsure (1)..(182): unsure at all n locations
  Clone ID: LIB3093-025-Q1-K1-D6
gaatttnggttcgaccccgcgtccgccctacttacctaagatttaattttggcttatgctgttaacggacttctttaaagagaggattgggatacgtgcttaacgatgcccctttttgctcttcctgcatgaaatggcatggcaaaatctcttcttgattcacctgtggatccttgtgaagt

SEQ ID NO: 42981 - DNA, 273 bp, Glycine max
  Clone ID: LIB3093-025-Q1-K1-D7
cccacgcgtccgctaatatttactttggcttttcacgtggtcatactttatttcgggccagggccttctaagatgactttctcaatagcacttgctgaactggaacttagctctcattcctaacaaaaggtccttcacaacacaatcctcttgctcctaataatgaacccctttcactataatcacccaattcttctccatattgtccaaaccatttgtatatactattcctctttatatgacattgatgacctctgtacaaacttagattac

SEQ ID NO: 42982 - DNA, 300 bp, Glycine max
  Clone ID: LIB3093-025-Q1-K1-D8
tcgcaaaaccatccaacaagggaaacattatattattccattttttcacttccacacgggcttgcgttcattccccattttcaactatggcctcttcagctcaattttccaccactttggtcgtactatgtctcttccaattcctagcaggtaatcatttatactcattaatttttttttttgttttaaacatgttgacttttgtaatattcaattccagttcctggatatgcaactgggtgatcttttagaagaaaatgttagctacttgtattaatggtcatgtgttatgtttaacgt

SEQ ID NO: 42983 - DNA, 362 bp, Glycine max
  Clone ID: LIB3093-025-Q1-K1-D9
caatctctctttctctctttttttgtgtgtccaaaatggctcctagttctgctcggaacggggggttctatgtgcttatgctacttggtatagtgtttagcactattgatgctacctgcgctggtagcttctaccaagactttgatctaacatggggtggtgaccgtgctaaaatattcaatggtggccatcttctatcactttccctacacaaagtctctggctctggcttcaaatcaaagaaagaatacctatttgggaggattgatatgcagcttaagctcattgccggcaactttgctggcactttcactgcttactacttgtcattccaagggccaacacatgatgagattgatttc

SEQ ID NO: 42984 - DNA, 428 bp, Glycine max
  Clone ID: LIB3093-025-Q1-K1-E10
cccacgcgtacggttctgcaagattgtatctattggggaatctttcgctgcctcgggctagatcttttgaaaaaatatcgaatcctcaaagtgccgatcctcctaaatccaatgtttgctctttttagcccttctctccctatatattttttcacaagcacctctttcaattctctccgtttcactagctcttattccaaagcataggaagaagaaagaggagactagtctaatatggagaccatgaatgttcaggtgatgagaagcttatcagatatggtaattaaaaaaggaccatggactgaggaagaagattctgttctgatcaactatgttaacgtccacggcgaatgccactggaactcccttgctcgctcttcaggtttaaagcgaacgggcaaaagctgcagactaagattggtcaacta

SEQ ID NO: 42985 - DNA, 402 bp, Glycine max
  Clone ID: LIB3093-025-Q1-K1-E2
aaaaaaactaccatttttaggttgggctcgaaattgattgaaaaaaaatgcagaaagaagagcaagaaaaagagtatttagaatcgttgacgtgtccaagcttcaactgctactccaccgatgaactcccatgtatcgctcaaagcaggattcataaggacgacgcgtcgttttcggcctctcaaaatgacgaccctgacttcgagttcgccgcgtttcgagacgacgcctttgagttctccaacgacgacgccgttttccctctcttcaacagcgacgttgcgagggaccgccggaacagtgtctccggcggtctcgattccgacgcggcggtgctccggtttccgataaccggcgaggagcttcgaaggggtgagcacgatccctcactgtcgccgtcgt

SEQ ID NO: 42986 - DNA, 418 bp, Glycine max
  Clone ID: LIB3093-025-Q1-K1-E4
cggacgcgtgggcggacgcgtgggtttcgtttttttcttcactgctatttgccattgtcaggctcattctcgatggcggcgaagatttcattggcaattggtttgagaactctcttcactgtttcgggactgcttatgcttgctatcgttctttacactgacttcaccgatggtcttccgtttcgcaaagaacttctcacaccgcggatggcagcaacttagattgatttttatatcaacgatgtaactgtggcggtctggattgcttacaaggaatcaaactgaatcagctcaattctgcggattgttgtgcttgtctgccttggaagcatcactacatctgcctatattggtgagcaatttctgaagctgtcatgtcaagaatcttctcaggatcctatgtgttatgttctattgc

SEQ ID NO: 42987 - DNA, 363 bp, Glycine max
  Clone ID: LIB3093-025-Q1-K1-E5
acgcggacactgacccttatgttactgaaaaccttatccctcacacctacatggtagtggacaggcttgaaactggggagcaggtcactcacaatgtgaacactcctgtggagaataaaaggaaaaccacaaatggatcttccttgactagtaacccccaatccaaggatgctgcaacagaaaggaaaaacaagacacatatgaagggcaatggtgggttgaaagaagaggacaaggctaaacaagagaagaaggaacagagaaagtgtcccgaagagcctccaacaggctatatccatgtcagagcatgaaggggtcaggcaacggatagccacagccttgctgatagggtgagaagagaga

SEQ ID NO: 42988 - DNA, 329 bp, Glycine max
  Clone ID: LIB3093-025-Q1-K1-E6
cgctttacacttttattcttttacgaaatcgattctgtatcgaaatctctgccaccggacagggagcgcgtacgaccttcccattgtttcctcaacgtgaacaatacaacaccacaccaccacccactaacaatacctaaagcctaacgaaccctaattcttgatcattgctcaaatctttgttccctttccatctcggagacacgaattcgccttcttcctcattttccaaacaaatttcccctccgcaactcccccaatttattcttttttttgcattttattttacccttttgaacctgaggctttttttcgacgccccccatata

SEQ ID NO: 42989 - DNA, 340 bp, Glycine max
  Clone ID: LIB3093-025-Q1-K1-E7
ccccttccactctttacttggggcagttttattaacacaccattgattttatttcaactttatttggaatacggttgtatcgctgactcgaaatttttctgaacacaaatattcatgcttgttcaacctatatttcttttcatcatcaacctatttggaccaaatggttaaatttccctgcaaaaaggtcttggcataataacggattttttcctcacgtgaggttcttcaatattaaaccatccaaatcttcttcatttttaatcaagtttagtcactgtgaaaccctatattgtacctttctctacgccctatatctgaggccactaaatctttcttt

SEQ ID NO: 42990 - DNA, 403 bp, Glycine max
  Clone ID: LIB3093-025-Q1-K1-E8
aaaaagtggaggattgttgaagagagagtctcgtgatttgagaaggccacaaatctccgaagtaaaagcttcaaatttcggtcacaatttaaagaaaaaggggatttatttaaaaacttttttaaataaaagaacagaacttggggtgtggcaaagcagagaaagaagaagaagaagaagaatcatttgggtgtgtttttgaagtgaaaggtgatgtcgggttcttcttcatctgggtctgaagaggaggatgaggggttcgactcttaccggaaaggagggtaccacgccgtcagagtcgccgatcagttcgccggcggcaggtacatagcgcagaggaagctcggttggggtcagttttcaacagtttggcttgcctatgatactactacatctgcatatg

SEQ ID NO: 42991 - DNA, 400 bp, Glycine max
  unsure (1)..(400): unsure at all n locations
  Clone ID: LIB3093-025-Q1-K1-F11
gcaggatctttatggggagcttctggataatgcacggttaaaccaaagtaaagaagttctggcagatgataaaaagcatcttgagtttctgaggttccaaactgagattcatgaaagttactcaacttttcttgaagaacttgtggagcagctctctgctgtttcttatggcgatgttatttttggccggcaagtttcactttatctacaccgttgtgttgaaacttacattcgacttgctgactggaatacactgaccaattctcgtgttcttgagcttttgccacctttagaaaaatgcttctctggtgctgaaggataccttgaacccgctgaggataatgaagcaattttggaggcttatacnaatgtgggggtttctgatgcccttgacagggct

SEQ ID NO: 42992 - DNA, 269 bp, Glycine max
  unsure (1)..(269): unsure at all n locations
  Clone ID: LIB3093-025-Q1-K1-F12
tcgcccacgcgtncgccactcgtacactcaattcaagatgtaccccctcaaaaaacctctggggacatggtgaaaggacttgcatctcataaaccttcctccagaaaatgcatctatcacgcattgagatgcacagtacctgctcgtctcgatcggttatcaccattgcagatactattcgaagcctgcccatgtcttaaaataggatacatccatgcaaatgacgctatacctgacgttgatcgagatgatatgaaagttcacataat

SEQ ID NO: 42993 - DNA, 152 bp, Glycine max
  Clone ID: LIB3093-025-Q1-K1-F2
ctgcttatggatttcccctaaacctcccctctctcttcttcagtttcggtgcttttacattttcttcccaaaaaaaaaaatccccacaacaaaaaatggtctttcttcttttttatattaaccaatccttcaactctcccttatttcttttc

SEQ ID NO: 42994 - DNA, 410 bp, Glycine max
  Clone ID: LIB3093-025-Q1-K1-F3
cccacgcgtccgcccacgcgtccgcccacgcgtccgcttggagctgcgagcactagttttcccttttccccttgtttgtttttttaggataataattgaccaattgggtatcttgtcagttgagacatttttcaagaagtagcaaagctccttctacaatatttgacttggtgctttccttttggatcttacaatgggaaacagtgaggaagagaaatctaccaagactgaaaaaccttcttcacctgtaacagtggatcaagccaatcagaccaaccagaccaatattcatgtctatcctgattgggcagccatgcatgcatattatgggccaagagtcaccatgccaccatactacaactcagctgtggcttctggtcacgctcctcacccatacatgtggggaccac

SEQ ID NO: 42995 - DNA, 418 bp, Glycine max
  Clone ID: LIB3093-025-Q1-K1-F4
gatccggctgctatggacgagagaatgaggatgcggatggagtccaaccgcgagtgcgcggggcgatcgcggatgaagaagcataacctgctcgaagacctatccgacgtagcgagtcgccttcaaggcgagaacgtgcgcttagcgcagagcataaaggcgaaggatgaagcgtacgttgagatcgaagccgcgaacgacatcctcatagcacagaccatggaactcgccgaccggctaaggtttctgaactccattctcgatatcgccgatgatgtcagcggctgtggtgaatcctttgagattccgcagattccagaccctctttttatgccctgtcatatgccccaccctatgatggcgtcacctgacatgcttcctcatggatatcaaggcctgtttgcttgatttactttaa

SEQ ID NO: 42996 - DNA, 347 bp, Glycine max
  Clone ID: LIB3093-025-Q1-K1-F6
cccacgcgtccgcccacgcgtccgcactactcaacacaaaaaatagtcttaattagttagggtgtcaatttgtgcctcaaattgaaactagctatagatatggccaattcccttaataaccacctgtttgttgtagtatctattctttctctcttagccttttctagcaacgcacaactatctcccaccttctatgccaaaacttgccccaaccttcaaaccattgtgcgcagtgcaatgaggcaagctgttgctaaagaagccaggattggtgcctctattcttcgcttgttctttcatgattgctttgtaaatggctgtgatggatcaatcttattggacgacac

SEQ ID NO: 42997 - DNA, 231 bp, Glycine max
  Clone ID: LIB3093-025-Q1-K1-F8
gcccgctttctccactttttttagggttttctttaaattggtctctcttttggggggggctttgagttttttgtgaaaaaaaaaattccccaatacgaaaattgggctttgtgccttttttatgaaaaacataaaacctcttccaaatttgactcggggcggtccttttgggtcttaccacgggaaacactgtggaagagaaattctaccaagactgaaaaaccttcttca

SEQ ID NO: 42998 - DNA, 267 bp, Glycine max
  Clone ID: LIB3093-025-Q1-K1-G1
ccatcgcttactttcagatcaactcaaaagattccaccaagaaatatagacgctagggttaggttacattagcgttagcacgcaatactttacatatatcgagagcagcttacgagacatgtagaacaacgttgaggagctcattctactgcaagactctgtttaccttatcctgctcacttcatcaaacgtgttcaacaagtacatgaaaaaatctaacagcttcaggccggaacgctcggtgagcattcgactgatgctaagttt

SEQ ID NO: 42999 - DNA, 248 bp, Glycine max
  Clone ID: LIB3093-025-Q1-K1-G10
gaacacctgttgaagaaaaaaacgccctcgccctcggaacccatgaaataccctaaggagggggcattctatgaagatacgatccctaatttgcagaaatcctctcaaaagacgctttgaaattcaacgctgaactgcaaccagagttcaagagcgacatctaccatgcattacacagcacaagagatgcgaagactaatgcccatgcagggactcttccggtgtttgatccttccacccatcacatt

SEQ ID NO: 43000 - DNA, 169 bp, Glycine max
  Clone ID: LIB3093-025-Q1-K1-G12
aggggttctttgctttcaagacccatgaagttcttgttccactccttgtgaaggataccttgccactcattcccacccaaaaactttttttattaattcttcaacctcaaggcttccttaatgagaatgatccaaataatacgactatttttgttggcaaattgtatcc

SEQ ID NO: 43001 - DNA, 149 bp, Glycine max
  Clone ID: LIB3093-025-Q1-K1-G2
ccgacgcgttcgattagactttagttcaaaaatttaagtccaatcgttgtgtattgctctggctctcataagcgagaatcttacacacttactcctactccgactttgctatctaaactttctgaaccaatggaaagacctattgtgct

SEQ ID NO: 43002 - DNA, 419 bp, Glycine max
  Clone ID: LIB3093-025-Q1-K1-G3
cccacgcgtccggtctgaatcatgtgctgcttctagctccaaggcatgtcgagagaagttgcgaagagataggcttaatgacaagtttgttgaattgggctccattttggagcctggaaggcctgccaaaacggacaagactgctatcctgattgatgctgtccgaatggtgacccaattaaggggtgaagcccagaagttgaaagacactaatcagggtcttcaagaaaagattaaagatttgaaggctgagaagaatgaacttcgcgatcagaaacagaggctcaaggcagagaaggagaagctggagcagcagctgaaatcattgaatggacagcctagtttcatgccttcccctgctgcaatccctgctgcatttgcggtgcaaggccaagcccacggcaacaagttggtacctt

SEQ ID NO: 43003 - DNA, 276 bp, Glycine max
  Clone ID: LIB3093-025-Q1-K1-G4
aaatcaacaagttgagatgcagagttaattatcatgcactgaaatttcttcctgaggtagagcagatggctaattcacttgcatcaagaatgagaaaccgtactggcagttcaaatccttacatggctctgcatcttacatttgagaaaggaatggtgggactatcattctgcgattttgtggggacaagagaggagaaagccaatatggctgagtatataaaaaaggagtggcctctacggtacaagaatggttcccatctgtggcaattagctc

SEQ ID NO: 43004 - DNA, 446 bp, Glycine max
  Clone ID: LIB3093-025-Q1-K1-G5
attaggggggcgacccacgcttccgcccactcttacttaaaaaaccaatttcattttttcagtatagttgatccgttaatgtagtgtgaatgttgtattcccattcaaactatcttaacttatatatatacattctttacattcttctatcttgattcaaatttatggtttcgattggtgcaaacccaataatcttaatttacaatttaatatcaaaatgacttttccatctctatcaaaacaaatttaaatttaccctttaatcgtataaaaaactattttaattataatataatactatctcctttaatgaatgaattcttatcgattttctcactatcctaatttattaattatatcttctccatcaaattttttactaattataaacccattactgttttaactacatattcatttgtcaaaaaaattctatctttactaaa

SEQ ID NO: 43005 - DNA, 113 bp, Glycine max
  Clone ID: LIB3093-025-Q1-K1-H1
cccgtccgaggaagtgaagtttatggctacagtcccgccttcccatgcaaaatttggggaacagaaaaggttaaattcatggtaaacccccattattaatacttcacctgccc

SEQ ID NO: 43006 - DNA, 202 bp, Glycine max
  Clone ID: LIB3093-025-Q1-K1-H12
cgtccgcgagacgtagaataagaggattcgtgattgtgcaggcgagggatcgcgctgcggcgttgcctcgtttgtttcgtaccatcccacactcataatcttgctatgcatcaaccggagcctaccactgacacgtacacacatgtgaacgcgtatcgtcccttccatggctcggaagcgcatcctcatggagctcaaggac

SEQ ID NO: 43007 - DNA, 301 bp, Glycine max
  Clone ID: LIB3093-025-Q1-K1-H2
cccacgcgtccgggcaatagcagcagcagcaacaacgatgatggggaattgactggggctaagcctgctcgtccgtcttacaacgcttttgagataatctcgtccttgtcgaatgggttcgatctgaggaatttgtttgagacgaggaagcggtcgccgtccatgttcatttccaagttttcggcttcggcggtgatggcgaagctggagggggtggcgaagaagctgaactttatggtgacggggaagaaggagttcgtggtgaggatgcacggggcgacggaagggaggaaggggagaa

SEQ ID NO: 43008 - DNA, 262 bp, Glycine max
  Clone ID: LIB3093-025-Q1-K1-H4
ccctaacctactcctcttgctgtcttccattatgttgggaggaatgtccaactgcgactctatgaatgccttttccattcttgctgctaataataatgcctccttcacccaaagtttgatacccggcacaatggtgtaggtatctaaagatcctcacgcgcctatcatgactttaaatgctttttttcaattcaagtaggaaaaaaagaaggtgtttatctatgaacatactgacctcaaatcattgtgtgttgtgggcata

SEQ ID NO: 43009 - DNA, 208 bp, Glycine max
  Clone ID: LIB3093-025-Q1-K1-H5
gattcacagttctgtgcaacgtttttttatcccttgcgcttatgtaccttaaccgggttggtgagaaacaagctatgtatttctgatgaatatgcatgtgaaatggattctggaggttacaccaatgaataacccagacttgttttgcccccatctaacagagaatcaatgcttcgatcattatctactgctgatggaaacaattcaa

SEQ ID NO: 43010 - DNA, 417 bp, Glycine max
  Clone ID: LIB3093-025-Q1-K1-H6
aaagaagaaaagaatggtaacaatagctggtggtgtgagtctttcaagccctagcagggtatttgctaatgctaagggaatagactcagcacaaaaggcccaggccgtgaggtttccagctctgtcgaggcccattcaaaagtggcctggtttggtgaagacccggcccgttcgggcgacgccggagaagatatcggagaaggtagaggagagcataaagagcgcggaggaggcgtgctcgggaggcggcggtgacgcggaatgcgcggcggcctgggacgaggtggaggagctgagcgcggcggcgagccacgccagggagaagcataagcagtctgacccgctcgaaaattactgcaaggacaatccaaagactgatgagtgccgcacctatgataattggatgactgaactcag

SEQ ID NO: 43011 - DNA, 373 bp, Glycine max
  Clone ID: LIB3093-025-Q1-K1-H8
aaatttgaaaagagcgatagacaaagagagaaatggcatcggtgtccgggaaacataaaggggtttttacagaccagaagaaaaccaccgccaccaaaaaatcttccaaaaaatctccgattcccgccgcggcccaatcaccggccctcatatcccacggcggaaaacccgacctagaagatgagtacaaggaagagcgaggtggcactgcggcaattcgacctgaacatggcgtacggaccttgcctcgggatgacgcggctcgcgcggtgggagcgcgctcagaggctcggcttgaaccctccgcaggaaatcgataggctcttgaagagtggcaaggttcaaactgagtccttgtgggatggtcgcattt

SEQ ID NO: 43012 - DNA, 435 bp, Glycine max
  Clone ID: LIB3093-026-Q1-K1-A11
tctgcctgattatgggactcatgctgatgggcggccatctcaagatgttgatgccagaaccagttttgttagcaatgttcattttgctgccaccaaagatggcctgtctcggcattttaatacatctggggatgtcattaaaagggattctagttacagatgcagcaacagggcagccaaaaggggcaccttatgttgagttcatgctaaaagaagcggcgtacaatgcataatctctggataacacttctttcatgtcaagaattctcaacgttattaagaaaagtgctactcctcatgaatcagctccagccatggcatggccacgcattgttaacggttctgcattcccttctgctaggttttccagacatccctttccaagaggtattcctggtgtgtttagagctcgacccccaattaaactgggtgcca

SEQ ID NO: 43013 - DNA, 408 bp, Glycine max
  Clone ID: LIB3093-026-Q1-K1-B10
gtcggactcatcaagagtgttgagaagaaataccccaccggagccaaagtcaccaatgccggtgccaagaggaagtgattgcatttgggcaattttgctagcacatgtgatcatcatcgtggttactcctttatagcagttctatccttgcagagtcttaagtgttttgtttaagttatattcttaagtttctgccgatttcatgtagccgtaactttcaaaactaggtccttgatcggcggtggtcaattttcattgctgtatgcttttgatgagtactgatttttgttttgatggtaagaagagtctgagatatttcgaactttacaagcagctatatggttttagtccattttctttgctgctgacggatgtgttaagttgcaattaatttataacgagctttat

SEQ ID NO: 43014 - DNA, 146 bp, Glycine max
  Clone ID: LIB3093-026-Q1-K1-B11
caaaatgggtggatcaattttggacatgaaatccaatatcaacaacaacgagttcttggcaaatcattacatttattcaacaattctaacccttatgatcataatcttacaaacatcattatcaactattcaataaccattccact

SEQ ID NO: 43015 - DNA, 377 bp, Glycine max
  Clone ID: LIB3093-026-Q1-K1-C10
cgaactcgctcaggattgcaacagatccaggtgatgcacgatacactagtgcatctactgaggacgtggcgggatatggacagagaaatgctcttaatgttgctaataatatcacagtatcttctgctagaaatgagcattctgagataaattctcatatgggtacatcatggttagagcagtgtgtaacttttaaaacagcgaatatgttgcagatgtatgatactctgacatatgactccataaatagttatggaccatcctttaattataaagaaccaatctgtgtagtagcatcttgctaattcaatggatcaagtttacaagctcaatgatgctgcgcaaaattcaatgcttacttcagatgctaatgagca

SEQ ID NO: 43016 - DNA, 442 bp, Glycine max
  Clone ID: LIB3093-026-Q1-K1-C11
cggacgcgtggggttttctttgcagacatatcttggatcccatttccatcaggtcagtgcgcgtatgtactgtgttcagaaaggttggtggtgactggtgattgttgaagagaataatggcaacttcaactatggatattcttcatttccaccacactcctttttattgtgaggagaatgtatacttgctttgcaaaaagttgtgcaatgatggaatagcaaatgctgatggatctgatctttttgttgctttcatttccaacgaaaagaaacagatcccactttggaatcaaaaggctagcaaaagagctgatggggtgattctattggattatcatgtaatttgcattcagaataaacaaggagctgtccctccactagtgtgggacttaaattcgactctttcttttcctttacctttaccattatatgtggctgaaac

SEQ ID NO: 43017 - DNA, 367 bp, Glycine max
  Clone ID: LIB3093-026-Q1-K1-C12
ggcagattccttgccctcaatcggcgcaatatatgaccgctagaagagctagctcacatgagcttcaaccggcaccgttcactcttcgaagaactagacggctcatgatcgtacagttacagaaccctcaccactctcagcctcatcgttacggcatttgaaggctccttttctgccacctcaatgttgtcgtcttgagttgacagacctactcgtggttggaaccatcgaaatgacaatgcaagtgcacctatggctcttcattcccgcgctgattgatagatcagtggagaagcatggagtgaagatagagattacaaaataagaacggttggaaatggaagaaggatgagttggatcgatggtg

SEQ ID NO: 43018 - DNA, 117 bp, Glycine max
  Clone ID: LIB3093-026-Q1-K1-D10
tcctccttcatcactaactaccattattatttccaccctcactcactcgtacattgggcgtctatctgaaaattattttatctctgaaaaaactcccgcgtccatctttgctcattt

SEQ ID NO: 43019 - DNA, 381 bp, Glycine max
  Clone ID: LIB3093-026-Q1-K1-D11
gacaccatgaacattaattcacttgcccgcaaatccttggtcaatgcagacggtattatagagaaaacaggcttgtggggtaggtactctttggaaatgtctgctgttatttacaaggactgggttttcactgatcaagcattgcctaatgatcttgtcaagagaggagttgcggttaaggatccatctgctccccatggagttcggcttttgattgaggactatccttatgcttctgatgggctagagatatgggatgccatcaagtcctgggtgcatgaatatgtctcattctactacaagtcagatgcagcaattcaacaagatcccgagctccaagcttggtggaaagaacttgtccaagtgggtcatggtgatttg

SEQ ID NO: 43020 - DNA, 273 bp, Glycine max
  unsure (1)..(273): unsure at all n locations
  Clone ID: LIB3093-026-Q1-K1-D12
gaaggacggaccattgttggttgtcgcgtgtggaagagataccatttctactgcaagttcggtaaaacgtggagcatctganaatgcttttgatgttcagatacaaaatccaagactgcatctgaataggtttgacatggtgattacacctaagcatgattattatcctttaacttcagaacgacagaaacaggttccttggttccttcgaagttggataactgcacgtgatcctccagattgtcatgtggttctgaccatgggggcgctaca

SEQ ID NO: 43021 - DNA, 311 bp, Glycine max
  Clone ID: LIB3093-026-Q1-K1-D9
cgaaggactttaggttgggatttgggaattagggttattcgcgtggctaagatgattgatgtggttttgaacgatcgattgggtaagaaagtgcgcgtgaagtgcaacgactatgataccatctgcgacctgaataagcttgtggcggctcagactggcacaagagccgacaagatccgcattcagaagtggtacaccatctacaaaggatcactttactcttaaagattactaaatccaagacggcatgggtcttgaacttttacttcacttaacacaacaaggtgtgttttatgcgtaatatactatgt

SEQ ID NO: 43022 - DNA, 422 bp, Glycine max
  Clone ID: LIB3093-026-Q1-K1-E10
gcggcaacccgtccgcgcctctttctcccaatgccttccctccgcctgggcccactcggcgatcctactcccggatcaactcgcccgtgactcaccgcagagctgccccgaccctgaccccaacctctactaccagccagtcatcggaatcgtcagccatcccggcgacggcgcctccggccgcctcagcaacgccaccggcgcctcctacatcgacgtctactatgtcaaattcagtgaggccgccggcgcccatgtcgatcccctcatgtataccgagccttcggagaagcttctcaagaagctccaattggcaaatggggatctcttcactggtggatgggctaaaaatggcttatatcttgaaactgtcacaaaaatatttaagaaaattttacagaacaatgatgctggagatcatt

SEQ ID NO: 43023 - DNA, 290 bp, Glycine max
  Clone ID: LIB3093-026-Q1-K1-F10
ggatatatatctccagaatatgcgatgcattgtgaacactcagacaaagctgaattctatagctctagagttaaatccttataaatagtatctatcaagagcaataccatccaccgatccaagcaagaagcattagcatcttctatattagtcacattaattgaaagtgatggacaacctaatggaactagtagataaaaggctaagttcatatttcaattaatatcactttattattataatcaaagttgcactactatgcacctataccactttaaaccttaggctca

SEQ ID NO: 43024 - DNA, 421 bp, Glycine max
  unsure (1)..(421): unsure at all n locations
  Clone ID: LIB3093-026-Q1-K1-F11
ggttcccatggcttcttcttcttcgattcgacccactctctcctcccttagattcttaacgccgtcatctgtttcgctctccaacccttcttctcgtatctctttctcccatcttccctctccctctgtgtctcaatccaatagttttggcctcaaagcttccagagagttgagacaacatggcaactccacgagaatcatggcatcagggcacgtgtctcaatcgatttcagctgcttcaccagaaaatgtgcttgagtgggtcaaacaggacaagcgaagaatgcttcatgttgtatatcgtgttggggacttggacaggaccataaagttttatacagagtgcctaggaatgaagctcctcagaaagagggacatacccnaggagaaatatactaatgcctttcttggatatgggccc

SEQ ID NO: 43025 - DNA, 311 bp, Glycine max
  Clone ID: LIB3093-026-Q1-K1-F12
agcaaacacagtcatggcctcgattcttcaatgcttactggatccgaacaacaactgatcggcccctcaggacatgacatacctctccagacggcttcgcaaatacgggctcccatatgacgatttgtacgatccttactacgatctagacgtgacggacgcgctgcatcggattcccgaagatgtgcgcgacgctcgccacgcgcgtcttacacgcgccatctatcttatcatgaagcacgagtacctccctgacaatcttcaggcaatgcaaacaccaatcaggcgctaccttcacgatatgctgactc

SEQ ID NO: 43026 - DNA, 301 bp, Glycine max
  Clone ID: LIB3093-026-Q1-K1-F9
cccacgcgtccgcagacccatagagtttcacatagctccttcatcataggcattttcagggttcttccaggcacactgttaccatcaatcatatacgtctcgattctaaaatctctaaaaagatgcagctacaacatggctctgctggttaagccattaataacctatcacaagatctgatttactacgtcgccggaatgattatcgacaagtcaaaggtggtgggagaccagagcatcttttaccggcacaaaaaagatcactttggacccgttgtcaagcttgagaagttctcactcta

SEQ ID NO: 43027 - DNA, 381 bp, Glycine max
  Clone ID: LIB3093-026-Q1-K1-G10
ggggaatcctctgtctacacatagaccctatataagaacacatactctattcacactgacatgctctcttctcatactataaaggctacgctgtcttatatccatcaaaaaccaaaaccctaatggcaaagcgcggaagacgcaaccgactcatctaccatcacggtctccgacgcagtttaagacaacgatggcccttatgcaacaggcgccattgccggtcacaaagtacatgacacgaggaaaatgagaaatgggtcccaatgaccatactgatccacctatttaaagatggaagaatccgaagccttgaacagatctacctacaatcgctctagatcaaagagcaccatatcatcaacacgctcgagggttccaacc

SEQ ID NO: 43028 - DNA, 322 bp, Glycine max
  Clone ID: LIB3093-026-Q1-K1-G11
cccacgcgtccgcccacgcgtccggcggcttcaaccttgtagttattctctttcttcttttgtagctatcgctctcttgaaaaatctagatctcgttcttccttgatctacgttacgcttttagtgaccggatctgtatggatctgaaccagatctacacgccgatggtggttttggcctggtctttcatagatctgatgcatggaggctcagatctactgtacagaggtgtgcgattcatgttcgtctctcttttggaatctgtttcgtagaaagtcgtttggtcttccatgtcgcatggctcttgaggtatttttttttg

SEQ ID NO: 43029 - DNA, 451 bp, Glycine max
  Clone ID: LIB3093-026-Q1-K1-G12
gttcttctttctttttcagaacctgctctcttttttctgtttttttcttctgattttcacagatccgagcgaaactatagagaatgtcagaaacaccccaaaggaagaaagcgagcctttccccaaaacgaggtcagatcaaggctcaaatttttactagccttgtgaattcagtggcctccactatctcaaaaacaggggaatcgcttctaaacgtgattggaaatgggggcggttcaggttctgcatcttctaccccacccccaagtagtggctacaactctgaggccaactcctccgatgtcacctagaatcaatcaagtggcttttttctacgtggcttaaccaatgtttttgctggttgaccaggaacttttccgtaaactctgctactgctagtgttgtttttgagagatcacagatcttagggagcttacttcctaccctgttt

SEQ ID NO: 43030 - DNA, 323 bp, Glycine max
  Clone ID: LIB3093-026-Q1-K1-G9
gcgaaacatgctctctctccacatagaccctataaaaaaacacaaacctagtcacgttgccatcctctcttctgatcctctaaaggctgcactctcttttatccctcaaaaaccaaaaccctaatggcagagcgcggaggtggcgaccgtggcagcgaccgtggcggtttcggacgcggctttggtgggcgagggcgccgaggtgacaagggccgaagccggcgccgaggtccccgccgcgaggaagaggagaaatgggtcccagtgaccaaactgggccgcctggtgaaagaaggaagaatccgaaaccttgaacagatcta

SEQ ID NO: 43031 - DNA, 438 bp, Glycine max
  Clone ID: LIB3093-026-Q1-K1-H11
cacaaagagaagcattagcactaggagcagcaacaactagtctcagctgaaatggcctctggagtgatggcatctgtggccctcaaacctgcccctttcactgttgagaagtcctcagtgagaggccttccctctctctcaaggaactcttcttcattcagagttgtggccagtggcaagaagatcaagactgacaaaccttatggaattaatggtggcatggctttgagggatggaactgatgcatctggcaggaaaggaaagggaaagggtgtttaccagtttgtagacaaatacggtgctaatgtcgatggttacagtcctatctacgacaccaaggactggtctccaaccggtgatgtctacgctggcggtacgactggcttggctatctgggctgtgactctacttggtcttttagctggtggtgcacttctt

SEQ ID NO: 43032 - DNA, 444 bp, Glycine max
  unsure (1)..(444): unsure at all n locations
  Clone ID: LIB3093-026-Q1-K1-H12
gagaaaagttagggttcacaacttttccttttccttttgcttgcgaatctgaatcaaatgggcaatcatgcgttcattattcatcatgtcgtcggcgaagaaaatcacgctgaagagttcggacggcgaggctttcgaggtggaggaggcggtggcgctggagtcgcagacgataaagcacatgatcgaggacgactgcgccgacagcggcatccctctgccgaacgtgacgagcaagatcctggcgaaggttatcgagtactgcaagaagcacgtcgaggccgcgaatcccgaagacaaaccctccgaggacgatctcaaggcctgngacgctgaattcgtcaaggtcgaccaggccacgctcttcgatctcatcctggctgctaactacttgaacatcaagagcctgctggaccttacatgtcaaactgtagccgacatgat

SEQ ID NO: 43033 - DNA, 453 bp, Glycine max
  Clone ID: LIB3093-027-Q1-K1-A1
cccacgcgtccgaagatttcagttccaaacaaaacttatcaaaatctcatatactgattcagttctatacataaccatcgagatttactatcaaaccaaaaattctcaaaatctcttcacctctgtgatgaccatggaatacagaaccttagaactcaacatcatatccgcaaaggacatcaagaacgttaacctcttctccaagatggacgtatacgccgtcgttacgctctccggcgaccctctccaccctcagggcgccaccacccacgtccacaaagacgccggcagcaaccccacgtggaactaccccgtgaaattctccgtcaacgaatcgctggccaaggagaatcgtttgtctcttgagatcaagctcgtctccgaccgcaccctcggcgacaccgttatcggcaccgtccatgttcctctcagggaactcatggacaatcccgg

SEQ ID NO: 43034 - DNA, 450 bp, Glycine max
  unsure (1)..(450): unsure at all n locations
  Clone ID: LIB3093-027-Q1-K1-A10
gcttcgctaactgcttacgcagtttggcatatatgcagtttcttccgagaggtaacggttggggtccactccaagttggtgaaatgtcacagcttctcatcaaccaccgcttgctcctctcttccacccccggatttgcctcgtttggcaaaaactgctcaaatttcacttaccccaaacgaggttgaagaaattgctcccaaaattcaacaagttatagaatgattgtttttgcagtgagccaaacttttgaatttggattgaactgtcttgtgtggcatgtttggacagctgcaaggtattgatcttgaaagtgttgaaccctcgatcagagcagagactgaaaacaatntgcgtggtaatgctcctgaaacatttgaccatagggacgccttgatcgcttctgtcccgagctatgaggagccttatattaaagttccgagggtctta

SEQ ID NO: 43035 - DNA, 452 bp, Glycine max
  unsure (1)..(452): unsure at all n locations
  Clone ID: LIB3093-027-Q1-K1-A12
cccacgcgtccgcacggtgatccgtatccttttgatggtccaggtgggatattgggccatgcggtcgctcccactgatgggaggtgccactttgacgccgacgaatattgggtggcgtctggcgatgtcaccaaatcgccggtgacaagtgcgtttgaccttgaatctgtggcagtgcacgagatcgggcacttgctcggattaggccactcgtcggacctaagagccatcatgtatccttctataccacctcgaactaggaaggtgaatctagcgcaagatgatagacgggattcgaaagctctatggtatcaacccctaattattatagctaggtgttgtttgtactagaactagagttttatttcggtaatttgcattaaaggattttgaaagttatcgaggtgaaattattctaattcangaacaacanaaatagcatgtaagatatt

SEQ ID NO: 43036 - DNA, 428 bp, Glycine max
  unsure (1)..(428): unsure at all n locations
  Clone ID: LIB3093-027-Q1-K1-A2
tctctctctctctctcttcacgttcgatctttcgcttctgaatctccaacgatggtgctcgaggcgactatgatctgtattgacaattcggaatggatgcgtaacggggattactctccttctcgatttcaagcccaaacagacgccgtcaatcttatttgcggtgctaaaacccagtctaatccagaaaatacggtgggagttctcacgatggcggggaagggcgttcgtgttttggtgacccctaccagtgatctgggcaagatcttagcttgcatgcatggactagaaataggcggtgagatgaatctagcttgctgcattcangntgcacaattggctcttaagcatcggcagaacangaagcaacagcaaaggattattggctttgcttggaggtgtgaataaactgttcttctgtggtattt

SEQ ID NO: 43037 - DNA, 372 bp, Glycine max
  unsure (1)..(372): unsure at all n locations
  Clone ID: LIB3093-027-Q1-K1-A3
cgcgttcgcccacgcgtccgcacaaggcacattggtaataggaagaaagaaagaaagaagattaagatagggcatctcccgaaacagttgaccttgtgagatacagacacagcaccttcaattcttcatttctcaaatcgcaattcgtaaaaccataacaacacaaagtgtctcaaattcacattaaattctccctccccgaaaaggatgtcgttcgaggtggaagaggaggaggaggcgttcgagcacacgctcttggtggtgcgcgaggtgtcngtgtacaagatcccgccgcgcagcaccttcggcggctacaagtgcggcgagtggctccagtccgacaagatctggtcgggccggatccgcgtcgtg

SEQ ID NO: 43038 - DNA, 187 bp, Glycine max
  Clone ID: LIB3093-027-Q1-K1-A4
atccactcaacccactattctcctttctagcacaacacaaactttatacacatacgtcatctttcaaaacaggtcaccttatcacatacagacacatcacccaccaactcttcactcctaatatctcacaacataaaaccacaacaacacagaccgtaccaatttcacataaaattcatccttccca

SEQ ID NO: 43039 - DNA, 496 bp, Glycine max
  unsure (1)..(496): unsure at all n locations
  Clone ID: LIB3093-027-Q1-K1-A5
cgtctcgtgtcagcagcaaatttggggctnnntactccctgtnntgatccnntttattccagatnnatgtgccttggttanntgcgagtatgcncnnatgccacnncagcntanntgaatatnnntagtannncgtggcttcaaagctgggtttgaanngtagggaaatggggaagagtnggttcnaagttatntnnctcttggtggacccatatactnnngctgcagccattagcactttcactggcctggtcaacaaattcctcttggtggcttattaatcttaaagggcgtnnctttaagtttctgggatttcaaactggctaannnactcttctaataccagaacnncatanntataatnnngttgtgtgaactggacaatgtcataccaacnnaattttctttcaccaacttttggttctaattcaaggggacatatannatgaaagaaaagctagaaatnnngtatgtttaccgaattggagtgaaaatt

SEQ ID NO: 43040 - DNA, 456 bp, Glycine max
  unsure (1)..(456): unsure at all n locations
  Clone ID: LIB3093-027-Q1-K1-A7
aaccggcaagaacctcgtccagctggcttccaaaggcggacagaggaactccatcaacgttgttctgacatccgctgatgtggcggtcgaaggtttctgtatgagccgatgtgggacccacggctcttccgcttctcatctgaagaagaacagcaagagctacaagttcgcctacatctgggtgggaaactccgaaacccaatgcccggggcaatgcgcgtggccattccaccaacccatttatgggccccagagcccacccttggttgctcccaacaacgatgtgggacttgacggaatggtcataaacctcgccagcctccttgccggaaccgncaccaaccccttcggaaacggctacttccagggtcccgcggaggctccgctcgaagccgcgtcggcgtgccctggggtttatgggaaaggggcttaccctggttatgctggggacttgct

SEQ ID NO: 43041 - DNA, 471 bp, Glycine max
  Clone ID: LIB3093-027-Q1-K1-A8
cccacgcgtccgggcttgttcattctctgtttctgcactgaggcaatttggatcaaattttgtcatctttagtttgggtgattcgccccctactttttttcccctctttgtattttttaaaatattttttctttttttttgaaggtacggttgtcggaaattttttatttttttcatcgtttttgaataaataggcgaatttatgagatgggtttgggtttttatgcttaatttttcgattttgtgcaaacttttaaaatgggttgtggtggagaggtcgaatccagaatttttcattgggttttgccttgagttgactttttggggatgcagaagataactgataaatctgatgataggaccactgggggttgtgaatcaatgcaagttgggaagtgggaatgctcaagttgcataaatatgtagtcatgaattgatatttgatatttagtgtagccttttttttattga

SEQ ID NO: 43042 - DNA, 452 bp, Glycine max
  Clone ID: LIB3093-027-Q1-K1-A9
ccacgcgtccgggagtacaataatgttgcacctgatgggtcatatgttggtaatggtcgattaggcagaaaggcattgaatgatggttcttacattgcaccgaggaggcgttcaccaggaggaagagatggcatccaaattggtcatagaaatccaagaaacattagtccaaatagatgtattggagatggttcagacttggttggagtgaggcataatgataaatttatgagaggcttgcctgaagataatatggatgctatgttcacccggtcccaaacatttgagggaatggatggtcggtttacgagagggagtaggaatttttcttccatgcagagaaggggtcctcctcgaattcgttccaagtcacccatcagatctaggagtcgctcacccggtccatggtcatctccaagaagaaggtcgcctagaagaagatcccctgatgg

SEQ ID NO: 43043 - DNA, 406 bp, Glycine max
  unsure (1)..(406): unsure at all n locations
  Clone ID: LIB3093-027-Q1-K1-B1
cagagctcaaaaccctagagaggaggaagagagagcgtgcaagttccggccaccaccgaccatgacattcaagcgcaggaatggaggtcgcaacaaacacggccgcggccacgtcaaattcatccggtgctccaactgtggcaaatgctgtcccaaggacaaggccatcaagaggtttctggtgaggaacattgttgaacaggctgcagtcagagatgtgcaggaagcttgtgtctatgaacaatatactcttccgaaactctatgtgaagatgcagtactgtgtttcttgtgctatccactctcatgttgtgagggttcgatcccgcactgacaggaggaaacgtgagcctncacagagattcatcaggcgcagggatgatgcacctaggcctggtcagcccggc

SEQ ID NO: 43044 - DNA, 450 bp, Glycine max
  Clone ID: LIB3093-027-Q1-K1-B10
aactatcgattccctcaaagtggaacccaagcaaagaggttgagtacacaggtcaggttgttggatatgaggataactttgattcaaccaccaacgtggttgtcaccatcactccgactgataagaagtctatcactgactatggttcacccgaagagttcctctctaaggtggattatttactaggaaaacaggccttcttcggcgaaacacaagccgagggtggttttgatccaaatgcggtggccacggctaacatcttagagacggcaacacctgtgattgatgggaagccgtactattttctgtctgtgttgacaaggactgctgatggagatgaaggtggcaagcaccacataattagagcaactgtaaaagatggaaaactgttcatttgcaaggctcaagctggagacatgaggtggttcaagggaacaagaagatttgtgg

SEQ ID NO: 43045 - DNA, 446 bp, Glycine max
  Clone ID: LIB3093-027-Q1-K1-B11
ggggaacggatccaaactcccttggatgttactcgtatgatttagttggaaaaccactcgatgtgtatgacaagcttcgtgcacctttgggcaatctattctttgggggagaagctgtaagcttggacaatcagggatctgtgcatggagcttactcagctggggtcatggctgcagaaaattgtgagagctatcttttagaaaaactaggccacgtggaaaagctatctctagcttctgttaggcatgaaatgcttgaaactcttatacctcttcagatctcgaggatgtgatttgttggttctcagtagtagcttttagacaatgattctggataacgcaatggcaaaatatttgccattcaatataataaaagaaataacctgttctttaaggatggtgaattggtgattggtgactatcgtccaaggtacaccattttcact

SEQ ID NO: 43046 - DNA, 447 bp, Glycine max
  Clone ID: LIB3093-027-Q1-K1-B12
cagacattcttgaaaaccgtaacggggaagacgatacccctagaggtggagtcatcggtcacagtcaacagtgtgaaggcgaatatccaggacacggtgggcatcccgccggaccagctgcgcctgatcttagacggcaagcagctggtggacggccggacgatagccgactacaaaatccagaaggagttcacgcttcacctcgtgctccgcctccgcggcggcgccaagaagcgctagaggaagacctacaccaagcccatgaagatcacgcacaagcacatgaatgtcaagctcgaccttctacagatctacaaggtcgacgactccggcaaggtccagaggctccggacggaatgccccatcgccgagtgcggcgccaggactttcatggccaaccacttcgatcgccactattgccgcaagtgtggtttgacctatgtttac

SEQ ID NO: 43047 - DNA, 436 bp, Glycine max
  Clone ID: LIB3093-027-Q1-K1-B3
cccacgcgtccgcccacgcgtccggttgttggaagccaaaaccctagcagccggcgagaatggcagacgttgaggttgatgtggcggcggcggcggcggcggcggctgcagggcagccaaagaagagaacgttcaagaagttcagcttcaggggggtggatctggacgcgcttctggacatgtccactgacgaactcgtgaagatgttcagtgctcgcgcacgcagaaggttccagagaggtctcaccagaaagcccatggccttgattaaaaagctccgcaaagcgaaaagggaagcaccagcaggtgagaagccagaaccagttcgcacccatcttcgcaacatgattattgtgcctgagatgattggtagcatcattggagtctacaatggcaagaccttcaaccaggttgaaatcaaacccgagatgattgg

SEQ ID NO: 43048 - DNA, 310 bp, Glycine max
  Clone ID: LIB3093-027-Q1-K1-B4
ggattgaagaggtgcgaacagagagaggcagtgatgtcattattgttcttgttgggaacaaaactgatcttgtcgagaaaagacaagtctctatagaggaaggggaagcaaaagcacgtgagctcaatgtcatgttcattgaaactagtgctaaggctgggtttaatataaaggccctatttcgaaaaattgctgcagcactacctggaatggaaacactatcttctgcaaaacaagaagacatggttgatgtaaacttaaagtctacgaatgggagtgctcattctcgacctcagtcaagtggatgttc

SEQ ID NO: 43049 - DNA, 451 bp, Glycine max
  Clone ID: LIB3093-027-Q1-K1-B6
cccacgcgtccgcccacagcagttttctgtttaatacgctccgtgcttttggaaatgattgccacccagatataaagagtgaaatatgcacacactttgctaattgtgagctgcgttcaatcgtcatcattgatagaggtatgattggatcaagtgaatcaactaccaactatcctggcaagattcctcgtggccccgatgttcccagtgaagctgctgactaaaaccattcagggattatccttaccaaataatagctcctctttgtgatcattggtcgtatattggaattttcattggtataatagggttatttcttaattgcatttacaggcaagtgttcaatattttgttttacccgaacaaactaatccgtaagagcagtttcaaaattcctttttagtggcttaaagtaaattggtaacatatgtaagtgccaatttttaagatg

SEQ ID NO: 43050 - DNA, 371 bp, Glycine max
  Clone ID: LIB3093-027-Q1-K1-B7
ggagtctctgggtacccaacaattcagtggtttccaaaaggatctcttgaacccaaaaagtgtgaagggccacgcactgctgattcacttgctgagtttgtaaatacggaaggaggaacaaatgtgaagattgctacagctccttccaatgtagtggtgcttacatctgaaaattttaatgaggttgtcttagatgaaaccaaagatgtcttggttgagttttatgcaccctggtgtggacattgcaaaagtcttgctcctacttacgagaaaattgccacagcatttaaattggaggaagatgtattaattgcaaatctggatgctgataaatataaagatctggctgaaaagtatgatgtgagtggatt

SEQ ID NO: 43051 - DNA, 386 bp, Glycine max
  unsure (1)..(386): unsure at all n locations
  Clone ID: LIB3093-027-Q1-K1-B8
ttcttgtttgcttcccaagtctctcgaagcatctttctttctcttcctgcagaagctatccgtgttacttgttcccaagtctccaacaagcaaagtacatggttgatttggaaatccaggtccccagcgcattcgacccgtttgccgaggcgagagaatcagatgcccccggggcaaaggagtatgtgcacatacgaattcagcagaggaatggaaagaagagtctgacaacagtgcaagggctgaagaaggagttcagctacgagaagatcctcaaggacctcaagaaggacttctgctgcaacgggactgtggtgcaggacaaggagcttggcaagattatccaactccaaagcgaccagcgcaagaacgtatnccatttcctc

SEQ ID NO: 43052 - DNA, 447 bp, Glycine max
  Clone ID: LIB3093-027-Q1-K1-B9
ggatcgcggttctccctctcctatcgtctttctcttctcttcggatctccctccattccttggagtcacaatctcaatcactgtttcttctcttctacctcgtttccctattctccctcaatttttctttcgcttccaatgacatacttttaatttttttatcaataaatcactctttttcgtggatatctatgatttttttgactaaaacattggtctttcagatctaacgtatctatgccaacacccattgcacaacatcatcttctcgttttcgtgtatcattttccaattaactgatacccttttgcctgttttattaatttattccttcttgaccggacttgattcatcacacaactgcattttttggttggttggttggttggattctattattcttttacctgaaaaataatggttatggtgaatctgggaatgcttcat

SEQ ID NO: 43053 - DNA, 451 bp, Glycine max
  unsure (1)..(451): unsure at all n locations
  Clone ID: LIB3093-027-Q1-K1-C1
cccacgcgtccgggtgccaattggtagtgggattgacatgtgtaattttgaggaccctttggatgtaaatcctcctgcattgatcagtttaggtggcaatgccaaattgtctgggtataatgataggattccctgtagcttgttgtccaaaagtcgtgacaatgtaccagtagttagtagagatgatgatgaaaactcttctgggtgtactcaccctataaatactgaaaccaagtcctttaggccaaagacttgtataggtaaaagaatggcttctaactttcagaaagttgctgaaaaaacaaagaattatgcactttctaacaatgatggagattggaagcgaacttacctcagcaagaggaactgcaataaacaccaaagttctcagatgaatattcctttcaaaaagaggaagctttntaattatcgctcttgtgcaaactctaat

SEQ ID NO: 43054 - DNA, 458 bp, Glycine max
  Clone ID: LIB3093-027-Q1-K1-C10
gggttatcaagtaaaagccgtggctttcctttaaaacatgatgagaaaaatatccatggtgggggtacaagttatggtgcaattgaagccaaggggaatccgccgataactccagcagtgatgactcctggaggacctcttgatctcacatctgttttgttcaggaatcgtataatcttcataggtcagccagtcaattcacaagtggctcagagagttatatcccagcttgtgactctagctactataaatgaaaatgcagacatactggtatatataaattgtcctggtggaagcacatattcagtgttggcaatttatgattgcatgtcttggataaagcccaaggttggtaccgtgtgttttggagtagctgcaagccaaggagcacttctacttgctggaggtgagaagggaatgcgctatgcgatgccaaatgctcgcataacgatacatta

SEQ ID NO: 43055 - DNA, 450 bp, Glycine max
  Clone ID: LIB3093-027-Q1-K1-C11
caagaaacaacaagggatttccatggaagtctcaaaagaagaagctcgagtggcacccgcacgggccctagtggcgatgctgccatcccctggcatgggccacctaatcccaatgatcgagttcgcaaagcgagtggtgtgctaccataacctggcggtgagcttcgtgatccccactgacggcccaccttcaaaagcccaaaaggcagttctggaggcccttccggactcaatttcccacaccttactccctccggtcaatctctccgacttcccgccggacaccaaaatcgaaaccctgatctcccacaccgtcctccgctaccttccttccctccgccaagcattccactccctctccgccacaaacaccctctccgccgtcgtcgtagacctcttctgcaccgacgccttcgacgtcgccggcgaattcaatgccttcccctacgt

SEQ ID NO: 43056 - DNA, 416 bp, Glycine max
  Clone ID: LIB3093-027-Q1-K1-C12
gaaaggcttatggtggatacctaggcacccatagacgaggaagggcgtagtaagcgacgaagtgcttctgggagttgagaaagagcatacaaaaagtaaagaagagaagaaacataaagatgaagataaatcaaagaaaaaaaagaaagagaaaggggaagaggaagatgaagagggagagaagaaagaaaaagatgtaaaagataaaggggaggatggtgaagagaaagagaaaaaggagaaggataagaaggagaggaaaaaggaaaagaaggacaaggatgacaaaactgatgtagagaaggttaaggggaaagaacatgatggggaggatgctgaagagaagaaagaaaagaagataaaggaaaagaaagacatggatgacaaaactgatgtagagaaggtcaaggggaaag

SEQ ID NO: 43057 - DNA, 385 bp, Glycine max
  unsure (1)..(385): unsure at all n locations
  Clone ID: LIB3093-027-Q1-K1-C2
cccacgcgtccgctcttcttctcttgcggctagggttttagcgcagcttcttctagatttaaggaagatgggtaaggaaaaggttcacatcagtattgtggtcattggccatgtcgactctgggaaatccactaccactgatcacctgatttacaagcttggaggcattgacaagcgtgttattgagaggtttgagaaggaagctgctgagatgaacaagaggtctttcaagtatgcctgggtgctggacaaacttaaggctgagcgtgaaagaggaatcaccattgatattgctttgtggaagtttgaaacaacaaagtattattgcacagttattgatgcgcctggacatagggatttcattaagaatatgnatactgggaca

SEQ ID NO: 43058 - DNA, 443 bp, Glycine max
  Clone ID: LIB3093-027-Q1-K1-C4
gttttcattcaatcatcactgatctaagatatgtctacatctgataagtcagaagtggtggaaaggggtgctaaggatgatgaaaagccaaaggaagaacatgagaagggtggatttcttgatacagtgaaggatttcattcaagacattggtgagaagattgagggagcagttgggtttgggaagccaactgcagatgtcactgggatacacattccatcaattaatcttgagaaggcagagctagttgttgatgttcttataaagaacccgaatccggtgccaattcccctaattgacataaactacttggtcgagagtgatgggaggaaactagtttcgggattgataccagattcgggcacaatccatgcacatggagaggagacagtcaagattcctcttactttgatttttgatgacttaaggaatacctatgatga

SEQ ID NO: 43059 - DNA, 456 bp, Glycine max
  Clone ID: LIB3093-027-Q1-K1-C6
aattgcttctctgctggcagaggggaaggttcccattgggattggaaggaacacaaaaattaggaactgcataattgacaagaatgcaaagatcgggaaagatgtcatcatcatgaacaaagatggcgttcaagaagcagatagaccagaagatggattttacattcgatcaggaatcacagtcatattagagaaggcaacaatagaagatggcactgtcatataaataaatgggtggaagtacttatttcatggactggtgtagtggctagcagtactagctcgaagaagcattccaaggaactttggggacagaaggatccaattgaaaaatcagcactccccttttgctatatatgcaacacataaggctctcccactgcatgtaaaaataaaatgaataaacagtgtatgaaatcaagatgcataaacgtaaataaaatgaaaatgtgaatg

SEQ ID NO: 43060 - DNA, 417 bp, Glycine max
  Clone ID: LIB3093-027-Q1-K1-C7
ggtggttgtcgtttttgaaatggcagcgtcgtcgtcagagaagcaagtggtggtgataggcatagacgacagcgagcagagcacgtacgcgttgaattgggctctgattacctttttccgaaccccatttttaaggttggtcttattcaattcaagcccaacggcaacttcggtgtgggcttcgccggccctgggtttgcaagaaccgcttaagtcttgcctattggagattccgatttgagaaagaatggcgccagaatccttgaaaccggttaacaactttgcattaaccaattcgtaaatgatgtgacacgccaagtggtggaaggtgatcctagaaatgttctttgtgatgctctagataagtaccgcgctgcaatgttggttgtgggtagtcatgggtatggggctataaaa

SEQ ID NO: 43061 - DNA, 451 bp, Glycine max
  Clone ID: LIB3093-027-Q1-K1-C9
gcacgaatatcttgttgtttggagcgatccgagaaaaactctgtaaacatgttggtttaccaggacctccttacaggtgatgagcttctctctgactccttccgttacaaggaaattgagaatggaatgctgtgggaagttgaggggaagtgggttgttaaaggagcagttgatgtagacattggtgcaaacccttctgctgagggtggaggagaagatgagggagttgatgatgcagctgttaaggttgttgacattgttgacacattcagacttcaggagcaacccgcattcgataagaagcagtttgttaccttcatgaagaggtttatcaagaatttgactcccaagctcgatgcagagcaacaggagttgtttaagaagcacatcgagggagcaactaaatacctgctctctaagattaaagatttccaattttttgttggtgaga

SEQ ID NO: 43062 - DNA, 413 bp, Glycine max
  unsure (1)..(413): unsure at all n locations
  Clone ID: LIB3093-027-Q1-K1-D1
agataaaagacacacatgtcagagaggttatgacacctcttgttgatgttgttgcaattgatgcaagttcaagcctggtagactttcatcacttgtgggtcacacatcagtactcaagggtacctgtttttgagcaacgtgttgataatataatgggtatagcatatgcaatggatctgctggattatgttcaaaagggtgagttgctagaaagtactacggttggagatatggctcacaaacctgcttattttgtacctgattcaatgtctgtttggaatcttcttagagagttcagaatcaggaaggttcacatggcggttgttcttaacgagtatggtggaactgtggngattgtaacactcgaagatgttgttgaagaaattgttggtgaaatatttgatgaaaatgac

SEQ ID NO: 43063 - DNA, 459 bp, Glycine max
  Clone ID: LIB3093-027-Q1-K1-D10
ggaagcttagagagagagagagagagagagagagagaggagagagtgttggcgcttcatcaagatgggtatttctagggattccatgcacaagaggcgtgccactggtggcaagaaaaaggcttggagaaagaagagaaagtatgagcttgggcgtcaggcagcaaacaccaagttatcaagcaacaagacaatcaggaggattcgtgttagaggtggcaatgttaaatggagggcattgaggctggatactggcaattactcatggggtagtgaagcagttactcgcaagactcgtattctagatgttgtttacaatgcctcaaacaacgagcttgtgcgaactcagaccctggtcaagagtgctattgtccaggttgatgctgctcctttcaggcagtggtaccttcagcactatggtgttgaaattggtagaaaaaagaaagtggcagccaagaag

SEQ ID NO: 43064 - DNA, 449 bp, Glycine max
  unsure (1)..(449): unsure at all n locations
  Clone ID: LIB3093-027-Q1-K1-D11
caactttatccgatactaccgctttcaatctcatccttcgaaacccaaacttgagcttcttcgtgtttcttgctcgtggaagcaaatgacaaccgcgccctctctaactggtcccttgtcaaacgcggtcggattcagtgactggaaaaaacatgcccctttgtcagcttctctctgtaaactaagctccagttcaaatatagttgacatgaagatatctcgatgtggttgtcggaaagttggacatggccaaagatgtttccgattatatgccctatttggaggaaaaaaggacaataatgggaaaagtgatgatgttccttctaaggccggaattctaggaaacatgcaaaatctttatgagactgtgaagaaggcacanatggttgtccaagttgaagctgtgcgtgtgcagaaagaactcgcagcagcagagtttgatggttatt

SEQ ID NO: 43065 - DNA, 454 bp, Glycine max
  unsure (1)..(454): unsure at all n locations
  Clone ID: LIB3093-027-Q1-K1-D12
gaaagaaaaaggtagagaaggagagagagagagagagaaagaaaactgaaaaaaaaaaaaagaggataagactaattaactacatttttggtttggtttttcttcatctcgcaggagacacgaagagacaagttacatcacatgagatgtcaggtggtggatgcagcagcatagtgtggttcagaagagatctgaggatagaagacaatccagcactgacagcaggagtgagagctggtgctgttgttgcagttttcatatgggcacctgaagaagaaggacaatactaccctggcagggtctctagatggtggctcaagaacagtttggctcaccttgattcctctctcaggaatcttggcactcctctcatcactaagcgatccactgatactctntcttctctatttgaggttgttaagtccactggagccactcaactcttttttaatca

SEQ ID NO: 43066 - DNA, 489 bp, Glycine max
  Clone ID: LIB3093-027-Q1-K1-D2
ggagccgacattgtgcaaaaggcactgatagctcctgcagcattgattgctcaaaatgctggaatagaaggtgaagttgttgtggagaaaataaagagtggtgaatgggaggtcggttacaatgctatggtagacaggtatgagaatttagtggaggctggagttatcgaccctgccaaggtaacaaggtgtgcattgcagaatgctgcttcagttgctggaatggtgttgaccacacaggccattgtggtggaaaaacctaagcccaaggcacctgtagctggtgccccacaaggccttaccgtttaaattttaggttattagggctacggcaaagaacagttttgtgcagaaaattgaaagagcggagagaaatataccgatgaattcgttcgtttctgtgccaagaaagtaatacaccatgaaattgctccagcatttcaacatcagtcaatctacatgcaagcagacgatgtgaaattctcctca

SEQ ID NO: 43067 - DNA, 423 bp, Glycine max
  Clone ID: LIB3093-027-Q1-K1-D3
ggcgaagagatggccaccgttccagggcagctcgtgtgggagatcgtcaagaaaaacaattgcttcttggtcaagcagtttggaaggggcacccagagcgtcgaattcagcagagagagcaacaatctctacaacctcaattcgttcaagtactctggtttggcaaacaagaaaactgttactgttcagcctgagggcaaagatcaggctgtgttgttggctacaaccaagacaaagaagcaaaacaagcccgctgcattgctccacaaatctgtgatgaagaaggagttcaggaggatggcaaaagctgttgaaaaccaggtggccaaaaattactacaggcctgatctcaagaaggctgcccttgcaaggttgagtgctgttcacagaagcctcaaagttgccaagtctggtgtcaagaag

SEQ ID NO: 43068 - DNA, 348 bp, Glycine max
  Clone ID: LIB3093-027-Q1-K1-D4
gatctacgtaacggtcacgcacgagctgatgccccgagccgatgactcctgaaagcgaatcagacactgatagagtattcgtgctttgacagagctcactagatcgaagacagacgctgctgtgacggaactgcagtccattggcttgggagcgtgcgttcatgccagcttgatgcgcatcatacggcccgaaaatgacgaaccttctggaagcttgcgcacgctggcgataatgtgcatcgcgagggcgctgttgaacaagattaaaccgacggtgatgttcgctgacaagggtcttgtgtggtgcatctattgaatagacctcaggggcatgatcgagaatgtctt

SEQ ID NO: 43069 - DNA, 232 bp, Glycine max
  Clone ID: LIB3093-027-Q1-K1-D5
ttttggtactagaaaataataatattacggtaattacaatataatgtacaaatggtataaataattcccatttgtaacaatagaaataaaacagaagaataggagtttgaattgtatttgaaatcatttttgaaaacctgttgggttgatcaaaaccttttattaagaggcttggtaaaaagcgtaacagcaaaaagagtattgcaagcagaagttaaatatcattttatgg

SEQ ID NO: 43070 - DNA, 478 bp, Glycine max
  unsure (1)..(478): unsure at all n locations
  Clone ID: LIB3093-027-Q1-K1-D6
gaaggaaggtcagagtgacatctactacatcacaggtgaaagcaagaaggctgttgagaactctccattcttagagaagttgaagaagaagggatacgaggttctttatatggttgatgccattgatgaatatgctgttggtcagctcaaggaatttgagggcaagaagcttgtctctgccaccaaggaagggctcaagcttgacgagagtgaagatgagaagaagaagcaagaagagttgaaggagaagtttgacaacctctgcaaggtgatcaaggatgttttgggtgacaaggttgagaaggttgtggtctctgaccgcgttgtagattcaccatgctgtcttgtgactggcgaatacggttggaccgcanacatggaaaggataatgaaggcccaagctctaagggacaacagcatggcanggtacatgtcaagcaagaagaccatggagatcaacccttagaacccaatcatg

SEQ ID NO: 43071 - DNA, 478 bp, Glycine max
  unsure (1)..(478): unsure at all n locations
  Clone ID: LIB3093-027-Q1-K1-D8
gcctcctgcagatgctctgtttgaacacccaaggctattcagagcttgtgttcccccaggaatgcatcggtttaggggcaatatatgggattatgatacaagaccccatgttatgaaaacacttggatatccattggaaatggcagacagaatcccagaaattactgaagccaggaacatagagcttggacttggattgcagctttgtttcatgcatccatcgaagtacaaatttgagcatcctcgattttgctatgagagattagaatacgttggccaaaagatacaggatttggtgatggctgaaagattattgatgaagcatttagatgctccggggttatggctacaagagaggcaccgtcatcttcttatgaacaagtattgtggaagatatttgagggccaaacatctncaccgggttattatatttgatgataaggttcaagacacttatgagcataacccgagaaagaga

SEQ ID NO: 43072 - DNA, 447 bp, Glycine max
  unsure (1)..(447): unsure at all n locations
  Clone ID: LIB3093-024-Q1-K1-E11
agataatgtcattagccggcaaggtaatatcccaaagccaaaacacctctgcatgtgctcacactcataaccagcaagggaatcatccttcctttgttcctaatgtctcccctcaagcaccgtccagaccaattgtttgtgaactgccaattgctaggaaagtttcacttcatcggttcctttctaagagaaaagatagaattgcttccaaagcaccatatcaaataaacaatcccaactctgcttcaaataagccggctgaatccatgacatggctaggattaggtgctcaatcaacacaattctgagtgcatttgcagttttgagtagttttagcctctnttttttttatatatatttgattttgtagttctttgtcgttttaacttctactctagactttgatagatattagtagtagttgaaagcttcaatttttatgattgc

SEQ ID NO: 43073 - DNA, 375 bp, Glycine max
  Clone ID: LIB3093-022-Q1-K1-F11
ctttgtcaccaccacgggtaacaaggacatcatcatggttgaccacatgaagaaaatgaagaacaatgccattgtttgcaacattggtcactttgacaatgagatcgacatgctggggctggagaactaccccggcgtgaagcgcatcaccatcaagccccaaaccgacagatgggtcttccccgagaccaatgtcggcatcattgtcttggccgagggtcgtttgatgaacttgggatgcgccacaggacaccctagttttgtgatgtcctgctccttcaccaaccaggtcattgctcagcttgagttgtggaaggagaagagtaccggcaagtacgagaagaaagtttacgttttgcccaagcaccttgatga

SEQ ID NO: 43074 - DNA, 450 bp, Glycine max
  unsure (1)..(450): unsure at all n locations
  Clone ID: LIB3093-022-Q1-K1-F12
ctttgtcaccaccacgggtaacaaggacatcatcatggttgaccacatgaagaaggggaagaacaatgccattgtttgcaacattggtcactttgacaatgagatcgacatgctggggctggagaactaccccggcgtgaagcgcatcaccatcaagccccaaaccgacagatgggtcttccccgagaccaatgtcggcatcattgtcttggccgagggtcgtttgatgaacttgggatgcgccacaggacaccctagttttgtgatgtcctgctccttcaccaaccaggtcattgctcaacttgagttgtggaaagagaaaagtaccggcaagtacgagaagaaagnttacgttttgcccaagcaccttgatgagaaggtggctgcactttaccttggcaaacttggagctaaactcaccaagcttagcccggcccaagctgattacat

SEQ ID NO: 43075 - DNA, 494 bp, Glycine max
  unsure (1)..(494): unsure at all n locations
  Clone ID: LIB3093-022-Q1-K1-F2
gaccgcccgaatcccggtcgaccacgcgtncgccacgcgtnctgccacgcgtncgagaccaatcatatagctgctggcaggcttattttgagcgtgaagatcttgaaaaagagtccccaagagcagacatagagaggctgattctggagactggtggtgtaaaatccctaataggatgcttgcatgggatttcaatcatgcacaaagtaaagaagggtgacatgaatctgagcaaggatgtgaaatcagaagaaggtgagagaatgtgtcccatacctgatggattgccaaaatctgctgatgaacttanggaagaggagcaagcaagaatgcctgattcaccatacactaagcttcttaggaccatgggcaggcaccctgcatggtactctcctgcccctgaccatgaaacagattgatgaatgatgattcccatacatactaagctcaaagggaatgaatatattctctttgagggaacaagtaataacata

SEQ ID NO: 43076 - DNA, 450 bp, Glycine max
  unsure (1)..(450): unsure at all n locations
  Clone ID: LIB3093-022-Q1-K1-F3
ncacgcgtncgnccacgcgtncggaaaattgagctttgggtggataaaacagaaaaccttcgctctcaggctcaagatttcaggcagcagggaaccaagattaggagaaagatgtggttccaaaacatgaagataaagctaattgttctgggtatcataattgccttgattctcattattgttctttccgtttgtggtggcttcaactgtggtaaatgagtcttcccacatcctggcttcaactgtggtatttgtctcctcacttgataagattggtgctagcagattgccattgcctctactgtcaacatagtgcttttgactttttgggatttacattcttccgacttctccgatgatgaatattatatggcattgcttgtatagtgtgaattatttagcctttatcatcttgtctccatagcataatgctaatctgtcattctctat

SEQ ID NO: 43077 - DNA, 398 bp, Glycine max
  Clone ID: LIB3093-022-Q1-K1-F4
aaaggaaaaatgtttgagggaaagggctgtttggttttcaaaaccgggggcgttggcagcaatcgcggtggtagcttgcgttgggcttacaaaggcccaacccgaggccaggttcaagtgcaacagcgcgaacatccccacgtgtcgcgcgctcataagctactctcacccgaacaccaccaccctcggcgacatccaaaagctcttcaacgtgaaacacatactcgacatcgtgggagccgaacaacctccaagcaacgccacaaaaacatacgcggtgggccccaacgaggttgtgaaggtccctttcccgtgcaggtgcagcaacaacacgggactctcggaccgtgttccgctgtacaggatcaaaaagggggacacgctgtactacatcgcga

SEQ ID NO: 43078 - DNA, 417 bp, Glycine max
  Clone ID: LIB3093-022-Q1-K1-F5
aataacttagtttcgtttttcttactcactcaccgccgggatgtcgccggtgcccggagcacacgcccctctcctcccgggatccaagtccaaggatgttccgccggccaccgtgtccggcgccgtgttcaatgtcgccaccagcataatcggcgccggaataatgtctcttccggcgactctcaaggtcctcggagtgattccggcgttggttctgattctcgtgattgcttttcttgcagagctatccgtggagttcctcatgaggttcacacgtgccggcgaaacgacgacgtatgccggcgtcatgagagaagcctttggacccttgggagcagtggcagctcaagtcgctgttgtaatcaccaatctcgggtgtttaattatgtacctaattattattgcggatgtgttttc

SEQ ID NO: 43079 - DNA, 426 bp, Glycine max
  Clone ID: LIB3093-022-Q1-K1-F6
actatttcttcttcttatcttcaaaccctaaatcggggcctcgtcaattaaccaccaaagtgatcgaactcaataccctaaaagccatggcccaatcccatggatccatccttactcgatcagcgtggtccttcaatctcgaatcggagttcgacttaatccgatccgtcatcgattcgttccctctcatctcgatggacaccgagttccccggtgtcgtcttgcgtaccgacgccggcgacccctgcttccgtcacctgcaacccgtggcgcactacgccgtactcaaagccaacgtggaccgactgcacctgattcagatcgggcttaccctttccgacaacgccggaaaccttgccaccctcggcacctacaacgccttcatgtgggaattctaacttaaagatttcgacgttgcgcgtgacg

SEQ ID NO: 43080 - DNA, 456 bp, Glycine max
  Clone ID: LIB3093-022-Q1-K1-F7
cccacgcgtccgcccacgcgtccgcccacgcgtccgcccacgcgtccgcccacgcgtccggaaccaccataacatcattctgcccttccctcgcgtttcaacaccgataacccgcaaaaatctccattgatctgcgcctcctgttccatggcaaagctgcctgtggaatacaacggcgactgcgccaccaccgcctcagcatccgcctccgcagccgcggagtctcagagatccattcccacgccgtttctcaccaaaacctttcaactcgtcgacgaccaatccatcgacgatgttatttcctggaacgacgacggatcaacgtttatcgtctggaaccctaccgtcttcgccagagacttgcttcctaaatatttcaaacacaacaatttctctagcttcgttcgccagctcaacacttacggattcagaaaagttgtacctgatcggtgggag

SEQ ID NO: 43081 - DNA, 457 bp, Glycine max
  Clone ID: LIB3093-022-Q1-K1-F8
cccacgcgtccgcccacgcgtccgtttacgcgtccgcccacgcgttcgcccacgcgggcggggccaccataacatcattctgcccttccctcgcgtttcaacaccgataacccgcaaaaatctccattgatctgcgcctcctgttccatggcaaagctgcctgtggaatacaacggcgactgcgccaccaccgcctcagcatccgcctccgcagccgcggagtctcagagatccattcccacgccgtttctcaccaaaacctttcaactcgtcgacgaccaatccatcgacgatgttatttcctggaacgacgacggatcaacgtttatcgtctggaaccctaccgtcttcgccagagacttgctttctaaatatttcaaacacaacaatttctctagcttcgttcgccaactcaacacttacggattcagaaaagttgtacctgatcggtgggagt

SEQ ID NO: 43082 - DNA, 448 bp, Glycine max
  Clone ID: LIB3093-022-Q1-K1-F9
aaaccttattggcgtcgtagcagaactcaaaagttaacatccttaatctcttcaaacacggttgttcatagcatatggaaacgaggatgttgcggctttcgattcaacgagtgaggaagttgaactttctgaggcctcagatctctgctttgggaaggtcccatttgtcaactgctgctgaaccatcttccagtaagagcaatccacctagggttccaaatcttattgggggcagttttgttgactcaaaagcatcaactgtcattgatgttataaacccggcaacccaagaagttgtttcacaagttcctttgtcgacgcatgaagagtttaaggcagctgtatctgcagcaaaggaagcatttccatcatggcgtaacactccaattacaacacgccaacgtgttatgttgaagcttcaagagcttatacgcagagatatggataa

SEQ ID NO: 43083 - DNA, 476 bp, Glycine max
  unsure (1)..(476): unsure at all n locations
  Clone ID: LIB3093-022-Q1-K1-G1
cgggtcacccacgccgtccctaattcttatttcttcatcggtcgaatcttcttcttctaaaaatgccaatctttgtgaaaaccttggccgggaagaacattaaccttggaggggaagtcttccgcccccatcgataccgggaaacctaaaattcaaaacagggaagggatccaacctgaccagcaaaaactaatttttgcgggtaaacaactggaggatggtcgaacctttgccgactacaacatncaaaaggaatccactctccacctcgtccttcgcctcaggggtggcatgcaaatctttgtcaagactttgactggcaagaccatcaccctcgaggtcgaatcctcggacaccattgataatgtcaaggccaagatccangacaaggagggtatccctccagatcagcagaggttgatatttgctggtaaacaacttgaggatggaagaacccttgctgattacaatattca

SEQ ID NO: 43084 - DNA, 389 bp, Glycine max
  Clone ID: LIB3093-022-Q1-K1-G10
ctctaataacatttctaatctcattctccttctgttcaaacactctctctcatggcatcagataagaagattaggatcggcatcaacgggtttggaaggattggccgtttggtggccagggttgcccttcaaaggaatgatgttgaacttgttgctgtcaacgatcctttcatcaccactgattacatgacatacatgttcaagtacgacaccgttcatggccagtggaagcattttgatgtgaaagtgaaagactctaagacccttctctttggtgagaagcccgtcaccgtttttggaatcaagaaccctgaagaaattccatggggtgaggttggtgctgattatgttgttgagtcaactggtgtattcactgacaaggacaaggc

SEQ ID NO: 43085 - DNA, 440 bp, Glycine max
  Clone ID: LIB3093-022-Q1-K1-G11
atttttcttcatcccccaaagtttcaatctttgtattcaattcaccctttctctctctccatggccacttgtgttgatgccccaacccctctttctcggaagcctaacgggtcccaatccgatgatcattccttcaattacatgaaattctgccgacccactttctctgatcgcgttccctgcatacccatttgcaagaatcgtgacactgccttcacacgcgtggaggagtttgacacatgtgtggaggataatgatgatattgaagttgaggttgtggagggtgttgatctttggttgaagattcaagaagaggcaaggttagatgttgatcaagaaccaattttatccagctactatttcagttccattttgtctcacaaatctttggagagtgccttggccaaccacctctccacaaatttgagcagcttgagcct

SEQ ID NO: 43086 - DNA, 438 bp, Glycine max
  Clone ID: LIB3093-022-Q1-K1-G12
ctttcttttcttctcgcagagcgaaatcccaatcccacacaaatggcatgctcagccacctctgcttctctcttctccgcaaaccccacacctctcttctctcccaaatcctccctctccctccctaacaactctctccacctcaaccctctccccacgcgcccttctctctccctcacgcgcccctcgcacactcgccgctccttcgtcgtcaaagcctcctccagcgagcttccgctagttggaaacaccgcaccggatttcgaagcagaggctgtgtttgaccaggagtttatcaacgtgaaactatctgattacattgggaagaaatatgttgtgctcttcttctacccgttggacttcacttttgtttgtcccacagaaatcactgctttcagtgaccggcatgcagagttcgaggcactaaatactgagata

SEQ ID NO: 43087 - DNA, 448 bp, Glycine max
  Clone ID: LIB3093-022-Q1-K1-G3
aaaaagtcaccttcttttcgcaaatccctttcccttttacactctcccttctcttcttcggctccctctccgtctccgcccaaagcggccaccgcgacgacgacgacgacgacgacgcggacgccggaggcgacgccacccccaacctccgtgctcggtccttgattctcgcaaaggtgtggtgtttgatcgttattttttttgctacttttgtatcgggcgtttccccctacattctgaaatggaacgaggggttcttagttctggggacccagtttgctggaggagtgtttctgggaactgcaatgatgcattttctcagcgacgctaatgaaaccttcggggacttaactcgcaaggagtaccccttcgcgttcatgctcgcgtgtgcagggtacttgatgaccctgctcgctgatgctgtcatttcctcggttttgaagaatac

SEQ ID NO: 43088 - DNA, 312 bp, Glycine max
  unsure (1)..(312): unsure at all n locations
  Clone ID: LIB3093-022-Q1-K1-G4
cttcggtcacttatttattatttaggtaaccaccccaaaaaaggaaaggaaaagggaaggaaccggtgccaccaaaaaaggaccaaaaaaaatccaattcatcgatgggggggaaatctgccggggttggaattttgctggcgttgatcgccgccgcttggtgtctgttaactccagcgaggggcgaattcgacgacaatatatgatgagctcctggcgcacgggtcttncggtggggcttcttccaaaagggaatagcgaaagtacttcgatgaaacgcgacgaagcggggaagttcgaaggtgtgggatg

SEQ ID NO: 43089 - DNA, 479 bp, Glycine max
  Clone ID: LIB3093-022-Q1-K1-G5
tcccggcgccacgcgtcgagacaacactactcactagctaacaatttcataagcctgccatggcttcctcgtgtgcttgctctgccattgcagctgttgccatctccacaccaagttcccagaagaatggatcactcttgggaagcacaaaagcttcttttcttagtgggaggaaactgaaggtgaacagttttacagcaccagttggagcacgatccagcactacagtgtgtgcagttgctgagcctgataggcctctgtggttcccaggcagcacccctcctccatggctagatggcagtttgccaggagattttggctttgatcccctaggtcttggatctgatcctgagagcctgagatggaatgtccaagcagagcttgtgcactgcagatgggccatgttgggagctgctggcattttcatcccagaattcctcacaaagattggtatcctgaacaccccttcatggtacact

SEQ ID NO: 43090 - DNA, 375 bp, Glycine max
  unsure (1)..(375): unsure at all n locations
  Clone ID: LIB3093-022-Q1-K1-G6
cgcagaacaacaactnactcactaagctaaacaatttcatcaagcctgccatggcttcctcgtgtgcttgctctgccattgcagctgtngccatctccacaccaagttcccagaagaatggatcactcttgggaagcacaaaagcttcttttcttagtgggaggaaactgaacgtgaacagttttacagcaccagttggagcacgatccaccactacagtgtgtgcagctgctgaacctgataggcctctgtggttcccaggcagaacccctcctccatggctagatggcagtttgtcaagagattttggctttgatcccctacgtcttggatctgatcctgagaccctgaaatggaatgttcaagtacagcttg

SEQ ID NO: 43091 - DNA, 455 bp, Glycine max
  Clone ID: LIB3093-022-Q1-K1-G7
cccacgcgtccggggagtttgaaaaagctgatgatgttgatgctgagaatcattctagtcaggctaaaaagcaaagaaatgagtgtgaaagtgatgccttgacaatgcctgaggatagaggtttatgctctattgtgactggtattgctgctgaacatgtggaggaaaatttagaaacgaaagaggttcatgaccaacctgccagagaggaacttcccaaagattcacctagtgtcctttcacaagaaatggataagcatcttgattctaaagggtcaaaattgattgccatggaagcggaggaggctgaggagtgcacctctaccactgcagatgcttcttccatgtcttctgcagctgtgtcagatgcagatgctaaggttgaatttgatttaaatgaagggctcaatgcagatgatgggaaaagtggcgagttcaactgcagtgcacctgct

SEQ ID NO: 43092 - DNA, 449 bp, Glycine max
  Clone ID: LIB3093-022-Q1-K1-G8
gagacactcatgtgctcttttcagatactaaggcctgcggaacacagaaagcctaagtttgcttttgggagcaaaactacattcaaggcaattcttgatgctgctagagtatgaccccattgagctgacttagatcaataaagtttgtaacatagcaaaaaattgacatggacaaattgatatccgtgttcactccaatgtgaaggaagggtattacaactaccaatataatgaagaacgtaggaatattatctctgctttttcttttcaagtatagctgaaagtgtttttctgtgctggcgcattctcaatatgtaccatgttgtcaacacagatttagggggtcaggttccatttttcttttctttcagctttttgatgtgagagacagttatgcaattctccttttcatatctcctgttgtattataaatggcagcatacttttcg

SEQ ID NO: 43093 - DNA, 461 bp, Glycine max
  Clone ID: LIB3093-022-Q1-K1-G9
aaaggagctcatcaaatacaagggatatcaggttcctccagcagaactagaggccttgctactgactcatcctgctattttagatgccgctgttatcccgtatccagataaggaagctgggcagcatccaatggcatacgtggtgaggaaggctggaagtagcttatcagaaactcaagttatggattttgttgcaggacaggtggctccgtacaagcggattcgaaaagtggcatttatttcctccatacccaaaaatccatctggcaaaattcttcggaaggatctcatcaaactcgcaacgtctaaactctgaatagatgagctttttcgtaatatattttttctatcggagttggacaagtgaggaaataatctttagctccttttttgctgtaattttctggcttgtttacttttgctgctttcatattatctgttctttgttcaacagtctattg

SEQ ID NO: 43094 - DNA, 372 bp, Glycine max
  Clone ID: LIB3093-022-Q1-K1-H10
cccacgcgtacgctctatataacccttcacatttactctattctttatcttaaaggacttttgcatggaggaaagcaagaaacgagtccgggacgagtccaagtactcacccgagttccaaacttatctggtcgactctaccgagtctgaaagttaacgggtcgactcacctgagtctaagattcggcgagttgactcgttcgagtctcaacttgactcggaccttgacttggaagtgcgtatacaagacgacattgttaacatacttgacgacgccgataatgtgcctgagcgtgactcggtgcaaggtcttgactcagtgatcaaaagcttcgaagatgagataaacgcttctggttcggattctggttc

SEQ ID NO: 43095 - DNA, 379 bp, Glycine max
  unsure (1)..(379): unsure at all n locations
  Clone ID: LIB3093-022-Q1-K1-H11
cccacgcgtccgcaaacatcatgggcatcagcagcaggagcaggaaccgcaatcacctcatgggggacaatgatctgtttatgttgtaatggttcatggcttgctctttgaggatgttttaacggatctttcagctggcaagtaatcgtgtttgtaggagaagccttggctggtttacttgctgcatttgtgcaagctctgaagaagatggcttcatttttataattttatttagttttctttttcctggcatattaagattttttagtgtgtaaaccttcgaacccaattgtgcgcttgtaaaattgttactttgaagaaacaacttttgaacgtttaatacattatcgacgtgcatgcatttncttgaaaannaaaa

SEQ ID NO: 43096 - DNA, 441 bp, Glycine max
  Clone ID: LIB3093-022-Q1-K1-H2
atcgaacatggctaagtatcattcaagtgggaaaagctcttgcatgactgctatagccttcctgtttatccttctaatcacttatacaggcacaacagatgcacaatccggggtatgttatggaagacttggcaacaacttaccaacccctcaagaagttgtggccctctacaatcaagccaacattcgcaggatgcgaatctacggtccaagcccagaagtcctcgaagcactaagaagttccaacattgagcttttgctagacattccaaatgacaacctcagaaacctagcatctagccaagacaatgcaaacaaatgggtgcaagacaacatcaaaaactatgccaacaatgtcagattcagatacgtttcagtgggaaatgaagtgaaacccgaacactcatttgcacaatttctagtgcctgcattggaaaacat

SEQ ID NO: 43097 - DNA, 120 bp, Glycine max
  unsure (1)..(120): unsure at all n locations
  Clone ID: LIB3093-022-Q1-K1-H3
aaaaaaaaaaaaaaaaaaaaaaaaaaaaaaaaaaaaaaaaaaaaaaaaaaaaaaaaaaaagggggggggaaantggggggggtccgtttaaaggatcaaagtttatgtaacggggggggg

SEQ ID NO: 43098 - DNA, 475 bp, Glycine max
  unsure (1)..(475): unsure at all n locations
  Clone ID: LIB3093-022-Q1-K1-H4
tcgcccacgcgtccgccaccctccgccacgcgtccgcttttttgctattttatccctcctttgatgattatcatccctttcgtatctctatgtttagggggaggtaacagtgcatggggtgtagaagaataggggaaaagatgagaaggaggcactgctacttggtaattaaggttgttgacagaagatagagagcacagatgatgatatgcatattatataatatatagcagggaactcatgatgaattgtgcatcttactcctttgtgctctctatacttctgtcatcaccttcagcctccatttctcactattccccctctacaccaactgttagctagtgtagtatatacttcgtttctatctactggaactataattcatatataaattactttaataagcctgttcatatataataatntgatgttcaccctgngtatttattacctagctagctagttttctcttcta

SEQ ID NO: 43099 - DNA, 449 bp, Glycine max
  Clone ID: LIB3093-022-Q1-K1-H6
tcaatgggaaatcaggtcatgattctgctggccaatctcccatagtgagtgtacctaaaagtacttcagctgctaaggacactggccatcaagaaaatgtccaacctcaagcagctgttgttgcagcagcatcctcccctagtcaaacctctggctcagttactaccactgaccaaggaaagtctgtgtcaagttctgatcaacttcaaacttctgtatccaatgtccattcctctttggatcttgtagtagcatcatctgtctcccggaatcctggtgtgagtggtgcaattagtagggaagttgggagcaactggatatctgccggaccaaatcatgttaaaggaaataaagttggtcatgaagttaatgatttatcggcatccaagaatgaaaaatatgggtccatgaattcaacgagcaaaacaaatgccccacagaagtcaaat

SEQ ID NO: 43100 - DNA, 449 bp, Glycine max
  Clone ID: LIB3093-022-Q1-K1-H7
cggatccatacactcccagaaaacatttttcattctatttctcagcaccagtcagcaacaacaacatccctttcctttccacaagacaccaaacaaagttcacagctttttttgttctttcacctcgattcacgaactgggtcatcctctgattgtggattattggatttcattttgagctacaccacacccccaagactttgactttcaacccaaaaccagctctttgtggtttgccaggttgccagttactgtgatatcataatggattccccacaatctgttgtgtcacccttcaagagctcagtgttgggtgagggtgagaagcacaagtctgatgttttctcaagaaactctagtcctttgtccaaggacattgaagtgaatggcaaggaagtagtcatgtcaaatgtagaggagtttcttggagtgcttgatgtttacataca

SEQ ID NO: 43101 - DNA, 325 bp, Glycine max
  Clone ID: LIB3093-022-Q1-K1-H8
aaaaacgggggcggcccacgcgtacaaaaattcatacacttccacaaaacatttaattttcaactcacaataaacaatcagcggctgcggcatacttaacctttccacaaaacaccaaacaaaaattacatctttttttgtactttcacctatattcacgaactgtaccatcctcttatttaatattatcgtatttcattttaatctacaccacacccccaatactttgacttttaaccaaaaaccaactcttttattaattgccatttaaccagttactattatttcaaaattcattccccacaatctgttaagttacccttca

SEQ ID NO: 43102 - DNA, 442 bp, Glycine max
  Clone ID: LIB3093-022-Q1-K1-H9
tgagaaccaaacacgacgctgcgccttgtgtagttgcccaacgccgcgccaccaggtttttccatcaaaagcttcttcttcttcttagaatgtttacttttatgctttttctgtggtatgctatctatcaatctcgttgtatgccttttctttctgtttctgctttctctttccataggatatggtgtttcttcaattgattctgctctaagattctctgtcaacaagtttctttcatttaggaaccgattcatgcctctttaggcacatgaacactttttttttttttttatttaggattttttcaatgaaataaacctaagcatattttgagcagtagggttttttttttttttttatccacaggagtctaagatagtttaaggggacttaacttacgcaccatgtgtttgctcaatcaattgagttagacctccttaac

SEQ ID NO: 43103 - DNA, 425 bp, Glycine max
  Clone ID: LIB3093-023-Q1-K1-A1
gtcaagtctggatatggagcttcgaatgtttcagatcattgatgatgatgatcagcaagaagcagagaagagacctgagttggtatccattggatggcttctggattattttattcatgagctttccagcagaaataattttgagtttctacaagctgttatgaggctatttttgaagatccatggtgagacaattcggcagcagtcatgcttacaagaaaaggcaaggaagcttctagatattcaatgcatggtatggcagagagtagataaattatttcaaagttcgaggtgtgtgattgcctttcttagtaattcccaaatttaggtgacaaaccttcaacttgcaaccctcgagagatagcaaaggcaacttgtgaggtcatgtatttggtttggacttttcattggattgatagaaaagt

SEQ ID NO: 43104 - DNA, 440 bp, Glycine max
  Clone ID: LIB3093-023-Q1-K1-A10
agaaaaaagtcacagcaaagcagaaaacagattcctcaaattttagtctcaaactaaaacttggtatcaacagaaaaaaaaagaaccaaattttctatgggaacatccatatggaattgaaatgaagggaaggcataaggaggagaagaacttactttgcaggtggttttgcagggtcgttggctcgagaaggaggaggaggtgcagcagtggtagtcttctctgtagacgcagatgaaggtgaatctgaggcagagtcatcactggaagaaagattaagcttcaaatcaacagaagcagtttcagagaagcctctctttccaccactgcccttgaccgttgttgactcgttgtgatcactcgcagacccgccagggaggccgagtcgcaactcggtttcttcgaagttaatcatctcctcgtgcttggttttcttttct

SEQ ID NO: 43105 - DNA, 439 bp, Glycine max
  Clone ID: LIB3093-023-Q1-K1-A11
ttcgtcaattccaacaacaccacaatgggaagaagaccggcgaggtgttacccgcggataaggaacagaccggacccgaaatcccttttctgccgcggcgtgccggagccgaagatccgaatctacgacgtgggaatgaagaagaaaggcgtggacgagttcccgttctgcgtgcacctggtctcgtgggagaaggagaacgtctccagcgaggctttggaggcggcgcgcatcgcatgcaacaagtacatggccaagttcgccggaaaagatgccttccacctgcgcgtgagggtgcatcccttccacgtgctccgcatcaacaagatgctatcgtgcgccggggccgacaggctccataccggcatgaggggcgcctttgggaagccgcacgggacgtgcgctagggttaacattggtcaggtgctgctctcggtga

SEQ ID NO: 43106 - DNA, 440 bp, Glycine max
  Clone ID: LIB3093-023-Q1-K1-A12
ctgcattgcttaaacctcatgaaagaatcatggcacttgatcttcctcatgggggccatctggctcacggatatcagactgataccaaaaagatatctgcagtctcgatattttttgagacaatgccatatcgattgaatgaaagtacaggatacatcgactatgaccagatggagaaatctgctacactcttcaggccaaaattaattgttgctggagctagcgcttatgcacgtctctatgattatgaacgtgtacgcaaggtttgcgataaacagaaagctatactattggcagatatggcacacatcagtggattggttgcagctggtgtcatcccatcaccttttgattatgctgatgtagttactaccacaactcacaagtcacttcgaggaccacgtggagctatgatattctacagaaaaggggttaaagaa

SEQ ID NO: 43107 - DNA, 442 bp, Glycine max
  Clone ID: LIB3093-023-Q1-K1-A2
gaaaattctcccagttttaaacttgcccagagaaactttgttgaaagtatggcaggatattccctggtgtgctactttctgcaggtgaaggataggcataatgggaacctcctattggatgaagaaggtcatatcatacatatcgattttggcttcatgctttccaattcacctggtggtgttaactttgaaagtgcacctttcaaattaacacgtgaacttcttgaggttatggattctgatgctgagggtgttccaagcgagttctttgattattttaaggttttatgcattcaaggcttccttacttgccgcaagcatgctgagcgcatcattcttcttgttgagatgttgcaggattcagatttcccatgctttaaaggtggtgctcggacaatacagaacctacgaaagcgattccatctcagtttaactgaagagc

SEQ ID NO: 43108 - DNA, 443 bp, Glycine max
  unsure (1)..(443): unsure at all n locations
  Clone ID: LIB3093-023-Q1-K1-A3
ctcagtcctacgatacgattctcttccgcctcccttcccttcaactccacggcgcanatccgaggagtgtgggaaaccctaattcattcctctttgcttcttctatctctattcctctaacaccagtgatggcaggtttggctccagaaggatcgcagtttgatgctcggcaatatgattctaagatgaatgaattgctttccgccgatggacaagaatttttcacttcatatgacgaagtctatgatagttttgatgcaatgggccttcaagaaaatcttctgagaggcatatatgcttatggttttgagaggccttctgcaatccagcagaggggaattgttcctttctgcaagggtctggatgtgattcagcaggctcagtctggaactggaaagacagcaacgttctgttcaggaattttgcagcagcttgactatgga

SEQ ID NO: 43109 - DNA, 415 bp, Glycine max
  Clone ID: LIB3093-023-Q1-K1-A4
gccacgcgtccgtgaagagggacatatatggtcctactactgtggagattgtgactttgatgtccatccggaatgtgcattggaaaaggaggacaaagaaggaagcaaagatgatgccaaggaagaaaagtccaaagatgaatgggtttgtgatggagaagtctgcaaaaaagcctaaaagctgcttgtcaagggttttggtgatgaataatctgaatatttggatgaagtattgtgaacgcccttcctagtatgttttatgagttgtgcagaataatctgaatatttggatgaggtattgtgaacgcccttcctagtatgttttgtgagttgtgcagaataatctgaatatttggatgaggtattttgatgttaattatggtctttaatatatatggtataatggtttactctt

SEQ ID NO: 43110 - DNA, 442 bp, Glycine max
  Clone ID: LIB3093-023-Q1-K1-A5
aaagaaatggcttctgttctgctttcagcactgtatgctgatgtcatcagccctgcacagagtagggatgggttttttatgcttattgaatcttctgatgatcttgctgtggatatactggatgcagttgacatccttgcattattcttagcacgagctgttgttgatgacattcttcctccagcctttcttgccagggctaggaaggctcttccagaatcttccaagggagttcaggtaatccaaactgctgaaaagagttatctctcagctccacaccatgcggaacttgtggaaaggcgatggggtggtagcactcacataactgttgaagaagtgaagaagaagataggtgatttacttagagaatatgtggatagtggtgacacattggaggcctgtagatgtatacgtgagttgggggtttcattcttccatcatg

SEQ ID NO: 43111 - DNA, 434 bp, Glycine max
  unsure (1)..(434): unsure at all n locations
  Clone ID: LIB3093-023-Q1-K1-A6
ctcagcgatggtgttggatccgccgcccttcctcccgtcgacaaagtccgcctacctccaaggcggcgacgccacggccttcgatgaggaagatctctacagccgcctcaaatccctagtgcgtcagctcgagttcgtcgacatccaggaggagtatgtgaaggacgaactgaagaatctcaggcgcgagctcctccgcgcgatggaggaggtgaagcggatccagtcggtgccgctcgtcataggccagttcatggagatgatcgaccagaacaacggcatcgttggatccaccgcaggatccaactactacgtcagaatcctcagcactatcaaccgcgaattgctcaagccttctgcttncgtcgcgctccaccgncactccaacgcgctcgtcgaggtgctgccgccggaggccgactccagcatctcgc

SEQ ID NO: 43112 - DNA, 439 bp, Glycine max
  Clone ID: LIB3093-023-Q1-K1-A7
gcgttcgatttatttacaacaacaagggcttctgtgcctgaaccaaaaatctcccttcgggccttatggttcggggcgtccttcaccatcattgcgcatgcaattgttcctcaaaacgaaaccttcaaatttgagaactcaggtgaacttggaccctacatcgttgagtacggtgcagattacagaatgataagcatcttcaactctccattccaagttggtttctacaacaccaccccaaatgccttcactctagctttgcgtgtagggctccaacgctcggagcacctatttcgttggggttgggaggccaatagggccaacccagttggagaaaatgccactttctcacttggcactgatgggaaccttgtgttggcagatgctgatggcagaattgcatggcaaactaacactgccaacaagggtggtgtgggct

SEQ ID NO: 43113 - DNA, 433 bp, Glycine max
  Clone ID: LIB3093-023-Q1-K1-A8
tgggagtgggaagtgtttaaaaatttattctgggcatgtgaatagagtatactgcataactgccacattttctgtgactaatgggaaatatattgttggcggttctgaagatcactgtgtttatatatgggatcttcagcagaaattggttcagaaacttgaaggccatacagacactgtaatatctgttacttgtcacccaacagagaacaaaattgcttctgctggtctcgctggtgatagaactgtgagggtttgggtacaggattcctgaataatatcgaaactgtatggggatgttgtctttcttctagatttcaactacatgcctatgcatgtctgatttcaatattagacactattaaacatacaagttgatctcatgttggcactagttccgtttttggtattatttgtaaatatagtttttcat

SEQ ID NO: 43114 - DNA, 434 bp, Glycine max
  unsure (1)..(434): unsure at all n locations
  Clone ID: LIB3093-023-Q1-K1-A9
gtaagtcctatcagtttccacgtaagtctccaaaatcagaaacactcgaagctgttcaatggagatagatggcaacgttctcgcggccaagtcgctggtgcgcttcggtgtgcagcacatgttcggcgtggtggggattccggtgacgtcgctggccaaccgcgccgtctcgctcggtgtcagattcattgcttttcacaacgagcagtccgcgggctacgccgcctccgcctacggctacctcaccggccgccccggcgtgttcctcaccgtctccggccccggctgcgtccacggcctcgccggcctctccaacgcctncgtcaacacctggcccaccgtcatgatctccggctcctgcgaccaaaacgacgtcggccgcggcgattntcaagaactcaaccagatcgaagccaccaaacccttcaccaaac

SEQ ID NO: 43115 - DNA, 440 bp, Glycine max
  Clone ID: LIB3093-023-Q1-K1-B1
ctttgacaaaccggagtttgccacggtcaacattcagcgtgatctgttctatggttacgatactctcatggagaatgtctctgatccttctcacattgagtttgctcatcacaaggtcacgggaaggagagacagagccaaacctctgccattcaagatggattctcgtggttcatggggcttctctggagctaatgaagggaacccacagatcagtgccaagtttgttgcaccatgttatatgatgaacaagattgagattgataccaaactccctgtagttggtgaccagaaatgggtagtatggatatgttccttcaatgtccccatggcacctggtaagactcgctccattgtttgcagtgctcgaaacttcttccagttctcagtgccagggcctgcctggtggcaagtcgttcctagatggtatgagcattgga

SEQ ID NO: 43116 - DNA, 441 bp, Glycine max
  Clone ID: LIB3093-023-Q1-K1-B10
tgacattttgcgtgaaatttgaatacatatcagattcaatttttatgcacagataaaatttggacagaccttcaaagcaagcttcttcatctggttcattgctctaaaccatttcatcctaattaaaacagcactgtctggatgcttgtctgatgcttcaccaccttccttcaaccaagggtgttcgaaaaatatggaatggggtgatgacagcatcaatcagtagttaaactatcagaatgcaaatgggtgaaaatagttaccaagggcatcagcagttgtaatgcattccttagggtcacaagtcagcatttttctaaccaaatcttttgcagattctgaaatagagggccatggctcgttgtccatatctaacattccttccaaaatagcatcaaacatgcctttttcggtttctgaagttgaccaattcattgatat

SEQ ID NO: 43117 - DNA, 436 bp, Glycine max
  unsure (1)..(436): unsure at all n locations
  Clone ID: LIB3093-023-Q1-K1-B11
cactgacacggcaactagcacccctgctgtagttgctgccagcaatagcagtggctccactggagtctcatcttcatctcccacaacttcatttttcaaatttggatctaccccttcagcaccaacaagtttacttgtgtcatcttctggctcagaaccgctagaaaacaagagtggcacagggagtgtcatttttggaagctcttctgctgcaattggaagcacagggagtgacatttttgggtttagtaccccagcaatgaccggaaatagccagtctctgggttctgtctttggcactacaagtgggtctgtccctggtactcangtatcttctggtactagtggtttttccacttcatctgagagtcagtcggtggcatttggttcatctgcatcagcctcattgtttgggttgactgggagcacaactttt

SEQ ID NO: 43118 - DNA, 435 bp, Glycine max
  Clone ID: LIB3093-023-Q1-K1-B12
cgacaatctggtcattgagggttttgtcaaaacgacgtggccagctcaaacaggccgtaacagctatggtgcaacaagctatgcaatatattgatgagacaccagatatcgaaactcgcatagaactcatcaaaacgttgaacagtgtgtctgcagggaagatatacgtggaaattgagagagctagattgatcaagaaacttgcaaagattaaggaagaacaagggcttatagctgaagctgctgatttgatgcaagaaattgcggtggaaacttttggtgccatggccaagactgagaaaattgcattcattctcgaacaagtccgtttgtgtctagatcgccaggattatgttcgtgcacaaatactctcaagaaagattagcccaagagtatttgatgccgatttatctaaggaaaagaaaaagcctaaag

SEQ ID NO: 43119 - DNA, 445 bp, Glycine max
  Clone ID: LIB3093-023-Q1-K1-B2
gtttttgaagtatagagatggcagagacattcctatttacctcagagtcagtgaacgagggacaccctgacaagctctgtgaccaaatctctgatgctgtcctcgacgcttgcctcgaacaggacccagacagcaaggttgcctgcgaaacatgcaccaaaaccaacttggtcatggtcttcggagaaatcacgaccaaggccaatgttgactacgagaagatagtgcgtgacacctgcaggaacatcggctttgtctcaaacgatgtgggactggatgccgacaactgcaaggtcctcgtcaacattgagcagcagagccctgatattgctcagggtgtacacggccacctcaccaaaaaacctgaagaaattggtgctggtgaccagggtcacatgtttggctatgccactgatgaaacccctgaattgatgccattgagcca

SEQ ID NO: 43120 - DNA, 437 bp, Glycine max
  Clone ID: LIB3093-023-Q1-K1-B3
gaaaaagatatctagtggttacaacaaggtaatggtgacggtcgaggatggcaggaactttgttgctgatgctgctatcataactgttcctattggaatcctaaaagcgaatttgattgaatttgaaccaaaacttcctgattggaaggtttcagcaatttcagatcttggtgtgggcaatgaaaataagattgccctaagatttgacaaagtattttggcctaatgtagaactcttgggcactgttgctccgacctcttatacctgtggctattttctcaatcttcacaaagcaacaggccatcctgttcttgtctacatggtagctggaaggttcgcttacgacattgagaaactatctgatgaagcagctgcaaattttgtgatgcaacagctcaagaagatgtttccaaatgcttctaagccagttcagtatc

SEQ ID NO: 43121 - DNA, 447 bp, Glycine max
  Clone ID: LIB3093-023-Q1-K1-B5
attttataatccttctccatcttttctcttgagccttccttcccacaccaatcttctccacgacttcacgcaaccttaaatccaacccaaaaccaaaagaaacacacacactcagaaacaccaagagaaggtacttgtttttttttcttttcttttcttttctctgttctgttctgtcacaacttagtacttcacatcctttgctttgttatcttcttcacatgttgcttttgttgcttgtcttgtcctttgagctgagtgatgattgattccctttcagtagcagaaagatgggttgccgttagtttctatgactttcgatgttatgtatgtgtgagtgtgatagaaagttagaaactacaacaactcatgtttttcttttaaacctttttatttggtatgtttttcttcttcttcctagctagttaatttgatctcttcctgatt

SEQ ID NO: 43122 - DNA, 435 bp, Glycine max
  Clone ID: LIB3093-023-Q1-K1-B6
ctctcctcctcgatcccaattccactagggattcaattccgatgcgattccgagcttgttagatccacgacaacgtttcgtttcccagattcttttgtaaaaaaaaataatcttcctttgcccaacaggtaagttggaaaaaaatggaccatgacaagactgggtgccaagctcctcctgaaggtcctatattgtgcatcaacaactgtggattttttggaagtgcagctaccatgaatatgtgttctaaatgccacaaagacatgttgctgaaacaggagcaggccaagcttgcagcatcatccattgggaatattatgaatgggtcttcaagcagcactgaaaaggaacctgttgttgccgctgctgctgctaatgttgatatcccagttattccagtagagcctaaaactgtctctgtgcaacctttatttg

SEQ ID NO: 43123 - DNA, 334 bp, Glycine max
  Clone ID: LIB3093-023-Q1-K1-B7
tgctctctgagcttgaaaaacacgctacgaccggattctttcttttcaacacccgaattcgggttgactctcttgcaatctcattcctcaagatcgctttcgctgcttactcaggaattatgtcttttccgcggcattatcaagctgaagatcggggtctacatattggttactggtccaccgttgatggaaacacctatcgtgaccacaatccgaaaagaagcatcgaacaattattataacaagaattgttacattgacaatgataaccgcacaactatggctgaccattttaagttctacaatgctgatcatgctaactatgctagatatg

SEQ ID NO: 43124 - DNA, 406 bp, Glycine max
  Clone ID: LIB3093-023-Q1-K1-B8
gaatacaaatatatctaatcctcacaataaaagccggtaacagagtttactagatagaagagaatcttaaaattccaattccatataataaaaacttcagtgtccttaataaaataggcaatttggaaaacacttgagaaaatggaaggacaaactaaaacggcccagtacatccacaattcataacagacatgaatgcctaaaatcccagtaccaaagagatattagcaacaaacaccttctcccttcaaaaagatatggaggagaagttcaattctaattagcagtaaaatatttttactggtcatccggtttcggcgctgcttctttaatttcatctgctccatcgtcctgcatgtcagaggtccaaagtgtgaggttatcacgaaggagttgcatgatcaaa

SEQ ID NO: 43125 - DNA, 425 bp, Glycine max
  Clone ID: LIB3093-023-Q1-K1-B9
gccgagattccgtgagttgcaaaaatgaagacgattctttccaccgagaccatgaacatcccggacggcgtgagcatcaaagttcatgccaaggtcatcgaagttgagggcccccgcggaaaattggtgcgagacttcaagcatttgaatctcgattttcagctcattactgacgaaaacggtaaaagaaagctgaaaatcgacgcgtggtttggttctcggaaaacatccgccgccattcgcaccgccttgagccacgtggagaatcttatcaccggcgtcaccaagggctaccgctacaaaatgaggttcgtttatgcccattttcccatcaacgcaagcatcggcaacagcaacaagtctattgagatccgaaatttccttggcgagaagaaggtgaggaaagtcgacatgcttgatggcgt

SEQ ID NO: 43126 - DNA, 424 bp, Glycine max
  Clone ID: LIB3093-023-Q1-K1-C1
ctcacacacacacaaagtgactcttccgatgatgttaatcggcgacggtgccggttgccgggaagtcctcgtcggcgttaaattagatcctcgcagccgcgaattgctgacgtgggctctcgtcaaggtcgccgagcccggcgacctcgtcattgcgcttcacgtcctcgactccatcactgagggaacggcatcgctgttatctctcgtgaagacgttcgattccgttctcggcgtttatgaaggcttctgcaacctaaaacaggttggtctgaggcttaaagtgtgtcgcggaggttcggtaaggaaggcgttggtgcaggaggcaaaggcgtttggcgtttccaccgtgattttgggaacttcgaaatcttatcatactattcgttcttccgcgtgggttgcgaaatactgcgcaaagaaa

SEQ ID NO: 43127 - DNA, 439 bp, Glycine max
  Clone ID: LIB3093-023-Q1-K1-C10
ggccgattgttctatgttgaaaagactgaccatcaatgatgctatacttggcaggggtattgaggagatatcagtcaatcacgacaggctgtgtcatctccaattgacaaagtgccgtgtgatgcgtatagcagtcaggtgcccacaacttgaaactatgtcattgaagcgcagtaacatggcacagactgcgctcaattgcccccttttgcaagagcttgatataggctcttgccacaaacttcctgattctgctattcgttcagctgttacatcatgctcgcaattagtttctttggacatgtctaattgttcgagtgttagtgatgaaacattacgagaaatatccatgaattgtgctaaccttagttttcttgatgcatcgtactgccccaacctattcttggagactgttagactgccaatgttaacagttctg

SEQ ID NO: 43128 - DNA, 444 bp, Glycine max
  Clone ID: LIB3093-023-Q1-K1-C11
aaaaaatcgtagttggaggcgccgcactccactccactccaatcaatcagatactagcgatggggaggaagcgaaaggtagcaccgaaatcttctgtatccgccgagcccccgctgaagcaacaccaaccaaaacccgaaaatgccgctcaggaatacgaagaagaggtcgaagaggaagttgaggaagaagaggtagaggaagaggtcgaagaggaagaagaagaagaggaggacgaagaggacgaggaagaagaagaagaagaccaaaaagaccaataccagcaccaacaacaacagcaagacgaagacgacgacccgatctccaagcttctggaaccgttgagcaaggaccagctcctcatccttctctgcgaggcggcggccaagcaccaagacgtggctgagaggatccgaagggcggccgacgaggatccggtgcacc

SEQ ID NO: 43129 - DNA, 395 bp, Glycine max
  unsure (1)..(395): unsure at all n locations
  Clone ID: LIB3093-023-Q1-K1-C2
accaatcgtccaatttattgccaagcagcgggcatagtgcaggtgatactccaccacataagcaatctgcatacgatgaggcagctgaatatcaagctatatctgtcataatgcctgacctgccttttgagcaactggttactgaaattcacacgaggatccatgctacgtctgctaccatggataccaacattgacagcaacatgtcaggtgacattgctccaaccaaggatccaagcggcaagcttgatgacatagatcatgcgatcgatcaaccgaacattttgattaatcctctgcatgctgcacaggctcattctcaggatagctcgacatctgctcactaaactgcanactgtactgaaactgacatagtgcatgagctgctgcatgtc

SEQ ID NO: 43130 - DNA, 443 bp, Glycine max
  Clone ID: LIB3093-023-Q1-K1-C3
gctctcttggactcagttcagtttcacgaccgatcctacaatggcgacagtcacgttttcggtttccggtaaaaccctaactctaccttatcaccccaaaaccccaatctccaactttaccccggtaacgaatcttcgcctccctccttctatcgtgacccgaacccgcaattgtaaccggattcgggcggcgctggatggggatttctcggcgaaaaggagcagcagcagcaacaacaacgaccagagggagacgataatgttacctggttgtgactacaaccattggctgattgtgatggagtttccaaaggaccctgcacccacccgtgaacagatgattgacacgtacctcgacactcttgccactgtcttgggaagcatggaggaagctaaaaagaacatgtatgcctttagcaccaccacttacactggatttcagt

SEQ ID NO: 43131 - DNA, 446 bp, Glycine max
  Clone ID: LIB3093-023-Q1-K1-C4
agaatccataaaacacacaaaaactcagggtagggcagagagagagagagaaatgggaggttgggctatcgcggtgcatggtggcgctggtgtggaccctaatcttccactcgagcgtcaagaagaagcgaaacaacttctcacgcactgtctcaatcttggaatctctgctctaaattctaatcttcccgccatagatgtcgttgaacttgtggtgagggaattggaaacggatccgctgttcaattcgggccgtggatctgccctgacagaaaaaggaacggtggagatggaggctagcatcatggatggtccaaaacgacgatgcggcgccgtttcgggtcttaccaccgttaagaacccgatctcgctcgctcgtttggttatggacaaatccccacattcctatctcgccttctccggagccgaagaatttgctaggcaac

SEQ ID NO: 43132 - DNA, 448 bp, Glycine max
  Clone ID: LIB3093-023-Q1-K1-C5
cgacttgttcacatcaagtgcaacagtgagagctttaccttgtgggcattacatgcattcatgttgctttcaggcatacacttgtagccactacacatgtccaatctgcagcaaatcactgggagatatggcggtttactttggtatgcttgatgctttattggctgctgaggagcttcctgaagagtacagggaccgctatcaggatatactctgccatgactgtgatagaaagggcacttcacgcttccactggttatatcacaaatgtggatcttgtggctcatacaatacccgggtaatcaagagtgaggcagcaaattctagctgcctttagtatgcttattttttgtaatgaaagtacagagcttgtaaatatttgtatagccaatccaattttccccaaaccaggaaactggttacctttcattttatacacaatgcgagt

SEQ ID NO: 43133 - DNA, 299 bp, Glycine max
  unsure (1)..(299): unsure at all n locations
  Clone ID: LIB3093-023-Q1-K1-C6
cttattccangatctatttacattacctgcataactaactcgagcagtattactaaagagggcggatgagaaggaagattttgggttgcgtctacacttgtgctatcctgaaaaccctggaacttatattgatatcattctagtttgatcttatgattctaatcacttgcttcagaaaccctatcggcacgaccctgttagttcttaagcttgaatatcactcttttatggaatccaagtgaaccgtgtaccttttgcggtcgatagctaacaggaatcttgtgtgtcatctgcaaaca

SEQ ID NO: 43134 - DNA, 434 bp, Glycine max
  Clone ID: LIB3093-023-Q1-K1-C7
ggggaaacgaaatctgtaaattcacgtggaataccatctgggtcagatttggggggaggcgttgcagcatcttctgttcctggtttatctccaagttcatcagtttgttcactgtcttctgaaaaatcaactctgaatcccaatgcaaaggaattcaagcttaaccctaatgcaaagagttttattccatcgcctgctcggcctcccactccagtgtctgatggttccttctattttccaactaacgtaactactgtaccaagtatgccaggcatgcccgtgggtattggaattggacctacttttgctgggccacaacctatcatatataatcctcaggtagcacaaatgccgtctcaaggatattttcatccgaatgcaccccagtatggacagcttcttggtcatcctaggcaatctttatacatgccgag

SEQ ID NO: 43135 - DNA, 437 bp, Glycine max
  unsure (1)..(437): unsure at all n locations
  Clone ID: LIB3093-023-Q1-K1-C8
acggtatttccctacctctcccttcaagatgcagatcttcgtcaagaccctcaccggcganaccatcacccttgaggtggaaagctctgacaccatcgacaacgtcaaggccaagatccaggacaaggaaggaatccccccggaccagcaacgtctcattttcgccggaaagcaacttgaggacggccgtacccttgctgactacaacattcagaaggagagtactcttcacctcgtcctccgtctccgtggtggcatgcagatcttcgttaagacactcaccggcaagaccataaccctagaggttgaaagctccgacaccatcgataacgtcaaggccaagatccaggacaaggagggtatccccccggaccagcaacgtctcatcttcgccggaaagcagctcgaggacggccgcaccctcgccgactacaaca

SEQ ID NO: 43136 - DNA, 330 bp, Glycine max
  Clone ID: LIB3093-023-Q1-K1-C9
cccacgcgtccgcccacgcgtccgacaccatgtggttgaaagcctgctgggatgattgttgtggttttatgtgtatatatattggtgttgtggttgttatactgaagtggaggagagggtgaaaaagttacctgatgcacattgagacgacatcgattgagtccatgtgcaaaattggtttttgtttgtgtggaagtctctagcttcctgtgatgtaatgttataatattaccttgtagttgtaaggagaaagcaatttggcgctttcttataagaaaacaacccaatgtaataacataaggtatattaattcaatcatgttttgctttt

SEQ ID NO: 43137 - DNA, 445 bp, Glycine max
  Clone ID: LIB3093-023-Q1-K1-D1
acgctttcttgcaaaaatacggtatcaagttgaacgatgcgattctcgctgaggataagcacaaacctgtgtatgaagaattggctaacaatcctaatgtggagtacattgctggaggtgctactcagaattcaatcagggttgctcagtggatgcttcaagcaccaggtgccacaagttacataggttgcataggaaaggacaaatttggagaggagatgaagaagaaatgtacacttgatggtgtaaaggttaactattatgaaatcgacaatacacctactggaacttgtgctgtttgtgtggttggcggtgaaaggtcccttgttgccaacttatcagctgcaaattgctataagtctgagcatttgacgagaccggaaaattgggcattagttgaaaaggccaagtatttctacatttctggctttttcctcactgtatc

SEQ ID NO: 43138 - DNA, 430 bp, Glycine max
  Clone ID: LIB3093-023-Q1-K1-D10
catgcgcccccctataaaaccctctctcatattattattattattcattccagggtctcttgcaccacttgaagattctccttttcaaatttcaacctttttcccccaaaactaacaaacccctcttcttctcaatcattgcatggctcttcactgattctataataataatttcagattcgtttttcgttttttgttaccatggagttgatttcaggtctaccagaggacgtagcccgagactgtttgattagggttccctatgatcaattcccggcggttgcttcagtctgcaaaggctggagcgcggagattcactcgccggactttcaccgtcggaggagaaccaccaaacaagcccagaaaatcctcgtcacggttcagtccaagatagactccgataaaacccgaaccggtttgctcgcgaagt

SEQ ID NO: 43139 - DNA, 441 bp, Glycine max
  Clone ID: LIB3093-023-Q1-K1-D11
caaactctcgcatcaatcttcgtttctttagagagagagagagagagagagagcgcggtgtcggaatcgtgttctccgattgcaccggtggttcgatttatggtcgtcggagaatcgccgatctcgctgagagtttcgaatcgcaccggtgaccggaggagatggtgaattccatggtggaacgcgccacgagcgacatgctcatagggcctgattgggccatgaacatcgagatctgcgacatgctcaatcatgaccctgggcaagcaaaggatgttgttaaaggtataaagaagcggattggaagtaaaaattcaaaagttcaacttcttgcactaactttgttggagacaatcataaagaactgtggagatattgttcacatgcatgttgcagaaagagatgtgcttcatgagatggtgaaaatagtaaagaaaaagc

SEQ ID NO: 43140 - DNA, 439 bp, Glycine max
  Clone ID: LIB3093-023-Q1-K1-D12
ggatcgtgatgggatttccaggctgggcagtagatgcttgtcagctgtcagtgcatacgataatactctagagaatatagagacattagatgctgcccaggccaaatttgatgatatcctcaattctccttctattgatattgcttgtcagaagatcaaaagcttagcaaaggcaaaggaacttgattcttcattgatattgttgataagcagtgcttgggctaaagcaaaagaatctacaacaatgaagaatgaggtgaaagatataatgtaccaattgtacagggccacaaagagcagcctaaggagtattactccaaaagaaataaagctactcaaacatttgttgaacatcattgatcccgaggagcgattctctgcattggcaactgctttcacccctggtgatgaacacgaagccaaggaccctaatgctcta

SEQ ID NO: 43141 - DNA, 455 bp, Glycine max
  Clone ID: LIB3093-023-Q1-K1-D2
aattccggtcgcccacctccgacgattccacccatcttgattccaactccactcccggaatcagttcgatagctcattatatgtgtcgaatgaccaattaatcagcaatgctcaccaaacccaaagcactataatgatcatggcaccgttgggttagctcttggtcctctaatcatcgacatcagggttcatgctggcagctcttctgctataaatccttttgatgattggtcccacaacagggacaagggggctgatgaattcttttcggaagaagaaatccgcttcagaagtcacgagatgctagagaatgaagatatgcagcagttgcttcgcctcttcagcatgggaggtcatggctccatgagtgctgaggatggcttttcattcccatcattcatgccatctcccagtataccgaactatgatgaggatcgctctcgcccaggcagagc

SEQ ID NO: 43142 - DNA, 440 bp, Glycine max
  Clone ID: LIB3093-023-Q1-K1-D3
cccacgcgtccgatatatatatatatatatatatatatatatatattatttaatttcacacggaaaagcgattatttaattttgttggaattttgaatttataagtatgcagtagtatttaatatattaagtttttttcttcttctcagaaacgccccttcatattattacagaatcccctaaatgtgggttcgacgccaggcaagggtttcaaaaacttctatttatattacgggggattattattttcttataggttatgcttttctcttgtcataagccaagtaaaagtgctttttcttctttttttgaaagattgattctgaagttcccacaacaaaaacacaaactttactcgttccagaaaaggcattggtgcagatcgggggattattatcaatatatgattagagacaaatctacaatataataatgacatt

SEQ ID NO: 43143 - DNA, 448 bp, Glycine max
  Clone ID: LIB3093-023-Q1-K1-D4
ctctttgcaacacaacaaaaaaagacaacacagagagaagcgtcttaataaacgctcttctgtgaaaaacctgatttcttctcttcttctcttctctttcgtttcgatcttcgatctctgaaaatgagagagtgcatttcaatccacatcggtcaggccggtattcaggtcggaaacgcctgctgggagctctactgcctcgaacacggcattcagcctgatgggcagatgccaagtgataagactgttggtggaggtgatgatgctttcaacaccttcttcagtgaaactggggctggaaagcacgtgcctcgtgcgatttttgtagatctcgagcctactgtgattgatgaagttaggactgggacataccgccaactatttcatcctgagcagctcattagcggaaaggaggatgctgcaaacaactttgcccgtggccactata

SEQ ID NO: 43144 - DNA, 446 bp, Glycine max
  Clone ID: LIB3093-023-Q1-K1-D5
gccacgcgtccgcaaatctggatttttgaaagaaataattcgaagacgaccatggattggacatgctatggttggctttattttagagagatgtggaagtgccaagtcagactttcgacgagtggaagcacttgaattggtaatggaaatattgaagtcactgtcaacagggaatagtgatgaacagaatgcatcgaaaaagattcttaagaacagtttggataaactttctcatctgttgaaagaattagtgactaatatgccaagtaaaccagcaaggcggacagaggtacagaagttttgtgttaaggccttggagattttgtctaagcttaacctcaccaagaattttgtgaaaactttggcacctgatactcaagctgcccttgaggcgcaacttggtgagcaattcattagtttgaagaagctggaaaaataaactacac

SEQ ID NO: 43145 - DNA, 446 bp, Glycine max
  Clone ID: LIB3093-023-Q1-K1-D6
aggatatctgtaacttttattgataaggatggtgaggagaagcatatcaaagtccctgttggaatgtctatgttagaagctgctcatgaaaatgacattgaactagaaggcaagagctttgattttataattctattatttcacctcaagatttcggtcttctgaattctgcttttttttttctcttttaaatgtttgagatagccagttggtcatatttgatccatctagccaccccacctgttgggttaatttttatttttttagtttttttagttttgctagaattacttttcattttgatagtctgcctttactttggaaaaagctcgccaaaaatgagactgtttctaataggtttagactcactacacttttacttgcctactttagagacaagttcacttgagaagaacattatctcctcctttgcttatgatggatat

SEQ ID NO: 43146 - DNA, 351 bp, Glycine max
  Clone ID: LIB3093-023-Q1-K1-D7
gtcaaaacctgtgttaaaggtgggtcagccatactttactgacactctctatggcaatctggatcaaatttaactatggctactgaagagggtttggttgacgaaatgacttaccataccgcgatcactactacttatcccctatgtctgcttggccatggaatcaccggcctggagattcacttcatccatgtgaaattctattcactcagggttgatttgtagccaaaactaataagtgacttggaccagtataaaggataatctgcaaaggagctgtgcgataatgaatagtgtttcaatgctctaatttttgactacgtggagaaacctattagactggtagtgatc

SEQ ID NO: 43147 - DNA, 439 bp, Glycine max
  Clone ID: LIB3093-023-Q1-K1-D8
aaaacatctcaatgggttcttcttctattacaacatcgcccgcaaccatgaccatggctgcgatcgtgctcctgttcacggtctttgccgtttcctccgccctagacatgtcgataatctcgtacgacagcgcccacgcggacaaggccgccacgttgcgcaccgaggaggagctgatgtccatgtacgagcagtggctcgtgaagcacgggaaggtgtacaacgcgctcggcgagaaggagaagcgcttccagatcttcaaggacaacctgcgattcatcgacgaccacaactccgcggaggaccgaacctacaagctcggactgaaccggttcgctgatctcaccaacgaggaatacagggccaagtacttgggaaccaagatcgatcccaaccggaggctcggaaagaccccgagcaaccgctacgcgccacgtgt

SEQ ID NO: 43148 - DNA, 374 bp, Glycine max
  Clone ID: LIB3093-023-Q1-K1-D9
tataaatgtagttgtgaaagctaaaatgaggaagagatggcagatgttggagaggaacatcgtgatagctattaaaaaacctctattacaatttgagtatttagatgctcaaagtcttcgaggcttaaactggtttgattcctttattttgttggttggcatgtgtatttagttctcaaactctaaattttggtcattaactatgaatgtctttacttgtaggtatttctttttcggcatgcatctgcgtactataatctatgttaggcgcatgttaaaacttcaaaacgcaatcttgctacctgttatatgcgtgctgggaccaaactgcttcatgccactttctgggatatatatttcgttgctattcttat

SEQ ID NO: 43149 - DNA, 422 bp, Glycine max
  Clone ID: LIB3093-023-Q1-K1-E1
gttgaatcatctgcaccagacaccgattcattcgaccaaaacataagcatgtccggatctgacatggcggggagggagcaattcacggttgggatgcacaaaccccaacaacaacaacaacaacaacaacaacctcagcttcatcaaaacatgcgtatggactatgctgctgacggcactgctgttttcgcccctccgaccgttaccgttaacattaacggcggagattcctctccagcggtgccttcgggcctgggcctgccccagccccagcccatgatggttaactcccccgaaccaattaagagaaagaggggaaggcccaggaaatatgggcctgactgtggcatgaccttgggggctttgaagaccaccatttcttcctgcggcggcgtgccggttgggcagtccggtggggcatt

SEQ ID NO: 43150 - DNA, 439 bp, Glycine max
  Clone ID: LIB3093-023-Q1-K1-E10
cgcaaccctcgcgcttccgccgccacactcgtcggagcacactcgccggaaaagactcccgggcaaaaaaagaaaacctcaaagactaacccgagtcgttatagtgggttggagtgaacgaaaagaaacaaaggcaatacaaaaagggcaaacacgaatacacggttttcattctttcaccactcttgtttccttttacgacgtcgttatggaactcaagtttatgcagttttcgcaacacgttcttcctcattccccttcttcatctcaaaccctcgcttctgcactctcttccccttcatcgtccaaaacgcgaaccctagtgtgtcgtttcgtgaatcgctcgagcctctttccgaccaccacccgccttcttcggagaaccaaatcgtttgagcaccacgcgcttttcacgcgcagggggagtttgagaagggct

SEQ ID NO: 43151 - DNA, 438 bp, Glycine max
  Clone ID: LIB3093-023-Q1-K1-E11
ttcacctcatgtcagatcacaaccacaagatatccaattccgctgtcaatgggagtgattcgctgaatggtcacatcatatccactacagttggaggaaaaaatgggaagcccaaacagactaaaagttacatggcagaatgcattgtggggactgggtcatttggaattgtcttcctggctaaatgcttggaaactggcgagccagtggccattaagaaggttttactggacaaaagatataagaatcgtgagctacagttaatgcgcttgatggatcatccaaatgtgatctctctgaagcatcgtttcttttccactacaagtgcagatgaactttttcttaatttggtgatggaatatgttccagagtctatgtatcgagtctcaaagttctatagtaatactaatcagagcatgccacttatttatgtaaaac

SEQ ID NO: 43152 - DNA, 442 bp, Glycine max
  Clone ID: LIB3093-023-Q1-K1-E12
tttccttctccttctccttgcctaatcgtttcatttctcccacgagactcacggatatcatgctcatgcttcgtctcagtctcacaggacccaatataaataagaagcttctaaatctcttcactatctgggttagtggaagaattctgtggtgaagtaaagtgactaattgccttaaatcagaaacgacatcaagttccatggaagaagagcatcaatgttctagaagtggtgaagaaccacagacacaggaactggatggagaagatcaacagctgcagcatcaatgccaacaacctggagctgaagagaaacttgtattgcaatttatggattcaatggataactacctatccctctttgatgtagtgtcctccacccttcgacagggatggtttgacttagctagtgctcgacattccatgggtgcttctcgcattaa

SEQ ID NO: 43153 - DNA, 446 bp, Glycine max
  Clone ID: LIB3093-023-Q1-K1-E3
gactcgttcttcttcgtcgttatcttcttcttttgttgtttgtgtgtttgttttttctctcacctgaaaatgtcttgctgcggtggtaactgtggttgcggaagcgcctgcaagtgcggcaacggctgcggaggctgcaagatgtacccagacttgagctacaccgagtcaaccaccaccgagaccttggtcatgggagtggcaccagttaaggctcaattcgagagtgctgaaatgggtgttcccgctgagaacgatggctgcaaatgtggagctaactgcacctgcaacccctgcacttgcaagtgaggtgttggagagctaaagcttcaagcagaaatggcccttagaaataatgataaaaactatatgtagtttcaaaacttcaaaattatgtagtatgtattatgttgcactctggtgttttgtgtctaaacaaacaccct

SEQ ID NO: 43154 - DNA, 447 bp, Glycine max
  Clone ID: LIB3093-023-Q1-K1-E4
cccacgcgtccggtttgtccatatccatatcaagactttaaaattgtgaagtaacaagaaatgtgtttattatccaaccaagagaaaaatgataatatttttccctaatgctgttatggataatttatcttgttggttttttgtgtagtaagtatatttgtaaatgaacgagatgtataatgtttagaagcttcattaatattttattcttgggctctatatatagagcataagtgcaatacaaaaattcaaatactaacattatgctaatcttataatcagactgataatttcctaaatctaaatgataagatcatatccttgtctttatctaaacagtatcttaaaacaacctaaattcctaaaaataaattcaaattcaaattacagtcatttaggcatatgttttcattatataatttacaattacttgaatgccattgggct

SEQ ID NO: 43155 - DNA, 413 bp, Glycine max
  Clone ID: LIB3093-023-Q1-K1-E5
cagcaaaaccaaaataacactccagatggttcaggagaggtgcctttgaagcgtaaacgtgggcgtccacggaaatacccaaagccagattcagaggagagttcctatatcctagttagtcaaaatagaaggcagaatcctgttcgtgctgaacaagctccagtacctcctggatttgaaggggttaatggaaatcaacagcttcaaaggggtcaagagaatcattcaaataatgcaatggtgggccagctagtttccggcgtaattgaggctgcatttgatgcatgatatttgcttagtgttagagttggtgattctaatactactttgagggggctaatcttcaagcctggacgatacgtttctatatcacctgataatgatgttgctccgagtgttccaatgatccaaag

SEQ ID NO: 43156 - DNA, 448 bp, Glycine max
  Clone ID: LIB3093-023-Q1-K1-E6
cgctgttgttgttgctgcaccaccgaacaacttcccctgtaaatcgcgtttcgtttgtgcagggttttaaaagatggctgatgctgaggacattcaacctcttgttgttgataatggaactggaatggtcaaggctggttttgcaggtgatgatgctcctagggccgtgttccccagcattattgggagaccacgccatactggtgtaatggttgggatgggtcagaaggatgcttacgtgggtgatgaagcccaatcaaaaaggggtatactcaccttgaagtatcctatagagcatggcatagtcagcaactgggacgatatggagaagatttggcatcacacattttacaatgagctacgtgttgcccctgaagaacaccccgtacttcttaccgaggcaccactcaatcccaaggccaacagagagaagatgacccaaattatg

SEQ ID NO: 43157 - DNA, 428 bp, Glycine max
  unsure (1)..(428): unsure at all n locations
  Clone ID: LIB3093-023-Q1-K1-E7
cccacgcgtccgcttttgtgtttttctgcagatgtctcggtgggaagtagttgatgttcttgttcttgttcttgattcgtgaaagaagaactgaaagcatgaagctctccttctccgtcccatcatccaaaccccactcgaagcccaaagccgtctccaacaccttcgacgacaattccacctcccaaaacgacaccggcggaaccaaatacctcatcaccgaattcgacccttccaaacccgctcccacctccgtccccaaaaccctaattcccccaatccaaaaccaatggcaacccttcaagaagatgaagaatctncacctccccaccgccgccgacgtcgaatccctcgccttcgaactccacaccgacggggaccaacccgaatccgacatctcctacggcctcaacgtccgtgccgacaat

SEQ ID NO: 43158 - DNA, 436 bp, Glycine max
  Clone ID: LIB3093-023-Q1-K1-E8
ctcacccaccctccatacacactctctctgagtcggtcgagttgaatcggtgtgagtcagtgaccgagtcgaaccatgtcggacgaagaacaccatttcgaatccaaggccgatgctggagcctccaagacctatcctcaacaagccggaaccatccgcaaaaacggttacatcgtcatcaagggtcgtccctgcaaggttgttgaagtttctacttccaagactggtaagcacggtcatgccaagtgtcactttgttgggattgatattttcactgccaagaagcttgaagatattgtgccctcttctcacaactgtgatgttccccatgtgaatcgtactgattaccagttgattgacattgctgaggatggatttcttagcttgcttactgaaaatgggaacaccaaggatgacctgaagcttcctactgatg

SEQ ID NO: 43159 - DNA, 435 bp, Glycine max
  Clone ID: LIB3093-023-Q1-K1-E9
ggcatcgaaagaggaagcataagggcaactgttctgatagaaacacttcctggagtgtttcgaatgaatgaaattttgtatgaactgaacgaccattcagtgggtttgaactgtgggcgttgggattacattttcagttatgttaagaccttccaagctcatccagatcgcctcttaccagatagggtcctagttggcatgactcaacacttcatgaaaagttattctgatcttctcatcaggacgtgccacaggcgcggcgtgcatgctatggtaggaatggcagcgcagattccaatcaaagaagatccagtggctaacgaggtagcactggaacttgtaaggaaggacaagcttatagaagtgaaggcagggcacgatggaacttgggctgcgcaccctggtctcattccagcctgcatggatgatattaac

SEQ ID NO: 43160 - DNA, 352 bp, Glycine max
  Clone ID: LIB3093-023-Q1-K1-F1
cggacgcgtccgcccacgcgtccgcccgaatatagagcatatcaagagcaagttctcagcagcagctttgggtttgcacaggctctgagtgagataagctatcaacttgtctctggtggaaccgagaatcacctggttttggtgaatctgaagaataagggtattgatggctccagagttgagaaggtgttggaagcagttcatattgcagctaataaaaacactgttcctggagatgtgtctgccatggttcctggtggcatcaggatgggaacccctgctcttacttctagaggatttgttgaggaggattttgtcaaggtagcagagttttttgatgcaacactgaaga

SEQ ID NO: 43161 - DNA, 443 bp, Glycine max
  Clone ID: LIB3093-023-Q1-K1-F10
cccacgcgtccggataaaactccctttataacttctgagttactgatacaaaggcacaactgttcatccatgaaaatcagttttgtttataaacatatacaaataattaggtggtgaaattgaaacaagtaaacctccaaaaaccagtaaccactccgtatattatcttattggcaaagtactcaatcatcagcactagcaacagccatgggagaggtagacccagctttcatccaagacctagaacacagaccaaagctctccataatccaagctgaaggaattcccataattgacctctctccaatatccaaccacacagtttcagatccatcttccattgaaaacttagtgaagcagatagggagtgcatgcaaggaatggggtttcttccaagtaaccaaccatggggtgcccctcactctaaggcaaaacattgagaa

SEQ ID NO: 43162 - DNA, 435 bp, Glycine max
  Clone ID: LIB3093-023-Q1-K1-F11
gtttttctttttctcttctcactgcatcgcttcaggttcttctgaaaagatgggtcgcgtggatgttggtaacttggattcacgagtcactgagagagatctcgaagacgaattccgcgttttcggagttattcggagtgtttgggttgcacgtagaccacctggttatgcttttattgactttgatgaccgcagagacgcacaggatgctatccgtgaattggatgggttttcctcaactagctagttaagtcttctttttggcctatggggcaagcagatgctgctctctctttcttctacttctgccttggcctgcagtaatggttttttcttggttgtgtcttcgtcaaagtctgctgctttgtacagtttgactacttctactactactgcatgtaaagagaattaagaatgtgaacacaggggatttgc

SEQ ID NO: 43163 - DNA, 437 bp, Glycine max
  Clone ID: LIB3093-023-Q1-K1-F12
atttcttttgttttatttttggtgtgggagtgggatggatgttctaccatatgtattacaggaattctttgatattaatgacgaatcattaattttttcttacagtaatatagttaaatcaaagttatttaacttgactacgtactgagaaattaattttaaaaatgttaagttaattgtctgtttcagttgatgatataggcatattgtatgtcctatagttaacttacacattagttatatatctcatcaaaatgtttgctgtcaccacacatttaacaaaaaaaacaaatgtaaagaaaaggctgaaaattgaaagttcttcatttaacaataaaaggccgaaaaaggttaaaataatatttggataaatacatagtgctgcaatagtaatgcttctctaacatctaaatcagtggcaaatacagagaggtaac

SEQ ID NO: 43164 - DNA, 420 bp, Glycine max
  Clone ID: LIB3093-023-Q1-K1-F2
gtcgctcgtaaaagtgacaagtgacaacaaaaccccactctaccagtccccctatcttaagaaaactaagcgtaatccattttcccaacatcgcatattgcacgacacgagcgttgagacagtaaccacgatgtccaaactatagacaagatgaaaacgttggaaatgagtctattagcaggtgcttacgttcaaccccgcttcccttgtaactacaacccaacgctttccgcatcttgcagaacccaaaagacagcaacttcactaaccgtaacaactcccaagaaaacagaaaaggcgttattcactgagtcattcgatcaaacacgtgacgcgcaacctctccccgaaaagaagaagagggtgttcttcttagacgttaacccgctctgttacgaaggaagcaaacccagcttgcac

SEQ ID NO: 43165 - DNA, 442 bp, Glycine max
  Clone ID: LIB3093-023-Q1-K1-F3
gtttctagttcaaaattcttattacaagcattcttgccctggtagtatgcgccttgttttatgaatttaggagaacactttgtggcaatacaaataaaatctgtaatgcacctcaagcaccacgtgcatggcctatcattggccatttgcaccttttgaatggtcatcaactcacacacaaaacactcggcatgatggctgagaaacatggtccaatcttcacaataaaacttgggtcatacaccgatctagtattgactaaatgggagatggccactgagtgtttcactgtacatgacaaagcattctccaccataccatgtgttgcagactcaaaactaatgggctacaactataccatgtttggcttcactccatatgagtcttactggcgtgaggtaaggaaattaactaccatataacttgttctaacaatcgtctt

SEQ ID NO: 43166 - DNA, 439 bp, Glycine max
  Clone ID: LIB3093-023-Q1-K1-F4
cccacgcgtccggtctttgtatcacgaaaactatacgattcgattccttgttttcaatgggcgaccttcttgaattctcaatcttcttcttcttcgagaagccgctggagttacgatactctcaagaatttccgtgagatctctccgctggttcagaatcacatcaaacgggtttattttacgttatgttgcgctgtggtggctgctgctgttggagcttttcttcatgttctgtggaacattgggggttttctcaccacgttggcttccattggaagcatggtttggttgctatctacaccccctgttgaagagcaaaagaggttgtctctgttgatggcttcggccttgtttcagggcgcttgcattggacctctgattgatttggctattgccattgatcctagccttattggtagtgcatttgtggcaacttctt

SEQ ID NO: 43167 - DNA, 439 bp, Glycine max
  Clone ID: LIB3093-023-Q1-K1-F5
caaaacttgaaatcaaatcaggagcgggggaaaaagaaaagagagagaagtagggttcgaaaatggcaggagaatcatcagagggcgaagaagaaaccaagttaagcggagggagcttattgctgaccgttgacgacgacttaacggaaatgggaaagaaagccgcttggagcgtcagttcctgcaaacccggtaacggcgtttcctctctccgtgacgacaatctcgaaacctattggcaatccgacggagggcaaccccatttggtcaacattcagtttcaaaagaaagttagacttcagttgattgtgctgtacgtggatttcaagcttgatgagagttacacgccgagcaaagtttccatccgtgccggtgatggttttcacaacttgaaggagattaagaccgtggaactcgtgaagccaactgggtgggttta

SEQ ID NO: 43168 - DNA, 438 bp, Glycine max
  Clone ID: LIB3093-023-Q1-K1-F6
cccacgcgtccggtgtggcgtgggtagataaagagtgtatctggattctgatctgaatataggggcacgcataaaagggaacgaacgtaatggctgcagcagcgttgctcgaacttgatcgagttctcaagtccaagaaggaaatgttgacgcctcgggaagcaaatattcttctatcgtggaaatctaaatctctgatggatctcgctgccggtgcacttggtgggaccgcaactgcaggggctgcaacttggaaactcaatggactatttcgaatatgcctttcagcaggatttggtacttactgtggaccgcggatgtttaatagatcctcgtattctcatgcagatcagattcttacaatggatggtagtatattacagaaggagttagcgaatataacggtgacaaaataccagaatgatcctttgctaatgc

SEQ ID NO: 43169 - DNA, 438 bp, Glycine max
  Clone ID: LIB3093-023-Q1-K1-F7
gcaccacattcacctgaggcttccaaagcaatggcttcccttgcagcatccactgctgctggttcccttggcatgtcagaaatgcttggaaaccccatcaacttcagtggtgccacaaggccagctccatctgcttctagtcctgcctccttcaagactgtggctcttttctccaaaaagaaggctacaccaacacctccaaaaaaagctgctgctgctgctcctgccaatgatgagcttgccaagtggtatggtcctgacagaaggatcttcttgcctgagggtctcttggaccgatccgaaatcccagagtacttgaccggagaagtccctggagactatggttatgacccatttggtcttagcaagaagccagaagactttgccaaatatcaggcatttgagttgattcatgccagatgggcaatgcttggtgct

SEQ ID NO: 43170 - DNA, 435 bp, Glycine max
  Clone ID: LIB3093-023-Q1-K1-F8
cccacgcgtccggacacagacacggtgcattccagatatgcatggagtctctctctctgtgtgaacacgcaaaagaccattgattgtccgagagaacgcaagcactgacatcagtactccatatatttgctactctgcatgaacataacattcatacttaagttttgctggttgtgtgtgtgttttttgttcttggtcgagccttgtactgattaacgagaatggacaaggaagtggagcttggttcccttgaaggtgaaatggccacccagcacatttcacaaccacagaagcgcaagggtggtcttgttaccatgcctttcatcattgcaaatgaggcacttgcgagggtggcaagtttgggccttttgcccaacatgatactgtatttgatggggacctacaggcttcaccttgcccaagcaacccagatac

SEQ ID NO: 43171 - DNA, 423 bp, Glycine max
  Clone ID: LIB3093-023-Q1-K1-F9
ctcaagtctctcgaagcctctttctctctcttctagaagctatctgtgtttggtgttactaggtctccaacaagcaaagtacatggttgatttggaaatccaggtccccaccccattcgacccgtttgccgaggcgagagaatcggatgcccccggagcaaaggagtatgtgcatattcgaattcagcagaggaatgggaagaagagtctgaccacagtgcaagggctgaagaaggagttcagctacgagaagatcctcaaggacctcaagaaggagttctgctgcaacggaaccgcggtgcaggacaaggagcttggcaagatcatccaactccaaggcgaccagcgtaagaacgtctgccacttcctcgttcaagctggccttgtcaggaaggaccagatcaagattcatggtttttgacc

SEQ ID NO: 43172 - DNA, 447 bp, Glycine max
  Clone ID: LIB3093-023-Q1-K1-G1
caacaagggaaacagaatattattccattttttcacttccacactttcttgcattcattcccgattttcgactatggcctcttcagctcaattttccaccactttggtcgtactatgtctcttccaattcctagcaggttcatattcaacgacattcacaattgtgaacaagtgcagctacacagtttggcccggcattttaaccggcgccggaacctcaccgctctccaccaccggcttcgtcttacaacccggcgagtccaacgtgatcaccgtgccggccgcctggtccggccgcctctgggggcggaccgtctgcacccaagacgccaccggaaaattctcctgcgtcacaggcgactgcggctcctccgccgtggaatgcaacggcgcaggagccgccccgtcggccacgctcgccgagttcacactgaacggcgccggcgg

SEQ ID NO: 43173 - DNA, 439 bp, Glycine max
  Clone ID: LIB3093-023-Q1-K1-G11
ccacgcgtccgtaacctccgaagcatggcaactcgaagagtaagatgcatgcagtgcggaaggcccctgctagtgccaattgaagttgcctatagcattcctttgatgtgttatggatgccaagctagcagacccaattatcattttgcaaacaatgttacacctccatttgttaattatcaccctgctcctggctatgcacataggatacgacgtaaccaattcaattatcctcggccattgccactgacgccgccaccaactccattgaaccctccttcttcctatggcaacaagagggctgtcttagttggcattagttattgcaatcagattaacaaccttaaaggttctgtcaatgacgctcagagcatgaaatactttctcattaacaagatgggtttccctagtgactccattcgcgtcctcacagatgatc

SEQ ID NO: 43174 - DNA, 440 bp, Glycine max
  Clone ID: LIB3093-023-Q1-K1-G12
ctcatctataccgagcctccggagaagcttctcaagaagctcgaattggtaaatggggttctcttcactggtggatgggctaaaagtggtttatattttgaaactgtcacaaaaatatttaagaaaattttagagaagaatgatgctggagatcatttcccattatttgccacctgcttaggctttgaactcataacgatgatcataagccaggacaataatattcttgaagagtttagtgcatcaaatcaggcaagtactcttcaatttgtggagaatgcaaatatcggagaaagtgtctttcaaagatttcctccagagttgttagggaagatgagtacagattgtcttgtcatgcaaaaccatcgttatggcatatcccctggaaagcttctgaataatccaaagttgtctagtttttttgagatcttgacaacttg

SEQ ID NO: 43175 - DNA, 427 bp, Glycine max
  Clone ID: LIB3093-023-Q1-K1-G2
caagggaaacagaatattattccattttttcactgccacactttcttgcattcattccgcattttcggctatggcctcttcagctcaattttccaccactttggtcgtactatgtctcttccaattcctagcaggttcatattcaacgacattcacaattgtgaacaactgcagctactcagtttggcccggcattttaaccggcgccggaacctcaccgctctccaccaccggcttcgtcttacaacccggcgagtccaacgtgatcaccgtgccggccgcctggtccggccgcctctgggggcggaccgtctgcacccaagacgccaccggaaaattctcctgcgtcacaggcgactgcggctcctccgccgtggaatgcaactgcgcatgagccgccccgtcggccacgctcgcctagttacac

SEQ ID NO: 43176 - DNA, 93 bp, Glycine max
  Clone ID: LIB3093-023-Q1-K1-G3
cccacgcgtccgcccacgcgtccggtttgaatgaatacttttgtagggaaattcttgtagtggcatgtaatctcaatcttgatgaattttgtc

SEQ ID NO: 43177 - DNA, 448 bp, Glycine max
  unsure (1)..(448): unsure at all n locations
  Clone ID: LIB3093-023-Q1-K1-G4
agcgcattatagcacaccacacaaaaaagcaaagcagaaaacaactgttacttacacacgccatgggtatgggtatgggtatgggtatgggtaaatgagtggtaaatgagtggtttttgagcagaagcagttaaaagagaaagggattcagcgaagatgacatcggttggtgtggcaccaacttcgggtttgagagaagccagtgggcatggagcagcaggtgttgatagattgccagaggagatgaacgatatgaaaattagggatgatagagaaatggaagccacagttgttgatggcaatggaacggagacaggacatatcattgtgactaccattgggggtagaaatggtcagcccaagcagactataagctacatggcagatcgtgttgtanggcatggatcatttggagttgtcttccaggctaagtgcttggaaactggtg

SEQ ID NO: 43178 - DNA, 366 bp, Glycine max
  unsure (1)..(366): unsure at all n locations
  Clone ID: LIB3093-023-Q1-K1-G5
atcgctttttttgtcagtacgcggattatcctatctttctctagcagtagatagatccgccaggaggatgcaactccggatcgggctactactacgatctcgggattagtagggatgcctccttctctgatattcgcactggctaccgaaaactcactatgaggggggacccggacaaaagggctcttaatcccgcaaccgccggcgatagccaagcgccggtttcatcaaatgcaagaagcctactcagttctctccgatcagtctaaaaggtcaatgtacgatgcggggctctacgatcctttggaggaagaagaccaaaatttttgtgacttcatgcangagatgatctctatgatgaacaat

SEQ ID NO: 43179 - DNA, 412 bp, Glycine max
  Clone ID: LIB3093-023-Q1-K1-G6
gccttatctatctaatatactatacaaaaagttcttatcagtgacagagtaaaggaggcataccgatgacgatggcgatgacggcgtcgcacttgcggtgcggttgggggtggaggccaacgccgaatcagcagcagcaacgacgtcgtatggttccggtggtgtgttccatcgctatagagaacgcgaagaacaaagagagagcgaaactgaagaagctcttcgatgaagcgtacgagaggtgccgcactgctctcaccgaaggcgtttacttcactgtacaacaattcaccgacgctctcgacaagtacgacttcaacgccgaaatgggcaccaaggttaagggcactgtttttgccacggataacaatggagcttatgttgacattactgctaagtccacggcctactt

SEQ ID NO: 43180 - DNA, 439 bp, Glycine max
  Clone ID: LIB3093-023-Q1-K1-G7
acgcccacgcgtccgcccacgcgttcgagtccttgcattgtacattatccaaaagggacgagtggaaatcactttggattctgatttattgtcttgtccaaatgcctacagcctcaagcctgacatccaaagtgaggatgatgtacagagcggaaaagaactgtcaatagagaagcctgagggaagctattttggtgaatgggcccttcttggtgaaaatattggttccttgagtgctgttgctgtgggtgatgttgtatgtgctttactaacaaaggaaaaatttgaatctgttattggctccttacaaaagatttctcaggaagatcacaagtcaagggattattctagaaattatgaattttcatccctcgataaggtccagctctcagatttggagtggagaaagacactatattccactgactgctctgaaata

SEQ ID NO: 43181 - DNA, 433 bp, Glycine max
  Clone ID: LIB3093-023-Q1-K1-G8
gtggcattgtagggactagggattgtttcacagaacacctctgaaattcaaatcccttttttttgtttgatattaatctatggtaggatatagaatctgaagctgaaaaaaggggttaattgttttgcagaatcagtataattgtagagagcgagatggatcactatggttcttctggaggaagctggacaatgatcccaacccacaattcccaatcccaatcgaaccaggaccctaacctctttctgcaacaacaacaacagtttctccagtcacaaccttttcagcaagcactagcgcctcaatctccatttcaacagcagcagcagcagcgtcttctacagcaacagcaacaacaacaacagccgcagaaccttcaccagtcactggcctctcactaccatctcttacacttggtggagaatttggctga

SEQ ID NO: 43182 - DNA, 420 bp, Glycine max
  Clone ID: LIB3093-023-Q1-K1-G9
ctgacactttcggccccacggactgtcactcacatcaccaaagaaattaaaaggccttctgggggttccagattaatctatgcctctaaatacaatacaaagctgaaaaaacgcaataattaccatacaaaatcagtataattgtaaacagcctgatggatcactatggttctcctgaacgaagcttgtcaatgatcccaacccacaaataccaatcccaatcgaaccaggaccctaacctctttctgcaacaacaccaacagtttatccagtcacaaccttttcaacaagcactagcgcctcaatctccatttcaacagcagcagcagcagcgtcttctacagcaacagcaacaacaacaacatccgcagaaccttcaccagtcactggcctctcactaccatctcttacacttggtgg

SEQ ID NO: 43183 - DNA, 441 bp, Glycine max
  Clone ID: LIB3093-023-Q1-K1-H1
gccaacatagcattacccatggtgctaaccgggttattactctattctcgctccgtaatctgcatgctcttcctcggtcgtgtgggtgagcttgccttagctggtggctctctcgccattggattcgccaacatcacgggctattctattctctcgggcctcgccatgggcatggagcccatttgcggccaggcttttggggccaaaaggttcaaacttttgggtctcgctatgcagaggacaatcgtcttgcttcttctaacttcagttttgatttcattcttgtggctcaacatgaagaaattattgatcctatgtggccaacaagaagacatcgccaccgaagctcaatctttcatactattttctattcccgatcttgtagcacaatcattgctacaccctttgagaatctacttacgaagtcaatctataacccta

SEQ ID NO: 43184 - DNA, 348 bp, Glycine max
  unsure (1)..(348): unsure at all n locations
  Clone ID: LIB3093-023-Q1-K1-H10
ccgggtgtagttgagctccatgtacattggcagattgtctacacgttgtagtcctcgggtcgttgaaaaggttgaggtgcatttcaggaaatatcaccaatggtggtttgataatttgcatattgacctgcaggcaaggcctgagttaggaatcgtgttgtttgaaactggtagatagttatcatgccattttgtttttacagcagttatgacattgcaatattgtaatcgtgtatatgtatgttatattttatgtattttacctcgtgggatttgtaataaattttgtttaagttaaagaacttttgaaatataatttaattaagtacttttgaaacatggtacana

SEQ ID NO: 43185 - DNA, 439 bp, Glycine max
  Clone ID: LIB3093-023-Q1-K1-H11
gtttatatcttgcctctcacaaggtctatggtggagaggcaaggatttcaactgtgagggaattatttcctctgatggaagacaagaagagccttgcttcatctgaagagcgttctcagataaagggaaaagcttctctattagctgcacttgactactatgttggcttgcatagtgacatcttcatctctgcttccccaggaaatatgcacaatgcattggttggacaccggacatacttgaacttaaagactataaggccaaatatggcattgatgggtcagcttttcctgaataaaaccatagagtggtcagagtttcaggatgcagtggttgaaggtcaccaaaatagacaaggggaactaaggctgaggaagccaaaacaatcaatatatacgtatccagctcctgattgcatgtgccaagcttagtagtgact

SEQ ID NO: 43186 - DNA, 440 bp, Glycine max
  Clone ID: LIB3093-023-Q1-K1-H12
aaaaaaaaaaaaaaagcgagagaagagtgcatagcaagcttagaagagcaaagggtgtgtgtgatgttgttggacattcattcatttcaatctcaatcacatggcttgttcttctccctctcactcatatctcacacatcttcctcttcatccctctcaccaaggtgatagtgagaagcgcgtggaggacgattaatcccgcgttccgattcacatcgtgacggcggcgtcacaacttcccgtcgaatttctggaaccctcccctcaatcgaagctcggcatcggctttgactgctagggcgttgacttgtgccgcaaaggcactctctgcgtaatgcagcttgcgtttacggatgctgtctacttggttgatgcgattgaagggggagaggagcttatcatagcgtgtaagcctgcacttgtatctaattacatcacaa

SEQ ID NO: 43187 - DNA, 447 bp, Glycine max
  Clone ID: LIB3093-023-Q1-K1-H2
cccacgcgtccgcccacgcgtccggtgctttactaaggcacgtgagcagctattcgagaaggctgttacgccgagcgacgttgggaaattgaaccgtttggtgataccgaagcagcacgcggagaagcactttccgttacagagctctaacggcgttagcgcgacgacgatagcggcggtgacggcgacgccgacggcggcgaagggcgttttgttgaacttcgaagacgttggagggaaagtgtggcggtttcgttactcgtattggaacagtagccagagttacgtcttaaccaaaggttggagccggttcgttaaggagaagaatctgaaagctggtgacacggtttgttttcaccggtccactggaccggacaagcagctttacatcgattggaagacgaggaatgttgttaacaacgaggtcgcgttgttcggaccggtcgg

SEQ ID NO: 43188 - DNA, 447 bp, Glycine max
  unsure (1)..(447): unsure at all n locations
  Clone ID: LIB3093-023-Q1-K1-H3
cccacgcgtccggacgaggacgaagaggtaatgagtctaaagttggaaactgagagtttgagtgtacccacaaaacggcaatcaagaaggaacacaccattgcctagcagaattagtggtgcatcatctccttctctgcctgatcatggcattcgaaatcatccagagccataaatcatggacaccaaggaatcatatcattattttggaccgaccacaaccacgaccacataggctagtaggatggatagatgaaccatggatgtgtgcatatgtaacataaactgagaaagcaagctagtgtgatcagcacaaactgtgaggtagagattattattatttcgaattttgttaatagtgaatttgttcccttacaccacggaatgctgtaaattatccaagagctgaatcatggtttagatcgnggtatattttttttttttcttt

SEQ ID NO: 43189 - DNA, 316 bp, Glycine max
  Clone ID: LIB3093-023-Q1-K1-H4
atcctatgaacactcattatcctcttctctaacaaagccatagtacgacacttttagttcattagttctgcttatcctatggataccattcgtaccaccaccatcacccgcgtgcaacaaacaaccccaacaaagaaaaccaagcccaaaaaataaagcctcaccccttccatacgcaacacaaacaccaaaagtgggctacatactaaaatagtgtatttgctgaaataaaatgtactatagatacagattactcgccatacagtcaacaaatgttacattattctattaaaattatgactgttaattatttttc

SEQ ID NO: 43190 - DNA, 421 bp, Glycine max
  Clone ID: LIB3093-023-Q1-K1-H5
cgcattctcaatacccttttgatttgtgaaaggaaagcaaacatggttgatcaggtccaacaccctacagtcatggacaaggttgctggtcagctccatctccgttctggtctttcatctggtattagaagttatgatggagcctaccgccacccagctatgtaccaaagaccctcttttgggaattactcgaatgctgcattgcagtttcctgtgatgcccacatgcaaagctaccatggatttgtctgctactgcaacatctgcctcacccgtctttgttgctgctccagcagagaaaggccattttcttttagactttctcatgggaggtgtttcagcagctgtctccaaaactgctgctgctcccattgaacgtgttaagcttttgatccagaaccaggatgagatgatcaaaactg

SEQ ID NO: 43191 - DNA, 439 bp, Glycine max
  unsure (1)..(439): unsure at all n locations
  Clone ID: LIB3093-023-Q1-K1-H6
cccacgcgtccggcggcagcgacggtaaccctccaacaacaacacttccgctgcgaaaaatgtctctggtggcgaacgaggatttccagcacattctgcgtgtgctgaacaccaacgtggatgggaagcagaagataatgttcgcaatgacctccatcaagggtattggaaggagattcgccaacatcgcttgcaagaaggctgatgttgacatgaacaaaagggctggtgagttgactgctgctgagttggatagtgtgatgactgtggtggcgaaccctatgcagttcaagatcccagactggtttttgaacagaaagaaggattacaaggatggcaaatactctcaagttgtgtctaatgctcttgatatgaagctcanggatgatcttgagagactcaagaaaatcagaaaccaccgtggtttgaggcattactg

SEQ ID NO: 43192 - DNA, 438 bp, Glycine max
  Clone ID: LIB3093-023-Q1-K1-H7
cccacgcgtccgcccacgcgtccgcccacgcgtccgtgttgttgtaactcgttcttcttcttttgttgttctgtgtttgtgtttgttttttctctcacctgaaaatgtcttgctgcggtggtaactgtggttgcggaagctcctgcaagtgcggcaacggctgcggaggctgcaagatgtacccagacttgagctacactgagtcaaccaccaccgagaccttggtcatgggagtggcacctgttaaggctcaatttgagggtgctgaaatgggtgtgcccgctgagaacgatggctgcaaatgtggaccaaactgctcctgcaacccctgcacttgcaagtgaggtgttgggagagcaagcttcaagcagagatagcccttaattaggaataatgataaactattaatgtgtagctaaaaacttatgtattatgtct

SEQ ID NO: 43193 - DNA, 413 bp, Glycine max
  Clone ID: LIB3093-023-Q1-K1-H8
cccacgcatgcgcccacgcgttcgaccacgcgtgcgtgttattgtaactctgggttcttccggtgtggggcagtgttagtatctcactttactctctcctgaaaatgatttgctgtgttggtcactgacgcctcggtaactaactgcaagtgcggcaacagctaccatacgctgcaagatgtacccaaacttgagcatctctgagataaccaccaccaataccttggtcatggtagtggtacctgttaaagcacaattactggatgctgaaatggatattccccattagaactatggttgcaaaagtagaccaaactgatgctgcaacccctgcacttgcatgtgaggtgttgggagaccaagctttacccatatatagcccttaattaggaattatgataaactattaatgt

SEQ ID NO: 43194 - DNA, 404 bp, Glycine max
  Clone ID: LIB3093-023-Q1-K1-H9
cagggtggctttatgatgtctcagacttctctgctcttccaggaaggggcatggagtgcttggtagatgggaggcgtattttggttggtaaccggaagctgctggaggaaaatggcataaatatttctacagaagtcgaaaattttgtagtagagcttgaagaaagtgcaaagacagggatactagttgcatatgatgatatattaattggagtcttagggattgcagacccactaaagagagaagctgctgttgttatagagggcctacagaaaatgggagtcatacctgtgatggttacaggagataactggagaacagctcgagctgtagccaaagaggtgggcattcaagatggtagggcagaagttatgcctgcacgaaaggctgatgatgctggatca

SEQ ID NO: 43195 - DNA, 431 bp, Glycine max
  unsure (1)..(431): unsure at all n locations
  Clone ID: LIB3093-024-Q1-K1-A1
ccggnncggaanaaccgggcttcaggtcgttgccgccctctctctctctctctctctctctctcttaccctcctttcaaccaaacccttaacactgtcgaatctcacttctctgtttcgaatctcgttgaagtgcagagctcactgctcttcaccaatctcagatctgttactcgaaaactctattcatggcgcatggagcgtacctttcgattttcttttaattctagggattggatgctaatcggatttgagttttttattggatttttaattggtgttgtggttttgaggcattgatttgacacgaatattgagtggaagctgaagtcaggttcgagttacttcgtgaatgctgtgtggtaatgttggttatctggtggttaccacgtttggattcccaagggctctggtctttgattttgatgggaa

SEQ ID NO: 43196 - DNA, 280 bp, Glycine max
  Clone ID: LIB3093-024-Q1-K1-A10
cgcaaacacaataattgtatagtttttagtctgtcgagaactcattcatgatctgtgatatttgttaaagagagagcgacagacagagagagagaggatgggttgttgccaatcatctatcttgctgatagtgggagagaggtagactcaccctgaaatggtgaaggaaagggtaaaggaaaaagagcaagcgttctgtaaccactaaaggcatgctgctgtatgagagctcgacggcgagaaagacgtggttgatttctcgttctcggtgttctcactt

SEQ ID NO: 43197 - DNA, 299 bp, Glycine max
  unsure (1)..(299): unsure at all n locations
  Clone ID: LIB3093-024-Q1-K1-A11
ggggcgacccacgcgtgcgncaaaaccattagattcatgggttttttaactctcactaattacttgattttttggctcattttaatcagctgctatatgggtgtaatctctgtgaatgataccatcacatcaaccagattcatcatggaccctgagactataatctcaagcaacggtgacttcaagctaggattcttcagccctgaaaaatccacacatctttatgtagctatctgcgatctcgctgaaacctacatcatatggatagccaatatagaccaaccacttattgatttatt

SEQ ID NO: 43198 - DNA, 391 bp, Glycine max
  Clone ID: LIB3093-024-Q1-K1-A12
cccacgcgtccgcccacgcgtcctttctatccagaaccagacctcgttagttgcgtgtcttggattcttttggtggatcaataaatgttaatccttaattgttaatattttgttagtgtggaattgtggtaactaaatgggtttttcaatttgggcttagatacaaccatggttggtcacactgtcgcagagattttggttttgtttctgattaagttcacgttggatcaagttgggttcaaattggactctctatgcctacttgctctgtgtctgatattttgcctgcctttaacgaattaagcttcaagagtcaacggcgttgcattataaaaacgtaaaaagagcatggaagggagagaagcaagcaaacaaaactgatcgatcaaat

SEQ ID NO: 43199 - DNA, 394 bp, Glycine max
  unsure (1)..(394): unsure at all n locations
  Clone ID: LIB3093-024-Q1-K1-A2
gaggaaccctagctagggtttggaagaagctgatccgagaagatggtgcagcgtctcacctaccgcaaacgccacagctatgctaccaaatccaaccagcacagagtcgtcaagactcccggtggcaagcttgtttatcagaccacgaagaagagggccagcggacccaagtgccctgtcactggaaagaggattcaagggattccacatttaaggccagcagagtataatagatcaaggttacacagaaaccgaaggactgtgaaccgtgcatatggtggtgtgttgtctggcagtgctgttagagaaagaatcattcgagctttcttggttgaagagcaaaagatngtgaaaaaggtcttgaagatccaaaaggacaaaggaaaacaagctt

SEQ ID NO: 43200 - DNA, 371 bp, Glycine max
  Clone ID: LIB3093-024-Q1-K1-A3
cggacgcgtgggggggatgaaaaacttgatactgaagaggcaaggcgagggagaaaaacagagcgtggattctctgcttctggttctgcaacaaggaagccatgcctcaaaaatcgcatcggctagggttttgaaatcagtcgccgtagacgcggaatcgaagctgctgttagcggagaaggaaggtttagtatccgaattgctgaatctaatcacgccggagaaagatcctgatcttattgagaactgtttatcgtgtctggtttcaatttcgacgccgagacggagcaagatgaagctggtgcgtctcggaacggtgaaggtgttctcgaaccttctttcggctccgggcctgagcgtgtcggtgaaag

SEQ ID NO: 43201 - DNA, 434 bp, Glycine max
  unsure (1)..(434): unsure at all n locations
  Clone ID: LIB3093-024-Q1-K1-A4
cccacgcgtccgaaaaatggaatctaaagagtccatctttgtgaagcttttgctgattctgcatttgtccgttctctgtgtttcacaggattttgatttctactactttgttcagcagtggccaggatcatattgtgacacgacacagaacagctgttgctaccctacaactggaaaacccgctgcagattttggcattcatgggctttggcctaattacaaagatggttcatacccatctaactgtgattcaaacaatcgttttcagccatctcagatatcagacctcactagtagcttgcagaggaactggcccacactagcatgcccaagtgggaatggggttcaattctggacccacgaatgggagaaacacggcacttgctctcagtcagtccttaaacaacatgnactatttgaaacagctctcgatc

SEQ ID NO: 43202 - DNA, 419 bp, Glycine max
  Clone ID: LIB3093-024-Q1-K1-A5
cgaaatcccaatcttaatcgcaagcaattcctctctctgagagaagctctcgaaattcttgtgatactcgtagaattttaatggcttgttcatcatccgattcaaaaaaaccagtgacgtcgctgttgttcttttccttcctaattccgataccttccgattctctttccgccctacgcatactcgatacttgttcatctctctctttctcaaattccgattcctttttgtagcatacacaccgtactagcccaactaacaaaccaaacaaaaccgttaccatgggaaaacgtaattctcaacgtaaaagtgctgcgatgttcgatagtgatgacgatagtagcgtgacttcgtcgtcaactgctcgttctgatttgatgtcggtgtctggggctgaagatgttcaatttgttcaagat

SEQ ID NO: 43203 - DNA, 405 bp, Glycine max
  Clone ID: LIB3093-024-Q1-K1-A6
gtctgccacaacacacagtcgcacacagcgcatgaatataagcagagtaaacgtaatgtggaagagaggcttggtcggcgccgtgggtggtctccggcggccatattcgtcaggaggtggcggcatctcctcctccgtgaactcaatgctcctccgctccctaaaggatcactatcaagaagtcgccaaaatgaacatgccccctaaagtgagtgctccatcgccgttcacgatcgtgaagggagctctggactcgcacggtccggttctgaagcgcagctacggcaacgaagaggtgagcatctatgtgatgcggttgttgacccccgaggacgaggattccgccatcgaccagctcttcatccacgtcgatgtctccaaacctcagcagaacgaatccttgat

SEQ ID NO: 43204 - DNA, 168 bp, Glycine max
  Clone ID: LIB3093-024-Q1-K1-A8
gagggtcgacgcacgcgtacccctacgcgtgcggacaaaatgcattctgcaaaacgatttagaatccaaaatctcgagttgggaacataaaatggtacctttggatccaaatactttatattaatcattattgatgaatctcaactaggcctaccgtccttgtgtaag

SEQ ID NO: 43205 - DNA, 352 bp, Glycine max
  Clone ID: LIB3093-024-Q1-K1-A9
cacaatttgctttcgtttgttgttgttgttgtttctgttccttctcttgttccttaaactctttgtttcaaacatccttagaaaaggtaaaaatttaaaaaaaagaaaagaaaatggtggctgtggtttcccaagaaaatgttgcggcattggtttctcgtaccggtagggagttgcaacgttatagaaaaggtcgtcgccaagttgtgggatgcataccgtacagatttaagattggggagaagacttccttggatgttgtttctgatgaattggaagttctggttattagttcccagaaaggaaaagggatgctatttccaaaggaggctgggaattagacgaataaaaa

SEQ ID NO: 43206 - DNA, 422 bp, Glycine max
  Clone ID: LIB3093-024-Q1-K1-B11
acagattgtgaagaagaacgaaactggctggaccttccgcgagacgtggtgtgcacgattttccagaagctgggcgcaatcgaaatcctgacgcgcgcccagcgcgtgtgctccgtgtggcgcggcatctcgaaggagcctctcctgtggcgcaccatcgacatgcgcaattcgggcgacattgaaaccaacttcgtgttcttggccatgtgccaccgcgcaattgactacagctccggccacttgctccatatcaacatcgagtatttcgccaccgatgatctcctccgccacatcacccattctacaagtaatctacgaagcctacgtcttgcatgttgctaccaaatttcagatgaaggattgtgtgaaattgcaaaagagcttcctcagctggaggagcttgatatatcaatcagcag

SEQ ID NO: 43207 - DNA, 426 bp, Glycine max
  Clone ID: LIB3093-024-Q1-K1-B12
cagcgatcgaagtttcacatcagtcttatccagtttagggtttcggttccttacgctacctttgacgtatcgaaaccttaaatttgggattaggtctgagcaatctggttggtagaacctttggtcttagagagtcaagttttatgtctggattagacgatcaaattcctactgccttcgatccttttgctgatgcaaatgctgatgactcgggtgctgggtcaaaggagtatgtgcatattcgcgttcagcagcgaaatggtaggaaaagcctgacaaccgttcagggattgaaaaaagaattcagctataacaagatacttaaagacgttaagaaagagttctgttgcaatggaacagttgttcaggacccagaactaagacaggttattcaacttcaagtgatcagaggaagaaatgttctac

SEQ ID NO: 43208 - DNA, 410 bp, Glycine max
  unsure (1)..(410): unsure at all n locations
  Clone ID: LIB3093-024-Q1-K1-B2
cccacgcgtccgttccactctatatccatcgtcaacagtgaagtgcgaatactcagcaactggagctggggaaccttgtctctactcgctctcgtccccgccggagatccaccatggccggcaaccccgccaccacttcctcctccgcattatctcccgagaaatttaatttcaatttctcccccgataacccctcccgaatcaccctcacttcggatcaggtcaaccactgcacccaagccctcaacattctgaaggagaagctccacgctcctaacgtgatcactcangagttcgcacacttgcaggcgaacaggataacgccgagcgagatgaggagaagatgcaccgtcgcgtatgacgacgtcaatttgaggaaaaaccgatacaccgacgttctgccatttgac

SEQ ID NO: 43209 - DNA, 359 bp, Glycine max
  Clone ID: LIB3093-024-Q1-K1-B3
atcgcattgaatccattttcgtcaaacataacataacatgtctaatcatcatcattcctccaatcccttcgcatcatgctcatgcactcactccgattccgattccgactcagtgagttgcttcgtcaccgatctcttcgaaactcgcctatgctcctgcgacgacgacactgacataaaccccttttccgacgtcgtttgcgacctccaccgtacggagcatgtgttagggttagggtttggcgttgaaattgatccccatagccaaacgaatggggataatcatcatcgtgatcgggttttcgatgctgatagagttttcaatttcacggtgggggatggttcgagcggggttaggg

SEQ ID NO: 43210 - DNA, 297 bp, Glycine max
  Clone ID: LIB3093-024-Q1-K1-B4
tttacgcaaacataacataacatgtataattttcataatgactccaatcccttcacatcgtgctaatgcactcactcgggttccgattccaactcaatgagttgatacatcaccgatctgttagaaactcgcctatgctcctgctacaacgacactgacataaacccattttccgacgtcgtttgcgacctccaccgcacggaacatgtgttaggattagggtttggcgttgaaacagatccccatagccaaacgaatggggataatcatcatcgtgatcgggatttcgatgctgat

SEQ ID NO: 43211 - DNA, 445 bp, Glycine max
  unsure (1)..(445): unsure at all n locations
  Clone ID: LIB3093-024-Q1-K1-B5
cgtcgggaccgtgggttgtgaggcgagggtaaggtcgcgttggttgcgtcggtcggcgctgtcctctgttctcgttttggtgtcagaccgaaccctagctcgatcgaaccatgtcgaccaagcaaggtggaaaagctaagcctttgaagaaactaagtctgataagaaggattacgacgagattgatgtggctaacattcagaagaaaaaggaagaggagaaggcgctaaaggagttgaaagccaaggcgcaacagaagggaagctttggaggttctgggctcaagaaaagtggaaagaaataagggctctttatcatgattgtatgcattcaatattgagccctgtaattacagttgctaccatgataacttctcttattattgtggcctactntattgctaatgtgtactgaactgangtatgtcgtgatgtaagctgcaata

SEQ ID NO: 43212 - DNA, 446 bp, Glycine max
  Clone ID: LIB3093-024-Q1-K1-B6
ctctcttcttcagtggtggaagctactagaacactagtttgttgagcactgcgatgaggaagtggacggttgcttccgctctccttcttctctctctcctctttctctttgcagatcaaggtcgaaagtttcaggcgaatgccgagggagattccgacgagcttgtagatccacccaaggtggaggacaagatcggtgctgtgcctcatggcctttcaaccgattcagatgtcgtcaagagggaggcggagtcgatctcgaagagatctctccggagcaacgcggagaagtttgagttccaagcggaagtgtcgcggcttatggatatcatcatcaattctctctacagtaacaaggatatcttcctcagagagttgatttccaatgcttctgatgctttggacaagattaggttcctctccctcacggataaagaagtgttggga

SEQ ID NO: 43213 - DNA, 274 bp, Glycine max
  Clone ID: LIB3093-024-Q1-K1-B7
atataattctgatactggagacttttagagaccgacatgggatgcaaagacgggggtgcgtggcaagtgttgagcaaactgggcacatattatgacccgacaagatatatgctcttctaggaatataagctgtcatgatcccagatgccgattggtttcagcctatgatccacctaagccttgcgctggatgagaataagaactgtccatactttaattggaacggtgactgatacaacacaactggggatttagcattgaaaactctgactga

SEQ ID NO: 43214 - DNA, 376 bp, Glycine max
  Clone ID: LIB3093-024-Q1-K1-B9
caaaaccctgaagaaagacacagccattgtttacttttcattgattgagccaaagctttgtattttctgcgataattttccattgggtggaagaaagtctcaacctttattcgaaagagcaaggatctgagttgagttgagtgatcatgtgtggtggtgcgattatctccgacttcataccggcaggtcccgccagcggggcgcggcgcgtgaccgccgacatcctgtggccgagtttgaggaagcgcttctcgaagccgctgctggacgatgatttcgaggctgggttcagagaattcaaggatgattcggaaatcgaggatgttgatgacgaggacgatgaagacgaggaggagttgaagaagaagccctttgg

SEQ ID NO: 43215 - DNA, 369 bp, Glycine max
  Clone ID: LIB3093-024-Q1-K1-C1
cccacgcgtccgatctttatataataatataaataagaatgaaaaaatgaaaaaaaaaaaggaaaggggaaaaaaaaaagaatctatataaatataaaaataatatatataaaggacaaaatagaaaatcgaggtacccaatttaatgataaactttccttccattttatgttcctatagtaggcctagtatttccggcaattgcaatggcttctttatttctttatgttcaaaaaaacaagattttttagatacagaaaacaaagtaaaattctggggttttttattccccaattataatactaaattcaaaaaaaggagagtaatgagtataatctttcgctcagacgatgtactgatatattctat

SEQ ID NO: 43216 - DNA, 439 bp, Glycine max
  unsure (1)..(439): unsure at all n locations
  Clone ID: LIB3093-024-Q1-K1-C10
cccacgcgtccgcaagaacattagcttcactgtttgggatgttggtggccaggagaagatgggtcccttgtggaggcactacttccagaacacccagggtcttatttttgttgtagacagcaatgatagggacagagttgttgaggccagagatgagttgcataggatgttgaatgaggatgaactgagagatgcagtattgcttgtgtttgccaacaaacaagatcttcctaatgcaatgaatgctgctgagattaccgacaagttgggtctacactctctcagacagcgccactggtacattcagagcacctgtgcaacctctggggagggcctttacgaaggtctggactggctttccaacaacattgccaataaagcttaatgcctttgggagtcttgcggattggtaattctggatgcangggtgaacattatc

SEQ ID NO: 43217 - DNA, 438 bp, Glycine max
  Clone ID: LIB3093-024-Q1-K1-C11
tgttgatcgagtctgactcatggcggagattgaactgaaaactgcacctgctgggtttcgttttcctacaacaaatcaaaccagacattgtttcactcgctacatagagtttcatagatgcttggcagcaaagggtgaaaactcaggtgaatgtgagagatttgctaaatattaccgctccctttgcccgggtgaatgggttgaaaggtggaatgaacagagggagaatgggacttttccaggacctctttgaaatcatgtggcacttggatatccttccgaggcatgagaagtctttaacattctattctcttcagttgttgagtaattgtgaataaggcagtttgtggatattcattacttcacaaatggttgaagccattttgattttaaagttgatttaattgttctgtggatacgcatctgagttacggaact

SEQ ID NO: 43218 - DNA, 252 bp, Glycine max
  unsure (1)..(252): unsure at all n locations
  Clone ID: LIB3093-024-Q1-K1-C12
aaaaaaaaaaaaaaaaaaatttttaattttaaaaaaaaaaaaaaaaattcgtaatgttgaaattttgaaattggannaaaaataaaataaatattatttataaatttttaatatattatttataataaatttttaaatttattaattaattttattttttatataaatattatattattatttattaattattattttattattatttttaataattaaaaattatttttttttatttttttatttattttt

SEQ ID NO: 43219 - DNA, 420 bp, Glycine max
  Clone ID: LIB3093-024-Q1-K1-C2
taatatttttatataataatatttataatattaaaaaaaaaaaaaaaaaattgtaaattgttaaattttagtagtttttatttaaaaaaaaattattttatttaatttattttttatatttttatttattttttaaatttattaatttataattttattatttatattttattttttttttttattttataatattaatttattattttatatttatttatattttttaataaatataaatattatttattttatttatttaatttttttttttttatatatatttatttttttaatttttaatatttattataatttattgttttatttttattttatttatatttctttcaatttttatatattttattttaattaatatttatttttttataaatttatattatttttttttttttt

SEQ ID NO: 43220 - DNA, 396 bp, Glycine max
  Clone ID: LIB3093-024-Q1-K1-C3
cgatcttattacgtgaccttgcttttcccaatggtgttgccttaagcaaagacggctcatttgttctggtagcagaaaccgctacttgcaggatcttgcagctttggcttggtggacctaaggctggccaagtggatacatttgcggttctgcctggtttcccagacaatattagaagaaattcagaagggcatttctgggtggctctgcatgcaaagagaagccctttcgcgaagtgggtttcttccaatccttgggtgggaaaggcattgcttaagattggatttaatttcaagcagctgcacacatcatttgcagggtggaagcctcatgctgctgctgtaaagctgagtgataaaggagagatattagaagtcttggaagattgtgatggga

SEQ ID NO: 43221 - DNA, 292 bp, Glycine max
  Clone ID: LIB3093-024-Q1-K1-C4
cttctcttgaggacgaacaagctagcttgattgcctagacaacaatttgattcacattttgcaaattgaagtagcttgcttaatgtactactactatatatgtgcaattatttgcaaattggctttggtccagaaaatgatcaccaatgttgtgatcatgtgggaaatcttgtgtgatatgtattagtgtaatgcttcaaaaatagagtgaacaatatatgtgtagttaactagttatagatattggatagagttcttcatccatttgaataaaggacttttgccgaactac

SEQ ID NO: 43222 - DNA, 140 bp, Glycine max
  Clone ID: LIB3093-024-Q1-K1-C5
taaaacaaacaaactaaattcttttacattacaacaaaaaaaaacacatctcgcttcctttaaatactagccccccctcccacaacaatataaattcaactattaacacaataacctttccccacaaaatcatcaccaat

SEQ ID NO: 43223 - DNA, 445 bp, Glycine max
  Clone ID: LIB3093-024-Q1-K1-C6
gtagtttcatccttggccaatctgcatggttggactcttgagaatctaaaccttgatggtgtcaaaaatatcagtgatgctagcttgatggcaattgctgaaaactgtgcattgctatgtgatcttgatgtctccaagtgcacaatcactgatgctgggattgcagtcctggcacatgccgaacagattaatctgcaaatcctttctttgtcaggttgcactttggtctcagacaggagcttaaccgctctgagaaaattaggccacacccttttgggactaaacatccaacactgcaatgcaatcaacaacagcacggttgacacacttgtggagtttctctggaggtgtgacatcctctcctgagctgaaagaagaactaatctcacttgcaatttaagccaggatcacatcatgcaagaagcttgtatgcttagtgttgcac

SEQ ID NO: 43224 - DNA, 445 bp, Glycine max
  Clone ID: LIB3093-024-Q1-K1-C7
agagagttgtggtgtggtggtggttgtcgtttttgaaatggcagcgtcgtcgtcagagaggcaagtggtggtgataggcatagacgacagcgagcagagcacgtacgcgttgaattgggctctggataactttttcccgagcccaattttcaagctcgttctcatccactccaggcccaccgccacctccgctgtgggcttcgccggccctgtgtttgcaggagccgctgaggtcttgcctattgtagattccgatttgagaaagattggcgccagagtcctcgaaaccgctaaacaactttgcatcaacaaatccgtaaatgatgtgacagcagaagtggtggaaggtgatcctaaaaatgttctttgtgatgctgtagataagtaccgtgctgcaatgttggttgtgggtagtcatgggtatggggctataaaaaggcgggtt

SEQ ID NO: 43225 - DNA, 291 bp, Glycine max
  Clone ID: LIB3093-024-Q1-K1-C8
ggatttattggacaaataaggttcattccatttattgcattttttggtttgttggtgttgtaaattttatacagccacacaggattggtatagtatatatttcataactgttgtatgtttttacacatggtgttggtgaaattttttgattactttggggtttctcttttagttgggaggagaaccttatgttaatcttttgtaagattctgttaattttttcctgtcttcacaattgttcactatcaaaatagtaaagtttcacaagaaatgtgaattatttttgctttt

SEQ ID NO: 43226 - DNA, 438 bp, Glycine max
  Clone ID: LIB3093-024-Q1-K1-C9
aaacccccctctctctactcaaactaaccactctgtttctcttgctctacttttgccctgtgtccagtggaacaaatcttcatccaaattaggttttgttttggagaaatgtatgcagagactggtcttttcttcccatatttgcacaacgtctctcacggccttcatcagcttgaggagtactgcaaaacccagaagtccaatgcttcaatggatgaccttgttcagtcttctgccatgtcagagtatgatttggcagctgagggagatctgttcaaagctcctgaacctattattgaagagccaatcatggacatgtcagcggccatctcaatgatgtcttgtggggaagatgtctcgtcacaaggactaaagtccactgatattgatattctttaaaatgattcagttttgagtgaggtgttctatgaatgtgaa

SEQ ID NO: 43227 - DNA, 409 bp, Glycine max
  unsure (1)..(409): unsure at all n locations
  Clone ID: LIB3093-024-Q1-K1-D1
gaccgtactatctcgttatcaagaaaacgataaatcctgcggcgggacagtaccaactgacgcacatcattccctctctcttcggatctcacagccgccgctcacggcggtgccgccgttgcactcgccgctgctctctcttcgatctccccctcgccgatactgagaaggtaaagtccttaacgatggtcgaagtctctggtagtaagacttgtggcactttggctctttctggaggttgatgaaggtgacatctccgatgtagcggtttcgttgagtgaaatctgtgttgaagagtaagctgttgtcatgtgagaactttntaagagtttttttgattttacagaatttactatgattgtttatggaaaaaactcttctctgcaacatcaagtgctggcattcgaca

SEQ ID NO: 43228 - DNA, 440 bp, Glycine max
  Clone ID: LIB3093-024-Q1-K1-D10
cccacgcgtccgtgacactcttctctccttaaagccaccacattctgataccctggtgatcaatcaaagtgaagatcagcatagaatgcttgtttgattctatttcattgctatggataagtacgaggctgttaaggatttgggagctggcaattttggggtggctaggctcatgaggaacaaggtcaccaaggagcttgtagccatgaaatacatcgagcgtggccccaaggtttcttcttttatacaatcacttcatcaatttatgatttatcccaacccttttgtgtgtttattattatattaagcagttaaagagatggtagaacttgatgcagaactgaacaaagacttatgtttgttaattattctcctatgatttgtgaagtttatttctatgtaccggtttacgctcaacccatcagaaatcatatgacttt

SEQ ID NO: 43229 - DNA, 451 bp, Glycine max
  Clone ID: LIB3093-024-Q1-K1-D11
acgcttgatcatcctggtgttggaagggttccaaaggctttagaaggagagcaagtggtagcagggtgaccaacttgactttcttatgatgctggtgaagctatccaagggtggataccacggaaggcggatacttttgagaggtttcataaaattggccaaggaacctacagtactgtgtataaggctcgtgatttgactgaccaaaagatcgttgcattgaagagggtacgctttgataattgtgatgctgagagtgtcaagtttatggcaagggaaatccttgttctgcgtaagcttgaccatccaaatgtaataaagttggaaggcttgataacatcgcagacatcttggagcttgtaccttgtttttgaatacatggaacaacgatcttacaggacttgcatcaagtcctagcattaatttttctgaaccacagggtaaaatgctt

SEQ ID NO: 43230 - DNA, 442 bp, Glycine max
  Clone ID: LIB3093-024-Q1-K1-D2
cttttctcttctccctttttctctctgtctctctctctcggtctcgctcttcttctcatcaagcacagagttacagactcaccgatcttccgattctctttcgtcttggtttatgagctcgaaggagagacccactcttggtggcacgcggattaagacccgcaaacgaaatattgctgcgccgctggaccctgcagcattctcggatgcagtggtccagatttatttggataatgctggtgatctggaacttattgctaagagtattgaatcttcagaccttaacttttcaagatacggtgacaccttttttgaggttgctttcactgggggtcgtacacaacctggaactaccaagcctgatgagggggaccgccacccatactctataatagagtgtgagcctaagcgtgaagtcatttaccatctgtaatctacatac

SEQ ID NO: 43231 - DNA, 440 bp, Glycine max
  unsure (1)..(440): unsure at all n locations
  Clone ID: LIB3093-024-Q1-K1-D3
cttttcctgctgagagtgagaggcgttaatctgaatgggttacatccaccatggaagaaccggtctcaggcacttattcagattcagaaccgccaccggcgtggtaaaaaactccgcgagatcgcaattacgcactgcatttctctcccattcttcccctatcctcggcaacaacgtggttttttttctccacaggcgacaaattcctgcacgaaattaccgcggaggtggagaaagacaggcgcagggagcgaaacgagcgtttgcgcctcggcctcgacaccgccgacatcgacgccgagtcggagcaggactacatgggcgtggggcccctcatcgcgaagctcgagaaggaaatgctcaaggaatctgctgagctgaaccgctacgaggagcccaccgactccgangacgactncgacgaggaaaccatggacgac

SEQ ID NO: 43232 - DNA, 280 bp, Glycine max
  Clone ID: LIB3093-024-Q1-K1-D4
cgcgtgcgcttttccttctcacagtgaaaagcatacatttgaatgtgttacatccaccatccaacagcgtgacgtgggcacttatgtagattcataacacacaccgccgtgataaaaaactccgcgagatcctaattacgcactgcatttctatcccattcttcccctatcctagacaacaacgtgcttatttttctccacaggcgacaaattcctgaacgaaattactgtggatgtggataaagacaggcgcagggaacgaaacgagcgtatgcgcctc

SEQ ID NO: 43233 - DNA, 377 bp, Glycine max
  Clone ID: LIB3093-024-Q1-K1-D5
cccacgcgtccgatggcatcttcaccaaccttaataccctttctcctcatcttcttcctctggcactggcactttcaccgttcctactacctccccctctccgaggagaaccccgaagatgacgtcatagtctcgtcgccgaagggaaccttcaccgcagggttcagccccgtgggggagaacgcgtactgcttcgcgatatggttctgcacgcaagcgacgacaaagaccgttgtgtggatggcgaaccgcgatcaaccggttaacgggaaacggtccacgctttcgctcctcaagacggggaacctcgatttaaccgacgcgggacagttcgatgtctggtccaccaacacgctctgctcgaagacgcttgagct

SEQ ID NO: 43234 - DNA, 450 bp, Glycine max
  unsure (1)..(450): unsure at all n locations
  Clone ID: LIB3093-024-Q1-K1-D6
cccacgcgtccgtctctctctgttaatgaccttcttgcatgctgtggctttctgtgtggatctggctgtgatggaggatatcccttatatgcatggcgatacttagcccaccatggtgttgtcactgaagagtgtgacccatattttgatcaaattggctgttctcatcctggttgtgagccagcttatcggactcccaagtgtgttaaaaagtgtgtaagtggaaaccaagtttggaagaagtcaaagcactatagtgttagtgcatacagagtcaactctgatccccatgatatcatggcggaagtttacaagaatgggccagttgaagttgcatttaccgtttatgaggattttgcttactacaaatcangagtttacaaacacatcactggttatgaactangtggtcatgcagtaaagctaattgggtggggaacaactgatgat

SEQ ID NO: 43235 - DNA, 412 bp, Glycine max
  Clone ID: LIB3093-024-Q1-K1-D7
ggaggagtgaatagtgaaatgcttagagagagtctcgagaaaatagttggaaaagatgattccacgtttagtggatttgaccttgctacccttatcaggaacaaatatgggaggtcttatgatgttcagttgataaagaaggagttcatgggaagaaatctccttgcgatgaatgtcatgtggaagtacatggagcagagatccttcccattgaccgaagaagagtatattttgaggcttgatgatattgcaaacaacttaaaatgttggggagctgtgtctcatattcggaacagcctagaaaagtcgaaggaacgacctcggatagggaaggcagtaagcatttttatagatatggatgagtcgggtgctcgttccaacgagtggatctacaaatagaatgtggtactga

SEQ ID NO: 43236 - DNA, 434 bp, Glycine max
  Clone ID: LIB3093-024-Q1-K1-D8
gagagtcttcccgtctcttcctcttcacttcttataccggcgcccccaaacgacgccgttggctgttctcttatgtaaacgccgttcgagaacaaaccaaaaaaagaaaagaaaatcagttattgccgttgttgttttgtttccggttcggtttatttcaatggatcgggcggcgttgacggttggaccgggcatggacatgccgatcatgcacgacagcgaccgttacgatctggtacgcgacatcgggtccggaaatttcggcgtggcgaggctgatgcatgataaacaaaccaaagaactggtcgccgcaagtacatcgaaaggggtgataagattgatgaaaatgtaaagagggaaatcattaatcacaggtctctgaagcatacttacatttgtagatttaaagaactttaatgtttttggagtgtctt

SEQ ID NO: 43237 - DNA, 375 bp, Glycine max
  Clone ID: LIB3093-024-Q1-K1-E1
caatcgtagccgtcgcactttgcgttttctgcgtcatctccgattccccgacaatggccagccaaatgagcaagaagagaaagttcgtagctgatggagtgttcttcgctgaactgaacgaggttctgacaagggagttagccgaggacggatactccggcgtggaagttagggttacgccgatgcgcaccgaaatcatcatcagagccaccagaacccaagccgttctcggtgagaagggaaggagaatcagggaacttacctcggtggttcagaagaggttcaagtttcccgagaacagtgttgaactttatgctgaaaaggtcaacaataagggtctttgcgctatagcacaagctgagtctctccgctaca

SEQ ID NO: 43238 - DNA, 439 bp, Glycine max
  unsure (1)..(439): unsure at all n locations
  Clone ID: LIB3093-024-Q1-K1-E10
caccaaagtacttgtgagtgtatacccaacacaaactaagatcaacatggactactacacccgcgtttcagaagttgagagggaacctatcatggagtattccacaccacgaccaatgatgggcaactaccaccaccctaatgctcaccgtgtcctcaacgagaagattgtttatgaggaggatgtgattggaggatcccgccacaaccacatgcatcaccaccaccctgagactcatgagagagtcaaggtggtggagtatgaacaagttcctgagaggcgcgttgtctatgaagagaaagttgcttatgacaacgatcgttactactctccaaggtattgaaattggacaaatggaagaacacctataacgtgttatcatgtggctttntattangcaggctacctagtataccaaaagcaccactgtgcttgtact

SEQ ID NO: 43239 - DNA, 374 bp, Glycine max
  Clone ID: LIB3093-022-Q1-K1-F10
gataaagttgctgcaaaccttgtccgacttctctcatataacaataagaatttcttagagaccgggttaattgttggtggatgggataaatatgaatgtggacaaatttatggagttcctctgggtggaacaatagtacaacaaccttttgctatcggaggatctggctccagttacttgtatggtttttttgaccaagcctggaaagagggaatgaccaatgatgaagctgacgatttattaaaaaaagctcgttcactggctattgctcgtgatagcgcaagtggttgggttgtcctaacagtcataataaactcagagtgagtgaccaggaatttctaccctggcgaccaacttacattatggcacgagga

SEQ ID NO: 43240 - DNA, 371 bp, Glycine max
  Clone ID: LIB3093-019-Q1-K1-A5
gtccgggtgattcttattggggatcccgccagcccactttccggaagctctgagtcgcctcaaggcaaagatcttcacacccccccctcttcgcttctcttgtccgcagaaagctctccgccgcttctttccatctttcataccatggtggggttcaccatcaccccccgggtttataaattcaaattcaaattcaaattgtctctcttgagtctcaactcacttacccacaatcttttccacactgtaatgtgatcccttcgcaccaccttcgaatggatccctgggacaacaattccatcgcctttttgcacttcaaccaagcgctccaaaccaacccaatgatcctgcattttacattccctgaattc

SEQ ID NO: 43241 - DNA, 392 bp, Glycine max
  unsure (1)..(392): unsure at all n locations
  Clone ID: LIB3093-019-Q1-K1-A6
atctgaaacaagcatggagtntggaaatggtgaattcagctcataggagctaaagaaaatagaggagggcgataaacttgctgaaattgccatggccgatcctaagcgtgctaaaaggattttggctaatcgtctatcatctgctcgctcaaaagagaggaagatgcggttcatttctgaattagagctcaaagtacaaacacttcatacagagacaaccacatttgtctactcagtttaccaaattacaggtgtgtacggtctgagttgagccataattctcttttctttcaggttttaataatattttattgtgtggaataatgtttgctttctagcattcatttattcttttttttcctttcttttgatgtgcttgtctacagatggat

SEQ ID NO: 43242 - DNA, 373 bp, Glycine max
  Clone ID: LIB3093-019-Q1-K1-A7
caaacctaacgcagcatcgctattctcttcattccatggctttgcccaaccagcaaaccgtggattaccctagtttcaaactcgttatcgtcggcgatggtggcacaggaaagacaacctttgtgaaaaggcatctcaccggagaattcgagaagaaatatgagccaaccatcggtgtggaggttcacccattggattttttcacaaactgtggaaagattcgattttactgctgggatactgctggacaggagaaatttggtggcctcagagatggatactatatccatggacaatgtgctattatcatgtttgatgttactgcccggctaacatacaaaaatgtttccacctggcaccgggatctttgcag

SEQ ID NO: 43243 - DNA, 417 bp, Glycine max
  Clone ID: LIB3093-019-Q1-K1-A9
taaatattccggtttgcgtatctctgcctaaaaggattgaaagatgggtcaagcgctagggggctatcaagttgatcagtcaaatgtggctatcaaggagcattttggaaaatttgatgatgtcctagaacctggatgtcattgcctgccttggggtcttgggtaccagattgctggtagtttgtcactgcgtgtgcagcaacttgatgttcgatgtgagacgaaaaccaaggacaatgtctttgtcactgtggttgcatctgggcaataccgagctgggtctgagaaagcatttgatgcattctataggcttaccaacacaagggagcagatccaaatatatgtttttgatgtcatcagggccagggtaccaaaggtggagttggattcctgcttttgagctgaagaatgttttat

SEQ ID NO: 43244 - DNA, 315 bp, Glycine max
  Clone ID: LIB3093-019-Q1-K1-B1
aggaataattacagggtccactgatggcctgctacgtttttgggaaaatgatgatggaggtatacgctgtgcaaaaaatgtaacaattcacaatgctgccatattatctatcaatgctggggagcactggttaggcattggagcagctgataattctttgtcgctcttccaccggccccaaaaaagacttggtggttttcctggcactggtgttcaaaatggctggttgaccaatggccatgtctttgttactgtgggttgttttggtcaggtgtgttgctttagacttggaaaggaaaaggatatgcagcggtg

SEQ ID NO: 43245 - DNA, 383 bp, Glycine max
  Clone ID: LIB3093-019-Q1-K1-B10
gaacaaagcacttagtgctattcaataattacgaaaaaccaacagcgagtgttggtggggtttggtccaggctggaccagggaatgaatagagatgagaggctttcggttgaagagaactgagttaagcggcgaagccaaacgcagaatcggcggcagaaattgccaccggaagcacgtcgaagacgggtgaaccaaacacaaaattccatccaccacttctcttttcaatccccaactcaaatctgggaagaaaatctcaatttctaaattgtaattcttagcactactgctagtagtagtaaaaaaaaacaattagaaagtagtagagtgtttttttttctttttttccgttggtttacttttaagatgggtgagaagagc

SEQ ID NO: 43246 - DNA, 273 bp, Glycine max
  Clone ID: LIB3093-019-Q1-K1-B11
cccacgcgtccgcccacgcgtccgcccacgcgtccgcgtcattcctttccttattggcttggtagcatacaatgaatcacaaggcacctagtttttttctggggatggatgtgaagagaatcatgggtggtgatagagatgggaacaccaattgggtgattaatgaagatggtgaataagatagcaatgattcattatccattggactcaactcaatggactttatgtgcttgtcttttttattagagcttaactaggtctctttaatttttt

SEQ ID NO: 43247 - DNA, 187 bp, Glycine max
  Clone ID: LIB3093-019-Q1-K1-B12
cccacgcgtccgtgaacgtctgggttgccctcatgggcgccttcctcatcttgctggcttggcgcctctgtcatgcctacttctttcttcccttacacctggtttccttcgccactctgcttatggttctgctcatgattcttacctgttttccccaacaagccttttttcaccctcatccttcaac

SEQ ID NO: 43248 - DNA, 137 bp, Glycine max
  Clone ID: LIB3093-019-Q1-K1-B2
actctaagtccttagtgcaaattttattcttccagttagttatacttacaaaattttgtgtttggcttaaaatacacatactctactattttatattattttattccacttactactctcccaaataaagtattttt

SEQ ID NO: 43249 - DNA, 102 bp, Glycine max
  Clone ID: LIB3093-019-Q1-K1-B4
ccaacccttcttaaaacaacaaaagttttgtttttttgccaccaaaaacaactccctccagggtctggaattttaaaagaaaaaaattttttatttaattta

SEQ ID NO: 43250 - DNA, 363 bp, Glycine max
  Clone ID: LIB3093-019-Q1-K1-B5
ttccggtaactttttaattcctaaattctctaaaattcgaaattctaatttcgttagggaaaagaaattggttgtttataagtgagtatttcttgaaaaagccagggtccttctatcggaatcgatttgggaacgacgtactctttcgtctgcgtgtggcaacacgatcgtttttaaatcatagccaacgatcaaggtaacaaaactaccccatcctactttgctttcaccgacacaaaacggttgatctgcgatgctgctaaaaaccaagttgctattaacccaaccaacaccgtttttgatgctaaacgttttatttgaaagcgttttttctattcatcaatacaaggttacattaaattt

SEQ ID NO: 43251 - DNA, 335 bp, Glycine max
  Clone ID: LIB3093-019-Q1-K1-B6
tatctcacgccgaagaccgtgcgttgaaatcttgcaaggacgagatccaagcatcgggggttgtgcttcccagaatggacgctcttcttactatcatcaagatacaaaatggaatatcgacggaccagtggtagtgcaggaaaccggttgccgtgacagaagacaatctataagggaacaggcatatcaggactctcttattgaggatttgtcacaagattttttgtttgccaatcaaccacaggccaacagaaaatgttgatctggacaacgtaaagcaagcatcttttgacacacagataacatcatctaatattggctttaagcttcttcaa

SEQ ID NO: 43252 - DNA, 392 bp, Glycine max
  Clone ID: LIB3093-019-Q1-K1-B7
cccacgcgtccgggaggagttcaaaagacacagactaggagctgcccaaaattgctctgccgctcttaacggcaaccacaagctcaccgatgctgttcttcctccaacgaaagactggagaaaagaaggtatagtgagttcagttaaagatcaaggcagctgcggatcatgctggacattcagcacaactggggctttagaagcagcctatgcacaagcatttgggaagagtatctctctttctgagcagcagctagtggactgtgctggccctttcaacaactttggctgccatggtgggttgccatcacaagcctttgagtacattaaatacaatggtggactagagacagaagaagcatatccctacacaggaaaagatggtgtctgca

SEQ ID NO: 43253 - DNA, 326 bp, Glycine max
  Clone ID: LIB3093-019-Q1-K1-B8
ggagattcacttcatccatgtgaaattctattcaatcggggtttatttggagccgggggtaggaggccacttggaccagttcaaaggaaaatctgcaaaggagctggaagataatgaagagttcttcaatgctctcatttctgccccggtggagaagtttattagacttgttgtgatcaaagagatcaagggtgcacagtttggggtttagattgagactgcggttagggataagttgtttgctgatgacatatatgaggaggaagaataagtatctttgtaaaatgtttatgaatttttttagtccaagtacttttataaacttt

SEQ ID NO: 43254 - DNA, 421 bp, Glycine max
  Clone ID: LIB3093-019-Q1-K1-B9
ctcgtgtcaaaagaagcatctcgtgtatcgtctcctaaaaaaaatggaattgatgtgtcattgttcgagctttcttcttccgccggagaatcctaacacgacgtgttcgctttctctaaagtacgctctcgttgttctcaaccaaagcctcccgagatttgctcccctgctttgggaccacgctcaagtgcgagtttgtgctgatggaggtgccaatagggtgtatgatgaaatgcctcttttcttccctcatcaacaaccttcccatgttcgcaccaggtacaagcctgatgtaattaaaggggacatggattcaatcaggacagaagtacttgacttctatgcaaagctgggaactaagataattgatgagtctcatgatcaggacaccacagatttacacaaatgtgtggcatacata

SEQ ID NO: 43255 - DNA, 373 bp, Glycine max
  Clone ID: LIB3093-019-Q1-K1-C1
cacaatccttcgatttgctttcttcaacgcacccacttatatttcttaaactagttttccagagagccgggagcactgtacggtgccgatccaatatacaggtctgtaaagccttgtttgggacttcccaaagacccccacctttcccttgattgatatgttttgcaaagcgtatactcttttgcatgcaaaatcgccctcgtcgattcccactctttccaaacacttaccttggcgcacctgaaattacaagtcgccacaactgcccacggtgttcttaaaactggctttaacaaaaacgacgttttcctactgctcgctcccaacagcatccactaccctatattctatcttgctggcaccgccattggcg

SEQ ID NO: 43256 - DNA, 261 bp, Glycine max
  Clone ID: LIB3093-019-Q1-K1-C10
cccacgcgtccgcagtttttacatttttttttttttataatttggatgatggttaggcacatatctgagaatttttacgaatatcacacccattgtcccttatagggttcgagtatccttttttgaaaaacaagttcgggttaacattctcgtctattggagatattgatctgttatatatggtgtccatactttctcttattttttatcattgaaagaaataggaaattgaatcagattatgttcaactttttgcactga

SEQ ID NO: 43257 - DNA, 431 bp, Glycine max
  Clone ID: LIB3093-019-Q1-K1-C2
cccacgcgtccgggtggatcaaataattcgggggacgatgagaggggtagaatcgaagaaggtgaacgtagcttcggcggtaaccggtggccacgacaagagactttggccttgttaaggatacgctccgatatggacgtggcgtttcgagatgcaagtgtcaagggtcccttgtgggaagaagtatccaggaagatggcagagcttgggtatcacagaagctccaagaagtgcaaagagaaattcgagaacgtgtacaagtaccacaagagaaccaaagaaggccgaagtgggaaacaagatggcaaaacctatcgtttctttgatcaactacaagcccttgagaaccacttttcaacaccccaattttccaacccttcaacaaaaccctcacaatcagcaccatcaagagtagtagcattatcggtgtc

SEQ ID NO: 43258 - DNA, 325 bp, Glycine max
  Clone ID: LIB3093-019-Q1-K1-C4
cccacgcgtccgggcttagctacattccttctcatgtaggtggtgcacttcccattgtaaaggcgcttgatcctccagaaagaccagtggagtatttcccagaaaactcgtgtgatcctcgtgctgccatttctggaaccttggatggtaatggaagatggctgggaggaatttttgacaaagacagctttgtggagacactagaaggatgggcaagaacaagtgttacaggaagggcaaagcttggaggaatccctgtgggaatagttgctgtagaaacacaaacagtaatgccaataatacctgctgatcctggtcagcttga

SEQ ID NO: 43259 - DNA, 341 bp, Glycine max
  Clone ID: LIB3093-019-Q1-K1-C5
cccacgcgtccgggcttagctacattcgttctcatgtaagaggtgcacttcccattgtagagccggttgatcctgcagaaagaccagtggagtatttcccagaaaactcgtgagatcctcgcgctgccatttcgggaaccttggatggtaatggaagatggctcagaggaatttttgacaaagacagctttgtggagacactagagggatgggcaagaacagttgttacaggaagggctaagcttggaggaatccctgtgggaatagatgctgtagaaacacagacagtaatgcagataatacccgctgaatccgagccgcttgattcttacgagagggtt

SEQ ID NO: 43260 - DNA, 346 bp, Glycine max
  unsure (1)..(346): unsure at all n locations
  Clone ID: LIB3093-019-Q1-K1-C6
gcgcccacgcgttcgatcttctgcgaggcatatatgcttatggttttgagaggccttctnctaggcagcggaggggaattgttcctttcttcaaaggactggatgtgattcaacaggctcagtctggaacaggaaagacagcaacattttgttctggaattttgcagcagcttgattatggattggttcagtgccaggctttggttttggcaccaacaagggagctagcacagcagatcgagaaagttatgcgagctcttggtgattacttgggagttaaggtccatgcttgtgttggtgggacaagtgttcgtgtggatcatctcattcttcaagctggtgtcca

SEQ ID NO: 43261 - DNA, 260 bp, Glycine max
  Clone ID: LIB3093-019-Q1-K1-C7
gcaaaaacagaatcactctgttctctctgttcaaacagagtttgcataatactcagtgacagcacttttcttcctttcttcaacttcattacaaaactcttactcttatttcatgcttccaaatataaaaacctttttactattattttctataccaacactttctttctttatttacaaagttaatttctccttttagttagtcacacaaaacaaaacactttatttgtttcttcatctaccctttcacaaattgactt

SEQ ID NO: 43262 - DNA, 419 bp, Glycine max
  Clone ID: LIB3093-019-Q1-K1-C8
gcagcatcgctatactcttcattccatggctttgcccaatcagcaaaccgtggattacccgagtttcaaactcgttatcgtcggtgatggtggcacaggaaagacaacctttgtgaaaaggcatctcaccggagaattcgagaagaaatatgagccaaccatcggtgtggaggttcacccattggattttttcacaaactgtggaaagattcgattctactgctgggatactgctggacaggagaagtttggtggcctcagagatggatactatatccatgggcaatgtgctattataatgtttgatgttactgcccggctaacatacaaaaatgttcccacctggcaccgtgatctttgcagggtctgtgaaaacatcccaattgttctttgcggtaacaaggttgatgtcaagaaca

SEQ ID NO: 43263 - DNA, 281 bp, Glycine max
  unsure (1)..(281): unsure at all n locations
  Clone ID: LIB3093-019-Q1-K1-C9
tccttggtaaaagagtttaaaaaagcaacttttcaactgtacccctaanggatgaggtccgtgaaaatactaggctatttatcttcnanacatactctataatacaccaactcatttacatgggagttcttgcttagaagttaaattttaattatgaggaggcttagagatggattgttaatttcattctgagctcaaatctttgatccaaaattgatttctaatacttgatctattattattgaacctatttttcttaaatatttttatcatcttttttt

SEQ ID NO: 43264 - DNA, 294 bp, Glycine max
  Clone ID: LIB3093-019-Q1-K1-D10
cacaccaacattcactacacacactctaataccttacgattttcaaggttgatagagcacgattgtttattacagtctttataagattaccttctaaccaaatcggaatgaccttatctacatgatcctctctatcacccattgtcaaacaccaacctttttgcataaaaactattctttacgcgtgatgggatcattaccttagagtgctgatgactgaaaataaaccccttgatcacattaacaccggttctccagtctcttcactgattcaacatgcagaagaaccattat

SEQ ID NO: 43265 - DNA, 248 bp, Glycine max
  Clone ID: LIB3093-019-Q1-K1-D11
cactcatggaccccaaaaacgtgaaatcggacctggttctcattctcgattacggtgcccagtacacccaccttatcactcgccgcatacgcaacctctcggggatctacctaagcatctacggcaccatctgtctttcaaccatcaccgacctgaaccccttcgtcagcattctctccgggggccctcactccgttcacaccccagactccccccccccccctatgaatcaattttactaatattat

SEQ ID NO: 43266 - DNA, 368 bp, Glycine max
  Clone ID: LIB3093-019-Q1-K1-D12
caacaattgctgctgcagtttatcttagaatggcaggaaggccacctgtgcttcgggctcaggcacctttcttacacagagaacttcctatatatgctagattcttttggtaatcggtcatataaacccaatcctcggctaactcgtgtgctagacattatcttcatcctgcatgcagaacatgaaatgaattgttctacatctgctgtccgacaccttgcatcaagtggcgttgatgtatacactgctattgccggggctgttggagctctatatggaccacttcatggtggagctaatgaggctgttcttaaaatgctgagtgaaattggaactggtcagaacattccaaagttcattgaaggaaa

SEQ ID NO: 43267 - DNA, 431 bp, Glycine max
  Clone ID: LIB3093-019-Q1-K1-D2
acttcttcttcaaaaacacacaaacacactacactttgtctctgttctgtgtgtgcgagaaagggcggtggcaatggcgcttcgcaggctttcatcttcaattgacaagcctctgcgccctctcttcaatgccggttccctctactacaagtcgtctttgcctgatgaagctgtttacgacaaggagcgacccggagttacatggccgaagcagttgaatgctccacttgaggtcgtggatcctgagattgctgatattattgagcttgagaaagctaggcaatggaaggggctagaattgataccgtcagagaatttcacctctgtgtctgtgatgcaagcggttggatcggttatgaccaacaaatacagtgaggggtaccctggtgcaagatattatggtggaaatgagtatattgacatggcttaaa

SEQ ID NO: 43268 - DNA, 361 bp, Glycine max
  Clone ID: LIB3093-019-Q1-K1-D3
ttctttcttaatgcctcctggccaggggttaaaatggcccaagaaacttttctattcacatctgaatcaatgaacgaggggcccccttacaagctttgtgaccagatctcctatgctttgcctcaatcatgctttgagcaagacccttacagcaagggtggcttgttaaccttcaccaaaaccaacatggtgatgggtttcggagagatcacaaccaaagccaacgttgactattagaagattgtgcgtgacacatgcaggaacattggttttgtctctgatgatgttggtcttgatgctgacaactgcaaggtcctcgtcaacattgagcaacagagtcctgttattgctcaaggtgtgc

SEQ ID NO: 43269 - DNA, 212 bp, Glycine max
  Clone ID: LIB3093-019-Q1-K1-D4
agaaattgccacctgaagcacgtctaatactggtgaaccaaacacaaaattccatccaccacttttcttttcaatccccaactcaaatctgtgaagaaaaatctaatttctaaattgtaattcttagcactactgctagtaataataaaaaaaaacaattataaagttgtagaggggttttttttctttttttcggttgttttacttttaaa

SEQ ID NO: 43270 - DNA, 161 bp, Glycine max
  Clone ID: LIB3093-019-Q1-K1-D5
gtgttaacttctacaggttatcagggtgttctttacacatatgtgcttccgtctgttgcacggccggcatacaatgcagtgaattacacaccaaatggtgctgcttgaggaaagctccataacagcaaggaggagcggagtaactcatttaccatgggtgt

SEQ ID NO: 43271 - DNA, 430 bp, Glycine max
  Clone ID: LIB3093-019-Q1-K1-D6
gcgtacgcgataatgatgggttcaaacccaaaacctcttgtgcacctttgtctgcttctcctggtccggttttgttcctcaaccgaatccctgagatttgaaatccaatccgggcacaccaaatgcatctccgaggatatcaagagcaattccatgaccgttggcaagtaccaaatcgttagccccaacgagggtcaacctctgccagatgcccacagattcaccgtcagggtgacttcgtcttatgggaacaactatcactacggggatcgcgttcagacggggcagtttgcgtttgctgcagtggaggctggagattacatgacttgcttctgggctgtggatcacaaccctgtggaaacgttgactgtggattttgattggaaaacgggtgttgcggccaaggattgggcaaaagttgcttaaaaag

SEQ ID NO: 43272 - DNA, 472 bp, Glycine max
  Clone ID: LIB3093-019-Q1-K1-D7
tcgcccacgcgtccgcttttattacaggtttggtctcagggttcactttaatagcaggggcagtgtctatttaataattttgatatttaaatgtttcatatagtgtactttctataatttatattaatatatttatagaatttttattttttttcttttattgtatttttttttttttttttatattttttatttaattttatttttttttttatttttttttattattttattatattatttatttattttttatttttttttttatttttttttttttttattttgttctatttttttatttttttattttttttttttttattttattttattttattttattttaatttttttttttttttttttattttttttttatcatattatttttttatatttttttattttttttatatttttttttttaattttttatttttttattatttttttttatttattttttttt

SEQ ID NO: 43273 - DNA, 358 bp, Glycine max
  Clone ID: LIB3093-019-Q1-K1-D8
cttgttctactttttattatcactgttgcatttatttcagatatttagtatttgcgtacgagtttgttctttagtttaaacacagacaagacgactctttatggcggctataaccaatttgaacttttcttccttgtgtaaaaaaaggttttgtgtgcgtttgtgcgtgttggagttggctttttgaagtgggtgcatgctgaagttatatgtgtatgtgaaagatgaagaacaattgagattaagaaaagggttacgacgtttaccagagttacagacagcattacacgttgtcaatgccaatgattgtttttggtttgaacagaaagaatgagatgtcagtctatttttttgcttt

SEQ ID NO: 43274 - DNA, 425 bp, Glycine max
  Clone ID: LIB3093-019-Q1-K1-D9
cccacgcgtccgcaccacaccaccattattcatatctcattctctaacctttcactctgcggtactcactctctactttgctcatcatcgtagatgaaccaacacttctagtctctcttactttataaccatgtaaaaatgagtcacctaatgaaaaattagtagcttcttgttgtgctttttattttgtttgtgttgagataaatttgtttgtttgtttggtattgttttgggttttatgaattatttgatgggtgaagaaggagaagtggtgagaaagcaaggacaaaagggtgttggtggagataagtggtacttggatagctgcttacaagactgtaaatattggtgctgtttaatacacgaggctagttctttttcgatgggtcctttggagtgaaaatccttggctttttagctttttt

SEQ ID NO: 43275 - DNA, 383 bp, Glycine max
  Clone ID: LIB3093-019-Q1-K1-E1
aaggatgtcaagcaatttgcattctgtctgcaaatggcacaatttcaaatgttacactacggcaaccgactttttctggtggtactttaacatattaagggcggtttgaaattctctccttggctggttcataatataacaacctggacaaattggattaaacaaaagagccaaaatcctggtgggaatgagcatctcttttggccgctccaaaatggtcgagtaaattggggggtgggattggctggtttgcttgtagctgcaagtactgtgcaagttgttgtggctagttttgttcctggtcatcagctggagcaacagaaaccaaataagccgagagtggagcatatattaaatgctgctccgacgtatgttaaccctac

SEQ ID NO: 43276 - DNA, 374 bp, Glycine max
  Clone ID: LIB3093-019-Q1-K1-E10
cggacgcgtgggtgaccaccgactttcacgggcaaagttcttctttattgcactagtgtggagtttttcgtggtatggtgtccctggatacttgttcacaacgctcacaaacatttcatgggtgtgttggatattctccaagtcagttacagctcagcagatagggtcaggcatgaggggccttggagtttgtgccctcacacttgattgggctgccgtggcatcattcttgttcagccctctaatctcacccttctttgccattgtcaatgtttttgtgggctatgcattaattgtctacgtggtcattcctgtatcatacttggtgcctaatgtgtacaatgcccataggtttcccattttctccttacact

SEQ ID NO: 43277 - DNA, 265 bp, Glycine max
  Clone ID: LIB3093-019-Q1-K1-E12
gagagagagagagagagagaagcgttaatcttaatgggttacatccaccatggaagaaccggtctcaggcacatactcagattcataaccgccaccggcgtggtctcaaacttcggcagatcgcaatcgcgcgctgcattcccctcccatttccctatccttggcaacgtgctttttttttttaacaggcgattaataccttaacgaaattactcgataagttgaactctacttgcgcagggagcgaaactagcgtttgtgcctt

SEQ ID NO: 43278 - DNA, 302 bp, Glycine max
  unsure (1)..(302): unsure at all n locations
  Clone ID: LIB3093-019-Q1-K1-E2
ggagaacaagaagaaaaaaccgacacaaagatctagtcctagctagaatcaaacaggggcgatctcagcttcaagaacacatcgccatggcaaggaacttgcttcttgtgctttttgcagtagccaccctcctccatggctcagcagcccaaaccagacacatggtcggtgatgccacgggctggatcatccctgctggcggcgctgccacctacaccgnctgggctttcaacaaaaccttcaccgtaaacgacactctcgtgttcaactttcgcaccggccaacacaacgtggccaaaggt

SEQ ID NO: 43279 - DNA, 314 bp, Glycine max
  unsure (1)..(314): unsure at all n locations
  Clone ID: LIB3093-019-Q1-K1-E3
atttaacaatccctttctatttataagcagggagaattcctgtatatgttaaattgaattggatttgtgttttacatgttgcttgtaggctttatgttttgtctgttgattacactttcaagcaaatttgcttttaccgtgtttgatgctctgttggacttttgttctcttgtaagataccaatattttttttttccttttgcaaatttagcttgtctctatgagcagcaatagtttaactgtctcattgatttttcttacccanaaaaaaaaattatatttttatataaatattttatattttatattttttt

SEQ ID NO: 43280 - DNA, 342 bp, Glycine max
  Clone ID: LIB3093-019-Q1-K1-E4
cacagcaacacctgaaaaaggaagggttagtgagtgtgtgtgtggaaattgtcatcgctcggaagagcaacaacaactagtacttaaagagacagagagtgtgcacatcaatgtctgctcaggtcggtgtcaggacacgagcccaagccgcattagccatggaagctgttagttctgctgaaccatcatccaagagaaagaagatcagcaacagtactaaccaagagccaaaactcttcaagactccgagaacgagttcttcctccgctgtcaaaccagcgacggtgacggagatggttcagccggtgtcgccggagattgttcaacaacgcttcctgagcc

SEQ ID NO: 43281 - DNA, 114 bp, Glycine max
  Clone ID: LIB3093-019-Q1-K1-E5
acaatgaactcgttttgtgaccactctaatataataaggcatattgtattgctttcatacactaagaagggatttttataccacttctatatttcaccttaatacaaaacacac

SEQ ID NO: 43282 - DNA, 427 bp, Glycine max
  unsure (1)..(427): unsure at all n locations
  Clone ID: LIB3093-019-Q1-K1-E6
ctcttgtactgtacgtacatgttattgagcatcatcaaatatggcaccacccactgaccggagagtgatagcttcggaaggctttgatctgatagacaagttttgtggaccatcancaccaagaaggcccaataatatgaatggggtattttctgcaagacaaggacgtttggtggttcaagtgcccaatgatgagttggaagagcctatgagtgtcatcaatagcagagaggctgcagctcgctatggtgggattatgattgtgaattatcccaaaaagccaaaacttggtagatcattcaaaccttgatcattttggtttaaatataatatatacttattgcttctattatactataatgggtctgtttctagtataggccatctcatatttaaattatattaatgttattatgatcagcatata

SEQ ID NO: 43283 - DNA, 475 bp, Glycine max
  unsure (1)..(475): unsure at all n locations
  Clone ID: LIB3093-019-Q1-K1-E8
gaccaagaaaggccagcttaaggtcaaggtgaatacagtgcttggttcaactgcgcgaccggtaacatttaaacttgtcctttcttttagcacangttcaaaatattcaactattattgacatgcaattatcttctttattaccaataaattggatttcatgttttttattttttttctaataattttttttttgtcttcttttttttttatcttttttatattttttttttaattttttttttttatttatatattttcttttcatcctttaatttatttatctttcatttttttttatttattatttttctatttttttatttatattttcattttcttttttatatattttttttattacttatttttttattattatttattatttttcttctctttatcattctttttcttcttctcttctttaattttttcattcttattattctttttattatttttttttataattt

SEQ ID NO: 43284 - DNA, 381 bp, Glycine max
  Clone ID: LIB3093-019-Q1-K1-E9
aacgcctccattatcagtcctttttcaggcttggtttttacctaaccctacaatgggccgagtcttccagttagggtttttctcttttatcaaattcttttaaatatataaacacttattatttttttcttatttctcatttataatttatttttattttttctacttattttttttttacttattattttcttttttattttctctttttatattactcttatttatatattttttcctttttttttttttattttttattttttatattattattttttattattttatctattatttatttatttttattttttattatatttattttatttatttttaatatatttttttatattattatattttttttttattttt

SEQ ID NO: 43285 - DNA, 431 bp, Glycine max
  Clone ID: LIB3093-019-Q1-K1-F1
cgggtcgaccacgcggtccgccacccgtccgattttgttcctcacccagtcaccaaccccgttgtccggagccaccattgtgcgcgcgcggcaatgttctttccggtggccatcgtcccttaaacccaccacactttaaagtcatgggtatttcatgggacgacgctcctgtgatccagcaaggggaggatcacaatgagccctgcatcgtcacccgcaattgccccgacaaggctggtctcggctgtgaactttgcagaaacaatctcgagttcggtctccccattacccgtgctgatattttcacggatggaagatggtgctacatccactattgggttcttgcacatccagcatcgctcaacgttgattgggagagtttgaagactctgctcctttcagcttgcccttcatgtttgctttcctatcac

SEQ ID NO: 43286 - DNA, 426 bp, Glycine max
  Clone ID: LIB3093-019-Q1-K1-F12
cccacgcgtccgcccacgcgtccgtcttcattgtgatataaagccagataatatgttggtaaatgagtctaaaaatgttttgaagctttgtgactttggcaatgccatgtttgctggtaaaaatgaagttacaccatatcttgtgagtcgtttttatcgtgccccggaaataatacttggcttgccatatgatcatccattggatatttggtctgtaggttgttgtttgtatgagttgtatatagggaaggttcttttcccaggtcttacaaacaatgacatgctacggcttcacatggaactgaagggtccttttccaaagaagatgctgcgtaagggagcatttactgaacagcattttgatcaggatctgaattttcttgctactgaaggggatcctggtacaaaaaagaccataaagcggct

SEQ ID NO: 43287 - DNA, 351 bp, Glycine max
  Clone ID: LIB3093-019-Q1-K1-F2
aacataggtaggggcaatttgaaaattgacatatcagatgagcttgcccggattgctgatatggtaaccaggtacgattgctcgaaacaggaagttgaaagagtgattgttagctatgagggtgatcttgatagggctgcagagaccttgagagagttgaaacttgatccaccatctgctccaccaaaaccagaaggaaaccggtgatcctcctattattaacaatgttaagcagtcaagagttgcaagtcagaagctaaggccacaaacaaaacccattcctttaccaaatcaacccaaaaaagatgacaaggattttaactatacaaaggctgcattgactattggagt

SEQ ID NO: 43288 - DNA, 279 bp, Glycine max
  Clone ID: LIB3093-019-Q1-K1-F6
gtttgaagattcttacagacaaattagctgctgctctgctgactattagtgcaaaagaagagttaggaaagcagcattctaaagttgcagaacaagccgtctcaggctgggagaaggctgaaaatgaagtgtcatctttaaaacaacagcttgatgctgcaaggcagaagaactcaattctcgaagatcgagttggtcatcttgatggggcactcaaagagtgtatgaggcagcttctacaagctagagaactgcaagagctaaagatggttgatgctg

SEQ ID NO: 43289 - DNA, 354 bp, Glycine max
  Clone ID: LIB3093-019-Q1-K1-F7
cccacgcgtccgtgtgtgtgttttgaagagcgaaacagaagcagaagctctttgtgggtgtgctatttttggaattttctgctctttatctcatttgaaaaccccagctttctgaggctcgtgatcttaattgtgaagatggattcaaattcaacaaatgagaatctgcataacattttttttgtttcagattgagcttaactttaagtcttgttattttcaaaaatttcatgctctatttaacctttttctaaaattttacatgatttgtaagagtctaatacctaacatttttttagggttttataatattgactatatttttatcccttcttaaattggattatcttttaa

SEQ ID NO: 43290 - DNA, 369 bp, Glycine max
  Clone ID: LIB3093-019-Q1-K1-F8
cccacgcgtccgactttttctacttaccttttctcttaatccaaatacgatggcaggcatggcaaccacaaccctctcttcaaaccccaaactctcattcttcaacggaaagcccgtcacatattcttcccgcgtcgcgcccaccaccaaattatcctcatccaaacaaggcacaatttccatgtccctaaccccacccccctacgaccttcagtccttcaaattccagcccatcaaagaatccatcgtgtcacgggaaatgacccgccgctacatgacccacatgataacctaccccgacacccacctcctaatcgtccgaacccgttccgcccggctcttctgcgcctaccaacctaacaagaaccc

SEQ ID NO: 43291 - DNA, 154 bp, Glycine max
  Clone ID: LIB3093-019-Q1-K1-F9
attggtgctaaaggtaacatctataaccggatggagaaagaaactgatgctaaaattgtgggttgtagtataggatcagtgaaagactttaaacttcaactaaataggtatttgaaaccttatcctttaaagaatgtacatttgcatgcgttaa

SEQ ID NO: 43292 - DNA, 407 bp, Glycine max
  Clone ID: LIB3093-019-Q1-K1-G12
cccacgcgtccgcggacgcgtgggttttcgaactgatggcgaacagttcctcaagtatccaccacctaaagtgatgcaggtcgacaagtctgcatggatgactgatgaagaatttgcaagagaaacaattgctggtttgaatccaaatgtcatcaagattattgaggagttcccactaagtagcaagctagatactcaagcctatggtgatcatacctgtataataacaaaagagcatttggagcctaacttaggtggtctcactgttgagcaggctatccaaaacaagaaagttgttcatcttagatcaccatgactatctcattccaatattgaggaaaataaatgcaaataccacaaagacttatgctacaagaaccatattttttttaaaaatgatggaactt

SEQ ID NO: 43293 - DNA, 235 bp, Glycine max
  Clone ID: LIB3093-019-Q1-K1-G3
ggaatactacagagaattggggtagcatatttggttgccgcactgtgtgaaatttggctcagagagtgatgatactgttaattcaggaccatccctgttaaggaagtatcggtaccagtgggctgtggctttgattctttctttcctttatctttgcttgctatatggattgtacgttcctgattgggtgtatcaaattcaaacagaaccttcttcagagccaaaaacattttca

SEQ ID NO: 43294 - DNA, 405 bp, Glycine max
  Clone ID: LIB3093-019-Q1-K1-G4
cggacgcgtgggcggacgcgtgggctgaaaatgaaagttataactgacaatgacagatacagaagagggaaaattatagtaaatgacataaaacaaaaacaagaagaattatatcagagagatacttgagaagggtattctgttacatctttgcaccttacctcacctcacatgctgccatggctgttcagatcaaaaatgcattccttcctgtttcacacgactggtaggttgtacaaccaaaacagaaaaggctggcctatgaatttctggttttaatctttcaagttgactgctcattcaaaatttggaagacacaactggcctttttctggttcctggcttgtgccaagttatgcatggctaaatatgggctggtactctgggtatgcagaggatacattg

SEQ ID NO: 43295 - DNA, 420 bp, Glycine max
  Clone ID: LIB3093-019-Q1-K1-G6
gcggcacgcgtccgctctaacctacctctttttcttctctctcaacaacttcaccttcttcctcctccatcatgtgtcactgcaagggcaagtaccatgatgagcttatcgccaatgctgcgtacattggcactcctggaaagggtattcttgctgctgatgagtcaacagggacaattggcaagcgtttggccagcatcagtgtagagaacattgaatccaacaggcgagctcttagggagctgcttttcactgctcctggtgttcttcaatatctcagtggtgtcatcctctttgaggaaaccctctaccagagcacagctgcaggcaagccctttgtgaatgtcttgaaggaagctggtgtgcttcctggcatcaaggttgaccagggcgcactctagcttgctggaactaatggag

SEQ ID NO: 43296 - DNA, 274 bp, Glycine max
  Clone ID: LIB3093-019-Q1-K1-G7
gtaaaaagtcactgtctactgatgctcatttatcaagatcatcaaagttggaggaaaaagagaaagagcacaagcgtgatttggatggagctaaagagaaggaaagatacagggagaaatacatgggaaaatccattcaagaacttgaccttagtgactgtaaacgttgtactcccagctaccggcttctgcctgcagattatccaattcctaaagctagtcagagatctgagcttggtgctcaagtcttgaatgaccattgggtatctgtgac

SEQ ID NO: 43297 - DNA, 393 bp, Glycine max
  Clone ID: LIB3093-019-Q1-K1-G8
cccacgcgtccgcccacgcgtccggatcaatgaagctctctgatctagttttcttttcaattgattgatgattttgctgattgcagtatttagatttattttccctaacacttttattgtggtattcatggaaaatgaattgagttcggattattcttgttgattattggtttgtctatgccctcttctgtatatcatctgtgtctgttctgtcctaccaaattgtttgggataaggctggtagatttcattgctgctaattttattgtaattgcttgggtgacgttttacttttaatagttttttttttttggttctgggggggaccataattgcaggacattcatggaaatgatttgagtcttaaatattacagcgggaaggttctactga

SEQ ID NO: 43298 - DNA, 212 bp, Glycine max
  Clone ID: LIB3093-019-Q1-K1-G9
gcacaatttctctctttctttttgtgtccaaaatggctcctagttctactcacaaggctggggtctatgtgcttatgctagtttggatatttattagcactattgttgctacctgtgctggtagcttctaccaagacttttatctaacatggggtggtgaccgtgctaagatattcaatggtggccagcttctattctttttcccttgacaa

SEQ ID NO: 43299 - DNA, 204 bp, Glycine max
  Clone ID: LIB3093-019-Q1-K1-H1
gcggctctcaatctcttctttctaccctttacctttctttcataccaaccccctcctcaaaccctaagccagccatttccttctccttgttcttcatccccaaaccccattcacgcttttccaaatccccaccaaggtgctgtcttacgcctgcctcgccaatcccttccaaaaacacaaacttatgtttcccagttttttaac

SEQ ID NO: 43300 - DNA, 279 bp, Glycine max
  Clone ID: LIB3093-019-Q1-K1-H2
gcgtccacgcgtccgtccacgcgttcgaaaaaaacaagattttttagatacagaaaacaaagttgggttcgggggttttttattccccaattattatactcattactctcagacgatgtactgatatattctatggcgggggttcgaagaacaagcaatttattttgggccgttttcacttttggtaggttctttgtgggttatgttctgtatcatattttcagatatttttggtatggattatgttccttatattttgtgaatatattttgttttttc

SEQ ID NO: 43301 - DNA, 60 bp, Glycine max
  Clone ID: LIB3093-019-Q1-K1-H3
ctcacaccaggcgcacgttagcacaaactatcatggccacggcaacagcagctgccatct

SEQ ID NO: 43302 - DNA, 188 bp, Glycine max
  Clone ID: LIB3093-019-Q1-K1-H5
gtgaattccaatttcaacgtttcaaattgcatactgttcttctcttcctctcggtgtctgcactgactgcatgtcgtcgataacgggcattcaaggccaaccttctgaggttacggttggttttgtgcttcaaggttgaagacacaaaatggatttcaaggctagatccctacgtttgtgttgagtat

SEQ ID NO: 43303 - DNA, 432 bp, Glycine max
  unsure (1)..(432): unsure at all n locations
  Clone ID: LIB3093-019-Q1-K1-H6
attcccttaaagtggaaggtctccgaggcattgtaactgtgcctgccaagctggagtctagcgtccctcgtctttgcctatggagtanatctattttttactcagattgctccttctaggacttacgattcactaactgaagatttcagctatgctctacttctttctacaattggtgcacttgtcgctgcaatatttgtcacttggggtttatcccagaggaaagatctacaagagaaatggagattgtccggccttcatttttgccttgcaatctcttagttttaaggtttaagttaggttattttgattctttgttttgtttttaattctaattttttaaatttttgtagctttgattggcaaagtcactttataatttcattattttattatttgcatttattctttattgtatttttttatttatta

SEQ ID NO: 43304 - DNA, 147 bp, Glycine max
  Clone ID: LIB3093-019-Q1-K1-H7
cccacgcgttcgaacagagtaacatacactccaaaaagctggattaaaaatgatctacaaaggaagaaaagaagggcatttcatctaatatataattagaccagtcatggctaatgagaaaaaacaatttgataattgatacccttt

SEQ ID NO: 43305 - DNA, 90 bp, Glycine max
  Clone ID: LIB3093-019-Q1-K1-H8
cccacgcgttctgagcatagaaaagcttttatgtttgggtgatgaaagattattgggacggggggtccttaatgaagcaaaataatttta

SEQ ID NO: 43306 - DNA, 254 bp, Glycine max
  Clone ID: LIB3093-019-Q1-K1-H9
ccaagatccaggacaaggaaggaatccccccggaccagcaacgtctcattttcgccggaaagcaacttgaggacggccgtacccttgctgactacaacattcagaaggagagtactctttacctcgtcctccgtcttcggggtggcatgcagatcttcgttaagacactcaccggctagaccataaccctataggttgaaagctccgacaccatctataacgttaaggccttatatccaggacaaggagggttt

SEQ ID NO: 43307 - DNA, 412 bp, Glycine max
  unsure (1)..(412): unsure at all n locations
  Clone ID: LIB3093-019-Q1-K2-A10
tcgcccactcgttttcccacgctntctgtttaaatgcaacnacancagnccanggcagccccctgtcctacgtgattctgccttgcgatgganagaaccgggcaatgggttttctccccagaaatcccaaccgatgttattgttgcagttggagaatccactttttttttctatatgtntattctggcggctaagagtaactacattagattagtgattatggtattataggagagtgacctatctagaattgtagttttccaacattccttgagggcattgagtctttttttattcctttttatatttctattgtttctttttgatatatctctttttttatctcttttgtttttttctttttttttttatttatcatttttttttctccttttttttttcttgttttttt

SEQ ID NO: 43308 - DNA, 64 bp, Glycine max
  unsure (1)..(64): unsure at all n locations
  Clone ID: LIB3093-019-Q1-K2-A6
tcctaancgtgctaaaaggattttggctaatcgtctatcagctgctcgctcaaaagagaggaag

SEQ ID NO: 43309 - DNA, 242 bp, Glycine max
  Clone ID: LIB3093-019-Q1-K2-A7
accgaggcgaccgacgcagtccgtaaacctaacccagcattgctattttattcattccatggctttgcccaaccagcgagaccgggtattaggctaggggaaactcgttatcgtcggcgatggtggcacaggaaagacaacctttgtgaaaaggcatcttaccggagaattcgagaagaaatatgagccaaccatcggtgtggaggttcacccattggattttttcacatactgtggaaaga

SEQ ID NO: 43310 - DNA, 190 bp, Glycine max
  Clone ID: LIB3093-019-Q1-K2-A8
cccagagtcaaccaagcaaacatttaaccaatggctccgaggttccaaaattcggatccgggtgcattggccgtagggtagcgaacaaaaaccccttacaagaacagcatgacatatatgttatcaaacacgcatacaggaagggaatcacatgctttgatactgcggatgtttatggagccaatgctaa

SEQ ID NO: 43311 - DNA, 199 bp, Glycine max
  Clone ID: LIB3093-019-Q1-K2-B10
tttcttattttcttattttttttatttttgtttttttttttttttttttttttattttaaattattttatttctttttttatattttttttctttctttttttttttttttctttttatttattttttttttttttattttttttttttatttttaattttttttttttatttattttttttttttctatttttttttt

SEQ ID NO: 43312 - DNA, 298 bp, Glycine max
  unsure (1)..(298): unsure at all n locations
  Clone ID: LIB3093-019-Q1-K2-B11
ttttctttcttctattttttttatatcctttttttatttcttcttttcttcctttatttttttttttttcttcttactncaattaatattttttttctttttttttttttttttttttttttttttttttttttttattttcttctttttttttttttttttttttactttcttctttttttttcttttttttattttttttttttttttcttttttttttctttttatttttttttttttttattttttttttttttctttttttttttttttatttttttttactttttttttttt

SEQ ID NO: 43313 - DNA, 107 bp, Glycine max
  Clone ID: LIB3093-019-Q1-K2-B5
aattccgaagggaaagagatgttttttatgggtaatgtcgcccgcaaaagccaggtcctctatcggaatcgatttggaacgactactcttgctcgcctgtggcaaca

SEQ ID NO: 43314 - DNA, 251 bp, Glycine max
  Clone ID: LIB3093-019-Q1-K2-B7
cccacgcgtccgggaggagttcatatgacatttactaggagctgcccaaaattgctctgccgctcttagcggcaagcacaagcgcacctatactgttcttcctccaacgaaagactggagaaaagaaggtatagtgagttcagttaaagatcaaggcagctgcggatcatgctggacattcagcacaactggggctttagaagcatcctatgcacaagcatttggtaagagtttcttttcttttgagcatc

SEQ ID NO: 43315 - DNA, 371 bp, Glycine max
  Clone ID: LIB3093-019-Q1-K2-B9
ctcgtgtcaaaagaagcatttcgtttatcgttttctaaaaaaaatggaattgatgtgtcattgttcgttctttccgcttccggcttataatactaacacgacctgttcgctttctctaaagtacgctctcgttgttctcaaccaaagcctcccgagatttgctcttcttctttgggaccacgctcaagtgcgagtttgtgctgattgaggtgcctttttgttgttatgatgaattgccttctttttctctctatctactacctttccatgttctgactaggtacttgccttatttatttttatgtcgaccatgcttttttcttccatctattttattttgtctttatacttcttattctgcttttatctta

SEQ ID NO: 43316 - DNA, 289 bp, Glycine max
  Clone ID: LIB3093-019-Q1-K2-C11
aaaaaaaagaaagaaaagataaaaaaaaaaaaaaaaaatgagaagaaaaaaaaaaaaaaaaaaaaaagaaaaaaaaaaagaaaaaaaaaaaaaaaaaaaaaaaaaaaaaaaaaaaaaaaaaagaaaaaaaaaaaaaaaaaaagaagaaagaaaaaaagaaaaaaaaaaaaaaaaaaaaaaaagaaaaggaaaaaaaaaaaaaaaaagagaagaagaaaaaaaaaaaaaaaagaaaaaaaaagaagaaaaaaaaaaaaaaaaaaaaaaataagaagaaaaaaaaagaaaa

SEQ ID NO: 43317 - DNA, 284 bp, Glycine max
  Clone ID: LIB3093-019-Q1-K2-C4
aaaagccgcttgatcctgcagaaacgccagtggagtatttcccagaaaactcgtgtgatcctcgtgctgccatttctggaaccttggatggtaatggaagatggctgggaggaatttttgacaaagacagctttgtggagacactagagggatgggcaagaacagttgttacaggaagggcaaagcttggaggaatccctgtgggaatagttgctgtagaaacacaaacagtaatgcaaataatacctgctgatcctggtaagcttgatttttacgagagggtt

SEQ ID NO: 43318 - DNA, 264 bp, Glycine max
  Clone ID: LIB3093-019-Q1-K2-C6
acttctcattttacttttttttttttttctcttctcttttatccttttctttctttcttatttttctttcttttttatctttttcttttttctttttatttctttctttttcttttcttctatttttttattatttttttcattttttcttttttactcttatctttcttcctctttttttttaatttttctttttttcttactatttttttcttttttttcttctttctttttttctcttttcttttttctctttattttttt

SEQ ID NO: 43319 - DNA, 310 bp, Glycine max
  Clone ID: LIB3093-019-Q1-K2-C8
gcagtatcgctatactcttcatttcatggctttgcccaatcagcaaaccgtggattacccgagtttcaaactcgcgatcgtcggtgatggtggcacaggaaagacaacctttgtgaaaaggcatctcaccggagaattcgagaagaaatatgagccaaccatcggtgtggaggttcacccattggattttttcacaaactgtggaaagattcgattctactgctgggatactgctggacaggagaagtttggtggctttaaagatgtattctatattcatgggctatgtgctattataattgttgatgtt

SEQ ID NO: 43320 - DNA, 225 bp, Glycine max
  Clone ID: LIB3093-019-Q1-K2-D1
agcgtttggacgccgagttgaaactggtcggtgagtacgggcttcgctgcaagagggagttattgttggtccagtacgccctgagccgcattcgtaacaacgccagaaaactattgacccttgatgagaataaccctttccttatcttttagggtgatgcccttttttgtagaatgtttcttaccgactctttgttttgacacataataagctgtattatttttt

SEQ ID NO: 43321 - DNA, 264 bp, Glycine max
  unsure (1)..(264): unsure at all n locations
  Clone ID: LIB3093-019-Q1-K2-D11
tcgcactcatggaccccaaaaacgtgatancttttctggttcncagncncgattacggggccttgttcactgacctcaggactcggcttatccncancctctcngtgttctccctatgcatcttcggcacctcctctctttcaaccatcaccgacctcaaccccttcgtcgttattctctccgggggcccccaatctctccacaccccggacttcctctccccccccatgaatcaattttattaatattatatttttttaagtc

SEQ ID NO: 43322 - DNA, 248 bp, Glycine max
  Clone ID: LIB3093-019-Q1-K2-D2
gacaggcctttgccccctctcttcaaggccggttccctctactacaagtcgtctttgcctgatgaagctgtttacgacaaggagcgacccggagttacatggccgaagcagttgaatgctccacttgaggtcgtggatcctgagattgctgatattattgagcttgagaaagctaggcaatggaaggggctagaattgataccgtcagagaatttcacctctgtgtctgtgatgcaagcggttggatc

SEQ ID NO: 43323 - DNA, 369 bp, Glycine max
  Clone ID: LIB3093-019-Q1-K2-D4
cccacgcgtccgcccacgcttccgaaagcacttagtgcttttcaataattacgaaaaaccaagagcgagtgttgttgttgtttgctccaggctttaccagggaatgaatagagatgagaggctttcggttgaagagaactgagttaagcggcgaagccaaacgcagaatcggcggcagaaattgccaccggaagcacgtcgaagacgggtgaaccaaacacaaaattccatccaccacttcttttttcaatccccaacttaaatcttggaagaaaatcttaatttctaaattggaattttttatcactactgttagatttgtaaaaataaacaatttaaatgttagaagagttgttttttttttctttt

SEQ ID NO: 43324 - DNA, 391 bp, Glycine max
  unsure (1)..(391): unsure at all n locations
  Clone ID: LIB3093-019-Q1-K2-D5
ccggtcgaccacgcgtccgggtttacttttcaggttatcagggggncccatactcttttgtgctnccgncngnngcacgaccggcttacaatgcagtgaagtacagaccaaatggtgctgctggaggaaagctccagaacagcaaggaggagcggagtaactcattgaccatgggtgttgcagatgagcatataggattggttgttggtcgtggtggaaggaatattatggaaattagtcaggctagtggggcaaggataaagatatcagaaagaggtgattacgtatctggaacaaccgataggaaaggtaccattacaagatcccagagagcaattcttacagctgaatttatgtattgcaaaaggtgctaatgcacccagaggggggt

SEQ ID NO: 43325 - DNA, 448 bp, Glycine max
  unsure (1)..(448): unsure at all n locations
  Clone ID: LIB3093-019-Q1-K2-D6
tgataatgatgggttcaaacccaaaaccccttgngcacttttctcttctnctcccggncctggtttctgcctcaaccgaatcgctgagagttgaaatccaatccgggcacaccaaatgcatctccgaggatatcaagagcaattccatgaccgttggcaagtaccaaatcgttagccccaacgagggtcaacctctgccagatgcccacagattcaccgtcagggtgacttcgtcttatgggaacaactatcactacggggatcgcgttcagacggggcagtttgcgtttgctgcagtggaggctggagattacatgacttgcttctgggctgtggatcacaaccctgtggaaacgttgactgtggtttttgattggtatacttgtgtttgtgtctatgtaattgtactaattttgttataatggctatttttttctcttctattctt

SEQ ID NO: 43326 - DNA, 381 bp, Glycine max
  unsure (1)..(381): unsure at all n locations
  Clone ID: LIB3093-019-Q1-K2-D9
cccattcgtccgcaccatttcatcattattcttatctcattctctaacctttcgctctgccgtactcactctctggtttgctgatcatcntanatgaaccaacacttctagtctctcttactttataaccatgtaaaaatgagtcacctaatgaaaaattagtagcttcttgttgtgctttttattttgtttgtgttgagataaatttgtttgtttgtttggtattgttttgtgttttatgaattattatatgggtttatttatgtgtagtttttttatttgttggtttatgttttgttttttgttatttgttttattttattttatttttttatttattgtttattttttttttattttttttttgttgtaatgtttttt

SEQ ID NO: 43327 - DNA, 300 bp, Glycine max
  unsure (1)..(300): unsure at all n locations
  Clone ID: LIB3093-019-Q1-K2-E1
acgcgtccgaagatgtcaagctattgcattctgtctgctataggcctaatttcaaatgttacactacgcgcaaccagcgtcttctggtggtgctntagcgatatnaangagcggtttgaaattctctccttgtctggttcatatataacaactgagaatggattaacaaagagcagatctggtgggatgagcatctctttggccgctccagatggtcgagtaatggggggtggattggctggttgcttgtagctgcaggttctgtgcaggttgttgtggctagttttgttcctggtcatc

SEQ ID NO: 43328 - DNA, 405 bp, Glycine max
  unsure (1)..(405): unsure at all n locations
  Clone ID: LIB3093-019-Q1-K2-E10
tcgcggacgcgtttttgaccaccgacttttanggtcatagnncnncnnnanngcacgagngngtggnnatttttggtatgttgtcgctggatacttgnncacaacnctcacaaacatttcatgggtgtgttggatattctccaagtcagttacagctcaacatatttttttaggcatgaggggccttggagttggtgctctcacatttgatttgtctgtctttgcattatttttgttcaatcttttaatcttacccttttttgctattgcaaattttttttgtggttatgcatttattttctacttggtaatttctttcattattattttttttttaattgataaatatttccatatagttttattttttctttttataattttttatctccttatttctattat

SEQ ID NO: 43329 - DNA, 326 bp, Glycine max
  unsure (1)..(326): unsure at all n locations
  Clone ID: LIB3093-019-Q1-K2-E3
tacggaaaatggaatgggatttgtttttactttttgctgctaggggttatnttttgtctgttgattacactttcaagcaaatttgcttttaccgcgtttgattctctgttggacttttcgttcttttttttttttcctatattttatttctatctctttatttttttctttgtttctttttatcttgtttcttttttctcttttttctcattctttctctctttttttcttttttctttttcttttcttttttttcttccttcttattttctctcctttttcttcatttcattctcttttctttctgatctcttactttctatttt

SEQ ID NO: 43330 - DNA, 403 bp, Glycine max
  Clone ID: LIB3093-019-Q1-K2-E7
cccattaatcaaaacccctttttttcaaccttatttttctccataaaccctagattcaacgagcccgtctgaccaagctcgaagctcacttcacaaaaaaacacttcttttcccctctccgaggttgtcgtgtcggagcatatccatgttgttccctcgaggaaattgtttttttttcataacatttgaatctcgttttgcttgttttgtcatttttattatgtatttcatttttctttcttttcttcttcttctttctttttttttatttatcttttattttttctattatatcttctttttttttttttattcttttatttttcattactctttatcttttcttttataatttcttctttcttaatttatcatttctttctccttttctattatcttcttt

SEQ ID NO: 43331 - DNA, 285 bp, Glycine max
  unsure (1)..(285): unsure at all n locations
  Clone ID: LIB3093-019-Q1-K2-F1
cgaccacgcgtccgcccacgcgtccgattttgttcctcacctagtttccaaccctgttgtccggagccaccattgtgcgctccggcaatgttcttcccggtggcgatcntcccttaaacccaccacacttcaaagtcatgggtattccatgggacgacgtcgttgtgatccagcaagggaaggatcacatttagccctgcatcgtcaccgtcaattgccccgacaaggctggtctcggctgtgatctttgcagaatcatcctcgagtttcggcttctctattacc

SEQ ID NO: 43332 - DNA, 268 bp, Glycine max
  unsure (1)..(268): unsure at all n locations
  Clone ID: LIB3093-019-Q1-K2-F4
gcaagagngagnncctgttcctgtgcacgcgtcgcaaggcacctcttatncaccaccaccacagccaccgcgttcgccgtcactttacccaaaccctcatcactctccctctcatcgcgtcgattcctcttccctctctcccatgccatcgtccctccctccacccgcgtcgccggaatccggtgccgcgttaaccgcgccggagactcggcgtactcaccgctgaactcggggtcgtcgtcttcttcgtcaacgaccccccccccac

SEQ ID NO: 43333 - DNA, 415 bp, Glycine max
  unsure (1)..(415): unsure at all n locations
  Clone ID: LIB3093-019-Q1-K2-F5
cacaacactattctncttttcagcaanggcgtggntggattctggacgggaaccccannaaggcactttttanatgtatgatcgacgctccctactncatangctcgcatctntncnagaagctcatgtccgaaacccctcacaccgtcctcgccctcgacgtctacaactacaagatcaaacacctnctcgaaccctccgattccccctgggccggccgcatcaccttccaccgcctcaacattcaaacacgactctcgcctcgaaagccttatcaagattgcagatctcactattaatctggccgccatttgcacttccgcggattacaacacccgccctctcgacaccatttacagtaatttcattgacgcgccttcccttgggaaatactgatcccagaacaacaaacctc

SEQ ID NO: 43334 - DNA, 432 bp, Glycine max
  Clone ID: LIB3093-019-Q1-K2-F6
gtttgaagattcttacagacaaattagctgctgctctgctgactattagtgcaaaagaagacttactaaagcaggattctaaagttgcagaagaagccgtctcaggctgggagaaggctgaaaatgaagtgtcatctttaaaacaacagcttgatgctgcaaggcagaagaactcaattctcgaagatcgagttggtcatcttgatggggcactcaaagagtgtatgaggcagcttcgacaagctagagaactgcaagagcaaaagatggttgaggctgttgtgaatagttctcgtgactgggaatccaaaaaatctgaacttgagaggaaagttgcccagtttgaggctcaacttcaaacagctaaagcagatgctgctgcgtcaattccatttgatcttcaccagagactagaggctgtgcagaatgaga

SEQ ID NO: 43335 - DNA, 263 bp, Glycine max
  unsure (1)..(263): unsure at all n locations
  Clone ID: LIB3093-019-Q1-K2-F8
cccattcgtccgacnnnttttacttaccngttctctnaccccaaanacnanggcagccatggcaacctgaacccgcgctncagaccccaaactcncaaacnncaacggaaagcccgncacatattcttcccgcgtcgcgcccaccaccaaattatcctcatccaaacttggcacaatttccatgtccctaaccccaccctcctacgacctccagtccttcaaattccagcccatcaaagaattcatcgtgtcacgggaaatga

SEQ ID NO: 43336 - DNA, 147 bp, Glycine max
  unsure (1)..(147): unsure at all n locations
  Clone ID: LIB3093-019-Q1-K2-G1
gcaacgccttccgctacttcttcaaggctcgcttcaaagttcttaccctcaccanngaanagtgctncaggggcatatctcgcagccatgtgtattactcttcataagtttacttgtctaccaaaatcacctctgaaaattagagac

SEQ ID NO: 43337 - DNA, 298 bp, Glycine max
  Clone ID: LIB3093-019-Q1-K2-G2
ttatttaatactataaataagattaatttaatatttaaaaaaaaggattctttataagtttaaaggtaatatgtatagggggcaaatagtaaatcgaggtacccattttatgataaactttccttccatttttgttcctctagtaggcctagtatttccggcaattgcaatggcttctttatttctttatgttcaaaaaaacaagattttttagatacagaaaacaaagtaaaattctggggtgttttattccccaattataatactaaattcataaaaaggatcagttaacttatat

SEQ ID NO: 43338 - DNA, 334 bp, Glycine max
  unsure (1)..(334): unsure at all n locations
  Clone ID: LIB3093-019-Q1-K2-G4
cggactcgtgggctgacttttgggctgaaaatgatatgtttttacngacaangacaganacagganaatgtaaatttttgtaaagcacatagaacaaaaacaanaanaattatatcanagagatacttgagaagggtattctgttacatttttgcacctcaccttacctcatattctttcatggctgttcagatcagaaatgcatttcttcctgtttcacacgactgttattttgtacaatcaaaacttaaaatgctgccctattaatttttgtttataattttctaagtatacttctcatcttaaaatttcaatgactcaatttttttctttt

SEQ ID NO: 43339 - DNA, 300 bp, Glycine max
  Clone ID: LIB3093-019-Q1-K2-G6
ctctaacctacctctttttcttctctctcaataacttcatcttcttcctcctcgatcatggctcactttaagggcgggtaccgtgattagcttatctccaatgctgcgtacattggcactcctggaaagggtattcttgctgctgatgagtcaacagggacaattggcaagcgtttggccagcatcagtgtagagaacattgaatccaacaggcgagctcttatggagctgcttttcactgctcctggtgttcttcaatatctcagtggtgtcatcctcttctaggaaaccccttaccat

SEQ ID NO: 43340 - DNA, 387 bp, Glycine max
  unsure (1)..(387): unsure at all n locations
  Clone ID: LIB3093-019-Q1-K2-G7
gtaaaaagtcactgtctactgatgctcatttttcaagatcatcaaagttggaggaaaaagagaaanagcacaagcgggatttggatggatctaaagagaaggaaagatacagggagaaatacatgggaaaatccattcaagaacttgaccttagtgactgtaaacgttgtactcccagctaccggcttctgcctgcagattatccaattcctacagctagtcagagatctgagcttggtgctcaagtcttgaatgaccattgggttttttttacttttggaagttaggattacttttttaaacattttttttagttttttgtatttattattttttgtatataattgtatttttttcttatttttattttgtactttttttattttt

SEQ ID NO: 43341 - DNA, 417 bp, Glycine max
  Clone ID: LIB3093-019-Q1-K2-G8
cccacgcgtccgcccacgcgtccgtaacaattaagctctctgatctagttttcttgtcaattgattgatgatttggctgattgcactatttagatttattttccctaacacttttattgtggtattcatggaaaatgaattgagttcggattattcttgttgattattgttttgtctatgccctcttctgtatatcatctgtgtctgttctgttctaccatttttcttgttatcttttctttttattattattttctttctttttattttttttcttttgtatttctcttacttttttttatttttctttcttgtcttttcttttttctttcttttttcttttttctttcatttctttttttttattttctattttcttctattttttttttttttttttctttctttctttttctt

SEQ ID NO: 43342 - DNA, 313 bp, Glycine max
  unsure (1)..(313): unsure at all n locations
  Clone ID: LIB3093-019-Q1-K2-G9
tcggcacaatttctctctttcttttggtgnccaatatggctcctagttctactcacagtactgggttctatgtgcttaggctagttggaatagtgattagcactatggttgctacctgtgctggtagcttctaccaagactttgatctaacatggggtggtgacctgtgcttagatattcaatggtggccagcttctatctctttcccttgacaaattctctggctcttgctttctaattcaataatgtatacctattttggaggatttgatctgcctgttttgttcttttcttgttatcttttcttatttct

SEQ ID NO: 43343 - DNA, 261 bp, Glycine max
  unsure (1)..(261): unsure at all n locations
  Clone ID: LIB3093-019-Q1-K2-H1
ggccgaccgacgcgtccggctcttaatctctccctcttaccctttaccttcttccattctaacccngtcctcaaaccctgagccacccattttctgctccggcttcttgatccccaaaccccattcacgcttcttcaaaaccccaccaaggtgcgttttcactcctgcctttccaatcccctccaaaaacactaactttgggtcccagtttctgaaccctactagcctcaccttttagctcttcttcctccatactttttc

SEQ ID NO: 43344 - DNA, 180 bp, Glycine max
  unsure (1)..(180): unsure at all n locations
  Clone ID: LIB3093-019-Q1-K2-H3
caacccgtcggttaattcaagccccacgtttccacaaacaactatggctttggcaccagcagctgccacctcgtcctttatggaaacgcgtctcgtggaggctcactccggagcggggcnagtgcactcccgattcggcttcggcaagaaaaaggctcccgccccaaagaaagccttcag

SEQ ID NO: 43345 - DNA, 304 bp, Glycine max
  unsure (1)..(304): unsure at all n locations
  Clone ID: LIB3093-019-Q1-K2-H4
cggncgaccacgcgtccgctgatttgttcaaatgtttgatgccgaatttgatgcagttgtttcaaaagnngaagacaagggntctatgtgacggttttgatgaagctgaggcacacangnaagacgccaaacttgagagctctagtaaatcaataatttcctgtaaaaacagcaatggtaatgatgaatatggatcttgttatgagatcacatctaacagtatgctagattttgtaggaatagattaaagactttttccttaatattttttataattttgtttcttttttatttattttctctt

SEQ ID NO: 43346 - DNA, 371 bp, Glycine max
  Clone ID: LIB3093-019-Q1-K2-H7
cccacgcgtccgaacagagtaacatacactttaaaaagctggattaaaaatgatcgacaaataaagaaaagaagggcgtccaagcaaatatataataagaccagtcatggctaatgagaaaaacaatatgataaattgataccctttgcactgttggttatatcagatagagatccccagagcttggaatctatcctttgcaaaaacaaatcaaagcttgccacaagctctgtctgtctccctctgttgtgctctgcttcaggagccaacaaaatccaatattaaaccttgatattgcaatattacaaatatcctaatccaatccaaacttggcaaagtctaaatgaataataattacccattgaaggctt

SEQ ID NO: 43347 - DNA, 338 bp, Glycine max
  Clone ID: LIB3093-019-Q1-K2-H8
tcgcccacgcgtccttagcagataatatttttgatgtgtggctgatgaacgattattgggacgtgtttttttgggtgaggcattagattttttttttttttcattttaattacattttctttttgttttattttactttttttttttttattttatgtctttattttttttttttttttattatttctaattacaattttcttttttatttttttccatatttctcttttttttttctatttattttttctttattttttatttttatactctttttttttttttttttctttttttttttttttttctattattattttttctatttttatattttt

SEQ ID NO: 43348 - DNA, 468 bp, Glycine max
  Clone ID: LIB3093-019-Q1-K2-H9
tcgccaagatccattacaaggaaggtatcttctctgaccagcaacgtctcattttcgccggaaagcaacttgtggacgggcgtacgctttcttactacaacattcagaaggagagtactcttcacctcgtcctccgtctccgtggtggcatgcagatcttcgttaagacactcaccggcaagaccataaccctagaggttgaaagctccgacaccatcgataacgtcaaggctaagattcaggacatggagggtattctcccttaccagcaacgtctcatctttgccgtaaagcatcttgaggactgactcactcttgcttacttcattattcagaacgatttaactttttcatcttttttttcttttttttttgtaatctattcattatcttttattttatactttttatctttataatctatttttctattttactttttattttttttatatactttttttattt

SEQ ID NO: 43349 - DNA, 276 bp, Glycine max
  Clone ID: LIB3093-022-Q1-K1-A1
tcggccacgccttcgggcaggaacaccccggcctggtttggatggggtctctgtacctgcagtcccactgatcaacgtgctggggtatttttcacattttgtgatcacggaggtattgcttgtttaccttcaaagaaagttattcacaggggttctgtttaagcacaccactttcacagtgttctttaacatttctttgttcaccactggattaactgcaactatgctgttatggccaacaatcaccgaacacattcacctgacacgcaatgtgca

SEQ ID NO: 43350 - DNA, 406 bp, Glycine max
  Clone ID: LIB3093-022-Q1-K1-A11
attttgagatttttttattgtttgatgtgtaccgattttaagattggatctcttttgattgagctgtttgagatttctttcttctttctctctctctctctctcttttggttggtgactgtgttgaattatcttatgatgtttccaatccttgtttgttttgtaggtgacccagtttaaaatttgagatttttttcttgtttgatttgtacccatttgaagattggatctcttttgatttggctgtttgagatttctttcttcttctttttttctttggtggctggtgacagtgtgttgaattatcttatgatgtttccttttaagcacttgttgctggatttcaatcatttcactccatttattgatatatttgttttttatttttgcatatttttttgaatatg

SEQ ID NO: 43351 - DNA, 420 bp, Glycine max
  Clone ID: LIB3093-022-Q1-K1-A12
gttgaatacaaattttgggaaaaaaattgggccacaagaatgatttgcttcttaaatacacccctgttcacaaaaaaggtccagtgtttgttcacaatgagcaccccctatcacagtctcttgtgattgttgaatacattgatgagacatggaagaacaaccccatcttaccttctgatccttaccaaaaaaccttggctcgtttctggtccaaattcattgatgataagattgggggggctgcatcgaaatctgttttcacggctgatgaaaaaaaacgtgagaagaatgttgaagaaacatatgaagctcttcagtttcttgagaatgagctggaggacaagaagttttttggaagaaaagaatttgggttggtagatattgctgctgtcttcatagcattttggatcccaatttttc

SEQ ID NO: 43352 - DNA, 251 bp, Glycine max
  Clone ID: LIB3093-022-Q1-K1-A2
tccgcgaggtagaacgacgacccccttctgcgttttgaccttcaatctcaatcatggccaaagctggagggggcaagggaccaataaatgaacaagcagtagcaaatatgtatgctgcaatgaggtctgagctcaaccaaatttactccaaaataactgaactggagatggaagttagtgagcacacattggttaccaatgccattcaaccacttgaccaatctagacgatgctatcgtatgattggaggg

SEQ ID NO: 43353 - DNA, 311 bp, Glycine max
  Clone ID: LIB3093-022-Q1-K1-A3
gtctattcgttcttttgctgaggcctctatggcaactgctttagagaaaaagtggccactgtatcttagcaccaaaaatacaattctgaagaaatatgatggaaggtatacaattcattattagcttattcatttaatatttttcaaaaacttttactgcattgatcgctgtttaattatattcatttattggttgtagattcaaggacatatttcaagaagtttatgaggcaagctggaaatcaaagtttgaggctgctggtatatggtatgagcatcgactcattgatgatatggtggcgtatgcactt

SEQ ID NO: 43354 - DNA, 461 bp, Glycine max
  unsure (1)..(461): unsure at all n locations
  Clone ID: LIB3093-022-Q1-K1-A4
cttccggcttaacggcctgaaaccaaggaggatccttttgaaacttttttgccagttaaaaaggagactaatgcaaaccctggagactgtaaattaaagtcaaggactttttttgatgatgatcaaaaggttgatcacatgaatgaggaaaccgctgaggatgaaaaaatgttggttccaaaagctgttgcaagtgttaagtctgaaaatgaatcgggtgaaaaaaatcctgagttatcctcaggtgtggataatgagaaccagattagtgcagagaaatcaacaggtactggtatactagtgcanaagggctctccagtttctgaaaactgtgagtctttgtatttaaaaaaggagtcacctacttctggtaatgctgtaatggtatccagggatgaaaatgctgatgacacgaagtcagttgtgattgagcctgatgaaagaaaacaaggcaggattta

SEQ ID NO: 43355 - DNA, 265 bp, Glycine max
  Clone ID: LIB3093-022-Q1-K1-A5
aaatcccgggggggaccaacgcgtccgcccacgcgtccgcccacgcgtccgcccacgcgtccgattgttctcaaaacagctgaccaaacgccattatctgctttgaatgcatcaaaattgcttcatgaggctggacttcctcctggcgttctgaatgtaatatctggctttggtcctaccgctggtgctgccattgctagtcacatggacatagataagcttgctttcactggttcaaccgaaactggaaaagttgtccttgaat

SEQ ID NO: 43356 - DNA, 462 bp, Glycine max
  Clone ID: LIB3093-022-Q1-K1-A6
ggtgtatccgccccactcctgaagagctggagaattttggtactccggacttcactatatacaatgctggacagttcccctgtaatcgttatactcactacatgacatcctccactagtatagatcttaatcttgctaggagggaaatggtcatcctcggcacacaatacgccggggaaatgaagaagggtcttttcggtgtcatgcattatctcatgcctaagcgccaaatcctctccctacactctggatgcaatatgggcaaagatggggatgtggcactcttctttggactctcaggtaccggaaagaccactctttcgaccgatcacaataggtatctaatcggagatgatgaacactgttggggtgacaatggtgtctccaacattgaaggtggttgctatgccaaatgcattgacctctcacgggagaaagagccagatatttggaatgcaatca

SEQ ID NO: 43357 - DNA, 439 bp, Glycine max
  Clone ID: LIB3093-022-Q1-K1-A7
gggcccacgcgtacgcttttgggctttatctccgcctatgacccacatatggcttcgtgacgcgtgctggaggacctcaaggatttgcagaaggatcctcctacgtcatgcagcgcaggtcctgtggctgaagacatgtttcactggcaagccacaatcatgggacctgctgatagcccatatgcaggtggtgttttcttagtttcaattcattttcctcctgactatcccttcaagccaccaaaggttgctgttcggactaaggtgttccacccaaacatcaacagctatggcagtatatgtattgacattctgaaggaacaatggagcccatctctaaccatttacaaagaactatagtcaatttgctcattgttgacggatcccaaccctgatgatccacttgtacctgagattgcacacatgtacaagaccgaca

SEQ ID NO: 43358 - DNA, 398 bp, Glycine max
  unsure (1)..(398): unsure at all n locations
  Clone ID: LIB3093-022-Q1-K1-A8
gccctatctcatagggtttccaccctctctctcatgcatttttgctgtcacgagttcttctttgccgttgccctcttattctttgctgtatttggagccttcttttgtgtggaacagagcagatttcacctccctgggttttttgaaccgtgcccatgtctaaagttttcagctttaccggaaatgatgatttctaccatgggggccctatttatcctaacccgaaggaaccatgtctcttcttgtctcttggccgncaagttgatgtttaccttcctcttcagaagaggtctcgcttcagtgttccatttgatatcagcggagaatggtttgagcaagaagcagagccaaagacatctattgaatctttgccagatgaatgcctctttgagatcctt

SEQ ID NO: 43359 - DNA, 434 bp, Glycine max
  Clone ID: LIB3093-022-Q1-K1-A9
ggcgagtcaaaagttggtgctggcattgatcagggccgcgaggccaaccttccgaaaccaaaacgacaaaatcgcctttgccgttcactcctccttcctcgcctctggttatgtccttacagctacgggtccccaggccctctccgacgatgcgttttctgacccatccaatgacgaggtgtccgttgatcactggaacgagctgaacgacgagtacgcgttcgtttacgcgaatccagaaaagggttcggagaaagtgcttgtcaagtgcctcgtgatgaacgacaaattgctcgttcatgctttgactcaagggtcgtcggagcctttgagccttgagattgatgttggggattatgctgaagaggatggaggcagcaattattctcagcagttcaagaattggataagcttgtgaagagatagatgggata

SEQ ID NO: 43360 - DNA, 423 bp, Glycine max
  unsure (1)..(423): unsure at all n locations
  Clone ID: LIB3093-022-Q1-K1-B1
cccacgcgtccgaaagcattgaattcaaaaactaagttcatttcttgtgctttgctttattcctcaaaaccaaacatgtcgaacacatgcggcaactgtgactgcgctgacaagactaactgcaccaagggaaacagctatggtgttatagtagagactgagaagagctacatcgagactgttgacatggatgttccagcagctgagcatgatgggaagtgcaagtgtggcactaactgcacttgcacggactgcacttgtggccattaaggaatatgtatgaaaatgtaattgccatgtgtttggcaatacaaatctccaaataatgtaatcttcgtatgaataaatgtgtgctgttatcctacttcanggtctgtgtagtcatgcagtctgaatcatgtccagttcctgtcatagttatta

SEQ ID NO: 43361 - DNA, 452 bp, Glycine max
  Clone ID: LIB3093-022-Q1-K1-B10
atcgatttgaaggcaggaggtaagtccaagaagaccaaacgtacagcccccaaatcgaatgatatttacctcaagctcctcgtcaagctgtaccgttttcttgttcggaggactggtagtaacttcaatgccgtcatcctcaaacgccttttcatgagcaaggtcaacaagcccccgctatccctctctagattgattcgttacaccaagggaaaggaggataagatagctgtggtagtcggtgccgtgaccgatgacattagggtgtatgaagtccctgctctgaacgtaactgccctgaggttcactgaaactgccagagctagaattgagaatgctggtggcgaatgcctcacctttgatcaactggctcttagagctccactcggccagaatacggttcttcttagacgtcccaagaatgcccgtgaggctgtcaagcactttggacc

SEQ ID NO: 43362 - DNA, 459 bp, Glycine max
  Clone ID: LIB3093-022-Q1-K1-B11
gtaggttttgaggaccctcatgtattacttactgtcggacgatggactctcatttgtggagggttttccttaaggaacttaccatacaatcatagaggattcatctgaccctattggtcctgctcaagagctgtctgaaaaactctttattcgtccaattcaaatgctttcccacaagaagattgtttgtaactaaacagaaagtatatagtcttatatgcacatcattgaggacattgtgtctaattgtctctaaatattcaaatgttcatttcaactattcatgaaccacagtttctacatattactaatggaataaacgctttattacatttcttaactgatgatactctttttgttttcacaccttctagagaatactttaaacgacgaatttattgaacaatcaaaactttcgaaattttacaattcttaaaaacatacaccaatttttttttt

SEQ ID NO: 43363 - DNA, 287 bp, Glycine max
  Clone ID: LIB3093-022-Q1-K1-B12
cttgaatggatcaaactgtacgtgctaccattctgattctacatctgttgtaggaggcgggggcaattcttcttgacggaatggcaaaccatgcactatgtaattacaaagagtatcacacacatttagaccattgtcgtattcatcaacaacatggaatcaaacatctactttagggccgcatatgctctgacctactgaaggaatttctaactcaacgattgaataccatggatatcttgcatgctcttacatacctgaaaagatgattcatacaccatctacat

SEQ ID NO: 43364 - DNA, 343 bp, Glycine max
  Clone ID: LIB3093-022-Q1-K1-B2
caggatctcaaacactgatcctggtgcccaaacatatcgtggggccagaaaaacatgaaatgcgggggtgcctccgccctcatctgggaaggaatgatctcaagttaacttgagatatgcacttaaaaaaatttgttaggcgattcccgtatggttcgtatgtcatttgttttctaactttgtaccatacaatgttatttgcaatagaattgtgtctcttatgtttgtctctagcaattttagctcactgactgccctggttctttttgttccggtgcatctgtattatgcttttgattgtaagcagtattgaacagctagttctcattatttataagaaatt

SEQ ID NO: 43365 - DNA, 361 bp, Glycine max
  unsure (1)..(361): unsure at all n locations
  Clone ID: LIB3093-022-Q1-K1-B3
gcgcccacgcgtncgcccacgcgtncgctctgaggatcaaaaacttttgagagaaaaggtgcagcacctgagtggagatgctggaattgagcgtatggaatctgcattatctgaaacaagatctagatactttgtagtgaaggatgacggaagtccagtgaggtctccaatgattccatctatgcccacaagcccaacttcgctttctactgctgccagctcaagtgaaagaaatatttctaatgagagtaatcataggtcaagccgagtagttcgctccctctttaaggaaacaaatacttcccctggagagtctagcttctctgaacccagaaccagttcagatagtcagcttggcaca

SEQ ID NO: 43366 - DNA, 439 bp, Glycine max
  Clone ID: LIB3093-022-Q1-K1-B4
caaaataaaaaaaaagaaaaaatgtttgcagggaaaggggctgtttggttctcccaaccgggggcgttggcagcaatcgcggtggtagcttgcgttgggcttacacaggcccaacccgaggccaggttcaagtgcaacagcgcgaacatccccacgtgtcgcgcgctcataagctactctcacccgaacaccaccaccctcggcgacatccaaaagctcttcaacgtgaaacacatactcgacatcgtgggagcgaacaacctcccaagcaacgccacaaaaacatacgcggtgggccccaacgaggttgtgaaggtccctttctcgtgcaggtgcagcaacaacacgggactctcggaccgtgttccgctgtacaggatcaagaagggggacacgctgtactacatcgcgacgacgacgttcgcgggtctgatgaagt

SEQ ID NO: 43367 - DNA, 469 bp, Glycine max
  unsure (1)..(469): unsure at all n locations
  Clone ID: LIB3093-022-Q1-K1-B5
cgaatcccgggcgccacgctccgccacctccggcactgggatcgaacagatctctgttccganaccaccgcctttgccaggggtcatgaagtccttttatctactgtttgtgattaacagtaataaaattaattcagttcttttcattcaagttaagttgttccattctttgccaccttttgccgccgagtgatcgaaccgaaccaacgaaccaggctcgcgagctgcactgcaacaagcttttttgcgcatacaagtttggtgacgactcacttctgcaccgagccacctccaactacactttttttattattattctctgccggcgtggctttctttcttcttttataaaagtcatatcataatcataataatattacatcgagtttttggagagaaaaaaaggggtcgaacgagtgtatcagaacatacgtgaagactgcgaatataggaacccaatcctaattct

SEQ ID NO: 43368 - DNA, 460 bp, Glycine max
  Clone ID: LIB3093-022-Q1-K1-B6
gtaggctgttccattgtatctttcggaaatggctccagctaagaaccgaggagcagtgaaccaactgtttcagttcacaacttgtgctggaatcttaattgcaaacctagtgaattactttactgaaaaaatccatccctatggatggaggatatctctgggtttggcaggtcttccagcatttgcaatgcttgttggaggtatttgttgtgctgagacaccaaacagccttgtggagcaaggaaggttggataaagcaaaacaagtattgcagagaattagaggtaccgagaacgttgaagccgaatttgaggatcttaaagaagccagtgaagaagcacaagctgttaagagcccgtttaggacactcctcaagaggaagtacaggccacaactgatcataggtgcattggggattccagcgttccagcagctaactggcaataactccatcctcttc

SEQ ID NO: 43369 - DNA, 371 bp, Glycine max
  Clone ID: LIB3093-022-Q1-K1-B7
cccacgcgtccggctttcttttccttcagggttaagcggtgagatttgcgaatctgagaaatggcggattcttctcgggaggagaacgtttacatggcgaaattggcggagcaggccgagcgttacgaggagatggttgagttcatggagaaagttgcaaagactgtggaagttgaagagttgacggtggaagagaagaatctcctctctgtggcttacaagaacgtgattggtgcgaggagggcttcgtggaagatcatatcctccattgagcagaaggaggagagcaggggcaatgaggaccacgtggccattataaaggagtacaggggcaaaattgaggctgaactcagcaagatctgtgatgggat

SEQ ID NO: 43370 - DNA, 358 bp, Glycine max
  Clone ID: LIB3093-022-Q1-K1-B8
cccacgcgtccgattggacttgagaataaaatcattttacactttgaaaatgtgttttggcctaatgtggagttcttgggagtagttgcagatacatcttatggatgtagctacttccttaatctccacaaggccgccggtcatgctgttctggtttacatgccttctgggcagcttgccaaagacgttgaaaagatgtctgatgaagcagccgtcaacttcgctttcatgcagctcaagaagattcttccagatgcttcttcaccgattcagtatcttgtgtctcggtggggatcagatataaattcactaggttcatatagctacgatgcaattgggaaaccccatgaactatatg

SEQ ID NO: 43371 - DNA, 370 bp, Glycine max
  Clone ID: LIB3093-022-Q1-K1-B9
attcaggctgcacatgttcagtcagaacgggcgaccaacacctgccagcaattactgaatgtcaacaacattccatcattagctgagcagagctcaaaggaaattcaaacctccatgactcctgcaagttttaatatttctagtgaaagggagcaatcggctccattaatgtacacaccacaagtgtcattttctcaaaaatctggacacattgaggaagatccacgcaagtctgcagctgctgcagtggcagcaaaactgactgcttcaacatcctctgcgcagatgctatcttatgtgttgtcatccctagcatcagaaggtgtgataggaaatccaatgaaagaatcttcagcagattatcactctg

SEQ ID NO: 43372 - DNA, 443 bp, Glycine max
  Clone ID: LIB3093-022-Q1-K1-C11
gtaggttttgaggaccctcgtgtaacacttactgttggtgatggagttgcatttttgaaggatgttccagaaggaacttacgatgcaggtatagtggattcatctgaccctattggtcctgctcaagagctgtttgaaaagcccttttttgcgtccgttgcaaaggctctccgtccaggaggtgttgtgtgtactcaagcagaaagtatatggcttcatatgcacatcattgaggacattgtggctaattgtcgccaaatattcaaaggttctgtcaactatgcatggaccacaggtcctacatatcctagtgggatgattggttttatgctttgctcaactgagggtcctcttgttgatttcaagcatccagtgaatcctttaagtgagaatgatagtcaacagtcaagaccattgaaattttacaattctgagattcatac

SEQ ID NO: 43373 - DNA, 168 bp, Glycine max
  Clone ID: LIB3093-022-Q1-K1-C12
gcgcgagtttcaactcggtgtagcaatggcgatgatgctaggggtgcagaagaacacactgtacgtgggagggttagcggaggaagtgaacgagtcgatcctccacgcggcgttcattcccttcggcgacatcaaagacgtgaagacgccgcttgaccaagccacgca

SEQ ID NO: 43374 - DNA, 398 bp, Glycine max
  Clone ID: LIB3093-022-Q1-K1-C2
catggtttccctttccaccaccccttttctccccttcactgcaaaaaacgcttctactagattcccacctcccaattcattctcccgcaacaagcaacgtagtaacagggatcacaggaaggttgtctgcgcctgcatcgcacctccgcagaacttcaagagccaggactcttccgccattaatttcaatggttcgtccaaatcagaacaactgagcacggcgtgggatcatgaggatgattctgatgttcttattgagtgtagagatgtgtataagtcttttggggaaaagaaaatcttaaatggtgtcagcttcaagattagacatggtgaagctgttggaataattggtccttctgggaccggcaaatctacagttttgaagattattgctggac

SEQ ID NO: 43375 - DNA, 353 bp, Glycine max
  unsure (1)..(353): unsure at all n locations
  Clone ID: LIB3093-022-Q1-K1-C3
ntccgtgagcgtgaaagatgccttcggcgaggctttcanggtcaccaaggctcgacgttgctattgacatgggcaatccatttctcaatctcactgttgatggtttccttaagatcggagctgtcgcagccacgcgatcagctgctgaagatacttatcatattatccgaaacgggaatatctcaagtcatgatttcgagaaaacgttgaagaagatgtgtaaagaaggtgtatattggggaactttagctggtgtttatcttggaatggaatatggggtagagaggatccgtggcaccagagattggaagaatgccatgattgggggtgcagtaactgcgactctgttatct

SEQ ID NO: 43376 - DNA, 435 bp, Glycine max
  unsure (1)..(435): unsure at all n locations
  Clone ID: LIB3093-022-Q1-K1-C4
gtttctaaggagagggaaggggagaatccaattccaattaagggtttcttaatattattcactttttgttttattccaaggaaggtcttcttcttccaattcaaattgaatggaccaagtagtggtaaaatattatattttttgaaaaactttggttcttttcttaactaaacccgtttaatggccggcttatcttggtaaattttttgcatttatttcaagtaagcttcaaatttccccattctatacagccttagattctacgtcgntaactctctccgattgattctatattcgatattcgnntgattgattcactcctctctctctctctctctctctcgctttcgattcgacgcctgaacaagtgaacatggaccctaatcacctcttcttcacgcatttccgcgatggtgctattgcctcacgcattga

SEQ ID NO: 43377 - DNA, 450 bp, Glycine max
  Clone ID: LIB3093-022-Q1-K1-C5
gctggcacaagttcagatcggaggagcagtcgaggaaggggatcttatatacctcctggtccaccaaatggaactcataagcctggagtgcatcctgctggatatcctgtgccaagggttcctttgcctccttttcatggtggtccccaatctcaaccatatgccattccatctcgcggggcagttcatggacccgttggggcagttcctcatgttccatctccagggagtcgaggttttggggctgggagaggtaattctggtgctccaatcggcaatcatctaccacatcaacaaggcacccaacagcctattgggaatattggatctacatttaacttccctgctctagagaatcccaacagccagccatctgttggtggtccatcatctcaacctgggtttgccaacaatatgcctgttcaaggtgctggccaatcatttcgagat

SEQ ID NO: 43378 - DNA, 332 bp, Glycine max
  Clone ID: LIB3093-022-Q1-K1-C6
gtgagtattcagctcaatatgtggatgctttctccaatgcccatcactcttcttcttcttcttctataccagaattcatgcaattccaacgcctcgagaatgatccccaagagaagaaattggagtacaatggaagtcaagtaccggaagaatttgtggaaacagagtattaccaagatctcaacagcgtggacaaacaccaccatacgacgggaacaggatttatcaaagtagagaaaaatggaaatgactttcacatagaaccagataatgacactggttgccatcactcttgcaggtgcaatccagcaaccaatgattgggttccttct

SEQ ID NO: 43379 - DNA, 461 bp, Glycine max
  Clone ID: LIB3093-022-Q1-K1-C7
attgagtttgagtttcagccatggtatctgtttctctgctcttattcctatctttctttgccttctttgcaccctctgaatctcacgacaaagtctcgttggaattgtactacgaaagcttatgcccctacagcgccaacttcatcgtgaatcacctcccaaaaatcttcaccccagatcttgccccaatcgttcacctcaaactcgttccttggggcaatgccaaactccgtgccaacgccacctttgactgccagcatgggccatatgagtgcttgctgaacacagttgaagcctgtgcaattcacatctggcctcaactcagcaaacattttcctttcatctactgtgttgaggatctggtgtttcagagtaagcgtgaggaatgggaatcttgttttgagaaactggatcttgattcggaacctattaatcagtgttataatagtgaacatggaaaa

SEQ ID NO: 43380 - DNA, 400 bp, Glycine max
  Clone ID: LIB3093-022-Q1-K1-C9
atttttcttctctcccttctttctctctctctctctctgaccattctcttcttcttctttttcttctcctctctctctctcccctccgccatggctgaggataaggagatgtctacctctgtcatcaatgggaatgattccctaactggtcacatcatatctacaactattggaggcaaaaatggggaacccaaacagactattagctacatggcagaacgggttgtaggaactggatcatttggaatcgttttccaggcaaaatgcttggaaactggggaggcagtggcaattaaaaaggttttacaagacagaagatacaagaatcgtgaactgcagttaatgcgtgtgatggatcatccaaatgtgatctctttgaagcatttgttcttttcaacta

SEQ ID NO: 43381 - DNA, 214 bp, Glycine max
  Clone ID: LIB3093-022-Q1-K1-D1
cctttttgcgtgaagggtcgcgtctactgtgacccttgccgtgctggttttgagaccttaacaaccacctacattgccggtgctgagattatgttgcaatgcaagagcagggttagcaacgaggttgtgtacaccaagaaagggtacactgactcaactggagcatacacaatgtacgtggacgagggatcacgcagatcaaatatgcagtgcc

SEQ ID NO: 43382 - DNA, 440 bp, Glycine max
  unsure (1)..(440): unsure at all n locations
  Clone ID: LIB3093-022-Q1-K1-D10
cgagtttattgagtctttaacaagagtcatgcaaaaggggttctttgaatcacgcgcttatgctgtgttcttgttgaaatctatttccgaagtggctgaaccagtgcaactattgcatctaagacaagaactttttgtcgaactggtacaagtcctgaaggatcaaatttcacagaagacatcaaaggcgacccttcaaaccctgatccaattctctccttgggggaggaacaggatcagagctgtggaagcagctgctgttcctgttttgattgagcttcttctcgattgcaaggagagaaagccttgtgagatgatgctggtgttgttggagctgctatgccagtgtgctgagggaagagcagaacttttgagccatgcagcangtcttgccattgtgtccaaaaagattctaagggtttcgactttggcgaatgata

SEQ ID NO: 43383 - DNA, 443 bp, Glycine max
  unsure (1)..(443): unsure at all n locations
  Clone ID: LIB3093-022-Q1-K1-D11
cttcctacttgaagaaagtaggatacaaccctgacaagattccttttgttcctatctctggttttgagggagacaacatgattgagaggtccacaaaccttgactggtacaagggtccaactctgcttgatgcacttgaccagattagtgagcccaagaggccctctgacaagcccctcaagcttccccttcaagatgtgtacaagattggaggtattggaactgtgccagtgggacgtgttgagaccggtgtcttgaagcctggaatggtggtgacttttgcaccaactggactgacaactgaagtcaagtctgtggagatgcaccatgaatctcttacagaggcacatcctggtgacanatgtgggattcaatgttaagaatgttgctgttaaggatttgaagcgtggttatgttgcctcaaactcaaaggatgaccctgc

SEQ ID NO: 43384 - DNA, 410 bp, Glycine max
  Clone ID: LIB3093-022-Q1-K1-D12
gatgtgagccggccaaagccaatgaccgccttttggtcatctctggctcatagctttaccaagcgcccaatgaagggaatgcttaccggtcctgttaccattcttaactggtcctttgttagaaatgaccaacctagatctgataccacctaccagattgctttgtctatcaaggaccaagtggaataccttgaaaaggctggcatgactgttatccaaattgatgaaactggtttgagagaaggtcttccactgaagaaatcagaacaagctcactacttggacttggcttgccatgccttcaaaatcaccaatgtttgagtgcatgataccacgcagatacacactcacatgtgctactcgaacttgaacgacatcatacacttcatcatcgacatggactccgatgt

SEQ ID NO: 43385 - DNA, 443 bp, Glycine max
  Clone ID: LIB3093-022-Q1-K1-D2
ccacgcgtacggaaatgtcctttttggctagttgtcaaaatctcgttcctcgaccttgggtcattgatgatcttgacactttcaaattgaaatggagcaagaacccatggaagaaggttatcatatttgttgataactctggtgcagatatcattttgggtattatgccatttgcaagagaactacttcggcgtgggagtcaggttgtattggctgctaatgacttaccatccatcaatgatgtgacttgttctgagctagttgaaattatatcaaagttaaaggatgaagatggacagcttgtgggtgtcagtacttcaaatctcttaattgcgaactctggcaatgatttacctgtcattgatcttacaagagtgtcacaggagcttgcttaccttgccagcgatgcagatcttgtcatcttagaagggatgggtcgtgga

SEQ ID NO: 43386 - DNA, 453 bp, Glycine max
  unsure (1)..(453): unsure at all n locations
  Clone ID: LIB3093-022-Q1-K1-D3
cccacgcgtncgnccacgcgtncgctgaattgagttcactgtccacaagtttcgccccaacactcaactcggctcgtcgctattgttgttgttcttcttctccatatcaaacaaagtatagataaaatatcattgcagcttcattttcatcctccaattaattagcaatggggcacacatcccttttcactccctcttcctctcttaggttcaactctcttcttgtttcctccaccccctcttcttcttcacgctccaacagcgtttctttccccgccctctccaggaacataaggaaatcggtagaagatagaaagattaatataaaattctgctgtgaaagcagtgtatggtgatgaattttggacacctgcgaagagttcacctcacgatatttggtccataaggagtgatttgcaagtcccatcttccccttatttccctacctatgca

SEQ ID NO: 43387 - DNA, 322 bp, Glycine max
  unsure (1)..(322): unsure at all n locations
  Clone ID: LIB3093-022-Q1-K1-D5
acctttcccaggccgacttcggccgcctcgagatcgagctggccgaggttgagatgcccggcctcatggcctgtcggaccgagttcggcccctcccagcccttcaagggggcccgcatcaccggctccctccacatgaccatccagaccgccgttctcattgagaccctcaccgcccttggcgccgaggtccgctggtgctcctgcaacatcttctccacccaggaccacgccgccgccgctattgcccgcgacagtgccgccgtcttcgcctggaagggtgagaccctccangagtactggtggtgcaccgagcgcgccct

SEQ ID NO: 43388 - DNA, 450 bp, Glycine max
  Clone ID: LIB3093-022-Q1-K1-D8
cccacgtgccggttcttcaatcttctagagagagagagagagagagagagagagatggcgttgaatcctcaactgtttccaaatggaatgcccgttcctttcgtgaacgagatgtttgtgttggccagagacggcgtcgaattcgaggtcgataagattcctgcctctggcaatcatgggggtaatctcaaaacaaagggaatcgtgtatttgtcgaatattcggatggtcttcgttgctaaaagtccagttggacacttcactgcttttgatatgcctttgctttacatccatggtgaaaagtttaaccagccaatatttcactgcaacaatctctctggacatgttgaacctgtggtcccaaatgaccaacacagagctctttactcaacacactcatttaagatcttattcaaagagggaggctgtggaaccttcattccccttttc

SEQ ID NO: 43389 - DNA, 456 bp, Glycine max
  Clone ID: LIB3093-022-Q1-K1-D9
gtcctctgaaaacaacagtaactggagttgagatgttcaagaagattttggatcaaggacaggctggtgataacgtgggtcttcttctccgtggtctgaagcgggaagacattcaacgtggtcaggttagttgaggagatctagcttttgctttttgttagacatcatagctgcatgcaagagaactgtatattatctgtatttgtttcgataaaatttatagaatttcgaattcaaattactaaatttgagaaagcactttcccaatgctgctttctattgaaaaggtgattgccaaacctggttctgtaaaaacatccaagaaatttgaggcagagatatatgtactcacaaaagatgagggagggcgacacactgctttcttctctaactacaaacctcagttttacttgaggactgctgatgtcactggaaaagtagagttgcccgaaaatg

SEQ ID NO: 43390 - DNA, 456 bp, Glycine max
  Clone ID: LIB3093-022-Q1-K1-E1
agtaaatcgaggtacccattttatgataaactttccttccatttttgttcctctagtaggcctagtatttccggcaattgcaatggcttctttatttctttatgttcaaaaaaacaagattttttagatacagaaaacaaagtaaaattctggggttttttattccccaattataatactaaattcaaaaaaaggagagtaatgagtataatctttcgctcagacgatgtactgatatattctatggcggaggttcgaagaacaagcaatttattttgggccgttttcactttgttaggttcattggggttattgttcgttgcaatttccagttatcttggtatggatttgttctttatttctgagaaaattagtgatttttcttttattccggactttatttattttccatttattccactaaagagacccacgatggctttttatggaaatcgc

SEQ ID NO: 43391 - DNA, 428 bp, Glycine max
  Clone ID: LIB3093-022-Q1-K1-E10
aagggcacttttttccccttgtgattttggtgtccaccaggcactgttacctcacacatcaagaggcaatgcaattctcctcctacacttattgttattggtgctggaatatcaggaattgctgctgcgcgttgtctccatgatgcatcttttaaggtgattgtattggagtcaagggataggataggtggcaggatttatactgattactcatttggctgtccagtagatatgggagcctcatggctacatggtgcttgcaatgagaatcccttggcaccattgatacgcgcattaagacttacactctatcatacaagtggtgataactctgtcatatttgatcatgacttggaaagctgtatgctatttaacattgatggtcatcaagtccctcaacacattatgatggaagtggagacacttac

SEQ ID NO: 43392 - DNA, 408 bp, Glycine max
  Clone ID: LIB3093-022-Q1-K1-E11
aaaaaaacaaaaacagaaacaaaagatggttcatcagaggcaaaacaacatccatgttcttgttcttccataccctgcccaaggccacatcaacccccttgtccaattcgcaaaaagattagcttcaaagggtgtcaaagccacagttgccaccacccactacactgccaactccatcaatgcacccaacatcacggtcgaagccatctccgatggtttcgaccaagccggcttcgcccagaccaacaacaacgtgcaactcttccttgcctccttcagaacaaacggctccaggaccttgtctgagctcatcagaaaacaccaacaaactccctcccccgtcacctgcattgtctatgactcatttttcccctgggttctcgacgtggcgaagcagcatggcattta

SEQ ID NO: 43393 - DNA, 374 bp, Glycine max
  Clone ID: LIB3093-022-Q1-K1-E12
cccacgcgtccgcccacgcgtccgcccacgcgtccgcccacgcgtccgatttcgtataacatttcatttcacttcacttagggtggtgcatttgcaaccctttaatttcctcacaaaaatggaggaacgtagtttgtactcactagtgtttcttgtgcttgctttggctattgtgaacaaagtgcatgggcaagggacgcgtgtagggttctattcgagtacatgcccacgcgctgagtccattgttaagtccacagttacaacccatgttaattctgatagtactttggctgctgggttgcttcggatgcacttccatgattgctttgtgcaaggttgtgacgcttctgttctcattgccggttctggcactg

SEQ ID NO: 43394 - DNA, 373 bp, Glycine max
  Clone ID: LIB3093-022-Q1-K1-E2
cttccgcctattgtagccaagaaaggaaggaaggaaacccttgcttaccttttcaacttttaagaagccaatttttggtaaaacacttactgggtaaaaaatcacccttggaggggggaggtcaaataccataaataatggaaaggccaaaattcaagaacagggaaggatcccaccaaaccaacaacgtctcatttttggtggcaagcaacttgggggtggacgtacacttgctgattacaacattcaaaaagagtccactctacacttggtgctccgtcttcgtggtggaatgcaaatctttgttaagaccttgaccggaaagacaatcacccttgaggtcgagagctctgacaccattgacaatgttaag

SEQ ID NO: 43395 - DNA, 429 bp, Glycine max
  unsure (1)..(429): unsure at all n locations
  Clone ID: LIB3093-022-Q1-K1-E5
agtcgttcctaaatggtatgagcatngggacttcaaacaaagtatatgatggagacatgattgttcttcaaggccaagagaaaatcttcctttcagaaaccaaagaaggtggagacattaacaaacagtatacaaacatcaccttcacaccaacacaagcagatcgctttgtcttggcatttcgaaactggctaaggcggcatggcaatggccaaccagaatggtttggcaacagcagcgaccaaccattgccatcaactgttttatcaaaacgtcagatgttggatagatttgaacagcacactctcaagtgttcatcatgtaaagcagcatatgagggattccaaacatggcagaaagtcctaattggtacaacagttgtgttttgtgcaacatcanggatcccatcaaatgttcaagtgcgtgtac

SEQ ID NO: 43396 - DNA, 451 bp, Glycine max
  unsure (1)..(451): unsure at all n locations
  Clone ID: LIB3093-022-Q1-K1-E6
cccacgcgtccgttcttgatctccattacgacacagacgacggcttcgaagtttttcaattccagctctattccctctcttccgttccacctcatcaacaaaagattttcggagccgaacaagatactccagtggtcaatgactctgatctcgtcgccatttctgacaaactacgactagtctcggtcaacgactccgaaccggaaccaagcgctgccgatttgttgaaatccgatgaggaattggccagactcttgcaggcagaggaggaagcgctaatgttgcagtagtatgtggcaagccaaaatcctcgagaatttgatagtggagtacggccctactagtcaagtcctcatgttgcagcagtatgggctatatttttttgcggaatatgatattaaatgcataattgactntcatgctgntcttggttccagaatgggatggagca

SEQ ID NO: 43397 - DNA, 414 bp, Glycine max
  unsure (1)..(414): unsure at all n locations
  Clone ID: LIB3093-022-Q1-K1-E7
atggaaccaaaagttttcagggctttgcttcatttatttatagagacactctaatagatgatgaagagctctttatgtcacgttcatcattcttgccttggtatctgaatcatttgctgcanagttgttagctgctgcagaaaagtatggtttgccaagacttaaactgatgtgcgagtctgtactttgcaaagacatctccatagattctgttgcctatattctggctcttgctgatcgttatcgtgctacagaattgaagtctgtctgtctacaattttctgctgaaaaccttgtcgctgtgatgcaatctgatggttttgagtatcttaaggaaaattgtcccttgctgcaatcagaactgctaaagactgtggcaggatgcgaggaggaatttagtggagaaggaaagtg

SEQ ID NO: 43398 - DNA, 445 bp, Glycine max
  Clone ID: LIB3093-022-Q1-K1-E8
tctttttctcagaagcaaaggttttgaatttcagttatggccttttgctgtctttttgtttgtattgttttgaaaaaaattggatattttttcagggtattggagtggttaaacaacctactatggaaggaggttcaaagcctcctcctcctcctatgttggagagaagggcaaggcctcaaaaggatcaagctttgaactgtccaaggtgcaattcaaccaacaccaaattctgctactacaacaactatagcctatctcagccaaggtacttttgcaagacatgtataaggtattggactgagggtggttctctcagaaacgttcctgtcggtggtggctctagaaagaacaaaagatcaacctcatcagcgccaccaccatcatcagcatcagcacaagcaaagaagcttcctgatctcacaacacctaatttccctcaatc

SEQ ID NO: 43399 - DNA, 455 bp, Glycine max
  Clone ID: LIB3093-022-Q1-K1-E9
catagtctttcggtccttccttccttcctccgctctagtgtatgccactctggttaattatcatacccccttctaggcatagttcttctccctctgttctctattctacactgtgaaaccaagatgaaggtagcatttgtagctgttctacttatttgccttgtcctaagctcctccttgttcgaggtgtcaatggccggttctgctttctgctcctccaagtgcgcgaagaggtgttctagggctgggatgaaggacaggtgcacgaggttctgcgggatttgctgcagcaagtgtaggtgtgtgccatctgggacttatgggaacaagcacgagtgcccttgctacagagacatgaagaactccaagggcaagcccaaatgcccttgattgttaatttcaccatgcatcaacttcaatctcaaacctttgaatccttcactcttgctagctga

SEQ ID NO: 43400 - DNA, 461 bp, Glycine max
  unsure (1)..(461): unsure at all n locations
  Clone ID: LIB3093-022-Q1-K1-F1
gtgtggaaacattctgttatggtttgtgctgcaatcacaacacaccaatatgtatctgctgagcagattgtgaatggcatgcatcaggcaaaggcagaaggagctgatatagtggagcttaagcttgactgcatcaccaatttccactctcaccatgacctcaaaatcattctccaaaataagccactacccgtgcttattgttaaccgaccaaaatgggaaggtggtttgtacgagggcgatgagaacaagcggttggaagcattacagcttgctgtggaattgagtgctgatttcatagacgttgagctgaaggcagcttcttgtcttccaaccttggtggaacatatgagaaatcataatagtcatggcaaaatcattgtttcctgctatgtggatggcaccacccctccgcatgaagtactacttcaacttgttgaactaatgcangctactggagc

SEQ ID NO: 43401 - DNA, 229 bp, Glycine max
  Clone ID: LIB3093-019-Q1-K1-A3
gctgaagaggcattgcagaagctaaatgggacaacgattggcaagcaaacggtccgtctttggtggggtcgtaatccagcaaataagcagtttagaatggattttggcagcccttggactggggcatattacggggcccctatgtatgatggttatggggtatgcattgtcccctcgtcatgatcccagcatatatgctgctgcttatggtgcttacccccttttatgg

SEQ ID NO: 43402 - DNA, 276 bp, Glycine max
  unsure (1)..(276): unsure at all n locations
  Clone ID: LIB3093-017-Q1-K2-H8
ctttgaatgaggatgctgctaataatgatcaattggattctctggacagcccacaagactgaagcangaggtatatactattatagggcggtgacaggagaatcaacatatcataaaccttctggctttaaaggggagtctcaccaagtttctgctcagcccactccagtttcaatgattgatttgcctggtactgattggctgttggtctacactagcgatggaaaaaaatattactacatcaatcttaccaagactagctgctggcaaatccca

SEQ ID NO: 43403 - DNA, 382 bp, Glycine max
  Clone ID: LIB3093-017-Q1-K2-H9
tttcatttctcagagagtcttcccgtctctttctcttcacttcttataccgtcgcccccaaacgacgccgttttctgttctctgatgtaaacgccgttcgagaacaaaccaaaaaaagaaaagaaaatcagttattgccgttgttgttttgtttccggttcggtttatttcaatggatcgggcggcgttgactgttggaccgggcatggacatgcctatcatgcacgacagcgaccgttacgatctggttcgcgacatcgtgtccggaaatttctgcgtggcgaggctgattcatgattaacaaaccaaggaactggtcgccggcaagtacattctaaaggggtgataagattgatgaaaatgtaaagaggggaatcattta

SEQ ID NO: 43404 - DNA, 252 bp, Glycine max
  unsure (1)..(252): unsure at all n locations
  Clone ID: LIB3093-018-Q1-K1-A1
gtagttagggcgatataatgggagtaaaaggtaactgtgggaaaatgggaaaaacgtttttttgctgatgnctgctgttatttgctgtccccacttgttggtgcttataggcgaagaaaaatattgtttgagccaatagcttccagactgtgaaggaaagctgccattgcttgatcttgggatttggactttgagaataaaatcatttttacacttttgaaaatgtgtntttggcctatatgttggagttct

SEQ ID NO: 43405 - DNA, 312 bp, Glycine max
  Clone ID: LIB3093-018-Q1-K1-A10
cttctcaccatcgttctttattattatcatcccctcctcttccttccttctcctctcattccatacctcaacaaaacaaggttcagagacttttccgattcctggaagaagagaagagaaaacctaaatcacagatccatggcggaagaacaccgatgtgaacctcccgaaggtcaccgactctgcgtcaacaactgcggcttcttcggtagcaccgccacgatgaacctctgctccaaatgctacagcgcgatccgtttgaaggagcaagaaaaagcgtcgacgaaatccacaatcgaaaccgcgctctct

SEQ ID NO: 43406 - DNA, 215 bp, Glycine max
  Clone ID: LIB3093-018-Q1-K1-A11
gttgtcaactgattaaactatgaattgaacagatacatttggcatgctccgaaatggaatcggtggatctaatagcggagttttggtttgtgtaccttatagcatgaatgaatcagtgtcgtttgcatgccatcaagaatcctagtgttttaaagtcagtggatagagaacataatctttctctactattcactttatatacttcactctttttc

SEQ ID NO: 43407 - DNA, 418 bp, Glycine max
  unsure (1)..(418): unsure at all n locations
  Clone ID: LIB3093-018-Q1-K1-A3
tccacgcgtncgtccacgcgttcgtccacgcgttcggtcggaacagccctgcatactacagtcctccgcggcgaggatactgcggtggtggccgangaggatgaggaggaggaggaggaggagggtccggcaggagggggttcggtggaggcaggcgcatggacagcaatgggagcctcttggttcgtaacattcccctcgattgcagacccgaggagcttcgcgttcctttcgagcgatttggacctgttcgtgacgtttacatacccaaagattattactctggagaacctcgaggctttgcctttgtgcagtttgtggatccttatgatgcctcataagcacagtaccatatgaacagacagatttttgctggaaaggaaatatctgtaattgtggctgaagagacgagaaaaag

SEQ ID NO: 43408 - DNA, 431 bp, Glycine max
  Clone ID: LIB3093-018-Q1-K1-A4
aaatggtgtcgctgaaactgcagaagcggctggccgcaagcgtgctcaagtgtggcagaggaaaggtgtggcttgaccccaatgaagtcaacgaaatctccatggccaattctcggcaaaacatcatgaagttggttaaggatgggtttatcatcaggaagccaaccaagattcactcacgctcgcgtgctcgtaggatgaaggaggcaaagaagaagggccggcactctggttatggtaagagaaagggtacaagggaggcgaggcttcccaccaagatactttggatgagaaggatgcgtgtgctcaggcggttgcttcgtaagtacagggaatcaaagaaaattgacaagcacatgtaccatgatatgtacatgaaagtgaaaggtaatgttttcaagaacaaaagagtcttgatggagagcattcac

SEQ ID NO: 43409 - DNA, 455 bp, Glycine max
  Clone ID: LIB3093-018-Q1-K1-A5
gctcggaaccttcgacaccgccatcgaagccgccaaggcctacgaccgagccgccttcaggctccgcggctccaaggccatcctcaacttccccctcgaagttaacaccgcggcggagaccgtctccgtcgccgccgtcgacgtcgagaggaagcgccgccgcgaggaggaggaggtggtggtggaggatgtaaaggcggtggtgaagaaggagaaaataacggagcatgatgtgagttgttttagggggatgccgttaacgccgtctatgtggaccgggttctgggacagtgacgtcaaggatattttcaacattccgccgttgtcgccgttatctccttttggattttcaccgctcgtggctgtgtgaaattccaatttaggactgcgttttttcgggttttagtacttacagcgtccttctgttcagggatgagtacattggacatttgacg

SEQ ID NO: 43410 - DNA, 406 bp, Glycine max
  Clone ID: LIB3093-018-Q1-K1-A6
cccacgcgtccggaaacggggaatcattgtctgcgtctgtaaattgtaaattgcatcatccctgaagctgaacctcaaaaccctagctgtccgcctgtctgcaacggcgtcgttatgatcagttgagaatccaaaggaatcgagtcgaatcatctgaccggcgacagttatgtacagagagcgaggaggcgtcggatccaaatcggaggtaacttccgttgatcggaagcgaatcaacgacgtcctcgataaacagcttgaacgttcctcgccttccacatccagagccgccgccatcaacggcaaggaccgctcctcctcttccctcttagccgccgccaaagactcccgctccgcctccgtcaccgcccctatctccaagaattccaacgcttccgacgaggaa

SEQ ID NO: 43411 - DNA, 311 bp, Glycine max
  Clone ID: LIB3093-018-Q1-K1-A7
atatacggcatcgttaccatggtcaacaagaatgaaaattgcagctggagctgcaaagggtctagcctttctacatgaagcaaagaaaccagtcatctatagagattttaaagcttcaaacatcttgttagactcggattataatgcaaaactttccgattttggcttggccaaagatggtcctgaaggagatgacacacacgtttcaactagagtcatgggcacacaaggctatgcgggcccagaatacatcatgacaggacacttgacagcaatgagtgatgtgtacaagtttggagtcgtgctcttgg

SEQ ID NO: 43412 - DNA, 442 bp, Glycine max
  Clone ID: LIB3093-018-Q1-K1-A9
gcttgctgaacacagttgaagcctgtgcaattcacatctggcctcaactcagcaaacattttgctttcatctactgtgttgaggatctggtgtttcagagtaagcgtgaggaatgggaatcttgttttgagaaactggatcttgattcggaacctattaatcagtgttataatagtgaacatggaaaacagttggagctacaatatgcagctgaaacaagtgctctggagcctcctcacaagtatgttccttgggtagttgtggatggagaaccactctatgaggattatgagaacttcttaagctatctttgtaaggcttataaaggcactgtttcaccccaaagttgcacccaagcatcatacctaagagaagtgaatgcaaagcctaagcattcggtttgctacaaggacagtgggattatgctaacatgggaaaaagt

SEQ ID NO: 43413 - DNA, 174 bp, Glycine max
  unsure (1)..(174): unsure at all n locations
  Clone ID: LIB3093-018-Q1-K1-B1
gccgattccggtcgaccacgcgtcgcggccccttttttttttttttattnnnntttnnnggcaacgaggtattagaaaaattgatcaaaacttcttaaactacagtcattgcatttttgcaaagtattccccacattaaaaaggactgtatcataatttggcggaaaaataaaa

SEQ ID NO: 43414 - DNA, 234 bp, Glycine max
  Clone ID: LIB3093-018-Q1-K1-B11
cccacgcgttcgccacgcgtccggctaatcttaatgtcttaatctacagatgctacaggagatttcagttgtttacaagctttgaagatttccctaatgaattgggctttaattgcccatcataaatggcaagttaagccaaatttaatttactttacctcacggcttcatgcaatttgcttgcaattccctttcttctgttagagggagctacccaaatttccttaatgccac

SEQ ID NO: 43415 - DNA, 396 bp, Glycine max
  Clone ID: LIB3093-018-Q1-K1-B2
cggacgcgtgggtttcgatttgagggaacagtacaagagtgtgaggatcggttaacccaactgcacaggtagtcactaaaataatggagtctcacgatgagactggatgccaggctcctgaacgccccattctttgcattaataattgtggcttctttggaagagcagctaccatgaacatgtgttccaagtgttacaaggacatgctgttgaagcatgagcaggacaattttgcagcatcgtcggttgaaaacaatttgaatggcagttccaatggcaatggggctgtgactactggtgctgttgatgtacaaatttgaagctgtggaggtcaagactgtctctgctcagagttctgtatattcatcctccggtgagagtttggagatgaaagcc

SEQ ID NO: 43416 - DNA, 434 bp, Glycine max
  Clone ID: LIB3093-018-Q1-K1-B3
ctcttatgtttttggctctttgcagaatctttgagtgacacatacctagctatcacctcaatggattactattttggaaaccttaatcctaacccttattaccatcactctgccgtagtgaacatggcatctccctcctgcgagttcatgttatctgattatctcgtgttggaagatgctcttgttgttgatcatcatcaagagtcttggtcacaaagcactgaaactgaatcgtcggagaaagcaacctccagcgatgcaagtcatgggttcggtgatgcaacctccaacaccaacatgcatatgcaagtgcttcttaattatctcgatttattttatttttttcattaaacaagaaaatggtatatcgtgtattctatgctattttatgtgtgcgcaagtacgcataaatgttcattaatcatcttgggatt

SEQ ID NO: 43417 - DNA, 245 bp, Glycine max
  Clone ID: LIB3093-018-Q1-K1-B4
ctgagaaggaatcacacaagagaaattttgggtggatcttggcaatttaaatttggtccaaaaatagtgagaaagaaaaccatagtttatatagttttcatgtccttcctaacggtggcgcaccaaagggggtcaggtgagtttatgcggttcacggaaagtcatggctgcggtggtgtgcgttgacagctattgtgaatatggttatggacattattatggtataagtggtgtgggtggtggtt

SEQ ID NO: 43418 - DNA, 398 bp, Glycine max
  Clone ID: LIB3093-018-Q1-K1-B5
ttttgtctctctctctcctcacgccaaaccacaccagcttcgtgccttcatctcctcactttctcattggtggaattacttttgtctcttcctctctgatcttccacaggctcctattatcccttttgctttcccaatccttttcgcgaaaaaaaaaagttcactttctattttggcccccttttgtggttcctgaaacgcagtaagggttccgtttgtgatattgggtcaataatggggtcccgtttttctaaaattaccgcctcaatttttgcggtctgggggtgattgattttgtggtgaatgaattgtactggatgaggtggttctgtgttttcaattttaatttcatcctctttttttaaaggtggtgttgttaatttctaaaatttgattcc

SEQ ID NO: 43419 - DNA, 299 bp, Glycine max
  Clone ID: LIB3093-018-Q1-K1-B6
acgccacgcgttcgttatttttgccctatctattatggttcccgcggcttcaaaccttaatggttctgttactctctttccctcatgcgcccttgctctcaacaacaattacacaccgtcatcgaaaccctcgctctttatcttcttcgttctcctttttgctctcgatcgagggttctttcgtggggaacactgcagatttcaccacccgggtcttattcatccgtgcccatgtccaaagttctcggcttttccggagttgacaatttttgccctattggatcaatataccccaaccc

SEQ ID NO: 43420 - DNA, 433 bp, Glycine max
  unsure (1)..(433): unsure at all n locations
  Clone ID: LIB3093-018-Q1-K1-B7
ccagaattgtgtgtgttggatgggacccggaaggcgtgcttggtccaccccaaactgggcacctcgccaggttcgagtttaagaggcgcctcgtgagagacgcatatgcccgcgaagccttccaacgtcaagtccgtgaagagaaagaacgccgtcaatcccttcgacaatctcgtcctcttcccgatactccgcaagacctcattgaatacttccttgacactgaagctcatgagattgagtntgagattgcaagaatgagaccaagattgaatgaggaattctttgcgcaactcaaattcgagttaagacagcttcgattcgcttgtaacaaaacacagctcatggatgacagacagattgagctggatgctctagagaaagccatactaaaaggattagaagcctatgataagatgcaaggtgaactcgt

SEQ ID NO: 43421 - DNA, 453 bp, Glycine max
  Clone ID: LIB3093-018-Q1-K1-B8
cccacgcgtccgctatcctcaactagtgaaattccttcttctctttccacgagccaacaacaacatcattgatgcaatttctgttcccataaataatgcccgggagaaggagaaggaagttgaaatcgttgagtgatacaattaccgacagcagacgggcatcagtggaggtggaaaatgaatatttagagctgcaaacttggtctgatctccctactgaactcttggaattaatactatcccgtttaagtctagatgataatgttcgagcttcggttgtttgtaagagatggcattctgttgccacttttgtatgtgtggtaaaccaatcaccatggctaatgtattttccgaaatttggtgactggtatgaattctatgaccccgcgcaccgcaaaacctattccatctagttgccagagttgaaggggatctagagtttggtacaccaaa

SEQ ID NO: 43422 - DNA, 423 bp, Glycine max
  Clone ID: LIB3093-018-Q1-K1-B9
cgcgtttctaatcattattagactcgatctcaacgatgaatgcaacactgctttgtccttgttcttctgctcctctgattctcgacacgcatagcaaccgaacctcggcaacgagacacgcttccaccgttgtttgttgttcgtcgaggaatcaaccctacatcccgaagctcgagccttttagccgaaccaaatttgaaagggccgttaaggaccctcctttgatcgaaaaatccgagagagagatcttagattattgttcaacgcttgaaggagaccaatcctatagctgctggcaggcttattttgagctgaaagatcttgaaaaagagtccccaaaagcagacatagagaggctgattctggagactggtggtgtaaaatccctaataggatgcttgcatgggatttcaatcatgcaca

SEQ ID NO: 43423 - DNA, 462 bp, Glycine max
  unsure (1)..(462): unsure at all n locations
  Clone ID: LIB3093-018-Q1-K1-C1
tntcatgctatgggatactgataacatttctctcaaacacggcaatngaactcaaagctggtctaagaagatatggttctacccttaaggatatagaaatacgtgatcttatggaagcggctgatgtggacaaaagtggaaccatagactatggggaggttattgctgcaacagttcatctcaacaaactagagcgtgaagaacatctcattgcagcattccaatattttgacaaggatggtagtgggtacattacagttgatgaacttcaacaagcttgtgcagaacaaaacatgactgacgcttttcttgaagacatcattagagaagttgatcaagataatgatggaaggattgattatggtgaatttgctgccatgatgcataaaggcaacgctggaattggtaggaaaactatgcgcaacagtctgaatttaagcatgagagatgcaccaagtgctc

SEQ ID NO: 43424 - DNA, 451 bp, Glycine max
  unsure (1)..(451): unsure at all n locations
  Clone ID: LIB3093-018-Q1-K1-C10
gagctactgttgtcattgctgtgaagtactccatagttgagcgtccagagaagatagatgagatcatataccctgaaatatcttcatttctgatgcttatcaaggataacgataggcatgttaggcgagctgctgttttggctataagcacatttgcacacaataagccgaatctcatcaaggggcttcttcctgatctgctgcctcttctatatgatcaaactattgttaagcaagagctcataaggacagttgatcttggtccttttaagcatattgtggatgatggactngaattgaggaaggcggcttttgaatgtgtagacacattgctggatagttgccttgatcaagtgaacccgtcatcattcattgttccttatcttaaatctggtttggatgatcattatgatgttaaaatgccatgccacctggtactctccaaactagc

SEQ ID NO: 43425 - DNA, 402 bp, Glycine max
  Clone ID: LIB3093-018-Q1-K1-C11
aatttcttggttacatcaaggtacatattttctgttcattcattaactcatctgcaaacatggccgataagcaaccccacttgaacggcgcttattacggtcccgccattcctccggcggagcaaccacgctaccgccctcacagtcaccgcggaagaagctgctgttgctgcctcttcggaatcttgtggaagattctggttgcactcattgtcctcgttggcctcgcggtcctcatcttctggctggtggttcaaccccgttccttcaagttccacgtcacggaagccgacctaacacaatttgattactataccaacaacaacacccttcactacaacatggtcctcaacttcactgcacgcaaccccaacaagaagctaatcatatactacgacaaag

SEQ ID NO: 43426 - DNA, 389 bp, Glycine max
  Clone ID: LIB3093-018-Q1-K1-C2
cctttcagatgatgtttccttccccacgcttcaaccctttctctatctgaactcactcacaagaacaccactgcttcaacttcaaaccccaaaatcgaatcaaactttcccaccatcactcactccgaaacacacctcaaccacttcacagcaccacccattcaaggtttgctacctcgtaagcacttgtggcttctccgtagaaaccgctctcaagatctccaagttcacccaattcaaaacccccgaaaaacccgattcaatcatcgccttattcagaagccacggtttctccaacacccagataatcagcattattagaagagcacccaatgttctctcatgcgacccccacaaaaggattttcccaaagtttgaatttttacgct

SEQ ID NO: 43427 - DNA, 460 bp, Glycine max
  Clone ID: LIB3093-018-Q1-K1-C3
cccacgcgtccgctttgtcttcttttgggaacggtggatggacatgcagttgccaacacagtactacacagctctgctttacacgatcactacgatcgtattactactgctaatagtatattatgactacatcagcagatggtacaaacatcgtcagaaggtcaacctcgtaagggatcacgaagaagagaaaaaaccattgaagccaccgaaacccactaacaaatctggaatcccaataccaaatggctcacccaaggcagcacctagacaggagtactattatatgtcagcaagatcattggctgggagtggcactccaccctggggaatctacatgagagctgctaaaagtggtccttcagcccatcgaatcgatcgatgactcttcttccgatgacgaagcacctcctgcttcctcaaataattctgcatcccaagctatgccaatcccacgttc

SEQ ID NO: 43428 - DNA, 391 bp, Glycine max
  Clone ID: LIB3093-018-Q1-K1-C4
cgccaaaccgccgattccgttgagcgtttctaccgtatcgctcatgaaggaggcagtggctggtggtgttggttgtggtggaggtggttttgctgatcatttgtggtagagggtaggaaagaaaaaaaagttgaaaatgagttcagacagccgcagcaggagcagaagcatgagcccaatggaccgtaagatccgctctgatcgattttcctatcgtgatgcaccttacaggagagattcacgtcggggtttcagccgtgacaatctgtgcaagaactgcaagagacctggtcattatgcaagaaaatgccctaatgtcgcaatttgccacaactgttgcctccctgggcatattgcttctgaatgtacgacaaagtcactgtgctggaac

SEQ ID NO: 43429 - DNA, 446 bp, Glycine max
  Clone ID: LIB3093-018-Q1-K1-C5
cttcccccattttttcctctttcttgctcgcctagctagctccagaaaattaggatctgcttcagatctagtgtttccctgtcccaaatcacgagtccattgagtttgattttgtggatgaaaagcatagatagggcttttgcaaaactctccaatgtttcttgaaattatatgaccatgcgtcgaattcgtatgctgcactccttctccgtcgtgttcctctactggttctacgttttctcatgaactccctcttaaatccgtgattaattagatctatctccttagttaatccttgtcttttccaataattaattagatctgcgtctcctttttggattagtttcttttttggttctgttatcaaatcaaataaaaaatctccttctcggaaatggcatcaccgatccaacaacaacaacgctcgactactacaagttctggat

SEQ ID NO: 43430 - DNA, 422 bp, Glycine max
  Clone ID: LIB3093-018-Q1-K1-C6
gttccatgaaacttctgcaatcaatcttcttcgaaaattgcaacaaaaatacatacaacggaactcatccaatttcaatggttgcgagagctaacggaattgagtgtgtttgaagtgattatgggtcctatgaggatgctgaataacagaaagaaaggacagcagaagaagttttgttaacctataccgtatttattatatctatatttaccaatttttttcttgccattccatacgatagagcgaatagttcgtagtaggtgtttttaacccccacgcgatcttattatggatggtccaaccagcattatatgattgggaataacatcacaataggggatgatgatgatgatgatgatcgccataactgtctccatactcttgggaaatgttcagagcttcgaccgccggtagtttgtgtg

SEQ ID NO: 43431 - DNA, 343 bp, Glycine max
  Clone ID: LIB3093-018-Q1-K1-C7
tgaaaagtactactattttctcttctcttgtctattcccctaacgcgttgcttcttcatttgcgtggttttttaacatttgaaaactcataattcttatcttcacacatagtgctagtgcgctgggcctgcatctgtggcctctctcttcctcatcctcatatttcattcactttgtgggtcaaaaggtctcctctcttcttctcttcttttattaattaattacagaaattgtcagtttctaaatcagtgctagcagagagaaagagattttaactttttaaggcggatcactcaacaaaccaatgggtctacagctgtccctgacatgatgaaatcttaat

SEQ ID NO: 43432 - DNA, 401 bp, Glycine max
  Clone ID: LIB3093-018-Q1-K1-C8
aaatgccatggatgcaaaaggcgattgcgatgatcctatcaattatttctcatcattgaactttgaagccaactttggtgagtttaatgaattcaccacacctctatttgatgacccagaaggttcgttctcttttgtcatgcctggatctttcaaatctggaggagaatctagttctgacaatcttttataacaatggtactacgattggttctgtaataacttaatatctatgtttctcttaatcgtgaagatataactttccggtttgtgttaaatttgcaaagccggtttaatttcatgaccatgcaaatccttaagaaggatgtttgatttttcttgatgattttataaattataaatggcgccgtcactttaatccattttttatttccaaattc

SEQ ID NO: 43433 - DNA, 320 bp, Glycine max
  Clone ID: LIB3093-018-Q1-K1-C9
cccacgcgtccgattttaacatatgagtaacatagcgggttcacaggccaccgacgaggatgttctccaccttcacttcaccgtcgctggcgtcaagatttccgcactagcgctccggcggcaccatcgacgtcactggcctgatgcatggcaagactgatgccaacgccatcatacgccttcgcccttcccgtcgaaggcaccaagattcgtgtcattgcccatttttttttcatatttctgaattccattcatgtgcttcaagtcctctcttgattcacacctgttggattttctgtggaacaagtatgggatgaata

SEQ ID NO: 43434 - DNA, 283 bp, Glycine max
  Clone ID: LIB3093-018-Q1-K1-D1
ttccggtcgaccacggcgtcggcaagtcttaaaaagcgatctaagatatacctacacgaggtcttcgggaagaagatacattgcacttgcaatgccaagcgacaggtgatgtacttatgagtaatactctacgtcatctactctaatttttaacacgagtctttataattgcttttagtttacccctttgaaattcaatctcattcaactttgcaaaacatttttcctagcggtggaaaattggatttttttttttttttttggatatataaaaatattgggg

SEQ ID NO: 43435 - DNA, 418 bp, Glycine max
  Clone ID: LIB3093-018-Q1-K1-D10
cggacgcgtgggcggacgcgtgggtggaaattgaggcagctcagtggatgccattcgaggaatttgctgatcaaccttttaatcagatgcatgaacccttcaagtacatgattgaattatgcttggcaaaggttgaaaaagtctataatggattctctccgcgacccatctcatcatatttcgtggaggagttgaattatctatatttgaatagtcattgcctggacaagtcttcttaagttttacaaatcaaccttggtcgtcatccataaaagtttagtttgatatttctttcttgtaaggatttaattaagctttttctccttaaatttaggttacttctgtttttgtccttcaaatttattttttttagtcctaaaattatgaaagatgttctttttacttcctcttgcggttt

SEQ ID NO: 43436 - DNA, 420 bp, Glycine max
  Clone ID: LIB3093-018-Q1-K1-D11
gcacaagattagatcattggcaacaaaagatgccagagtggagacacctaaattatcacagattccttgcaagttgattgagaaagacttgcacaaaggcagcaaaggtaatcatgatgtggaacagcctgctggctctctaaagtcatatttttcagtacgttttgtcacatccaagtgtagaatttgtggcaatatcatatgccattgtgaaaatcctagcaattcaacacaggtgtcatcagacatatcatccgaaggatctgaaggaagggacctaattgcacgtggtgccgattcattgagacaggattgccggactaaatgtacatcacctatggagaagaaatctgatcttgattctgatggagctgtaagttctttggacagtgaacatgtttgtcctagttctcagcatgt

SEQ ID NO: 43437 - DNA, 444 bp, Glycine max
  unsure (1)..(444): unsure at all n locations
  Clone ID: LIB3093-018-Q1-K1-D2
cccagacttncacacgagagaaggagtctctcaatctcatggaagtcccacaagcagataaaaccttgggcttggacatggccaagggcagcgcattctgcaagatgggtgaaggttggacatgcatcataactaaaactgaggggcctgatgctggcaaagttttcgttaaatgtggtgaaaattgcacctgtaccattgagggcgaagcagtgtcccaagaattgaatttgccacctgatgttgtgagcagcagtggcagtggagcattctgcaagtgtggtgaagggtggagttgtgtcattttcaggactgaaggccctgattcaagctcttgcaagggctttttttaaatgcgctggacagagttcttgtactattgatgacaaaaccacctaagattaaacgatgagggcatctatgatataatctgatgggtatttt

SEQ ID NO: 43438 - DNA, 397 bp, Glycine max
  Clone ID: LIB3093-018-Q1-K1-D3
caagcattggagaggcattaaaccaaggacaggggcaccatattcctgtgatattggctatgaacgatttctaggccctgagattttctttaatcccgagatatatggcagtgactttaccacccctttgccagttgtaatagacaagtgtattcagtctgcgccaattgacacaaggagatcattatacaagaatgtagtgttgtctggaggttcaaccatgttcaaggattttcacaggaggttgcaacgtgatctaaaaaaaatagtggatgctcgtgtacttttatctgaatcacgcttgaatggggagataaaatcgcagccagtggaggtaaatgtactcagcaatccaatccagagatttgcaagttggtttggaggatcaatgcttgca

SEQ ID NO: 43439 - DNA, 378 bp, Glycine max
  Clone ID: LIB3093-018-Q1-K1-D4
cggacgcgtgggtccaaatccaaaaaaatcatggagcagttgtactacctcacccttgtgctactgtttgtgtccttcgtctctgtctcttttttcatcattttctacaggcatcgttctccgttcagcgtccccaacttgccgccggggaaggcggggtttccggtgatcggcgagagcctggagtttctgtcggcgggacggaaggggcttccggagaagttcttctccgatcgcatgacagagtactcttccaaagtgttcaagacctccatcttaggggagcctacagtgattttctgtggagccgcatgtaacaagttcttgttttctaacgagaacaaacacgtcatttcgtggtggcctgaaaatgtcaag

SEQ ID NO: 43440 - DNA, 374 bp, Glycine max
  Clone ID: LIB3093-018-Q1-K1-D5
aagattttgacacctaacatcccattgtggtcggaggacacggaaatgttcacaaagcaaaggcgcacactggtcatattctagccgtgtagaaacttcatttagtccaaaatggggaatcgcccaatattaaagctttcacaagctaaatatcaagctttgataaacattcgacatcgtaacattgcgaaatcatattggttttgttctcattcacaatcctcatttgtggtgtatgagttcttggaaaaggcaagcattgattggattgtaaaagatgatgatcatgcaatatcctttgatcgggatcccaacactaatgccattaagggtggagcaaatgccgtatcttatatgcatcatgactgttcacc

SEQ ID NO: 43441 - DNA, 345 bp, Glycine max
  Clone ID: LIB3093-018-Q1-K1-D6
cgttgttcatgttggatacaggcatattgactgtgctagtgcgtataagaatcaagcagagattggttctgctcttaagaagctttttgatgatggcgtggtgaagcgtgaggacttatggatcacttccaaactctggtttgttgtctcttagtaattgtgatctctttttgaatattgagaaagattgtatgtgtttggaccaggtcgggtgctgaatgaaggatcctttgatttgctggctatatttttaggtgttcagatcatgcaccagaagatgtgccaaaagcattggataaaacattacaggtattgcgacttgactatcttgacctctatctgatc

SEQ ID NO: 43442 - DNA, 327 bp, Glycine max
  Clone ID: LIB3093-018-Q1-K1-D7
ctcaaccttaagaagacacctcagcttgtggaattggttgatgacagcgaggagatcgaagagcttcttaatttgtctcctgaaaaggttctactaaaatggatgaattttcatctccagagagcaggttacgagaaaactgtcagaaatttttcttctgatgttaaggatggagaggcctatgcttatctgcttaatgtccttgctcctgaacattgcattccggccacctttgataccaaagatgccagtgaaagggcaaatcttgttcttgatcacacaaagagaatgggctgcataatatacttgaccccaatggatgttgca

SEQ ID NO: 43443 - DNA, 445 bp, Glycine max
  Clone ID: LIB3093-018-Q1-K1-D8
cggacgcgtgggtttgcctcttggcgcaattcgatcgaagctatctacccttccatggcggcaggactctccaccgccgcaatcttaaagccctacaatctcgtccaacccccaatccctctttctaaaccaaccacatcactcttcttcaaccccttaagatgtttccatcacagtacaatccttcgagttcgacccataagaagaatgagcggcttcaccgtttgcgtcctcacggaggattccaaagagatcaaaacggtcgaacaagaacaagaacaagtgattcctcaagccgtgtcagcaggtgtggcagagaagttggcgagaaagaagtcccaaaagttcacctaatctcgttgcggctgtcatgtctagctttggcatcacctttatggcagtctttgccgttaattatagattctcctgcaaatggagggtggag

SEQ ID NO: 43444 - DNA, 375 bp, Glycine max
  Clone ID: LIB3093-018-Q1-K1-D9
ttctctcccaccactttttcctctctcttcctcgactagctagccacacaaaatgaggatgggcttcagatccagtgcctccctgtcccaaatcacgagaccattcattttaatcacgtgtttgatacacataaattgggctctcgctaaactcttccaattttttctataaactatatgaccttacgaccaatccttatgcttcactccttcttcgtcccttctctcttctgtgtctactttgtcgcataaactctctcccaaatttcgaattcattatatctttcttccttatttcctacttgttctttccatttagataattatatatgcatcttccaattttacattatttatctttttttttcctatctt

SEQ ID NO: 43445 - DNA, 333 bp, Glycine max
  Clone ID: LIB3093-018-Q1-K1-E1
gattccggtcgccacgctccgaaggctctaatctacaatgctgaatgaagcactcctatactgggtatcatatataaagcattagactagatggaggaggggaagtacgataccactcttctgtgagacttgaaaaaagtgggtgttgaagcccattggaacacatgttttaatttctactcttttatcagtagctgacctccaatgtgtatggaaatttcaattcatacggaagttcatctgcagtccctattgctttcttgtacaatatttgcaacttgctgtatagtatagtttgtgtagtgagggagaaagagccaccataggatcttt

SEQ ID NO: 43446 - DNA, 453 bp, Glycine max
  unsure (1)..(453): unsure at all n locations
  Clone ID: LIB3093-018-Q1-K1-E10
cccaaacgttaactcagacgaagcaccaacagaagaagaagaaacaaaaccgaacctctctaaactctccaacgtcgccacccgattcatcgcatttcgcaggctgcaatggcgacgttcgaactgtaccgcaggtcgacgattggaatgtgcctgacggagacgctggacgagatggttcagaacggcactctaagccccgagctcgcgattcaggttctggtccagttcgataagtccatgactgaagctctggaaacgcaagttaagagtaaggtctccatcaagggacatctccatacatatagattttgtgacaatgtttggaccttcatcttacaagatgcnttgttcaagagcgaagacagccaagagattgttggacgggttaaaatagtggcgtgtgactcgaagttgctcacacaataatgtgcctaatttctgccattgtcg

SEQ ID NO: 43447 - DNA, 247 bp, Glycine max
  Clone ID: LIB3093-018-Q1-K1-E11
aacctactttgcccctctcacgctttacttgtcgcgtatcaaacgatgttcaatggggctgttgcagatggacccacaacctgctgagaagcatgatatctggcctgtgctctctactccactgctactacttatctagttttcatgaaaaatcacacgtaagatggtggatcaattgccacacatgcacattatcagtcgcagaatcttcagacgtgttgtagcaacagtttattttaaacaccct

SEQ ID NO: 43448 - DNA, 377 bp, Glycine max
  Clone ID: LIB3093-018-Q1-K1-E2
gaaggaagagaagaagttcagaacaaaaacacatcaaaaaagaagtaactctctttctttctttctttctttctttctctcgttgtgaagttgttctctttaatggcgaagtcaaagaacaatgctaagaagttgtcctacatatcagttccatctcagatcatcaactccatatcatcatcttctctgcaatctcttcttgactctcccaagaagtcttcaaggaacaccaacaacaacaggttctttatcttcttcaccaacagcaccagcaccatcatcttcagaaaacaaagactctggtttttcacactctttctccttggtttccttggcatgctcaagtttggccttaacctttacaccccttttccccc

SEQ ID NO: 43449 - DNA, 394 bp, Glycine max
  Clone ID: LIB3093-018-Q1-K1-E3
cccacgcgtccgcccacgcgtccgtatagcttggttttatgttgctggctctcatttggaagtttgactttccaccctttatggtgcttattatcgctatcctaaatgatggtactattatgacaatttcaaaagatcgtgtaaaaccatcacctctgccagatagctggaagctagcagagatatttactactggagttgtgcttggaagttacttggcaatgatgacagttatattcttttgggcggcatacaaaacaaactttttcccgcgagtgtttggagtcccaagtcttgaaaaaactgctcatgatgattaccggaaacttgcctctgcaatctatcctcaagtgagcactattagtcaggctcttatatttgtaactcgatctcg

SEQ ID NO: 43450 - DNA, 379 bp, Glycine max
  Clone ID: LIB3093-018-Q1-K1-E5
tcgcccacgcgttcgtccacgcgttcgagccctcagagattccggcgaggacttcaaggcggtgctcaagtgcgactacagtggtggcggatgcggctgctactgttggggtgggggtgaccgggatgcggagaaagaagaaggtcccttgtcggagtggttgaatttcacttctgatgacgcaaaaacggtgcttgcggctctcgcaatttcgcttgcgtttcgatcattcgtggcggagccgaggttcattccttcgctgtcaatgttttctacattggatgttggagatcgaattattgctgagaaggtttaatactattttagaaaaccatgtgcaagtgacatattgatttttaaaaagccctcggtgcttaag

SEQ ID NO: 43451 - DNA, 404 bp, Glycine max
  Clone ID: LIB3093-018-Q1-K1-E6
cccacgcgtccggttgaggatgtatgcaacatgtcaacagcttcaggtgcaggcccaagctcatgcagctgcagccagtggcattcttggccacacagaattgaggttgcatatgccaccatcaatagctcttgcaagccgagggcgtctacagggtctcagacttcaacttgcacttcttgatcgggagtttgatgatctagattatgaaactttaagagctctagattcagataatgtttctactgcaccctccatgaccgaggaagagataaatgctcttcctgtccacaaatacaaagtttctggtcctcaaagtggtagttcctcaatgcaacaaacaatatctttcactcctgctgaaaagaagcaagataattcaactgctgttgggagcatgaaag

SEQ ID NO: 43452 - DNA, 355 bp, Glycine max
  Clone ID: LIB3093-018-Q1-K1-E7
cccacgcgtagctctttgacaccttcttcggcaacaccgagatgagggttgtgatgcttggtcttgatgctgctggcaaaacaactatactttacaagtttcacattggagaagttttatccaccgttcctacaattggtttcaatgtggagaaagttcagtataagaatgttattttcacagtctgggatgttggaggacaagagaaactaatgccactttggaggcactactttgacaacacagatggcctgattttatgttgttgatagcccggaccgtgagagaattggtaaagcaaagcaggaatttcagacaatcataaatgacccatttatgctcaatagtgtcatct

SEQ ID NO: 43453 - DNA, 351 bp, Glycine max
  Clone ID: LIB3093-018-Q1-K1-E8
gttcatgaagggaattcaggtatacgagtctctgataagttccttgagtacatttacagaagcttcacattaaaggcctgagttgctgatctcaataggagaacaatgcctaacttttgtagggaaaatctgagcgattggataccccacctccaaataataagtggagtaaaagcataaatagcaacgttgttatcggacaccatgaaaaaaggaagaaaaaaagtcctttgttgttccaattcgctcatggtggggactgggaatggtacaacttattaattattatttgtacctttagaaattgtaatgatcaggaattattttctgtgaaattttatttggtccttt

SEQ ID NO: 43454 - DNA, 371 bp, Glycine max
  Clone ID: LIB3093-018-Q1-K1-E9
cgcacacagaaatgcagagtgccctgcgattccatttccaagcttcaaacccaggcatcgttgttccgcacacgaaccacgctttcgccaccaaccttatctcacaccgtaccctctcctgcacaaaacgccgttcccttcccctgtgctccttcaccgcacaaccttcgaaccaaacctccgccgttggatctccatcgcttcaacactggaacctcaccaatcgccacgtcaccgttctcaacgtctttgcctgcgcgacggcgatatgtgcaacggggcctgttttgcttcggtgattccgacgctcctggctttcaagaaagcagcggagtcgatggaaaagctcatgggttccacgggggaggaac

SEQ ID NO: 43455 - DNA, 420 bp, Glycine max
  Clone ID: LIB3093-018-Q1-K1-F1
gtccgatttccttccatattccttggtccgaacacgacacagtagcataccatcaatcttcccccaaattatggattgcctcttttttccccattaacaatattaatcaatccaattaatttccatgaccatgtccataacactcttactccaagccaacccctcccacttgaaatggaaccagttaccttcccttccacgtcgcacaaggcccgaccgtttcactccaatacccgactcgaaacgccgcgtttcaagcgtcaaatgtatctcctcgtcgcggaagccggataacacgtttaatttgcagtccccgtgggaggttctggcgagcaccggggtctaacacgctgaatgcgctgaagaaaccggccatagctgcggtgttggtggggctgtttttaatgtacgatccaactt

SEQ ID NO: 43456 - DNA, 285 bp, Glycine max
  Clone ID: LIB3093-018-Q1-K1-F10
gatgagctagtgcaaacggaccacacgaggattattcatatatcattctctaaccgtgcactatatccctctcattcactctctagctagactcctcatcatcgtacaagaaccaatgcttgtactctctgttactttttaaccatcgttgaatgaatcacctaaggaaaaacgagtagcttacagcagagcgggttatctttgacctgtgttgtgaacgagataaatcgtgcttgtgtataggtgagtgcatgaagaattaagagatgggtgaagcgggtgaac

SEQ ID NO: 43457 - DNA, 389 bp, Glycine max
  Clone ID: LIB3093-018-Q1-K1-F11
cccacgcgtccgggcatggccttatcctctcccttcctcatttcagctgtgaacgccacatgttcagtaccccatttccatttccatttccatgcacagccactttcactttcttcttctcacttcccaattaatattagaccctccacccatcatcacgttcatgtctctcacaatcacaaatggagagcaaaagtttcatttttcacttccttcttgaagaaaggcaaagatgctaagatcatcaaggaagaaatgcttgaggccattgcaccgcttgatcgaagggctgatgccactccccaagaccagcatacaattgatcagattgcgcgggaacttgatgcagttactccaatatatgagcccctcaaaactaacctactcga

SEQ ID NO: 43458 - DNA, 362 bp, Glycine max
  Clone ID: LIB3093-018-Q1-K1-F2
gcgcccacgcgtccggtgtatcatcatatggaggagcggcattaaaaatgcagatcttcgtgaaaaccctggcggggtagaccataaccctcgaggtctaaagcagcgacaccattgacaatgtcaaggctaagattcaagacaaggaaggcatccctccggatcagcagcgtttgattttcgccggaatgcaacttgaagatggaaggaccttgtccgattacaacatccataaagaatcaacccttcaccttgttctcatgcttcttggtggcattatcgagccttccctcatggctttggctcgcatatacaaccaggaacaagatgtttttgccgcatattcttttgctcgttctgta

SEQ ID NO: 43459 - DNA, 342 bp, Glycine max
  Clone ID: LIB3093-018-Q1-K1-F3
acaacaacaactgatgaaattcaagagtacattgctccatcatgggctaagtttgaaatagggaggggggctgtctattggaaaaccatgaatggcctccctccttcttcaggagaaaagctaaaacttttttataatccagcttctactcatcttgtccctaattaagaatttggatttgcttttattggaggttttaattatccaattatgtttggtgttgagccatttccttttgcttaaataattttcaagccaaaacttaatcccccaattatattccatttcatatattcaatttcttaataatcttttttactatcattcttttcttttacaaaa

SEQ ID NO: 43460 - DNA, 317 bp, Glycine max
  Clone ID: LIB3093-018-Q1-K1-F4
cccacgcgttcgctccttcttccacctagcagtggtgacaaccaaaccaagtgtcccctccggtctcttgttaacaggtagcagagttagtgagtaatggcaggaggacaactaggagtgcttaatgcactcgatgtggcaaaaacacaatggtaccacttcactgctattgtgatagctggaatgggattcttcactgatgcctatgatcttttctgcatttcccttgtgaccaagttgttggggaggttatattacacagacataaccaacccgtagcctggtgttcttcctcctaatgtgcaagctgctgtgac

SEQ ID NO: 43461 - DNA, 423 bp, Glycine max
  Clone ID: LIB3093-018-Q1-K1-F6
aacgcagcatcgctattctcttcattccatggctttgcccaaccagcaaaccgtggattaccctagtttcaaactcgttatcgtcggcgatggtggcacaggaaagacaacctttgtgaaaaggcatctcaccggagaattcgagaagaaatatgagccaaccatcggtgtggaggttcacccattggattttttcacaaactgtggaaagattcgattttactgctgggatactgctggacaggagaaatttggtggcctcagagatggatactatatccatggacaatgtgctattatcatgtttgatgttactgcccggctaacatacaaaaatgttcccacctggcaccgtgatctttgcagggtctgtgagaacatcccaattgttctttgcggtaacaaggtttgatgtcaagaaca

SEQ ID NO: 43462 - DNA, 298 bp, Glycine max
  Clone ID: LIB3093-018-Q1-K1-F8
cgtctctccgcaccagtttcaccgcacgaatatcttgttgtttggagcgatccgagaaaaagtctgtaaacatgttggtttaccaggacctccttacaggtgatgagcttctctctgactccttccgttacaaggaaattgagaatggaatgctgtgggaagttgaggggaagtgggttgttaaaggagcagttgatgtagacattgttgcaaacccttctgctgagggtggaggagaagatgagggagttgatgattcacctgtttaggttgttgacatttttgacacatttatact

SEQ ID NO: 43463 - DNA, 318 bp, Glycine max
  Clone ID: LIB3093-018-Q1-K1-F9
cccacgcgtcctcccacgcgtccgctctcttcttcttcttcttcttcttgcacgtaggggtcgaatccacaaaaataatggccttaaattacaacattgccctcgccttctctacggttctcacgctgcttctccttcccttaccaacccttggggagctcgtgcaggatcagccactattcctcatgtaccacaacggccaactcctgaaggggcgcattaccgtcaatcttatttggtacggcaccttcaccccgatccaactgtccataatcgaggacttcataaacttactaagcagcgcgccaaactcgccgt

SEQ ID NO: 43464 - DNA, 295 bp, Glycine max
  Clone ID: LIB3093-018-Q1-K1-G10
cccactcgtccgcccacgcgtccggctggtgcatgcaccatggattggcctctaaggctcagaattgcaattggagcggccaaaggattagcatggcttcatcatagctgcaatccccgcattatccaccgaaacataagctctaaatgcatcttgttggatgctgattttgagcccacaatttctgattttggccttgctagattgattaaccctattgatacacatttgagtacttttgtgaatggggatgttggggatttatgttatgtcgctcctgaatttacataaactt

SEQ ID NO: 43465 - DNA, 296 bp, Glycine max
  Clone ID: LIB3093-018-Q1-K1-G11
cccacgcgtccgccacaacagtgggagggagatccaaaaagagagagtggaaaagatggcgcggttgatcacagtggtgtggtgcgcggtggctgttctattattctcctcggccggtgcgtcgtgggtggaggatgcggctaacccgatacgaatggtgtctggcgtggaggcggaggtggttcgggtgatcggggagtgccggcgtgcgttgaagtttgctaggttcgtgagcaggttcgggtagagttaccaaagcgaggaagatatgaatgagaggtacgagattattctcg

SEQ ID NO: 43466 - DNA, 410 bp, Glycine max
  unsure (1)..(410): unsure at all n locations
  Clone ID: LIB3093-018-Q1-K1-G2
cccacgcgtncgaaataattggtccggtactagatgtagcttttcccccaggtaagatgcctaatatttacaacgctctgatagttaagggtcgagatactgttggtcaacaaattaatgtgacttgtgaagtacagcaattattaggaaataatcgaattagagctgtagctatgagtgcgacagaaggtctaatgagaggaatggaagtgattgacacaggagctgccctaagtgttccagtaggtggagcaactctaggacgaattttcaacgtgcttggagagcccattgataatttaggtcctgtagatactcgcacaacatctcccattcatagatctgcgccctgcctttatacaattagatacaaaattagcccttttttgaaacaaggaataaaagtagta

SEQ ID NO: 43467 - DNA, 400 bp, Glycine max
  Clone ID: LIB3093-018-Q1-K1-G4
gccacgcgtgcggggaaatggatcatattcagccgaacataaaccaattctaaggcattacaaagctgcccatatctgctattccagaaagatctcaacctcattctatacctgatctctctgcacgtactttttgtggcaccatgcagattaatcttacgatcaatgaaatcaccagctatcttgtcttaaactccgatgaactagtcatacaaaacactcacttgactaactctcaaagacaggtgagtagtttttagtgatcaaaatattctgtttaagcacatatcgaaatctgagtactgggctttggtggctctgttccgggcttaatttatccagcagtaaactccattggatgttggtagggatactgatgatgacatactacttttgctgg

SEQ ID NO: 43468 - DNA, 458 bp, Glycine max
  Clone ID: LIB3093-018-Q1-K1-G5
gtggatttcaatctcgttcagttcctcccattttcatacacaaataattttctttatatttctgcattgctttgagtggattttgcataatcatattatcaatttttcattcatttaaccaggggtgtaagaagaagttgaggtgatggaaccccaggatgaagaagagatccataactgtttgatcaagctggttgctttattgttccttaccttgggttatctttctagttactgtctttaatgcagcatcaatgctagtgaaggaattgactctattgttgataatgcattacagagaagtaatccggaaaggcgaagggataaggtttacattggttgtggagctgggtttggtggtgacaagcccttggctgctcttaagttgcttcaaagagttcaagaactaaattatctggttcttgaatgcttggccgagcgaactcttgctgatcgtt

SEQ ID NO: 43469 - DNA, 293 bp, Glycine max
  Clone ID: LIB3093-018-Q1-K1-G6
agctatcattcactttccccatccatccatccaccgaaccctaaccctaatcctccatcatcgatttgactcgattctctcgctgtctgttatttccttcaaagcaaaacaattccatcgatgaatcgggcgtcgcagctttcgtgataatgatcttggcgctgcgaatcgattgcatgggtttggagaatgccggagcttcgtagtggaccgcgacgacgtcgtgctccggttgctcgtaaaagctccgaaccaccgtctccggccgggagatacgtcaagactcgcgctgc

SEQ ID NO: 43470 - DNA, 279 bp, Glycine max
  Clone ID: LIB3093-018-Q1-K1-G7
ctcatgttgaattcttgagaggagttgctaatccacttggcatcaaggtgagtgataagatggttcccgatgaacttgttaagctgatagatattctgaaccctaaaaacaagcctgggaaaaatacagtcattggtaaaatggagctgagaatttgccaagggaactttcacattttaatcaggccattccgaaaacaagtcaaaatttcacttgggtttatgaccccattcattggaacaccattaaagctccatttggacttaaaacccgctcttt

SEQ ID NO: 43471 - DNA, 434 bp, Glycine max
  Clone ID: LIB3093-018-Q1-K1-G8
gcccaaccatccgtcgccacgtggtggaaaggtacccaaaaatactaccaactcataaagtgatcaccaaaactcaccctcactctcggtacccaaatcctcgacgagaactactccctaggaaaatcactcaccaacgacaacattgttagtttagcatccaagggtgcctcgaaagacgccatcaacgttgttctcacatcctcggacgtaaccgttgaaggattctgttccagtaggtgcgggacccatggctcctcggtgggtcctcgcaagttcgcttacgtgtgggtggggaactcggagacgcagtgcccgggccaatgcgcgtggcccttccagcagcccatttacggcccacagaacccgcccttggtcgcgcccaacaacgacgtgggcctggacggaatgtgtatcaacgtggctaccctatt

SEQ ID NO: 43472 - DNA, 150 bp, Glycine max
  unsure (1)..(150): unsure at all n locations
  Clone ID: LIB3093-018-Q1-K1-G9
cttctattgttgtttgtgtgtntgtttatttctctcacctgataatgtcttgctgcggtggtaactgtggttgcggaagctcctgctagtgctgcatcggctgcggaggctgcaagatgtacccaaacttgagctacacccagtcaacca

SEQ ID NO: 43473 - DNA, 312 bp, Glycine max
  Clone ID: LIB3093-018-Q1-K1-H1
agataacaaaaatcgaaacattactcgttttttatttccccaaaatgatcaaggttatgagattgaatcgactaaaaaatgaaatgaatcatttcatattgatagtattgctatgcttagtgtgcgactcgttagttttttagaacggttccaatctaacaaatttataaaccggttcatcgtataaatgaattaaaaaagaactaatttccaacgcatcgcttcggattttctagatcttaagaactagtcctaacataaaactatattaaaaatgatttattatgcgcaactgaacttttgtgaagcata

SEQ ID NO: 43474 - DNA, 135 bp, Glycine max
  Clone ID: LIB3093-018-Q1-K1-H10
gtggattgtattagaggtggactggacccataactgcatcctacttctcccacgcgcaccagtttcgatggtgtgtaagctcctacccttaaatctatcaagagcagtttccctcacactattattgccacagat

SEQ ID NO: 43475 - DNA, 304 bp, Glycine max
  Clone ID: LIB3093-018-Q1-K1-H11
acgtccacgcgtacgcacacattttctagtgtccttcctcactctaaatccgccattgccattgggatggctaataagcgaaggtccgtggccactcgccttgactaagtgtatcgaaccatgtactcgactttctgcagcaccgccaactccctttctcatctatacacccacgccatgaaccaacataaactctcattccaggccggtgaacgacacgctcttgaaaaattgtatcaatggattctcaggcaacagcgagatggatctaggctgaccaccattgatattgttccccatttgc

SEQ ID NO: 43476 - DNA, 390 bp, Glycine max
  Clone ID: LIB3093-018-Q1-K1-H2
cgcgtccgtttttgtttatcccttcttctctcctataaaaacaccaacacacaaatcttcacaacatttgcatgatctgactcacaaatcatcctcctattcctcggtcgtagcctgttgttccctctttcatctctcttcgccgtcacaacagccaccaccatggtcgaaaccagacgcggcgccttttcttccaagcgttctctctcttcgccttcttctgcgtccaacaccaaacgatccaaggtgtctgaggattcctctgtggcggctccggtcaacgaatcttgaaccggaaatgaatctggggaaccggagctacgaccctctgatctgccagataccgcgtcgttgaaggtcgcgggtggtttgtgattaggcctccttctg

SEQ ID NO: 43477 - DNA, 456 bp, Glycine max
  Clone ID: LIB3093-018-Q1-K1-H3
aaccggcccaatttagcatatagcccagcatggccaccgcaacagcagcagccacctcgtccttcatggggacgcgcctcctggaggcccactccggggcggggcgggtgcaggcccggttcgggtttggcaagaagaaagccgccgccccgaagaaagtttccagggggtcgggctctagctccgataggcccctgtggtatccgggcgccaaggcgcccgagtacctggatgggagccttgtcggagactacggattcgacccatttgggctagggaagcccgccgagtacctgcagttcgagttggactcgctggaccagaaccttgcgaagaacgtggctggggacatcattgggaccaggaccgagctcgcggacgtgaagtccacgccgttccagccctacatcgaggtgtttcggctggcaaggttccgcgagtgcgagctcattcacg

SEQ ID NO: 43478 - DNA, 321 bp, Glycine max
  Clone ID: LIB3093-018-Q1-K1-H4
ctcagatattgttaaaaaagcaattgaaaatccagagctatttgtgatgaagcctcaaagagaaggaggaggtcttgtaccacttaaactttgactcaacactgttggaaaaaaatgtccgggagagaaacttacacaatgagctgtaattacttttcaggaaacaatatttatggtgatgagttgagggaaaccctccttaaattacaggaagcacgttctcaagaagatgcagcatacattcttatgcagaggatatttcccgccacttcttcagcaattttggtgcgtgatggtaattgggataccggtcatgtcatt

SEQ ID NO: 43479 - DNA, 379 bp, Glycine max
  Clone ID: LIB3093-018-Q1-K1-H5
ggctatggaaatgagaatgtagatggcttgaatgaactgaacagaggccctacggccaatggtggcagaaaccaaaaaggttttgcaccaactattttggcagtcaaagggcagaacttgcctgcaagtttatgcaccgatgaagagaaagacaagactagtaccgttccggaccgtgatcagtataacaaagctgattttccagaagaatatactgatgctaaattttttgtcatcaagtcttacagtgaggatgatatccataagagtattaagtataacgtgtgggccagtacccaaaatggcaacaagaagcttgatgctgcatatcatgaggcacagcataaacctggtggctgccctgtttttctcttttttt

SEQ ID NO: 43480 - DNA, 452 bp, Glycine max
  Clone ID: LIB3093-018-Q1-K1-H7
gtttcaaacctgcaatgctcccctccccttaggaggtcctcctccattgattcccaatatagatgtacatagcacgcatgccaattttgaccaaagctaaacattagtctgatgatactgttttttcaccttgcacctgcaggttgttctgtgaatttcgagtttttaaactacacagcaatcacaagcaaatgcaaaggaccccggtaccctcccaaagaatgttgtggggcttttaaagaatttgcttgcccttatgccgatgtattaaatgatttaacgaatgagtgtgcatcaaccatgtttagttacattaatctctatggaaaataccctcctggcctcttttctagtgagtgtcgtgaaggaaagtttggtcttgcttgtcctgcagtgccaccatcatcagtttcagcagatgacactgcaaataaagctttacactggtcatt

SEQ ID NO: 43481 - DNA, 416 bp, Glycine max
  unsure (1)..(416): unsure at all n locations
  Clone ID: LIB3093-018-Q1-K1-H8
cccacgcgtccgcgtttctggctttgcgggttgagcaatggccggaaaacaggtcggcgagggtttaccggcgaacctcgctggaatgtcaaagaatcagctctacgatatcatgtctcagatgaaggtacttacaatacttcttctttttcactcttcacgaagaacaacacgctaaccatttcgtttgttgtccctcagaatctgatcgaacagaaccagcaacaggccaggcagatcctcatccaaaatcctatgttaaccaaagcgcttttccaggcacaaattatgcttggaatggtgcaagcaccttaagtggtatgcttttttgctttcntttgatgtctttttaacaaccatccatcagtagaaatttggatgacaaaaaatatttgccttctaggttccaaaagttc

SEQ ID NO: 43482 - DNA, 428 bp, Glycine max
  Clone ID: LIB3093-018-Q1-K1-H9
gtattctttgaggtcatgactattcttcacattcagcatgaaacaagacaccatatgagatttgaattagtaaaagatgacattgaaaaacaaagaaagaaataaaagaaaagaaaagaaaagaaaaggagtggctttgcagtatatcatctgtgacatgcaaggcaataacatttcaggttccacccaataagtaggttttttctacataacctctgaatttactggatggtgggaccggagaatatttcatgtttaacaactacaatccatctcaccttgaaatctgtgaacctagcattctgcatggtattatgtcggcatctagatgatacggcccgaacctgctgcctccttggtattaaaagaggtaagccgtatttctaaagtcaaaaacgggcctattggctgaacttttattaattttt

SEQ ID NO: 43483 - DNA, 324 bp, Glycine max
  Clone ID: LIB3093-018-Q1-K2-A1
agggtcttgatattcgattggggcacagggttacaaaagtagttaggcgatataatggagtaaaggtaactgtggaaaatgggaaaacgttttttgctgatgctgctgttattgctgtcccacttggggtgcttaaagcgaagaaaatattgtttgagccaaagctttcataactggaaagaagctgccattgctgatcttgggattggacttgagaataaaatcattttacactttgaaaatgtgtttttggcctaatgtggagtgcttgggagtaattgcagatacactttatgaatggagcttctttcttaatctccacaa

SEQ ID NO: 43484 - DNA, 283 bp, Glycine max
  unsure (1)..(283): unsure at all n locations
  Clone ID: LIB3093-018-Q1-K2-A10
cttctcaccatctgaacnttaagattatcattttttacacnanccaccttctcctggcattgtatacctgaacaaagcgaggtgcagagacttttccgattcctggaagaagagaagagaaaacctaaatcacatatccatggcggaagaacaccgatgtgaaccttcctaaggttaccgactctgcgttaacaactgcggctttttcggtagcaccgccacgatgaaccttttctccaaatgctttaacgcgattcctttgtatgttctataaataactttt

SEQ ID NO: 43485 - DNA, 450 bp, Glycine max
  Clone ID: LIB3093-018-Q1-K2-A2
cacgcgtatgcgcaaactttaacttgtgtttaaagttttgagaaaatttcaagcacaaaaaatggcggagaagaaagtggtgatcctaggatgcggtgttgcctgtgccaaccttgcaaaaactatacaacgtcaagccaacgtcacccttattgatccgaaggaatattttgagattccatgggcaagtttgaggggattggttgagccaacttttgctgaaaggatagtgatcaaccatagagagtacttcaaaaagggtaaccttgttgtatccagtgctgtcaacataactgaaactgcagtggtgacttgaagattgccagcaaattgcctatgactatcttgttattgccactggacacacaaaacctattctcaaaaccaggagtgaaagacttgacctattccaaagagaaaatgcaaagatcaaatctgcaagttgagttt

SEQ ID NO: 43486 - DNA, 361 bp, Glycine max
  unsure (1)..(361): unsure at all n locations
  Clone ID: LIB3093-018-Q1-K2-A3
gcgtccgcnacgcgtncgccacgcgtncgcccacgttttcggtcggaacagccctgcatactacagtgctccgcggcgaggatacggcggtggtggccgangaggaggaggaggaggaggaggaggagggtccggcaggagggggttcggtggaggcaggcgcagggacagcaatgggagcctcttggttcgaaacattcccctagattgcagacccgaggagcttaatgtgccttaacagcgattttgacctgatcgagacgcctacatacccaaggatgattactctggagaacctcgaggctttgcctttgtgcaggttgtggatacctatgatgcctcaaaggcacaggaccatatg

SEQ ID NO: 43487 - DNA, 377 bp, Glycine max
  Clone ID: LIB3093-018-Q1-K2-A4
aaatggtgtcgctgaaactgcagaagcggttttccgcttgcgtgctcaagtgtggcagaggaaaggtgtggcttgaccccaatgaagtcaacgaaatctccatggccaattctcggcaaaacatcaggaagttggttaaggatgggtttatcatcaggaagccaaccaagattcactcacgctcgcgtgctcgtaggatgaaggaggcaaagaagaagggccggcactctggttatggtaagagaaagggtacaagggaggcgaggctttccaccaagatactttggatgagaaggatgcgtgtgctcaggcggttgcttcgtaagtacagggaatcaaagaaaattgacaagcacatgtaccatgatatgtacatg

SEQ ID NO: 43488 - DNA, 252 bp, Glycine max
  Clone ID: LIB3093-018-Q1-K2-A5
ggctcggaaccttcgacaccgccatcgaagctgtcatgtcctacgaccgagccgccttcaggctccgcggctccaaggccaggctcaacttccccctcgaagttaacaccgcggcggagaccgtctccgtcgccgccgtcgacgtcgagaggaagcgccgccgcgaggaggaggaggtggtggtggatgatgtaaaggcggtggtgaagaatgagaaaataacggagcatgatgtgagttggtttaagggga

SEQ ID NO: 43489 - DNA, 350 bp, Glycine max
  Clone ID: LIB3093-018-Q1-K2-A6
cccacgcgtccggaaacggggaatcattgtctgcgtctgtaaattgtaaattgcatcatccctgaagctgaacctcaaaaccgtagctgtccgcctgtctgcaacggcgtcgttatgatcagttgagaatccaaaggaatcgagtcgaatcatctgaccggcgacagttatgtacagagagcgaggaggcgtcggatccaaatcggaggtaacttccgttgatcggaagcgaatcaacgacgtcctcgataaacagcttgaacgttcctcgccttccacatccagagccgccgccatcaacggcaaggaccgctccttctctttcctcttagccgccgccaaagactccc

SEQ ID NO: 43490 - DNA, 335 bp, Glycine max
  Clone ID: LIB3093-018-Q1-K2-A7
atatacggcatcgttaccatggtctacaagattgaaaattgcagctggagctgcaaagggtggagcctttctacatgaagcaaagaaaccagtcatctatagagattttaaagcttcaaacatcttgttagactcggattataatgcaaaactttccgattttggcttggccaaagatggtcctgaaggagatgacacacacgtttcaactagagtcatgggcacacaaggctatgcggcctcagaatacatcatgacaggacacttgacaggcatgagtgatgtgtacagttttggagtcgtgctctttggagcttctaacatgacgaaagtca

SEQ ID NO: 43491 - DNA, 162 bp, Glycine max
  unsure (1)..(162): unsure at all n locations
  Clone ID: LIB3093-018-Q1-K2-A9
tcggcttgctgaacacagatgaagctcttgcaatttacatctggcctcaactcaacagacatttttctttcatctactgtgttgaggatctnntgtntcaaaataagcttgaggaatgtgaatcttgttttgagaaactggatctagattttgaacccatta

SEQ ID NO: 43492 - DNA, 297 bp, Glycine max
  unsure (1)..(297): unsure at all n locations
  Clone ID: LIB3093-018-Q1-K2-B1
gcggggccgccctanaaatanaaaaaaaagttttaaatttttgnnnnngnnnnttnnggcggacctggtttcattggataggggttgggcaataaaactctccttaaactacaggtacattggcaattttttttgctcaaaaagtaattcacacacaacatataaaaaatggtaactgattatacatcaatattgtgcgagaaaaaaaataaaaattgtttttagaaagatttcataattacaagatttagaagccggctgttagcttttttaaataaaatggacagggttcaactt

SEQ ID NO: 43493 - DNA, 347 bp, Glycine max
  unsure (1)..(347): unsure at all n locations
  Clone ID: LIB3093-018-Q1-K2-B11
cccacgcgtccgcccacacgncctttttattttaatgncngaaacaacacaaactacacgtgatttcaggtgattgcgggctgggaaaataaccctaataaatagggctttaattgcccatcataaatggcaagttaagccaaatttaatttactttacctcacgtcatcaatcaatttgcttgcaattccttctcttctgttatagtgagcaacccaaattgctttaatgccacaagcattgatggttgtttttctattacaataaaatgcaccttcctaatcttcataattactcaagttaacatactgttttttttaatcctacctttttgaaaaataacaatt

SEQ ID NO: 43494 - DNA, 409 bp, Glycine max
  Clone ID: LIB3093-018-Q1-K2-B2
cggacgcgtgggtttcgatttgagggaacagtacaagtttgtgaggatcggttaacccaactgcacaggtagtcactaaaagaatggagtctcacgatgagactggatgccaggctcctgaacgccccattctttgcattaataattgtggcttctttggaagagcagctaccatgaacatgtgttccaagtgttacaaggacatgctgttgaagcaggagcaggacaattttgcagcatcgtcggttgaaaacattgtgaatggcagttccaatggcaatggggctgtgactactggtgctgttgatgtacaagttgaagctgtggaggtcaagactgtctctgctcagagttttgtagattcattcttctgtgaggagttggagatgtaagccctgaacagtttcat

SEQ ID NO: 43495 - DNA, 442 bp, Glycine max
  Clone ID: LIB3093-018-Q1-K2-B3
ctcttaggtttttggctctttgcagaatcttttagtgttacatacctagctatcacctcaatggattgctattttggaaacggtaatcctaacccttattaccatcactctgccgtagtgaacatggcatctccctcctccgagttcatgttatctgattatctcgtgttggaagatgctcttgttgttgatcatcatcaagagtcttggtcacaaagcactgaaactgaatcgtcggagaaagcaacctccagcgatgcaagtcatgggttcggtgatgcaacctccaacaccaacatgcatatgcaagtgcttcttaattatctcgagttattttatttttttcattaaacaagaaaatggtatatcgcgtattctatgctaatttatgtgtgcgcaagtacgcatatatgttcattaatcttcttgggattttaatttg

SEQ ID NO: 43496 - DNA, 267 bp, Glycine max
  Clone ID: LIB3093-018-Q1-K2-B4
ctgagaaggaatcacacatgagaaattttggtgggatctcggcaatttaaatttggtccaaaaatagtgagaaagaaaaccatggtttatatagttttcatgtccttcctaacggtggcgcaccaaagggggtcaggtgagtttatgcggttcacggaaagtcatggcggcggtggtggcggtgaccgcgatggtgaatatggttatggacatgatgatggtagaggtggtgggggtggtggttcactagggttggtttttaaccaa

SEQ ID NO: 43497 - DNA, 197 bp, Glycine max
  Clone ID: LIB3093-018-Q1-K2-B5
tttgcgtttcccacatctcttttcgcgaaaaaaaaaaagagtcacttttctattttgtgcccccttttgtggttctctgaaacgcgttaagggttctgtttgtgttattgggtcaataatggggtcctgtttttttaaaaaatacggccttaatttttgctgtctgggggtgatttgatttttttggtgaatgaatt

SEQ ID NO: 43498 - DNA, 444 bp, Glycine max
  unsure (1)..(444): unsure at all n locations
  Clone ID: LIB3093-018-Q1-K2-B6
cccacgcgtccgctttttttttgccctatcttttanggttcccgcggattcaaaccttaatgcttctattactctctttctgtgatgcgttcttgctctcaacaacaatcacacaccgccatcgaagccttcgttcttttcttcttcgttctcctttttgctctcgttcgagggttctttcgtggggaacactgcagatttcaccacccgggtcttattcatccgtgcccatgtccaaagttctcggcttttccggagttgacgatttttgccctatgggatcaatatacgccaaccccaaggaagcaaggttcttcttgtcccttggccctcaagttgatgtatactttcctcctcggaagagatcgcgtgtcaatgctccattcgtttttatggagaatgggtcgagcataaacagaaaacctctattgaagccttgccaga

SEQ ID NO: 43499 - DNA, 418 bp, Glycine max
  unsure (1)..(418): unsure at all n locations
  Clone ID: LIB3093-018-Q1-K2-B7
ccagaatggggtgtgtnggatgggacccggtttgcgtgcttggtccaccccaaactgggcacctcgccaggttcgagtttaagaggcgcctcgagagagacgcanatgcccgcgaagccttccaacgtcaagtccgtgaagagaaagaacgccgtcaatcccttcgacaatctcgtcctcttcccgatactccgcaagacctcattgaatacttccttgacactgaagctcangagattgagtttgagattgcaagaatgagaccaagattgaatgaggaattctttgcgcaactcaaattcgagttaggacagcttcgattcgctgttaacaaaacacagctcatggaggacagacagattgagctggaggctctagagaaagccatactagaaggattagaagcctatgataagat

SEQ ID NO: 43500 - DNA, 198 bp, Glycine max
  unsure (1)..(198): unsure at all n locations
  Clone ID: LIB3093-018-Q1-K2-B8
cccacgcgnccgcnanccncaactagngaaatnccnncnncncnnnccacgagccaacaacaacancagggangcgagnncggggcccaaaaaaaaggcccgggagaaggagaaggaagnngaaancgnngaggganacaannaccgacagcagacgggcancagnggagggggaaaangaanannnagagcngcaaa

SEQ ID NO: 43501 - DNA, 347 bp, Glycine max
  unsure (1)..(347): unsure at all n locations
  Clone ID: LIB3093-018-Q1-K2-B9
cgcgnnncnaaacannannagactcgagcgtaacgangaaggcaacacngcnngggccnggggcnncngcgccggggagncgggacacgcanagcaaccgaaccncggcaacgagacacgcnnccaccgnngnnngnggnncgncgaggaancaacccnacancccgaagcncgagccnnnaagccgaaccaaannngaaagggcgcggaaggacccnccnnngancgaaaaanccgagagagagancnnagannannnggcaacgcnngaaggagaccaanccganagcngcnggcaggcnaaaanngagccgaaagaacnngaaaaagagnccccaaaagcagac

SEQ ID NO: 43502 - DNA, 389 bp, Glycine max
  unsure (1)..(389): unsure at all n locations
  Clone ID: LIB3093-018-Q1-K2-C1
ccggaaaanctgggaagacccacgcgtccgnntcaggctatggatactgataacatttcttttaaacttttaaangaacntaaanctagtggaaaaagatataggtgtaccgggaaggatataaaaatacgtgatcttatggaagcggctgatgtggacaaaagtggaaccatagactatggggagtttattgctgcaacagttcatttcaacaaactagagcgtgaagaacatcttattgcagcattccaatattttgacaaggatggtagtgggtacattacagttgatgaactttaacaagcttgtgcataacaaaacatgattgacgctttttttgaaaacatctttagagaaggtgatcaagataatgattgaaggattgatta

SEQ ID NO: 43503 - DNA, 443 bp, Glycine max
  unsure (1)..(443): unsure at all n locations
  Clone ID: LIB3093-018-Q1-K2-C10
gagctactgttgtcattgctgggttgtacnctanatttgagcgtccagagaagatagatgagatcatataccctgggatatcttcatttctgatgcttatcaaggataacgataggcatgttaggcgagctgctgttttggctataagcacatttgcacacaataagccgaatctcatcaaggggcttcttcctgatctgctgcctcttctatatgatcaaactattgttaagcaagagctcataaggacagttgatcttggtccttttaagcatattgtggatgatggacttgaattgaggaaggcggcttttgaatgtgtagacacattgctggatagttgccttgatcaagtgaacccggcatcattcattggtccttatcttaaatctggtttggatgatcattatgatgttaaaatgccatgccacctgatactcttc

SEQ ID NO: 43504 - DNA, 426 bp, Glycine max
  unsure (1)..(426): unsure at all n locations
  Clone ID: LIB3093-018-Q1-K2-C11
cgggtgcgaccgcacgcccgtccganaatttcttggttacatacaaggttcttttagttttcttgttcattcatgtaacatcaatctgcgaaacatggtgccgatatagcaacggccactgtgaactggcacttattacangtcccgccattctcttcggcggagcaacctacgctactcgccctcacagtcactcgcggaagaagcctgctgttgctgcctcttcggaatcttgtggaagattctggttgcactcattgtcctcgttggcctcgcggtcctcatcttctggctggtggttcaaccctcgtcctttaagtttcacgtcacggaagccgacctaacacaaattgattactataccaacaacaactcccttgattacaacatggttcttcaacttcactgcacacaaccccaataaga

SEQ ID NO: 43505 - DNA, 436 bp, Glycine max
  Clone ID: LIB3093-018-Q1-K2-C2
ccaagttgccttaatactctgaaatcatagatcactttcttaaacacctttcagatgatgtgtccttgcccacgcttcaaaccctttctctatctgaactcactcacaagaacaccactgcttcaacttcaaaccccaaaatcgaatcaaactttcccaccatcactcactccgaaacacacctcaaccacttcacagcaccacccattcaaggtttcctacctcgtaagcacttgtggcttctccgtagaaaccgctctcaagatctccaagttcacccaattcaaaacccccgaaaaacccgattcaatcatcgccttattcagaagccacggtttctccaacacccagataatcagcattattagaagagcacccaatgttctctcatgcgacccccacaaaaggattttcccaaagtttgaatttttacgct

SEQ ID NO: 43506 - DNA, 454 bp, Glycine max
  Clone ID: LIB3093-018-Q1-K2-C3
cccacgcgtccgctttgtcttcttttgggaacggtggatggacatgcagttgccaacacagtactacacagctctgctttacacgatcactacgatcgtattactactgctaatagtatattatgactacatcagcagatggtacaaacatcgtcagaaggtcaacctcgtaagggatcacgaagaagagaaaaaaccattgaagccaccgaaacccactaacaaatctggaatcccaataccaaatggctcacccaaggcagcacctagacaggagtactattatatgtcagcaagatcattggctgggagtggcactccaccctggggaatctacatgagagctgctaaaagtggtccttcagccatcgaatcgatcgatgactcttctttcgatgacgaaacacctcctgcttcctcaaataattctgcatcccaagctatgccaatccca

SEQ ID NO: 43507 - DNA, 285 bp, Glycine max
  Clone ID: LIB3093-018-Q1-K2-C4
cgccaaaccgccgattccgttgagcgtttctatcgtagcgttcaagaaggaggcagtggctggtggtgttggttgtggtggaggtggttttgctgatcatttgtggtagagggtaggaaagaaaaaaaagttgaaaatgagttcagacagccgcagcaggagcagaagcaggagtctaattgaccgtaagatccgctctgatcgattttcctattgtgatgcaccttacaggagagatttacgttggggtttcagtcctgacaatttgtgcaagaactgtaagag

SEQ ID NO: 43508 - DNA, 421 bp, Glycine max
  unsure (1)..(421): unsure at all n locations
  Clone ID: LIB3093-018-Q1-K2-C5
cttcccccattttttcctctnncttcctcgcttatctttctccagaaaattaggatctgcttcagatgtagtgtttccctgggccaaatcacgagtccattgagtttgattttgtggatgaaaagcatagatagggcttttgcaaaactctccaatgtttcttgaaattatatgaccatgcgtcgaattcgtatgctgcactccttctccgtcgtgttcctctactggttctacgttttctcatgaactccctcttaaatccgtgattaattagatctatctccttagttaatccttgtcttttccaataattaattagatctgcgtcttctttttggattagattcttttttggttctgttatcaaatctaataaaaaatctccttctcggaaatggcattaccgatccaacaacaacaa

SEQ ID NO: 43509 - DNA, 398 bp, Glycine max
  unsure (1)..(398): unsure at all n locations
  Clone ID: LIB3093-018-Q1-K2-C6
gaaaacgggccgacccacgcgtgcggttccatgaaacttctgcaatcaatcttcttttaaaattgcaacaaaaatacatacaacggaactcatgcaatttcaatgggggcgagagctaacngaattgagtgtgtttgaagtgattatgggtcctatgaggatgctgaataacagaaagaaaggacagcagaagaagttttgttaacctataccgtatttattatatctatatttaccaatttttttcttgccattccatacgatagagcgaatagttcgtattaggtgtttttaacccccacgcgatcttattatggatggtccaaccagcattatatgattgggaataacatcacaaaattggatgatgatgatgatgatatattccataactgtct

SEQ ID NO: 43510 - DNA, 334 bp, Glycine max
  Clone ID: LIB3093-018-Q1-K2-C7
tgaaaactcataattcttatcttcacacatagtgctagtgcgctgggcctgcatctggggcctctctcttcctcatcctcatatttcattcactttgggggtcaaaatggcttctctcttcttctcttcttttattaattaattacagaaattgtcagtttctaaatcagtgcttgccgagagaaagagaatattactatataaggcggatcactcaacaaaccaatgggtctacagctggccctgacatgatgaaatcttaagttactaaggttggccatttgagctaagcaataagcatccatttaataaaattgcgacctggtgtgaggac

SEQ ID NO: 43511 - DNA, 368 bp, Glycine max
  Clone ID: LIB3093-018-Q1-K2-C8
aaagccatggatgcaaaaggcgatagcgcttatcctatcaattatttctcatcgattgaacgttgaagccaacttgggtgagtttaatgaattcaccacacctctatttgatgacccagaaggatcgctctcttttgtcatgcctggatctttcaaatctggaggagaatctaattctgacaatcttttataacaatggtactacgattggttctgtaataacttaatatctatgtttttcttaattgtgaagatataactgtccggtttgtgttaaatttgcaaagccggattaatttcatgaccatgcaaatccttaagaaggatgcgagattgtcttgatgattttataaattataaattgcgcg

SEQ ID NO: 43512 - DNA, 204 bp, Glycine max
  unsure (1)..(204): unsure at all n locations
  Clone ID: LIB3093-018-Q1-K2-C9
cccagcgnccgannnaacanaagagnaacatagcgggnncacaggccaccgacgaggagggncnccaccnncagggcaccgncgcnggcgncaagaaaaccgcacnagcgcgccggcggcaccancgacgncacnggccggangcagggcaagacngangccaacgccancaaacgccnncgcccnncccgncgaaggcaccaa

SEQ ID NO: 43513 - DNA, 432 bp, Glycine max
  Clone ID: LIB3093-018-Q1-K2-D1
gccaagtctttcaaaaagctgatctaaggaataataacctacacgaggtcttcgtggaagaagataccattgccacttgccacatgccaagcgatcaggtgaatgttacttatgatgttaattactctacgtccatctcactcttaatttcttaacacgagtcctttagtcaattgctttttagtttttaccccttttgaaattccaatctcattccaactttgcacaaacatttttcctagcggtggaaaattggatttttttttttttttttggatatatagaaatattggtgaagtggtctttattaagagttgatggaacccaatgcactaggtggtggaatattttctaacataagttgtggtttgctaggagtagaaaaccctttacagccgctacaacaacaacaacatcctaacctttaaaacc

SEQ ID NO: 43514 - DNA, 415 bp, Glycine max
  unsure (1)..(415): unsure at all n locations
  Clone ID: LIB3093-018-Q1-K2-D10
cggacgcgtgggcggacgcgnggtttgaattttgttcagctcagnggatgccaggcgaggaatttgctgatcaacggttttaatcagatgcatgaacccttcaagtacatgattgaattatgcttggcaaaggttgaaaaagtctataatggattctctccgcgacccatctcatcatatttcgtggaggagttgaattatctatatttgaatagtcattgcctggacaagtcttcttaagttttacaaatcaaccttggtcgtcatccataaaagtttagtttgatatttctttcttgtaaggatttaattaagctttttctccttaaatttaggttacttctgtttttggccttcacatatattttttttaggtcctaaaattatgaaagatgttctttttactttcttttgc

SEQ ID NO: 43515 - DNA, 438 bp, Glycine max
  unsure (1)..(438): unsure at all n locations
  Clone ID: LIB3093-018-Q1-K2-D11
gcacaagaatagaacatnggcattttttgattccagagnggagacacccaaantatcacaggttccttgcaagttggtggagaaagacttgcacaaaggcagcaaaggtaatcatgatgtggaacagcctgctggctctctaaagtcatatttttcagtacgttttgtcacatccaagtgtagaatttgtggcaatatcatatgccattgtgaaaatcctagcaattcaacacaggtgtcatcagacatattatccgaaggatctgaaggaagggacctaattgcacgtggtgcccattcattgagacaggattgccggactaaatgtacattatctatggagaagaaatctgatcttgattttgattgaacttgaaattctttgtacagtgaacaattttgtcctaattctcaacatgtaaactctactactgattc

SEQ ID NO: 43516 - DNA, 447 bp, Glycine max
  Clone ID: LIB3093-018-Q1-K2-D2
cccagacttccacacgagagaaggagtctcttaatcttatggaagtcccagaagcagataaaaccttgggcttggacatggccaagggcagcgcattctgcaagatgggtgaaggttggacatgcatcataactaaaactgaggggcctgatgctggcaaagttttcgttaaatgtggtgaaaattgcacctgtaccattgagggcgaagcagtgtcccaagaattgaatttgccacctgatgttgtgagcagcagtggcagtggagcattctgcaagtgtggtgaagggtggagttgtgtcattttcaggactgaaggccctgatgcaggctctggcaagggctttgctgaatgcgctggacagtgttcttgtactattgatgacaaatccacctaagataaacgatgagtgcatctatgatataatctgatggttatttttctct

SEQ ID NO: 43517 - DNA, 413 bp, Glycine max
  Clone ID: LIB3093-018-Q1-K2-D3
caagcattggagaggcattaaaccaaggacatgggcaccatattcctgtgatattggctatgaacgatttctaggccctgagattttctttaatccccagatatatggcagtgactttaccacccctttgccagttgtaatagacaagtgtattcagtctgcgccaattgacacaaggagatcattatacaagaatgtagtgttgtctggaggttcaaccatgttcaaggattttcacaggaggttgcaacgtgatctaaaaaaaatagtggatgctcgtgtacttttatctgaatcacgcttgaatggggagataaaatcgcagccagtggaggtaaatgtactcagcaatccaatccagagatttgcatgttggtttggaggatcagtgcttgcattaacacctgaatttt

SEQ ID NO: 43518 - DNA, 448 bp, Glycine max
  Clone ID: LIB3093-018-Q1-K2-D4
cggacgcgtgggtccaaatccaaaaaaatcatggagcttttgtactacctcacccttgtgctactgtttgtgtccttcgtctgtgtctcttttttcatcattttctacaggcatcgttctccgttcagcgtccccaacttgccgccggggaaggcggggtttccggtgatcggcgagagcctggagtttctgtcggcgggacggaaggggcttccggagaagttcttctccgatcgcatgacagagtactcttccaaagtgttcaagacctccatcttaggggagcctacagtgattttctgtggagccgcatgtaacaagttcttgttttctaacgagaacaaacacgtcatttcgtggtggcctgaaaatgtcaagaagttgttcccaacgaatattcaaacaaactctaatgaagaagccaagaagttgagaaacattcttcctc

SEQ ID NO: 43519 - DNA, 397 bp, Glycine max
  unsure (1)..(397): unsure at all n locations
  Clone ID: LIB3093-018-Q1-K2-D5
acgatatggacaccaaacatccaaggggggtttttggttatggaaaggngcacaaagcaaaggcgcacacacgtgaaattctagccgtgaagaaacaccaaaaaatccaaaaaggggaagcgcccaatattaaagctttcacaagtgaaaatcaagcgtggataaacattcgacatcgtaacattgtgaaagcatatgggtttagagccaactcacaatcctcatttgaggagtatgagttatcggaaaaggcaagcattgataggagtgtaaaagatgatgaacaagcaatatcattggattgggatccgaacactaaagccattaagggtggagcaaatgctgtatattatatgcatcaagactgaccacctacaaaagtgcattgagagatatc

SEQ ID NO: 43520 - DNA, 415 bp, Glycine max
  Clone ID: LIB3093-018-Q1-K2-D6
gcgcgttgttcaggttggatacaggcatattgtttgtgcttttgcgaataagaatcaagcaaaggttgggggtgatctgaagaggggttgtgatgatcacgtggtgaaccgtgaggacttatggatcactatcaaactctggtttggtgacttttagtaattgtgatctctttttgaatattgagaaagatagtatgtgtttggaccaagatggttgctgaatgaaggatcctttgattagttggctatatttttaggtgtgcagatcatgcaccagaagatgtgccataagcattggataaaacattacaggaattgcaacttgactatcttgacctctatctgatccactggccagtgcgcatgaaaagtggaacatttggactcaataaataatatcttgagcaaccagaca

SEQ ID NO: 43521 - DNA, 454 bp, Glycine max
  unsure (1)..(454): unsure at all n locations
  Clone ID: LIB3093-018-Q1-K2-D7
ggaaaaaccgggccgacccacgcgaccgcncaaccnaaagaagacatcgcattttgngttattggntgatgacagcaaggagatcgaagagcttcttaatttggctcctgaaaaggttctactaaaatggatgaattttcatctccagagagcaggttactagaaaactgtcagaaattgttcttctgatgttaaggatggagaggcctatgcttatctgcttaatgtccttgctcctgaacattgcagtccggccaccttggataccaaggatgccagtgaaagggcaaatctggttcttgatcacgcagagagaatgggctgcaaaagatacttgaccccaatggatgttgcagatggtacttcaaatttgaatcttgcttttgttgcacaattgtttcattatatgagtggtttatctacagacactaaaaagaatgtcatgctgagatga

SEQ ID NO: 43522 - DNA, 417 bp, Glycine max
  Clone ID: LIB3093-018-Q1-K2-D8
cggacgcgtgggtttgcctcttgtcgcaatttgatcgaagctatctacccttccatggcggcaggactctccaccgccgcaatcttaaagccctacaatctcgtccaacccccaatccctctttctaaaccaaccacatcactcttcttcaaccccttaagatgtttccatcacagtacaatccttcgagttcgacccagaagaagaatgagcggcttcaccgtttgcgtcctcacggaggattccaaagagatcaaaacggtcgaacaagaacaagaacaagtgattcctcaagccgtgtcagcaggtgtggcagagaagttggcgagaaagaagtcccagaagttcacttatctcgttgcggctgtcatgtctagctttggcatcacctctatggcagtctttgccgtttattat

SEQ ID NO: 43523 - DNA, 397 bp, Glycine max
  Clone ID: LIB3093-018-Q1-K2-E1
caaaggcatcctcaatctcaccaaatgctgttttggaagcagctacctcaaactgggtaattcatatataaagcaattagactagatggagggaggtggaagttacgataccactcttctgttgagacttgagagaaagtggggtgttgaagccacattggacacacatgttttaatttcctactcttttatcagtagctgacctccaatgtgtatggaaatttcaattcatacggaagttcatctgcagtccctattgctttcttgtacaatatttgcaacttgctgtatagtatagtttgtgtagtgagggagaaagagccaccataggatctttggtctgctaataaactcagatttgtgctttcacttaaaaaaaaaaaaattaaatttattt

SEQ ID NO: 43524 - DNA, 393 bp, Glycine max
  Clone ID: LIB3093-018-Q1-K2-E10
cccaaacgttaactcagacgaagtttcaatttgtgaagaagaaacaaaaccgaacctctcgaaactctccaacggggccacccgattcatcgcatttcgcaggctgcaatggcgacgttcgaactgtaccgcaggtcgacgattggaatgtgcctgacggagacgctggacgagatggttcagaacggcactctaagccccgagctcgcgattcaggttctggtccagttcgataagtccatgactgaggctctggaaacgcaagttaagagtaaggtctccatcaagggacatctccatacatatagattttgtgacaatgtttggaccttcatcttacaagatgctttgttcaagagcgaagacagccaagagattgttggacgggttaaa

SEQ ID NO: 43525 - DNA, 443 bp, Glycine max
  Clone ID: LIB3093-018-Q1-K2-E2
gaaggaagagaagaagttcagaacaaaaacacaacaattaagaagtaactctctttctttctttctttctttctttctctcggggtgaagttgttctctttaatggcgaagtcaaagaacaatgctaagaagttgtcctacatatcagttccatctcagatcatcaactccatatcatcatcttctctgcaatctcttcttgactctcccaagaagtcttcaaggaacaccaacaacaacaggttctttatcttcttcaccaacagcaccagcaccatcatcttcagaaaacaaagactctggtttttcacactctttctctttggtttccttggcatgctcaagtttggcctcacccttcacacccctttccccccctacccatgtgccaccacaacccttctgccacagaacatgatcttaaccaccccacattcaaagtc

SEQ ID NO: 43526 - DNA, 446 bp, Glycine max
  Clone ID: LIB3093-018-Q1-K2-E3
cccacgcgtccgcccacgcgtccgtatagcttggttttatgttgctggctctcatttggaagtttgactttccaccctttatggtgctgattatcgctatcctaaatgatggtactattatgacaatttcaaaagatcgtgtaaaaccatcacctctgccagatagctggaagctagcagagatatttactactggagttgtgcttggaagttacttggcaatgatgacagttatattcttttgggcggcatacaaaacaaactttttcccgcgagtgtttggagtcccaagtcttgaaaaaactgctcatgatgattaccggaaacttgcctctgcaatctattctcaagtgagcactattagtcaggctcttatatttgtaactcgatctcgaggttggtcttatgttgagcgtcctggtttattgctggggtttgcttttgtt

SEQ ID NO: 43527 - DNA, 359 bp, Glycine max
  unsure (1)..(359): unsure at all n locations
  Clone ID: LIB3093-018-Q1-K2-E5
cccactcgtccgcccacgtttccgagccctttgtatattctttgaggacaacaaggcggggctcaagttcgacgtcggagggggcggaggcaacaacaacagagggggngggggngaccgggatgcggagaaggaagaaggtcccttgtcggagtggttgaatttcacttttgatgacgcaaaaacggtgcttgcggctctcgcaatttcgcttgcgtttcgatcattcgtggcggagccgaggttcattccttcgctgtcaatgtatcctacattggatgttggagatcgaattattgttgagaaggtttcattactattttagaaaaccatgttcaagttacatattgatatttaaa

SEQ ID NO: 43528 - DNA, 455 bp, Glycine max
  Clone ID: LIB3093-018-Q1-K2-E6
cccacgcgtccggttgaggatgtatgcaacttgtcaacagcttcaggtgcaggcccaagctcatgcagctgcagccagtggcgattcttggccacacagaattgaggttgcatatgccaccatcaatagctcttgcaagccgagggcgtctacagggtctcagacttcaacttgcacttcttgatcgggagtttgatgatctagattatgaaactttaagagctctagattcagataatgtttctactgcaccctccatgaccgaggaagagataaatgctcttcctgtccacaaatacaaggtttctggtcctcaaagtggtagttcctcaatgcaacaaacatcatcttccactcctgctgagaagaagcaagataattcaactgctgttgggagcatgaaagcctctgatgatgagctcacttgcagtgtatgcttggagcaagttgatgtt

SEQ ID NO: 43529 - DNA, 222 bp, Glycine max
  Clone ID: LIB3093-018-Q1-K2-E7
cttatgcaaagctcaatttcaccttctgcggtaatacccagaagaagatagtgatgcttgggctattttctactggcgaaacgactatacaatacaaatatcacatttgataatttttatccaccgttcctacaattgatcttaatgtggagaaagtccattatatctttgttattttcacatttatattattgttagtatacttatttaattcttatttct

SEQ ID NO: 43530 - DNA, 407 bp, Glycine max
  unsure (1)..(407): unsure at all n locations
  Clone ID: LIB3093-018-Q1-K2-E8
gttcatgaagggaatacatgtattttagttttttataagtgcctngagtacatttacagaagcttcatattaaaggcctgagtggctgatctcaataggagaacaatgcctaacttttgtagggaaaatctgagcgattggataccccacctccaaataataagtggtgtaaaagcataaatagcaacgttgttatcggacaccatgaaaaaaggaagaaaaaaagtcctctgttgttccaattcgctcatggtggggactgggaatggtacaacttattaattattattgtacctttagaaattgtaatgatcatgaattattttctgtgaagtttatttggtcctttgtgttaaatcatcgatggttgcctatcatgggccaaggattcaactctctactgttgt

SEQ ID NO: 43531 - DNA, 342 bp, Glycine max
  Clone ID: LIB3093-018-Q1-K2-E9
ggcgacccacgcgttcgcgcacacagaaatcagagtgcctttcgattctatttccaagcttcaaacccaggcatcggggtttcgtacacgggggacgcgtttcgccaccaaccttaactcacaccgtaccctctcctgcacaaaacgccgttcccttcccctgtgctccttcaccgcacaacctttgaaccaaaccttcgccgttggatcttcattgcttcaacactggaaccttaccaatcgccacgtcaccgttcttaacgtcttttcctgcgcgaccgctatatgtgcaacgtggctgttttgcttcccgatttcgacgcttctggcttttaagaaagc

SEQ ID NO: 43532 - DNA, 428 bp, Glycine max
  Clone ID: LIB3093-018-Q1-K2-F1
atttccttccatattctctgttccgaacacgttacagtttcataccatcaatcttcccccaaattattcattcctgtgttgtggcccattaacaatattaatcaatccaattaatttccatgaccatgtccataacactcttactccaagccaacccctcccacttgaaatggaaccagttaccttcccttccacgtcgcacaaggcccgaccgtttcactccaatacccgactcgaaacgccgcgtttcaagcgtcaaatgtatctcctcgtcgcggaagccggataacacgtttagtttgcagtccccgtgggaggttctggcgagcacggtgtctaacacgctgaatgcgctgaagaaaccggccataactgcggtgttggtggggctgttataaatgtacgaaccaacttgcgccttcacggca

SEQ ID NO: 43533 - DNA, 382 bp, Glycine max
  unsure (1)..(382): unsure at all n locations
  Clone ID: LIB3093-018-Q1-K2-F11
aggaaaaaaggggcgacgacgccgacgaccagcgnccgggcanggcaattttatatttcttccncagggcanctgngaacgccacatgttcaatggcccaggggcatggccatatccatgcacaaccactttcactttcttcttctcacttcccaattaatattagaccctccacccatcatcacgttcatgtctctcacaatcacaaatggagagcaaaagtgtcaattttcacttccttcttgaagaaaggcaaagatgctaagatcatcaaggaagaaatgcctgaggccattgcaccgcctgaacgaggggccgatgccactccccaagaccagcaaacaaatgaacagattgcgcgggaaacctgagcaataactcc

SEQ ID NO: 43534 - DNA, 454 bp, Glycine max
  unsure (1)..(454): unsure at all n locations
  Clone ID: LIB3093-018-Q1-K2-F2
cccacgcgtcctgtgaagcagcagattgattttcggtttttataatgcagatctncganaaaaccctggctgatttgaccatggccctggaatactaaagcatcaacaccattgacaatgtcaaggctatgattcaagacaaggaatgcattcctccggatcagcaatgtatgatttttgccggaaagcaacttgtaaatggaaggaccttggcctattacaacatctataatgaattaaccctttattttgtcctcaagctttgttgttgtcattaaataacctttctctattgttttggctttgcaaattcaatcattacaagatgatttgccgaatatgcgtattctcctcttcacccaattgcttttaattgttttactaagaatttctgtaatattaattatttaaggtcttataattaatattatgtaaatttgtgtgttatattttt

SEQ ID NO: 43535 - DNA, 425 bp, Glycine max
  unsure (1)..(425): unsure at all n locations
  Clone ID: LIB3093-018-Q1-K2-F3
acaacaacaactgaggaaattcaagagtacttgcttcttttatgggctaagtttgaaatagggagggctgctgtctattgggggaccatgaatggcctccctccttcttcaggagaaaagctaaaacttttctataatccagctgcaactcaacttgtccctaatgaagaatttggaattgcttttaatggaggttttaatcagccaattatgtgtggtggtgagccaagggctatgcttagaaaatatcgaggcaaagctgatgccccaatatattccattcagatatgcattcctaagcatgctttgaacttgatcttttcatntacaaattggagtagactgggatggtccatatagactacaatttcaagttcccaaggcattacagaacatgccaattgacttctttaataagggcttgg

SEQ ID NO: 43536 - DNA, 420 bp, Glycine max
  Clone ID: LIB3093-018-Q1-K2-F4
cccacgcgtccgctcctccttccacctagctttggtgttatttaaaccaagtgacccctcctttctcttgttaacaggtaggggagttggtgagtaatggcaggaggacaactaggagtgcttaatgcactcgatgtggcaaaaacacaatggtaccacttcactgctattgtgatagctggaatgggattcttcactgatgcctatgatcttttctgcatttcccttgtgaccaagttgttggggaggttatattacacagacataacgaacccgaagcctggtgttcttcctcctaatgtgcaagctgctgtgactggtgttgctctatgtggcactttagccggccaacttttctttggatggcttggtgacaagttgggaaggaaaagggtttatggcttaacttctatgcttatg

SEQ ID NO: 43537 - DNA, 343 bp, Glycine max
  unsure (1)..(343): unsure at all n locations
  Clone ID: LIB3093-018-Q1-K2-F6
aacgcacatcgctatttttcatcatgtcttgttaaccagcaaaccgggatagggtatttaaactcgtatggtcgcgaggtncacaggaaagacaacctttgtgaaaaggcattaccgggaattcgagaagaaatatgagccaaccatcggtgtggaggttcacccattggattttttcacaaactgtggaaagattcgattttactgctgggatactgctggacaggagaaatttggtggcctcagagatggatactatatcaggacaatgtgcttttcatgtttgatgttactgcccggcaacatacaaaaatgttccacctggcaccggatctttgcatgg

SEQ ID NO: 43538 - DNA, 323 bp, Glycine max
  Clone ID: LIB3093-018-Q1-K2-F7
aaaaacgggccgacccacgcgttcgcggacgcgtggtcacaaatactattctcaattttcagggacaaaatgtaatatggtgttatgtatctattggtcggggagcatctacttaaactcaagttgtgaataccttacaagaaagaggagcaatggaatacactattgtagtatctgaaacagcggattcttcatctacattacaatacctctccccttatacatgagcaactctgtcttaatattttatttaccgtgaactccacactttaatcatttattacgatctctttaaacaagcacaggcttattgtcaaatgtct

SEQ ID NO: 43539 - DNA, 371 bp, Glycine max
  Clone ID: LIB3093-018-Q1-K2-F8
cgtcgctccgcaccagtttcaccgtacgaattttttgttgtttggagcgatccgagaaaaactctgtaaacatggtggtttaccaggacctccttacaggtgatgagcttctctctgactccttccgttacaaggaaattgagaatggaatgctgtgggaagttgaggggaagtgggttgttaaaggagcagttgatgtagacattggtgcaaacccttctgctgagggtggaggagaagatgatggagttgatgatgcagctgttaaagttgttgacattgttgacacatttagacttcatgagctacccgcattcgataagaagcagtttgttaccttcatgaagagtgttattaaggaatttgacttc

SEQ ID NO: 43540 - DNA, 320 bp, Glycine max
  Clone ID: LIB3093-018-Q1-K2-G1
ctcatgcaactgtagcaagggaagaaccatttcaatgttcatctacccgaaagcaaaagggggagaagctttaattgacttgcctgccctgccccacaacaatagacactttgtctatctagacagcacctttatacctttcttgaaaaattacttaagtttatagctccctatattcacttattaatgcagcaaaatgtgatactgatagtgatacaatcatacaattgaatatgaacacggcatcgttacgtacttttatgttagcacttttgaaattcaacctctttcagaaagctgcttgcaaactctttacctta

SEQ ID NO: 43541 - DNA, 319 bp, Glycine max
  unsure (1)..(319): unsure at all n locations
  Clone ID: LIB3093-018-Q1-K2-G11
gaaaagagggtcgaccgcacgcgttcgcccacgcgtccttcacaacagtggtttgtgtttccaaaaagagagagtggaaaagatggcgcggttgatcacagtggggtggtgcacanatactgaactattattctccgcggccggtgcgtcttgggtggaggaggcggctaatcctatacgaatggtgttttgtctttatgccgatgttgttctgttgatcggggagtgccggcgtgcgttgaaattatctaggtttgtgagcaggtactgtaagagttatcaaatctttgaatatatgaacgataggtactatatattt

SEQ ID NO: 43542 - DNA, 277 bp, Glycine max
  unsure (1)..(277): unsure at all n locations
  Clone ID: LIB3093-018-Q1-K2-G12
aaaaaaaaaaaaaaaaaanaaaaaaaagaaaaaaaaaaaaaaaaaaaaagaaaaaaaaaaaaaaagaaaaaaaaaaaaaaaaaaaagaaaaaaaaaaaaaaaaaaaaaaaaaaaaaaaaaaaaaaaaaagaaaaaaaaaaaaaaaaaaaaaaaaaaaaaaaaaagaaaaaaaaaagaaaaaaaaaaaaaaaaaaaaaaaaaaaaaaaaaaaaaaaaaaaaaaaaaaaaaaaaaaaaaaaaaaaaaaaaaaaaaaaaagaaaagggagaaaaaaaaaa

SEQ ID NO: 43543 - DNA, 351 bp, Glycine max
  Clone ID: LIB3093-018-Q1-K2-G2
gcgcccacgcgtccgaaataattggtcctgtactttatgtttcttttcccccaggaaaaatgccgtaatatgtacaactctctggggggtaagggtccaaatactattggtcaacaaattaatgtgacttgtgaattacagcaattattatgaaataatcgaattagagctgtatctattattgcgacagaaagtctaatgagaggaatgtaagtgattgacacatttgcttccctaattgtttcatgtagttggagcttactctattgacgaattttttatcgttctttggatagccctcattgtattatttaatgtaccttgtaatatactttcctactatcaatcttc

SEQ ID NO: 43544 - DNA, 409 bp, Glycine max
  Clone ID: LIB3093-018-Q1-K2-G4
gggcgaccacgcgtccgcacgcgtgcgccaaaaggagcataagcagccgatttatacaagtaaaggcaaacgaagctgcccaaattggctgggggagaaggatatcaaccacatttaatacctgatctctctgcacgtacttaatgtggcaccaagcaaattaatcgtacgagcaatgaaagcaccagctatcttgtctgaaactccgaggaactagccatccaaaacactcacttcactaactctcaaagacaggagagtagtacttagtgatcaaaaacttctgtttaagcacatagtgaaatttgagtactgagctttggtggctctgttctgcgcttaatatattcagcagaaaactccatgtgatgttggagtggatactgataatgagatactacttttgctg

SEQ ID NO: 43545 - DNA, 449 bp, Glycine max
  unsure (1)..(449): unsure at all n locations
  Clone ID: LIB3093-018-Q1-K2-G5
gtggatttcaatctcgtttagancctcccttttttatttttaaataaaggncnntatatttgtgcattgctttgagtggattgggcataatcatattatcaatttttcattcatttaaccaggggtgtaagaagaagttgaggtgatggaaccccaggatgaagaagagatccataactgtttgatcaagctggttgctttattgttccttaccttgggttatctttctagttactgtctttaatgcagcatcaatgctagtgaaggaattgactctattgttgataatgcattacagagaagtaatccggaaaggcgaatggataatgtgtacattggttgtggagcttggtttggtggttacaagcccttggctgcttttaaattgcttcaaagagttcaagaactaaaatatcttgttcttgaatgctttgccgacctaacttttt

SEQ ID NO: 43546 - DNA, 389 bp, Glycine max
  Clone ID: LIB3093-018-Q1-K2-G6
gcgagctatcattcactttccccatccatccattttccgattcctaaccctaatcctccatcagcgatttgactcgattgtctcgcggtctgttatttccttcaaagcaaaacaattccatcgatgaatcgggcgtcgcagctttcgtgataatgatcttggcgctgcgaatcgattgcatgggtttggagaatgccggagcttcttagtggaccgcgacgacgtcgtgctccggttgctcgtaaaagctccgaaccaccgtcttcggccgggagatactgtaagactcgcgctgcattcgccagataggcactggcggttgagaggccaataactcgtttggcggcctaaaaagaggagaattcccttataataatatccgatcacac

SEQ ID NO: 43547 - DNA, 350 bp, Glycine max
  unsure (1)..(350): unsure at all n locations
  Clone ID: LIB3093-018-Q1-K2-G7
ctcatgttgaattcttgagaggagttgctatttcacttggcatcaaagngagtggtaaaatggtacccgatgaacgggttaagcttataaatattctgaaccctaaaaacaagcctggaagaattacagtcattgttatgaatgggagctgagaatatgcgagtgaagctttcacatcttattatggcagttctcatagcaggtcaaattgtcactttggttagtgaccccatgcatgggaacaccattaaagctccattttgacttaaaacccgctctttttattcaataaagtcttaacttcagttctatttcttttgtttttgcatttttcatataatagaagctta

SEQ ID NO: 43548 - DNA, 301 bp, Glycine max
  Clone ID: LIB3093-018-Q1-K2-G8
gcccaaccatccgtcgccacgtggtggaatgtgtcccaaaaatactaccaactcataaagtgatcaccaaaactgggcctcagtctcggtacccaaatcctcgactagaactactccctaggaaaattactcaccaacgacaacattgttagtttagcatccaagggtgccttgaaagactccatcaacgttgttctcacattctcggacgtaaccgttgaaggatttctgtccagtatgttcgggacccatggctcctctgtgggttcttgcaagtttgcttacatttgggtggggaact

SEQ ID NO: 43549 - DNA, 245 bp, Glycine max
  unsure (1)..(245): unsure at all n locations
  Clone ID: LIB3093-018-Q1-K2-H11
cccacacgtccgcacacattattttgngtccttcctcactctaaaaccgccattggcattgggatagcgaagaaggggaggtccgtaaccacgcgccttgacnaagtggatcgaaccatgtactcgactttctgcagcaccgtcaacttcttctctcatctttacacccactccatgaatcaacaaaaactcttatttcaggccggtgaacgacactcttttgaaaaattgtatcattggattct

SEQ ID NO: 43550 - DNA, 81 bp, Glycine max
  Clone ID: LIB3093-018-Q1-K2-H12
gttcgcccacacgtccgaagctaataagcctacagtctgttgacatgttcccacacacccctcatagtgaatgtgtttgcg

SEQ ID NO: 43551 - DNA, 313 bp, Glycine max
  Clone ID: LIB3093-018-Q1-K2-H2
gcgcccacacgtccgtccacgcgttcgtttatgtttatccttttttctctcctataaaaacaccgacacacggatttttacaacgggtgcgtgatctgactcacaaatcatcctcctattcctcggtcgtagcctgttgttccctctttcatcttttttcgccgtcacaacatccactaccatggtcgaaaccagactcggcgcctcttctttcaagcgttctctctctttgccttcttctgcgtccaacaccaaactatccaatgtgtcttaggatttctctgttgcggctctcgtcaacgaatcttgaacc

SEQ ID NO: 43552 - DNA, 272 bp, Glycine max
  Clone ID: LIB3093-018-Q1-K2-H3
cgacgcacgcgtgcgaaccggcccaatttagcataagcccagcatgttcaccttaacagcagcagccacctcctccgtcatggggacacgcctactggaggcccactccaaaacggaacggatgcaagcccggttcgggtttggcaagaagaaagccgccgccccgaagaaagtttccagggggtcgggctctagcttctataggcccctgtggtattcgggcgccaaggtgcccgaataccagtatgtgtgccttgtctgtgactacggat

SEQ ID NO: 43553 - DNA, 351 bp, Glycine max
  Clone ID: LIB3093-018-Q1-K2-H4
ctcagatattgttaaaaaagcaattgaaaattcagagctatttgtgatgaagcctcaaagagaaggaggaggtcttgtaccacttaaactttgactcaacactgttggaaaaaaatgtccgggagagaaacttacacaatgagctgtaattacttttcaggaaacaatatttatggtgatgagttgagggaaaccctccttaaattacaggaagcaggttctcaagaagatgcagcatacattcttatgcagaggatattttccgccacttctccagcaattttggtgcgtgatggtaattgggatacgggtcatgtcatttcagaagctggaatatttggtacttattta

SEQ ID NO: 43554 - DNA, 409 bp, Glycine max
  unsure (1)..(409): unsure at all n locations
  Clone ID: LIB3093-018-Q1-K2-H5
ggctatggaaatgagaatgtagatggctggtttgaactgtacagaggcccnagggccaagggtggcaggaaccaaaaaggtggtgcaccaactattttggcagtcaaagggcagaacttgcctgcaagtttaggcaccgatgaagagaaagacaagactagtaccgttccggaccgtgatcagtataacaaagctgattttccagaagaatatactgatgctaaattttttgtcatcaagtcttacagtgaggatgatatccataagagtattaagtataacgtgtgggccagtacccaaaatggcaacaagaagcttgatgctgcatattatgaggcacaacagaaactctggggctgccctgtttttctttttttctcagataataccagttggcaatttgtggggc

SEQ ID NO: 43555 - DNA, 354 bp, Glycine max
  Clone ID: LIB3093-018-Q1-K2-H7
gtttcaaacctgcaatgctcccctccccttttaggtcctcctccattgattccgaatatggatgtacatagcacgcgtgcggattttgaccaaagctaaacattattctgatgatactgttttttcaccttgcacctgcaggttgttctgtgaatttcgagtttttaaactacacagcaatcacaagcaaatgcaaaggaccccggttccctcccaaagaatgttgtggggcttttaaagaatttgctttgcccttatgccgatgtattaaatgatttaacgaatgagtgtgcatcaaccatgtttagttacattaatctctattgaaaatacccttctggcctcttttttagt

SEQ ID NO: 43556 - DNA, 284 bp, Glycine max
  unsure (1)..(284): unsure at all n locations
  Clone ID: LIB3093-018-Q1-K2-H8
cccactcgtccgcgtttctggcttttcgggtttagcaatggccggaaaacatgtcggcttgggtttactggcttggctcgctggaatttcaaanaatcatctctactatattatgttttatattaatgtacttactttacttttttttttttactcttcatcattaacttttctcttaccattttctttgttgttcttcataattttctcttacatattctgttttttgtcctgtctaattctctttttttatttttttttttaccatattctcttttttcttt

SEQ ID NO: 43557 - DNA, 187 bp, Glycine max
  Clone ID: LIB3093-019-Q1-K1-A1
acggcaagcgctctctttctttgcttttccttccccctttcagtttcttcaacgctgcaactatccatggcagaccgctggctcagacccgaggtgtatccactgttcgctgcgggtggtgcctgctgtgggatctgtggataccaattggttcgtaatatctttatcaaccctgttatttattgtg

SEQ ID NO: 43558 - DNA, 307 bp, Glycine max
  Clone ID: LIB3093-019-Q1-K1-A10
cccacgcgtccgcccacgcgtccggaaaaaaagcaactacatcagtccatggcaacccccaaccctaccagattctcccttgccatggagagaaccgggcaatgggttttctccccagaaatcccaaccgatgttattgttgcagttggagaatccactttttctctccataagtttattctggcggctaagagtaactacatcagaaaagtgataatggaatcagaagagagtgacctaacaagaatagagatttccaacataccttggaggacaagaagctttttaagaaagccgcgaaattttg

SEQ ID NO: 43559 - DNA, 147 bp, Glycine max
  Clone ID: LIB3093-019-Q1-K1-A11
caaaactaggatcactcctctagctagccagaaatggttctgaaacttgtttatagggaccggtgtgataatagggcggatttaatcattaacatgtgcacaatatcaaaatcaggctataatatctgcacatatttagaaagtgac

SEQ ID NO: 43560 - DNA, 163 bp, Glycine max
  unsure (1)..(163): unsure at all n locations
  Clone ID: LIB3093-019-Q1-K1-A12
cccacgcgtccgcccacgcgtccgctttcaatcttcacttctctctntctctcaaaacacaccaaaccaaccattcattcattcattcatagtttcattcaacaaatcaaataatatcaaacaaataaatgtcacctaacaatcctttcacgattgttcccga

SEQ ID NO: 43561 - DNA, 275 bp, Glycine max
  Clone ID: LIB3093-019-Q1-K1-A2
acgcgtcacgctacgcgtacgtacatgcgttcgctgctacaacaaacaaacaaacaccaccaacaacaacgactggggtttattttcaccctcgaatccacactttctttacaccgcgtttggatctccgtaaacaataccatgcatttaccgagggaatatcgaatacgtatatccaaccatcggtgtggaggttcacccattggattttttcacaaactggggaaagattcgattttactgctgggatactgctggacaggagaaatttggtt

SEQ ID NO: 43562 - DNA, 262 bp, Glycine max
  Clone ID: LIB3093-017-Q1-K2-H6
cggccgctaatttctctaacatggcttcaaccgtttatgatgttagccatcaagtccaatccaacagcaacagacgaattttcaaaagcgtgaaagcactaactgaatcaccagaactcactttcctcccaccctgttacacctacaccacccactcagatgatgaaatattggcacacccagatgaagatgatccaattcctattattgactattccctcttggtcactggaacacctgatcagagggccatgaccatcca

SEQ ID NO: 43563 - DNA, 423 bp, Glycine max
  Clone ID: LIB3093-016-Q1-K2-H6
attcaacacgccataattgcacccttttgaaaacttgtaacgttgattaaatgatggcttgcgtttctaaaccttgtcacggaaaaaagatgattttggctacgaatttcaagacgattctagaatgagattagtagcatcggcagcagagacagtgtgattgtgctctccctcgtatgttaccaccagcatagctggatcatccaaagctctttccacatgttttcgcgctggacaccctctcacactactgcacttgtagtaacccctgcaattatcattcccaaaaccaaaaaattaacacccatgaccacttctcaaattcaataggtacttcagaaacgcataaaagaaaccaaataattgggtccacctttaattttggaattcaatgagaaacctttaaggtaaatgggttgtttt

SEQ ID NO: 43564 - DNA, 277 bp, Glycine max
  Clone ID: LIB3093-016-Q1-K2-H7
gttattagtactgaaggcttttgcttgatagaactgagagggctaatcagagacatcctatgaagatacatgcactgcattattctgacatacttgcgccgcgtgatatgctcactccataggaaggatcaagggatcttatacaggaactgaacaatcatctgatacctctactatacaatattatagaatactattggattgatatgaaagaattatatgggattgaccggtacaagacaaatgagatctaatgtgacgcgactgatgagttcta

SEQ ID NO: 43565 - DNA, 332 bp, Glycine max
  Clone ID: LIB3093-016-Q1-K2-H8
cccacgcgtccgtcctaagattagtgtggctgcttatttcaacaagaggcacactgagaggaaccagaagacttcttatagtattactgttcactgatgtgtgcattggttggcctggttcaatgcctgatgatcaggtgttggaaaaaagtgccctttttcaaagggctaatggggggcttctgaagggggattggattgtgggtagttcagggtaccctttgatggattgggttttggtgccttatagccagcagaatctgacttggactcagcatgctttcaatgagaagattggggaggttcagaaggtggctagggatgcttttgct

SEQ ID NO: 43566 - DNA, 81 bp, Glycine max
  Clone ID: LIB3093-017-Q1-K1-A1
agagacattgtggttacccatagtctcatatagtgtcatacagcaaaaaattcagcaacacaaaacaatggggtctcttat

SEQ ID NO: 43567 - DNA, 439 bp, Glycine max
  Clone ID: LIB3093-017-Q1-K1-A10
cccacgcgtccggaagaacgcagaagccacgatgagtggcagagccattatctcctgtttctctcctccttcaacaactccatgctctgcccccattccagtactctcgcgccgaaaccacctcctccatgcaactccaccttcgccacacctcctctcgcggcggagccacctcgttgttgccggcggcggcggcgggaagacgtgggcaaatgtgaagtccgagaagaacgtgtccgagtcccccaagtacgaggatgatgccgtggttcagaaggcacgtgatttggataacgtggaagaggaagccaggtggtggcaagtgttccccaagagatgggtcattgtggttctctgcttctcagcttttcttctatgtaacatggatagggtaaatatgagcattgctatacttcctatgtctgcagagtacaactgg

SEQ ID NO: 43568 - DNA, 412 bp, Glycine max
  Clone ID: LIB3093-017-Q1-K1-A11
cttcttctctggtctctggcttccttggtacgggaagaactcaatcttgtccatttccctggggtttttctttcttcgatctcttcaccttcctttcgaccactctcttatcaccgctcgctttcttaactagagccctctccggtgagggtttctccaggtgtggtttgatttacagtttctgatgctgaagaaataaaaaagcttgaaggcttttgctcttctgtgtgaaaaatgttggaaagtggtgcgaaattcccaggaataatagatctcaacaaaaataataacaactactatgatttctctcaaggcttttaccataagcttggggagggtaccaatatgtcaattgacagtgttgggagcttgcatacaagtaacggcggaagatctgttgcgatgtctatcg

SEQ ID NO: 43569 - DNA, 439 bp, Glycine max
  Clone ID: LIB3093-017-Q1-K1-A12
cccactcgtccgcccactcgtccgtgaagatgatgatgcccctttgttgacagctgatgacaacataaaacttgaggttaaagaatgtgtaaacagactactttcccggtttaacgactcattaacagctttgttctgtggttccacagaatcactctctgaggctggaaatattcagttgtttaaatcctatttgactgatttgtcatgggcttgtcagatattgagtaagttggaaattatgagggagtttgttgagtattggtttgatgcatcggataagattgtcaaggtgcttgaacaaggaagttctacaactgaagtaattgagataaaattaagagctattgaggtgacatcaaaggttttagaggcaattgggtatggcactgttatattgccaactgcaaaacgccttcaggtcttgaaagtgtggctt

SEQ ID NO: 43570 - DNA, 390 bp, Glycine max
  Clone ID: LIB3093-017-Q1-K1-A3
caacactcatatccttatcctgtttctttcaatggaagtcatttctgcttctagcttgaatcccaacgctccgatgttcgtgccactcgcctatcggacggtggaggatttctccgaccagtggtgggacctcgttcactcctccccctggttccgcgactactggctccgcgagtgcttccaagatccccagttccaaaacgacgacgctttcgacttcgactttgacctagatctccaagatgaagatgaaagggaacgaaaggaagggaaggaggtggtgtcgttggggctgctgaaatggcgaatctgtggaggaggatgggcccatgcgccgaggtatgtggaaaaggcccccaagtttgtgaagcccaaggtgagcccacgggc

SEQ ID NO: 43571 - DNA, 427 bp, Glycine max
  Clone ID: LIB3093-017-Q1-K1-A4
acgaatatcttgttgtttggagcgatccgagaaaaactctgtaaacatgttggtttaccaggacctccttacaggtgatgagcttctctctgactccttccgttacaaggaaattgagaatggaatgctgtgggaagttgaggggaagtgggttgttaaaggagcagttgatgtagacattggtgcaaacccttctgctgagggtggaggagaagatgagggagttgatgatgcagctgttaaggttgttgacattgttgacacattcagacttcaggagcaacccgcattcgataagaagcagtttgttaccttcatgaagaggtttatcaagaatttgactcccaagctcgatgcagagcaacaggagttgtttaagaagcacatcgagggagcaactaaatacctgctctctaagattaaagat

SEQ ID NO: 43572 - DNA, 333 bp, Glycine max
  Clone ID: LIB3093-017-Q1-K1-A5
gatagtctttcgttacgcggagcgatacgacgagctctgttttcacatatgcctgtacaatgacaccactagcgggggtgagctgatccttaaatactccaacctcaaggcaattgaaaagtggatgcgcatcataagtcgcaggaaagtgtatggtgaaagcatccagtggctaatacattgcatcaaacccagtccctattgattcttaattccactttgtattgtatactacccctgtctacggtgacatcataagatacacgtccttactttatgctcaacacgatttctgattgaatcatttgatacacctgctgagatggtacatga

SEQ ID NO: 43573 - DNA, 438 bp, Glycine max
  Clone ID: LIB3093-017-Q1-K1-A6
cccacgcgtccggtgagtgtgtgctttgcggcagcaagaggagatgacttgttgttacatcaattactcaaacggggcatggatccaaatgaatccgacaacaatcgaaggacagctttgcatatagcggcatctcaaggaaaagagaactgtgtttcgcttctgttagattatggggcggatcccaacattagaggttgttctacgtgcagatttggaaggtaatgtgccactatgggaggctatagtggaaggacatgagtcaatgagcaagctgttatcagagaatggagcaaacttgcaatgcggggatgtgggtcaatttgcatgtaatgccgttgaacaaaacagtctcaacttgctgaaggaaataatgcgctatggaggagatatcacgcttccaaacagcaacacatggaccacagccttgcacgttgc

SEQ ID NO: 43574 - DNA, 181 bp, Glycine max
  Clone ID: LIB3093-017-Q1-K1-A7
gctgacacacatccgctcctgtgttctgctgataaataacgaggtctcaatgcagcatatttaaagggcggtatgaccattatgcctataactcacgcaacaccacttccatcaacatgggaatgccaacatcaacagcctgggagagtacacacccttacacgttaaggattaccagata

SEQ ID NO: 43575 - DNA, 88 bp, Glycine max
  Clone ID: LIB3093-017-Q1-K1-A8
cgaggacatgataaggccctcgtttcctaatagggggcatgagtattgctgctggtaggaacggatcatagagcctctaattccaccc

SEQ ID NO: 43576 - DNA, 251 bp, Glycine max
  Clone ID: LIB3093-017-Q1-K1-A9
atgagttccatacatagttgacacgaacagatatcatcaagtgtatacaatctgagaaagtaaggtttcgaggggttaatctttccggccttgacctctctaaactggatttatcttatgttgatttcagctatgcttgtcttaaaaacgtgtttttttcacgagcaaaccttcaatgtgcaaaatttcaaaatttttatgccaagggctccatcttttacaatgcaactttgcgtgaaatggaatttact

SEQ ID NO: 43577 - DNA, 317 bp, Glycine max
  Clone ID: LIB3093-017-Q1-K1-B1
ggctttctttattttctccttcctcttccttcttctcgtttcatcttccactgcttgtgatcgctgcttgcaccaatccaaggcttgctatttctccaaagcttctgctctttcatctggggcatgtgggtatggctctttggcactagacataagtggcggacaccttgcagctggtgtggcttctctcttcaaagatggagcagtttgtggtgcctgctttcagataagatgcaagaacccaactctatgcagcaaagaaggtaccagagtggtattgactgatcttaatcacaataatcaaactgattttgtgc

SEQ ID NO: 43578 - DNA, 425 bp, Glycine max
  Clone ID: LIB3093-017-Q1-K1-B10
gtgaactgatttcgttatcagaacaagaattggtggattgtgatacaggatataacgaaggatgcaatggaggacttatggactatgcatttgagttcattatcaacaatggcggcattgattctgaagaggattacccttaccgtggtgttgatggtagatgtgacacatataggaaaaatgctaaggttgtttctattgatgactacgaagatgttcctgcctatgatgagttagctttgaaaaaggctgttgcaaatcagcccgtcagtgtagctattgaaggagggggcagggaatttcaattatatgtatctggtgtattcactgggagatgtggcacagcactagatcatggtgtcgtggctgttgggtatggtacaactaatggtcatgattattggatcgtaaggaattcatggggt

SEQ ID NO: 43579 - DNA, 433 bp, Glycine max
  Clone ID: LIB3093-017-Q1-K1-B11
ggcatcttcttctggtagtttagacacctctgcaagtgcaaactccttcaccaacttcaccttctccacacaccctttcatgaccacttctttctctgaccttcttgcttctcccacagacaacaacaaaccaccacatggtggtggtggtggtttgtctgagagaactggctctggtgtccccaaattcaagtccacaccaccaccttctctgcctctctctccccctcccatttctccttcttcctacttttctattcctcctggtttgagccctgctgagcttcttgactcacctgttctccttaactcttccaacattctgccatctccaacaactggagcatttgttgctcggagcttcaattggaagagcagttccggggggaaccagcgaattgtcaaagaagaagacaaaggcttctcaaatttc

SEQ ID NO: 43580 - DNA, 428 bp, Glycine max
  Clone ID: LIB3093-017-Q1-K1-B12
tgcttctgtcctctccacatgagtctttttggctacttttagatactgggagacaaggcagtcaaatccagtgcacacacagcaactcccagagcgctgctatgctatgacagtgagacatcctctgatggttgttggcactgctgatagaaatcttattgtttacaacttgcaaaaccctcaggttgaattcaagagaattgtttcacccttgaagtatcaaacaaggtgccttgctgcattccctgaccaacaaggtttcttggttggatcaatagaaggaagagttggggtgcatcatttggacgatagtcagcatggtaaaaacttcacttttaaatgccatagagagggcaatgaaatatactcagtcaactttttaaactttcatcctgtacaccacacatttgcaacttctggttctgatg

SEQ ID NO: 43581 - DNA, 438 bp, Glycine max
  Clone ID: LIB3093-017-Q1-K1-B2
gtgaagagaagaaggaaaagaaagataaagagaaggagaagaaaaaggaaaagaaggataaagatgaagaaacagacacattaaaggaaaagggaaaaaatgatgaaggtgaggatgatgaaggaaataagaaaaagaaaaaggataagaaggagaaagagaaggatcacaaaaaggaaaagaaggataaagaggagggtgagaaagaggatagcaaggttgaagtttctgttagggatattgatatagaagaaataaaaaaagaaggtgaaaaagaagataaaggaaaggatggtgggaaggaagtgaaagagaagaagaaaaaagaagacaaagacaagaaggagaagaagaaaaaagttactggaaaggacaagaccaaggatcttagcactctgaagcagaagcttgaaaaaattaaacggaaaatacaaccac

SEQ ID NO: 43582 - DNA, 429 bp, Glycine max
  Clone ID: LIB3093-017-Q1-K1-B3
ctgacgcgtgggcggacgcgtgggtggtcttagaggagaaaattgaatacaatgatcttgtaaagtcagttcccgatgggaactcttcaaataatgatgaacacaccaatatccagacagttcagccagataaacaaaaggatgtgccccccaaaaatggtgaatgcaaaataaaagtacataattctgtttgaaatatagattttcttcttaatattaaggacggtcaatcttgactcttgagcatatactgttttgactttgttatagactagatgaactggcagaagttcaattctatttcttctacttcatttctattgctgcagtgttcccctgttttccttttttctatatattttcttttgggatgtttttttttctggtttttttttcctgcattcattggtttaatacacaaagaaattg

SEQ ID NO: 43583 - DNA, 446 bp, Glycine max
  Clone ID: LIB3093-017-Q1-K1-B4
ggattctcaccaaccagtggccccaaaactctcctcgctttagggaaacattgcaggagtatgctcgagaagtggaaaagctagcttacaagttgttggagctgatttcactgagcttgggtttggatgctgaaaaattccatggctgtttcatgaaccaactcagcatggtgaggctcaattactatcccacatgccctttccctgatttggcacttggtgttggtcgccacaaggactccagtgctttaactgtgcttgcccaagatgatgttggaggattacaagttaaaagaaaatcagatggagaatggattccagttaaacccaccccaaatgcatttattatcaatgtgggggatatagttcaggtttggagcaatgacaagtatgagagcgtggagcacatggtggtggtgaatacagagagggaaaggttttcaatt

SEQ ID NO: 43584 - DNA, 448 bp, Glycine max
  Clone ID: LIB3093-017-Q1-K1-B5
gcagtttcaaagagaggatttgggattgggaaggcgagggattgcgctgcgtctcttcctcttctctttcgattcatccctcattcataatcttccaatccaacaacctcagcctcacactcacacatacacacatctgaacgcgtatcgtccctcccatggcttcaaagcgcatcctcaaggagctcaaggacttgcagaaagacccaccaacttcttgcagcgctggtccagtagctgaggacatgttccattggcaagcaacgattatgggtcctgctgatagtccttatgctggaggtgtattcctagtcactattcactttcctgcggattatcctttcaaacctcccaaggttgcctttaggactaaggtgtttcatgcgaacatcaacagcaatggtagcatttgtcttgatatccttaaggagcagtggagccctgcact

SEQ ID NO: 43585 - DNA, 413 bp, Glycine max
  Clone ID: LIB3093-017-Q1-K1-B6
ctataattgaaatagataacccggccagtgtcaaaaggcaattggcgcagctgtttgacttgtctctgagggcaactgtgcccgatgagccagatgttgtgccgttaattgatgcttgtgctgctaaaggtggcgtaaaatttggtgattatcaatgtaataatgcaatgggtatatggtctaagatgaagggaaagcagacaggatttaggggtcccccagcaattggtcaggctatcgttaacaatcttcctccatctgaaatgatagattcgcgctctgtagctggtcctggatttgtcaatgttgtattgtcaaagaagtggatagctgagagcctacagagaatgctaattgatggtatcaattcatgggcacctcgacttccagtcaaagaggctgtgattgatttt

SEQ ID NO: 43586 - DNA, 433 bp, Glycine max
  Clone ID: LIB3093-017-Q1-K1-B7
ctgaccgagtccgagaggcatcatggcgacactggattccgacgtgaccgtgtttccggccggcgaagcctccagcagcgccggtccttcttcgtccaccaagaagccgaagcgtttcgagatcaagaagtggaatgcggtttccctctgggcttgggatattgtcgtggataattgcgctatttgtcggaaccatatcatggatctctgtattgagtgccaggccaaccaggctagcgccactagcgaggaatgcactgtagcttggggagtttgtaaccatgcttttcacttccattgcataagccgatggctcaagacccgtcaagtatgtcctctagataatagcgagtgggaatttcagaaatacggtcactagaactttgatgcggctgagctacttccaacttggacatttggattgtagcatttc

SEQ ID NO: 43587 - DNA, 288 bp, Glycine max
  Clone ID: LIB3093-017-Q1-K1-B8
atttactagtcccatacgcatctcagatgcacttaactcatacgtcaccgtgatttcttccggggaagcctcgctcatcacatctaataattcatgcaccaaaatacctgctcggtgttagatcgaaaataccgacacaatttcatatcagccttggactatgtgtcaatataatcactccgaaagacataaccatatcatggatatatgttaaataaccagggacaaccatgcgagctccactggcaaggaaagcaatgcatcatcatatgattgtgagcatgctta

SEQ ID NO: 43588 - DNA, 420 bp, Glycine max
  Clone ID: LIB3093-017-Q1-K1-B9
tcactgtgagagcggcgaataagaagaagaacaataatgaaggacgccggaaagagccacaaggcgaatgcaaagctgtcgccggagacgcggaaggatcggaaatcggcgacggggctgagtggatcgccgaagaagggaggccacggcgggaagttcacgtggatcggcaacggctacgagaacgtcgagatggagcacggtgctatggacgccaaggacccgaacttcgaggatccagcggagatcgccgccgtgtgatcgcggtggtttccggtgacgagatctgtacatactaataattgctaagagacgcggttttcgaattcaataatatgaagcaagtaggagaagaagcgctttctgtgattgattgttatagatctgatctgtctctggaatttggtagtggcatggcac

SEQ ID NO: 43589 - DNA, 439 bp, Glycine max
  Clone ID: LIB3093-017-Q1-K1-C1
tcggaacaaagcacttagtgctattcaataattacgaaaaaccaacagcgagtgttgtttttgtttggtccaggctggaccagggaatgaatagagatgagaggctttcggttgaagagaactgagttaagcggcgaagccaaacgcataatcggcggcagaaattgccaccggaagcacgtctaagacgggtgtaccaaacacaaaattccatccaccacttctcttttcaatccccaactcaaatctgtgaagaaaatctcaatttctaaattgtaattcttagcactactgctagtagtagtaaaaaaaaacaattagaaagtagtagagtgtttttttttctttttttcgtttggtttacttttaagatgggtgagaagagcaacgttggcggcgacgcgattaacacgacactgcttcacgggaagtacgagct

SEQ ID NO: 43590 - DNA, 433 bp, Glycine max
  Clone ID: LIB3093-017-Q1-K1-C10
cccactcgtccgcccacgcgtccggagatttcaaagtctgcacgccaggtatcagatcttagactcagaaataacccactgcaaaagatatggcaaggctcactaccaatcccagatttgtgcttcagtaaattgcactccttgattgtggacggctgccaatttttatcagatgcagtactacctttcaatttacttcgtttgttaactgaattggaaacattggaagttcgagactgcgattctgtgaaaaccatatttgatgtgaaatgtacaagacaagacagaataatgacaactatggaaccaaccatcttccccctcccttttcctctcaagaaattggttttacagcggctgccaaatctggagaacgtttggaatgacgaccctcatagaattctcaggatgcaacttctacagcaagtacatg

SEQ ID NO: 43591 - DNA, 402 bp, Glycine max
  Clone ID: LIB3093-017-Q1-K1-C11
cccacgcgtccgttcaaactcctatggtagaggatacctgcctaaccagggttctagctttggaggcacttccatttccaatcttaatgataggagttttgcttctcttgaaaatagcaggcggcaagggagaccaactgcttctctttgcaactgtaatggtactcttgatatccttagtgagcagaaccgatgaccaagggcctcgaagttgaaaaatcaaatttcaactgaaaataattctgtggatagtagtaaaaatagtgcatctactgccaagttccaaaatgaatcactcaatcggtcagattttgccacagattacaaggatgccaaattttttgtcatcaaatcttacagtgaagataatgttcacaagagcattaaatatggtgtctgggc

SEQ ID NO: 43592 - DNA, 435 bp, Glycine max
  Clone ID: LIB3093-017-Q1-K1-C12
gaaaaaaaaaactcaaacaccttcaagaacttgtatctttctttgttagtatttgttactacaattttacattcttttcatctctacatatttcattagtcatggcacctcaagcagtttccttcaagtccttcgccgttgctcttattgtggcgcttttcttctccgcctccgctctggacttagtttcggggcagtcgccggtgccggcgccggctcctgcaccagatgccggagcagctggatccgtgtcgagctcggtcgccatgattggagcttccgttgtgatttcattgctcgccatcttcaagcactgaagaataatctgatgatggatcgattttgtgtgaagattattgattcgttctgcacactcagatttattgttgctgctttataatacgttacgagtgatgattattatgtacgtataaa

SEQ ID NO: 43593 - DNA, 394 bp, Glycine max
  unsure (1)..(394): unsure at all n locations
  Clone ID: LIB3093-017-Q1-K1-C2
tcgtccacgcgttcgcccacgcgtncggattcttaatttttatttattaattgttactgtgttactttacaggattggctacttatggagagaaagagtggtacttcttttcaccacgggaccggaaatacccaaacggttcgaggccgaaccgggcggctggcaccggttactggaaggcaaccggggcggataagcccattggtcagcccaaaccggttgggattaaaaaagctttggtgttttacgcaaggaaagctcctaggggacaaaagcaattggatcatgcacgagtatcgtctcgcagacgtagatcgctccgttcgcaaaaagaacaccctaaggttggatgattgggtgctttgccgtatttacaacaagaaaggcacgatcg

SEQ ID NO: 43594 - DNA, 430 bp, Glycine max
  Clone ID: LIB3093-017-Q1-K1-C3
cccacgcgtccggaatcagaggaaaaaatcacataatttcgaattcaaaatttgaattttcgtgtataaaacgaagagaagagaatggaatcggaggatttggtgaagcaggaattggaggaattgcagaaacaattggggaagaagctaaaatttgaagcctctatttcgtctctaaaatctcttctccaacgcacttacccatcagcttccccagcgcttcgcaaatccttttatttggttatatgccgagttgctactgtgttgaagaccaggtatacagcaccaggtttctggaatgctggactgggcctttttgagcaggctcatttgcttgtttctgaaccttctgagaaggagaagttgaaggcttgcattgctcatgccagggaacatttgcatctagaagataacccatcacaagctttac

SEQ ID NO: 43595 - DNA, 425 bp, Glycine max
  Clone ID: LIB3093-017-Q1-K1-C4
cccacgcgtccgggggtttatttaagtggttcttctcagggatagaggactgtggattcgaacagttccctaccttcggattgcaagcttggaagcaaacattctacttcgattttagtatgacttttgtgggagcagggatgatttgctcccatcttgtgaactgttctttgctccttggagctgtgctctcttttggggtcatgtatccgctcattgatcggcttaaaggagactggttccctgacaatttagaagaaactaacatgaagggcttatacggttacaagttttttgtttccattgctcttatcctgggtgatggcatatacaatttcaccaagattctaatttctacagtcctcaatgttaatgaaagaatgaggagcgagaataataaaaatgtagctgctgatcggcacgag

SEQ ID NO: 43596 - DNA, 459 bp, Glycine max
  Clone ID: LIB3093-017-Q1-K1-C5
atatctgagtctcaattttatgccaacatcctaggtttgctgctgtaaacatctgatcagagttcatatatatggcgaataaactgaatataaggctaggagaaccaactctggtgccaccagcagaagaaacggaaaagggtctttactacttcctttcaaaccttgaccagaacatagcacatccagttcgaacggtttacttttataataagtctgcatgtatagggaacgaggaagcagcacaagtaataaaggatgcttcgtcgaaggttcttgttcactattaccctatggctggaagattggccataagttcagaagggaaactgatcatagagtgcacaagcgagggtgttgtgtttgttgaggctgaagaagcaaactgtgtgataaaagacctgggagatttgacaaaacaacctgaccttgaaactcttggaaaactggtttatgata

SEQ ID NO: 43597 - DNA, 444 bp, Glycine max
  Clone ID: LIB3093-017-Q1-K1-C6
cgtttctctctctctctctctgtgttataaaatcaaaattgagtgagtgaaggtggttgtggcgactcagatcgattgattgcggttgcaaccatcatctatggtgcgcccgcggccgatcattgattagctgtagttgcgctgtctcactgctttcatctcacgcgcgcacgttactcgaactgaatgtcatctttttttcggtgggccccgccacttgcgggtttatcaagtaacctaataagatatttattattttaagaaaataagcatcgataaatctttattaatttgaaataggaaataatatactacctacgtccgaatatatataatcgtcccgatacacatatgattttttaattaattcacatcttttacgaaaattgattaatttaaccagtgacattaatatatttgtcaaaattattcttaaaattattt

SEQ ID NO: 43598 - DNA, 414 bp, Glycine max
  Clone ID: LIB3093-017-Q1-K1-C7
ccattggtgagttccaacttctttcatgtgtttctttgcttttagcttccctgagggatatactatcatatatctcagtatatcctttttcttttgattttttgtttagttgaagttggatcagtgtgccaaaatgttaaacacacttcacttgtgattgggatcgggatctttctcttatatccactattctttgttttatttaatgtggatttagtgatttactgaggaatacacccttcattcttcctcacttgcttacttctcattcggttcaatgatctattggtttttgtagtcggtacttccccttctttgctttccgaatgcttttgtgattattactatagcaaatttggaatatttagttacttggaaaagctaaaaaaaactcaacttttggtatgggtaagt

SEQ ID NO: 43599 - DNA, 408 bp, Glycine max
  Clone ID: LIB3093-017-Q1-K1-C8
aaccctacttctacttcccccctttgctctcaaaccttatcacctaatccgtatcctcccaaaccagaaaaccatgtctacctccgcagcttccctcgcactcccaaccctcactctccgaacccgacaacctctatgttctccccaatgcttctcctcgtccctctccctcacacccaacaacaaacccatttccatttctgctgtttttctcaaaccaacaactctgtcgtcgtctcgcttcgttccccacgtcgtggtgtcgtcggatttggggcaggaggaggacaccttcagtgacggagacggccccagcttctcccccgaccttaagctctttgtcgggaatcttccgttcaacgtcgacagcgcgcagctcgcggagctctttgagagtgccgggaatgt

SEQ ID NO: 43600 - DNA, 439 bp, Glycine max
  Clone ID: LIB3093-017-Q1-K1-C9
cttaaaagaaacaaatgtttctctttctctctctctgtgtttgaagaacaaaacacacttcttctcaatttcttctttcttctgagagagaaagaaagtgagggacttggagagaatttctgtcataacagcacattgagtcaccaatcaaccatgtctctggggtatgccgagaagctttcctacatagaagatgtgggcaacgttggaatggtcgaatatttcgacccatcccatgttttgcgagagaaaatagatcaacttgctatcatgataaaaaagagtaagcatctagtggtgtttactggtgcaggaatatcaacttcttgtggtatacctgattttcgaggtcccaagggaatttggacacttcagcgtgaatgtaaagccctgcctgaagcatcactgccatttcatcgtgcatcgccaagcatgacac

SEQ ID NO: 43601 - DNA, 449 bp, Glycine max
  Clone ID: LIB3093-017-Q1-K1-D1
cccacgcgtccggttccgaagtctgaaccagaatcctacgaatgacatgaagagatgagggaacaaagttttggagataagatgcatggaataacaactctcgctctcactgcaactgcaaacacaaacacattcctttcttgtcctctaagatctcttctaccacttacccctccatcgaattgttgcatacccacttgtaaatttagctatggaattcgtttcaaccattctcagtggaagcaccaaaaaacagaaagatggatcaacagaaatagaacgatggttgtgagagcaaggcgtatcgagtctccgtatgaagttttgggcgtgtctccatccgcaaccgtcgaccaaataaaaaaggcctatcggaaacttgctctcaagtatcatcccgatgtcaataaagaggataaggcacaggagaaagttatgaggataaaaca

SEQ ID NO: 43602 - DNA, 406 bp, Glycine max
  unsure (1)..(406): unsure at all n locations
  Clone ID: LIB3093-017-Q1-K1-D10
aataacaccaacgaaagccgnggcactcncaagggaaagagagaaagangcggccaatatcaagagactacttgaggaaggggacttggtgatttgccctgaatgcacaacttgtatagagcctttcctcttgaggttcagtacactatttgctgaactcactgataggattgtcccagttgctattaacacaaagcaaagtgtgttctacagaaccacggtttgcggacacaagttgttggacccgtactttgtgttcatgaatccaatgccaacatatgagatcacttttttgaaccatctttccaaggagctcacattgcatggaaggaaatcagctattgaagttgcaaactacattcatagggctcttgcacggacttttggatttgagtgcacaaatttt

SEQ ID NO: 43603 - DNA, 437 bp, Glycine max
  Clone ID: LIB3093-017-Q1-K1-D11
cggacgcgtgggtgtagactggagggctggtttgctgcagacactgatgctatttcactgaaaggatgggaccaggaggtactgctccctggtggtcatggtcttatggtccgtggctacttgcctgttgtaaatagcctagccaagggtcttgatattcgattggggcacagggtcacaaaagtagttaggcgatataatggagtaaaggtaactgtggaaaatgggaaaacgttttttgctgatgctgctgttattgctgtcccacttggggtgcttaaggcgaagaaaatattgtttgagccaaagcttccagactggaaggaagctgccattgctgatcttgggattggacttgagaataaaatcattttacactttgaaaatgtgttttggcctaatgtggagttcttgggagtagttgcagatacacctta

SEQ ID NO: 43604 - DNA, 366 bp, Glycine max
  Clone ID: LIB3093-017-Q1-K1-D12
cacgaatatagtgttgtttggagcgatccgagaaaaactcggctaacatgtgggtataccaggacctacttacaggtgatgagcttctctctgactcctttggttacaaggaaattgagaatggaatgcttgaggaaagcgatgggaagcgtgttgttaaatgagcaactgatgtagacatcggtgcaaacccttctgctgagggtggaagttaagacgagggacttgatgacgcagctttcaaagtcacagacatctatgacacattaatacttcatgatcaaccgctattcaatatgaaacagattagaacctccctgaagaggagtatcaaaaacttgactcccaaactggatgcagaacaac

SEQ ID NO: 43605 - DNA, 450 bp, Glycine max
  Clone ID: LIB3093-017-Q1-K1-D2
cggacgcgtgggcggacgcgtggggcagtgaccaactttgagccaagtacttatgaaggagaaatgaaatctgcagccattaatgaaggtggcggtcagaatcttgatctcaatttgggcatagcaaccccaggacctggtcccaaggaaaattgggggcaacttcacttcccctccatcccttacaacacacatggtggaagaagttcaaagatggaaaccaatgttaattctggaattggtaatccatctttgaaaaggatggttgtaactgaagatcgtccttcattatggaatggcatgtctcctaatttctttcccaatggggaaagagcagagagaatcggcattgatccttcaaaaggactccccaattgggcgtggcaaacacatggccaggtcaatgctaccccagtaccatcgttctctgctgcagcatcatcaggattc

SEQ ID NO: 43606 - DNA, 441 bp, Glycine max
  Clone ID: LIB3093-017-Q1-K1-D3
tccttataatatgttgcatcaaagggattggcctcaccttgctcctaatgataaatgaacctataaggtcagccatcaccatcatatgcaaaagattcaaaggcttgattattggtagtatagctttctgagaagggaggagctgcattgatgattaccctgtaattcactcaaaaggattattgaggaagtatatgaagaagagtatatggagctagattacaatcttagtcagtagtgtgtatcctgtgggagatttacaaacttattggtacacatctctaattcctgtcacctaattgtatgacgagaattctggcttatttcttctggtctgcctagacagctgattctaaagtaaattcttaactggttctctgattcataaattatagattcctattatattgtgtaatcctgaatgtgttaactctctttttc

SEQ ID NO: 43607 - DNA, 415 bp, Glycine max
  Clone ID: LIB3093-017-Q1-K1-D4
cccacgcgtccgcttttttgttgttgtggtgtttcatttgtgaaactaacaacaacacaaggccatcatcatggcagctgcttccccaatggcaagccaactcaagtccaccttcactaggactcttgtagctcccaagggcctctctgcctcttcaccacttcacctcgtgccttctagaaggcaatttagcttcactgttaaggccatccaatcagagaagccaacctatcaagtgattcagccaatcaacggtgacccattcattggaagcctggaaaccccagttacatccagccctttgatcgcatggtacttgtccaacctgcccgcatacagaaccgcagtgagcccactactaagagggatcgaggtgggcctggcccacggataccttctggtgggcccattcgtg

SEQ ID NO: 43608 - DNA, 232 bp, Glycine max
  Clone ID: LIB3093-017-Q1-K1-D5
cccacgcgtccgatagggttgaggagaataacggctgcctcatgcttggctggcacactaggccactcatcgctacctccgtttggaagcttccctcctacagcgagtctagtggcttgactcactgaatgtaaaactatagcataattggacttgtcccagtgaactgaggcagtgtccgagtcagtgagccttccatgcagcaggatgataaataaatgagacggtgaac

SEQ ID NO: 43609 - DNA, 429 bp, Glycine max
  Clone ID: LIB3093-017-Q1-K1-D6
gtggaatccgatcatggacccttcttctccaatttcaggggcctcaagtgaacatcaaatgttaaaactggcaaatcgacaacgctgccgaactgaagttttaagctttgatggcagcattcttagatcttatgctttaactcctgtttatgaagctgctacatggcccattgatgaagctactcatgccaacacaataaaagctgaaacagatgagtgtgatagtaaagaagtaatccttcctggagtaaatcttatttttgacggttctgagttgcatccgtttgatataggtgcctgcctacaggcacgtcaacctatttctttaatagcagaggcaacagctggctcatcatctttagcataccaaatagttctgcagttaacataggttacaccacttcgaagtgcatgaatggtaatgctact

SEQ ID NO: 43610 - DNA, 407 bp, Glycine max
  Clone ID: LIB3093-017-Q1-K1-D7
cccacgcgtacggactggttcactgtacttggatcttttcccattacagtcacgcacagcaacaacgtcccttctcttctcttcttccgtcatctctactgtacaccctacgcttcatttcttctattctctcttctacttctctctctgcaaaagtacaagccatttatcttcacttcggttcatctcatagtcctacacctcttcacaattacaacaactcttacaccaaacacacatgcttctttttaagttcttcatatctcaacctctggttctggttctccaccatgaaccaataactacaacctcgtacttggcgtttgtttttgtgtttgtgcctggcttgccacatggcgtaccatatccacaacgtttcacagctagacctttcactccaccatttc

SEQ ID NO: 43611 - DNA, 434 bp, Glycine max
  Clone ID: LIB3093-017-Q1-K1-D8
tggaaatttatcagttactgaaaaggtggtgcctgttgatcatgttaaagaatgcagtcatcaggaacatcattcacacgctgagaaagctgcttctaataattcactggaggatactccaaagaagtcttttgcatccattgtgaatgcactaaaagaaaatgctgctcccttccatgtgagggtttcccctgtgaaacttcttgaacaaccacgtgtttctagtatacctgcaccagaagcaccagctcctagcactgacagtccaccagaaaagaataatgagattggaggtaaggcttatgcaatatttgttgcaaatttgcccatgaatgcaacagttgaacagctggaacgtgttttccagaaatttgggcccattaaacgggatggcattcaagttagaagtaacaagcatcaacaatcttgttttg

SEQ ID NO: 43612 - DNA, 413 bp, Glycine max
  Clone ID: LIB3093-017-Q1-K1-D9
cattgacccatggcaatattggcacacatgatttacagggtactcagacgtcgtgttcttggaatagtgatgcaaaaccctgggatattggaggatggtattctacatcatatgcacgtgttgaatccacagaactgtagaactctcttggaattgatggttctggataaacacctaattgtgaagaagatgcatcaaaatatgttagatgggggaccctccttacttccggaacttatcggaagcaaatccagtcaaccgaagttgatatgccgagagcatttcttcgccaatcccatgagtacttccttgttgtagggaatctgtggtattgacattagacattagtacttgttatataaaaaacatatttataggaaattttggatactggtttaagttatatttggaag

SEQ ID NO: 43613 - DNA, 413 bp, Glycine max
  Clone ID: LIB3093-017-Q1-K1-E1
tcgtccactcgttcgcccacgcgtccgatttttcttctctctaatctcttggttgcgtggcagactaaatgattttgtgtttttggttctcttttaggttggaaatcttgggcttcagctgccatggtactttctgcaaataattgtcagcgcatggtatttcatatcagtcgtgggtaatttgtttgaaagctatttcatctctttaaagaaatacaagtctcttcattcgggaaaggttcggtaccttgccattgtcatagaaagtgaagaagcttatcagatttccaaagttgttaaactttcgcagtggcttgactctattggtgtaaagaatgtgtgcctttatgacatgaatggagtattgaagaagtctaaggaaaccatgtttcaaaaattgaagaatgcaaaat

SEQ ID NO: 43614 - DNA, 403 bp, Glycine max
  Clone ID: LIB3093-017-Q1-K1-E10
ctcggacactgttgctcaggctgtctagtcaggaggtaatatttaaaataggatactttagtttaattatttcctttttttcatggtttaattaggtatttccgtatttgttataaattattaaatataattgaagtttcatttataaatggaaaagccttcttctcattacttggtttcaagtgagaaaaaatggacgagggttaacactcaatcctataatattaagttcttggaaagccctgttgggatggaggataacattttattgatcaagttctatcattagacacctctatacaaataaactctagatatgtgtattttttttttttttggtctaatctagaatgtattgacattgaatctttttgaagtgcaataaattctagaaatgtgcaat

SEQ ID NO: 43615 - DNA, 434 bp, Glycine max
  Clone ID: LIB3093-017-Q1-K1-E11
cccactcgtccgcccactcgtccgtaggcacccagagaggtattcaatatgaaaggaagggttgacgaaatttgcatcgatgagctgaaatatttaaaatcagttgtcaaagagacactaaggttacacccaccagctccacttttacttccaagagaatgtggacaggcatgtgagattaatgggtatcatataccagtcaaaagtaaggtaattgtgaatgcttgggcaattggaagagatccaaagtactggagtgaagcagagaggttttatccagagagattcattgatagctctattgactacaaagggactaattttgagtacattccatttggtgctggaagaagaatatgccctggcagcacttttggtttgatcaatgttgaggtggcacttgcatttttgttgtatcactttgattggaagct

SEQ ID NO: 43616 - DNA, 409 bp, Glycine max
  Clone ID: LIB3093-017-Q1-K1-E2
tcgtccacgcgttcgcgattctccaccactattcccttcaccccaatcacactttccggtagttgttgctattagtgtagaagatgagtacgctggatgcaacaagggctgaacttggtcttcttgttttatatttgggcaaggctgaagcaagggacaaaatatgcagggcaatacaatatggttccaaatttttgagtaatggggaacctggtactgctcagaatgtagacaaaacaaccagcttggcacgaaaagtcttccgtctctttaagtttgtcaatgacctacatgctttgataagtccaacaccacatgggacacccctccccctagctctgttgggaaagtccaagaatgctctactctccactttcttgtttcttgatcaatttgggtggcttggcag

SEQ ID NO: 43617 - DNA, 452 bp, Glycine max
  Clone ID: LIB3093-017-Q1-K1-E3
gagatatacaacatggctatatctacatcagaaagaatggcatcagtctcgaaaaggattacccttaccgtggtgacgagggtaaatgtgactcaaataagaaaaatgctattgttactattgatggccacggatgggttcctacccaacttgaggaagccttgaaacagggcattgcaaatcagccagtggccgtacctattccagcagacgactatgaatttcaatattatacatcaggtgtattcaaagggaaatgcggtacagaattaaatcatgctctcctgcttgtggggtatggtacagaaaaagatggagattattggatagcaaagaattcatatagtgataaatggggagagaatggctatatcagaatacaaagaaaactgagcacttgtaaatttggaaacgggggttactatcccattataaaagtcaccgatcaacaa

SEQ ID NO: 43618 - DNA, 417 bp, Glycine max
  Clone ID: LIB3093-017-Q1-K1-E4
gcacagtaagagaaaactcttggggtggattctggggtttgtagcaggggcactggggggaaccttatcaggattcgtgttttctttgatgttcaagctcgctctcgcgttgatcaaaggaagaggaaggaaagcggggcctgatatctatagtccattgatcaagaaagcagaagatttggccttcttggaaaaagaagaaggaatcgcgtcgttggagatcatcgggcgcggtggctgtggagaggtctacaaggcagagttaccgggaagcaacgggaaaatgatcgctataaagaaaatcgttcagcctccgaaagacggtgctgagttagcagaagaggacagcaaggttctgaacaagaaaatgaggcaaattcgatcggagatcaacaccgtgtgacaaattatacacag

SEQ ID NO: 43619 - DNA, 432 bp, Glycine max
  Clone ID: LIB3093-017-Q1-K1-E5
gtttcgacggcgagtactgtcgcaacctcttctactctcgcgtgggcaaaaccacctggccttactgctccggcgtctggagcaaaaaagaatgggtcctccccgagatccacgacgacgatatcgtctccgccttcgagggtaactccaacctcttctgggccgagcgtttcggcaaacagttcctcggcatgaacgatttgtgggtcaaacactgcggaatcagccacaccggcagcttcaaagatctcggcatgaccgtcctcgtcagccaggtcaatcgcttgagaaaaatgaaccgccccgtcgtcggtgttggttgcgcctccaccggtgacacatcggccgctttatccgcctattgcgcttccgctgccattccttccattgtgtttttgcctgctaataaaatctctcttgcccaacttgttc

SEQ ID NO: 43620 - DNA, 381 bp, Glycine max
  Clone ID: LIB3093-017-Q1-K1-E6
gccacacattcgaaaacacaatgttcatgtgtggatctgggtttgggacagcgatctctcacgctgacttacactatgacgaacgtatcgaaggctacatcaaaggctatcgacaagtcttttacgaccgctctactgaccacagatgaaccgctgaatcacctgaaataacacctaccctggagcctgcttaatgagaaacatgttacagaactgcttacaagaacgctacgaaagcagattcagaaaccgcattagtgtacttggaagtataggacaagcaatactacctgaatgaataccctgacctttatactgaccttaccgccacatctgcagccattgcttatataatggcatatatagcaacttccgacatga

SEQ ID NO: 43621 - DNA, 366 bp, Glycine max
  Clone ID: LIB3093-017-Q1-K1-E7
actcattctttcattctcattgccgtcacagagagagacatgaaacaatgaagtttaaccctagggtttcctcaagccgtcgcaagagccgcaaggctcacttcaccgctccgtctagcgtgcgccgcgtcctgatgagcgcgcctctctccaccgatctccggtcaaagtacaacgtgcggtccattccggttcgcaaggacgacgaggttcatgtcgtgaggggaacctacaagggccgcgagggcaaagtggtccaggtctatcgccgcaagtgggtcatccacatcgagcgcatcacccgcgagaaggttaacggctccaccgttaacgttggcattcacccttccaaggttgtcgtcacca

SEQ ID NO: 43622 - DNA, 432 bp, Glycine max
  Clone ID: LIB3093-017-Q1-K1-E8
cccacgcgtccgcatgggtggtggagaagttaagggaggcaaaggaggttgcagaagcgatggctggtacaaagaggaagactatcattagaaagataaggggggatgggaagaaggtgaaccaacataagaacaggtttcagtatgatgaacacaactatgctctcaactccaactccggagctcaaagcgtacatgaaggcatgcctcacaggttctcatctacgtttgctgctcctggtcgacgccagaacgaatcatgatacatattcttcactagagacaatgccagttggatagaacctataaacatgtatattggtgcccaaaattgtttacatgattgtaatacttatattgaaagtatcatacattgagagaagagtgaataccattgttctttaataaattaaattccacgttttatcaaaa

SEQ ID NO: 43623 - DNA, 438 bp, Glycine max
  Clone ID: LIB3093-017-Q1-K1-E9
gaacacacagtttgatcgatgatggaaacgttggccacatcttcttctgcaactcttccatcttcttcttctcccttttccattttcccttcaagaagaacttccctttatcctcccaagactctccaatttcgtttaccctcctccaagcgtgatgatgctttcgattcagactccaaagaaaaaaacaagcttccaattcttagtgatcgctgcctctctctttcccctctttccaaagatgctgcgatggggctggtgctgagtgctgcgacgggcagaggatggaccacgggttcagggatggaaggcccctctgttcctgcagttggtagggatagcgaatcggggacggggaacatctccactttcccttggtctctcttcacaaaatcccctaggagaaggatgctggtggctttcacctgtaccatctgt

SEQ ID NO: 43624 - DNA, 394 bp, Glycine max
  Clone ID: LIB3093-017-Q1-K1-F10
aagtaatccacccacgggtttcttggagttgtgatcaactacgttacttctgtcttggttttcttcatcttccaccttcacctggtttacttccttcgataattaactttatcaaaatcaaactttgatgttcttgcttgtcttaattacttctctgtcgtttgacgaatagtattacactattgtctgggaattttgttcctttcctcttttctgaattccgtttctctgaaaagaagtttatcataaacacgttggaatggcaaggaactacttctaacaagaacatgatcttgagaagagaagagctgaggctgctaggattagggagaaatacccagacaggattccggttattgtggagaaggccgaaagaagtgacatcccaagtatt

SEQ ID NO: 43625 - DNA, 438 bp, Glycine max
  Clone ID: LIB3093-017-Q1-K1-F11
ctttggtgagctgctacgggatcaaagatctgaacttggtgttgccaacagtatctccatgtgaatcacttcggtctttatctatcagtaattgccctggatttggcaatgcctccctctctgtattgggaaagctgtgccctcagcttcagcatgttgaattgagtggactcgagggagtgacagatgcagggcttcttccactccttgagagttccgaggctggtttggttaaagtgaaccttagtggttgcacaaacgttaccaataaagtagtttcgtccttggccaatctgcatggttggactcttgagaatctaaaccttgatggttgcaaaaacatcagtgatgctagcttgatggcaattgctgaaaactgtgcattgctatgtgatctcgatgtctccaagtgtgctataaccgatgctgggattgaaa

SEQ ID NO: 43626 - DNA, 435 bp, Glycine max
  Clone ID: LIB3093-017-Q1-K1-F12
gagagtgtgcacatcaatgtctgctcaggtcggtgtcaggacacgagcccaagccgcattagccatggaagctgttagttctgctgaaccatcatccaagagaaagaagatcagcaacagtactaaccaagagccaaaactctccaagactccgagaacgagttcttcctccgctgtcaaaccagcgacggtgacggagatggttcagccggtgtcgccggagatggttcagcaacgctgcctgagccctacctccagtgaaattccggcgtcttgctgctccagcaacggatccattggcctcgatcaggacaggatcaagctcttagatctggaggtggagagcgcgcaagttgaaacgtcgacgtgcaatggtggtcatgaaattgagaggagagagatgaaacgttccagcgagcttcgcgagaattctca

SEQ ID NO: 43627 - DNA, 442 bp, Glycine max
  Clone ID: LIB3093-017-Q1-K1-F2
cataactagcaaaaaaatggaccttctcctaaattgcctaaaccttaacaccattgctattgcatcaatcctttctctaatcttcttatgtttgtttctatatcgtaaaaattctcgtgggaaagatgctccagtagtgtctggtgcatggccaatacttggtcacctctcattgctgaatggttcacaaacaccacataaagtgttgggtgctttggctgacaagtatggacccttattcaccatcaagctcggtatgaaaccggctttggtactcagcaactgggaaatgtctaaggaattgttcaccacaaacgaccttgccgtttcatctcgccctaaactcgtcgccgttgaagtcatgtcttacaaccaagcctttgttggcttggcaccgtatggaccctattggcgcgagttacgtataattgtcacgttcgag

SEQ ID NO: 43628 - DNA, 415 bp, Glycine max
  Clone ID: LIB3093-017-Q1-K1-F3
tctacacagctctaatatggtgcagggttctagctttcttagttgcttcccaagctctacgcatagtgacattttatgctacgcagcttcctggtccaaactatcattgccgggaggggtctaaacttgctacactgcctcgtccggatagtgtctttgaagtcctcttgattaattttccacaagatgcgatatatggatgcggtgatttgatattttcatcacacatgatctttactctagtctttgttaatacatatcatagatacggcacacgaagatgtataaagcagctagggtggacacttgcagtgtgtcagtctcttttgataatagcatcacgcaaacattacacggttgatatagttgttgcctggtatacggtgaatttggtggtatttttcgttgagaagaa

SEQ ID NO: 43629 - DNA, 442 bp, Glycine max
  Clone ID: LIB3093-017-Q1-K1-F4
ctcagttctctcgttagtattcttccaatctccgtcgatcaccactaacaccaccatgtcgtggctcctccgatccaccaagtcaaaactcctctcttcctcatcttcactttctagaaccttcccctctctctcacgctccggccccacacttgacctccctcagatcggagccatctctcccctccccgatctcttccaccgcaacaccgctaccatgcctttcgcgaaggaaaacgcttccggtggaaacttggccggtcttcccaaagttcctgcgaatacgcttggcagtgactctaatgcgatcaattctccgaggtacaaagcttctggactggacacgaatgtgctggctggagctagatgtgtctctggagtttgggctgcacagggtccaatgcgattggtagtcaataccgtgatggctaagagttttgag

SEQ ID NO: 43630 - DNA, 405 bp, Glycine max
  Clone ID: LIB3093-017-Q1-K1-F5
ctcaaacgtatcgagccagcctcacaagcttgggttcttcaccgcgctccacccttcttccctgttccttcgtcccctccaattggaatgtgtttgtgacttcatatgctggtagttgacattttgaaattgctactgcggtgggagcaataatatattttgacatcatcatggagatacagacttgtggcatgcctattgactccttgctagagaaagcgctttgcatgaatattctgtcgtctgattactctaaggagctctatcgattgaaaacgtatcacgaagttattgatgagatctacaatcaagtttatcacgtgcagccattgatgactgggaactgtcgcggtccttcaacctcattttgtctcctgtacaagttctttactatgaagcttaccg

SEQ ID NO: 43631 - DNA, 433 bp, Glycine max
  Clone ID: LIB3093-017-Q1-K1-F6
atgatagtgacaagagaatccctgacatgaccataataaacaggcagcttggatggaatcccaagacttcactttgggacctgcttgagtccactctgacatatcatcacaggacatatgctgaagccgttaagaaagtcattgcaaaacccgttgcaagttaagctttttacagtgatggtgatgtgctacctttgagaagggtgttcttgtcttgcccaagtgttctgccatattatactggttgattttatataaaatcgtaaattttcctcctattggtttcgttagcctgtaggcaatatagcccccacatggagaagtaggaatttatacaagggcaatctgtgctctatgtaattttaatgtagagaccatgcgctgctaaacatgttgagacactttatatattacctagggaaagactttttct

SEQ ID NO: 43632 - DNA, 230 bp, Glycine max
  Clone ID: LIB3093-017-Q1-K1-F7
agaaaaagcgtgcgctcatctatcgtggaaatatttaatgtcaatgaatatcaggaagtctccaggcgggttgttaacgtacgcatttcatatgttcaaaattgaacccctgcaagtgaaaacaataaattctgtttccaacttctataaaaacgccaacttctttaacttaaagttcttattcaacatattctattttatgtacttattgagctccaaactctacctta

SEQ ID NO: 43633 - DNA, 288 bp, Glycine max
  unsure (1)..(288): unsure at all n locations
  Clone ID: LIB3093-017-Q1-K1-F9
ccttgtacccttggnnctttaaatagtnnttctggaagaggccttaatgatatgaaatttgcttggtccactattgatcccattattggtcnnccatttatcttctganntcgtgaaccganncttcaaatattattatatcanngatgcccaggagtaccttgcatgtattgcctatgtgccnnnttttccgtcttgggccatggcataaaaggacctttgcctgnnggtggtgtgtgggtttaatgggaagttccaaattgctaagtanggtcaatggaaattttt

SEQ ID NO: 43634 - DNA, 446 bp, Glycine max
  Clone ID: LIB3093-017-Q1-K1-G1
gcgttttgctgctgttattatgaggatcagggaaccaaaaactactgcactcatttttgcatctggcaagatggtctgcactggagctaagagtgagcaacagtctaaattggcggcaaggaagtatgctagaattatccaaaagcttggtttcccagctaaatttaaggattttaagattcagaacattgttggctcttgtgatgtcaagttccccattcgacttgagggtcttgcctattcccatagtgctttctcaagttatgaaccagagctgtttcccggactaatctatcgcatgaagcaacccaagatagtcttgcttatatttgtctccggaaaaattgttctgacaggagccaaggttagagatgagacttacacagcttttgagaacatatatccagtgcttactgagttcatgaaaaaccaacaatgattactac

SEQ ID NO: 43635 - DNA, 389 bp, Glycine max
  Clone ID: LIB3093-017-Q1-K1-G10
gctttagccatcactaacactcagtctctgtattggggctgagggcttcgggtaacgtttagggttcacgagtttaagatatcatgggtaaagagaaggttcacattaacattgtggtcattggccatgttgactctgggaagtcaaccaccactggccacttgatttacaagcttggaggtattgacaagcgtgttattgagaggtttgagaaagaagctgctgagatgaacaagaggtcattcacatacgcctgggtgcttgacaagcttaatgctgtacgtgagagaggaattaccattgatattgcattatggaagtttgtaaccaccaaatactactgcactgtcatttatgctccagaacattttgatttcatcaagaacatg

SEQ ID NO: 43636 - DNA, 418 bp, Glycine max
  Clone ID: LIB3093-017-Q1-K1-G11
cttgacgatataaatcatttgaaaaataaacgtattcgttcggtagcagatctattacaagatcaatttggattggccctggttcgcttagaaaatatggttagaggaactatatgtggagcaattagacataaattgataccgactcctcagaatttggtgacttcaactccattaacaactacttatgaatctttttttggattacatccattatctcaagttttggatcaaactaatccattgacccaaatagttcatgggagaaaattgagttatttgggccctggaggattgacggtgcgaactgctagttttcggatacgagatatccaccctagtcactatggacgcatttgtccaattgacacgtcggaaggaatcaatgttggacttattggatctctagcaattcatg

SEQ ID NO: 43637 - DNA, 439 bp, Glycine max
  Clone ID: LIB3093-017-Q1-K1-G12
tgaaaactatagataccagcccttctggctgaagtggcagttttggaagaagaaattgtaagacttgaagagcaggttgtgcatttcatacaggatttgtaccaggaagctgtctacatgtcatcttctatgaggaaattggaaaattcagtttccgctcctcctaacaagtcaaatccaacaatggatagtcccaagttggataaattgaagtctcttacccaaacaactggtaattcaacagcaacatctgcaactaatcctaccacaacactccctgatgataatagacaagggaaagagaaccaatcctgtactaattcttccaagagcaggaagcaatccttcaaccaaacgaacaaaactccaattaaaaaaattaacaatcaatcactgcagaaaaagttggatcatccaaaaaagaaggtgtgtcatgtga

SEQ ID NO: 43638 - DNA, 428 bp, Glycine max
  Clone ID: LIB3093-017-Q1-K1-G2
ccgtaacttaccgatccataaatacacacacataaccattttcattcaacatttttattttttatttttttgtatccgtgtaatatccacacattttcatttttcacattaaattaggtgaatacacgcattattattttttatgtacccattcgcgtgcgatagaattttctagagcaagagatttcggcgtaatgggtccaaacgctgcggcggcgaaacaagcggaaaagctccgaattgacggcaacacttacttcaaaaaagaccgtttcggtgccgccatcgacgcttacaccgaggcgattacgctgtgccctaatgttccggtttattggacgaatcgcgcgctgtgccatctcaagcgcaatgattgggagagagtagaggaagattctcggaaggcaattcagttggacagcaattca

SEQ ID NO: 43639 - DNA, 395 bp, Glycine max
  Clone ID: LIB3093-017-Q1-K1-G3
cccacgcgtccgggcatatatagtaggggagcatggggatagttcggtggcgttatggtctagcattagcattgggggtgttccggttctgagctttttggagaatcaacagattgtgtatgagaaagagacgttggagaacatacacaagtcagtgatagacagtgcgtatgaagtgatcaagctgaaagggtacacttcatgggccattgggtactctgtggctaacctggcccggtcctttatcaggaaccagaggaagattcaccctgtgtctgttctggctaaaggcttttatgggatcgatggagaagtgttcctgagtttgcctgcaatgattggtagaggagggatactgggtgtgaccaatgtgcacttgaatgaagaggagacac

SEQ ID NO: 43640 - DNA, 413 bp, Glycine max
  Clone ID: LIB3093-017-Q1-K1-G4
cgctctcatgctcaagattttaggcagcatggatccaagattagtgagaaagatgtggttccaaaacatgaagataaagctaattgttctgggtatcataattgccttgattctcattattgttctttccgtttgtggtggcttcaactgtggtaaatgagtcttcccacatcctgacttcaactgtggtatttgtctcctcacttgataagattgtcgctagcagattgccattgcctctactgtcaacatactgcttttgactttttgggatttacattcttccgacttctccgatgatgaatattatatggcattgcttgtatagtgcgaattatttagcctttatcatcttgcctccatagcataatgctcatctgacattctctataattcaggtgggagtttcatca

SEQ ID NO: 43641 - DNA, 119 bp, Glycine max
  Clone ID: LIB3093-017-Q1-K1-G5
ccctcgcatgcggacgtatataggctggaagcatgcgaattgttcagaggcgtgtgggtccagcacaagcagagggggcgtattctgctctgagctatattgaccatgaacagaatgag

SEQ ID NO: 43642 - DNA, 308 bp, Glycine max
  Clone ID: LIB3093-017-Q1-K1-G6
ccctcactcgcaagcaaatagattgaatccctggcgaggagaaagatggaggggatggaacaggatgtgtcgatgggagcgaacaagttccgacttagacagcccatggtgacggcggcgctgagcacaagacgtctgcagggactaccacgatccgtggcgggctccgctggttgacccaaccgagtttacggaacgggcgttttacacatcagggattgcatagtttgcggccacttttctgtttctctacatcaccgtctgaaccgtgatgggagtcgccggggctaagactatacagagtaccg

SEQ ID NO: 43643 - DNA, 306 bp, Glycine max
  Clone ID: LIB3093-017-Q1-K1-G7
tttcgttcagatcgttacaatctgaaccaggaggttctagaagctggttgagttcgttcggaggcgagcgcgagaggccggtgtaggagcgcaaaggatggtccataacggttcacgatctttcctgttcaccggtggccgcagcttccatggtcacgcctttcgtcgcttcgcccggttcggaccgggtgagctgctccaaccccggctcgaggctcattcttcgtcctatcgacggcacgtggaagccctgtgggaggctcgaggcgtggcgcgaacgcggcggctcctacagcctcggctacc

SEQ ID NO: 43644 - DNA, 437 bp, Glycine max
  Clone ID: LIB3093-017-Q1-K1-G8
cctcactccagccacacgcctcagtagaccatggcctcattgggtgggttacaaaatctaagcggcgtcaattttcttatcaaaaaagagggtccaaaagtcaatgcgaagttcgagctgaagccgccaccatatccactgtatggtttggagccggtgatgagccagcatacacttgagtttcattgggggaaacaccacaagacatatgtggaaaatctgaaaaaacaaattgctgggacagagcttgatgggaaatcactagaagagactatagtgacatcatataataagggtgacattcttgcagctatcaacaatgcatcacaggtatggaaccatgacttcttctgggagtgcatgaaaccaagtggaggtggaaagccattcgggtagcttctaaaactgattgaaagaaactttggctcatttgaaaa

SEQ ID NO: 43645 - DNA, 376 bp, Glycine max
  Clone ID: LIB3093-017-Q1-K1-G9
cgcttcttctattcactctgttacggtgcaacctatcagcctgcaaatccaatggcttcagagaagaaactttcgaacccaatgagggagataaaagtgcagaagctcgtcctcaatatctctgttggcgagagtggagatcgtctcaccagatccgccatggtgttggaacaacttattggccaaaccccagtgttttccaaagcaaggtacactgttcgttcctttgggattagaagaaatgagaagattgcatgctatgtcactgtcagaggtgacaaggcaatgcaacttttggagagtggtttgaaggtgaaggaatatgaacttctcaaaaggaatttcagcgatactggttgctttggctttggtattc

SEQ ID NO: 43646 - DNA, 231 bp, Glycine max
  Clone ID: LIB3093-017-Q1-K1-H10
ccgggttggaattacgcgttcgaacattcgttcatttacacttatgtccacttatcatccacaatattgaggagaccctccatgggggatggcacgcgaaagaggatcaccaccgccctcaccatggttagctcataaatgatcacaaaagataacaccatggtgtgcacaaatgtgaacacataggagaacttcaccttttcgagcacaaggagggacttgtggattaca

SEQ ID NO: 43647 - DNA, 392 bp, Glycine max
  unsure (1)..(392): unsure at all n locations
  Clone ID: LIB3093-017-Q1-K1-H11
gcaacacacacttcaatttatcagcatggcctccgttcagtgccacaaaacctgcaaagtgagctgccaacaggaaaaccagcacgcctcgtttgggcagaaagtttctgacttgttcaaagggcatcaacataatgaccacagctccaattatgccacccaaaccaaagtgctttcccagtcagggtcagggttaggccccttcaccaccaaaactcaaacacaatgcggttgcccccaaacacatctcagtaccactcatggctccaacacaaaatgccatggccatggccaagggagaattaagagggagcacaagagagggatgctgcataacatcaaagatcgcttatcangtgacaccatcagcgacagcagcgacagcgagagcg

SEQ ID NO: 43648 - DNA, 330 bp, Glycine max
  Clone ID: LIB3093-017-Q1-K1-H12
gcaacacacactccaatttatcagcatggcctccgttcagtgccacataacctgcaaagtgagctgccaacaggaaaaccagcacgcctcgtttgggcagaaagtatctgacttgttcaaagggcatcaacataatgaccacagcttcaattatgccacccataccaaagtgctttcccagtcagggtcagggttaggccccttcaccaccaattctcaaacacaatgcggttgccctcaaacacatctcaataccactcatggcttcaacacaaaaagccatggccatggccaacggagaattaatagggagcacaagagatgtatgct

SEQ ID NO: 43649 - DNA, 396 bp, Glycine max
  unsure (1)..(396): unsure at all n locations
  Clone ID: LIB3093-017-Q1-K1-H2
ctttgaatgaggatgctgctaataatgatcaattggatgcctggacagcccacaagactgaagcaggaattatatactattataatgctgtgacaggagaatcaacatatcataaaccttctggctttaaaggggagtctcaccaagtttctgctcagcccactccagtttcaatgattgatttgcctggtactgattggcggttggtctccactagtgatggaaaaaaatattactacaacaatctaaccaagactagctgctggcaaatcccaaatgaggtggctgaattgaaaaagaagcangatggtgatgttaaaaaagatcatttaatgtcagtttcaaatactaatgtattgnctgatagagggtctggaatggttactctgaaatgct

SEQ ID NO: 43650 - DNA, 441 bp, Glycine max
  unsure (1)..(441): unsure at all n locations
  Clone ID: LIB3093-017-Q1-K1-H3
tttcatttctcagagagtcttcccgtctcttcctcttcacttcttataccgtcgcccccaaacgacgccgttttctgttctcttatgtaaacgccgttcgagaacaaaccaaaaaaagaaaagaaaatcagttattgccgttgttgttttgtttccggttcggtttatttcaatggatcgggcggcgttgacggttggaccgggcatggacatgccgatcatgcacgacagcgaccgttacgatctggtacgcgacatcgggtccggaaatttcggcgtggcgaggctgatgcatgataaacaaaccaaggaactggtcgccgtcaagtacatcgaaaggggtgataagattgatgaaaatgtaaagagggaaatcattaatcacaggtctctgaggcatcctaacatngttagatttaaagaggtaattttaacacctac

SEQ ID NO: 43651 - DNA, 283 bp, Glycine max
  Clone ID: LIB3093-017-Q1-K1-H4
cgtcatatttcagagagtgttacactcacctcactttggcctatcataccgactggccacaacgactccgcacactgtcatctcatggaagcgcgcaccgagggcaggcacaaaaaggaacagatgctcaggtgttgccgatgctgcattgccctcgggacggtacataacaatggatcgggcgacgtagacgggtgtaccgagcatggacatgcacctgatggacaaaggtgtcggttcacaactgatacaacacacatggttcggaaatgtcaactgatca

SEQ ID NO: 43652 - DNA, 300 bp, Glycine max
  Clone ID: LIB3093-017-Q1-K1-H5
gaaataatgtccgggatcatccacaagattgaggagaccctccatgtgggagggcacaagaaagaggagcacaaaggagaacaccatggtgagcacaaaggtgaacacaaaggagaacaccatggtgagcacaaaggtgaacacaaaggagaacaacaccatgtggagcacaaggagggacttgtggataagatcaaggacaagatccatggtgatggccatgacaagaatgaaaagaaaaaataaaaaccaataaatgctaaaacacaaaaagccatggccatggccaaaggagaatta

SEQ ID NO: 43653 - DNA, 383 bp, Glycine max
  Clone ID: LIB3093-017-Q1-K1-H6
cttatttctctaacatggcttcaaccgcttctgaggttagccaacaagtccactccaactgcagcagaccaattttcaaaagcgtgaaagcactaactgaatcaccagaactcacttgcctaccaccctcttacacctactccaccaactcatatgatgaaatagtggcagacccatatgaagatgatccaattcctattattgactattcccgtctggtcactggaacacctgatcagagggccttgaccatccacgacttgggcaaggcttgtgaggagtgggggttcttcatgctcatcaaccactttgtgtcaaagaccatcatggagaaaatggttgatgaggtttttgctttcttcaatcttagagaggaggagaag

SEQ ID NO: 43654 - DNA, 425 bp, Glycine max
  Clone ID: LIB3093-017-Q1-K1-H7
gagcagagtaccttgtgaatacaaaaaacagaatttagccgttcgtgttgaagaatcaagcaagaagccagaatacttagcaattaaatttttgtatcaagggggacaaacggagatagtagccgttgatgtggctcaggttgggtcttcaaactggagcttcatgagcagaatcgacggtgcagtgtgggacacaagcagggtaccccaaggtgcattgcaatttaggttagtggtaacggcagggtatgatggcaagtggatttgggcaaagaaggtcctacctgctgattggaaaaatggacttatatatgattctggccttcagataacagacattgcacaagagggttgctccccctgcgacgatggaacctggtcatgattcattgctttgctgctgaagaataactcacatatacaca

SEQ ID NO: 43655 - DNA, 342 bp, Glycine max
  Clone ID: LIB3093-017-Q1-K1-H9
cttatgacagcgctgactgcataatatacaatgaataactggaggcgaggtacgagagaacataggaaacaactgctacttgacggcttcaggaccgaggcacctaaaaacggaccgactgggaaagtcgacggatagtgcattcacaatcgagaagtggtaacagacacatgataaaacgcatctgctcaggagaaaaggaaaccaagaagatgatcattttggacgtttcctgactgaaggggggtgtacccggacggacaagaagcccaaatctccaagccattgactgcggctcgaaaggctagaatgggatagatcaacttagctaacattcaatga

SEQ ID NO: 43656 - DNA, 371 bp, Glycine max
  Clone ID: LIB3093-017-Q1-K2-A1
agagacattgtggttacccatagtctcatattgtgtcatacagcaaaaaattcagcaacacagaacaatgggttctcttatggcaggatggtattctacccacatggatcctcaatcagccacacttaaaaggaaccgctcactcactaaggatgaaattgatgcttactggaaatcaaagaagaagatagaggaagaacaccttagagctatttccaatgtgtcagagactattcaggctagcaaaaacacagagcctgaaaagaagttgcagaagtcaatgaccatgccagttacccgtgcacgggactacttaaatatggtggacattgacacaagtttggagcacctattttagcgaaatggctggt

SEQ ID NO: 43657 - DNA, 227 bp, Glycine max
  Clone ID: LIB3093-017-Q1-K2-A10
tcgaccatgcgtccgacgtatatctagtcgtttggagcgacccgagttacactctgtgtgacatgttggtttaccaggagctccttacaggtgatgagcctctatgcgactccttccgttacaaggaaattgagaatggaatgctgtgggaagttgatgggaagtgggtcgcctaaggagcaggtgatgtcaacattgtggcaaacccttctgctgagggtagacga

SEQ ID NO: 43658 - DNA, 375 bp, Glycine max
  Clone ID: LIB3093-017-Q1-K2-A12
tcgtccacgcgtccttccacgcgtccttgtagattttgatgcccctttttttacatctggttacgtgataatagttgaggtgaaagagtttttaaacagacttctttcccgttttaactactcattaacagctttgttctgtggttccacataatcactctctgaggctggaaatattcagttgtttaaatcctatctgactgatttgtcatgggcttgtcagatattgagtaatttcttatttttgatggatttttgttgtttattttttttattcattttttaatatttacaatgatctttttaaattttatttttcatctttttttttttgatatttaaataatttctttttatgtgacatctattttttta

SEQ ID NO: 43659 - DNA, 357 bp, Glycine max
  Clone ID: LIB3093-017-Q1-K2-A3
atgagttccatacagagttgacactttacagatatcatcaagtgtatacaatctgagaaagtgaggtttcgaggggtgaatctttccggccttcacctctctaaactggatttatcttatgttgatttcagctatgcttgtcttaaaaacctgttcttctgacttgcaaagcgcctatgtgcaaagtttctagatgttgatgccgctggctacttcttttacaatgcaactcttcatgattgtgaatttactgcaccaaatgtttggaaggcgtttttgtcttttgcttgccttcaaagtgcatatcttcaagatgctttgttattagactcttgcttttttgaataagttctttat

SEQ ID NO: 43660 - DNA, 409 bp, Glycine max
  Clone ID: LIB3093-017-Q1-K2-A5
gattgacatcccttacgcatcttcagaagacttgctgcgatatcatctaggcctgaccaattgtcaccacatgcaagggaaagatgaacctcacatactccaaccttcgaccccttgaagtgttcatgtgcagcattgtgcgcaagatggggtatggtgaaggcttccagtggctaatccaatacatcaagtagagtccttattcattcttagttcccctttctcttgtcaactagccctgtctgcagttacatcagaagataattgacctttgtttttgcttttgatgatttttgattggattatttgatacaactgcagtgatattacatgataaaatttgtatcttcaaagattttttggggggaatgttcttctttgaaatacttaattctcctttaagattgtt

SEQ ID NO: 43661 - DNA, 334 bp, Glycine max
  Clone ID: LIB3093-017-Q1-K2-A6
cccacgcgtccggtgagtgtgtgctttgcggctgcaagaggagatgacttgttgttacatcaattactcaaacggggcatggatgcaaatgaatccgacaacaatcgaaggacagctttgcatatagcggcatctcaaggaaaagagaactgtgtttcgcttctgttagattatggggcggatcccaacattagaggttgttctacgtgcagatttggaaggtaatgtgccactatgggaggctatagtggaaggacatgagtcaatgagcaagctgttatcagagaatggagcaaacttgcaatgcggggatgtgggtcaatttgcatgtaat

SEQ ID NO: 43662 - DNA, 285 bp, Glycine max
  Clone ID: LIB3093-017-Q1-K2-A7
cccacgcgtccgcttttgtgtgctgttgatttatcccaagggctcaaagcaacagcatccacgaggaggtggtaccaaaattcctcatcctcccccaacaccactaccaacaacaagggaattccaacaacaacaacatgggagagaacaaaccatcagaggttaaggatttccagatagtggtagctgcttataaggactagagcaagaatcaccaacagtttgcaccaaagaagagttccaacaaggacaggcacaccaatgttgatgtcagggggaggagga

SEQ ID NO: 43663 - DNA, 304 bp, Glycine max
  Clone ID: LIB3093-017-Q1-K2-A8
caacactcatatccttatcctgtttctttcaatggaagtcatttctgcttctagcttgaatgccaacgctccgatgttcgtgccactcgcctatctgacggtggaggatttctccgaccagtggtgggacctcgttcactcctccccctggttccgcgactactggctccgcgagtgcttccaagatccccagttccaaaacgacgacgctttcgacttcgactttgacctatatctccaagatgaagatgaaagggtacgaaaggaatggaaggaggtggtgtctttggtgctgctgaaatgg

SEQ ID NO: 43664 - DNA, 306 bp, Glycine max
  Clone ID: LIB3093-017-Q1-K2-A9
ggtcgaccacgcgtccgggctttctttattttcttctccctcttccttcttcttgtttcatctagcacttacatatcatcgctgcttgcgaccaaggcaaggcttcctatctctccaaagctctctaaactggatttatggcatgttggtatgagctattctcgccttaaaaacgtggtttgttcactagcaaacctttaagcgttctaatttaaaagatgtagcatgccggggcgccatcttcacaaagcaaccttgcacgaatgtgtatttactgcggcaaatcctcgtggtgctttattggct

SEQ ID NO: 43665 - DNA, 444 bp, Glycine max
  Clone ID: LIB3093-017-Q1-K2-B1
ctgaccgagtccgagaggcatcatggcgactctggattccgacgtgaccgtgtttccggccggcgaatcctccagcggcgccggtccttcttcgtccaccaagaagccgaagcgtttcgagatcaagaagtggaatgcggtttccctctgggcttgggatattgtcgtggataattgcgctatttgtcggaaccatatcatggatctctgtattgagtgccaggccaaccaggctagcgccactagcgaggaatgcactgtagcttggggagtttgtaaccatgcttttcacttccattgcataagccgatggctcaagacccgtcaagtatgtcctctagataatagcgagtgggaatttcagaaatacggtcactagaactttgatgcggctgatctactttcaacttggacattgggattgtagcatttttatcaaattta

SEQ ID NO: 43666 - DNA, 274 bp, Glycine max
  Clone ID: LIB3093-017-Q1-K2-B10
gtgaactgatttcgttatcagaacttgaattgttggattgtgatacaggatataacgaatggtgcaatggaggacgtatggactatgcatttgagttcattatcaacaatggcggcattgattctgaagaggattacccttaccgtggtgttgatggtagatgtgacacatataggaaaaatgctaaggttgtttctattgatgactacgaagatgttcctgcctatgatgagttagctttgaaaaaggctgttgcaaatcatcccgttagtgt

SEQ ID NO: 43667 - DNA, 367 bp, Glycine max
  Clone ID: LIB3093-017-Q1-K2-B11
ggcatcttcttctggtagtttagacacctcttcaagtgcaaactccttcaccaacttcaccgggctccacacacccgggcatgacgacttctttctctgaccttcttgcttctcccacagacaacaacaaaccaccacatggtggtggtggtggtttgtctgagaaaactgtctctggtgtccccaaattcaagtccacaccaccaccttctctgcctctctttccccctcccatttctcctttttcctacttttctattcctcctggtttgagccctgcttagctttttgactcacccgtttttcttaactctttcaacatttttcctttttcaacaacttgaacatttttttttcggaactttaa

SEQ ID NO: 43668 - DNA, 227 bp, Glycine max
  Clone ID: LIB3093-017-Q1-K2-B12
aataagcggggcgaccgacgcgtccgttcttctgtcctctccacatgagtttttttttctacttaaagatacttgtatacagggcattggtattcagtgcacgcacaggagctcccatatctcttctattctattacagttagacatcctcttatggttgttgtcactgctgatataaatcttattgtttacaacttgcaaaaccctcaatttgattttaagagtat

SEQ ID NO: 43669 - DNA, 282 bp, Glycine max
  unsure (1)..(282): unsure at all n locations
  Clone ID: LIB3093-017-Q1-K2-B2
atttacttgtttcgaactccgcttttttgttttttactcagacgncacctntatggttttggtgcaagtttcaatagtcatagggaattattttatcatcaaattatattctcgttttggattaaaaataccgatctaattttattattatctttggaattgtttttatttttgtcattcctaaagacataactatttcctgtatatatgttataatattaaggaaattttttatatttcttctatttattaaagcaattcatcattatatttttttatact

SEQ ID NO: 43670 - DNA, 370 bp, Glycine max
  Clone ID: LIB3093-017-Q1-K2-B3
tcactgtgagagcggcgaagaagaagaagaacaataatgaaggacgccggaaagagccacaaggcgaatgcaaagctgtcgccggagacgcggaaggatcggaaatcggcgacggggctgagtggatcgccgaagaagggaggccacggcgggaagttcacgtggatcggcaacggctacgagaacgtctagatggagcacggtgctatggacgccaaggacccgaacttcgaggatccagcggagatcgccgccgtgtgatcgcggtggtttccggtgacgagatctgtacatactaataattgctaagagacgcgggtttcgaattcaataatatgaagcaagtaggagaagaagcgctttctgtgat

SEQ ID NO: 43671 - DNA, 412 bp, Glycine max
  Clone ID: LIB3093-017-Q1-K2-B4
ggattctcaccaaccagtggccccaaaactcttctcgctttagggaaacattgcaggagtatgctcgagaagtggaaaagctagcttacaagttgttggagctgatttcactgagcttgggtttggatgctgaaaaattccatggctgtttcatgaaccaactcagcatggtgaggctcaattactatcccacatgccctttccctgatttggcacttggtgttggtcgccacaaggactccagtgctttaactgtgcttgcccaagatgatgttggaggattacaagttaaaagaaaatcagatggagaatggattccagttaaacccaccccaaatgcatttattatcaatgtgggggatatagttcaaggttggagcaatgacaagttttaaagcgtggagcacaaggt

SEQ ID NO: 43672 - DNA, 329 bp, Glycine max
  Clone ID: LIB3093-017-Q1-K2-B5
gcagtttcaaagagaggatttgggattgggtttgcgagggattgcgctgcgtctcttcctcgggtctttcgattcatgcctcaggcataaggttccaatccaacaacctcagcctcacactcacacatacactcatctgaacgcgtatcgtccctcccatggcttcaaagcgcatcctcaaggagctcaaggacttgcagaaagacccaccaacttcttgcagcgctggtccagtttctgacgacatgttccattggctagcaacgattatgggtcctgccgatagtccttatgctggaggtgtattcctagtcactattcactttcct

SEQ ID NO: 43673 - DNA, 397 bp, Glycine max
  unsure (1)..(397): unsure at all n locations
  Clone ID: LIB3093-017-Q1-K2-B6
gcgctataattgaaatagataacccggccagtgtctaaaggttattggcgcagctgtttgacttggctctgagggcaactgtgccggatgagcgagatnttttgccgttaattgatgcttgtgctgttaaaggtggcgtataatttggtgattatcaatgtaataatgcaatgggtattttttctaagatgaagggaaagcatactggttttaggggttccccatcatttgttcatgctatcgttaacaatcttccttcatttgtaatgatttaattcttgctcttataattttcctgtatattttaattttttattgtgtcaataaattttttgcttgatttcttatatataattgcttatttaattgtattcaaatttttgtgcactttttattt

SEQ ID NO: 43674 - DNA, 439 bp, Glycine max
  Clone ID: LIB3093-017-Q1-K2-B7
gtgaagagaagaaggaaaagaaagataaagagaaggagattaaaaaggaaaagaaggataaagatgaagaaacagacacattaaaggaaaagggaaaaaatgatgaaggtgaggatgatgaaggaaataagaaaaagaaaaaggataagaaggagaaagagaaggatcacaaaaaggaaaagaaggataaagaggagggtgagaaagaggatagcaaggttgaagtttctgttagggatattgatatagaagaaataaaaaaagaaggtgaaaaagaagataaaggaaaggatggtgggaaggaagtgaaagagaagaagaaaaaagaagacaaagacaagaaggagaagaagaaaaaagttactggaaaggacaagaccaaggatcttagcactctgaagcaaaaacttgaaaaaaataacggaaaaatacaaccact

SEQ ID NO: 43675 - DNA, 293 bp, Glycine max
  Clone ID: LIB3093-017-Q1-K2-B8
ctgactcgtgggcggacgcgtgggtggtcttagaggatataattgaatacaatgatcttgtaaagtcagttcccgatgggaactgttcaaataatgatgaacacaccaatattcagacagttcatccagataaacaaaaggatgtgccccccaaaaatggtaaatgcaaaataaaagtacataattctgtttgaaatatagatatcacggttcatattaaggacaggcaatcttgtactttgagcatatactgttttgactttgttatagactagattaactggcagaagttc

SEQ ID NO: 43676 - DNA, 256 bp, Glycine max
  Clone ID: LIB3093-017-Q1-K2-B9
tttctttttttatcaactctaccttactttctaatccaaaccccaatactttcgtcagatttttcccccttaagcacgtctaaaacgggttatccaaacacataattccatccaccacttttcttttcaatccccaactcaaatctgtgaaaaaatctcatttttaaatattatttttacactactgctagtaataataaaaaaaaacaattataaagcatcagaatgtttttttttccttttttcctttctttta

SEQ ID NO: 43677 - DNA, 394 bp, Glycine max
  Clone ID: LIB3093-017-Q1-K2-C1
gaacaaagcacttagtgcgtattcaataattacgaaaaaccaacagcgagtgttgtttttgtttggtccaggctggaccagggaatgaatagagatgagaggctttcggttgaagagaactgagttaagcggcgaagccaaacgcaaaatccgctgcagaaattgccaccggaagcacctttatgtcatgtgcaccattcacagtattacatacacgcacttctatttttaataccgaactcaaatctgtgaagaaaatctcaatttctaaattgtaattcttagcactactgctagtggtttttgaaaaaaacacttagaaagttgtggagtgcgaattcttctgtttttcgttagttttacttttaaagatgggtgtgaagagcaacgtttg

SEQ ID NO: 43678 - DNA, 334 bp, Glycine max
  Clone ID: LIB3093-017-Q1-K2-C10
cccacgcgtccgtccacgcgtccgtttgatttaaagtctgcacgccaggtatcagagcttagactcagaaataaccgggtgcaaaagatatggcatggctcactaccaatcccagatttgtgcttcagtaaattgcactccttgattgtggacggctgccaatttttatcagatgcagtactacctttcaatttacttcgtttgttaactgaattggaaacattggaagttcgagactgcgattctgtgaaaaccatatttgatgtgaaatgttcaagacaagacagaatattgacaactttggaaccaaccatttttcccctcccttttcctt

SEQ ID NO: 43679 - DNA, 206 bp, Glycine max
  Clone ID: LIB3093-017-Q1-K2-C11
tctcccacgcttcctttcaaactcctattgtagattgtatacctgcctaaccatttttctggctttggttgcactggcatggcgaatcggaataatttgagtttttcttcttcttaaaatatcaagcagcattggagaccaacttcttttcttttcaactgaaatggttctctttttatccttagttagcagaacctatttccaat

SEQ ID NO: 43680 - DNA, 409 bp, Glycine max
  Clone ID: LIB3093-017-Q1-K2-C12
gaaaaaaaaaactcatacaccttcatgtacttttatctttctttgttagtatttggtgctacgattttacattcttgggatctctacatatttcattagtcatggcacctcaagcagtttccttcaagtccttcgccgttgctcttattgtggcgcttttcttctccgccttcgctctggacttaatttcggggcaatcgccggtgccctctcctttctcctttacctttttctttttttctatttttctggtccccttttttgtggtattttgttcattcttttttattttctttggtttcattgttcttttcttctatttaatttttataaatatttgttcttatttctttttttttattattttttttttttccttatcgttcatttatttcgctttttttttttt

SEQ ID NO: 43681 - DNA, 315 bp, Glycine max
  Clone ID: LIB3093-017-Q1-K2-C2
ggtcgaccacgcgtgcgccactcgttcgccacgcgttcggattctttatttttatttattaattgttactgtgttactgtacaggattggctacttatggagagaaagagtggtacttcttttcaccacgggaccggttttacccaaacggttcgaggccgaaccgggcggctggcaccggttacttggttgcaaccggcgcggattagcccattgtgtatcccaaaccggttgggattaaaaaagctttggtgttttacgcaaggaaagcttctatgggacaaatacattttgttcatgcacgtgtatcgtttt

SEQ ID NO: 43682 - DNA, 436 bp, Glycine max
  Clone ID: LIB3093-017-Q1-K2-C3
cccacgcgtccggaatcagaggaaaaaatcacataatttcgaattcaaaatttgaattttcgtgtataaaacgaagagaagagaatggaatcggaggatttggtgaagcaggaattggaggaattgcagaaacaattggggaagaagctaaaatttgaagcctctatttcgtctctaaaatctcttctccaacgcacttacccatcatcttccccagcgcttcgcaaatccttttatttggttatatgccgagttgctactgtgttgaagaccaggtatacagcaccaggtttctggaatgctggactgggcctttttgagcaggctcatttgcttgtttctgaaccttctgagaaggaaaagttgaaagcttgcattgctcaagccagggaacattttcatttaaaagattacccatcacaagctttacaacctt

SEQ ID NO: 43683 - DNA, 309 bp, Glycine max
  unsure (1)..(309): unsure at all n locations
  Clone ID: LIB3093-017-Q1-K2-C4
cccacgcgtccggnggtttatttaagtggttcttctcatggatagaggactgtggattcgaacagttccctaccttcggattgcaagcttggaagcaaacattctacttcgattttagtatgacttttgtgggagcagggatgatttgctcccatcttgtgaaccggtctttgctccttggagctgtgctctcttttggggtcatgtatccgctcattgatcggcttaaaggagactggttccctgacaatttataagaaactaacatgaagggcttatacggttacaagttttttgtttccattgctc

SEQ ID NO: 43684 - DNA, 430 bp, Glycine max
  Clone ID: LIB3093-017-Q1-K2-C5
tgaattcccgggatatctgtgtatcaattttctctcaacatcctatgtttgctgctgtttacatctgatcagagttcatatatatggcgaataaactgaatataaggctaggagaaccaactctggtgccaccagcagaagaaacggaaaagggtctttactacttcctttcaaaccttgaccagaacatagcacatccagttcgaacggtttacttttataataagtctgcatgtagagggaacgaggaagcagcacaagtaataaaggatgctttgtcgaaggttcttgttcactattaccctatggctggaagattggccataagttcagaagggaaactgatcatagagtgcacaggtgagggtgttgtgtttgttgaggctgaagaaacaaactgtgtgataaaagacctgggagaattgacaaa

SEQ ID NO: 43685 - DNA, 448 bp, Glycine max
  Clone ID: LIB3093-017-Q1-K2-C6
cgtttctctctctctctctctgtgttataaaatcaaaattgagtgagtgaaggtggttgtggcgactcagatcgattgattgcggttgcaaccatcatctatggtgcgcccgcggccgatcattgattagctgtagttgcgctgtctcactgctttcatctcacgcgcgcacgttactcgaactgaatgtcatctttttttcggtgggccccgccacttgcgggtttatcaagtaacctaataagatatttattattttaagaaaataagcatcgataaatctttattaatttgaaataggaaataatatactacctacgtccgaatatatataatcgtcccgatacacatatgattttttaattaattcacatcttttacgaaaattgattaatttaaccagtgacattaataattttgtaaaaatattctaaaaatatttgttaaa

SEQ ID NO: 43686 - DNA, 379 bp, Glycine max
  Clone ID: LIB3093-017-Q1-K2-C7
aagccattggtgagttccaacttctttcatgtgtttctttgcttgtagcttccctgagggatatactatcatatatctcagtatatcctttttcttttgattttttgtttagttgaagttggatcagtgtgccacaatgttaaacacacttcacttgtgattgggatcgggatctttctcttatatccactattccttgttttatttaatgtggatttagtgatttactgaggaatacacccttcattctttctcacttgcttacttctcattcggttcaatgatctattggtttttgtagtcagtacatccccctctttgctttacgaatgcttttgtgattattactatagcaaatttggaatattttattacttgg

SEQ ID NO: 43687 - DNA, 381 bp, Glycine max
  Clone ID: LIB3093-017-Q1-K2-C8
aaccctacttatacttacccccttttctctcttaccttatcacctaatccttatcctgccagaccatattaccatgtgggcctgcgcatcttccctcgcactcccaaccctcactctccgaacccgacaacctctatgttctccccaatgcttctcctcgtccctctccctcacacccaacaacaaacccatttccatttctgctgtttttctcaaaccaacaactctgtcgtcgtctcgcttcgttccccacgtcgtggtgtcgtcggatttggggcaggaggaggacaccttcagtgacggagactgccccagctttttccccgaccttaagctctttgtcgggaatttttcgtttaacgtctacagcgctcagctcgc

SEQ ID NO: 43688 - DNA, 340 bp, Glycine max
  Clone ID: LIB3093-017-Q1-K2-C9
cttaaaataaacaaatgtttctctttctctctttctgtgtttgaagaacaaaacgacacttcgtctcaatttcttcggtgcttctgagagagaaagaaagtgagggacttggagagaatttctgtcataacagctcattgagtcaccaatcaaccatgtctcttgggtatgccgagaagctttcctacatataatatgtgggcaacgttggaatggtcgaatatttcgacccatcccatgttttgcgagagaatatagatcaacttgcttttcatgtataaaaagaggtagcttctagtggtgattactggtgcaggaatatcaacttcttgtgggattc

SEQ ID NO: 43689 - DNA, 270 bp, Glycine max
  Clone ID: LIB3093-017-Q1-K2-D1
ggtcgacggatgcgtccaggcatgcgttcaggttacgaagtctgaaccatttttctttttatgacatgaaaagatgagggaacaaagttttggagataagatgcatggaataacaaactgtaggtctcactgcaactagcagacacaaacacattcatttcatgtgagtctacaatcaaccatagctctagggtatgcagagaagctttcctacataaaagatgagggaaacgttggaatggtcgaatatattgacccatcccatgtttt

SEQ ID NO: 43690 - DNA, 309 bp, Glycine max
  Clone ID: LIB3093-017-Q1-K2-D11
tcgcggacgcgtggttgtagactggtgtgctggtttgctgcagacactgatgctattggactgaatggattggaccagggggtactgctcccttttggtcatggtcttatggtccgtggctacttgcctgttgtaaatagcctatccaagggtcttgatattcgattggggcacatggtcacaaaagtagttaggcgatataatggagttaaggtaactgtggaaaatgggaaaacgttttttgctgatgctgcttttattgctgtcccacttggggtgcttaaggcgaagaaaatattgttttgagcc

SEQ ID NO: 43691 - DNA, 409 bp, Glycine max
  Clone ID: LIB3093-017-Q1-K2-D2
tccacgcgtacgaactggttcactgtacttgtattttttcccattacagtcacgcacaccatgaacgtcgcttctgggctcttgttccctcatctctactgtacaccctacgcttcatttcttctattctctcttctacttctgtctctgcaaaagttcaagccatttatcttcacttcgtttcatctcatagtcctacacctattcacaattccaacaactcttacaccaaacacacatgcttctttttaagtactccatatctcaacctctggttctggttcttcaccatgaaccaataacttcaacctcgtacttggcgtttgtttttgtgtttgtgcctgtcttggtacatggcgtaccatatccacaaccttttacagcatgacctttcactccaccatttcct

SEQ ID NO: 43692 - DNA, 379 bp, Glycine max
  unsure (1)..(379): unsure at all n locations
  Clone ID: LIB3093-017-Q1-K2-D3
nggaaatttatcagttactgaaattgtggtgctctgttgatcatgttaaagaatgcagtcatgaggaacatgattcagacgctgagaaagctgcttctaataattcactggaggatactccaaagaagtcttttgcatccattgtgaatgcactaaaagaaaatgctgctcccttccatgtgagggtttcccctgtgaaacttcttgaacaaccacgtgtttctagtatacctgcaccagaagcaccatctcctatcactgacagtccaccagaaaagaataatgaggaaggaagttaggcttatgcaatatttgttgcaaatttgcccatgaatgctacagttgaacagcttgaacgtggttttcagaaaattgggcc

SEQ ID NO: 43693 - DNA, 371 bp, Glycine max
  Clone ID: LIB3093-017-Q1-K2-D4
cccacgcgtccgcttttttgttgttgtggtgtttcatttgtgaaactaacaacaacacaagggcatcatcatggcagctgcttgcccaatggcaagccaactcaagtccaccttcactaggactcttgtagctcccaagggcctctctgcctcttcaccacttcacctcgtgccttctagaaagcaatttagcttcactgttaaggccatccaatcagagaagccaacctatcaagtgattcagccaatcaacggtgacccattcattggaagcctggaaaccccagttacatccagccctttgatcgcatggtacttgtccaacctgcccgcatacaaaaccgcagtgagcccactactaaaagggatcg

SEQ ID NO: 43694 - DNA, 436 bp, Glycine max
  Clone ID: LIB3093-017-Q1-K2-D5
cccacgcgtccgatagggttgaggagaatatctgctgcctcatgcttggctggcacactaggccactcatcgctacctccgcttggaagcttccctcctccagcgagtctagtggcttgactcagtgaatgtaaaactatagattaattggacttgttccagtgaactgagtcagtgaccgagtcagtgagccttccaggcagcaagaggataaataaatgagagggtgaacaaaaaaaaaaaaaaaaagtaaaaagaaaacccaaagaaagactgtaatttgtaatttgtgctctcataattaccgtttctcctctttagtgttttgttttcctttctctaaattattattattatataaattggttaattcttcaggattattatgtccttttcgttttttttaatattttttatttccattttattttttatc

SEQ ID NO: 43695 - DNA, 388 bp, Glycine max
  Clone ID: LIB3093-017-Q1-K2-D6
gtggaatccgctcatggacccttcttctcctttttcaggggcctcaagtgaacatcaaaggttaaaactggcaaatcgacaacgctgccgaactgaagttttaagctttgatggcagcattcttagatcttatgctttaactcctgtttatgaagctgctacaaggcccattgaagaagctactcaagccaacacaataaaagctgaaacagatgagtgtgatagtaaagaagtaatccttcctggagtaaatcttatttttgacggttctgagttgcatccgtttgatatatgtgcctgccttcaggcacgtcaacctatttctttaatagcagaagcaacagctggctcatcatctttagcaaccaaataattctgcaattaacat

SEQ ID NO: 43696 - DNA, 454 bp, Glycine max
  Clone ID: LIB3093-017-Q1-K2-D8
cggacgcgtgggcggacgcgtggggcagtgtctcaacttttagccaagtacttatgaaggagaaatgaaatctgcagccattaatgaaggtggcggtcagaatcttgatctcaatttgggcatagcaaccccaggacctggtcccaaggaaaattgggggcaacttcacttcccctccatcccttacaacacacatggtggaagaagttcaaagatggaaaccaatgttaattctggaattggtaatccatctttgaaaaggatggttgtaactgaagatcgtccttcattatggaatggcatgtctcctaatttctttcccaatggggaaagagcagagagaatcggcattgatccttcaaaaggactccccaattgggcgtggcaaacacatggccaggtcaatgctaccccagtaccatcgttctttgctgcagcatcatcaaggattctc

SEQ ID NO: 43697 - DNA, 440 bp, Glycine max
  Clone ID: LIB3093-017-Q1-K2-D9
tccttataatatgttgcatcaaagggattggcctcaccttgctcctaatgataaatgaacctataaggtcagccatcaccatcatatgcaaaagattcaaaggcttgattattggtagtatagctttctgagaagggaggagctgcattgatgattaccctgtaattcactcaaaaggattattgaggaagtatatgaagaagagtatatggagctagattacaatcttagtcagtagtgtgtatcctgtgggagatttacaaacttattggtacacatctctaattcctgtcacctaattgtatgacgagaattctggcttatttcttctggtctgcctagacagctgattctaaagtaaattcttaactggttctctgattcataaattatagattcctattatattgtgtaatcctgaatgtgttaactctcttttt

SEQ ID NO: 43698 - DNA, 442 bp, Glycine max
  Clone ID: LIB3093-017-Q1-K2-E1
cattgacccatggcaatattggctcacatgatttacagggtactcagacgtcgtgttcttggaatagtgatgcaaaaccctgggatattggaggatggtattctacatcatatgcacgtgttgaatccacagaactgtagaactctcttggaattgatggttctggataaacacctaattgtgaagaagatgcatcaaaatatgttagatgggggaccctccttacttccggaacttatcggaagcaaatccagtcaaccgaagttgatatgccgagagcatttcttcgccaatcccatgagtacttccttgttgtagggaatctgtggtattgacattaaacattagtacttgttatataaaaaacatatttataggaaaatttggatactggtttaagttatatttgggaagaattgtaacttaagcaatcctagtaaat

SEQ ID NO: 43699 - DNA, 365 bp, Glycine max
  unsure (1)..(365): unsure at all n locations
  Clone ID: LIB3093-017-Q1-K2-E10
tctctcggacactgtttctcaagctgttattctttgtgtaatattnaaaataagatacgtttaggttaattttttccgtgggttcatggtttaattatgtatttccgtatttgttataaattattaaatataattgaagtttcatttataaatggaaaagccttcttctcattacttggtttcaagtgagaaaaaatggactagggtttacactcaatcctataatattaatttcttggaaagccctgttgtgattgaggattacatttttttgatcatatttctatcattatactcctttttttcaaataaactcttgatttgtgtttattttttttttttttggtctaatcctataatgtatt

SEQ ID NO: 43700 - DNA, 192 bp, Glycine max
  Clone ID: LIB3093-017-Q1-K2-E11
tcgcccactcttcttcccacgcgtccgtagtctcttagagaggtattcaatattaaaggaatggtttgtctaatgtgtgagcgattagcttaaatatttaaaattatttgtcaaagatacacttatgttacacccaccaactccacttttactttcaagagaatttttacaggcattttatattaatgggta

SEQ ID NO: 43701 - DNA, 371 bp, Glycine max
  Clone ID: LIB3093-017-Q1-K2-E12
tcgtaaaaacaacctaattacatagatttttttaggctgtaaccaaagtatcgtaccaataccatggcatgtgacaatgtcgaattggagaaaccggtgcttgcatctctatgaggcttgaggaagcatgcccaaaaatccaaaggtaaaagtgaacacattacaccataccatggcgatgtggtttcaagaacatcatctggcactatataccaacaagtggtgcatatttctggtgatggtaacaactcatcacgccaccaacaactacggtggtggtcctgctataaataatattggcaatttccagggacatggcaatggaggctttattggtggtaattttcgatgccctcaacgagggactactg

SEQ ID NO: 43702 - DNA, 372 bp, Glycine max
  unsure (1)..(372): unsure at all n locations
  Clone ID: LIB3093-017-Q1-K2-E2
actcattctttcattctcattgccttcacattgatagacaagaaacaatgaantggtaaccctgagggtttgctcaaggggtctcaagatcctcaaggctcacttcaccgctccgtctagcgtgcgccgcgttctgattagcgcgcctctctccaccgatctcctgtcaaagtacaacgtgcggtccattccggttcgcatggactacgaggtttatgtcgtgaggggaacctacattggccgcgagggcaaagtggtccaggtctatctccgcatgtgggtcatccacatctagcgcatcacccgcgagaaggttttacggcttcaccgttaacgttggcattcacccttccatgggtgtcttcaccaatc

SEQ ID NO: 43703 - DNA, 359 bp, Glycine max
  Clone ID: LIB3093-017-Q1-K2-E3
cccacgcgtcctaataggttttgtttaagtttttgaaggcaaaggaggtttcagaagcaatgggtgattcgaagaggaggactgtcattataaatataaattggttttggaagaaagtgaaccaacaaaagaacaggtatcacttttatgaacacaactatactttcaactttaactccggggctcaaagcgaacatgaaagcatgccttacaggttttcatctacgtttgctgctcctggtctacgccagaatgaatcatgttacatattcatcactagtatacatttccactttgataataccttttaacatgtatattgtttcccataaattgttacattgattgtaattttttta

SEQ ID NO: 43704 - DNA, 314 bp, Glycine max
  Clone ID: LIB3093-017-Q1-K2-E4
gcacagtaagagaaaactcttggggtggattctggggtttgtagcaggggcactggggggaaccttatcaggattcgtgttttctttgatgttcaagctcgctctcgcgttgatcaaaggaagaggaaggaaagcggggcctgatatctatagtccattgatcaagaaagcagaagatttggccttcttggaaaaagaagaaggaatcgcgtcgttggagatcatcgggcgcggtggctgtggagaggtctacaaggcagagttaccgggaagcaacgggaaaatgatcgctattaagaaaatcgttcagcctc

SEQ ID NO: 43705 - DNA, 389 bp, Glycine max
  Clone ID: LIB3093-017-Q1-K2-E5
gtttcgacggcgagtactgtcgcaacctcttctactcgcgcgtgggcaaaaccacctggccgtactgctccggcgtgtggagcggaaaagaatgggtcctccccgagatccacgacgacgatatcgtctccgccttcgagggtaactccaacctcttctgggccgagcgtttcggcaaacagttcctcggcatgaacgatttgtgggtcaaacactgcggaatcagccacaccggcagcttcaaggatctcggcatgaccgtcctcgtcagccaggtcaatcgctttgagaaaaatgaaccgccccgtcgtctgtgttgggtgcgcctccaccggtgacacatcgggcggtttattcgcctattgcgctttcgctgccattcctttcat

SEQ ID NO: 43706 - DNA, 346 bp, Glycine max
  Clone ID: LIB3093-017-Q1-K2-E6
accactcatccgaaaacacaatggtaatgtgtgtatctttgaacgggacagcgatctctaaagctggcgttcactatgacgggggtattgaaggcttcatccaaggctatcaacaagtcttttaccaccgctctactgaccacatattaacccctgaatcccctgcaataacacctaccctagaacctgcttaatgagaaacatcttacagagccgcttacaagatcgcttcgaaagcagattcagaaacctcgttagtgtacttggaactatgggacaagcaatactacacgaaggattaccctgacctttatactgaccctaccgctacatcttcagccatgtt

SEQ ID NO: 43707 - DNA, 423 bp, Glycine max
  Clone ID: LIB3093-017-Q1-K2-E7
tcgcccactcgtccgcccacgcgtccgatttttcttctctcttatctcttggttgcgtggcagacgaaatgattttgtgtgtttgggtctcttttaagttggaaatcttgggcttcagctgccatggtactttctgcaaataattgtcagcgcatggtatttcatatcagtcgtgggtaatttgtttgaaagctatttcatctctttaaagaaatacaagtctcttcattcgggaaaggttcggtaccttgccattgtcatagaaagtgaagaagcttatcagatttccaaagttgttaaactttcgcagtggcttgactctattggtgtaaagaatgtgtgcctttatgacatgaatggagtattgaagaagtctaaggaaaccatgtttcaaaaattgaagaatgcaaaatccattgagtg

SEQ ID NO: 43708 - DNA, 348 bp, Glycine max
  Clone ID: LIB3093-017-Q1-K2-E8
tcgcccactcgtccgctattcttcaccactatttttttcacttctatcacactttcctgtatttgtggctatgattttagaagatagtgacgcgggattcaacaagggctgaacttggtcttcttgttttatatttgggcaaggctgtagctagggacaataatatgcacggctatacaatatgtgtttcaaatttttgagtaatggggaacctggttctgctcattatgttgtcaaaacaaccagcttgtcactaaatgtactccgtcgtttttaagtttgttaattgtcctacatgctttgataatttcaacaccacatggtactccccttcctttatcttttttg

SEQ ID NO: 43709 - DNA, 398 bp, Glycine max
  Clone ID: LIB3093-017-Q1-K2-E9
gagatatacaacatggctatatctacatcagaaagaatggcatcagtctcgaaaaggattacccttaccgtggtgacgagggtaaatgtgactcaaataagaaaaatgctattgttactattgatggccacggatgggttcctacccaacttgaggaagccttgaaacagggcattgcaaatcagccagtggccgtacctattccagcagacgactatgaatttcaatattatacatcaggtgtattcaaagggaaatgcggtacagaattaaatcatgctctcctgcttgtggggtatggtacagaaaaagatggagattattggatagcaaagaattcatatagtgataaatggggagagaatggctatatcagaatacaaagaaaactgagcact

SEQ ID NO: 43710 - DNA, 395 bp, Glycine max
  unsure (1)..(395): unsure at all n locations
  Clone ID: LIB3093-017-Q1-K2-F1
tagacgggtcgcagcccagcgcgattcggaacacacagntttgatcgatgatgttataacgttttgccacantcttcttactgcaaccacggccatggtcnttcttgtccctggggccatgtttcccttcaagtaataactttccctttatctcttccaagacctctccaattttcgtttacccttcctccaagccgtgatgatgcttttcgattcagacttccaaagaaaaaaacattgcttccaattcttagtgatcgctgcctctctctttcccctctttcctaagatgctgcgatggggctggtgctgagtgcttgcactggctttggatggaccacggtttcagggatggaaggccccttctgtcctgcttttgttatggattgctaatt

SEQ ID NO: 43711 - DNA, 224 bp, Glycine max
  Clone ID: LIB3093-017-Q1-K2-F10
cccacgcgttcgaagttttcactcacggttttctctgtttgttgttcaaccacggtacttctctctgggtttggttcatctgccaacgtgaccgggtatacttccttctataattaactttatcaaaatcaaacttttatgtttctgcttgtcttaattacttctctttcttttgactaatattattacactattgtctttgaattttgttcctttcctctttt

SEQ ID NO: 43712 - DNA, 378 bp, Glycine max
  Clone ID: LIB3093-017-Q1-K2-F11
ctttggtgagctgctacgggatctaagatcttaacttggtgttgccaacagtatctccatgggaatcacttcggggggtatctgtcattaattgccctggatttggcaatgcctccctctctgtattgggaaagctgtgccctcagcttcagcatgttgaattgagtggactcgagggagtgacagatgcatggcttcttccactccttgagagttccgaggctggtttggttaaagtgaaccttagtggttgctcaaacgttaccaataaagtagtttcgtccttggccaattctgatggttggactcttgagaatcttaaccttgttggttgcaaaaacattatttgatgctagcttgatggcaattgctgaaaac

SEQ ID NO: 43713 - DNA, 335 bp, Glycine max
  Clone ID: LIB3093-017-Q1-K2-F12
gagagtgtgcacatcaatgtctgctcaggtctgtgtcaggacacgagcccaatccgcattaggcatggaagctggtgagttctgctgaaccatcatccaagagaaagaagatcagcaacagtactaaccaagagccaaaactctccaagactccgagaacgagttctttctccgctttcaaaccatcgactgtgacggagattgttcatccggtgtcgccggagatggttcagcaactctgtctgagccctaccttcagtgaaattccggcgtcttgctgtttcagcaacggatccatttgcctctatcatgacaggatcaagctcttagatttt

SEQ ID NO: 43714 - DNA, 376 bp, Glycine max
  Clone ID: LIB3093-017-Q1-K2-F4
ctcagttctctcgttagtattcttccaatctctgtcgatcaccactaacaccaccatgtcgtggctcctccgatccaccaagtggaaactcctctcttcctcatcttcactttctagaaccttcccctctctctcacgctccggccccacacttgacctccctcagatcggagccatctctcccctccccgatctcttccaccgcaacaccgctaccatgcctttcgcgaaggaaaacgcttccggtggaaacttggccggtcttcccaaagttcctgcgaatacgcttggcagtgactcttatgcgatcaattcttcgaggtacaaagcttcttgactggacacgaatgtgctggctggagctagatgtgtctct

SEQ ID NO: 43715 - DNA, 430 bp, Glycine max
  Clone ID: LIB3093-017-Q1-K2-F5
cgcatacgtatcgagccatcctcacaagcttttgttcttcaccgcgctccacccttcttccctctcccgtcgtcccctccaatgggaatgtgtttgtgacttcatatgctggtagttgacattttgaaattgtaactgtggtgggagcaataatatattttgacatcatcatggagatacagacttgtggcatgccgattgactccttgctagagaaagtgctttgtatgaatattctgtcgtctgattacttcaaggagctctatcgattgaaaacgtatcacgaagttattgatgagatctacaatcaagttgatcacgtggagccatggatgactgggaattgtcgcggtcctttaactgcattttgtcttttgtacaagttttttactttgaagctcaccgtcaagcaaattcacgggcctgttaa

SEQ ID NO: 43716 - DNA, 441 bp, Glycine max
  Clone ID: LIB3093-017-Q1-K2-F6
atgatagtgacaagagaatccctgacatgaccataataaacaggcagcttggatggaatcccaagactgcactttgggacctgcttgagtccactctgacatatcagcacaggacatatgctgaagccgttaagaaagtcattgcaaaacccgttgcaagttaagctttttacagtgatggtgatgtgctacctttgagaagggtgttcttgtcttgcccaagtgttctgccatattatactggttgattttatataaaatcgtaaattttcctcctattggtttcgttagcctgtaggcaatatatcccccacatggagaagtaggaatttatacaagggcaatctgtgctctatgtaattttaatgtagagaccatgcgctgcttaacatgttgagacactttatttattacccaaggaagacttttttctgtgttttt

SEQ ID NO: 43717 - DNA, 366 bp, Glycine max
  Clone ID: LIB3093-017-Q1-K2-F8
cataactagcaaaaaaatggaccttctcctattttgccttaaccttaacaccattgctattgcatcaatcctttctgtaatcggcgttatgtgtgtttctatatcgtaaaaattctcgtgggaaagatgctccagtagtgtctggtgcatggccaatacttggtcacctctcattgctgaatggttcacaaacaccacataaagtgttgggtgctttggctgacaagtatggacccttattcaccatcaagctcggtatgaaaccggctttggtactcatcaactgggaaatgtctaaggaattgttcaccacaaacgaccttgccgtttcatcttgccctataactcttttccgttgaattaatt

SEQ ID NO: 43718 - DNA, 418 bp, Glycine max
  Clone ID: LIB3093-017-Q1-K2-F9
tctacacagctctaatatggtgcagggttctagctttcttagttgcttcccaagctctacgcatagtgacattttatgctacgcagcttcctggtccaaactatcattgccgggaggggtctaaacttgctacactgcctcgtccggatagtgtctttgaagtcctcttgattaattttccacaagatgcgatatatggatgcggtgatttgatattttcatcacacatgatctttactctagtctttgttaatacatatcatagatacggcacacgaagatgtataaagcagctagggtggacacttgcagtgtgtcagtctcttttgataatagcatcacgcaaacattacacgggtgatatagttgttgcctggtatacggtgaaattggtggtatttttcgttgagaagaaatt

SEQ ID NO: 43719 - DNA, 431 bp, Glycine max
  Clone ID: LIB3093-017-Q1-K2-G1
cccactcgttcgcccactcgtccgtccacgctttcgataccttaacaatcctccaggcagagtcctcactcttgctgtcaccctcacacttggttggcccttgtacttggctttaaatgtttctggaaggccttatgatagatttgcttgccactatgacccatatggtcccatttactctgatcgtgaacgacttcaaatatatatatcatatgcaggagtacttgcagtatgctatggccttttccgtcttgccatggcaaaaggacttgcctgggtggtgtgtgtttatggagttccattgctagtggtcaatggatttttggtgttgattacattcttgcagcatactcaccctgcattgccacattacaacttctctgagtgggacctggttgagaggagctttataccacagtggatagagatta

SEQ ID NO: 43720 - DNA, 361 bp, Glycine max
  unsure (1)..(361): unsure at all n locations
  Clone ID: LIB3093-017-Q1-K2-G12
tgaataccgggtcgacggcgcgtccgttaaaactatttataccatcccttctggctgtagtggcagtgttggaagaagaaattgtaaggcttgaagagcagggggtgcatgtcanacaggatttgtaccatgaagctgtctacatgtcatcttctatgaggaaattggaaaattcagtttccgctccttctaacatgtcaaatccaacaatggatagtcccaatttggataaattgatatctcttacccaaacaactggttattcatcagcaacatttgcatctaatcctaccacaacacttcctgatgattatatacaagggtaagagaaccaattcctgtactaattttttcaagaaca

SEQ ID NO: 43721 - DNA, 330 bp, Glycine max
  Clone ID: LIB3093-017-Q1-K2-G4
cgctctcatgctcaagatttcaggcagcattttaccaatattaggtgaaagatgtggttccggaacatgaagataaagctaatggttctgggtatcataattgccttgattctcattattgttctttccgtttgtggtggcttcaactgtggttaatgagtcttcccacatcctggcttcaactgtggtatttgtctcctcactttataagattgttgctagcagattgccattgcctctactgtcaacatagtgcttttgactttttgggttttacattcttcccacttctccgatgatgaatattatatggcattgcttgtttagtgt

SEQ ID NO: 43722 - DNA, 128 bp, Glycine max
  Clone ID: LIB3093-017-Q1-K2-G6
acggacgcgtgcgcacttactctcaagcaaatagatagtatcccatgcgaggattacgattgaggtcatggtcctgtgcttgtctatttgaacctgccagttcccacttaaacattccattgtgacgg

SEQ ID NO: 43723 - DNA, 354 bp, Glycine max
  Clone ID: LIB3093-017-Q1-K2-G7
gcgttttgctgctgttattatgaggatcagggaaccaattactactgcactcatttttgcatgtggcaagatggtctgcactggagctaagagtgagcaacagtctaaattggcggcaaggaagtatgctagaattatccaaaagcttggtttcccagctaaatttaaggattttaagattcagaacattgttggctcttgtgatgtcaagttccccattcgacttgagggtcttgcctattcccatagtgctttctcaagttatgaaccagagctgtttcccggactaatctatcgcatgaagcaacccaagatagtcttgcttatatttgtcttcggaaaaattgttctgac

SEQ ID NO: 43724 - DNA, 399 bp, Glycine max
  Clone ID: LIB3093-017-Q1-K2-G8
ccgtatcttaccgatccatatatacacacacatatccattttcattcaacatttttatttttgatttttttgtatccgtgtaagtgatccacacattttcatttttcacattaaattaggtgaatacacgcattattattttttatgtacccattcgcgtgcgatagaattttctagagcaagagatttcggcgtaatgggtccaaacgctgcggcggcgtaacaagcggaatagctcctaattgacggctacacttacttcaaaaaagaccgtttctgtgccgccatctacgcttacaccgaggcgattacgctgtgccctaatgttccggtttattggacgaatcgcgcgctgtgccatcttatgcgcaatgattgtgtgagagtataggaagattc

SEQ ID NO: 43725 - DNA, 339 bp, Glycine max
  Clone ID: LIB3093-017-Q1-K2-G9
cccacgcgtccgggcatatatagtaggggagcatggggatagttcggtggcgttatggtctagcattagcattgggggtgttgcggttctgagctttttggagaatcaacagattgtgtatgagaaagagacgttggagaacatacacaagtcagtgatagacagtgcgtatgaagtgatcaagctgaaagggtacacttcatgggccattgggtactctgtggctaacctggcccggtcctttatcaggaaccagaggaagattcaccctgtgtctgttctggcttaaggcttttatgggatcgatggagaagtgttcctgagtttgcctgcaatgat

SEQ ID NO: 43726 - DNA, 275 bp, Glycine max
  Clone ID: LIB3093-017-Q1-K2-H2
gagcagagtaccttgtgtatacataaaacagtttttagccgttcgtgttgaagaatcaagcaggaagccagaatactgagcaattaaatttttgtatcaagggggacaaacggagatagtagccgttgatgtggctcatgttgggtcttcaaactggagcttcatgagcagaatcgactgggcagtgtgggacacaagcagggttccccaaggtgcatttgcaatttaagttagtggtaacggcagggtatgatggctagtggatttgggcaaaa

SEQ ID NO: 43727 - DNA, 318 bp, Glycine max
  Clone ID: LIB3093-017-Q1-K2-H3
tagtaagccgcaatggtgaagtactcaagggggcctgacaatccgagtaagtgttgcaaggctagaggcgccgaccttagggttcattttaagaacacaagggaaactgcctttgcaatcaggaagttgcccttggtcaaggctaaaaggtacttggaagatgttcttgcccacaagcaggctattccattcatacgtttttgtcgaggtgttggaaggacagcccatgctatgaatagacactctaatggccaatgacggtggcctgtcaagtcatcataattcattcttgatttgctcaaaaatgctgatagcaat

SEQ ID NO: 43728 - DNA, 174 bp, Glycine max
  Clone ID: LIB3093-017-Q1-K2-H4
gcgcgaaaatatattctaatgtcaaacgcaactcttctatttctatctgcatgagttttcactgagaatgtgcacactgccaacagtgttatgctatctctaatgtttttatcattattgatcataagctttgatgtttttgatgcagcaattttcctttggagggtacaattt

SEQ ID NO: 43729 - DNA, 301 bp, Glycine max
  Clone ID: LIB3093-017-Q1-K2-H5
gaaataatgtccgggatcatccacaagattgaggagaccctccatgtgggagggcacaagaaagaggagcacaaaggagaacaccatggtgagcacataggtgaacacaaaggagaacaccatggtgagcacaaaggtgaacacaaaggagaacaacaccatggggagcacaaggagggacttgtggataagatcaaggacaagatccatggtgatggccatgacaagaatgaaatgaaaaaattataataatataaataaaataataaataaaaaaatatttatattttttaaaaaatta

SEQ ID NO: 43730 - DNA, 322 bp, Glycine max
  Clone ID: LIB3093-016-Q1-K2-H5
atttcttctcatcttctttttcttcttattaatattattattccgtgcaaacacagcaacatcttcatcaccaacgcgaagaacaagattagcgttatgggtctcttcctttctaggaatttggcttgcaaattcatatacccttttcttttttccaataaggtttcaaaggatttgttccccaagcagttggagaacatgatgtctctggtctctcctcgtactggcaggcatttgcagcgctatgacaaaggctgtcgccaagttgtgggatgcattccttacagatacaaaaacaatggaacacaggataaggaattag

SEQ ID NO: 43731 - DNA, 239 bp, Glycine max
  Clone ID: LIB3093-016-Q1-K1-A3
acgcgagggtgcacgttggcatcatcaagctataaaagaaaagaaaagaaaaaaagaaggttggagttagatacacacacatcacaaaatgattaaaaatctaatgaatctacattgattctcgttggagacatcaaacatggcatctggtgccaccccagatggataattctggtaaaggtatgaaaggtgcatatcctgctacgataactgtgtctagctacgaccttaccaccgta

SEQ ID NO: 43732 - DNA, 347 bp, Glycine max
  Clone ID: LIB3093-016-Q1-K1-A4
cccacgcgtccgtcacattcatccacttttcttcaaagtcttcatctcatatcctctttggtgtgtcctcacacgagtgtaggaacggcattattgtgatggagagccaggatctttcttcgccaccccacgtggacgcatctcgaccgtcccttgggttcacccttgggcactgcccttctcttgatcatcatcttcaccttgagtggcgtcctctctggctgctaccattgcgatagggtgtgttcccttccggaaactttcttctgattcgaatcccaaaaggctttcttaaccaacaaattttaacacttccagggatttgagccaaaccggggacaaagctt

SEQ ID NO: 43733 - DNA, 242 bp, Glycine max
  Clone ID: LIB3093-016-Q1-K1-A5
ctcgctttcgggctccccatgttctgtcagatagcgggtgtcgggttcgaccttgtcgtaatgggcgtgtgggacccagattcgtggaaagcgtcgaattcggtttgtatatacaacttcctgtcggccaaatggcgccgtggggccgacatgccaggagggccccgaacagttttcggctgcgcgtcggatcagaatcgcacggtttacagatgaggcggacacgacgaggggaatgacgc

SEQ ID NO: 43734 - DNA, 447 bp, Glycine max
  unsure (1)..(447): unsure at all n locations
  Clone ID: LIB3093-016-Q1-K1-A6
cccacgcgtccgctctctctcaccaaagccttcctagaacgaaaaaaaaaagaagagcaattttccctcaccaaagaagaagaagcaaacaatggccgatcaacttaccgatgaacagatctccgagttcaaggaagccttcagcttgttcgacaaggacggcgatggttgcatgacaaccaaggagcttggaactgttatgcgttcattggggcaaaacccaactgaggcagagctccaggacatgatcaatgaagtggatgctgatgggaatggtaccattgacttccctgagttcctaaatctcatggccaggaagatgaaggacactgattctgaagaggagctgaaagaggcattccgggttttcgacaaggaccagaatgggttcatctctgctgctgagctccgncatgtgatgaccaacctcggggagaagctcaccga

SEQ ID NO: 43735 - DNA, 247 bp, Glycine max
  Clone ID: LIB3093-016-Q1-K1-A7
cccacgcgtccgaggttgaccagctgttgaacaaccctttctttggcgcggtatagggcatatgaacgaagcttatcagatatttccccatctcatggatgccaatggaaactcaattaaagccaaagcaaagttaagtgcgctagttgagaggtatttattttccctccaagtattacaatactaactaactgtatgtatactcttgctagctatcattttcgccattcgatactgtttcatggac

SEQ ID NO: 43736 - DNA, 205 bp, Glycine max
  Clone ID: LIB3093-016-Q1-K1-A8
acgggaacattgctttccttggttctggaatttagctggtgaagtatatagtttctgttgtggcagcaatttatatgcctcacgtgaatataaactttgagacgttggttactcgtaccggctcatacaatttttgcaatgagcttgatttaccagggttgaatgggatgtatcagtatcggcgtttgggaaggacgagatatgc

SEQ ID NO: 43737 - DNA, 447 bp, Glycine max
  Clone ID: LIB3093-016-Q1-K1-A9
atggcctcagccgcatcctccaccactttctctctcctcatactccacgcacacctacgggtccccctccccctcgcgcgtgcaactcacctcctccctccgcgcccgcccgctgcgccgactgggcttcgccgcggcggacccgctgctcgcgacgagtgtagcgtcgcgcgtggcagctgcgagaggaggaagaaagggcgcgaggggaatagcgtcgatggcgaagaagagcatgctatacctgatcgcggacgacctgaatgcgaagaaggacttcgtcaggaccgacctcaacgtcccgctcgacgacaaccagaacatcaccgacgacaccagaatccgcgccgccattcccaccatcaaacatctcatccaaaacggcgccaaagtcattctctccagccactagaagcggccgaagggtgtcactcccaaatacagctt

SEQ ID NO: 43738 - DNA, 346 bp, Glycine max
  Clone ID: LIB3093-016-Q1-K1-B1
acggtggcttgccaactaattttgattctacttactgctatgcattgggttatggtgctgcagccctccttcaaagtgggtagactggattaatatcatcgattgagaatttatgggctcctgttgaagaatggactgttggtggaactgcactcactggattgatggacgcgtagaggagacatggtctattcaagcctgtgatcaagatggcaatggtagagcttgaacgggcaccctttcaaaagggtgcctacttgagggatgagtgggccctaaaaaattgctacattagtccaggtccaattcaatacactggtccaagatcttgtgcagttaatcacac

SEQ ID NO: 43739 - DNA, 471 bp, Glycine max
  Clone ID: LIB3093-016-Q1-K1-B11
attctttaggttgtgctgatgctttgagcatccataatttgcaaacaagcggttctatggtatcaaatcatgttatcaaccctggtagcaccttgaagtcatcacaaagtatatgtctgccacatgcagttgctgatactaagttagtttctagaactgaagagcattcacattatagtacaaaaggtgggaataatggcatcctatctggcactgctacttcaaattctaaaaatgacctgaaaacatctgttctaaaagtttctggtcaacttataggatcaaggttgtctaaaccctttccatcagctgttgggagttatattactggaaaatacagtgataagggtctttttccatatgatttgattgtcaagctttataattggaacagagaggagttggaaccatttggccttataaactgcggaaacagctgttatgctaatgctgtactccagtgcttggcat

SEQ ID NO: 43740 - DNA, 168 bp, Glycine max
  Clone ID: LIB3093-016-Q1-K1-B12
tgcaaggggaggactgaagtttactgattgcaaaacatgggattgaagggtctactattttaggcttgtaagttatattaacttgttaactgccagcacaaattgaagctaggtaggaatactattggaatgcacaatctgattactatctttatggatcaattttgt

SEQ ID NO: 43741 - DNA, 238 bp, Glycine max
  Clone ID: LIB3093-016-Q1-K1-B2
acgaccatggcggctgcgtttacaagtacaagtgcaacactgagactgtcaaatgttggagagagcagaggtttgcagctgcgtaagtgtaaccctaatcctaataagctgaaggttatgggggggtttggaggttgttctggagtggcagtgggcgtgagagaaagaaaaggaattggataggttatggttcgggttcgggcgagttcttcgtcggacgaagcagtgagtgcgcagt

SEQ ID NO: 43742 - DNA, 344 bp, Glycine max
  Clone ID: LIB3093-016-Q1-K1-B3
aaacagaggctacgtacgatcaaattaattaagatggcggaagtgaggaacaaacaagtggttctgagggactatgtgagtggttttcctaaggaatccgacatgaacatagttgaaggaaccacaatattgaagcttccacaaggttccaatgatgtgcttctaaaaaatctctacctttcctgtgacccttacatgagaatgctcatgaccaatgtggaaggcctcgacgtgtttggcacctatacacctggctctccattaacagggtatggagtgtccacagtcctagaatctggacacccagattacaggaaaggggatttagtgtggggatctacaaa

SEQ ID NO: 43743 - DNA, 256 bp, Glycine max
  Clone ID: LIB3093-016-Q1-K1-B4
acgcccacgcgttcggtttcgaatagattatgctaagtctttgggaatagtgctgcaatggcttgcagtcaggaggaggtgacccttttgggagctactggaagcgcgtttgtgtgcagggttcatattgccctcaagttgaagggagttcaatacaaatatgtcggagaaaatttgaggatcaagagtgaactgcttctcaaatccaacccagttgacaatgaggttccagtgcttattcacaatgagaagccca

SEQ ID NO: 43744 - DNA, 385 bp, Glycine max
  Clone ID: LIB3093-016-Q1-K1-B5
cttggatcttaccctcttgtttgctaatattctcattcttctgtctctgcttcttctccttgtaagttgtctcgctcgctctctccgcctgctactgctacttgtggactgtaagagctgaactaagagatggggttgtctttcaccaagctttttagccggctctatgctaggaaagagatgcgtattctcatggtaggtcttgatgctgctggtaagactaccatcttgtacatgctcaagctgtgagaaattgtcacaaccattcgcacaattggattcaatgtggagactgtggaatataagaatattagctgtactgtatgggatgtggatggccaagataagatccgatgcttatggggacactacttgcaaaacactc

SEQ ID NO: 43745 - DNA, 456 bp, Glycine max
  Clone ID: LIB3093-016-Q1-K1-B6
atcttattttaacatgttatactgggatttggaaccagattccctaaaagcttctaacaatgagagtatgggtggatcctttcaatataattttaatgatagtcttaatcttcaggagcgtcaatctctgtcaaaaattaagggaaacaattctagtcttgactgttttgcaaacaatattccacattccaagtcgaaagcatctcctaaatcattttcacaaactacagtacttgatggcctccaacatgttcttagtcaggctgagaatgatttcctatacatggttgaacaagaaatggaagaacgtccagatttagtttcgattggatcttgtgttttacttgtgcttcttcatgggaatgatttgtacacacttaatctaggcgacagtagagcagtggtggcaacatgcatcacagataacagtttgaatgcgaatgagagattgaaggc

SEQ ID NO: 43746 - DNA, 425 bp, Glycine max
  Clone ID: LIB3093-016-Q1-K1-B7
cttgatcggatgggagcagatccatggaaagtgttaaatcaggctagatctaagcttcggcatcataatgctgccatacaagttccaataggattggaagatgattgtaagggactagttgatcttgtgcagttaaaggccttctatttccatggttcaaatggtgaaaatgttgtcactgaagaagtgcctgcagatatggaagccttggttgcagagaaaagacgtgaactcatagaaaccgtgttagacgatgacgatgaacttgctgaagcttttcttggtgatgagaccatatcagctgctgatcttgaggaagcagtttgtagggctaccatagcccagaaatttatatcaggattcatgggtagagctttcaaaaataagggggttcagccacttttggatggtgtaattagttattt

SEQ ID NO: 43747 - DNA, 156 bp, Glycine max
  Clone ID: LIB3093-016-Q1-K1-B8
attttgctttcgcttgttatttggttatttgttttcatatacaaccaaaatttaagctagcgaaatgaagacgagctacgtttattctgtgtctgatactattatgtgcagggcttatcgtgccgccgttgacccactgactctgtccctggggct

SEQ ID NO: 43748 - DNA, 459 bp, Glycine max
  Clone ID: LIB3093-016-Q1-K1-B9
ttccactttccgggttttttattcgatatttcttgttccaatgatcgagcacttttttgggttccttgaccgtctcgcgcgccctgtccccgatgatccccttgctcacactgctcatttgccttccgaaccatctccacctccggcctccatggattccgacgcctcctacagctccttcacctcaccatccaatgattgctactactacgtcctcgactaagacgatccgctgatccatatagcatactgcctcatctgccactattaggatatcatttccaactttcataccccctgctcctttaactacattcttaactatgcttacaaaaagtgtgtccagcattgctgtcatgataaatgagacatatcttgtcatatatttcatcatccatatcaaccttcatatactgccctcccacctcattctaatcccttataaactaccattgatat

SEQ ID NO: 43749 - DNA, 325 bp, Glycine max
  Clone ID: LIB3093-016-Q1-K1-C1
cccacgcgtccgattttctctctcacttttcaagaatcgtaagctatgggaaagtcttacccaactgtgagtgctgattaccagaaggccgttgagaaggcgatgaagaagctcagaggcttcatcgctgagaagagatgcgctcctctaatgctccgtttggcatgggactctgcttgaacctttgacaagggcacgaagaccggtggacccttcgagaccatcaagcaccctgccgaactggctcacagcgctgtcgacggtcttgacatcggtgttaggcttttggagccactcaaggcggagttccctattttgagctacg

SEQ ID NO: 43750 - DNA, 463 bp, Glycine max
  Clone ID: LIB3093-016-Q1-K1-C10
gttcttgccaaacttgaagatggtaaactgtcgggtcctttccacagaagatatacttatggggagtcttatctcataaatatggattctgaaagcatcagcttgccagagaagattcggttagtcttgtttagcctatgtgatctactgatgacaacagttactcacatttcttcttatcatgttaaacaacaagcagaatttctgtggcagaaagtagggaatgatttgaatgtaatgactcttcaatggttaaaacaaaaatcagaattcagccagaaccaaaacctggacattttggaactggggaacatgaaagataactattcagttaatcagttattatgggatcgctgtgcggatcccaaattgatatctgattgctttgcacaggaaaaactcaattggccaaatgatttggatcagatgaatactaaaggatggaatgatttgtctataatta

SEQ ID NO: 43751 - DNA, 430 bp, Glycine max
  Clone ID: LIB3093-016-Q1-K1-C11
aaggaccttattgcgaatgcacagggtttcacgcctgtgatgtttgatgacaagatccatgatgaaaacaattcactctacaatacccctccttgttatgggatttacatgtgtgggttggtgtttgaggacttgttgtagcaaggtgggttgatggaggttgagaggaagaatcacaagaaagctgatattctctacagtgcaattgatggcagcaaagggttctataaatgccctgttgagaagtctgtgagatctttgatgaatgtgcctttcactctggagaaatcagagctggagggtgagtttatcaaggaggctgctaaagataaaatggtgcagcttatgggacatagatcagtgtgaggtatgacggcttctatttacaatgccatgcccttggctggtgttgagaagttggtggctttca

SEQ ID NO: 43752 - DNA, 408 bp, Glycine max
  Clone ID: LIB3093-016-Q1-K1-C12
ggcatttgagggttgaagccatattccccagttaccacacctttgcctgctgtaggtggagacacacagttatactcccctcagcaatttccatacactgggccaccttattatcatcagctggttcctcctagcttaccatatcttaattcacctactccagtttcacagccagagctcaccagcctggtaggtattgaccaacaagttgataacatgttttttggaccaagagcgggctatccgtcagtgggatcttttggtagaggcaactttcctgtagcacctggttcctttggctttcatgaatcccaacaaggatttgaaggatcaagatctggtggaatctggtcagactgctcaaaaccatctgaaagacagagatctttgatgcctctatcgccatct

SEQ ID NO: 43753 - DNA, 349 bp, Glycine max
  Clone ID: LIB3093-016-Q1-K1-C2
gggtttttggctacggttcactggtgtggaaccctggattcgattacaatgagaagattataggtttcattaaggactacagacgcgtgtttgatttagcgtgcattgatcaccggggaacacctgaaaacccagcaagaacttgcacgttggaggagaaggaaggggctatttgctggggagctgcttattgtgttcgaggaggccctgaaaaggataaactggctatgcagtatttggagcgacgggaatgtgaatatgacagatagactcttggaaacttcttcaaggaaagagattcactgcaccctactttaactgatgtaatagtattcacatctactccaga

SEQ ID NO: 43754 - DNA, 326 bp, Glycine max
  Clone ID: LIB3093-016-Q1-K1-C3
aacaacttctgctacttcctactccaaccgcacttctgctccgcaattatcatgggcaaggtcaagatcggaatcaacggatttggaagaattggccgtttggtagccagagtggctctgcagagagacgatgttgaactcgttgccgttaacgaccctttcatcaccaccgattacatgacatacatgtttaaatacgacagtgttcatggacactggaagcatcacgatgtcaccgtttaggacgagaagacccttctcttctgggacaagccagtcactatttttggacacagaaacccttgagaagatccatgggggtcaac

SEQ ID NO: 43755 - DNA, 326 bp, Glycine max
  Clone ID: LIB3093-016-Q1-K1-C4
cccacgcgtccggccacgcgtccggtctggggcttcaatgacctgtgctggttgccagggtactggcatgaaggtgtctattaggcaccttggtccttctatgatgcagcagatgcagcatccttgcaatgagtgtaagggtactggagagacaatcaatgactgagacaggtgccaactgtgcaaaggagagaaagttgttcaggagaagaaagtacgagaagttgttgtggagaagggaatgcagaatggacagagtgatacattgcctggtgaagctgatgaagcagtatgttgagctttgataccaacaccgtgctggatta

SEQ ID NO: 43756 - DNA, 321 bp, Glycine max
  Clone ID: LIB3093-016-Q1-K1-C5
cccacgcgtccgtttgtcctttacagtgggaaccatgagcgagattggcctggaacaggatccttttatgagaacatggattctgggggagaatgtggtgtgttggcacagactatgttctacacccctgcttctaacagggctaagctttggtatggcgacatgacttcatacatttcttcaaattataatcaataaattagctaattgttagatttttcccgtttagaaaggttatcttcttttgggattaatgatttgagcatgaagaaagtgaatcaccaagaattacaaatgccattcaataaagaagtaataatc

SEQ ID NO: 43757 - DNA, 153 bp, Glycine max
  Clone ID: LIB3093-016-Q1-K1-C6
cgggtcggcccagacctacgcgcacgcgtacgcgcacgccgacaggttggagcttcaaaaactgccgcctagaggtcggacatctggtttaaagggagctctgctttgccggaaatcgtgaatggagtaactaatgcaccttgctatctaaga

SEQ ID NO: 43758 - DNA, 343 bp, Glycine max
  Clone ID: LIB3093-016-Q1-K1-C7
ctccatattaccaactcaactattggcattgaactgaagacaactaatggtagaggtggttatatgaataacatcttcatttctgacgcaaaattggttgatatttacttgggtatcagcatgacgggaagctctgtctcccatccagatgacaagtactatcctaatgcagtgccggatgttgggaatgttacttttgagaatgttgattggttcaaatattgctattgctgcgaagttttcacgaataattgaatcgccgattactactatctgtcttttgaacgcgacctttttcttgcagatctgagtcatcatctacttcatggtcttgttctgacat

SEQ ID NO: 43759 - DNA, 460 bp, Glycine max
  Clone ID: LIB3093-016-Q1-K1-C9
ggattttcagttcctcacaggcacttcttgtgaagccagtgaagaggcggatgatggggaagagcaagggattgagaattgcatgccaagccaccagcatttccgctgatagagtccctgacatgggcaaaagacagctcatgaatcttcttcttcttggtgccatttcactccccactgctggaatgcttattccctacacctacttctttgtccctccaggttcaggttcttcagctggcggtactgttgccaaggatgccgttggaaatgatgtaattgccgagaattggctcaaggcacatggacctggtgaccgaacccttacacaaggattgaagggagatcctacctatcttgttgtggagaaagacagaacccttgcaacatttgcaattaatgccgtgtgcactcatcttggatgtgtcgtgccatggaatcaagcggagaacaagttcat

SEQ ID NO: 43760 - DNA, 229 bp, Glycine max
  Clone ID: LIB3093-016-Q1-K1-D1
cccacgcgtccgggatggtttgcgaacaaaagataaagagcgtatacttgttcttgcggctacaaatagaccttttgatcttgatgaggctgttattaggagacttccactaagattgatggttaatttgcccgatgctccaaacagagaaaaaatggttagggtaatttaagcaaatgaggaattgccacctgatgttgatttcgaaccattagcaattttgactgat

SEQ ID NO: 43761 - DNA, 468 bp, Glycine max
  Clone ID: LIB3093-016-Q1-K1-D10
agcaaattttccctcatttattctcctctcctcacaaatcacttcccttgttcaataccaaatcaaattattccttctcaatcgattctcttcggccatgtttgcttacagggttttgtcccgttcctctgccaccctttctcgaagcttcacccttttctctgtttcacgaaattcccaacctttctccaccaacctctccaataacttcaattccctccttcacccatctcccaacaagctgattccagttcaaaccaattttctgaattcaatgaatccatcattgacttcgagatttggattttcttcaacggcctcacatgaacatgcaagtgaaggagcaaaggtatctgatcagtctgaacaagccgaagctgcggatcaaaccaaagaatcagatgtagagattgaatgtgatctgtccagggatgatttgataaagcttgttgctgagaaggaacaact

SEQ ID NO: 43762 - DNA, 384 bp, Glycine max
  Clone ID: LIB3093-016-Q1-K1-D11
tcttacgtccacgcgtacgcttctttaaaaattgtacaatccttgattctgcttcgggactactttaagagtttacgagaagtatcaaacccataaaagacttttcttcaacatcattgaccttcttttaatataattccttcaaaacgtcattgtctttcctacaataccactacatactgcccatagtccccctttataaagtaaaaaagctcattgactaataagcgctttttatcatatcaaagtttaaaaagtttatcgatgacgacgataaccttcacaagttcatcactacttacgttctcagactcttgaatatcgacattatcgctgatctcactgaacttgaactccaataacaattttctctctctctcatta

SEQ ID NO: 43763 - DNA, 399 bp, Glycine max
  Clone ID: LIB3093-016-Q1-K1-D2
acgtgatccagtgaggcgcatttcaaccaatcatggtgttttttccgaccaaaagagaaggcaatgaataaattaatgaactcaaactaaaacaccaaggaaaaaaaaacacagaatataaaacacaaaacacaaacaaagagagagaaagaacaaagactgttttgtttctctaagttgttgttgcagttagcttcccgagcaccgtgtggtcgagtattgtattgtattgagagagtgatttgtaggttctttctgatcactgtggtgcgtacattgaagaggaaacatcaaacatgggttggattccctgttctggatattctggcactaagaacaaggttgagaagatggaaggtcaggatagtatcgttggtcagatcaaagccaccccaagaa

SEQ ID NO: 43764 - DNA, 157 bp, Glycine max
  Clone ID: LIB3093-016-Q1-K1-D3
gatgctgaaacatctgaccatagggacgcctggaccgcttatgtcccgagctattaggagccttatgttaaagtgccgagggtcttaagcctggactaaaggtcaaattgcttagatgagctatatggtataatgaaaaatatattcagactatgat

SEQ ID NO: 43765 - DNA, 447 bp, Glycine max
  Clone ID: LIB3093-016-Q1-K1-D4
cttagcttagccttctcctattctggacctctgtcccttcctcttgattagggttctaattatgttatgaaccttccatgcttttatttttcttttaaaaaaagaataaagaaaaccctacatatgggtttgtggggtatattcagtcttcaatatcatggctctctttgtattcttccacagctttcttgaactgcatccaaagagttcctttgcatgcatgccatggcactcttactcccaaatcttgttttgcggctcaataaagctgtgggaagatacagatagggtcaacaacggactagcttatcttatactccagaatcttctctaaatcttcctatccaattatatatagggattaaattattgcaaaagattttttttcctttttcttttgggatttgacttaagtttaatcattttcagatttaaaccatcgacttt

SEQ ID NO: 43766 - DNA, 369 bp, Glycine max
  Clone ID: LIB3093-016-Q1-K1-D5
cccacgcgtccgtgaaatctgggggcaggcaggattcttttgaagatgaaccatctcaaaatggcagtttggcatatactgctcaaaatgggggactaaatacacctcatacagtagtcaatcaaactatgtctatcatacctatctctgcaggtggtgctcctggagctgttcctggtcccacgacaaacttaaatataggaatggattattggggtacaccagcttcatccaacattcctgcacttggcagaaaggttccatctactgcagttgctggagggatggttaccgttggatctcgggatagggctaagtcacaactttggctacaggatgaaagagagcttaaaaggcaaaggcggaagc

SEQ ID NO: 43767 - DNA, 155 bp, Glycine max
  Clone ID: LIB3093-016-Q1-K1-D6
gggcggtatactttctgcgcttcttggcggctacgcggtggcggcggcgtcttcgccggagagatctacttctagagtctgctcctttcactcgatgagaggctggcagctctacttcaacgagatcaaagataccgtgaagctcgtatatccct

SEQ ID NO: 43768 - DNA, 245 bp, Glycine max
  Clone ID: LIB3093-016-Q1-K1-D7
tcaagacacactttgctagaccaaattggcgcagtgttttcaaacacactgcactcaaacaccctgggaaaagagttggtgttttctactgtggtgctgtctcattggttggagaacttacgaggctttctcttgactttttccaggaaaaccaacatgtagttggattttcattattagtattatgaaattcttgtatcatagtttgtatttatgtttccaactgtaacgtatgtatttgaggg

SEQ ID NO: 43769 - DNA, 358 bp, Glycine max
  Clone ID: LIB3093-016-Q1-K1-D8
cagggaagagaaaggactagagacagaggaagcatatccctacacaggaaaagatggtgtctgcaaattctcagctgaaaatgttgctgttcaagtcctggactctgtgaatatcaccttgggtgctgaagatgaactaaaacatgcagttgcatttgttcagccagttagtgttgcctttcaggtggtgaatgggttccatttctacgagaatgtagttttcactagtgacacttgtgttagcacttcccatgatgtgaaccatgccgtgctagctgttggatatggagttgaaaatggtgtcccatattggctcatataatattcattgcgagaaagctggggtgaaaatggctac

SEQ ID NO: 43770 - DNA, 431 bp, Glycine max
  Clone ID: LIB3093-016-Q1-K1-D9
ggtgatcttatggatagtaaatgtggtattgatgaacatttcaatgaagagctaaagtatggttcatgattatgcatgtcactattgtattgtatatatgcacatgtgtctatgagcgtctcaatttagcttctctcccattgatgtctttcttagacaggtagaaaaataagcaggagagagttgaatgtgtaataatcaagcagaggtaatgactctcagttaattacctgtgtgtccttatgctttttctgtttatgcatgcttcgatatgtatggatattaagatattttcaggtggtatagattctaccatttttattttttttaaaaaaaaaaattgagcacccaaaacaaaattctattcaatctaataaaggttaaagtgatgcaaaagcaagattgggtcaagccttatgcatacctctata

SEQ ID NO: 43771 - DNA, 248 bp, Glycine max
  Clone ID: LIB3093-016-Q1-K1-E1
caacacctttgccttgctgcagttcgcaactgcaactgcactcaaatataaatatatatacatatatatatatgtatatatatatgtattacttcatggtcacacataggtaagtttattaattactaggtagctggttttgaatagggtagttggtagttatagatgctgtccgggatatgggagaagcaggtttaggagattgctgttcctctgatttgacgattacgaggaagagcgattagcga

SEQ ID NO: 43772 - DNA, 460 bp, Glycine max
  Clone ID: LIB3093-016-Q1-K1-E10
aaattccaaacacatgtttcggtgtgccgcctcattggaccagcccagagcctcacctaaccgacacccttctctcttttcctctcttctcttctattcctaaattgtacttctgttttgccagtgattgaagctagttagaacaagatgttgcagctactctacactgcgattttctccgaaatgcttttgattctcacgctcgtcttcaaaaccccactgataaaactcgtcatcgattccctcgatagtgtaaaacgcggtcgcggtcccgtggtcgtttccaccgtgggcgccacattgatggtggttctcgcttcgagcctctacagcatggccaagatccaacaacgcaccctcgatgccgtcatagtcaaccccaccgaccaaatccttatgtccaagcacatgctcaaagcttctctcatggggtttctgctgatcctctctctgatgattg

SEQ ID NO: 43773 - DNA, 467 bp, Glycine max
  Clone ID: LIB3093-016-Q1-K1-E11
ataaaagaaacccaaaatctctctctctctctcgttcgctttccgtagcgatatatatcccaaaccctaccgttaggttccccaattcttcaacaccccgtggaccggtgctctgcttcttagtagttcgtacggtttttccgtcgattgcctccgaaacgatgtcgtatcgcccaagcgggaactccatgaccgaggtccgccggaaccggtacaaggtggcggtttactcggaggaaggtcgtagacggcgagaggacacgatggtggagatccgcatgaaccgcatagaatagagtttgcagaataagaggcgcaaagggctccaacctcagcagatgcctgcgtccgttcactctagattggttgagaagaagttggaacatctaccatcgatggttactggtgtttggactgatgataataacctgcagctcgaagcgacgacgcagtttcggaagctgctt

SEQ ID NO: 43774 - DNA, 461 bp, Glycine max
  Clone ID: LIB3093-016-Q1-K1-E12
agcacttagtgctattcaataattacgaaaaaccaacagcgagtgttgggtttgtttggtccaggctggaccagggaatgaatagagatgagaggctttcggttgaagagaactgagttaagcggcgaagccaaacgcagaatcggcggcagaaattgccaccggaagcacgtcgaagacgggtgaaccaaacacaaaattccatccaccacttctcttttcaatccccaactcaaatctgtgaagaaaatctcaatttctaaattgtaattcttagcactactgctagtagtagtaaaaaaaaacaattagaaagtagtagagtgtttttttttctttttttcgtttgttttacttttaagatgggtgagaagagcaacgttggcggcgacgcgattaacacgacactgcttcacgggaagtacgagctgggccggctgttaagccacggaaccttcgcg

SEQ ID NO: 43775 - DNA, 155 bp, Glycine max
  Clone ID: LIB3093-016-Q1-K1-E2
acgcgatctttggaggagcaggttcatggtgattaccttcaccatgcgcttaagcatgggtcttcatgctcccctggtgttctaggaaccaatcatgccgatcataatagtgggaggtcaaccactaaaatctgtagagcctgatagtcattaaa

SEQ ID NO: 43776 - DNA, 448 bp, Glycine max
  Clone ID: LIB3093-016-Q1-K1-E4
atgaaaccaaaaaccaaattcaacaccgcccttttaatacttttctgttttcagagccccagcctcacacaagttcaattttttgtcacccttttctgattatatccttgtcctcttctccgagcaataaaaaaaccttcttctttctctttactgcgtgctcctctgcgtgaaactgggacacccctttagccctctttcgctctttgcctgccaaaggctttaactttgtcactttagctccgtacaatatgtgccccatgtcacttctttggtctaattcctcaaattgagcaactgggtcgtgcttacttggtttttgttgatggctgagaacgtttgacttgtgtttcccacaagtttgattcttttggttttgttctttttccctttttaatccttcggtttataggtgtattagttcagtttttctgcttggtataccctg

SEQ ID NO: 43777 - DNA, 350 bp, Glycine max
  Clone ID: LIB3093-016-Q1-K1-E6
cccacgcgtccgtggagaggatatagacaagtacttgggtctcaaggaaggaaaatcatccaaaaagtttagaagaagatgagatcatatcactgccaatgagtgaattaatgcgacggctaaatgaatcatatgaagccatgaaaaattgaggatagacttagatgtcaagtatattagtgcgttggagcacaattttgagcaaatctttgcattgatttaacaaaaattgtatacgtatggactgactatgcaatgcagttattaggatatttgaatgaatcaaattgagcaactgggtcgtgcttacttggtttttgttgatggctgagaacgtttgacttgtgttt

SEQ ID NO: 43778 - DNA, 147 bp, Glycine max
  Clone ID: LIB3093-016-Q1-K1-E7
gtatgtcggaaaagcccagcaaaaatccgagcgtgaacaagaactgaaaggaccatctgagcacaacagaaaggaagctgctgacgaatatacaagtgagaacttgtatctcacgaactgggatgatacaatcagtaatgaacaact

SEQ ID NO: 43779 - DNA, 205 bp, Glycine max
  Clone ID: LIB3093-016-Q1-K1-E8
gcttcagcggctatgcctagctaactcttccgaccttatttcacattatattccccgccttctctcgcatgtacttcaagtaaggcttctctgatcttatctgtggccactgattctcactatactcacacggtccgatttctacatactgcgaacctctgtgcacctgtgtggtacacgaggtgagccatacttgactctttga

SEQ ID NO: 43780 - DNA, 356 bp, Glycine max
  Clone ID: LIB3093-016-Q1-K1-E9
aataccctaccgacccacctactccaccctcctttttaaaatccaatatccttatatccttcgtactacttaggtaattttctaaaaatatttaacccataaaataccattcttcaacatcattgaccttccataaatttaattcgatcaaaacatagtcatgtatcctgcaataccactactgaatgcccaaaacccccacttacaaattaaaaaacctcattttccaaaaaaccctttttgccatatagacgtttaaaaagtttaacgatgactacgataatcttaccaacttcatcaaaacttactttatcatactctttaatatagacaattatccctattcttactgaact

SEQ ID NO: 43781 - DNA, 289 bp, Glycine max
  Clone ID: LIB3093-016-Q1-K1-F1
cggacgcgtgggcggacgcgtgggcggcaacgcccatcaaaatttagtggatcagactactctactgatgaatgagatagtctagttcagaaaagaaatcatggaatgcatagcaaacgccatcgacaatcagaatctagtgaatctgacttgtcaagtgatgacgctccccatattgaaggccacagaaagcaccataaacatcacatgcgatcgcataatgtggagctgaggttgactgattctgattatcgcagtcatggtcaaagaagcagatcaaagtcaatgg

SEQ ID NO: 43782 - DNA, 419 bp, Glycine max
  Clone ID: LIB3093-016-Q1-K1-F10
catcaactttacctagctttaaaaaacaacttcaactacacacctattggaatctttatacacctatgtatacatatatatatatatattacttcatctccacacatattcaattccattaatatctaataaacataactacaataagaaactacttatatttagaaatattacctactataataaatactaatttaccagatccctcctcctactattcgaccataacaactaacatctattaacgaactcaataactccaacccctctacaatccattcacaggactaactataatcaaatcacacacttaatctacttatattacaaaaccccataatcttctatcaatatccaaattcttatctcatcacactaccatctcacacacatataccaacttcaatatccaccatcta

SEQ ID NO: 43783 - DNA, 465 bp, Glycine max
  Clone ID: LIB3093-016-Q1-K1-F11
cccacgcgtccgcccactcttccgcttcctcttcctcttcctctgtgaagagggtttctggcttttttaacaacaatttcgaatcgattcgattgggtctctcaaagttttgattgcacagtttgcgaagatgcctcgtcccaaaagaaaagctgccccaccaatcacttcctctgatgttgattcttctcttcgcaccgaaccaaagaaatcaactataaagcaatttgatcgaatagataacttatttgagtcatatgcaaataagtcattgggattaattgacccatacgggattgaagcactttgtaaagatgtgcatgtggaccacacagatgttagaatgctcatacttgcttggaaattgacagctgacaaacaaggttatttttccaaggatgactggcgaacagggctcaaatgtttaggggctgacactctaccaaaattaacaaaggctattaa

SEQ ID NO: 43784 - DNA, 417 bp, Glycine max
  Clone ID: LIB3093-016-Q1-K1-F12
cccacgcgtccgcccactcttacgcgtactcatgatctaaccttcagagcaatgtttctactgaacagggctattatgttttttgcaacaagtcacacactattgccaacatatcaccacaaaatattcaatcacttcaacttcataaacgtgaattgagcaaataccgatcaatcatctcctggaactatttacatgacggaacaatttgtctatccaagcaagtgctttaaagcatatacaaggaaaataaccaaatgacaatgaacgtcatacattatgacttgcttacactctacaagaacttcaaatctaattacaagttaactccaacggaaatggcaacctaatacttatggcaatttaaatccagaaacaacatgaccacatttcttacgcttatacctttttacaact

SEQ ID NO: 43785 - DNA, 162 bp, Glycine max
  Clone ID: LIB3093-016-Q1-K1-F2
acgctcacgattcatcatacgcgtgaatgacctcgtggctcgacgcacccgttatgtacctagtctggggtgaacctcgctgccatgctgcatgtccgaagctcgctatgaggattattgttaaagctatgtgcctatatatggaactcgatacagacgcat

SEQ ID NO: 43786 - DNA, 245 bp, Glycine max
  Clone ID: LIB3093-016-Q1-K1-F3
cggacgcgtgggcggctccgttaggttttccttccgcgtgtttgctcggaactactcctccactcatcgtttaaaatgtctgacgtggaagagtttcgatgctgcattggtggccttgcatggtcaacgtctgatagaaagttaaaggatacatttgaaaaggtttgcaagcttattgaggcagaggtggttgttgacaagttctctgggcgttctcgtggttttggatttgtcacatttgatga

SEQ ID NO: 43787 - DNA, 255 bp, Glycine max
  Clone ID: LIB3093-016-Q1-K1-F4
acgcccacgcgtccggaacaatttaagcgccttcttggagtcaaaccaacgcctaagacggaactgagaagtacacctgctatatctcagccaaagtcattgaaatttgcacagaattttgatgcaaggacagcttggtctcagtgaagcactattggaagaattatggatcagggtaactgtggttcttgatgggcatttggcgctgttgaattattgtcgtgtcgcttttgcattcattttgatgtaaatatc

SEQ ID NO: 43788 - DNA, 456 bp, Glycine max
  unsure (1)..(456): unsure at all n locations
  Clone ID: LIB3093-016-Q1-K1-F5
ctagcttggactatgggttcaagggagctgaaattgccatggcttcttactgctctgaactccaatatcttgcaaatccagtaactagccatgtccaaagtgctgagcagcataaccaggatgtgaactctttgggtttaatttcatccagaaagacaaatgaagctatcgagatccttaagctcatgtcttccacattcttgattgcactttgccaagcgattgacttgaggcatttggaggagaatntgaaaaactcggtcaagaacactgtgagccaagtttccaaaaggattcttaccacaggtgtcaatggagaactccatccttcaagattttgtgaaaaggatctgctaaaagtggttgatagggagtacgtattttcctacattgatgacctctgcagtgctacatacccattgatgcaaaaacttaggcaagtgcttgtagatcatg

SEQ ID NO: 43789 - DNA, 352 bp, Glycine max
  Clone ID: LIB3093-016-Q1-K1-F6
aatacaacagcaacatgatggtttcagtttcttgagggtactaatatgaacagaatctcctctcaacacctttgccttgctgcagttcgcaactgcaactgcactcaaatataaatatatatacatatatatatatatatatatatatgtattacttcatggtcacacatagttaagtttattaattactaggtagctggttttgaatagggtagtaggtagttatagttgttgtcccatatatggaagaagcaagtttaggagattgttgttcctcgaattcgacgattacgaggaagagcgataagcgaaagcagcaacaccaacaacaagagaagccatacagaggaat

SEQ ID NO: 43790 - DNA, 204 bp, Glycine max
  Clone ID: LIB3093-016-Q1-K1-F7
cggacgcgtgggcgcatcgagcgtggagaaagagaaggatgatgaggctcaggtggagtgtactcgtagtggtcacgttcgctgtttctctgctatggcttgtaccgctgcaagtcaaagcctctaattctgtttccgccttcgttcaaaacgccatttattccaacatgaattgtcgttgtcttcaaatcctattgcccctac

SEQ ID NO: 43791 - DNA, 154 bp, Glycine max
  Clone ID: LIB3093-016-Q1-K1-F8
acgcgcacgcgtccgatcgtgcgccgcctaagtgtgcaacccaacgcctgagaaggggctgagcagtacacctgttatgtgtgacccaatggcatagaagttgagacagaagtcagaagcatggccagaaaggtcacaaggagctgctatagtg

SEQ ID NO: 43792 - DNA, 201 bp, Glycine max
  Clone ID: LIB3093-016-Q1-K1-F9
cccacgcatccgcttattataccctatcactcacttcacctatcttcagtcacctttattgaaagaatgatccacctcaacatccctcttacattgactcgaattacccactccccacatcttacacattaacgttccacgattcagcactgaagacataaatctgcacattgagcatgataatattcttcacatcaaact

SEQ ID NO: 43793 - DNA, 315 bp, Glycine max
  Clone ID: LIB3093-016-Q1-K1-G1
acaaaccaaagagaagttgagactgttgatgatgactcacatcatggcaaaactcaagatgattcatctgcagtgcaaactaatattgctgaatcatctatgaaaaatatgggtgatgacaagagagatcctttacaagcacaaacttataatcaagatttggaatcttctctgatggataaagaagctgttgtggacacacaaactctggatcgagacatggttgggagtgatgcacatcatctggataaacccctttgttcaatccccacataagaaaatttggaaaggggtgtagttgaaggtcttgagact

SEQ ID NO: 43794 - DNA, 415 bp, Glycine max
  Clone ID: LIB3093-016-Q1-K1-G10
aagagaatggttgggatttctgacatggatagtctcattaagaaaccgggcgttttatcagttcacataggcagtaaaatacctgtgtctgaatctacaaggcaggaatttttggatattgatagcattgcatatatgctgcgtaaggaaattgaattactagagagcatagatcttatccggtgtaaaagctgttacgtaatcattgtctaaccaaagccccacagtttttcactttttatttccttgtaataaatttataggcaatttttgattattcaattctgtttcaactttcatcaaatgcagaaaatactgatacttcctctttttttaccttaataattgcagactataattgtacaaataagtgattattttatcatgtcaagtcatggtcctcttaaagcatatt

SEQ ID NO: 43795 - DNA, 453 bp, Glycine max
  unsure (1)..(453): unsure at all n locations
  Clone ID: LIB3093-016-Q1-K1-G11
ggaagatcaacctaatgttacccctgattcttctatgactgttaattcggagtcagaccttgacaattgattgatattgtatcaggaaatgatcatggaattatttacatcgagggataaaatggagcagcagttattgcagatagcaaatactgtatatggcatgctgacaatgaaatagactctacatcgaatcgaagtatcaatcctaacttaaggattctaatttattaccattttcttttgctactctcatagagtgtagagtttagatattgtacagtgttaacaatcttatggggaagtgaaatccttttccaaccacaaatagaatgtcacccacagtgagcttcaaattgttgatattcttccctggccttttacaatacaattggttntaaggtatgtcactaggtcaatggtagggctgttattcagtgaccaattttctag

SEQ ID NO: 43796 - DNA, 350 bp, Glycine max
  Clone ID: LIB3093-016-Q1-K1-G12
aaactttttgctttgcaaatggctgctgcaactgctgcaactgcttcgtggatgctattcaaaggcggcaaggaaaggaagctaaccaagatgaataaatccaggattaattgctcttattcttcttcttcttctgtgatagatccttacaagaccttaagaataaaacgaggtgcctctgaatctgaggttaggaaggctttcagacagctcgctctgcagtaccatccagatgtgtgcataaggagcaattgtggggtgcaatttcacgaaatcaacgaagcttatgatgttgtgatgtccaaattgagaggagaatcaaatgaagcagaatcgtatgaagcttatta

SEQ ID NO: 43797 - DNA, 347 bp, Glycine max
  Clone ID: LIB3093-016-Q1-K1-G2
gcagaagggttcctcactctcttcatctgattgaacaaaatgtacacctcgaggaagaaaattcacaaggataaagatgccgagcccactgaatttgaggagacagttggacagtacttgttcgacttggagaacaccaatcaggatctgaaaagtgacttgaaagatctctacataaactaagctattcaaatggatgtggctggtaatcgcaaggctgatgtcatctatgtgcctttcagattgaggaaagcatttctgaagatgaatgttcgactggtcagagagttggagaagaagtttaatgggaaagaatgttgcttgattgccacaatgaggatcgtgcg

SEQ ID NO: 43798 - DNA, 138 bp, Glycine max
  unsure (1)..(138): unsure at all n locations
  Clone ID: LIB3093-016-Q1-K1-G3
gcacaaggggccctcactctctccatcggatcgaacacaacgtacaccacagcgcagaaagagcacaaggagagaggatgccgagcccactgaatcggaagagagagaaaagcantactggatccacgaggagaacac

SEQ ID NO: 43799 - DNA, 373 bp, Glycine max
  Clone ID: LIB3093-016-Q1-K1-G4
cccacgcgtccggaagatgttgatcgagcagttgcagctgctcgcaaagccttcgaccgcggaccttggccaaagatgacagcctatgaaagacaaaggatattgctgcgcgctgctgatctgtttgaaaagcacaatgatgaccttgctgcactcgagacttgggataatgggaagccatatgaacagtctgctcaaatcgaaattccaatgctggttcgcctatttcgatactatgctggttgggcagataagattcatggtctcacagttccagctgatgggccatatcatgtgcaaacattgcatgaacccattggtgttgccggtcagatcattccgtggaacttccctcttgtcatgtttggctgga

SEQ ID NO: 43800 - DNA, 231 bp, Glycine max
  Clone ID: LIB3093-016-Q1-K1-G5
gattcacctccctgatccctttctattttccgcagcttgccggatcgatctgtgagaggaattttgatattatttgggggtgactgaagtgggataggatttgaatggagagaggatgccagagttgagaagtgtggctagaaggtcgaaacggtgttgagatctattagttgtgtcatctgtctgttgatcaaggagagaattgggatctatttgctgctccgaatcgaa

SEQ ID NO: 43801 - DNA, 232 bp, Glycine max
  Clone ID: LIB3093-016-Q1-K1-G7
atgaaacaacatatgtttccagtgacaagaatcgattcggttggcccaaacagctagaaagggaaccttctcctccgaataatgtggaccgtgttataagtgatataatggggggaaatttgataccatctgtgtattctgatccacaaaatggatatagtatgcagattaatttggcattactgcaaatgaatatgattacctatgaccaacatatgaacaggatagaacg

SEQ ID NO: 43802 - DNA, 375 bp, Glycine max
  Clone ID: LIB3093-016-Q1-K1-G8
tctaaccacaaaaccttgctggtttcgcctgttataaacctgctggctgctagaaatgagagggagagtgtgcacatagctatccgaccaaaggtttgatagggtagctctagtgctgcagggactgtgcagattcagagtagtgacctatgtagcacatgtggagacatactggttgttgagcaatcactgctgttgcggcgggtgtagtacattttaggtgtacctgatgctcttattagcgtagatcatacaatgaagcatatgaacctattttctggggagactaccgctctcaggatattcattgactttccaagttctcaaccttcagggcaatatgaatgatagattgtcattatcgtgataaaatca

SEQ ID NO: 43803 - DNA, 456 bp, Glycine max
  Clone ID: LIB3093-016-Q1-K1-G9
cacacacccatctactgcatccttgatctccacaattctagctacctatgacaaaaattgtagtcatgttggggaataggccccagccactgatcggaaaaatctccgaattattggtctccggcggtcgtgccgccgtgctttacgatgccctcggaagccctagacgcccgtttgacatgattaacttaaagatgcaatcaccaaacggcctaataagctattaccttgatggtgtccgtctacgaattgcgctggacctcgataaatcatcatccgaggaacaaggccatgtctgcacatcaaattcaaaccgatccgaaccaatcccagttactaaccaacgtgcgtttcaaaagggtgctaatgaaattcccgctggaagctccgaggattacacgtttgtgacataccatgtacctaacagcaataccatcactaacgcttattatgatg

SEQ ID NO: 43804 - DNA, 97 bp, Glycine max
  unsure (1)..(97): unsure at all n locations
  Clone ID: LIB3093-016-Q1-K1-H1
nccacgcgtccggtttccaatattgtgggtggtgatcccgaaccctgtgattctaaaacagatgtgggacattgtacttttggcactggtggatctg

SEQ ID NO: 43805 - DNA, 344 bp, Glycine max
  Clone ID: LIB3093-016-Q1-K1-H10
tatcttctttacctatctttctctctcatctatgtcccaaaaactaactgataatttctacaaattaatgctccaataaacaccactcaatcatttccccacctatgaaaccactaattattaaacttactagaaaatagtctcaaatcgcataccaatatatctataaactgcagcaaacaacgattctacctattacccaattttcacactatataatacaccataacctatacacctgcactaatcctctaacttaaactcccaccgcattcacattcaaaaatcactcaaggttgttaaaatgtatgaaactgatgacacaagctctaatatatcatact

SEQ ID NO: 43806 - DNA, 434 bp, Glycine max
  Clone ID: LIB3093-016-Q1-K1-H11
ctgatccttgtcctcttttatctgccgcaaaaaagaaaggactgcgtgagaaggataagttattctatgctgccatgtctggccttggggatcttttgtacgacaaagatgctgtatacataaatattaatgatcaccttgttcaattctcaaaagttgatgaaaactctgctatgacgagtaaaggaaagggtggagatattggggaggatttggtgaaatcgctacagaatatcaaatactcaattaatgaaaaactagagaacagctttatcaatatttttggtcaaaagacaaatgtgtcatcataagctctatgtgatgcacatggcacaaacaaggaaattgaaccaaatggcaaaacagaagcttttgataaatatcatcctgaggctgttataactggtgaagataataacaaaatggattttgat

SEQ ID NO: 43807 - DNA, 470 bp, Glycine max
  unsure (1)..(470): unsure at all n locations
  Clone ID: LIB3093-016-Q1-K1-H12
gggagttgaaagaaagaatggaaggatgggagtgacaccgaaaattgcgccttcgatgctctcttccgacttcgccaatttggcttccgaggctcagcgcatgctccacttcggcgccgattggctccacatggacatcatggatgggcattttgtccccaatttaactattggcgctccagttattgaaagtttgagaaagcacacaaagggatatttggattgtcaccttatggttacaaatcctcttgattatgttgagcccttggcaaaagctggtgcttctggttttacatttcatgtagagacatcaaaagataactgggaagaacttatccaaagaatcaagtcacatggcatgactcctggtgtagcattaaagcctgngacccccattgaagaggtttatcctctggtggaagccggaaatcctgtggaaatggttcttgtgatgactgtagaaccgggat

SEQ ID NO: 43808 - DNA, 156 bp, Glycine max
  Clone ID: LIB3093-016-Q1-K1-H2
acgattcaacacgccataattgcaccccgttgaaaactcgtaacgttgattaaatgatggcttgcgtttctaaaccttgtcacggcaaaaagatgatctctgccaccatatttaagacgattctagaatgagattagtagcatgggcagcagagac

SEQ ID NO: 43809 - DNA, 157 bp, Glycine max
  Clone ID: LIB3093-016-Q1-K1-H3
cgcaaagccgctttctttgtttttggactgagagattaccaaaccaaacccacgaattttgggtgtggcaattcacgattcctcagaaaactgtaatggctttgatgtctgaggtcaccataaccttttttaactccatggttaatgattttagaaa

SEQ ID NO: 43810 - DNA, 465 bp, Glycine max
  Clone ID: LIB3093-016-Q1-K1-H6
attcaacacgccataattgcaccccgttgaaaacttgtaacgttgattaaatgatggcttgcgtttctaaaccttgtcacggaaaaaagatgattttggctacgaatttcaagacgattctagaatgagattagtagcatcggcagcagagacagtgtgattgtgctctccctcgtatgttaccaccagcatagctggatcatccaaagctctttgcacatgttttcgcgctggacaccctctcacactactgcacttgtagtaacccctgcaattatcattcccaaaaccaaaaaattaacacccatgaccactcctcagattcaataggttctcagaaacagcatataagaaacaaattaattgggtccactttaaattttgaaatcaagtgagagacatataaaggtaaatggatgattttaaagaaaaaaaatgttacgggattcgatccactttactaat

SEQ ID NO: 43811 - DNA, 148 bp, Glycine max
  Clone ID: LIB3093-016-Q1-K1-H7
ctcactcgtacctgaaggcgctcgcttgatagatcctgagagggcaagcacatagacatccgttgaagaacaggcactgcattattcggacatacatgcggcgacgtagacgctcacaccatatgacggatcaatggatcttatacag

SEQ ID NO: 43812 - DNA, 360 bp, Glycine max
  Clone ID: LIB3093-016-Q1-K1-H8
acgcccacgcgtacgttctaagattagtgtggctgcttatttcaacaagaggcacactgataggaaccagtagacttcttatagtattactgctcactgatgtgtgcattggttggcctggttcaatgcctgatgatcaggtattggaaaaaagtgcccttttttaaaaggctaatgggtggcttctgaaagcggattggattgcgggtagtttatggtaccctttgatggattgggttttggtgccttatagccatcataatctgacttggactcattatgctttcaatgacaagattgtggaagttcagaaggtggctagggatgcttttgctctgttgaaagggatgtggaattgtc

SEQ ID NO: 43813 - DNA, 365 bp, Glycine max
  Clone ID: LIB3093-016-Q1-K2-A1
caaggaagaaaatgatttgatgatgataagattcttgcgggctcgtagtttggatgtggagaaggcttcggcaatgttccttaagtacttgaaatggaagcgttcatttgttccaaatggttgcatatcaccgtcagagattgccgaagatattgcacaggacaaggtgtttacgcaaggactcgacaagaagggtcgacctatagttgttacctttgctgcaaaacattttcaaagcaaaaatggtgccgatggtttcaaacggtatgtggtgtttgttcttgagaagctttgttcaaggatgccaccggggcaagaaaagtttcttgccattgcagacattaaaggatgggcatacgtaaaca

SEQ ID NO: 43814 - DNA, 373 bp, Glycine max
  unsure (1)..(373): unsure at all n locations
  Clone ID: LIB3093-016-Q1-K2-A10
ctgatccttgncctcttccatcngcttcaaaaaagaaaggactgcgtgatggggaaaagttattgtatgctgccatgtctggccttggggatcttttgtacgacaaagatgctgtatacataaatattaatgatcaccttgttcaattctcaaaagttgatgaaaactctgctatgacgagtaaaggaaagggtggagatattggggaggatttggtgaaatcgctacagaatatcaaatactcaattaatgaaaaactagagaacagctttatcaatatttttggtcaaaagacaaatgtgtcatcagaagctctaggtgatgcacatggcacaaacaaggaagttgaaccaaatggcaaaacaaaaacttt

SEQ ID NO: 43815 - DNA, 372 bp, Glycine max
  Clone ID: LIB3093-016-Q1-K2-A11
atctgcattgtctatcctcttctctttttgaggtcccaaaaacaaacttagaaaatgttcaaattaatgctgcaagaaacaccactcaattatttccccaactttgaaaccacgaattttgaaactgaagagaaaatagtctcaaattgcgtttgaatatggctataagctgcggcaaacaaggattcttgctatggcccgcttttcacactagagaatccaccacagcgtttccacctccactaagcctctcacttaaactcccaccgcaatcacattcaaaagtcaagagggttgttaaaatgtctgcaactgaagtcacaagcctctagatatcataccaatactttgcaataaagccttctgagcacc

SEQ ID NO: 43816 - DNA, 398 bp, Glycine max
  Clone ID: LIB3093-016-Q1-K2-A2
cccacgcgtccgtgaagaagatggtggttgcaatgatgcttatatttcttctaatttctacgcaaatggagagcgttgagcccgatgctgcagattgcttggatggttgcactactgcctgtgttcaaagcgactcgaggcttcaagcacggtgtgatcgcaagtgcagcattagatgcggtccagattccacaatcaaggaggacatgggttgagtatgtaaagtcacagcgcaagcaagcagtgtctgcttgaccaacaccgtgtcttttttagtccttgcttatatatgatataacattttaaagtcttcccgatgctgtagtagcatccaaataaacatggatgatagacagctttttaagatcaaatttgttagggtagatgctttgtaactt

SEQ ID NO: 43817 - DNA, 393 bp, Glycine max
  Clone ID: LIB3093-016-Q1-K2-A3
ggagggtgcacgttggcatcatcaagttataaaagaaaagaaaagaaaaaaagaaggttggagttagatacacacacatcacaaaaagaaaaaaaaaaaaaagaagctacattgcttcttgttggagacatcaaacatggcaactggtgccaccccagatggattattctggtcagtgtatgaagggtgcatatcctgctacgataactgcgtcgagcgacgaccctaccaccgtaactgtggctgtgcactccataacaagtcacttattaattgcacgcacaagcttccaaggtgtaacaatgtgtcataccctatgaggagggcatggagtgaaggaagcttggtcttggcagcttcttcttcttctccttctcaagttgcaactggggg

SEQ ID NO: 43818 - DNA, 344 bp, Glycine max
  Clone ID: LIB3093-016-Q1-K2-A4
cccacgcgtccgtcacattcatccacttttcttcaaagtcttcatctcatatcctctttgttgtgtcctcacacgagtgtaggaacggcattattgtgatggagagccaggatctttcttcgccaccccacgtggacgcatctcgaccgtcccttgggttccccttgggcactgcccttctcttgatcatcatcttcaccttgagtggcgtcctctcttgctgctaccattgggatagggtgtgttccctccgtcaatctttctctgattccgaaccccaaatgccttcctcacccaccaaatctaagcactccaaggaattgaagcaaaacaggggacaaagc

SEQ ID NO: 43819 - DNA, 325 bp, Glycine max
  Clone ID: LIB3093-016-Q1-K2-A5
ctcgctttcgggctccccatgttctgtcagattgcgggtgtcgggttcgaccttgtcgtaatgggcgggtgggacccagattcgtggaaagcgtcgaattcggtttttatatacaacttcctgtcggccaaatggcgccgtggggccgacatgccgggtgggccccgcacgtttttcgcctgcgcgtcggatcagaatcgcacggtttacgtcgcgggcggacacgacgaggagaagaacgcgctgaggtcagcgcttgcgtatgacgtggccatggacgtgtgggtcccgctccccgacatgtcgcgtgagcgagacgagtgca

SEQ ID NO: 43820 - DNA, 349 bp, Glycine max
  Clone ID: LIB3093-016-Q1-K2-A6
cccacgcgtccgctctctctcaccaatgccttcctagaacgaaaaaaaaaagaagagcaattttccctcaccaaagaagaagaagcaaacaatggccgatcaacttaccgatgaacagatctccgagttcaaggaagccttcagcttgttcgacaaggacggcgatggttgcatcacaaccaaggagcttggaactgttatgcgttcattggggcaaaacccaactgaggcagagctccaggacatgatcaatgaagtggatgctgatgggaatggtaccattgacttccctgagttcctaaatctcatggccaggaagatgaaggacactgattctgaggaggagctg

SEQ ID NO: 43821 - DNA, 361 bp, Glycine max
  Clone ID: LIB3093-016-Q1-K2-A7
cccacgcgtccgaggttgaccagctgttgaacaaccctttctttggcgcggtatagggcatatgaacgaagcttatcagatatttccccatctcatggatgccaatggaaactcaattaaagccaaagcaaagttagtgcgctagttgagaggtatttattttccctccaaccattccaatactaactaactgtatttattttcttgctccctttcatttccgccattcgatactcttccatggaccttccgcttctcagcaagagtcttcaattctctctaagaaacaaaaactaccttctcctaattgccttgttcggtgcctccggttacgctgcctacaattcaccctatgtcgctc

SEQ ID NO: 43822 - DNA, 358 bp, Glycine max
  Clone ID: LIB3093-016-Q1-K2-A8
ggaacattgctttccttggttctggaattttgctggtgaagtatattgttgctgttttggcagcaatttatatgcctcaggtgaatataaactttcaggcgttggttactcgtaccggctcatacaatttttgcaataagcttgatttaccagggttgttttgtatgtatcgtcattggctattgtgaaggaggagatatgccgaggcaattaaaaaggccaacgacgttcattttcttgaagaggttggtcgttcttttataaagtgaattgaccgaacaaaaagatagaggaagcaaaagaacatcacctagatgaagatgctcttgataccacttgatgtagctccattggagct

SEQ ID NO: 43823 - DNA, 382 bp, Glycine max
  Clone ID: LIB3093-016-Q1-K2-A9
gggagttgaaagaaagaaagtaaggatgggagtgacaccgaaaattgctcgttcgatgctctcttccgacttcgccaatttggcttccgaggctcagcgcatgctccacttcggcgccgattggctccacatggacatcatggatgggcattttgtccccaatttaactattggcgctccagttattgaaagtttgagaaagcacacaaagggatatttggattgtcaccttatggttacaaatcctcttgattatgttgagcccttggcaaaagctggtgcttctggttttacatttcatgtagagacatcaaaagataactgggaagaacttatccaaagaatcaagtcacatggcatgactcctggtgtagcattaaag

SEQ ID NO: 43824 - DNA, 373 bp, Glycine max
  Clone ID: LIB3093-016-Q1-K2-B1
gtggcttgccaactaattttgattctacttactgctatgcattgggttatggtgctgcagccctccttcaaagtgggaagactggattaatatcatcggttggtaatttatgtgctcctgtagaagaatggactgttggtggaactgcactcacttcattgatggacgtggagaggagacatggtaaattcaagcctgtgatcaagaaggcaatggtggagcttgaaggggcacccttcaaaaagtttgcctccttgagggatgagtgggccctaaaaaattgctacattagtccaggtccaattcaattcactggcccaggatctgatgcaattaatcacactttactcttggagcttggtgcacaagctta

SEQ ID NO: 43825 - DNA, 375 bp, Glycine max
  Clone ID: LIB3093-016-Q1-K2-B10
ggaagatcaacctaatgtgacccctgtattcttctatgactgttaattcaaagtcagaccttgacaattcattgatattgtatcaggaaatgatcatggaattatttacatcgagggataaaatggagcagcagttattgcagatagcaaatactgtatatggcatgctgacaatgaaatagactctacatcgaatcgaagtatcaatcctaacttaaggattctaatttattaccattttcttttgctactctcatagagtgtagagtttagatattgtacagtgttaacaatcttatggggaagtgaaatcctttttcaaccacaaatagaatgtcacccacagtgagcttcaaattggtgatattctttcct

SEQ ID NO: 43826 - DNA, 366 bp, Glycine max
  Clone ID: LIB3093-016-Q1-K2-B11
aagagaatggttgggatgcctgacatggatagtctcattaagaagcctgacgttttatcatttcacatagccagtaaaatacctgtgtctgagtctacaaggcaggaatttttggatattgatagcattgcatataggctgcgtagggaaattgaattactagagagcattgatcttatccggtgtaaaagctgtgaggtaatcattgtctaaccaaagccccacagttttgcacttcttattgcttgtgaataaatatagaggcaatttgggattgtacaattctgtttcaactttcatcaaatgcagaaaatactgtttcttcctctttttttaccttaaaatttgcagactataattgcaaaa

SEQ ID NO: 43827 - DNA, 338 bp, Glycine max
  Clone ID: LIB3093-016-Q1-K2-B12
cacacacccatctcctccatccttgttctccacaattctagctacctagcgcaaaaattgtagtcatgttggggaagaggccccagccactgatcggaaaaatctccgaattattggtctccggcggtcgtgccgccgtgcttttcgatgccctcggaagccctagaagcccgtttgacatgatgaacttaaagatgcaatcaccaaagggcctaaaaagctatgaccttggtggtgttggtctaggaattgtggtggcccttgataaatcatcatccgaggaacaaggccatgtttgcacatcaaattcaaaccgatccgtaccaatcccagttact

SEQ ID NO: 43828 - DNA, 387 bp, Glycine max
  Clone ID: LIB3093-016-Q1-K2-B2
accatggcggctgcgtttacaagtacaagtgcaacactgagactgtcaaatgttggagagagcagaggtttgcagctgcgtaagtgtaaccctaatcctaataagctgaaggttatgggggggtttggaggttgttctggagtggcagtgggtgtgagagaaagaaaaggaattggaagggttagggttcgggttcgggcgagttcttcgtcggacgaggcagtgagtgcgcagtcaaaagtgactcagaaagtattctttgacgtcagtattggaaatccagttgggaagcttgtgggacgtattgtgattggactgtacggcgacgatgtcccccaaacggccgaaaacttccgtgccctttgtactggagagaaaggctttggc

SEQ ID NO: 43829 - DNA, 426 bp, Glycine max
  Clone ID: LIB3093-016-Q1-K2-B3
aaacagaggctacgtacgatcaaattaattaatatggcggaagtgaggaacaaacaagtggttctgagggactatgtgagtggttttcctaaggaatccgacatgaacatagttgaaggaaccacaatattgaagcttccacaaggttccaatgatgtgcttctaaaaaatctctacctttcctgtgacccttacatgagaatgctcatgaccaaggtggaaggcctcgacgtgtttggcacctatacacctggctctccattaacagggtatggagtgtccaaagtcctagaatctggacacccagattacaagaaaggtgatttagtgtggggatctacaaaatgggaagaattcagcttggtgtccccaactcaaatacttttcaaaattgagcacaccgatgttccgctttcatattatact

SEQ ID NO: 43830 - DNA, 353 bp, Glycine max
  Clone ID: LIB3093-016-Q1-K2-B4
cccacgcgtccggtttcgaatagattatcctaagtctttgggaatagtgctgcaatggcttcaagtcaggaggaggtgacccttttgggagctactggaagcccatttgtgtgcagggttcatattgccctcaagttgaagggagttcaatacaaatatgtcgaagaaaatttgaggaacaagagtgaactgcttctcaaatccaacccagttcacaagaaggttccagtgtttattcacaatgagaagcccatagcagagtctcttgtgattgttgaatacattgatgagacatggaagaacaaccccatcttgccttctgatccttaccaaagagccttggctcgtttctg

SEQ ID NO: 43831 - DNA, 394 bp, Glycine max
  Clone ID: LIB3093-016-Q1-K2-B5
cttggatcttaccctcttgtttgctaatattctcattcttctgtctctgcttcttctccttgtaagttctctcgctcgctctctccgcctgtttcttctccttgtggactgtaagagctgaactaagagatggggttgtctttcaccaagctttttagccggctctttgctaagaaagagatgcgtattctcatggtaggtcttgatgctgctggtaagactaccatcttgtacaagctcaagctgggagaaattgtcacaaccattcccacaattggattcaatgtggagactgtggaatataagaatattagctttactgtatgggatgtgggtggccaagataagatccgtcctttatggagacactacttccaaaacactcaggggctta

SEQ ID NO: 43832 - DNA, 384 bp, Glycine max
  Clone ID: LIB3093-016-Q1-K2-B6
atcttattttaacatgttatactgggttttggaaccagattccctaaaagcttctaacaatgagagtatgggtggatcctttcaatataattttaatgatagtcttaatcttcaggagcgtcaatctctgtcaaaaattaagggaaacaattctagtcttgactgttttgcaaacaatattccacattccaagtcgaaagcatctcctaaatcattttcacaaactacagtacttgatggcctccaacatgttcttagtcaggctgagaatgatttcctatacatggttgagcaggaaatggaggaacgtccagatttagtttcgattggatcttgtgttttacttgtgcttcttcatgggaatgatttgtacacacttaatct

SEQ ID NO: 43833 - DNA, 392 bp, Glycine max
  Clone ID: LIB3093-016-Q1-K2-B7
cttgatcggatgggagcagatccatggaaagtgttaaatcaggctagatctaagcttcggcatcatagtgctgccatacaagttccaataggattggaagatgattttaagggactagttgatcttgtgcagttaaaggccttctatttccatggttcaaatggtgaaaatgttgtcactgaagaagtgcctgcagatatggaagccttggtggcagagaaaagacgtgaactcatagaaaccgtgtcagaggttgacgataaacttgctgaagcttttcttggtgatgagaccatatcagctgctgatcttgaggaagcagttcgtagggctaccatagcccagaaatttataccagtattcatgggtagtgctttcaaaaataaaggggt

SEQ ID NO: 43834 - DNA, 327 bp, Glycine max
  Clone ID: LIB3093-016-Q1-K2-B8
attcaaccaaaaatcaaactaacaaaatgaacacaaacaaggtctttacagtgtctgatatcatcaccccgagttcttctagttctgccgttgacccaccgacactgtccctggggctatccttttcatctgaccaaagacagacatcatcaagacattcagctttacatgccatacaatgtttcagcaatggagaaagcatcattagtgttgcttgagattatggtccttggattcacatattaattacatatactaatctttctctagtttcctgtctttttggtgggagaaagagaaagaggttgaaggaaagggtgatggatt

SEQ ID NO: 43835 - DNA, 392 bp, Glycine max
  Clone ID: LIB3093-016-Q1-K2-B9
aaactttttgctttgcaaatggctgctgcaactgctgcaactgcttcttggatgcgattcaaaggcggcaaggaaaggaagctaaccaagatgaataaatccaggattaattgctcttattcttcttcttcttctgtgatagatccttacaagaccttaagaataaaacgaggtgcctctgaatctgaggttaggaaggctttcagacagctcgctctgcagtaccatccagatgtgtgcagagggagcaattgtggggtgcagtttcacgaaatcaacgaggcttatgatgttgtgatgtccaaattgagaggagaatcaaatgaggcagaatcgtatgaggcttattatgatgctggaggcatgatgagccacttgagggaatgaacgat

SEQ ID NO: 43836 - DNA, 372 bp, Glycine max
  Clone ID: LIB3093-016-Q1-K2-C1
cccacgcgtccgattttctctctcacttttcaagaatcgtaagctatgggaaagtcttacccaactgtgagtgctgattaccagaaggccgttgagaaggcgaagaagaagctcagaggcttcatcgctgagaagagatgcgctcctctaatgctccgtttggcatggcactctgctggaacctttgacaagggcacgaagaccggtggacccttcggaaccatcaagcaccctgccgaactggctcacagcgctaacaacggtcttgacatcgctgttaggcttttggagccactcaaggcggagttccctattttgagctacgccgatttctaccagttggctggcgttgttgccgttgaggtcacgggt

SEQ ID NO: 43837 - DNA, 390 bp, Glycine max
  Clone ID: LIB3093-016-Q1-K2-C10
cccacgcgtccgcccacgcttccgctttctcttcctcttcctctgtgaatggggtttctgccttttttaacggcaatttcgaatcgattcgattgggtctctcaaagttttgattgcacagtttgcgaagatgcctcgtcccaaaagaaaagctgccccaccaatcacttcctctgatgttgattcttctcttcgcaccgaaccaaagaaatcaactataaagcaatttgatcgaatagataacttatttgagtcatatgcaaataagtcattgggtttaattgacccagacgggattgaagcactttgtaaagatgggcatgtggaccacacagatggtagaatgctcattacttgcttggaaaattgaagcttaaaaacaagggtttt

SEQ ID NO: 43838 - DNA, 314 bp, Glycine max
  Clone ID: LIB3093-016-Q1-K2-C12
cccacgcgtccgctttggattccctttcagacacttcatctggggtcacccgaccaattttcaaagaatggggcggctcaacagccctcttagattggctcgaatcacccactgcccacatcttaaaaattaacgttccaggattcagcaaggaagacataaaggtgcatattgaggatgggaatattcttcacatcaaaggggaagtttggagagaggagcctcaagcaaaggagaaggatactgtttggcatgtggctgagagaggcactgggaagggagggttctcatgggaaattgaattgccagagaat

SEQ ID NO: 43839 - DNA, 377 bp, Glycine max
  Clone ID: LIB3093-016-Q1-K2-C2
gggtttttggctacggttcactggtgtggaaccctggattcgattacaatgagaagattataggtttcattaaggactacagacgcgtgtttgatttagcgtgcattgatcaccggggaacacctgaaaacccagcaagaacttgcacgttggaggagaaggaaggggctatttgctggggagctgcttattgtgttcgaggaggccctgaaaaggaaaaactggctatgcagtatttggagcgacgggaatgtgaatatgacagaaagactcttgtaaacttcttcaaggaaggagattcactgcaccctactttaactgatgtaatagtattcacatctactccagacaaagtgaacaacaaatactacctggga

SEQ ID NO: 43840 - DNA, 361 bp, Glycine max
  Clone ID: LIB3093-016-Q1-K2-C3
aacaacttctgctacttcctactccaaccgcacttctgctccgcaattatcatgggcaaggtcaagatcggaatcaacggatttggaagaattggccgtttggtagccagagtggctctgcagagagacgatgttgaactcgttgccgttaacgaccctttcatcaccaccgattacatgacatacatgtttaaatacgacagtgttcatggacactggaagcatcacgatgtcaccgttaaggacgagaagacccttctcttcggtgacaagccagtcactatttttggacacagaaaccctgaagagatcccatgggggtcaactggagctgacatcattgttgagtccaccggagttt

SEQ ID NO: 43841 - DNA, 362 bp, Glycine max
  Clone ID: LIB3093-016-Q1-K2-C4
cccacgcgtccgcccacgcgtccggtctggggcttcaatgacctgtgctggttgccagggtactggcatgaaggtgtctattaggcaccttggtccttctatgattcagcagatgcagcatccttgcaatgagtgtaagggtactggagagacaatcaatgacagagacaggtgccaacagtgcaaaggagagaaagttgttcaggagaagaaagtacttgaagttgttgtggagaagggaatgcagaatggacagaagattacattccctggtgaagctgatgaagcagtatgttgagctttgataccaacaccgtgctggattatggaaattaggctgaccttgatcttttttttgtttg

SEQ ID NO: 43842 - DNA, 424 bp, Glycine max
  Clone ID: LIB3093-016-Q1-K2-C5
cccacgcgtccgtttgtcctttacagttggaaccatgagcgagattggcctggaacaggatccttttatgagaacatggattctgggggagaatgtggtgtgttggcacagactatgttctacacccctgcttctaacagggctaagctttggtatggcgacatgacttcatacatttcttcaaattataatcaataaattagcgaattgttagatttttcccgtttagaaaggttatcttcttttgggtttaatgatttgagcatgaagaaagtgaatcaccaagaattacaaatgccattcaataaagagtaaataatcaaattgaggctttgaaataattttataccaaagtccaccaatgcttttggtattaaagctttaggtagaaaatacttcacagaattaatcagggttttggaaa

SEQ ID NO: 43843 - DNA, 420 bp, Glycine max
  Clone ID: LIB3093-016-Q1-K2-C6
cccacgcgtccgccgaaatctcatatctggaaaaactgccgctgagagtttggacattaactttaaagtgagctctgctttggtggaaatagtgaaaagaataactacaaaacctcgctatataattgcaaagggtggtattacgtcttcagatcttgctacaaaagcccttggtgcaagatgtgcgaaaatagttggtcaagcacttgctggtattcccttgtggcaattaggccctgaaagtagacaccctggagttccttacattgtcttcccaggtaatgttggtaacagcacagcattggcagaagttgtaaagtcctggactagtccaatcagacttacattaacaaaagaaattcttaataatgcaaaaaaaggtggatatgctggtggagcatttaattgatataattttga

SEQ ID NO: 43844 - DNA, 406 bp, Glycine max
  unsure (1)..(406): unsure at all n locations
  Clone ID: LIB3093-016-Q1-K2-C7
ctccatattaccaactcaactattggcattgaactgaagacaactaagggtagaggtggttatatgaaaaacatcttcatttctgacgcaaaattggaaaatatttacttgggtatcagcatgacgggaagctctggctcccatccagatgacaagtacgatcctaatgcagttccggatgttggtaatgttacttttgagaatgtgattggtacaaatattgctattgctgggaatttttcaggaatagttgattcgcctttcactcctatctgtcttttgaacgcgaccttttcttccagttctgagtcatcatctccttcatggttttgntctgacataatgggaatctccgaggaagtgtttcctgagccatgtccctgactgcagaacacgtattcaaact

SEQ ID NO: 43845 - DNA, 403 bp, Glycine max
  Clone ID: LIB3093-016-Q1-K2-C8
cccacgcgtccgagcattttgtggttcgcattccagatagattaccacttgatgctgctgcacctcttctttgtgctggcatcactgtgtatagccctctcagatattatggacttgacaagcctggtctgcatgtgggtgtggttggtcttggtggactaggccatatggctgtcaagtttgccaaagcttttggtgctaaggtcacagtaataagtacttcaccaaacaaaaaggaagaagcaatacaaaatcttggagctgattcctttctaataagccgggaccaagatcagatgcaggctgcaatgggtactttggatggtattattgacacagtttctgccgttcatcctctcttacctctcattggtttgctcaagtctcatggaaagcttgtaat

SEQ ID NO: 43846 - DNA, 374 bp, Glycine max
  Clone ID: LIB3093-016-Q1-K2-C9
cccacgcgtccgcccacgcgttcgcttacgcgtgggctagcctgcacatcaaggcttctgctgaacagttctatgatgttttttgcaacaagccacacactattgccaacatttcaccagaaaatattcagtcagttgaagttcataaaggtgaatggggcaaagagggatcaatcgtctcctggaactatttacatgagggaacagtttgtgtagccaagcaagtgcttgaaggcatagacaaggaaaataacaaaatgacaatgaaggtcatagagggtgacgtgctgggactctacaagagcttcaagtctaatttgcaagttacttcaaaaggaaaaggcagcgtaatgctttgggcaatggaatacgag

SEQ ID NO: 43847 - DNA, 389 bp, Glycine max
  Clone ID: LIB3093-016-Q1-K2-D1
cccacgcgtccgggatggtttgcgaacaaaagataaagagcgtatacttgttcttgcggctacaaatagaccttttgatcttgatgaggctgttattaggagacttccacgaagattgatggttaatttgcccgatgctccaaacagagaaaaaattgttagtgttattttagcaaaagaagaattggcacctgatgttgatttcgaagcaatagcaaatatgactgatggatattctgggagtgacctaaagaatctatgtgtcacagcagctcactgtccaataagagagatcttggagaaggaaaagaaggagagaagcttagcattgactgagaaccaaccattacctcagttgtgtagcagtaccgacattcgtcccttaaaga

SEQ ID NO: 43848 - DNA, 324 bp, Glycine max
  Clone ID: LIB3093-016-Q1-K2-D10
ataaaagaaacccaaaatctttctctttctctcgttcgctttccgtatccatatatatcccaaaccctaccggtaggttccccaattcttcaacaccccgtggaccggtgctctgcttcttagtagttcgtacggtttttccgtcgattgcctccgaaacgatgtcgtatcgcccaagcgggaactccaggaccgaggtccgccggaaccggtacaaggtggcggtggacgcggaggaaggtcggagacggcgagaggacacgatggtggagatccgcaagaaccgcagagaagagagtttgcagaagaagaggcgcgaggggc

SEQ ID NO: 43849 - DNA, 358 bp, Glycine max
  Clone ID: LIB3093-016-Q1-K2-D11
aaattccaaacacatgtaattgtgtgccgcctcattggaccagcccagaccctcaccgaaccgacacccttgtctcttttcctctcttctcttctattcctaaattgtagttctgttttgccagtgattgaagctagttagaacaagatgttgcagctactctacactgcgattttctccgaaatgcttttgattctcacgctcgtcttcaaaaccccactgagaaaactcgtcatcgtttccctcgatagtgtgaagcgcggtcgcggtcccgtggtggtttccaccgtgggcgccacattgatggtggttctcgctttgagcctctacagcatggccaagaaccagcaacgcaccc

SEQ ID NO: 43850 - DNA, 354 bp, Glycine max
  Clone ID: LIB3093-016-Q1-K2-D12
gcaagtgccattttattttgccctacctcctcgattctagggtttcaacaatggcgctgttccttctctacgaatccgcttcgggctacagcctgttcgaggttcacggcgtcgatgaaatcggccagaacaccgaagcggttcggaactccgtttcggacctcaacaggttcggcaaagtcgttaagcttcgctccttcaaccctttcacttccgctctcgatgctctcaaacagtgcaacgccgtctccgaaggcatattaactgatgagctgaggactgtcttggagaccaacttgcctaaagtgaaggaaggtaagaagtccaagttcagtttaggtgtgtccgatccta

SEQ ID NO: 43851 - DNA, 410 bp, Glycine max
  Clone ID: LIB3093-016-Q1-K2-D2
tgatccagtgaggcgcatttcaaccaatcatggtgttttttccgaccaaaagagaaggcaatgaataaattaatgaactcaaactaaaacaccaaggaaaaaaaaacacaaaatataaaacacaaaacacaaacaaagagagagaaagaacaaagactgttttgtttctctaagttgttgttgcagttagcttcccgagcaccgtgtggtcgggtattgtattgtattgagagagtgatttgtaggttctttctgatcactgtggtgcgtccattgaagaggaaacatcaaacatgggttggattccctgttctggatattctggcactaagaacaaagttgagaagatggaagttcaggatagtctcgttggtcagatcaaagccaccccaggaaagttgaaaaggaat

SEQ ID NO: 43852 - DNA, 418 bp, Glycine max
  unsure (1)..(418): unsure at all n locations
  Clone ID: LIB3093-016-Q1-K2-D4
cttagcttagccttctcctattctggacctctgtcccttcctcttgattagggttctaattatgttatgaaccttccatgcttttatttttcttttaaaaaaagaataaagaaaaccctacatatgggtttgtggggtatattcagtcttcaatatcatggctctctttgtattcttccacagctttcttgaactgcatccaaagagttcctttgcatgcatgccatggcactcttactcccaaatcttgttttgcggttcaataaagctgtgggaagatacagatagggtcaacaacggactagcttatctcaaactccagattcttctctaaatcttcctatccaattatatatagggataaaattattgcaaagtattttttttcctttttcttttgngatttgacttaatttaa

SEQ ID NO: 43853 - DNA, 375 bp, Glycine max
  Clone ID: LIB3093-016-Q1-K2-D5
cccacgcgtccgtgaaatctgggggctggcaggattcttttgaagatgaaccatctcaaaatggcagtttggcatatactgctcaaaatgggggactaaatacacctcatacagtagtcaatcaaactatgtctatcatacctatctctgcaggtggtgctcctggagctgttcctggtcccacgacaaacttaaatataggaatggattattggggtacaccagcttcatccaacattcctgcacttggcagaaaggttccatctactgcagttgctggagggatggttaccgttggatctcgggatagtgctcagtcacaactttggctacaggatgaaagagagcttaaaaagcaaaagcggaagcagtcta

SEQ ID NO: 43854 - DNA, 362 bp, Glycine max
  Clone ID: LIB3093-016-Q1-K2-D6
gggcggtatactttctgcgcttcttggcggcgacgcggcggcggcggcgtcttcgccggagagttctacttctagagtctcctccttccactcgtcgccgcgctggcagctctacttcaacgagatcaaagataccgataagctcgtaaatccctagatctcgattttcccccaattttttctctatgcgctggatctgaatattttccttgaaaactaggttgtgatagatttctcggcgtcgtggtgcggtccttgcaaattcatagagccagcgattcacgccatggccgacaagttcaacgacgttgacttcgtcaagatcgacgtcgacgaattacctgatgtggcgcaggagtttc

SEQ ID NO: 43855 - DNA, 387 bp, Glycine max
  Clone ID: LIB3093-016-Q1-K2-D7
tcaagacacactttgctagaccaaattggcgcagtgttttcaaacacactgcactcaaacaccctgggaaaagagttggtgttttctactgtggggcgcacacattggttggagaacttaagaggctttctcttgacttttccaggaaaaccaacaccaagtttgattttcataaagagaatttttaaattcttttatcatagttcgtatttttttttccaactgtaacgtatgtagttgagggaaagtttctagttatatatagtttgttggggtttttttctttggtactagagctaggtagataagcagctagctgcattcaattagagttgtatacatgtataaaaaaattcattttgatataaatgaaatggttacgttggt

SEQ ID NO: 43856 - DNA, 377 bp, Glycine max
  Clone ID: LIB3093-016-Q1-K2-D8
cagggaagagaaaggactagagacagaggaagcatatccctacacaggaaaagatggtgtctgcaaattctcagctgaaaatgttgctgttcaagtccttgactctgtgaatatcaccttgggtgctgaagatgaactaaaacatgcagttgcatttgttcggccagttagtgtggcctttcaggtggtgaatgggttccatttctacgagaatggagttttcactagtgacacttgtggtagcacttcccaggatgtgaaccatgccgttcttgctgttggatatggagttgaaaatggtgtcccatattggctcataaaaaattcatggggagaaagctggggtgaaaatggctacttcaagatggaattgggga

SEQ ID NO: 43857 - DNA, 374 bp, Glycine max
  unsure (1)..(374): unsure at all n locations
  Clone ID: LIB3093-016-Q1-K2-D9
agcacttagtgctattcaataattactaaaaaccaacagcgagtgttgtttttgtttggtccaggctggaccagggaatgaatagagatgagaggctttcggttgaagagaactgagttaagcggcgaagccaaacgcagaatcggcggcagaaattgccaccggaagcacgtcgaagacgggtgaaccaaacacaaaattccatccaccacttctcttttcaatccccaactcaaatctgtgaagaaaatctcaatttctaaattgtaattcttagcactactgctagtagtagtaaaaaaaaacaattagaaagtagtagagtgtttttttttctttttttcgnttggtttacttttaagatgggtgagaag

SEQ ID NO: 43858 - DNA, 378 bp, Glycine max
  Clone ID: LIB3093-016-Q1-K2-E1
caacacctttgccttgctgcagttcgcaactgcaactgcactcaaatataaatatatatacatatatatatatatatatatatatgtattacttcatggtcacacatagttaagtttattaattactaggtagctggttttgaatagggtagttggtagttatagttgttgtcccagatatggaagaagcaggtttaggagattgttgttcctcgaattcgacgattacgaggaagagcgataagcgaaagcagcaacaccaacaacaagagaagccatacagaggaataaggatgaggaagtggggcaagtgggtggcggagattagagaacccaataagcgttcgaggatctggctgggttcttacgccacccccg

SEQ ID NO: 43859 - DNA, 342 bp, Glycine max
  Clone ID: LIB3093-016-Q1-K2-E10
cccacgcgtccgcttcttataaaattggaaaatccttgattttgcttcgttactactgggagagtttacgagaagtatcaaacccataaaagacgtttcttcaacatcattgaccttcgttgaatttaattcgttcaaaacggcgttgtgtttccggcaataccacgacggaaggcccagaggccccctttggaaaggaaaaaagctcattggcaaagaagcgctttttgtcatatcggggtttaagaggtttaacgatgacgaggataagcttcacaagttcatcaaaactcacgttctcagactcttgaagatggacatgatcgctgttctcactgaact

SEQ ID NO: 43860 - DNA, 367 bp, Glycine max
  Clone ID: LIB3093-016-Q1-K2-E11
agcaaattttccctcatttattctcctctcctcacaaatcacttcccttattcaataccaaatcaaattattccttctcaatcgattctcttcggccatgtttgcttacagggttttgtcccgttcctctgccaccctttctcgaagcttcacccttttctctgtttcacgaaattcccaacctttctccaccaacctctccaataacttcaattccctccttcacccatctcccaacaagctgattccagttcaaaccaattttctgaattcaatgaatccatcattgacttcgagatttggattttcttcaacggcctcacatgaacatgcaagtgaaggagcaaaggtatctgatcagtctgaa

SEQ ID NO: 43861 - DNA, 390 bp, Glycine max
  unsure (1)..(390): unsure at all n locations
  Clone ID: LIB3093-016-Q1-K2-E12
ggtgatcttatggatagtttttgtgtgtattgatgaacatttcaatgaagagctaaagtatgtttcatgattatgcatgtcactattgtattgtatatatgcacatgtgtctatgagcgtctcaatttagcttctctcccattgatgtctttcttagacaggtagaaaaataagcaggagagagttgaatgtgtaataatcaagcagaggtaatgactctcagttaattacctgtgtgtccttatgctttttctgtttatgcatgcttcgatatgtatggatattaagatattttcaggtggtatagattctaccatttttattttttttaaaaaaaaatatntccttaattttattacttattatattttatatatttatcattatata

SEQ ID NO: 43862 - DNA, 378 bp, Glycine max
  Clone ID: LIB3093-016-Q1-K2-E2
cgatatttggaggagcaggttcgtggtgattaccttcaacatgtgcttaagcttttgtcttcatgctcccctgatgttctggaaccaataaggcagagcattttactgggtggtcaatcattaaaatctttagagcctttagtcattaaagcagtggtggagtcactagttgaaaagtcagttgaggacttgagacaaatgaaggggataacagcaacctataggatgactaataaacctctacctgtgaggccttcaccatatgtttcaggggtattacgtccccttaaagcttttttggatggggagagagctacaagatatttggccagtgaaattaggaataaaatactcctttgtgctgcaactgagattact

SEQ ID NO: 43863 - DNA, 396 bp, Glycine max
  unsure (1)..(396): unsure at all n locations
  Clone ID: LIB3093-016-Q1-K2-E4
atgaaaccaaaaaccaaattcaacactgcccttttaatacttttctgttttcagagccccagcctcacacaagttcaattttttgtcacccttttctgattatatccttgtcctcttctccgagcaataaaaaaaccttcttctttctctttactgcgtgctcctctgcgtgaaactgggacacccctttagccctctttcgctctttgcctgccaaaggctttaactttgtcactttagctccgtacaatatgtgccccatgtcacttctttggtctaattcctcaaattgagcaactgggtcgtgcttacttggtttttgttgatggctgagaacgtttgacttgtgtttcccacaagnttgattcttttggttttggtctttttcccttttta

SEQ ID NO: 43864 - DNA, 305 bp, Glycine max
  unsure (1)..(305): unsure at all n locations
  Clone ID: LIB3093-016-Q1-K2-E6
cccacgcgtccgtggagaggatatatacaagtacttgggtctcaaggaaggaaaatcatccaaaaagtttagaagaagatgagatcatatcactgccaatgagtgaattaatgcgacggataaatgaatcatatgaagccatgaaaaattgaggatagactgagatgtcaagcaacttgtgcgttgtagtacaattttgagcaaatttttgcattaaattaaaaaaaattgtatactaattgattgactatataaacaattttctagttatatttttgcgnaaaaaaaaacaatacaaaagaaaa

SEQ ID NO: 43865 - DNA, 368 bp, Glycine max
  Clone ID: LIB3093-016-Q1-K2-E7
gtatgttggaaaagcccagataaaatttgagcgtgaacaagaactgaaaggacgatttgagcagagcataaaggaagctgctgacaaatatccaggtttgaacttgtatctcaagaacttggatgatacaatcagtgatgaaaaacttaaggaaatgtttgccgactatggtacaataacttcttgcaaggttatgcgagacccgactggaatcagcagaggatcaggatttgttgcattttcaactcctgaggaagcaactcgagctcttggtgagatgaatggtaaaatgtttgctggaaaacctctgtatgttgcccttgcccagagaaaagaagagagaagagcaaggttacaggcacaatttt

SEQ ID NO: 43866 - DNA, 359 bp, Glycine max
  Clone ID: LIB3093-016-Q1-K2-E8
gcttcagcggctatgcctcgttaattcttccgatcttatttcacatttcatttccccatttttctcgcatttccttcaattagggtttcttttttcttagctgttgcaattgattttcattttactcacctggttcggttttcacatttgtttaaacttgttacacctctgtcacgattgatgtggtccagacttgatgctttgatcccatcattaatgaccacagtgaagttcaaatgatgcttgtttcctggccatttctatagttttgtgacgtgattgagaatgtggaactttgcatctagtttaattgctggaagtgtgggtctgaaaaatgattctccaaaaccaactcactc

SEQ ID NO: 43867 - DNA, 340 bp, Glycine max
  Clone ID: LIB3093-016-Q1-K2-F1
cggacgcgtgggcggacgcgtgggcggcaacgcccatcaaaatttagtggatcagactactctactgatgaaggagatagtctagttcagaaaagaaatcatggaatgcatagcaaacgccatcgacaatcagaatctagtgaatctgacttgtcaagtgatgacgctccccataagaaaggccacagaaagcaccataaacatcacaagcgatcacataatgtggagctgaggttgtctgattctgattatcgcagtcatggtcaaagaagcagatcaaagtcattggaagaaaattctgaagatgaaagcaaaaaaagatcaatggataagaagtctg

SEQ ID NO: 43868 - DNA, 358 bp, Glycine max
  Clone ID: LIB3093-016-Q1-K2-F10
aggaccttattgggaatgtctagggtttcacgcctgtgatgtttgattacaagatccatgatgaaaacaagtcactctacaatacccctccttgttatgggatttacatgtgtgggttggtgtttgaggacttgttggagcaaggtgggttgggggaggttgagaggaagaatcagaagaaagctgagattctctacagtgcaattgatggcagcaaagggttctataaatgccctgttgagaagtctgtgagatctttgatgaatgtgcctttcactttggagaaatcagagctggagggtgagtttatcaaggaggctgctaaagagaagatggtgcagctcaagggacataaatc

SEQ ID NO: 43869 - DNA, 404 bp, Glycine max
  Clone ID: LIB3093-016-Q1-K2-F11
gttcttgccaaacttgaattggtatactgtcgggtcctttccacagaaaatatacttatggggagtcttatctcataaatatggattctgaaagcatcagcttgccagagaagattcggttagtcttgtttagcctatgtgatctactgatgacaacagttactcacatttcttcttatcatgttaaacaacaagcagaatttctgtggcagaaagtagggaatgatttgaatgtaatgactcttcaatggttaaaacaaaaatcagaattcagccagaaccaaaacctggacattttggaactggggaacatgaaagataactattcaagtaatcaagtattatgggatcgctgtgcggatccccaaattgatatctgattgctttgcacaggaaaaactcaa

SEQ ID NO: 43870 - DNA, 347 bp, Glycine max
  Clone ID: LIB3093-016-Q1-K2-F12
ggattttcagttcctcacatgcactttttgtgaagccagtgaagaggcagatgatggggaagagcaagggattgagaattgcatgccaagccaccagcatttccgctgatagagtccctgacatgggcaaaagacagctcatgaatcttcttcttcttggagccatttcactccccactgctggaatgcttattccctacacctacttctttgtccctccaggttcacgttcttcagctggcggtactgttgccaaggatgccgatggaaatgatgtaattgccgagaattggctcatggcacatggacctggtgaccgaacccttacacaaggattgaaaggagat

SEQ ID NO: 43871 - DNA, 264 bp, Glycine max
  Clone ID: LIB3093-016-Q1-K2-F2
ctcacgcgggagcatacgcgttaatgtcatctttgctcaacacacacgttatacacctatttggggtgggatcacgcgttgaaaaacattcaaaaagccggatgcgagagtatggtaaaagctaggagacaactaatggaacgcaaccctgacacaaaatgagacaacgagccgtctgattcggctgaggcaaccaactcaaatgttcaaacttcaacgctatctgcatcatatgcaccctgatactatgcatccatccttaaa

SEQ ID NO: 43872 - DNA, 361 bp, Glycine max
  Clone ID: LIB3093-016-Q1-K2-F3
cggacgcgtgggcggctccgttaggttttcctttcgcgtgtttgctcggaactactcctccactcatcgtttaaaatgtctgacgtggaagagtttcgttgcttcattggtggccttgcatggtcaacgtctgatagaaagttaaaggatacatttgaaaagtttggcaagcttattgaggcaaaggtggttgttgacaagttctctgggcgttctcgtggttttggatttgtcacatttgatgacaagaaagcaatggacgaggctattgatgctatgaatgggatagatttagacgggcgaactattactgttgatagagctcagcctcaacaaggatcaactagagatgatggtgatc

SEQ ID NO: 43873 - DNA, 391 bp, Glycine max
  Clone ID: LIB3093-016-Q1-K2-F4
cccacgcgtccggaacaatttaagcgccttcttggagtcaaaccaacgcctaagaaggaactgagaagtacacctgctatatctcacccaaagtcattgaaattgccaaagaattttgatgcaaggacagcttggtctcagtgtagcactattggaagaattctagatcagggtcactgtggttcttgttgggcatttggtgctgttgaatcattgtcagatcgcttttgcattcattttgatgtaaatatctctctctctgttaatgaccttcttgcatgctgtggctttctgtgtggatctggctgtgatgggggatatcccttgtatgcgtggcaatacttatcccaccacggtgttgtcactgaagagtgcgacccatattttgatc

SEQ ID NO: 43874 - DNA, 383 bp, Glycine max
  Clone ID: LIB3093-016-Q1-K2-F5
ctagcttggactatgggttcaagggtgctgattttgccatggcttcttactgctctgaactccaatatcttgcaaatccagtaactagccatgtccaaagtgctgagcagcataaccaggatgtgaactctttgggtttaatttcatccagaaagacaaatgaagctatcgagatccttaagctcatgtcttccacattcttgattgcactttgccaagcgattgacttgaggcatttggaggagaatttgaaaaactcggtcaagaacactgtgagccaagtttccaaaaggattcttaccacaggtgtcaatggagaactccatccttcaagattttgtgaaaaggatctgctaaaagtgggtgatagggagtacgtattt

SEQ ID NO: 43875 - DNA, 384 bp, Glycine max
  Clone ID: LIB3093-016-Q1-K2-F6
aatacaacagcaacatgatggtttcagtttcttgagggtactaatatgaacagaatctcctctcaacacctttgccttgctgcagttcgcaactgcaactgcactcaaatataaatatatatacatatatatatatatatatatatatgtattacttcatggtcacacatagttaagtttattaattactaggtagctggttttgaatagggtagttggtagttatagttgttgtcccagatatggaagaagcaggtttaggagattgttgttcctcgaattcgacgattacgaggaagagcgataagcgaaagcagcaacaccaacaacaagagaagccatacagaggaataaggatgaggaagtggggcaagtgggtggcgg

SEQ ID NO: 43876 - DNA, 350 bp, Glycine max
  Clone ID: LIB3093-016-Q1-K2-F7
cggaccgtgggcgcatctagcgtgtataaagaaagatgatgagttaaggtggagtgtactcgtaatggtcacgttcctgtttctctgttttggcttggacccctgcaagtcaaagcctctaattctgtttccgccttcgtcaaaacgccatctactcaacagaatcgcgttttctccaaatcctattgcccctactgtttgcgcgccaaacgcttgcttgctgaactcaatgaaaacttttgtggtggagctcgatttgcgagatgatgggtttcaaattcagagtgttcttctggattgaaggtagaaggacagcccgaagtgtttggaatggcagcatattggggatc

SEQ ID NO: 43877 - DNA, 386 bp, Glycine max
  Clone ID: LIB3093-016-Q1-K2-F8
cccacgcgtccgatcgtcttttgcatattatttgcgccatcgtcgagagaagcgtgagagacttctcgtttatgatgagagctaagatagtttagttgtcaagtcataaatcagtatcatcactttaaatttcattagaagctgtcaaaatgtcacggaagggtttgatggagcaagacctgagtaagttggatgtaacaaagttgcatccactttctccagaagtcatatctcggcaggctactattaatatcggcactataggtcacgtggcccatggcaagtcaacagttgtgaaagcaatatcaggtgtccagactgtgcgtttcaaaaatgagttggagcgtaacattacaatcaagcttggctatgcaaatgcaaaaata

SEQ ID NO: 43878 - DNA, 355 bp, Glycine max
  Clone ID: LIB3093-016-Q1-K2-F9
ggcatttgagggttgaagccatatttttcagttaccacacctttgccttctgtaggtggagacacacagttatactcccctcagcaatttccatacactgggccaccttattatcatcagctggttcctcctagcttaccatatcttaattcacctactccagtttcacagccagagctcaccagcctggtaggtattgaccaacaagttgataacatgttttttggaccaagagcgggctatccgtcagtgggatcttttggtagaggcaactttcctgtagcacctggttcctttggctttcatgaatcccaacaaggatttgaaggatcaagatctggtggaatctggtcag

SEQ ID NO: 43879 - DNA, 351 bp, Glycine max
  Clone ID: LIB3093-016-Q1-K2-G1
acaaaccaaagagaagttgagactgttgatgattactcacatcatggcaaaactcaagatgattcatctgcagtgcaaactaatattgctgaatcatctataaaaaatatgggtgatgacaagagagatcctttacaagcacaaacttataatcaagatttggaatcttctctgatggataaagaagctgttgtggacacacaaactctggatcgagacatggttgggagtgatgcacatcatctggataaacccctttgttcaatccccacagaagaaaatttggaagggggtgtagttgaaagtcttgagactgggttaagtagtttaaagggttccttaacaatggaa

SEQ ID NO: 43880 - DNA, 275 bp, Glycine max
  Clone ID: LIB3093-016-Q1-K2-G10
gaccgtccggattccggctcgcccagctcccattctttagatgtgcgtttcttttgcatccataatagcaaacagtggggtctagggtatcaaatgatgtcatccaccctggtaccaccttgaaggcatcacacagttgatgtctgccacatgcagatgctgatactaagttagcttctagaactgaagagcattcacattatagtacagaaggtgggaataatggcatcctatctggcactgctacttcaaatcctaacaatgacctgagaaca

SEQ ID NO: 43881 - DNA, 221 bp, Glycine max
  Clone ID: LIB3093-016-Q1-K2-G11
gattcacctccctgacccctttctattttccttttatcgccggatcgatcattcaggggaattttgccagtattggggggtgactaaattgatctatgatctgaatggacagaggatgccagagttgataagtggagctagaaggtcgaaacggcttggatatctatagcctgtgccactgcctgttgatcaaggagagaattgtcaatatcctgctgctc

SEQ ID NO: 43882 - DNA, 202 bp, Glycine max
  Clone ID: LIB3093-016-Q1-K2-G12
cctaagggacccgggaagccagactgataccgctctttgcgcacaatctgaacgtgaatccggctagaatgcctgcaccggcacgagctccgtgacctcaccgttagaggattgcgacacctagggcggcgaccaggaagaacctatgtttcatatggcacagcgtcgcatctctcaaaacgaggaaggcgtatgcaacttg

SEQ ID NO: 43883 - DNA, 347 bp, Glycine max
  Clone ID: LIB3093-016-Q1-K2-G2
gcagaagggttcctcactctcttcatctgattgaacaaaatgtacacctcgaggaagaaaattcacaaggataaggatgccgagcccactgaatttgaggagacagttggacagtacttgttcgacttggagaacaccaatcaggatctgaaaagtgacttgaaagatctctacataaaccaagctattcaaatggatgtggctggtaatcgcaaggctgtagtcatctatgtgcctttcagattgaggaaggcattccgcaagattcatcttcgacttgtcagagagttggagaagaagtttagtgggaaggatgttgtcttgattgccacaaggaggatcgtgcg

SEQ ID NO: 43884 - DNA, 328 bp, Glycine max
  Clone ID: LIB3093-016-Q1-K2-G3
gcagaagggttcctcactctctccattttgattttctaaaatgcacacctcaaggaagaaaagtgtacaaggttaagggggccgagcccacttaattttaggagacagttggacagtactttttctactatgtagaacaccaatcaggatctgaaaagtgacttgaaagatttctacataaaccaagctattttaatggatgttgctggtaatcgtaaggctgtagtcatctatgtgccttttagattgaggaaggcattccgtaagattcattttctacttgttatatagttggagaaaaaatttagtgtgaaggatgttttcttta

SEQ ID NO: 43885 - DNA, 316 bp, Glycine max
  Clone ID: LIB3093-016-Q1-K2-G4
cccacgcgtccggaagatgttgatctagcagttgcagctgctcgcaaagccttcgaccgcggaccttggccaaagatgacagcctatgaaagacaaaggatattgctgcgcgctgctgatctgtttgaaaagcacaatgatgaccttgctgcactcgagacttgggataatgggaagccatatgaacagtctgctcaaatcgaaattccaatgctggttcgcctatttcgatactatgctggttgggcagataagattcatggtctcacagttccagctgatgggccatatcatgtgcaaacattgcatgaaccca

SEQ ID NO: 43886 - DNA, 311 bp, Glycine max
  Clone ID: LIB3093-016-Q1-K2-G5
gattcacctccctgatccctttctattttccttagcttgccggatcgatctgtgagaggaattttgccattatttgggggtgactgaagtgggctatgatttgaatggagagaggatgccagagttgagaagtggagctagaaggtcgaaacggcttggagatcttcagcctggtccactgcctgttgatcaaggagagaattggcaacaacctgctgctccgaatcgaactatgaggagagttggaggtggtagaggaagaagtggtaatgccacagctgtaggcaaagggccatcaccagctgtaccca

SEQ ID NO: 43887 - DNA, 368 bp, Glycine max
  Clone ID: LIB3093-016-Q1-K2-G7
atgaaacaacatatgtttccagtgacttgaatcgatttggttggcccaaacagctagaaagggaaccctctcctccgaataatgtggaccgtgttccaagtggtagaatggggggaaatttgataccatctgtgtattctgatccacaaaatggtcaaagaggcagtcaaaaggccagaactgcaaatgaatatgattacctaggaccaacatatgaacaggatagaacgagaaaaacaagtaagagggtggataacaaccaattatctgccgtgggggacaagaggaagatagaatctcgtgttaaacttgtggatgaattgcattttgaggctaatcattctgatcctgacgataatttaaatgcc

SEQ ID NO: 43888 - DNA, 371 bp, Glycine max
  Clone ID: LIB3093-016-Q1-K2-G8
tctaaccacaaaaccttgctggtttctcctgttataaacctgctggctgctagaaatgagagggagagtgtgcaaatagctatccgaccaaaggtttcatggggtggttctagtgttgcagggactgtgcagattcagtgtagtgacctatgttccacatctggagacagactgattgttgggcaatcactgctgttgcggcgggtggtgcccattttaggtgtacctgatgctcttgttcccgttgatcttccagtcagtcaaataaacctatttcctggggagactaccgctctttggatatccattgacgttccaagttctcaacctccagggcaatatgaaggagagattgtcattactgctataaa

SEQ ID NO: 43889 - DNA, 188 bp, Glycine max
  Clone ID: LIB3093-016-Q1-K2-G9
tgcaaggggaggactgaagtttactgtttgcaaaacatgggattgaagggtgtactattttaggcttgtaatttatattaacttgttaactgccagcacaaattgaagctaggtaggaatactattggaatgcacaatctgattactatctttatggatcaattttgtaaacttttgaaagagtatat

SEQ ID NO: 43890 - DNA, 323 bp, Glycine max
  Clone ID: LIB3093-016-Q1-K2-H1
cccacgcgtccggtttccaatattatgggtgttgatccaaaaccctttgatcctaaaacatatgtggaagaggatacttttgtaactgatgaatctggaaccagaaaacgcatacgtttggagaacaatattgtacgctggaggactactagaaatcctgatggcacaacatcttgtgaaagcaacgctcgctttgtgagatggtctgatggcagcctgcagctattaattgggaatgaagttcttgacatatcagtacaagatgcacagcatgatcaagcacatcttttccttagacatggaaagggaatcctccaatcaca

SEQ ID NO: 43891 - DNA, 274 bp, Glycine max
  Clone ID: LIB3093-016-Q1-K2-H10
cccacgcgtccgtcaacctttaaactctccaaacgatgttagctgcaaaccccaccttaaaaatcgaagctttatgatcaccaccctagtgttgtgttggtgatgaatcctaggagcagcttgtgttcttctctgttcatgttcatcaccttgttggggcttcatgtgtacttcgcttcgtcgcaggtcgaagactacgtgagatgtctacggggcatcgaggacactgtctccgaccctcaggctcggctcgccacgtggaggttcgacaaca

SEQ ID NO: 43892 - DNA, 298 bp, Glycine max
  Clone ID: LIB3093-016-Q1-K2-H11
attattacatcttcttgcaccccttattattttattacgccgagcaaacacaggatcgttttcatcgaccaacgggaagaacaaaattagcgttatggttctcttcctttctcggaactaggcttgcaaattcatatacccttttcttttttccaataaggttgcaaaggatttgttccccaagcagttggagaacatgatgtctctggtctctcctcggactggcaggcattcgcagtgctataacacaggacttggacaaacccctgcaagcatttcttccaaatactaaaacatt

SEQ ID NO: 43893 - DNA, 281 bp, Glycine max
  Clone ID: LIB3093-016-Q1-K2-H12
acgatggcctaagccgcatccttcaccattttgtctctcctactcctccaccgccacctgcgcctccccctcgccctggcgcgtgcagctcacctcctccctccgcgcccgcccgctgcgccggctgggcttcgccgcggcggacccgctgctcgcggcgagtgtatcggtgcgcgtggcggcggtgagaggaggaagaaagggcgccaggggggcggtgtctatggcgaataagagcgtgggggacctgaacgcggcggacctgaatgggaagaaagtct

SEQ ID NO: 43894 - DNA, 340 bp, Glycine max
  Clone ID: LIB3093-016-Q1-K2-H2
aggaattcaggaaggtgttcaacaaggaacattccgacaacaaagcagtgtctgctgtgggcaaagctgctggagcaaaatggaagacgatgtctgatgctgaaaaagcaccttatgtggcaaagtctgagaaaaggaaagtggagtacgagaagaacatgagagcttataacaagaaacaggcggaaggtcctactggtggggatgaagaagaatctgagaagtctgtatctgaggtgaatgatgaggatgatgacgaggaaagcagtggcgaggaggaggatgacgattagagaatggactgatgataatagcatttatgtaagttctgatgattttg

SEQ ID NO: 43895 - DNA, 360 bp, Glycine max
  Clone ID: LIB3093-016-Q1-K2-H3
cgcagagccgctttctttgtttttggtactgagagattaccaaaacaaacccacgaatttttggtgtggcagatcacgattcctcagaaaactgtaatggcttttatgtcggaggtcaacatgagcttctctcactacatggatgatgaatatgagaaactcttccggagaatgaaccctcccagggttgtaatcgataatgaagcctgcaagaatgccaccgttatacgggttgatagtgcaaacaagcatggaatacttcttgaagttgtacaaatcctcactgatctaaacctcatcataactaaggcttacatttcttctgatggtggatggttcatggatgtttttaatgttact

SEQ ID NO: 43896 - DNA, 237 bp, Glycine max
  Clone ID: LIB3093-016-Q1-K1-A2
acgcccacgcgtacgcgaagaagatggtggttgcaatgatgcttatatttcttctaatttctacgcaaatggagagcgttgagcccgatgctgcagattgcttggatggttgcactactgcctgtgttcaaagcgactcgaggcttcaagcacggtgtgatcgcaagtgcatcattatattgcggccaaattccacaatcaaggaggacatgagttgagtctgtaaagtcacagcgc

SEQ ID NO: 43897 - DNA, 445 bp, Glycine max
  Clone ID: LIB3093-015-Q1-K1-B3
gtgaattacgtttgaaaatgcacggtcggcctcgcaaagcgttgaagcaagaagatgaagccgcttcagcagccaaagctgaaaagcttcgttcactccaagctcagttcctcgccaatcaccacaatcacatttatagcaaggaagcgttagatgtgagcgcgaagcttctagaagtgaatccagagtgctacacagcttggaattacagaaagctcgccgttcaacatcttctctctaactccgattccgatcctcactctatcttcgatgacgagctcaaactcgtggagattgcgctgaggaagaatttcaagtcttacggcgcgtggcatcatagaaaatgggtactcagcaaggggcattcgtccatagacaacgaaatgcgccttctgaatggttttcagaagatggatcctcggaattttcacgcctggaattaccg

SEQ ID NO: 43898 - DNA, 446 bp, Glycine max
  Clone ID: LIB3093-015-Q1-K1-B4
ccctttctctctctcattctcttctccatcgcgcgtaagaaacacattttagttgctactaatgggaactgttgaagctgcaaacaaggatgcaaatggaagtctcctagagaaaaatccttcagttgtttttgtgttaggtggcccaggaagtggaaagggtacccaatgtgcaaatattgtccaaaattttgggtatactcatctcagcgctggtgatcttctgcgagcagaaatcaaatctggttctgaaaatggtacaatgattcagaatatgattaaagaaggaaaaattgttccctctgaggtaacaattaagctcttacaaaaagcaatgcaggaaagtggcaatgacaaatttcttattgatggttttccccgcaatgaggaaaaccgggcagcatttgagaaagtgacaggaatagagccagcatttgtcttatttt

SEQ ID NO: 43899 - DNA, 451 bp, Glycine max
  Clone ID: LIB3093-015-Q1-K1-B5
aaaaattcttaaggatggccacagcagaagaaatttcaactttgaaactgttgcgccaatatctcttgggggatatttcagacccttttctcaccaatctcattccagtaaaacttgaagacccctcatcaggacttgatatgggttcaaacttctcagaacaaagcagcttctgcaagtttctggagtgctttgattttgaagcagaagtggtaggtctcacttctcatcataaggtccaaagctccattgcaacaagtccaccccagaatttcaattttccagaagaaccaatggtgtcaatgaaaaaggaagcaacatgttatgcaacaaggcattacagaggagtgaggagaaggccatgggggaagtttgcggcagagattcgcgaccccaaaaagaaagggagcagggtgtggcttggcacatttgacactgagattgatgctgc

SEQ ID NO: 43900 - DNA, 412 bp, Glycine max
  unsure (1)..(412): unsure at all n locations
  Clone ID: LIB3093-015-Q1-K1-B6
cccacgcgtncgcctagattcagccacagttggaaaaaaaaaaaaagttgttcgagatggcacgtacgaagcaaactgctcgtaagtccacaggaggaaaggcacctaggaagcagctcgcaaccaaggctgcacgtaagtctgcaccaactactggtggtgtgaagaagccacatcgttatcgtcctggtaccgttgctcttcgtgagattaggaaataccagaagagtaccgagcttttgatcaggaagctccccttccagaggctggttcgtgaaattgctcaggacttcaagactgatctgcgtttccagagccatgctgtgcttgcattgcaagaagctgctgaggcataccttgttggactctttgaggatactaatctgtgtgccattcacgctaagcgtgtaac

SEQ ID NO: 43901 - DNA, 442 bp, Glycine max
  Clone ID: LIB3093-015-Q1-K1-B7
gcttgcttgagttgccaactttaagtttgtcaatttccgtgctgcttggttggttgcaattgcaagtgaacaattggctagtgtgtactagttttgaatcacaatggcagaggatgatggttacacgaaagatggaacagtcgattactgtggaaatccagctaataaaaaggaaactggaacctggaaagcctgcccctatatcttaggaaacgaatgttgtgagagattggcttattatgggatgagcacaaacctggtgctttatttcaagaaccggctaaatcagcatagtgctactgcttccaagaatgtctctaattggagtggaacttgctatatcacaccattgattggggcatatttggctgattcctaccttggaagatattggacaattgctgttttttcaataatttatgctattggaatgacactcttg

SEQ ID NO: 43902 - DNA, 442 bp, Glycine max
  unsure (1)..(442): unsure at all n locations
  Clone ID: LIB3093-015-Q1-K1-B8
gggaagaagaactgagctacaagctaaggaaggancaaagagaanggctcaagcaacggcatcaaagactagcttacgtggttcctctcaggctgtgttggaaggtagccttggctccacacgcttgaatgtggggagtggaagcagggtggcctcagtcacacgtgcagggttcacagttagagcacagcaacaacaagtgaatggtggtgaggtacaaagtagccgtagggcagtgctttcacttgatgctgctggtttgaccactggctcttttgttcaagctgtgcttgctgatgccaaacctatcaaagttggaccacctcccccaccttctggcggattacctggaacattgaactcagatgaaccaagagaccttaagctgccattgaaagataggttcttccttcaaccattgtctccaactgatgctgcacaa

SEQ ID NO: 43903 - DNA, 443 bp, Glycine max
  Clone ID: LIB3093-015-Q1-K1-B9
gccatgtcttcctctctcgctcttccttccactcccttcttcgccaatggaacaagaatcttcgctctcaagcactctctccctcgctctagggtttccatgagcgtctccgctggatctcaggcttccgttcaccaggctttgttcgccgattacaaggcctccacttcattcctcttcccgggccagggtgctcaagctgttggaatggggaaagaagctcaaaatgtgcctgctgctgcggttttgttcaacaaggcaaatgacattttggggtttgatcttcttgatatatgcatcaatgggccaaaagaaaagttagattccaccgttattagccagcctgctatttatgtcacaagtcttgctgctatagagctacttcgtgcacgtgaaggaggtcagcagattattgactcagttgatgttacatgtggtttaag

SEQ ID NO: 43904 - DNA, 449 bp, Glycine max
  Clone ID: LIB3093-015-Q1-K1-C1
agggttttagcgcagcttcttctagatttaaggaagatgggtaaggaaaaggttcacatcagtattgtggttattggccatgttgactctgggaagtccactaccactggccacctgatctacaagcttggaggcattgacaagcgtgttattgagagatttgagaaggaagctgctgagatgaacaagaggtctttcaagtatgcctgggtgcttgataagcttaaggctgagcgtgaaagaggaatcacaattgatattgccttgtggaagtttgaaaccaccaagtactattgcacagtcattgatgcccctggacacagggatttcatcaagaacatgatcactgggacatcccaagctgactgtgctgttcttatcattgattccactactggtggttttgaagctggaatttcaaaggatggacagactcgtgaacatgctct

SEQ ID NO: 43905 - DNA, 449 bp, Glycine max
  Clone ID: LIB3093-015-Q1-K1-C10
gttactcaccaggaaactcttgagtcaaaggttaacgagtccaaggccatggttaaatttcaacttaagaaggtgctctgcatgggagtagctgtggggaatgttagtatggaggaaaagcaaatcttccaaaatgttcaactgagtgttaatttccttgtctctttgttgaaaaagaactggcaaaatgtgagtagtagtccactatcaatattttgttaagtcattgcttctggtgccttcttttttgatgtgattttcttaaagttatatgttcttgtttctgttttattattggtgtaattaaaaagctctgctactataagaatagtctttgatatcagatgtggcatggattgaatccatgcttatcacaggttttatcttctgcttatatggttatgtagatgatgacaagattcttttgtacatgtctcttctttctgttt

SEQ ID NO: 43906 - DNA, 447 bp, Glycine max
  unsure (1)..(447): unsure at all n locations
  Clone ID: LIB3093-015-Q1-K1-C11
ggtgaagtcaacaaagaaagaaaaaaagctttctccgagaaagcttctgttcacgtcagggtccggggtaggcttcttcattgagattgggttggtgttcagtgtgaatgcatttccagtgagataagagaaaaggaacgaggggaagaagcgacttatattaagaaatattaatatacttaatttaatattaatgttcgggtacccccctccggctcgtagttgagaagagctttcgtttaggaaagggctaaatgggtgcgatccctctcgttgagagtcaagggtctcctggagtagaaggcacatcctggatctattaagccggcaagggttcagcattggctttcacgaccgcaaaggggccatctctcagtcggagtagataagatagatatacttaatttaatatctnttattatatattttaatataataaagaaaatc

SEQ ID NO: 43907 - DNA, 423 bp, Glycine max
  Clone ID: LIB3093-015-Q1-K1-C12
caaacccaaccctagattgagagaaaaatccccaaaaacaaaacacacatctctttcattctctccctcaccaaaccctagattgaaagaaaccctaacacaccatgggaacacccgagacatcgcgcgaaccctgccccgatcgcatcctcgacgacataggcggcgccttcggcatgggagcggtgggtggctccgccttccattttctcaagggtctctacaattcccccaagggcgatcgcttcgtcggcgccacccaggccgtgcgcctcaacgccccccgcgtcggcggcagcttcgccgtctggggcggcctcttctccgccttcgactgcaccatggtctacgcgcgccagaaggaggacccctggaactccatcgtcgccggcgccgccaccggcggctttctctccatgcgcc

SEQ ID NO: 43908 - DNA, 453 bp, Glycine max
  Clone ID: LIB3093-015-Q1-K1-C2
cttttctctctctttctctcaggctcagctctaaaaacttgtcttcaatattctgtttttcttatcagtctttggttttctagatcagatggaggaaagcaagaaaaacccttctcaacttaacagattccaggatgatggaatgcacgatcttgacatagttgaatggaaaaagaaaagaaaattacagagtgatcagttggatttgattagacctaaacataaatgctgggttggaagtttctcctctgaacatgcttcagtgtttgataaaaatccagttttagagagcatgcacaaccacacagttgaaagctccaaacatgaatctgccaaagacagcaatagttttatggaagactgtgatactgccatgtctgtaaatgaagaagccaaacacgagacagattgtggaagttcatacttatatgtaaatagggtaagctatatcga

SEQ ID NO: 43909 - DNA, 453 bp, Glycine max
  Clone ID: LIB3093-015-Q1-K1-C3
ctcagaaacctagcatctagccaagacaatgcaaacaaatgggtgcaagacaacatcaaaaactatgccaacaatgtcagattcagatacgtttcagtgggaaatgaagtgaaacccgaacactcatttgcacaatttctagtgcctgcattggaaaacattcagagggccatttctaatgctggccttggaaaccaagtaaaagtttccactgccattgatactggtgccttggcagaatcattcccaccatcaaagggttccttcaaatctgattatagaggagcatatcttgatggtgtcatcagatttctagtgaacaataatgccccattaatggttaatgtgtactcttacttcgcttacactgcaaaccctaaggacattagtcttgactatgcactttttaggtctccttcggtggtagtgcaagatggttcacttggttaccgt

SEQ ID NO: 43910 - DNA, 318 bp, Glycine max
  unsure (1)..(318): unsure at all n locations
  Clone ID: LIB3093-015-Q1-K1-C4
aaaaataatactatatataacatgttaattgcttaatatgtgctttaagagtaaagaataacatcgtgaaatcaaattacccctttttcaatacgtgttgaatcatcgatcttggtttgtaatttggttgtatattcacaaaattaataagtatattgtgatgtgattaattcccttctctgttatggtgtacttgccttccctgtattgtccatctccatcgtctgtctattaataagaattcttatgtgatattttcatttcncaaaaaaaaaaataaaaaaacaaataaagatagaatcaaaaaatttaaagata

SEQ ID NO: 43911 - DNA, 448 bp, Glycine max
  unsure (1)..(448): unsure at all n locations
  Clone ID: LIB3093-015-Q1-K1-C5
cccacgcgtccggacaaatcctagagtttctcctttggttgaaagagagggacctgtgagtgtcacaaacatgggagaggagaatgttaaacaaccgttgttggagaggaagtactacaaggactgcccaggttgtaaagtggatcaagccaaagagttgagtgagggaaagggtgtacctgttaaaaatctttttatcatgtggatggtggtgctgtgtgctgcactgcctatatcatctctctttccattcctctatttcatggtaagggatttcaatattgcgaaaacagaagctgatattagttcttatgctggttatgttggctcttcattcatgcttggcagatgtttgacatctgtattatggggaattgtagccgatcgctatggccgaaaacctgttatagttatggngattattgcagttgtcattttcaacacatta

SEQ ID NO: 43912 - DNA, 452 bp, Glycine max
  Clone ID: LIB3093-015-Q1-K1-C6
cccacgcgtccgcggacgcgtgggctgcaccatcgtcctgcatgtcagaggtccagagggtgaggttatcacacacactttctctctctctctctctcacccagatcttgtagcaatggcgagcgctcccactccacgcgaagagttcgtgtacatggcgaagctggcggagcaggccgagcgctacgaggagatggtggagttcatggagaaggtctccgcctccgccgagagcgaggagctgaccgtggaggagcgtaacctcctctccgtcgcctacaagaacgtgatcggcgctcgccgcgcctcctggcgcatcatctcctcaatcgagcagaaggaggagagccgcggcaacgaggaccacgtcgccgtcatccgcgactaccgctccaagatcgaggccgagctctccaacatctgcgacggaattctcaaactcctcgacacgc

SEQ ID NO: 43913 - DNA, 445 bp, Glycine max
  Clone ID: LIB3093-015-Q1-K1-C7
cccacgcgtccgcccacgcgtccgtaggcacccagagaggtattcaatatgaaaggaagggttgacgaaatttgcatcgatgagctgaaatatttaaaatcagttgtcaaagagacactaaggttacacccaccagctccacttttacttccaagagaatgtggacaggcatgtgagattaatgggtatcatataccagtcaaaagtaaggtaattgtgaatgcttgggcaattggaagagatccaaagtactggagtgaagcagagaggttttatccagagagattcattgatagctctattgactacaaagggactaattttgagtacattccatttggtgctggaagaagaatatgccctggcagcacttttggtttgatcaatgttgaggtggcacttgcatttttgttgtatcactttgattggaagcttccaaacggaa

SEQ ID NO: 43914 - DNA, 444 bp, Glycine max
  Clone ID: LIB3093-015-Q1-K1-C8
ctttcttgtaacttcaacaaacggcagcttcttcaattcaagttctctctttttgtttatttcatttgtttattttctctctcttttctttttctatttgatttcattgtttgtgtgtctgttttccttatcattgtgtctctatgacagaacagaactctcttgggtgttggtgttggtgagggatctgaggcaaaggtgttgatgatatgggagcgtgtgtttcaactccacaagggtgcgtgggagggaggttgagctcttccaagaagaaaaccagaaagagaaggagagagggactcagaagaagagttacttctcggttgtgtaaggaatcatcggagaaagttgatgtggcagggttgcctgattgttcctttgctaaccccactttccaaggaagtattgaagaggcatggtttgattccattgcagtatttgact

SEQ ID NO: 43915 - DNA, 443 bp, Glycine max
  Clone ID: LIB3093-015-Q1-K1-C9
cccacgcgtccggtggtggcaatgtgttaccaatatcatatcatatattctttcatcttcttgggttagggttctacacttgcaatctcctttcacacccacccacccttcaaccatttcaattccttccctcacccaaaccgcactatcgttcttcgacacggtcctgtttattaagcggtttggataaaagaatagaagcgtaaaatggccttcgtagcacatcaacctcagggtttgtttgtgacatcttcctcgaggcgtttgccatggagcaaaaggctgaagttgaagcagtgtttaacaaaacatcacatgattggaagaactgaccggcattgcctagtaaagtggaatgcttgtttaagtttagggcctccttgcttttgtgtatccaagttcaaacctttaaggatttcaggcttcaaaggcagcacccaaaa

SEQ ID NO: 43916 - DNA, 449 bp, Glycine max
  Clone ID: LIB3093-015-Q1-K1-D1
gttgttgaggcggggctagataaatcaaagggaccattcgcttcatttattgtgcagaatggcaccctcagacggggagatatagtagtttgtggagaagcttttggaaaggtgcgggctttatttgatgatggtggaaagcgggttgatgaagctacaccctctatacctgtacaggttattggattgaataatgttccaattgctggtgatgaatttgaggttattgaatcccttgatactgcacgtgaaagggcagaaactcgtgctgagtcattgcgtaatgagcgtatttcagcaaaggcaggggatggaaaggtcaccctttcttctttagcttcagcagtttcgtcaggaaagctgtctggactagatttgcatcaactaaatattattttgaaggttgatcttcagggatctattgaagctgtcagaaaagctctggagat

SEQ ID NO: 43917 - DNA, 446 bp, Glycine max
  Clone ID: LIB3093-015-Q1-K1-D10
cccacgcgtccgcccacgcgtccggaaattatcatgaatccaattatttctgctgcttctgttattgctgctgggttggccgtagggcttgcttctattggacctggggttggtcaaggcactgctgcagggcaagctgtagaagggattgcacgacaaccggaggcagagggaaaaatacgaggtactttattgcttagtttggcttttatggaagctttaacaatttatggactggttgtagcattagcacttttatttgctaatccttttgtttaatcctaaaaaaatagaaatacatatccttttttccgtggacttgctttaccggtcttgctttttcgaattctatttatattaatatttcactcctataattctttatccgttcggacaagaacacaggggaaggactaattgaaaggtgaagaattcacatactgatt

SEQ ID NO: 43918 - DNA, 332 bp, Glycine max
  Clone ID: LIB3093-015-Q1-K1-D11
cccacgcgtccggaattcacggataatcccttccttaacagtgatcttgatgataacatgggttttggctggaaggcatgactaacacaatcttggacatgaaatcggcatatcatgtgttgatgaagtgtttatcttattatctttgtacaggacactttaaatagatgctgtttttttccttgtttttccctgttattttcttgatggaatttgtttggactcggactcggactcgagtaggtttttagagattttatttgagggtttttgtcctgcaagtgtaatctattggacaatttaatgaacagttagtttattatacggcactc

SEQ ID NO: 43919 - DNA, 205 bp, Glycine max
  unsure (1)..(205): unsure at all n locations
  Clone ID: LIB3093-015-Q1-K1-D12
gcgtacggcaaacatcaaccnacgcgtccggaatctcatgctgatacattcattaacacatatcttgctgcggactctgataatacctgtgaagcatcccataacacattcttgtacataaattcaggatattatgagctcatgtaccggttaacttattatatctattcgacactctctaaatagatactgaatacttccatgt

SEQ ID NO: 43920 - DNA, 451 bp, Glycine max
  Clone ID: LIB3093-015-Q1-K1-D2
ctctaatagaaatatttctggacgtgaatgaaatatgatccagtatttcttataaacaaccttttattatacccaccactgcctccatttttgtgccttttaaatcagtgtaacaaaactgtggaccttcttgttatactctgttggccttgacaaccatctacaagttttcaaggaaaagattcactatattgccctatctcatgccaatttctgaatcattgtgtggctattttttatgtgcatgatgtttgcataaagagatataatatgattctaagctgcatgagtctattatgtctacaatatcttctttttgcaggatggagaggcttatgcttacttgcttaatgctcttgccccagaagtggcaggcccatctgccctaaacacaagtgatccaacagaaagggcaaacatggttcttgagcaggcagagagattagattgc

SEQ ID NO: 43921 - DNA, 455 bp, Glycine max
  Clone ID: LIB3093-015-Q1-K1-D3
ctgaccgggaaaagaaaaaccagctttcttcaagcacctagatttcctctctctctaaatggcgttctcttcttttctcggcagagtcctcttcgcctccgttttcatcctctccgcttaccaagaatttaattcttatggagttgatgggggacccgcagcaaaagcactcagaccgaagtttgatgcctttgcacatcaagtacattctaaagttggctttcaacttccagatattgatatgaaatttttagtggctggggctattgctctcaagggccttggagggattcttttcatactcagcagctcttttggagctttccttttgcttttgcatcaagtgatcactactccaatactgtatgatttctacaattatcacagtgaggacaaagaatttatccaacttttcatcaaatttactcagaatatggctctcttcggggcattgg

SEQ ID NO: 43922 - DNA, 457 bp, Glycine max
  Clone ID: LIB3093-015-Q1-K1-D4
ctctagtcgacttgggtctcgcccttcttcgtcttctagtcacagtcacagggtcaaccgcttcagattatcgtctcttctatgtggcacctccacctctcgctccgttcatcagatggaagaactttcagctgaacttcgggttgattcagcaagggattttgatggtgaaattcagaaagacactgaggaatcgtctttatcatatacagaagctagaattagctccagtcgccctgctgaaactgcaaccctatctgatatgagaactgagttccatgggaatactagtgttgaaggttcttctagaaacgttgcaacaaatagtcagaggaactgcttgtctgaacatgaggagcttgtccctccttatcaggtaagtgctggtcatactggtcatgaatcatatagtgatagtagcaacacagctagtacttcatttgtagaacagcagtct

SEQ ID NO: 43923 - DNA, 451 bp, Glycine max
  Clone ID: LIB3093-015-Q1-K1-D5
ctcaagcttcttgaaagtcagttggagcctttaaccgagcaacaattgatgggcatctacaacttgcagcagtcatcccagcaggctgaagatgctctttcccaagggatggatgcattgcagcaatcactgtctgagacattggctaatggttcacccagcacatcaggctcctcgggaaatgtggcaagttacatggggcaaatggctatggccatgggaaagcttggtactcttgatgggtttcttcgccaggctgacaatctgcggcagcagacattacaacaaatgcttcgaatattaacgaccaggcaatcagctcgagctcttctcgccatcagtgattatttctcacggctgcgagctctgagttctttgtggcttgctaggccaagggagtgaagcatttcacagctccattagtggacttctttcatacctgaccccctta

SEQ ID NO: 43924 - DNA, 455 bp, Glycine max
  Clone ID: LIB3093-015-Q1-K1-D6
cggaatcaaaagcaagtgctaagaagttccgtgttcctattctcaaacctgtagcaccaaacccaagttgtcatccaagttttataatactacatatattattattatacgatacataacaatagtattaatattgttgtgattgtgtgtgatttttggtgtcgtccttttttcttatattaaggtggtacggagcttatatgtgttgattcaattcgtcgacaagaaaccttagtttgatatttgattggttctgtggagagttttcctttggtgtggttggtttgtgctgtttttggttgggaataggaatggctaatgaaggaaagaaaagcaataacttctattcgatcttgggcttgagcaaggagtgcactgaattggagctaaagaatgcttataggaaacttgcaaagaaatggcacccagatcgttggtcagccaccgggaattta

SEQ ID NO: 43925 - DNA, 446 bp, Glycine max
  Clone ID: LIB3093-015-Q1-K1-D7
caaaaactaagttcatttcttgtgctttgctttattcctcaaaaccaaacatgtcgaacacatgcggcaactgtgactgcgctgacaagactaactgcaccaagggaaacagctatggtgttatagtagagactgagaagagctacatcgagactgttgacatggatgttccagcagctgagcatgatgggaagtgcaagtgtggcactaactgcacttgcacggactgcacttgtggccattaaggaatatgtatgaaaatgtaattgccatgtgtttggcaatacaaatctccaaataatgtaatcttcgtatgaataaatgtgtgctgttatcctacttcagggtctgtgtagtcatgcagtctgaatcatgtccagttcctgtcatagttattaacagccatggttgtggcattctatatatggttttatagtagataaaaa

SEQ ID NO: 43926 - DNA, 442 bp, Glycine max
  Clone ID: LIB3093-015-Q1-K1-D8
cacgattctgtccactctcatgtgtgcccctcgttctgtttattcctgggacattgtcgtccagcgtgtcggaaacaagcttttctttgataagcgcgatgggtcgcagctcgatttgctctctgttcatgaaacctcgcaggagccattgcctgagtcgaaggatgatattaactctgcccattcgttgagcgttgaggctgcttatatcaaccagaatttctctcagcaggtgcttattagggatgggaataaggttacttttgatgaggctaacccttttgctaatgaaggtgaggaggttgcttctgtcgcttataggtataggaggtggaagcttgatgatgatatgtatcttgttgcgaggtgtgaggttcatagtgttgttgacgtgaacaagcagaggtcgttccttactttgaatgcgttgaatgagtttgat

SEQ ID NO: 43927 - DNA, 383 bp, Glycine max
  Clone ID: LIB3093-015-Q1-K1-D9
attttcttactttcctctcacgctctgccacaaaactccgtctccgcaataacggaataaaaaaacaagtttaattactattatggcgccgagggatcataagacaagcaacgctaaggctaacggtaacggtaacagcggggtgaaggaggtgcattttcgtggagtgagaaagaggccgtgggggagatacgccgcggagatcagagatcccggcaagaagagccgcgtctggctcggaaccttcgacacggcggaggaggcagcgcgtgcctacgacgccgcagcacgagagtttcgcggccctaaggccaagacaaacttccctctccctttggaaaatgttaagaactcgagccccagccagagcagcaccgtcgagt

SEQ ID NO: 43928 - DNA, 455 bp, Glycine max
  Clone ID: LIB3093-015-Q1-K1-E1
cccacgcgtccgcaagctaagatctgggctttggcttaaaggaatattccgtggggtgatcatagtttttaccctgttcttatgatgggtgactcagaggtggcaaagttcggcttaaaagtcgggaagaatgagaaaaatgggttcccaaggggactagatcctgcaatatccaagttttttgtgcagctccaaagtgttgttaagtctcgacttagtagattagcaaaacaggatggaatgagtttgatgagttctgtccaaagaaaaggggataagtctttcagttactctgaagctgaactaaatgagcaactgcaagcatggagagaaaatccatcttgggttgacaagcctccactaataaaggtcactgctcccaaaggttctctttgcaaccttgatgtagaagttgatgttggcctaccccctgatgcagtatataatatagtgat

SEQ ID NO: 43929 - DNA, 187 bp, Glycine max
  Clone ID: LIB3093-015-Q1-K1-E10
ctgaagccttctcttaccttgaaacaaaccgagccactggaaaggttgttatacatccaatcccttgaatcaaataaaagggataggcaatttttctgtgtgtctagtaaacttcacattctgtgcaaatcagagtttagataaaaactcaaaaaaatataatgaacttcatttttacattcttagt

SEQ ID NO: 43930 - DNA, 450 bp, Glycine max
  Clone ID: LIB3093-015-Q1-K1-E11
agacttttcctccttctggagctcagggcaagatcaccgctgcttccgggcctcctcgtgacgctgatgattcattttcaaaacctgtatctggttctgatgaaccgcagcagggtggttggtttcagacttttacaattgctgcttacaaaccatactttgatgttgacacttcagatgttctagagaggattatcgactcactatttccatttagaggatctttcaatgaaaaaactgctaccaaccctgatttgtatggtccattctggatttgcactaccttgatatttgtagcggcatctattggcacctttgtgacatatatagcgcacaagctaaagagcaaagaatgggattatgacataaatctggtgacttggtctgctggtttggtttatggctatgttaccattggtcctctttgcctgtatgtaatcctcaaatatt

SEQ ID NO: 43931 - DNA, 447 bp, Glycine max
  Clone ID: LIB3093-015-Q1-K1-E12
gtctctgccgtcacaaaaaagagaaaagtctccgtgtcgtcgtgactaacagtgtgagtgagtgtttgtgtaaatcggggaaattgttgggctattcaagagatcggcagcggcgtcatgggtggagatggagccacggcaaacgcggaggcgcagtacgccacggcgaagatatcggtgtggtgggacatcgagaactgccacgtccccaagggttcggatccgcacgcgatcgcgcagaacatcagttccgccctcgttcgcatgaactactgcggccccgtctccatctccgcctacggcgacaccactcgcatccccgcctctgtgcagcacgcgctctccagcaccggtatctccctcaaccacgtccccgccggcgtgaaagacgcaagtgacaagaagattcttgttgatatgctgttctgggcagtggacaatcctgca

SEQ ID NO: 43932 - DNA, 449 bp, Glycine max
  Clone ID: LIB3093-015-Q1-K1-E2
gatcaagaggtggatgaggaggaagcctccctctttgacatgctctggttactacttgcaagtgttgtatttgtgccaatatttcaaaagattcctggaggcagtcctgttcttggctacttggctgctggtatcttgattgggccttatggtctctccatcattcgtcatgttcatggaacaaaagcaatagccgagtttggagttgttttcctgttattcaatattggcctggagctctctgttgaaaggcttagttcaatgaagaaatatgtctttggattaggctctgctcaggttttggtgactgctgtagttgttggcttggtggctcattatatttgtggtcaagctggccctgctgctattgtcattgggaatggcttggcattatcatcaactgctgttgttctgcaggttttacaggagagaggtgagagcacatcacg

SEQ ID NO: 43933 - DNA, 456 bp, Glycine max
  Clone ID: LIB3093-015-Q1-K1-E3
atttctaactaattattgtgcttattattattgttgagaaagaaaagaatggcaaagttaataaaattctttgagttgaacacaggggccaagattccttctgttgggttaggcacttggcaagctgagcctggtgttgtagccaaagctgtcaccacagccattctggttggatacaggcatattgattgtgctcaagcgtataacaatcaagcagagattggttctgctcttaagaagctttttgatgatggtgtggtgaagcgtgaggacttatggatcacctccaaactctggtgttcagatcatgcttcagaagatgtgcccaaagcattggataaaacattgcaggatttgcaacttgattaccttgacctctatctgatccactggccagtgcgcatgaaaagcggatcagttggattcaagaaggaatatctcgatcaaccggacatt

SEQ ID NO: 43934 - DNA, 456 bp, Glycine max
  Clone ID: LIB3093-015-Q1-K1-E4
gcaaacatcaaccagcgctctatggaaggaacaagggacaccgagattgcaatgggtgcgtaccaacctcatcatacctgggcaagaagccagtatcatcctcgtgggcaaatccatggatataggatgtcactttgggctgaacatacgggtacgattgaagactgcttcttacaaccagagagccttgaatgtgttagtaggattagaacaatgggtgagctgaactggaagcaatttgcatcaaatgatgtaacagaaatgacagggcatctgctcaagtacccggtagaagtcgatcgaaagggtaaggtaagatccctcccgggccacgaagagtttccggatgtgggaggaaagattgtaggatcattcattgccattcaggagaatctaaccatttgattacttttttacattcactttgctggccattaggataggaataggatgaat

SEQ ID NO: 43935 - DNA, 456 bp, Glycine max
  Clone ID: LIB3093-015-Q1-K1-E5
cccacgcgtccggaaaaagaaaaaagcgatcatagtttcacttcggccttatccagtttagggtttcggttctctaccctatctttcacgtatcgaaaccttaaatttacgatcaggtctgagcaatctggttggtagaacctttggtcttagtgagtcaagttttatgtctgaattagacgatcaaattcctactgccttcgatccttttgctgatgcaaatgctgatgactcgggtgctgggtcaaaggagtatgtgcatattcgtgtacagcagcgaaatggtaggaaaagcctgacaaccgttcagggattgaaaaaggaattcagctataacaagatacttaaagacgtcaagaaagagttctgttgcaatggaacagttgttcaggacccagaactaggacaggttattcaacttcaaggtgatcagaggaagaatgtttctaccttcct

SEQ ID NO: 43936 - DNA, 393 bp, Glycine max
  Clone ID: LIB3093-015-Q1-K1-E7
agagactgcagaaatgaaccccactaatggtattgaggtagaaaagattccaggaaatcatgcgcaaggagaaactagtgattgaggatgatggtaaattcaatcaagaagaagcaaaagggatcgaagaagcaacaaaaacactgttactaaatactgcaacagagagcctaacagaggaagaagtccaggaaatattgcccactcctgcaattgtccaacgtgacacaaagcaaatcatgcaacaacaaacacttcacaatgatgaatcagaagcaattgataaggaaaagagctgcataccagaaaatgaacttgacagaaagttcattgcttgtgaggaatctgatcaacctgaaaccaaggccaatgctggcatagttaaagaagaac

SEQ ID NO: 43937 - DNA, 254 bp, Glycine max
  Clone ID: LIB3093-015-Q1-K1-E8
atacactgtacaaattatccttattaatggtattgaggtagaaaagattccacgagattttgggaaggataaactagtcattgaagatcattgtaaattcaatcaagaataagctaaaggtatcgaataagcaacaaaaacactcaccacaatcacttctgcatagatcctaacatatgaataagtctcccatatattgcccactcccgcacttgtccaacgtgtcataaatcccatcatgctacaccaaacac

SEQ ID NO: 43938 - DNA, 449 bp, Glycine max
  Clone ID: LIB3093-015-Q1-K1-E9
catccctttcatttcgatctccattctccctgacactcctctctctgtatccgagttctagggttttggggatagaaagcataaatcacgtacacgacgtcgtttgatttgagggcggcgcaagatgccggggcaccgctcgaagtcggagaagcacgacgtcgacggcggcggcggtgagaagcagctccggcgggacccctacgaggtcctcggcgtctcgcgcaactccacggatcaggaaatcaaaaccgcgtaccgcaaaatggcgctcaaatatcatccggacaagaatgctaatgatcctaaagcagctgatatgtttaaagaggttaccttctcttataatatcctgtcagatcctgataaacggcgtcaatacgactcagctggctttgaggctgttgaatcagacaaccaagagttggagttagatctttcaagtctgg

SEQ ID NO: 43939 - DNA, 453 bp, Glycine max
  unsure (1)..(453): unsure at all n locations
  Clone ID: LIB3093-015-Q1-K1-F1
ggcgtcgagaccagaggtgattgcgccgcctgagattttctacgacgatgccgaagctcgcaagtacacctcttcttcccgtattgttcaaattcaggcgacgctgtcagagagagctcttgaactacttgctttgcctgatgacggcgttcctaaattactccttgatatcggttgtggatcgggacttagcggtgagacaatctcggagaatggacaccattggattgggcttgatatttcagcatcaatgcttaatgttgcggtggagcgagaggttgagggtgaccttttacttggtgacatgggccagggtataggaattcgtcctggagttatggatggggccatcagtatatctgctgttcagtggttatgcaatgctgataaatcctctcacaaccctcgattaagattgaaggcctttnttacatctctatataaatgcttatc

SEQ ID NO: 43940 - DNA, 426 bp, Glycine max
  Clone ID: LIB3093-015-Q1-K1-F10
gccaaccgcagctcctacagcaatcgcccctttctctccctccgccgcgccaaacagttcctcggcgccgccaagttcaagctcttcttagttctttttgctctctccatcgtcgtttttgtctcctccagactcagttcgtggatgggatggaaccctcaccactcctcttcggtttcctccacttcaaggggtggctatactgtgcttataaacacttggaggcataaatctcttctgaaacaaactgttgctcattatgcatcctgtcgaagtgctgaagcaatacatgtggtgtggagtgaaagtgaacaaccatccgagaggcttaaaacatatctgaataagattgtggttttgaagtctcagaaagctcataaaccaaactttagatttgacatcaatgcagatggtgagccaaacagc

SEQ ID NO: 43941 - DNA, 425 bp, Glycine max
  Clone ID: LIB3093-015-Q1-K1-F11
cccgcggtcgccccccaaagctcaaatcccagcccaacactgagctcacatggcctgcgctagccctcaacgacaaccctgctcttcaatccgcaaaaagaggcccgggtcgtcccaaaaagattgcaggacccgtaggtgtgagcccgggcccgatggtgccgggcagaaggggtcgtccacctgggaccgggagatctaagctgcccaagaggcctggccgtcctcccaagcccaaatccgtgtcggcgatctccagtgggctcaaacgacgtccgggccgcccacccaaagccgaatccaacgtaaacgtcatccccttcgcagcccctgttgctcccggcctgcccacagtgcagcccatcgttcctactgcttccgtgcccaatggatctcccaggcccagaggaaggcccaaaaagatt

SEQ ID NO: 43942 - DNA, 451 bp, Glycine max
  Clone ID: LIB3093-015-Q1-K1-F12
tcgcccacgcgtccgcccacgcgtccgggacttggcctggcaatttgtaggaggttcgtaaatcttatggaagggcatatttgggttgaaagcgaaggtattggtaaaggatgtacagtcacttttattgtaaaacttggaatcccagaccgatcaaatgaatttaagctaccttttgtacctaaagtaccaggaaatcatggatctacaaactttgctgggctcaaagttcttgtcatggatgacaatggggttagcaggacagtaacaaaaggacttcttatgcatttaggatgtgatgtaacaactgcaagctcaagtgaagaatgtctgcgtgttgtttctctggaacatgaagtggtcttcatggatgtttgtacagggttagatggttatgaacttgcagtccgtatacatgagaagtttacgaagcatcaagatagaccactga

SEQ ID NO: 43943 - DNA, 403 bp, Glycine max
  Clone ID: LIB3093-015-Q1-K1-F4
caacgaaagagaaaatgagtacgtgtgtatcttgtggtaacgggtctgcgctgattcacaataagaattaggggatatcaccaattcataatgcattaaaggtgaggggcaacaatagaagttgtggcttgcgtgttcaggtttctatggtggactcttcctccgctgatttcaccagacgcatcgaacgagcttggtcaatttctaagcaaccaaggccaatcgtgtgttcgtcttgcgactcaaaagggcatattgaatgtaaatggtgtgcgggtactggtttttttattcttggtgataacatgctttgtgaagtcccatccagaaacactacctgcattatttgcactggaaagggatcgatgtgctgttctgattgtcaaggaacaggctttcatgc

SEQ ID NO: 43944 - DNA, 386 bp, Glycine max
  Clone ID: LIB3093-015-Q1-K1-F5
ctttatctagagatgcgaccaaagccaaggcccgttccgacagacaagagcgacagaattttaattgattgcaaaatagaaaaaaaagaaagtgaagcgtgttagttagttagtagttggtgcgctgcgttgtgagttcgaaagtgaatctaggagaagaaggagtaaacaacacaaccaacaaacatcttcgatcttattctagggtttcaattgtgatgtgaatctaatgaatgtaacgggaaaagactgtagatagatgagctccagcaatttgacggggtttgtgttggccgtgctttccagcgctttcattggctccagcttcatcatcaagaaaaagggtctccaactcgccagtgccaatggcccacgtgccagtgttg

SEQ ID NO: 43945 - DNA, 455 bp, Glycine max
  Clone ID: LIB3093-015-Q1-K1-F6
cccacgcgtccgctgtaattcatcagaggattcaaggcaactctgacatgttacctgagcatcaagtaaccagtttaggtagacattttgaaagtgaccatgattcagcaccttctcctgtcaatgcgtctgttgacaaaaatatgaaagattccaaagaactggttactgttcctgaaatggatgaggaactagctatggtacctgtacaccagaagccaaagcgatctgagatcgtccagcgtcgaatacgcaggcctttttctgtagatgaagtagaagcactggttcaagcagttgaaaaactaggaactggaaggtggcgtgatgttaagctttgtgcttttgataatgcaaagcatcggacatatgtggatttgaaggataaatggaaaacactggtgcacacggcaagaatatcccctcagcaaaggaggggtgaacctgttccccaa

SEQ ID NO: 43946 - DNA, 445 bp, Glycine max
  Clone ID: LIB3093-015-Q1-K1-F7
cccacgcgtccgctctccttcttttctcttctttcttcttcttccatctctttttttctgcttaaggtctacaaaagttctcttcttcttctcctcctattgaactttggtcatcacacgagaaaacccacgtctggatcttctggtgtaaaggccattagaagccttttagaaattttcaaattgagttggtgtatagtgttgaagggggtgaaatttggagcccagtttgttacttcatttgaaaggtcatagtttgaaccctctttttctggagatttacctgggaaaagatgatgatgtttgaagatatgggattctgtggcgatttggatatgttatgtggttctcttggggatggggatattgctgtgagacaaactgaaccggatcctgtagttgaggatgactacagtgatgaagaaattgatgtggatgaactcga

SEQ ID NO: 43947 - DNA, 444 bp, Glycine max
  Clone ID: LIB3093-015-Q1-K1-F8
agaaaagttagggttcacaacttttccttttccttttgcttgcgaatctgaatcaaataatcaatcatccattcattattcatcatgtcgtcggcgaagaaaatcacgctgaagagttcggacggcgaggctttcgaggtggaggaggcggtggcgctggagtcgcagacgataaagcacatgatcgaggacgactgcgccgacagcggcatccctctgccgaacgtgacgagcaagatcctggcgaaggttatcgagtactgcaagaagcacgtcgaggccgcgaatcccgaagacaaaccctccgaggacgatctcaaggcctgggacgctgaattcgtcaaggtcgaccaggccacgctcttcgatctcatcctggctgctaactacttgaacatcaagagcctgctggaccttacatgtcaaactgtagccgacatgatc

SEQ ID NO: 43948 - DNA, 420 bp, Glycine max
  Clone ID: LIB3093-015-Q1-K1-F9
ggtacttgctcacagatatatttttttttttgtctccatcattttctcgagagctttcagtttctgtggttcatctttcttcttcttaatctttccccccctctctgtaacatcccgcttctctgaatccctttctgctaatcatctgtctttcaagctaagattttctggtttgtcttttaattcaccaaaaagcaaacttagaaggatttttcgaaagccaggtgttttcagaaacgagatccaggttttattgtcgaatttcgctagtcatattaatatttcatcatttttttttcctttgaaaccagccaagagggttatttttgatccctcaaagctaatttctcattttcttttccgggactgaagaggttgtctatttgaaatctccttcatcctttcctttcttgttgaaaa

SEQ ID NO: 43949 - DNA, 454 bp, Glycine max
  Clone ID: LIB3093-015-Q1-K1-G1
cccacgcgtccgggcatttgtccactggtatgtgggtgaaggaatggaagaaggtgaattctctgaagcccgggaggatcttgctgcccttgaaaaggactacgaagaggttggagcagaaggcgaagaagaagaagaagaacccgatgattactcaaagtagtcaatcattcatcaccagctaccttacctacatctaccttctttcctctgtctaatgtctatccttgtccattgaattttaagcatctttctgttgtgtgctagctctgttagtgttgggtgagataattgctttcctcatgagaagcagtggtttatttgtcagtttgaatcacttttaagtttcagtgaaagagcaaaataaaggatagcgtaggagtgctgcagtttccattacttaaaagaaatcagatgtttattttatcttttgcaataatatgtttaaaatata

SEQ ID NO: 43950 - DNA, 450 bp, Glycine max
  Clone ID: LIB3093-015-Q1-K1-G10
gtcattgaccatgttgtcacagataaaaggaaaactccgctacttaaagggtgtggttcaatctaagcaaaaactgcaattcgaaagtccaactagttcttcattcacacgagagacaactgcaacgccaaactctacagaagagaaggatgcacttttatctaaaagtgacgacgaaacatgcccaatttgccaagaaaagctgggcaaacagaaaatggtttttcaatgtgggcatgttacatgctgtaaatgtaagaattatatgaggaaactttatattatcattctttagttgcggttatagatttaataaaagtcatttgtcttcacctagcaacttaagctgttaggagaattagttcttgacattgttttagagcctcaatgatcaagtaacgtagagtttgatccttgttcattcttctaaacaaaactttgaattttaca

SEQ ID NO: 43951 - DNA, 401 bp, Glycine max
  unsure (1)..(401): unsure at all n locations
  Clone ID: LIB3093-015-Q1-K1-G11
atagggttttccccggcgggatacagtcccgtaatcccttcttcatcctgttttcctaaaaaattgagagtccagccgcaacgggccttgagctctgacccctacgttctggaactcgccgaaaccctagaagactccttcccctcctctccctccaccccactccctctccagaacctccgcctctcctcctcccaatccctcctctccactccatggccctcccgccgcgacgagcccttccgcttcaccgacctctccttcatccgccaatcccgcatcctccccgtctcccccaccatctccctcctcactcccacctcccacctncccaacgacgtctacgtcggctccctctcctcctcctccccctctctcctccaacgagtctcccatttcat

SEQ ID NO: 43952 - DNA, 135 bp, Glycine max
  Clone ID: LIB3093-015-Q1-K1-G12
cccacgcgtccggaaaaaagtggctataaatccattggaacaaaagcaaacttggttattgctgctgctgctggggcttgcacagccattgcgactcagcctctggatacagcctcttcaaagatgcagacaagt

SEQ ID NO: 43953 - DNA, 454 bp, Glycine max
  Clone ID: LIB3093-015-Q1-K1-G2
cccacgcgtccgggaaatgaagtcttctttaacagcacagttaacagacgaggctgatacatctgaagtcattgagactgtgaagctgcgagttagagatgctaaattgccggacattgaggtggtgcggatcttgtgggatgttttaatggatgctgttcagtggtctggaaaaaatcagcaacagaatgccaatgcagcccttcgtcaggtaaaaacttgggcagaattgttgaatacattctgcaccactgggaaacttgagctggaactgatgtacaaagtacagatgcaatgctatgaggatgctaaactgatgaagctgttccctgagattgttagatctctttatgaccaggatgtgctggctgaagataccattcttcattggttccgaaaaggaacaaactccaagggcaggcaaacctttgtgaaggcgctcgaaccctttgtt

SEQ ID NO: 43954 - DNA, 393 bp, Glycine max
  Clone ID: LIB3093-015-Q1-K1-G3
cccacgcgtccggctgatgaaggtgctggtacaactataataattaaaaattgtggtctccctcggataaaatgttgcatacgtacggttgtcttaaactatgatgatgaacaatttaggagaactgacaacataccgacactgatggaagaagctgcgcaagctgcataatcagctgcagctgcagatggagatgtggcaaatgcaagccaagaaatgctggcttcaaaaggtgaaaagaggagatactttgtggaaaatgtgagccttttatataaaccagtgcacgaaatgaaggctatgacgaatgtcatatgatggttggaagggctagaagatcttcatatcagtcaaacaagttcgaagcaactgattgtgaatggaaaagcatac

SEQ ID NO: 43955 - DNA, 457 bp, Glycine max
  Clone ID: LIB3093-015-Q1-K1-G4
cccacgcgtccggcactctcttcattactacaggaaacagatttgacagctgagcaacgactgatggtggagacaatattgaaaagcagcaatttgttggctaccctcatcaatgacgttttggatctttcacggcttgaagatggcagtcttcaacttgaagcagcaacatttaacctccattctttgttcagagaggtccttaacttgattaagcctgttgcatctgttaaaaagttatcactcacttcacatgtagcctcagatttgccaatgtatgccattggtgatgaaaaacgtctcatgcaaactattctgaatgttgttggtaatgctgtgaagttctcaaaagagggttgcatttccatcactgctttcgttgcaaagcctgaatcctttagagatgctagaattcctgactttcttccagtgccaagtgataaccacttttatttgc

SEQ ID NO: 43956 - DNA, 254 bp, Glycine max
  Clone ID: LIB3093-015-Q1-K1-G5
gccacgcgtgcggatcactattcacttattcgcataatcggccaaaatgtagactcgcctaggggctcatgggccactaactgaagattccgatcagtgggctcctaagactggtcagagtcaggctctttgtacaacacaacatggtgggcctaaggctacagatggcgcacataataacactgtatgaggaaactggcactatgccctgaacagacctggttctactcctgacaaagaacatctaatgaaaa

SEQ ID NO: 43957 - DNA, 411 bp, Glycine max
  Clone ID: LIB3093-015-Q1-K1-G6
gcgcttgagctattttatcattatcacctccattgccaattcttctctatagcttgtgtgagtatggaaataagagatggaagacagagcgagcggatcttgccacctcttaatggctccataccccaggcagggtcacataaacacaatgctccaattcagcaagcgcttgagcaccaaaggagtgagagtcactatgggcacaaccattttcatttccaagttcatgcatcttcaatcttcttccttgttaggaaatgttcaacttgatttcatatcagatggctgtgatcaaagaggttttggtcaagcatgtagtgtgtcaatctatttatctcgcatgcaaaaaataggtgccaataactcgagggaacttataaaaaaatacaactcttcagatcaccctattga

SEQ ID NO: 43958 - DNA, 450 bp, Glycine max
  unsure (1)..(450): unsure at all n locations
  Clone ID: LIB3093-015-Q1-K1-G7
cccacgcgtacgcccacgcgtccgctacacaactaagctttntctctctttcggggtcctctgggacattgtgacccgccactctcaccaccgagcaggagctttccgtcatcgttgccgcccttaccaacgtcgtcgccggctccacctccgcctgcagctccttctccctccccgaattccgccttccacagacctctgatcctctcgccgccgcctgcctaatgccgccgccgccgccgactagcatggacactcgtcgcgagagcaacatcgcacgatgcctgggatgcaactttttcccggaggagaaaaagaagcagaagagggccaagaagaagtacagaggcgtgaggcagaggccctgnggaaagtgggccgcggagattcgtgaccctcgtcgtgctgcccgggtctggctcggcacgttcggaaccgccgaagatgccc

SEQ ID NO: 43959 - DNA, 446 bp, Glycine max
  Clone ID: LIB3093-015-Q1-K1-G8
ctttgcttccccttagtcaaacaaagtaacacaccatccatcctctctctcttgtgttcttctgttctctagtttcctgctcttgtttcttagaatccgtacggtctaatcaacacaacaaaatggatgcaattagttgcctggatgagagcaccaccaccgagtcactctccataagtcaggcgaagccttcttcgacgattatgtcgtccgagaaggcttctccttccccgccgccgccgaacaggctgtgccgcgtcggtagcggtgctagcgcagtcgtggattccgacggcggcggcgggggtggcagcaccgaggtggagtcgcggaagctcccctcgtccaagtataagggcgtcgtgccccagcccaacggccgctggggctcgcagatttacgagaagcaccagcgcgtgtggctgggaacgttcaacgaggaagac

SEQ ID NO: 43960 - DNA, 446 bp, Glycine max
  Clone ID: LIB3093-015-Q1-K1-G9
cccacgcgtccgcccacgcgtccgcccattctccccacgctataaaatccccccactccttcttgcttcacacaacatatctttctcttgttccttctccttgtgatcttcttcaaccttcagagtgagaaaacacattcagaaaccacgtttctctcttcttcttcttcttcttctttttcttctctcgaggtcattattaagtattcaccatggaggcaccatctcccaccaaacccaacgacccaacaaaaccttccaacacttccaccacccttagtctggaggccggcccggcccaagcgagcccactccgaaaaatgtttgccgtggcgtccatcgccgccggcatacagttcgggtgggctctccagctctctcttctaaccccctacgttcagcttttaggagtcccccacgcggcggcctccttcatctggctctgc

SEQ ID NO: 43961 - DNA, 444 bp, Glycine max
  Clone ID: LIB3093-015-Q1-K1-H1
cccacgcgtccgaactacatggtctcttgaaaacgacccgtttcctccctcgcacggatccacccgaaatctgagattccttcgaattgttaactctctttcagtttcaagttggaaactttttcgattttcgctttctggaggtgtgaattgttgtttgaaagtcacaagcaatggtgaaggacactgcgtattatgacatattaggtgtcaattatgatgcatctgctgcagagatcaagaaagcttattatgtcaaggctagaattgttcaccccgataaaaatcctgaggatcctaaggccgcagaaaactttcagaaacttggtgaggcttaccaggttttaagtgatcctgggaagcgtgcggcatatgatgagcatggaaaggagggagtaccacaagattccatgatggaccctacaactgtatttggaatgattt

SEQ ID NO: 43962 - DNA, 439 bp, Glycine max
  unsure (1)..(439): unsure at all n locations
  Clone ID: LIB3093-015-Q1-K1-H10
gcgtgcgagaacacaaaaccatggagncaccaattgcacactnaggaactgcaaacctctaattatcagggtcattgggggcttcagcttcacttgaagaaaactttgtccaatgtctcagcttctattcagacaaagcagctccattttatgcatcaatttacactccacaaaatgcatcattcaacaagatccttgaatcctctgcacagaacctaaggtatttggtgccttcagcgccaaaacctgagcttatattcacacccttgactgattcccatgtccaagtggcagtgacttgctcaaagaagcttggtattcatctgagaattcggagtggtggccatgactatgaaggactctcatatgtttctgaagttgagtccccttttcataattgttgatttggccaagcttcgtgccatcgacgttgatatag

SEQ ID NO: 43963 - DNA, 400 bp, Glycine max
  Clone ID: LIB3093-015-Q1-K1-H12
ctcgcctataaaatgtccgccactgcttcactctgcgccacttccagaacaactttctcatcatcgaagcccgtcgcgagaagaagctgcttcgtcgcggttcccaaaatcgcgtttcccaagctccgtttcaaacccgtcgctatggctacgctcggcgctcgcatggtggccgccgcacccaccgtcactccgccggcctcgctcgacttcgaaacctccgttttcaagaaggagaagattaacctcgctggacacgacgagtacatcgtgaaaggagggagggatttgttccctctgttgcagggtgctttcaaggggattaagcagattggcgtcattggatggggttcgcagggacctgctcaggcacagaatttgcgggactcgcttgctgatg

SEQ ID NO: 43964 - DNA, 454 bp, Glycine max
  Clone ID: LIB3093-015-Q1-K1-H2
cgaagcagctagccatggcttctcactctcatagttgcatcattttggctttgttcattgctatttccttctcaagcatggacatggcattagcaacacgccatctctcacctttcccaccactgccacctttgccagcaaccccaccattattgccaccattgccacctgtgccaacagtcccaatcccaattacactgccacctttgccaccaactccaccattgccaccaactccacctttgcctaggattacaacctagctcctgagcacttgcagttggatacatacataacatataataagtaaacaaataaaagcactaatctcttctctccatttcgattcagttctgctttcctgcatgcatgccgtttcctgctttcaataagtgatatatacatatacacacacatatgctgttcttttcttttcaatcttccgcgtattttc

SEQ ID NO: 43965 - DNA, 461 bp, Glycine max
  Clone ID: LIB3093-015-Q1-K1-H3
ggccatataatttttttttatttgaaataatgtccgggatcatccacaagattgaggagaccctccatgtgggagggcacaagaaagaggagcacaaaggagaacaccatggtgagcacaaaggtgaacacaaaggagaacaccatggtgagcacaaaggtgaacacaaaggagaacaacaccatggggagcacaaggagggacttgtggataagatcaaggacaagatccatggtgatggccatgacaagggtgagaaaaagaagaagaaggacaagaagaagaaggagcatggacatgaccatcatggtcatagcagcagcagtgacagtgattagatcttatatgttaagcaggtgtacggtacgatggtagtgaggagccagaatccctcttcctgctttatgatataatacaaataaaatagcgattccggaaatcatgtctgtagctgctctttt

SEQ ID NO: 43966 - DNA, 442 bp, Glycine max
  Clone ID: LIB3093-015-Q1-K1-H4
agaacacaaaaccatggtgtcaccaatttcacacttagtaactttaatcctcttattatcagtttcattggcagcttcagcttcacttgaagaaaactttgtccaatgtctcagcttctattcagacaaagcagctccattttatgcatcaatttacactccacaaaatgcatcattcaacaagatccttgaatcctctgcacagaacctaaggtatttggtgccttcagcgccaaaacctgagcttatattcacacccttgactgattcccatgtccaagtggcagtgacttgctcaaagaagcttggtattcatctgagaattcggagtggtggccatgactatgaaggactctcatatgtttctgaagttgagtccccttttcataattgttgatttgtccaagcttcgtgccatcgacgttgatatagaagacaacac

SEQ ID NO: 43967 - DNA, 462 bp, Glycine max
  unsure (1)..(462): unsure at all n locations
  Clone ID: LIB3093-015-Q1-K1-H5
gcctacttcttttgagaaatttgccaatggggtcaagcagcaggcaaatatcaagggagtggacaggctaactgctaaggtgggagtggtggagataggaaagggtgtccgtggaactagtccaaccgggaagagaatttccgtgggaaacccgatcagaaatttggttcagggaattgagcttggagctaaggcgctgcgtaagagctgggaagggaatatggaagtcaagaagaaagatacatccaaattaagggccgccaagtgtgatcctaagccagagactcctaggagaagtacttcaagtgaaaagtttccctctaaagaagagagcaagatgcaaccgcagacaaagtcctccaaagaagagcacaagactcaaacatctataaagagagttattgtcagtggaacaatggangaacaagaataaccaagtaagcaaagagtttctgttggaaa

SEQ ID NO: 43968 - DNA, 455 bp, Glycine max
  unsure (1)..(455): unsure at all n locations
  Clone ID: LIB3093-015-Q1-K1-H7
atccagttgtggcataaattgcataagaatatggtccctggtgactaccaccttgtcatgcttcagagtttaaagataagtgtcattgtataatgaaaattgctcctagttgggttggtatgatgtattaaataagttagaagttgctgtaaatcacgtaagaatatcatggcctgaattgtgtgtatcacagacataaataacgatcatatattgatagttcatagttacatattgtattgtnaaaaaaaaaaaaaaaaaaaaaaaaaaaaaaaaaaaaaaaaaaaaaaaaaaaaaaaaaaaaaaaaaaaaaaaaaaaaaaaaaaaaaaaaaaaaaaaataaaaaaataaaaaaaaaaaaataaaaaaaaaaaaaaaaaaaaaaaaataattggggggggcccctttaaagaaaccaagtttaactcttttgaatggttacacgtttttttttt

SEQ ID NO: 43969 - DNA, 446 bp, Glycine max
  Clone ID: LIB3093-015-Q1-K1-H8
caccatcgggcccagcaccaaaccccttcccctctcccccaaattagggtttctctctgggaatgtgattcagcgcgcggcagcatcaatggcggagaagagattcggcgtgatagggtacgctctggcgccgaagaagcagaacagcttcatccgcgactcgctggtgagcctagcgaaatcgcgagggattgagctcgtgcgcgtggactccgacaaccccctcgcggatcagggccccttcgactgcgtcctccacaagctctacggcgacgactggaagcgccagctccaggaattccacaccctctacccaaacgccgtcatcctcgacgcccccgaggcgatcgagcgcctccacaaccgaatctcgatgctgcaggtcgtgtcggagctccgaattgaggaccgacccgagacctttgggatccccaagcagattgtga

SEQ ID NO: 43970 - DNA, 122 bp, Glycine max
  unsure (1)..(122): unsure at all n locations
  Clone ID: LIB3093-015-Q1-K1-H9
ccagagcaaccnccgngccggagagcagcgccggcaacacncggcncaanacncnggaaccgggagcccngnnagggcgcngganccncnncaacaacnacnncaacancnacaacaaacag

SEQ ID NO: 43971 - DNA, 417 bp, Glycine max
  Clone ID: LIB3093-015-Q1-K2-A1
ctagtcccaaagagctaacaagagatttaagaccggcatggctaatgaagaggaacagaaaaaccacctcttcggcatcaaagatctcggtcacaagactctccttcagagtgatgcactctatcagtatatacttgaaaccagtgtctatccaagagagcacgagtgcttgaaagagatacgcaagatgactgcaaaacacccactgaacatcatggcaacaccagcagacgaaggacaacttctgagcatgcttgttaagctcacgaattcaaagaacgccttggaaattggtgtattcactggttactctctgctctccactgccctggctcttccccctgatggaaagatcttggctttggatgtgaatcgcgaatactatgagttaggattgccaataattcaaaaagctga

SEQ ID NO: 43972 - DNA, 418 bp, Glycine max
  unsure (1)..(418): unsure at all n locations
  Clone ID: LIB3093-015-Q1-K2-A10
ccattactagcacttctgattcngtgagtcttagtggaggatttgaagccctggatgaaaaacccaagtgctcggatggtgaaaataaagacactaataatgatgaagaattgccatctcttgagctcagtttaaagaggcttagaggagttgaagatgctggtattgcaattcaggatgacaggaatgttttaagacgttctgatcagtctgctttctcaaggtacaatgcagccttaaaccctaagaaatctcccactggatgtgttggaagcaattctcctcataataatagcttagaagttacaaagaaagattcatctcacgatattcaatctcattctagcggcaatcctcctaaccaaaactcaaatggtgctagcaataacattgatatgggttccactactaataatgc

SEQ ID NO: 43973 - DNA, 395 bp, Glycine max
  Clone ID: LIB3093-015-Q1-K2-A11
ggtggatagtggtagtcgtagtttgcatggaggaggaagcggaagaaacgaagagcgcagtgagaatattcgtcggaggattggcgggagccgtgagcgccgaagaccttcgaagcttattcgcgtctctgggctccgtccaatccgtccaaaccatccgaaccaaaggtcgcagcttcgcctacctcgacttcctatccgaccccaaatccctctccaagctcttcagcaagtataatgggtgtctgtggaagggtggaaggctgaggctggagaaggccaaagaagactatcttgtgcgtttgaagagagaatgggaacaaggcgctctagatgatgctactcaaaaaccacctgctgctgctattgaggaggaaattcccagcaccacacac

SEQ ID NO: 43974 - DNA, 362 bp, Glycine max
  Clone ID: LIB3093-015-Q1-K2-A12
caaactccaacatggaagtggtgtaaagtgggggtggaatattggggttggtaggtggtcttgcacaagagtttctcaagcaaaagcttgatgacaatgatgagggatatgcaaagcctgcattggagacaaaagtggaaagtaagcaagaggcatatgctggaccaaccaaacgtggccttccggatggtgggatattgatgagtggatgtcagaccgaccaaacttctgccgatgcaagtcctgcaggaagcgctgccagtgcttatggagcttttagcaatgcaatacaggctataattgaggagactgatggtgcaatcacaaaccaagaacttgttcaaaaggcaagagagaagctg

SEQ ID NO: 43975 - DNA, 400 bp, Glycine max
  Clone ID: LIB3093-015-Q1-K2-A2
cgttctccctcttttctctcaccatcttaaagcgcttttttttttttttttttcttctacctccgtttctccgtctccacatttctccttcacgaactcccgatttttcttcctcttcaatctcgtccctctctgtctctccatccttaaatatacacaacatcttctaaggagaaaggggttccgaaagttacgataaaataaaaatggatccaaacgcggtgaagtccactctctccaatctggcgtttggaaacgtaatggcggcagctgcccgtgattatcagaaggaattgcatgctcaagagaagacacatgcatcaagttcagtacatcaggaggttgaccttgacgagttaatggatgatcctgagttggaaaaattgcatgcagataggat

SEQ ID NO: 43976 - DNA, 395 bp, Glycine max
  Clone ID: LIB3093-015-Q1-K2-A3
aggccaaatgtagtgaatactatttattttctcatgcgcaaacgcaagggtctcttcttcagcagatagattgtaacggagcatgtgctgcgaggtgccgtttatcatctcgtccacgcctctgccaaagagcttgtggaacttgttgtagacgctgtaactgcgtgccacctggcactgctggaaaccaagaagtgtgtccctgctatgcaagtttgactactcatggtggcaaacgcaagtgcccttagacttaattggaccactatcctatgcatgcctttgatttatattataaaataaaaataatactatatataacatgttaattgcttaatatgtgctttaagagtaaagaataacatcgtgaaatcaaattacccctttttcaatac

SEQ ID NO: 43977 - DNA, 380 bp, Glycine max
  unsure (1)..(380): unsure at all n locations
  Clone ID: LIB3093-015-Q1-K2-A5
cccacgcgtccgcccacgcgnccggagatannttctccatcattnaacaacctcacaggctggtttaagttgagggtggcgcataatcgcttagagggaccaattccaactggagggcagtttttaagcttccctagttcaagttttgagggcaacctggggctttgtagggaaattgattctccttgcaaaattgtcaacaatacaagtcccaacaattcttctggttcttccaaaaaacgtggtagaagcaatgtccttggcataacaatcagtatagggatagggcttgcactgcttcttgcaattattctgctaaaaatgtcaaagagggatgatgataagcctatggataactntgatgaggaactcaatggtag

SEQ ID NO: 43978 - DNA, 244 bp, Glycine max
  Clone ID: LIB3093-015-Q1-K2-A6
aaaaaaaaaaaaaataaaaaaaaaatatattttataaaaaaaaaaaaaaaaaaaaaaaaggggggattttatggaggagggggagggtaaatccacctttgtgcggccgctcttctttttccaaccttccttccccgtccatcgcaattccatatcttttctttatttttgcccaactaaaattctttggccgcccctttttttcccaattccttgcagtccccttccttaccctcccttaata

SEQ ID NO: 43979 - DNA, 291 bp, Glycine max
  Clone ID: LIB3093-015-Q1-K2-A7
gctactcaatcaggttgtgaatgtcggtgagaatgacacagatcatgatacacatgatgatggacgtggttatggaggatgcttttgggcctgatgcatatacatattcatagaacttgtatataaaagtgctgatatagatactgccatatatttaactagctcatttgagacataatttgatgcaaacatgattacatgtgtgaagccatatacgaactcacttaccaaatttcttgaaagacaattggaaagcttaaatgtgaactatgttggacatgatgtgtatga

SEQ ID NO: 43980 - DNA, 399 bp, Glycine max
  Clone ID: LIB3093-015-Q1-K2-A8
ctcaaatctgtgaagaaaatcttattttctaaattgtaattcttagcactactgctagtagtagtaaaaaaaaacaattagaaagtagtagagtgtttttttttctttttttcgtttgttttacttttaagatgggtgagaagagcaacgttggcggcgacgcgattaacacgacactgcttcacgggaagtacgagctgggccggctgttaggccacggaaccttcgcgaaggtgtaccacgcgcgccacctgaagacgggaaagagcgtggcgatgaaggtggtgggcaaagagaaggtggtgaaggtaggcatgatggagcagatcaagagagagatctcagccatgaacatggtgaagcacccaaacatcgtgcagcttcacgaggtcatggcga

SEQ ID NO: 43981 - DNA, 404 bp, Glycine max
  Clone ID: LIB3093-015-Q1-K2-A9
atttgtattggtttagaggaacatagttcgaggaacagccaacacatgtatggtagggagttccaatcgatgttggacggactcgacgaggaagggtgtgttgaagaaccggggtatcaatctgagaagaagcgtcgtctaagtgtggatcaagtgaaggctttggagaagaactttgaggttgaaaacaagcttgaacctgagaggaaggtgaagcttgcccaagaacttgggttgcaacctagacaggtagccgtatggttccaaaaccgtcgagccagatggaaaaccaaacaattggagagagattatggtgtactcaaagccaattatgatgctcttaagcttaactttgacaccctcgatcaggacaacgaagccttacgaaagcaggtagaataata

SEQ ID NO: 43982 - DNA, 414 bp, Glycine max
  Clone ID: LIB3093-015-Q1-K2-B1
tcttaataaccgattcttcatctggttcttctcaatatgcatgtgcatcaccctcactgccctcacccttacctacttatatggtttgcaaatggtcaccccaaacgacgtttgggataattcattattcagcatggttggagtcgttatttttatttggatcatacttctaggaatcgtcgtaattttcctctccctacgcctacttttttggattgtcactaaatgccggaataaaaaacaaactgaacaaggagaagatcaaaaccaaagtaaacaagaagatccaaaacaaagtacaggagaagatgcaacctagttctgctcatccatcaggccatgcatcgcatatcaaccttccttacttgtggactattttacattgttaagcaatattattaatcatacataaat

SEQ ID NO: 43983 - DNA, 379 bp, Glycine max
  unsure (1)..(379): unsure at all n locations
  Clone ID: LIB3093-015-Q1-K2-B10
cccacgcgtccggntncgcttttttattattcttagaggccgnngatcgngtgcgggaaatgttctgcgggtgcacgggcacagcacgtgctcacaaagctggtgaattccactgggattccttttctcccaactccgatggggaaaggaattttacctgacacccacgcacttgcggctactgcagcaaggtcactagcgattgggaagtgtgatgtggcgcttgtggtgggagcgagactcaactggcttctacacttcggtgaaccaccgaaatggtctaaggacgtgaaattcatcttggtggatgtgagcgaagaggagattgagctgaggaagcctcacttaaggttaattggtgatgccaaacacgtgattg

SEQ ID NO: 43984 - DNA, 373 bp, Glycine max
  Clone ID: LIB3093-015-Q1-K2-B11
gtttcggagctatggcgcaagttgcattctgatgttatgagattcttgcagcgggtgaggtgctgggagtaccgccagcaaccttctattgtccgtttgacaaggtctactcgcccagacaaggctcgccgcttgggtttcaaggctaagcagggttatgtgatttaccgtgttcgtgtacgaaggggtggccggaagagaccagttccaaaaggtattgtttatggtaagcccaccaaccaaggtgttactcaactgaaatttcagcgcagcaagaggtctgttgccgaggagcgagctggaaggaagttgggtggcctcagggttctcaattcatactgggtgaatgaggactcgacttacaaatattttg

SEQ ID NO: 43985 - DNA, 402 bp, Glycine max
  Clone ID: LIB3093-015-Q1-K2-B2
ggcttctcaaggccatggtttcataatgtgtctgcaatggaatggctttctttcaggttgaatttactttcaaattttgtttttgccttctcactggtcatgctagtgagcctccctgaaggaataatcaatccaagtattgccgggttggcagtaacatatgggatcaatctgaatgtgttgcaagcttcagttatatggaacatatgcaatgcagaaaacaagatgatatcagttgaaaggatccttcaatatacaaatataacaagtgaagcacctcttgtgattgaagacagcaggccgccaagcaactggccagatactggaacaatatgtttcaaaaatttgcagatacgttatgccgaacatctaccatctgtattgaaaaacatcacttgcaca

SEQ ID NO: 43986 - DNA, 397 bp, Glycine max
  Clone ID: LIB3093-015-Q1-K2-B3
gtgaattacgtttgaaaatgcacggtcggcctcgcaaagcgttgaagcaagaagatgaagccgcttcagcagccaaagctgaaaagcttcgttcactccaagctcagttcctcgccaatcaccacaatcacatttatagcaaggaagcgttagatgtgagcgcgaagcttctagaagtgaatccagagtgctacacagcttggaattacagaaagctcgccgttcaacatcttctctctaactccgattccgatcctcactctatcttcgatgacgagctcaaactcgtggagattgcgctgaggaagaatttcaagtcttacggcgcgtggcatcatagaaaatgggtactcagcaaggggcattcgtccatagacaacgaaatgcgccttctgaa

SEQ ID NO: 43987 - DNA, 387 bp, Glycine max
  Clone ID: LIB3093-015-Q1-K2-B4
ccctttctctctctcattctcttctccatttcgcgtaagaaacacattttagttgctactaatgggaactgttgaagctgcaaacaaggatgcaaatggaagtctcctagagaaaaatccttcagttgtttttgtgttaggtggcccaggaagtggaaagggtacccaatgtgcaaatattgtccaaaattttgggtatactcatctcagcgctggtgatcttctgcgagcagaaatcaaatctggttctgaaaatggtacaatgattcagaatatgattaaagaaggaaaaattgttccctctgaggtaacaattaagctcttacaaaaagcaatgcaggaaagtggcaatgacaaatttcttattgatggttttccccgcaatga

SEQ ID NO: 43988 - DNA, 425 bp, Glycine max
  Clone ID: LIB3093-015-Q1-K2-B5
gaataccggcgcgagccacgcgtccgaaaaattcttaaggatggccacagcagtagtaatttcaactttgaaactgttgcgccgatgttttttgggggatatgggagacccttttctcaccaatctcattccagtaaaacttgaagacccctcatcaggacttgatatgggttcaaacttctcagaacaaagcagcttctgcaagtttctggagtgctttgattttgaagcagaagtggtaggtctcacttctcatcataaggtccaaagctccattgcaacaagtccaccccagaatttcaattttccagaagaaccaatggtgtcaatgaaaaaggaagcaacatgttatgcaacaaggcattacagaggagtgaggagaaggccatgggggaagtttgcggcagagattctcgaccccaaaa

SEQ ID NO: 43989 - DNA, 384 bp, Glycine max
  Clone ID: LIB3093-015-Q1-K2-B6
cccacgcgtccgcctagattcagccacagttggaaaaaaaaaaaaagttgttcgagatggcacgtacgaagcaaactgctcgtaagtccacaggaggaaaggcacctaggaagcagctcgcaaccaaggctgcacgtaagtctgcaccaactactggtggtgtgaagaagccacatcgttatcgtcctggtaccgttgctcttcgtgagattaggaaataccagaagagtaccgagcttttgatcaggaagctccccttccagaggctggttcgtgaaattgctcaggacttcaagactgatctgcgtttccagagccatgctgtgcttgcattgcaagaagctgctgaggcataccttgttggactctttgaggatactaatc

SEQ ID NO: 43990 - DNA, 389 bp, Glycine max
  Clone ID: LIB3093-015-Q1-K2-B7
gcttgcttgagttgccaactttaagtttgtcaatttccgtgctgcttggttggttgcaattgcaagtgaacaattggctagtgtgtactagttttgaatcacaatggcagaggatgatggttacacgaaagatggaacagtcgattactgtggaaatccagctaataaaaaggaaactggaacctggaaagcctgcccctatatcttaggaaacgaatgttgtgagagattggcttattatgggatgagcacaaacctggtgctttatttcaagaaccggctaaatcagcatagtgctactgcttccaagaatgtctctaattggagtggaacttgctatatcacaccattgattggggcatatttggctgattcctaccttggaagat

SEQ ID NO: 43991 - DNA, 398 bp, Glycine max
  Clone ID: LIB3093-015-Q1-K2-B8
gggaagaagaacttagctacaagctattgaaggatcaaagagaatggctcaagcaatggcatcaatgactagcttacgtggttcctctcaggctgtgttggaaggtagccttggctccacacgcttgaatgtggggagtggaagcagggtggcctcagtcacacgtgcagggttcacagttagagcacagcaacaacaagtgaatggtggtgaggtacaaagtagccgtagggcagtgctttcacttgttgctgctggtttgaccactggctcttttgttcaagctgtgcttgctgatgccaaacctatcaaagttggaccacctcccccaccttctggcggattacctggaacattgaactcagatgaaccaagagaccttaagctgccattgaaag

SEQ ID NO: 43992 - DNA, 396 bp, Glycine max
  Clone ID: LIB3093-015-Q1-K2-B9
gccatgtcttcctctctcgctcttccttccactcccttcttcgccaatggaacaagaatcttcgctctcaagcactctctccctcgctctagggtttccatgagcgtctccgctggatctcaggcttccgttcaccaggctttgttcgccgattacaaggcctccacttcattcctcttcccgggccagggtgctcaagctgttggaatggggaaagaagctcaaaatgtgcctgctgctgcggttttgttcaacaaggcaaatgacattttggggtttgatcttcttgatatatgcatcaatgggccaaaagaaaagttagattccaccgttattagccagcctgctatttatgtcacaagtcttgctgctatagagctacttcgtgcacgtgaa

SEQ ID NO: 43993 - DNA, 419 bp, Glycine max
  Clone ID: LIB3093-015-Q1-K2-C1
agggttttagcgcagcttcttctagatttaaggaagatgggtaaggaaaaggttcacatcagtattgtggttattggccatgttgactctgggaagtccactaccactggccacctgatctacaagcttggaggcattgacaagcgtgttattgagagatttgagaaggaagctgctgagatgaacaagaggtctttcaagtatgcctgggtgcttgataagcttaaggctgagcgtgaaagaggaatcacaattgatattgccttgtggaagtttgaaaccaccaagtactattgcacagtcattgatgcccctggacacagggatttcatcaagaacatgatcactgggacatcccaagctgactgtgctgttcttatcattgattccactactggtggttttgaagctggaatttc

SEQ ID NO: 43994 - DNA, 431 bp, Glycine max
  unsure (1)..(431): unsure at all n locations
  Clone ID: LIB3093-015-Q1-K2-C10
gaaaacccggcggcgacccacgcgnccgggtacttaccaggaaacncnngtgggtagttttacgagaccaaggccanggggaagggncattttaagggggggctgtgcatgccgagtagctgtggggaatgttagtatggaggaaaagcaaatcttccaaaatgttcaactgagtgttaatttccttgtctctttgttgaaaaagaactggcaaaatgtgagtagtagtccactatcaatattttgttaagtcattgcttctggtgccttcttttttgatgtgattttcttaaaggtatatgttcttggttctgttttattattggggtaattaaaaaactctgctactataagaatagtctttgatatcagatgtggcatggattgaatccatgcttattacaggctttatcttttgcttatatggttat

SEQ ID NO: 43995 - DNA, 419 bp, Glycine max
  Clone ID: LIB3093-015-Q1-K2-C11
ggtgaagtcaacaaagaaagaattataagctttctccgagaaagcttctgttcacgtcagggtccggggtaggcttcttcattgagattgggttggtgttcagtgtgaatgcatttccagtgagataagagaaaaggaacgaggggaagaagcgacttatattaagaaatattaatatacttaatttaatattaatgttcgggtacccccctccggctcgtagttgagaagagctttcgtttaggaaagggctaaatgggtgcgatccctctcgttgagagtcaagggtctcctggagtagaaggcacatcctggatctattaagccggcaagggttcagcattggctttcacgaccgcaaaggggccatctctcagtcggagtagataagatagatatacttaatttaatatctttta

SEQ ID NO: 43996 - DNA, 376 bp, Glycine max
  Clone ID: LIB3093-015-Q1-K2-C12
caaacccaaccctagattgagagtaaatatccccaaaaacaaaacacacatctctttcattctctccctcaccaaaccctagattgaaagaaaccctaacacaccatgggaacacccgagacatcgcgcgaaccctgccccgatcgcatcctcgacgacataggcggcgccttcggcatgggagcggtgggtggctccgccttccattttctcaagggtctctacaattcccccaagggcgatcgcttcgtcggcgccacccaggccgtgcgcctcaacgccccccgcgtcggcggcagcttcgccgtctggggcggcctcttctccgccttcgactgcaccatggtctacgcgcgccagaaggaggacccctgga

SEQ ID NO: 43997 - DNA, 417 bp, Glycine max
  Clone ID: LIB3093-015-Q1-K2-C2
cttttctctctctttctctcaggctcagctctaaaaacttgtcttcaatattctgtttttcttatcagtctttggttttctagatcagatggaggaaagcaagaaaaacccttctcaacttaacagattccaggatgatggaatgcacgatcttgacatagttgaatggaaaaagaaaagaaaattacagagtgatcagttggatttgattagacctaaacataaatgctgggttggaagtttctcctctgaacatgcttcagtgtttgataaaaatccagttttagagagcatgcacaaccacacagttgaaagctccaaacatgaatctgccaaagacagcaatagttttatggaagactgtgatactgccatgtctgtaaatgaagaagccaaacacgagacagattgtggaag

SEQ ID NO: 43998 - DNA, 403 bp, Glycine max
  Clone ID: LIB3093-015-Q1-K2-C3
ctcagaaacctagcatctagccaagacaatgcaaacaaatgggtgcaagacaacatcaaaaactatgccaacaatgtcagattcagatacgtttcagtgggaaatgaagtgaaacccgaacactcatttgcacaatttctagtgcctgcattggaaaacattcagagggccatttctaatgctggccttggaaaccaagtaaaagtttccactgccattgatactggtgccttggcagaatcattcccaccatcaaagggttccttcaaatctgattatagaggagcatatcttgatggtgtcatcagatttctagtgaacaataatgccccattaatggttaatgtgtactcttacttcgcttacactgcaaaccctaaggacattagtcttgactatgcac

SEQ ID NO: 43999 - DNA, 265 bp, Glycine max
  Clone ID: LIB3093-015-Q1-K2-C4
aaaaataatactatatataacatgtttttggtgtatatatgtgctttaagagtaaagaataacatcgtgaaatcaaattacccctttttcaatacgtgttgaatcatcgatcttggtttgtaatttggttgtatattcacaaaattaataagtatattgtgatgtgattaattcccttctctgttatggtgtacttgccttccctgtattgtccatctccatcgtctgtctattaataagaattcttatgtgatattttcatttc

SEQ ID NO: 44000 - DNA, 390 bp, Glycine max
  Clone ID: LIB3093-015-Q1-K2-C5
cccacgcgtccggacaaatcctagagtttttcctttggttgaaagagagggacctgggagggtcacaaacatgggagaggagaatgttaaacaaccgttgttggagaggaagtactacaaggactgcccaggttgtaaagtggatcaagccaaagagttgagtgagggaaagggtgtacctgttaaaaatctttttatcatgtggatggtggtgctgtgtgctgcactgcctatatcatctctctttccattcctctatttcatggtaagggatttcaatattgcgaaaacagaagctgatattagttcttatgctggttatgttggctcttcattcatgcttggcagatgtttgacatctgtattatggggaattgtagccgatcgcta

SEQ ID NO: 44001 - DNA, 387 bp, Glycine max
  Clone ID: LIB3093-015-Q1-K2-C6
cccacgcgtccgcggacgcgtgggctgcaccatcgtcctgcatgtcagaggtccagagggtgaggttatcacacacactttctctctctctctctctcacccagatcttgtagcaatggcgagcgctcccactccacgcgaagagttcgtgtacatggcgaagctggcggagcaggccgagcgctacgaggagatggtggagttcatggagaaggtctccgcctccgccgagagcgaggagctgaccgtggaggagcgtaacctcctctccgtcgcctacaagaacgtgatcggcgctcgccgcgcctcctggcgcatcatctcctcaatcgagcagaaagaggagagccgcggcaacgaggaccacgtcgccgtcatccgcgacta

SEQ ID NO: 44002 - DNA, 387 bp, Glycine max
  Clone ID: LIB3093-015-Q1-K2-C7
cccacgcgtccgcccacgcgtccgtaggcacccagagaggtattcaatatgaaaggaagggttgacgaaatttgcatcgatgagctgaaatatttaaaatcagttgtcaaagagacactaaggttacacccaccagctccacttttacttccaagagaatgtggacaggcatgtgagattaatgggtatcatataccagtcaaaagtaaggtaattgtgaatgcttgggcaattggaagagatccaaagtactggagtgaagcagagaggttttatccagagagattcattgatagctctattgactacaaagggactaattttgagtacattccatttggtgctggaagaagaatatgccctggcagcacttttggtttgatcaat

SEQ ID NO: 44003 - DNA, 359 bp, Glycine max
  Clone ID: LIB3093-015-Q1-K2-C8
ctttcttgtaacttcaacaaacggctgcttcttcaattcaagttctctctttttgtttatttcatttgtttattttctctctcttttctttttctatttgatttcattgtttgtgtgtctgttttccttatcattgtgtctctatgacagaacagaactctcttgggtgttggtgttggtgagggatctgaggcaaaggtgttgatgatatgggagcgtgtgtttcaactccacaagggtgcgtgggagggaggttgagctcttccaagaagaaaaccagaaagagaaggagagagggactcagaagaagagttacttctcggttgtgtaaggaatcatcggagaaagttgatgtggca

SEQ ID NO: 44004 - DNA, 359 bp, Glycine max
  Clone ID: LIB3093-015-Q1-K2-C9
cccacgcgtccggtggtggcaatgtgttaccaatatcatatcatatattctttcatcttcttgggttagggttctacacttgcaatctcctttcacacccacccacccttcaaccatttcaattccttccctcacccaaaccgcactatcgttcttcgacacggtcctgtttattaagcggtttggataaaagaatagaagcgtaaaatggccttcgtagcacatcaacctcagggtttgtttgtgacatcttcctcgaggcgtttgccatggagcaaaaggctgaagttgaagcagtgtttaacaaaacatcacatgattggaagaactgaccggcattgcctagtaaagtggaatgc

SEQ ID NO: 44005 - DNA, 409 bp, Glycine max
  Clone ID: LIB3093-015-Q1-K2-D1
gttgttgaggcggggctagataaatcaaagggaccattcgcttcatttattgtgcagaatggcaccctcagacggggagatatagtagtttgtggagaagcttttggaaaggtgcgggctttatttgatgatggtggaaagcgggttgatgaagctacaccctctatacctgtacaggttattggattgaataatgttccaattgctggtgatgaatttgaggttattgaatcccttgatactgcacgtgaaagggcagaaactcgtgctgagtcattgcgtaatgagcgtatttcagcaaaggcaggggatggaaaggtcaccctttcttctttagcttcagcagtttcgtcaggaaagctgtctggactagatttgcatcaactaaatattattttgaggttgatct

SEQ ID NO: 44006 - DNA, 317 bp, Glycine max
  unsure (1)..(317): unsure at all n locations
  Clone ID: LIB3093-015-Q1-K2-D10
cccacgcgttcaaccacgcttacagccacgcgtttgnataatttatcaatccaattattnctggtgcttcttttatggctgcgtgggctggccctaagacttgcttctattggacctggggttggtcaaagcactgcttgtctgaaacattggctaatggttcacccaccacatcaggctcctcgaaaaatacgacaagctacattgcgcaaatggcttttgacataagctatcacaatactttggctgggtgtctcattacacactgacatttcctaatcctttacattactcctaaagctatagaaattcatatc

SEQ ID NO: 44007 - DNA, 324 bp, Glycine max
  Clone ID: LIB3093-015-Q1-K2-D11
cccacgcgtccggaattcacggttaattccttccttaacagtgatcttgatgataacatgggttttggctggaaggcatgactaacacaatcttggacatgaaatcggcatatcatgtgttgatgaagtgtttatcttattatctttgtacaggacactttaaatagatgctgtttttttccttgtttttccctgttattttcttgatggaatttgtttggactcggactcggactcgagtaggtttttagagattttatttgagggtttttgtcctgcaagtgtaatctattggacaatttaatgaacagttagtttattata

SEQ ID NO: 44008 - DNA, 393 bp, Glycine max
  Clone ID: LIB3093-015-Q1-K2-D12
cccacgcgtccgcccacgcgtctgcctactcgtccggtcggaacagccctgcatactacagtcctccgcggcgaggatacggcggtggtggccgaggaggaggaggaggaggaggaggaggagggtccggcaggagggggttcggtggaggcaggcgcagggacagcaatgggagcctcttggttcgtaacattcccctcgattgcagacccgaggagcttcgcgtccctttcgagcgatttggacctgttcgtgacgtttacatacccaaggattattactctggagaacctcgaggctttgcctttgtgcagtttgtggatccttatgatgcctcagaggcacagtaccatatgaacagacagatttttgctggaagggaaatatctgtag

SEQ ID NO: 44009 - DNA, 422 bp, Glycine max
  Clone ID: LIB3093-015-Q1-K2-D2
ctctaatagaaatatttctggacgtgaatgaaatatgatccagtatttcttataaacaaccttttattatacccaccactgcctccatttttgtgccttttaaatcagtgtaacaaaactgtggaccttcttgttatactctgttggccttgacaaccatctacaagttttcaaggaaaagattcactatattgccctatctcatgccaatttctgaatcattgtgtggctattttttatgtgcatgatgtttgcataaagagatataatatgattctaagctgcatgagtctattatgtctacaatatcttctttttgcaggatggagaggcttatgcttacttgcttaatgctcttgccccagaagtggcaggcccatctgccctaaacacaagtgatccaacagaaagggcaaacatgg

SEQ ID NO: 44010 - DNA, 418 bp, Glycine max
  Clone ID: LIB3093-015-Q1-K2-D3
ctgaccgggaaaagaaaaaccagctttcttcaagcacctagatttcctctctctctaaatggcgttctcttcttttctcggcagagtcctcttcgcctccgttttcatcctctccgcttaccaagaatttaattcttatggagttgatgggggacccgcagcaaaagcactcagaccgaagtttgatgcctttgcacatcaagtacattctaaagttggctttcaacttccagatattgatatgaaatttttagtggctggggctattgctctcaagggccttggagggattcttttcatactcagcagctcttttggagctttccttttgcttttgcatcaagtgatcactactccaatactgtatgatttctacaattatcacagtgaggacaaagaatttatccaacttttcatc

SEQ ID NO: 44011 - DNA, 410 bp, Glycine max
  unsure (1)..(410): unsure at all n locations
  Clone ID: LIB3093-015-Q1-K2-D4
ctctagtcgacttgggtctcgcccttctttttcttctagtcacagtcacagggtcaaccgcttcagattatcgtctcttctatgtggcacctccacctctcgctccgttcatcagatggaagaactttcagctgaacttcgggttgattcagcaagggattttgatggtgaaattcagaaagacactgaggaatcgtctttatcatatacagaagctagaattagctccagtcgccctgctgaaactgcaaccctatctgatatgagaactgagttccatgggaatactagtgttgaaggttcttctagaaacgttgcaacaaatagtcagaggaactgcttgtctgaacatgaggagctngtccctccttatcaggtaagtgctggtcatactggtcatgaatcatata

SEQ ID NO: 44012 - DNA, 413 bp, Glycine max
  Clone ID: LIB3093-015-Q1-K2-D5
ctcaagcttcttgaaagtcagttggttcctttaaccgagcaacaattgatgggcatctacaacttgcagcagtcatcccagcaggctgaagatgctctttcccaagggatggatgcattgcagcaatcactgtctgagacattggctaatggttcacccagcacatcaggctcctcgggaaatgtggcaagttacatggggcaaatggctatggccatgggaaagcttggtactcttgatgggtttcttcgccaggctgacaatctgcggcagcagacattacaacaaatgcttcgaatattaacgaccaggcaatcagctcgagctcttctcgccatcagtgattatttctcacggctgcgagctctgagttctttgtggcttgctaggccaagggagtgaagcatttcaca

SEQ ID NO: 44013 - DNA, 387 bp, Glycine max
  Clone ID: LIB3093-015-Q1-K2-D6
cggaatcaaaagcaagtgctaagaagttccgtgttcctattctcaaacctgtagcaccaaacccaagttgtcatccaagttttataatactacatatattattattatacgatacataacaatagtattaatattgttgtgattgtgtgtgatttttggtgtcgtccttttttcttatattaaggtggtacggagcttatatgtgttgattcaattcgtcgacaagaaaccttagtttgatatttgattggttctgtggagagttttcctttggtgtggttggtttgtgctgtttttggttgggaataggaatggctaatgaaggaaagaaaagcaataacttctattcgatcttgggcttgagcaaggagtgcactgaattggagc

SEQ ID NO: 44014 - DNA, 376 bp, Glycine max
  Clone ID: LIB3093-015-Q1-K2-D7
caaaaactaagttcatttcttgtgctttgctttattcctcaaaaccaaacatgtcgaacacatgcggcaactgtgactgcgctgacaagactaactgcaccaagggaaacagctatggtgttatagtagagactgagaagagctacatcgagactgttgacatggatgttccagcagctgagcatgatgggaagtgcaagtgtggcactaactgcacttgcacggactgcacttgtggccattaaggaatatgtatgaaaatgtaattgccatgtgtttggcaatacaaatctccaaataatgtaatcttcgtatgaataaatgtgtgctgttatcctacttcagggtctgtgtagtcatgcagtctgaatcatgt

SEQ ID NO: 44015 - DNA, 356 bp, Glycine max
  Clone ID: LIB3093-015-Q1-K2-D8
cacgattctgtccactctcatgtgtgcccctcgttctgtttattcctgggacattgtcgtccagcgtgtcggaaacaagcttttctttgataagcgcgatgggtcgcagctcgatttgctctctgttcatgaaacctcgcaggagccattgcctgagtcgaaggatgatattaactctgcccattcgttgagcgttgaggctgcttatatcaaccagaatttctctcagcaggtgcttattagggatgggaataaggttacttttgatgaggctaacccttttgctaatgaaggtgaggaggttgcttctgtcgcttataggtataggaggtggaagcttgatgatgatatgtatc

SEQ ID NO: 44016 - DNA, 293 bp, Glycine max
  Clone ID: LIB3093-015-Q1-K2-D9
atttcttactttcctctcacgctctgtccaaaactccgtctccgcaataacggaataaaaaaacaagtttaattactattatggcgccgagggatcataagacaagcacgctaagctaacggaacggtacagcggggtgaaggaggtgcattttctggagtgagaaaaagccggggggagatacgccgcggagatcagagatcccggcaagaagagccgcgtctggctcggaaccttcgacacggcggaggagcagcgcgtgcctacgacccgcacacgagagttcgcggcct

SEQ ID NO: 44017 - DNA, 397 bp, Glycine max
  unsure (1)..(397): unsure at all n locations
  Clone ID: LIB3093-015-Q1-K2-E1
gggttttggcttaaaggaatattccgtggggtgatcatagtttttaccctgttcttatgatgggtgactcagaggtggcaaagttcggcttaaaagtcgggaagaatgagaaaaatgggttcccaaggggactagatcctgcaatatccaagttttttgtgcagctccaaagtgttgttaagtctcgacttagtagattagcaaaacaggatggaatgagtttgatgagttctgtccaaagaaaaggggataagtctttcagttactctgaagctgaactaaatgagcaactgcaagcatggagagaaaatccatcttgggttgacaagcctccactaataaaggtcactgctcccaaaggttctcttttgcaccttgatgtanaagttgatgttgg

SEQ ID NO: 44018 - DNA, 187 bp, Glycine max
  Clone ID: LIB3093-015-Q1-K2-E10
ctgaagccttctcttaccttgtttctttactagccactggaaaggttgttatacatccaatcccttgaatcaaataaaagggataggcaatttttctgtgtgtctagtaaacttcacattctgtgcaaatcagagtttagataaaaactcaaaaaaatataatgaacttcatttttacattcttagt

SEQ ID NO: 44019 - DNA, 413 bp, Glycine max
  Clone ID: LIB3093-015-Q1-K2-E11
agacttttcctccttctggagcttatggcaagatcaccgctgcttccgggcctcctcgtgacgctgatgattcattttcaaaacctgtatctggttctgatgaaccgcagcagggtggttggtttcagacttttacaattgctgcttacaaaccatactttgatgttgacacttcagatgttctagagaggattatcgactcactatttccatttagaggatctttcaatgaaaaaactgctaccaaccctgatttgtatggtccattctggatttgcactaccttgatatttgtagcggcatctattggcacctttgtgacatatatagcgcacaagctaaagagcaaagaatgggattatgacataaatctggtgacttggtctgcttgtttggtttatggctatgttacc

SEQ ID NO: 44020 - DNA, 422 bp, Glycine max
  Clone ID: LIB3093-015-Q1-K2-E12
gtctctgccgtcacaaaaaagataaatgtctccgtgtcgtcgtgactaacagtgtgagtgagtgtttgtgtaaatcggggaaattgttgggctattcaagagatcggcagcggcgtcatgggtggagatggagccacggcaaacgcggaggcgcagtacgccacggcgaagatatcggtgtggtgggacatcgagaactgccacgtccccaagggttcggatccgcacgcgatcgcgcagaacatcagttccgccctcgttcgcatgaactactgcggccccgtctccatctccgcctacggcgacaccactcgcatccccgcctctgtgcagcacgcgctctccagcaccggtatcttcctcaaccacgtccccgccggcgtgaaagacgcaagtgacaagaaaatcttggtgatatgctg

SEQ ID NO: 44021 - DNA, 402 bp, Glycine max
  Clone ID: LIB3093-015-Q1-K2-E2
gatcaagaggtggatgaggaggaagcctccctctttgacatgctctggttactacttgcaagtgttgtatttgtgccaatatttcaaaagattcctggaggcagtcctgttcttggctacttggctgctggtatcttgattgggccttatggtctctccatcattcgtcatgttcatggaacaaaagcaatagccgagtttggagttgttttcctgttattcaatattggcctggagctctctgttgaaaggcttagttcaatgaagaaatatgtctttggattaggctctgctcacgttttggtgactgctgtagttgttggcttggtggctcattatatttgtggtcaagctggccctgctgctattgtcattgggaatggcttggcattatcatcaact

SEQ ID NO: 44022 - DNA, 416 bp, Glycine max
  Clone ID: LIB3093-015-Q1-K2-E3
atttctaactaattattgtgcttattattattgttgagaaagaaaagaatggcaaaggtaataaaattctttgagttgaacacaggggccaagattccttctgttgggttaggcacttggcaagctgagcctggtgttgtagccaaagctgtcaccacagccattctggttggatacaggcatattgattgtgctcaagcgtataacaatcaagcagagattggttctgctcttaagaagctttttgatgatggtgtggtgaagcgtgaggacttatggatcacctccaaactctggtgttcagatcatgcttcagaagatgtgcccaaagcattggataaaacattgcaggatttgcaacttgattaccttgacctctatctgatccactggccagtgcgcatgaaaaagcgatc

SEQ ID NO: 44023 - DNA, 425 bp, Glycine max
  unsure (1)..(425): unsure at all n locations
  Clone ID: LIB3093-015-Q1-K2-E4
gcaaacatcaaccagcgctctatggtttgtttaagggacaccgagattgcaatgggtgcgtaccaacctcatcatacctgggcaagaagccagtatcatcctcgtgggcaaatccatggatataggatgtcactttgggctgaacatacgggtacgattgaagactgcttcttacaaccagagagccttgaatgtgttagtaggattagaacaatgggtgagctgaactggaagcaatttgcatcaaatgatgtaacagaaatgacagggcatctgctcaagtacccggtagaagtcgatcgaaagggtaaggtaagatccctcccgggccacgaagagtttccggatgtgggaggaaagattgtaggatcattcattgccattcangagaatctaaccatttgattacttttttacattcactt

SEQ ID NO: 44024 - DNA, 368 bp, Glycine max
  Clone ID: LIB3093-015-Q1-K2-E5
cccacgcgtccggaaaaagaaaaaagtgattatagtttcacttcggccttatccagtttagggtttcgggtctctaccctatctttcacgtatcgaaaccttaaatttacgatcaggtctgagcaatctggttggtagaacctttggtcttagtgagtcaagttttatgtctgaattagacgatcaaattcctactgccttcgatccttttgctgatgcaaatgctgatgactcgggtgctgggtcaaaggagtatgtgcatattcgtgtacagcagcgaaatggtaggaaaagcctgacaaccgttcagggattgaaaaaggaattcagctataacaagatacttaaagacgtcaagaaagagttct

SEQ ID NO: 44025 - DNA, 413 bp, Glycine max
  Clone ID: LIB3093-015-Q1-K2-E7
agagactgcagaaatgaaccccactaatggtattgaggtagaaaagattccagcaaatcatgccaaggagaaactagtgattgaggatgatggtaaattcaatcaagaagaagcaaaagggatcgaagaagcaacaaaaacactgttactaaatactgcaacagagagcctaacagaggaagaagtccaggaaatattgcccactcctgcaattgtccaacgtgacacaaagcaaatcatgcaacaacaaacacttcacaatgatgaatcagaagcaattgataaggaaaagagctgcataccagaaaatgaacttgacagaaagttcattgctgttgaggaatctgatcaacctgaaaccaaggccaatgctggcatagtaaaagaagaacaagcagacaaccaatcacaag

SEQ ID NO: 44026 - DNA, 387 bp, Glycine max
  Clone ID: LIB3093-015-Q1-K2-E9
catccctttcatttcgatctccattctccctgacactcctctctctgtatccgagttctagggttttggggatagaaagcataaatcacgtacacgacgtcgtttgatttgagggcggcgcaagatgccggggcaccgctcgaagtcggagaagcacgacgtcgacggcggcggcggtgagaagcagctccggcgggacccctacgaggtcctcggcgtctcgcgcaactccacggatcaggaaatcaaaaccgcgtaccgcaaaatggcgctcaaatatcatccggacaagaatgctaatgatcctaaagcagctgatatgtttaaagaggttaccttctcttataatatcctgtcagatcctgataaacggcgtcaatacgactc

SEQ ID NO: 44027 - DNA, 400 bp, Glycine max
  Clone ID: LIB3093-015-Q1-K2-F1
ggcgtcgagaccagaggtgattgcgccgcctgagattttctacgacgatgccgaagctcgcaagtacacctcttcttcccgtattgttcaaattcaggcgacgctgtcagagagagctcttgaactacttgctttgcctgatgacggcgttcctaaattactccttgatatcggttgtggatcgggacttagcggtgagacaatctcggagaatggacaccattggattgggcttgatatttcagcatcaatgcttaatgttgcggtggagcgagaggttgagggtgaccttttacttggtgacatgggccagggtataggaattcgtcctggagttatggatggggccatcagtatatctgctgttcagtggttatgcaatgctgataaaacctctcac

SEQ ID NO: 44028 - DNA, 338 bp, Glycine max
  Clone ID: LIB3093-015-Q1-K2-F10
gccaaccgcagctcctacagcatgggtccttttctctccctccgccgcgccaggcaggttcttggggccggcaaggtcacgctcttcttagttctttttgctctctccatcgtcgtttttgtctcctccagactcagttcgtggatgggatggaaccctcaccactcctcttcggtttactccacttcaaggggtggctatactgtgcttataaacacttggaggcataaatctcttctgaaacaaactgttgctcattatgcatcctgtcgaagcgctgaagcaatacatgtggtgtggagtgaaagtgaacaaccatccgagaggctcaaaacata

SEQ ID NO: 44029 - DNA, 392 bp, Glycine max
  Clone ID: LIB3093-015-Q1-K2-F11
cccgcggtcgccccccaagctcaaatcccacccaacattgttctcacatggcctgcgctagccctcaacgacaaccctgctcttcaatccgcaaaaagaggcccgggtcgtcccaaaaagattgcaggacccgtaggtgtgagcccgggcccgatggtgccgggcagaaggggtcgtccacctgggaccgggagatctaagctgcccaagaggcctggccgtcctcccaagcccaaatccgtgtcggcgatctccagtgggctcaaacgacgtccgggccgcccacccaaagccgaatccaacgtaaacgtcatccccttcgcagcccctgttgctcccggcctgcccacagtgcagcccatcgttcctactgcttccgtgcccaatggatc

SEQ ID NO: 44030 - DNA, 416 bp, Glycine max
  Clone ID: LIB3093-015-Q1-K2-F12
cccacgcgtccgcccacgcgtttggttcttggcctggcaatttgtaggaggttcgtaaatcttatggaagggcatatttgggttgaaagcgaaggtattggtaaaggatgtacagtcacttttattgtaaaacttggaatcccagaccgatcaaatgaatttaagctaccttttgtacctaaagtaccaggaaatcatggatctacaaactttgctgggctcaaagttcttgtcatggatgacaatggggttagcaggacagtaacaaaaggacttcttatgcatttaggatgtgatgtaacaactgcaagctcaagtgaagaatgtctgcgtgttgtttctctggaacatgaagtggtcttcatggatgtttgtacagggttagatggttatgaacttgcagtccgtatacatga

SEQ ID NO: 44031 - DNA, 413 bp, Glycine max
  Clone ID: LIB3093-015-Q1-K2-F3
cggccggattcccggggaaaggataaagggttggttcttagagttgggctcctcagttgttgttttggagcatgttgcaatcaaaggggttatgacccattgtggatggaactccactttggaaagtgtgtgtgctggtgtgccaatgattacgtggcctctctcggccgagcaattttcgaacgagaagttgataactgatgttttgaagattggtgttcaagtggggagcacggagtggtggtcgtggaattcagaatggaaagatttggtgggaagagagaaggttgaatcaccagtgaggaaattgatggtggagagtgaagaggcagaggaaatgacaacaagagccaaagagattgcagataaagcaagaagagctgtggaaaaaggtggaacatcttacgctgatg

SEQ ID NO: 44032 - DNA, 386 bp, Glycine max
  Clone ID: LIB3093-015-Q1-K2-F4
gcgcaacgaaagagaaaatgagtaggtgtttattttgtggtaacgggtctgcgctgattcacaatatgaatttgttgatatgaccaattcataatgcattaaaggtgaggggcaacaatagaagttgtggcttgcgtgttcaggtttctatggtggactcttcctccgctgatttcaccagacgcatcgaacgagcttggtcaatttctaagcaaccaaggccaatcgtgtgttcgtcttgcgactcaaaagggcatattgaatgtaaatggtgtgcgggtactggtttttttattcttggtgataacatgctttgtgaagtcccatccagagacactacctgcattatttgcacttgaaagggatcgatgtgctgttctgattgt

SEQ ID NO: 44033 - DNA, 408 bp, Glycine max
  unsure (1)..(408): unsure at all n locations
  Clone ID: LIB3093-015-Q1-K2-F5
ggaaaanccggggcgccgccacgcgtccgctttatttagagatgcgaccaaagcgtggtttctttccgacagacaagagcgacagggttgtttttgatggcagaatagagaaacaagaaagtgaagcgtgttagttagttagtagttggtgcgctgcgttgtgagttcgaaagtgaatctaggagaagaaggagtaaacaacacaaccaacaaacatcttcgatcttattctagggtttcaattgtgatgtgaatctaatgaatgtaacgggaaaagactgtagatagatgagctccagcaatttgacggggtttgtgttggccgtgctttccagcgctttcattggctccagcttcatcatcaagaaaaagggtcttcaactcggcagtgccaatggcccacgtgcc

SEQ ID NO: 44034 - DNA, 379 bp, Glycine max
  Clone ID: LIB3093-015-Q1-K2-F6
cccacgcgtccgctgtaattcatcagttgattcaaggcaactctgacatgttacctgagcatcaagtaaccagtttaggtagacattttgaaagtgaccatgattcagcaccttctcctgtcaatgcgtctgttgacaaaaatatgaaagattccaaagaactggttactgttcctgaaatggatgaggaactagctatggtacctgtacaccagaagccaaagcgatctgagatcgtccagcgtcgaatacgcaggcctttttctgtagatgaagtagaagcactggttcaagcagttgaaaaactaggaactggaaggtggcgtgatgttaagctttgtgcttttgataatgcaaagcatcggacatatgtggattt

SEQ ID NO: 44035 - DNA, 412 bp, Glycine max
  Clone ID: LIB3093-015-Q1-K2-F7
cccacgcgtccgctctccttctttttttttctttcttcttcttccatctctttttttctgcttaagggctacaaaaggtctcttcttcttctcctcctattgaactttggtcatcacacgagaaaacccacgtctggatcttctggtgtaaaggccattagaagccttttagaaattttcaaattgagttggtgtatagtgttgaagggggtgaaatttggagcccagtttgttacttcatttgaaaggtcatagtttgaaccctctttttctggagatttacctgggaaaagatgatgatgtttgaagatatgggattctgtggcgatttggatatgttatgtggttctcttggggatggggatattgctgtgagacaaactgaaccggatcctgtagttgaggatgacta

SEQ ID NO: 44036 - DNA, 397 bp, Glycine max
  unsure (1)..(397): unsure at all n locations
  Clone ID: LIB3093-015-Q1-K2-F8
agaaaagttagggttcacaacttttttttttccttttgcttgcgaatctgaatcaaataatcaatcatccattcgttattcatcatgtcgtcggcgaagaaaatcacgctgaagagttcggacggcgaggctttcgaggtggaggaggcggtggcgctggagtcgcagacgataaagcacatgatcgaggacgactgcgccgacagcggcatccctctgccgaacgtgacgagcaagatcctggcgaaggttatcgagtactgcaagaagcacgtcgaggccgcgaatcccgaagacaaaccctccgaggacgatctcaaggcctgggacgctgaattcgtcaaggtcgaccaggccacgctcttcgatctcatnctggctgctaactacttgaaca

SEQ ID NO: 44037 - DNA, 359 bp, Glycine max
  unsure (1)..(359): unsure at all n locations
  Clone ID: LIB3093-015-Q1-K2-F9
ggtacttgctcacagatatattttnttttttgtctccatcattttctcgagagctttcagtttctgtgggtcatctttcttcttcttaatctttccccccctctctgtaacatcccgcttctctgaatccctttctgctaatcatctgtctttcaagctaagattttctggtttgtcttttaattcaccaaaaagcaaacttagaaggatttttcgaaagccaggtgttttcagaaacgagatccaggttttattgtcgaatttcgctagtcatattaatatttcatcatttttttttcctttgaaaccagccaagagggttatttttgatccctcanagctaatttctcattttcttt

SEQ ID NO: 44038 - DNA, 403 bp, Glycine max
  unsure (1)..(403): unsure at all n locations
  Clone ID: LIB3093-015-Q1-K2-G1
cccacgcgtccgggcatttgtccactggtatttgggtgaaggaatggaagaaggtgaattctctgaagcccgggaggatcttgctgcccttgaaaaggactacgaagaggttggagcagaaggcgaagaagaagaagaagaacccgatgattactcaaagtagtcaatcattcatcaccagctaccttacctacatctaccttctttcctctgtctaatgtctatccttgtccattgaattttaagcatctttctgttgtgtgctagctctgttagtgttgggtgagataattgctttcctcatgagaagcagtggtttatttgtcagtttgaatcacttttaagtttcagtgaaagagcaaaataaaggatagcgtangagtgctgcagtttccattactta

SEQ ID NO: 44039 - DNA, 293 bp, Glycine max
  Clone ID: LIB3093-015-Q1-K2-G10
caaaaacgcggggggtttttctaggcaggaggggcgattccaaagtccaactagttcttcattcacacgagaaacaactgcatcgccaaactctacaaaagagaaggatgcacttttatctaaaagtgacgacgaaacatgcccaatttgccaagaaaagctcggcaaacagaaaatggtttttcaatgtaggcatgtcacatgctgaaaatgcacgaaatatatgacgaaactttatattatcattctataactgtggatatagacttaataaaaagcatttgtcttcacct

SEQ ID NO: 44040 - DNA, 384 bp, Glycine max
  Clone ID: LIB3093-015-Q1-K2-G11
atagggttttccccggcgggatcagtcccgtaatcccttcttcatcctgttttcctaaaaaattgagagtccagccgcaacgggccttgagctctgacccctacgttctggaactcgccgaaaccctagaagactccttcccctcctctccctccaccccactcgctctccagaacctgcgactctcctactgccaatccctcctctacactccatggccctcccgccgagacgagcccttccgcttcaccgacctctccttcatccgccaatcccgcatcctccccggctgccccaccatcttcctcctcactcccacctgccaccttcccaacgacgtctacgtcggctccctctcctgctgcttcccctctctcctccaac

SEQ ID NO: 44041 - DNA, 316 bp, Glycine max
  Clone ID: LIB3093-015-Q1-K2-G12
cccacgcgtatcggaaaaaagtgtttattaatccattggaacaaaaccaaacttggttattgctgcggctgctggggcttgcacagacatagccactcaccctctggatacagcctattcaaagatgcagacaagagaatatgcaaagtctaacaggctactgaagacccttacagacagaaaccggagtgacgcatcacatagcctcaggattttcttgctgctgacatcaaaccctgcaattcaatatacaccgtttgatcagctcaaacaacgagcactgaagaatagacaaaacaatgctgataaacgaaca

SEQ ID NO: 44042 - DNA, 404 bp, Glycine max
  Clone ID: LIB3093-015-Q1-K2-G2
cccacgcgtccgggaaatgaagtcttctttaacagcacagttaacagacgaggctgatacatctgaagtcattgagactgtgaagctgcgagttagagatgctaaattgccggacattgaggtggtgcggatcttgtgggatgttttaatggatgctgttcagtggtctggaaaaaatcagcaacagaatgccaatgcagcccttcgtcaggtaaaaacttgggcagaattgttgaatacattctgcaccactgggaaacttgagctggaactgatgtacaaagtacagatgcaatgctatgaggatgctaaactgatgaagctgttccctgagattgttagatctctttatgaccaggatgtgctggctgaaaataccattcttcattggttccgaaaaggaa

SEQ ID NO: 44043 - DNA, 396 bp, Glycine max
  Clone ID: LIB3093-015-Q1-K2-G3
cccacgcgtccggctgcttcaggtgcttgttctatctataataattaagaattctgttgtccctcggttaaaatcttggatacgtaaggttgtcttagacaatgatgatgaacaattaaagaaaactgacaacaaaccgacactgatggaagaagctgcgcaagctgcaaaatcagctgcagctgcagctgcagatgtggcaaaagcaagccaagaaatgctggcttcaaaaggtgaagagaggagatactttgtggaagttgtgagccttttagataaacaagtacaagaaatgaagtcaatgacaaatgccataagaaggttggaagggcaagaagatcttcaaatcagtcaaacaagttcgaagcaactgattgtgaatggaaaaacagacta

SEQ ID NO: 44044 - DNA, 384 bp, Glycine max
  unsure (1)..(384): unsure at all n locations
  Clone ID: LIB3093-015-Q1-K2-G4
cccacgcgtccggcactctcttcnatttttcttgaaacagatttgacagctgagcaacgactgatggtggagacaatattgaaaagcagcaatttgttggctaccctcatcaatgacgttttggatctttcacggcttgaagatggcagtcttcaacttgaagcagcaacatttaacctccattctttgttcagagaggtccttaacttgattaagcctgttgcatctgttaaaaagttatcactcacttcacatgtagcctcagatttgccaatgtatgccattggtgatgaaaaacgtctcatgcaaactattttgaatgttgttggtaatgctgtgaagttctcaaaagagggttgcatttccatcactgctttcggtgca

SEQ ID NO: 44045 - DNA, 331 bp, Glycine max
  unsure (1)..(331): unsure at all n locations
  Clone ID: LIB3093-015-Q1-K2-G5
gaaaaaaggcgggggcgacccacgcgtccaatttggttttccccggcgggagatagtttccgtaatccctncaacatcccggggggcgaattaaatgggagggggggcgaaacgggccttgagctctgacccctacgttctggaactcgccgaaaccctagaagactccttcccctcctctccctccaccccactccctctccagaacctccgcctctcctcctgccaatccctcctctccactccatggccctcccgccgagacgagcccttccgcttcaccgacctcttcttcatccgccaaacccgcatactccccggcttccccacc

SEQ ID NO: 44046 - DNA, 375 bp, Glycine max
  Clone ID: LIB3093-015-Q1-K2-G6
cttgagctattttatcattatcaccgtcattgccaattctcctctatagcttgtgtgagtatagaaataagagatggaagagagagtgagtggatgtagccacgtcttaatggttccatacccaagtcagggtcacataaacccaatgctccaattcagcaagcgcttgagcaccaaaggagtgagagtcactatggtcacaaccattttcatttccaagtccatgcatcttcaatcttcttccttgttaggaaatgttcaacttgatttcatatcagatggctgtgatcaaggtggttttggtcaagctggtagtgtgtcaacctatttatctcgcatgcaagaaataggtttcaataactttgaggaactcat

SEQ ID NO: 44047 - DNA, 392 bp, Glycine max
  Clone ID: LIB3093-015-Q1-K2-G7
cccacgcgtccgggaaatgaagtctttttttttagcacagttaacagacgaggctggggcatctgaagtcattgagactgtgaagctgctagttaaagatgctaaattgccggacattgaggtggtgcggatcttgtgggatgttttaatggatgctgttcagtggtctggaaaaaatcagcaacagaatgccaatgcagcccttcgtcaggtaaaaacttgggcagaattgttgaatacattctgcaccactgggaaacttgagctggaactgatgtacaaagtacagatgcaatgctatgaggatgctaaactgatgaagctgttccctgagattgttagatctctttatgaccaggatgtgctggctgaagataccattcttcattggt

SEQ ID NO: 44048 - DNA, 400 bp, Glycine max
  Clone ID: LIB3093-015-Q1-K2-G8
ctttgcttccccttagtcaaactttagttcacaccatccatcctctctctcttgtcttcttctgttctctagtggcctgctcttgtttcttagaatccgtacggtctaatcaacacaacaaaatggatgcaattagttgcctggatgagagcaccaccaccgagtcactctccataagtcaggcgaagccttcttcgacgattatgtcgtccgagaaggcttctccttccccgccgccgccgaacaggctgtgccgcgtcggtagcggtgctagcgcagtcgtggattccgacggcggcggcgggggtggcagcaccgaggtggagtcgcggaagctcccctcgtccaagtataagggcgtcgtgccccaacccaacggccgctggggctcgcaaattta

SEQ ID NO: 44049 - DNA, 388 bp, Glycine max
  Clone ID: LIB3093-015-Q1-K2-G9
cccacgcgtccgcccacgcgtcttctctttctccccacgctataaaatccccccactccttcttgcttcacacagcatatctttctcttgttccttctccttgtgatcttcttcaaccttcagagtgagaaaacacattcagaaaccacgtttctctcttcttcttcttcttcttctttttcttctctcgaggtcattattaagtattcaccatggaggcaccatctcccaccaaacccaacgacccaacaaaaccttccaacacttccaccacccttagtctggaggccggcccggcccaagcgagcccactccgaaaaatgtttgccgtggcgtccatcgtcgccggcatacagttcgggtgggctcttcagctctttttttaacc

SEQ ID NO: 44050 - DNA, 415 bp, Glycine max
  unsure (1)..(415): unsure at all n locations
  Clone ID: LIB3093-015-Q1-K2-H1
cccacgcgtccgaactacatggtctcttgaaaacgacccgtttcctccctcgcacggatccacccgaaatctgagattccttcgaattgttaactctctttcagtttcaagttggaaactttttcgattttcgctttctggaggtgtgaattgttgtttgaaagtcacaagcaatggtgaaggacactgcgtattatgacatattaggtgtcaattatgatgcatctgctgcagagatcaagaaagcttattatgtcaaggctagaattgttcaccccgataaaaatcctgaggatcctaaggccgcagaaaactttcagaaacttggtgaggcttaccaggttttaagtgatcctgggaagcgtgcggcatatgatgagcatgngaaggagggagtaccacaagattccatgat

SEQ ID NO: 44051 - DNA, 414 bp, Glycine max
  Clone ID: LIB3093-015-Q1-K2-H11
atttaactggtttcatgcttattgatgttgctgtggaactggaagatgacctattttttgcagacttgagcaagcaaatttctcaactaattatggatgaagatgaagacccccttcctacttgtcctcctgattctcttcagacttttcctggatcaatctatcctcctccacagtctggtttcctctacgagcaggctttgataagacaaagcaaagggacaggggtgtttatcccccaatctacacagcctagaaggaagcacaggaaaggaagatcaagctcaaacgctaagtatcaaaagcagactcaagatacaaaaacggtttctcaagttcctataacaagttctttcaaacccaaaaatggttgaagatatatatattttcccacaaattaaactgcataagttc

SEQ ID NO: 44052 - DNA, 397 bp, Glycine max
  Clone ID: LIB3093-015-Q1-K2-H12
ctcgcctataaaatgtccgccactgtttcactctgcgccacttccagaacaactttggcatcatcgaagcccgtcgcgagaagaagctgcttcgtcgcggttcccaaaatcgcgtttcccaagctccgtttcaaacccgtcgctatggctacgctcggcgctcgcatggtggccgccgcacccaccgtcactccgccggcctcgctcgacttcgaaacctccgttttcaagaaggagaagattaacctcgctggacacgacgagtacatcgtgaaaggagggagggatttgttccctctggtgcagggtgctttcaaggggattaagcagattggcgtcattggatggggttcggagggacctgctcaggcacagaatttgcgggactcgcttgctg

SEQ ID NO: 44053 - DNA, 422 bp, Glycine max
  unsure (1)..(422): unsure at all n locations
  Clone ID: LIB3093-015-Q1-K2-H2
cgaacagctagccatggcttctcactctcatagttgcatcattttggctttgttcattgctatttccttctcaagcatggacatggcattagcaacacgccatctctcacctttcccaccactgccacctttgccagcaaccccaccattattgccaccattgccacctgtgccaacagtcccaatcccaattacactgccacctttgccaccaactccaccattgccaccaactccacctttgcctaggattacaacctagctcctgagcacttgcagttggatacatacataacatataataagtaaacaaataaaagcactaatctcttctctccatttcgattcagntctgctttcctgcatgcatgccgtttcctgctttcaatangtgatatatacatatacacacacatatgctg

SEQ ID NO: 44054 - DNA, 414 bp, Glycine max
  Clone ID: LIB3093-015-Q1-K2-H3
ggccatataatttttttttatttgaattaatgtccgggatcatccacaagattgaggagaccctccatgtgggagggcgcaagaaagaggagcacaaaggagaacaccatggtgagcacaaaggtgaacacaaaggagaacaccatggtgagcacaaaggtgaacacaaaggagaacaacaccatggggagcacaaggagggacttgtggataagatcaaggacaagatccatggtgatggccatgacaagggtgagaaaaagaagaagaaggacaagaagaagaaggagcatggacatgaccatcatggtcatagcagcagcagtgacagtgattagatcttatatgttaagcaggtgtacggtacgatggtagtgaggagccagaatccctcttcctgctttatgatataat

SEQ ID NO: 44055 - DNA, 386 bp, Glycine max
  Clone ID: LIB3093-015-Q1-K2-H4
agaacacaaaaccatggtgtcaccattttctctcttagtaactttaatcctcttatgatcagtttcattggcagctgcagcttcacttgaagaaaactttgtccaatgtctcagcttctattcagacaaagcagctccattttatgcatcaatttacactccacaaaatgcatcattcaacaagatccttgaatcctctgcacagaacctaaggtatttggtgccttcagcgccaaaacctgagcttatattcacacccttgactgattcccatgtccaagtggcagtgacttgctcaaagaagcttggtattcatctgagaattcggagtggtggccatgactatgaaagactctcatatgtttctgaagttgagtccccctttt

SEQ ID NO: 44056 - DNA, 411 bp, Glycine max
  unsure (1)..(411): unsure at all n locations
  Clone ID: LIB3093-015-Q1-K2-H6
ctcgcctataaaatgtccgccactgtttcactctgcgccacttccagaacaactttctcatcatcgaagcccgtcgcgagaagaagctgcttcgtcgcggttcccaaaatcgcgtttcccaagctccgtttcaaacccgtcgctatggctacgctcggcgctcgcatggtggccgccgcacccaccgtcactccgccggcctcgctcgacttcgaaacctccgttttcaagaaggagaagattaacctcgctggacacgacgagtacatcgtgaaaggagggagggatttgttccctctgttgcagggtgctttcaaggggattaagcagattggcgtcattggatggggttcgcagggacctgctcaggcacagaanttgcgggactcgcttgctgatgcnaagtctgat

SEQ ID NO: 44057 - DNA, 261 bp, Glycine max
  Clone ID: LIB3093-015-Q1-K2-H7
atccagttgtggcataaattgcatattatatatggtccctggtgactaccaccttgtcatgcttcagagtttaaagataagtgtcattgtataatgaaaattgctcctagttgggttggtatgatgtattaaataagttagaagttgctgtaaatcacgtaagaatatcatggcctgaattgtgtgtatcacagacataaataacgatcatatattgatagttcatagttacatattgtattgtaaaaaaaaaaaacaaaa

SEQ ID NO: 44058 - DNA, 354 bp, Glycine max
  Clone ID: LIB3093-015-Q1-K2-H8
caccatcgggcccagcaccaattccttttccctctcccccaaattagggtttctctctgggaatgtgattcagcgcgcggcagcatcaatggcggagaagagattcggcgtgatagggtacgctctggcgccgaagaagcagaacagcttcatccgcgactcgctggtgagcctagcgaaatcgcgagggattgagctcgtgcgcgtggactccgacaaccccctcgcggatcagggccccttcgactgcgtcctccacaagctctacggcgacgactggaagcgccagctccaggaattccacaccctctacccaaacgccgtcatcctcgacgcccccgaagcgatcgagcg

SEQ ID NO: 44059 - DNA, 237 bp, Glycine max
  Clone ID: LIB3093-016-Q1-K1-A1
caaggaagaacatgatttgatgatgagaagattcttgcgggctcgtagtttggatgtggagaaggcttcggcaaggttccttaagtacttgaaatggaagcgttgatttgttccaaatggttgcatatcaccgtcagagattgccgaagatattgcacaggacatggggtttacgcgaggactcgacaagataggtcgacctatagctggtacctttagtgcacaacatcttcaaag

SEQ ID NO: 44060 - DNA, 474 bp, Glycine max
  Clone ID: LIB3093-016-Q1-K1-A11
cccacgcgtccgtcaacccccaaacgcccaaacgatgttagctgcaaacgccaccttaaaaatcgaagctttatgatcaccaccctagtgttgtgttggtgatgaatcctaggagcagcttgtgttcttctctgttcatgttcatcaccttgttggggcttcatgtgtacttcgcttcgtcgcaggtcgaagactacgtgagatgtctacggggcatcgaggacactgtctccgaccctcaggctcggctcgccacgtggaggttcgacaacacaacctccggtttcatctgcgacttcgagggcgtgtcatgctggggccgaagggagaaccgtgtcttaggtttggacctccgagatacgaagctttcgggtaataagatccctgaggctttgaagtactgtggaaagagcattcaaaggttggatcttgcttcagattcttttacttcgaagatcccacgtgagatatgca

SEQ ID NO: 44061 - DNA, 447 bp, Glycine max
  Clone ID: LIB3093-015-Q1-K1-B2
ggcttctcaaggccatggtttcataatgtgtctgcaatggaatggctttctttcaggttgaatttactttcaaattttgtttttgccttctcactggtcatgctagtgagcctccctgaaggaataatcaatccaagtattgccgggttggcagtaacatatgggatcaatctgaatgtgttgcaagcttcagttatatggaacatatgcaatgcagaaaacaagatgatatcagttgaaaggatccttcaatatacaaatataacaagtgaagcacctcttgtgattgaagacagcaggccgccaagcaactggccagatactggaacaatatgtttcaaaaatttgcagatacgttatgccgaacatctaccatctgtattgaaaaacatcacttgcacatttcctggaaggaagaaagttggtgttgtaggacgtaccggtagt

SEQ ID NO: 44062 - DNA, 288 bp, Glycine max
  Clone ID: LIB3093-016-Q1-K1-A12
cccacgcgtacgtcaactttcaaacgcccaatcgatgttagctgcaaacgccaccttaaaaatccaagctttatcatcaccaccctagtgtactgttgatcatgaatcctactaacagcttgtgtacttctatgttcatgttcatcaccttcttattgcttcatgtgtactctgcttcgctgaaactttaacactacttaagacgtataccgctcatcgacgacactctcttcgaccctcacgctgctcattccacgtgaactttcaacaacacaacctctcttttca

SEQ ID NO: 44063 - DNA, 459 bp, Glycine max
  unsure (1)..(459): unsure at all n locations
  Clone ID: LIB3093-014-Q1-K1-B10
acggttgttttttctggtgttagtgttaggtcgaatcttaatcctgtagctgatcgttttgtatccatgcttgctcagtgtggattttatcctctcctccataattttccaacaaaatctcaaacataataaataaaaattacatttttattcacaaaaatatcgggattcatcttgttctcattttgcccccttttttcttctgctctcccgaatcagaaaccctaatcattgtttgggatttcagaggaaagaaatttaaacagagcacgaagatgaagggtctcttcaagtccaagcctcgcactcctgcagatgtagtgcgccagaccagagatcttctgctctttgttgatcgcagccccgaaacccgcgaaagcaaacgtgaagagaagatgtccgagctatttaaaaatatcanggagctaaagtcaattctgtatggaaatagtgaatctg

SEQ ID NO: 44064 - DNA, 457 bp, Glycine max
  Clone ID: LIB3093-014-Q1-K1-B11
agaagattgaacttaaacaaaaacaacacgaaagaaagaaagaaagaagatgggaattgcagtgggaggtgttgatttgctgagtgaaaaagcggcgatgatgagagagtgtctgcagaagagtgaaaccatcacagacaacgtcgtcaccattctcggttccttcgaccaccgtctctccgccctcgaaaccgccatgcgtccaactcagattagaactcactctattaggaaggctcatgagaatattgataggactttgaaggctgcggaggttatattggctcacttcgatcaatatcgtcaggcagaggcaaaaatacttaaagggccacatgaagacttggaaaactatcttgaagcaattgataagttgagaagcaacattcagttttttggtagtaagaagggtttcaagagtagtgatggcattgtcgtgcatgctaataatttgcta

SEQ ID NO: 44065 - DNA, 457 bp, Glycine max
  unsure (1)..(457): unsure at all n locations
  Clone ID: LIB3093-014-Q1-K1-B12
ccggnccggaccacgcgggccgacacacgcgtgcggttgaatacctatgggaacacacggcactggctgcattgctgtgaaggggaacactctgggtggttgtgtgcatacttgatgtgcttcccatactaatacctgagcgtacactggagtgcttaaaccacgtgatcggataatgggtctggactagcctcacggacgacatgtgactcatggcttcatgacacccactgctgcgtgcgtctggcccgtcaatttatcatgcagctatggctcatcgacttgatgaatcaacaagtcttattgattatgatatgcgggagaaaactgctactgtggttcattcaacactcattgctgccggtgctagtgcttatcctcgcgacatagactacactgctctgagataaattgcagctgaagtacgtgctcttcttatgatggatatggcttatat

SEQ ID NO: 44066 - DNA, 425 bp, Glycine max
  Clone ID: LIB3093-014-Q1-K1-B3
atggcaactatgactggtgtgagcctttcatgccccagggttttcttcaacgcatcagcctcaccgcaaaacgcgcatgctgtaaagttctcacttccacccagccaagcagtgcgaccgggtagtatcaagttgggtcgcgtgatgaggatccgacccgttcgcgctgcgcctgagcgcatatcggagaaggtggaggagagcataaagaacgcgcaggaggcgtgcgccggcgatccgacgagcggcgagtgcgtggcggcgtgggacgaggtggaagagctgagcgcggcggcgagccacgccagggacaagcaaaaggaaaaggactccgacccgctcgagaattactgcaaggacaacccggagaccattgagtgcaaaactttcgaagactgagcatgcatgcttcgttcgtacgtgag

SEQ ID NO: 44067 - DNA, 460 bp, Glycine max
  Clone ID: LIB3093-014-Q1-K1-B4
ggaatcttggaagcccaggatggatcaagaggactatctgacattgaggaggggacagatagtaaaagctgtgccgctgagatgggaaatgtatctgaagtcccaaaatcctcagtatcagctgagaaggtggaaggaatcttggaatcccaggatggatcaagaggactagctgacattgaggatgggacagatagtaaaagctgtgctgctgagatggaaaatgtatctgaagttccaaaacccctagtatcagttgagaaggtggaaggattatctaaggaaggtatagttggcagccaagcaatagtgcaggtatcagaagaatctgaaactgttacgggagatggaattgatgttactccagattgtttggctgtgccagaaactgtgtcaaatgatggggcttcatctttgtgctcttcagcagcaggaagtgaacatgtggacagcttgtctg

SEQ ID NO: 44068 - DNA, 418 bp, Glycine max
  Clone ID: LIB3093-014-Q1-K1-B5
aacactctctctcctccttccacctagcagtggtgacaaccaaaccaagtgtcccctcctttctcttgttaacaggtagcagagttagtgagtaatggcaggaggacaactaggagtgcttaatgcactcgatgtggcaaaaacacaatggtaccacttcactgctattgtgatagctggaatgggattcttcactgatgcctatgatcttttctgcatttcccttgtgaccaagttgttggggaggttatattacacagacataacgaacccgaagcctggtgttcttcctcctaatgtgcaagctgctgtgactggtgttgctctatgtggcactttagccggccaacttttctttggatggcttggtgacaagttgggaaggaaaagggtttatggcttaactcttatgcttatg

SEQ ID NO: 44069 - DNA, 457 bp, Glycine max
  Clone ID: LIB3093-014-Q1-K1-B6
ataatatcaggatagcagagacttaacatcaaataatccaagtgtaagtttggctagcacgtcacgaggcatttgttctcctgacatttctgtgactcttccaaatacttcaccaaagtcctttcggtctgacaatacaatttctgaaaggtcacatgcgccaccagacccaacaaacatgcaagtgaaaggatctgcttcagatgtatttcgtgtcagtgtttccagtgccccaagtacatctagtcatggatctgcacctgatgactgtgatgctttgggggatgtatacatatggggagaggttacctgtgaaaatgttaaagttggtgctgataaaaatgtaaattatgtcagccccagggcagatgtacttctccccagaccactggaatccagcgtagttttagatgtacatcatatagcatgtggtgttagacatgcttctctagtcact

SEQ ID NO: 44070 - DNA, 433 bp, Glycine max
  Clone ID: LIB3093-014-Q1-K1-B7
ctttggaatgcagcatctaagcttctaatggctgtaggttacatactccggggcatgactatgccagggtccctatacatagggtctattttagttggcatgtgctatggaatgaggcttgccattacagtcccaacaacctcaaatttatttgcactcaaatattatggtctcatatacaacattctcattcttaaccttcccttgggatctatcattttctatggtatgcttgctggcatactctatgatatctatgcaactacaacaaagggaggaggcaacaccttttattgtacgacaatgttacaggctaacctatgttgtcatgactggagcttgcattgttggcttcttcttatacaatttgttgtgaatcatttactagaactattacacaaagatttccataatcaataaatccttagcaaca

SEQ ID NO: 44071 - DNA, 408 bp, Glycine max
  Clone ID: LIB3093-014-Q1-K1-B8
cccacgcgtacgaccacgcgtccgaatgcctgatgaatgagtcatctggtgggacagatactatggacatggatgctttacataacaattatcctcccggtgatgttctatttcaaacaaatacgtgctccaaggatagtcaaaactcacttacgtctcaaggcgcaacaatttttgcttgagagaacactcttgcatactctgagactacaacaatactagatattaaccaagagcctcaagagcttcttactgaggaaagttctgtggtagacagggagactagcacattatgaacccacagccttgatttggatcactttctttctcatgcacatgagcatgctatgacatgttctcgcaatagttgtttaagaacagacccaagcagcagatgggtcaaaagac

SEQ ID NO: 44072 - DNA, 456 bp, Glycine max
  Clone ID: LIB3093-014-Q1-K1-B9
cccacgcgtccgcccacgcgtccgcccacgcgtccggtcctcttttctcggctccctttttctctctgtctctctctctcggtctcgctcttcttctcatcaagcacagagttacagactcaccgatcttccgattctctttcgtcttggtttatgagctcgaaggagagacccactcttggtggcacgcggattaagacccgcaaacgaaatattgctgcgccgctggaccctgcagcattctcggatgcagtggtccagatttatttggataatgctggtgatctggaacttattgctaagagtattgaatcttcagaccttaacttttcaagatacggtgacaccttttttgaagttgctttcactgggggtcgtacacaacctggaactaccaagcctgatgagggggaccgccacccatactctataatagagtgtgagcctaagcgtgaa

SEQ ID NO: 44073 - DNA, 448 bp, Glycine max
  Clone ID: LIB3093-014-Q1-K1-C1
tttcattcacccttggtgtgaaacagatgatttgctgctgtaacaaaatggatgctactacacccaagtattccaaggccaggtatgatgaaattgtgaaggaagtctcttcctacttgaagaaagtaggatacaaccctgacaagattccttttgttcctatctctggttttgagggagacaacatgattgagaggtccacaaaccttgactggtacaagggtccaactctgcttgatgcacttgaccagattagtgagcccaagaggccctctgacaagcccctcaggcttccccttcaggatgtgtacaagattggaggtattggaactgtgccagtgggacgtgttgagaccggtgtcttgaagcctggaatggtggtgacttttgcaccaactggactgacaactgaagtcaagtctgtggagatgcaccatgaatctcttac

SEQ ID NO: 44074 - DNA, 446 bp, Glycine max
  unsure (1)..(446): unsure at all n locations
  Clone ID: LIB3093-014-Q1-K1-C12
cccacgcgtccggnggacatgcccgcgaaacagaagggcgaaggggcaaacacaactttgggggggcgaaggagagcgagagagaaaaaaacggcggggatcttcagcagttccgaggtgtcgccgccggaggagctggtggctgccggcagcagaacgccgtcgccgaagacgacggcggggaagctgctgaaccggttcgtggagaacaaggcgtcggcggtgtcgctgcaggtgggagaacacgtgcagttggcttacacgcaccacaacgagtcaccgtggcatcccagatcatttgctgttaaggatgagatattctgcttgtttgagggggctatagacaatttgggcagcctgagacaacagtatggactggccaagtcagccaatgaagtggttttggtgattgaagcttacaaagctttacgtgatcgagcaccata

SEQ ID NO: 44075 - DNA, 461 bp, Glycine max
  Clone ID: LIB3093-014-Q1-K1-C2
gtccctttttacagagtcatgactatggctggagctttgagtctctcccaattcccagttcgtgggtctgtttctttgcccaaaagaagaatacccagaagaagcttttgcattaagggcatgtcagaaatctcttccactttttctgtgagcacccaacaagaagaaccaacttctaatgcttcgtcagtgacaattgcacctccccccaacttcaagccccctgagcctaaacgctttgcaatcagacctgacaagaccagtgaagtatttggagctttgcttcctttgctctttcgctttgctaccggagttttcgtttctgggtattctttttcaattgtttctaaggatgaaattcctccagatgaatatgctttggaacttaatggcgttaccataaaagaaacagcaaaattaggccctcgcccagagaagcctattgagatatatgaatttga

SEQ ID NO: 44076 - DNA, 458 bp, Glycine max
  unsure (1)..(458): unsure at all n locations
  Clone ID: LIB3093-014-Q1-K1-C3
agaaaacagcatcgaacccgtcgtagcagaaaaacttgtcaccatggtttcttccgacaaggatccacgagaggatgtccttcaagcctggtacatggatgatagtgatgaagatcaaagactcccccaccacaaagaacccaaggagtttgtctcgttggaccaacttgctgaacttggagtccttagctggaaactagatgctgataaccatgaaaatgatccagagctgaagaagattcgtgaagagcgtggttacacctacatggatgtttgtgaggtctgcccanaaaagttgccaaattatgaacagaaaatcaaaagcttctttgaagagcatcttcacactgatgaggagatccgcttttgtgctgctggaagtggctattttgatgttagggatcgcaatgaagcttggattcgtgtgtgggtcaagaaaggaggaatgatcatcttac

SEQ ID NO: 44077 - DNA, 432 bp, Glycine max
  Clone ID: LIB3093-014-Q1-K1-C4
acataactatcttgtgtgtcaaacggatgcatactggatacaggtgtggaggataacatacggtaatacaacggagaaacggtttctgaccattgcgttgagcagggctgaggcttattgaattatttaaattggaaagtcagattgaatcaatgatacacatttattaatggaacgaacttatacgcttcctactgagaatgtttggtgcatgtcactcaatctagaacgtataatacttgatgcgatgattctcatagcatagtgacaagatcttatatggaaaactgatgatgtgagccttaacagcacttatgaatgctgtattaatatagcacagagatgtgctcaatgtgtacgaaacatgaaacatgtatttatacaggtatgagtcctggtggttggaaggtactggttgaatactatgatagc

SEQ ID NO: 44078 - DNA, 466 bp, Glycine max
  Clone ID: LIB3093-014-Q1-K1-C5
cccacgcgtccgtgctactctttacaaggccctagttacagatgccgacaacgtcatcccaaaggctcttgattccttcaagagtgttgaaaacgttgagggaaatggtggcccaggaaccatcaagaagatcactttccttgaggatggagaaaccaagtttgtgctgcacaaaatagaaagcattgatgaggcgaacttgggatacagctacagcgtggttgggggtgctgcattgccagacacggcggagaagatcacattcgactccaaattggttgctggtcccaatggagggtctgctgggaagctcactgtcaaatacgaaacaaaaggagatgctgagcccaaccaagacgaactcaaaactggaaaagccaaggctgatgctctcttcaaggccattgaggcttaccttttggcccatcccgattacaactaatcctcttcaacttacttgttatca

SEQ ID NO: 44079 - DNA, 406 bp, Glycine max
  Clone ID: LIB3093-014-Q1-K1-C7
cccacgcgtccgataagctaccttgctagtttccatcatcgaatctgttggtatttccaaatatacacattttctattttattcatagaaatctttaacttgagaagcattacatggcgctgacgatgatggcggcgatcggcatctgcatgaagcaagagaagaagatgccggcgacgccggcgccggagaacgagctgaagaagcggaatgaggagctcgagaaggagctcagagagagcaatgagagggaggagcagatgaagcgcgaactacagagcgcgtgggagaggctgcgcgtggccgatgaggctgaagagaggctctgctcccatctcggatagctagaagcagacgccgtgtaccacgcgcgtgactaccacgcgcgcatcgtctccctcatgga

SEQ ID NO: 44080 - DNA, 451 bp, Glycine max
  unsure (1)..(451): unsure at all n locations
  Clone ID: LIB3093-014-Q1-K1-D1
cccacgcgtncggtaatttctttctgtaacctcatgccatgctcactcagttactcatttttcttgcaccgcctattgtgcgtgaaatgaaatatatcatttgcggaatctctccacggagcaagttttgggcaggtttgagttttagtgtttgaagcattcaaatgatcttgagttggagttggagttggttatcttagtggcttggatgttagatgcctgaagcctgcgttggaggattgcaattgcatactaaagagggttcattgttcatagcttaacaccaaaaagtgtgggcacatgctacagctacatacccgaaaaaaattacatattctttgtatatgtgttatatttgtgtttgataattccattggtaaatgtgatttttctaactcgtgtgcagaaaaccagttataggatttgtctcattggcgacatgaacttctga

SEQ ID NO: 44081 - DNA, 263 bp, Glycine max
  Clone ID: LIB3093-014-Q1-K1-D10
agtacttcttagaagtattcttcaaacatcgttgtattagaaagtacatggtgtctctcctgaaaatgtcttgctctcagtcatatctgatgactccgaaacacatagctttgcaaaatcatatgtgagggtcttcacatatttacagattttagctacatcgtttcaaccaccacggacacctaattaattgcaatgatactaattaaaaatgaactcgaacagctcttataagagacttttcgacgataatgatgatgttt

SEQ ID NO: 44082 - DNA, 448 bp, Glycine max
  Clone ID: LIB3093-014-Q1-K1-D11
ccatggaaggccaaaattccgccatataaacatgccattgcagcctatagtgttgccatagcgggcctcccttcacaaactgtctatggtggttggcaaaaatctgcaatggcgctgccatttaacaacattgacacttagtagggtaaacttgttagtaatttgtataaaggtacgattttcggatctaagccgcaccagctgtcacatttgggatcataattgaatattatcattaactatatcttgttttgatattttggcttaaaaaaaagctatatcttattttattgtataatggtgatcattattttcgggatttgctggggtcggtgaatgttttattttttggttgatgcacgcatgggagtgctctcctgggaaagagttcgcatggaacttgttatccctctttactacttctggaatgctgtttctagaaatgagc

SEQ ID NO: 44083 - DNA, 296 bp, Glycine max
  Clone ID: LIB3093-014-Q1-K1-D12
ttcatagggggcctttcttcacaaactgtctatcgtctttggcaaaaatctgcaaccattctaccatctaacaactttttcacttattctaacaaacttgtcactaatttgtataaaggttctattttctgatctaatccgcaccatgctgtcacatttgggatcataattgaatattatcattaactatatctcgttttgatattttggcttaaaaaaaagctatatattattttattgtataatggcgataattattcccgtgcatttctggctgattttgaatgttttatttt

SEQ ID NO: 44084 - DNA, 411 bp, Glycine max
  Clone ID: LIB3093-014-Q1-K1-D3
atcgactcgtacctcgttgctggtaccgatggcgtgggaacgaacgtgatgcttgccttcgaaactggaatccacgatactattgggattgacctggttgcgatgagtgtgaatgacattgttacttcgggggcgaagcctttgtttttccttgattactttgccactgggcaccttgacgtggacgttgctgaaaaggttataaaaggcattgttgatggttgtaagcaatctgattgtgttcttttaggaggagagactgcagagatgcctggtctctataaagaaggtgagtatgatcttagtggctgtgcagttggcattgtgaagaaagattctgtaatcaatgggtcaaacattgttgctggtgatgttattattgggcttccatctagtggagttcactctaat

SEQ ID NO: 44085 - DNA, 413 bp, Glycine max
  Clone ID: LIB3093-014-Q1-K1-D4
aagacacagccattgtttacttttcattgattgagccaaagctttgtattttctgcgataattttccattgggtggaagaaagtctcaacctttattcgaaagagcaaggatctgagttgagttgagtgatcatgtgtggtggtgcgattatctccgacttcataccggcaggtcccgccagcggggcgcggcgcgtgaccgccgacatcctgtggccgagtttgaggaagcgcttctcgaagccgctgctggacgatgatttcgaggctgggttcagagaattcaaggatgattcggaaatcgaggatgttgatgacgaggacgatgaagacgaggaggagttgaagaagaagccctttgggttctctcgctccagcaacaaggctgcttctaagcctctctctcgtggatc

SEQ ID NO: 44086 - DNA, 455 bp, Glycine max
  Clone ID: LIB3093-014-Q1-K1-D5
cccacgcgtccgcccaactcaatttttctctcaaccggcccaatttagcataagcccagcatggccaccgcaacagcagcagccacctcgtccttcatggggacgcgcctcctggaggcccactccggggcggggcgggtgcaggcccggttcgggtttggcaagaagaaagccgccgccccgaagaaagtttccagggggtcgggctctagctccgataggcccctgtggtatccgggcgccaaggcgcccgagtacctggatgggagccttgtcggagactacggattcgacccatttgggctagggaagcccgccgagtacctgcagttcgagttggactcgctggaccagaaccttgcgaagaacgtggctggggacatcattgggaccaggaccgagctcgcggacgtgaagtccacgccgttccagccctacaacgaggtgttcgggct

SEQ ID NO: 44087 - DNA, 464 bp, Glycine max
  Clone ID: LIB3093-014-Q1-K1-D6
ggagggggcagggaatttcaattatatgtatctggtgtattcacggggagatgtggcacagcactagatcatggtgtcgtggctgttgggtatggaacagctaaaggtcatgattattggatcgtaaggaattcatggggttctagctggggagaggatggctacatcagattagaaagaaatcttgctaacagcagatcaggcaagtgtggaattgcaattgagccatcttatccccttaagaatggtccaaatccccctaatcctggaccatcacccccttcacctgtgaagccgccaaatgtctgtgacaactactacagctgtgctgatagtgctacttgttgctgtatttttgagttcggaaatgcttgcttcgagtggggttgctgtcctcttgagggtgcttcctgctgtgatgaccactacagttgctgccctgcagactatcccatctgcaacac

SEQ ID NO: 44088 - DNA, 406 bp, Glycine max
  Clone ID: LIB3093-014-Q1-K1-D7
gcgcttgtgttgtttttgtgtctcataaatcccacactcagtcactattgctccagcctccacctgctgaaagaaactcctaattgtcaattgttgtaaagaaaagaactgaaaacactgacactgttattctctgaattttctcaccatctacaactgaagttttaaccaatatggaaactgaaaagtctaatgtttcaaaggctgaagaatttaaactccttgccaatgaagtgttcaatgctcgaaaatactcccaagccattgatctatatacacaagcaattgagctgaacagtcaaaatgcagtttacttttctaatcgggcctttgcccatcttcggcttgaggaatatggtagtgcaatacaagatgccacaaaggctattgaaattgatcctaaata

SEQ ID NO: 44089 - DNA, 461 bp, Glycine max
  Clone ID: LIB3093-014-Q1-K1-D9
atcactggtaaagaatatgcaagaaacagtgtattattagaaagtacataaaattactgtatcatttaatcataaatcagtcacatttgataacttttataaaagcaactttcaaaaattatttttgaggataatttctgatttatggataatgtaaaactttttacaataaaagtgtatgaaaaataaactcctacaatgataaaaaaaaatgtgcaaggagtgtattattagagactctgttgcatttctcatcatatatataatatatataagtaaaaataatttcatattaattaaaaaaagcaattaacataatttacttttactaatcttaagtaaaaaaaaagttatttttaaaatgtctttcattataaagtactttatatcatgaataaaaaagtcattgaaaataggattagaattaaatgaaaaatattttaagaataataacattaaat

SEQ ID NO: 44090 - DNA, 472 bp, Glycine max
  unsure (1)..(472): unsure at all n locations
  Clone ID: LIB3093-014-Q1-K1-E1
cccacgcgtccgggaacaccgggcggtctgaaccggcagggtcttccgggggaccggaagccggacggcggcgacaagaaggagaagaagttcgagccggcggcgccgccggcccgcgtgggccgtaagcagcgtaagcagaagggcccggaggcggcggcgcggctgccgacggtgacgccgctgtcgaagtgcaagctaaagctgctgaagctggagcgcataaaggactacctcttgatggaggaggagttcgtggcgaaccangagaggctgaagccgcangaggagaaggccgaggaagacagatccaaggtcgatgatctccgaggttctcctatgagcgttggtaacctagaggaactcattgacgagagtcatgccatagtttcgtcctcggtggggcccgagtactatgttggtatcttgtcttttcgtcgataagatcagctcgagcctggatgcgctattt

SEQ ID NO: 44091 - DNA, 413 bp, Glycine max
  Clone ID: LIB3093-014-Q1-K1-E10
cgagaagccaaaaaatggaggccgacgagaagaaagcaatgatccgcgacgtagcgctacaagtcgttttcatttccctcactattttcagcttcctctggatgcacggcctccctcaaaacctctacgccaagctccgccaccgtcctccaaactctcgcgccgtccaagccaagcgccacttcgtccaaggcgcacagctcctcgcccaagccagaagatccaaaagcgcttccgccgcaacctccctcgccaaacaggccctagccgaggccgagaaggccctcgcgctcgaccccaaggacgccgcctcgcacctcctcaagtccatggcgctcgacctccagggcttccgcaccaacgcgctcgacgcgctcgacgccgcgttgtcccctctcgccgcggggtccctc

SEQ ID NO: 44092 - DNA, 468 bp, Glycine max
  unsure (1)..(468): unsure at all n locations
  Clone ID: LIB3093-014-Q1-K1-E12
ccacgcgtncgcacttcaccaccaccttatcctatctccctgttcttcattctatgtgcatgtaaactctctgcgtgcctatggaccttttctttttagcacggaacatgtgagtgccacaaaacgttagagactatacgacgctatctctcactctaataagtcctaacctcattcacctcttgggtggtgtggtctataatgtaatttatcatttgtgcaaattttttctcagatctatccaacttctcttttttgtccttttattctgtttggaaatcgtcatcatcaccatttgatttgcagggccataatttttctgctttggttttcaactcttccacaccattttccattttttcttcttcttcttctctggtttttttttttcctgtgaaaaaaaaattgaagtctttttggctaaacctccaaacagatccaactatggaaatgtaaaattttcaattt

SEQ ID NO: 44093 - DNA, 461 bp, Glycine max
  Clone ID: LIB3093-014-Q1-K1-E2
ctttagtggaacttggtttaagcaaatgcgttggagtgaccaacaagggaattgtgcagctagtatctggctgtggctatttgaagatacttgatttgacttgttgtcgcttcatatctgatgcagcaatctctactatagcagactcttgtccagaccttgtctgtctgaagctagaatcttgtgatatggtgactgagaattgtctttatcaacttggattaaattgctcgcttctcaaagagcttgatcttactgattgctctggtgttgatgacatagctctaagatatctatcaagatgttcagaacttgtaagattgaaattaggattatgcacaaacatatcagacataggattggcacacattgcttgtaactgcccaaaaatgactgaacttgatctctatcgatgtgtacgtattggagatgatgggctagcggcactaacgagtggatgc

SEQ ID NO: 44094 - DNA, 466 bp, Glycine max
  Clone ID: LIB3093-014-Q1-K1-E3
cccacttcctccaaagacatcatttttattaccaatcttccaatttcagagaaaattctttgtgggcatctcttaattaaaaaaatgtcaagcttccccaacacggtggcggaaggccgcaggtccagcaaggcaccggaaaaatccactttttctcagacttgcagcctcttgagccagttcttgaaggagaaacgtgcttctgctgattccacctttcgaattggtgggaaaatggaacccatagcgagtaccaagggtttgttaggaagcctgcaaaactctgatggggctttgaaactaagcgcttctgccatggaatttcttccccagcttgtggaaaacccctgcattaagaagtctagatcacagggacctgaaactccccaattgacaatattctatgctggaaaaatgttggtgtttgatgccttttcgccggagaaggcgacggaggtcatggaga

SEQ ID NO: 44095 - DNA, 468 bp, Glycine max
  unsure (1)..(468): unsure at all n locations
  Clone ID: LIB3093-014-Q1-K1-E4
gggcacagaaatatggattgaaaatcatccttgatcttcatgctgcacccggttctcaaaatggttttgagcacagctcttcaagagatggttcacaagaatggggaaaaacagatgaaaccattcaacaaacagttcatgttatagacttcctaactgcaaggtacgcaaaatgccaaagcctttatgctgttgagctaataaatgagcctctctcacctggtgtgacactagaggccttgaacaagtactataaggctggttatgaagcagtgcgcaagcactcttccacagcttatgtggtgttatcaaataggataggaccctcaaatcctanggaactcttccctcttgcaaatggccttatgcgatctgtgattgatgttcactactacaacctctttcaagatgtatttaatgacatgactgtccaacagaacattgatttcatctacaacaatcgctcat

SEQ ID NO: 44096 - DNA, 468 bp, Glycine max
  Clone ID: LIB3093-014-Q1-K1-E5
ttgacattgataagcactctgaatggctgctatggcattccctgggttcattacaagggtcggcaaggagatttctacattttggtcatggacatgcttgggcccagtctttgggatgtatggaattctgttggtcaacaaatgtcaccaaatatggttgcgtgcattgcaatagaggcaatatcaattcttgagaagctccacttgaaagggtttgtgcatggagatgtgaaacctgaaaactttttgcttggtcaacctggatcagctgaagataagacgctatatcttattgatcttggtctggcttctaaatggaaggatgcatcatctggtctacatgttgattatgatcaaagacctgatatattcaggggaacaataaagtatgctagtgtacatgcacatttatgtaggactggaagtcgaaaggatgaccttgagtcactggcatacacactaatattt

SEQ ID NO: 44097 - DNA, 468 bp, Glycine max
  Clone ID: LIB3093-014-Q1-K1-E6
cccacgcgtccgcacttcaccaccaccttctcctttctccttcttcctcctcctttctgctggttcattctctccttccctcttgagcttttctttttagcacggaacatgtgagtgccacaaagggtttgagactttttgaggctttctctcactctaataagtcctaacctcattcacctcttgggtggtgtggtctataatgtaatttatcatttgtgcaaattttttctcagatctatccaacttctcttttttgtccttttattctgtttggaaatcgtcatcatcaccatttgatttgcagggccataatttttctgctttggttttcaactcttccacaccattttccattttttcttcttcttcttctctggtttttttttttcctgtgaaaaaaaaattgagttctttttggctaagcctccaagcagatccaactagggaaatgtaaaattttcaatt

SEQ ID NO: 44098 - DNA, 465 bp, Glycine max
  Clone ID: LIB3093-014-Q1-K1-E7
gtctctgccgtcacaaaaaagagaaaagtctccgtgtcgtcgtgactaggagggtgagtgagtgtttgtgtaaatcggagaaattgttgggctattcaagagatcggcagcggcgtcatgggtggagatggagccacggcaaacgcggaggcgcagtacgccacggcgaacatatcggtgtggtgggacatcgagaactgccacgtccccaagggttcggatccgcacgcgatcgcgcagaacatcaattccgccctcgttcgcatgaactactgcggccccgtctacatctccgcctacggcgacaccactcgcatccccgcctctgtgcagcacgcgctctccagcaccggtatgtccctcaaccacgttcccgccggcgtgaaagacgcaagtgacaagaagattcttgttgatatgctgttctgggcagtggacaatcctgcacctgctaattttttatta

SEQ ID NO: 44099 - DNA, 324 bp, Glycine max
  Clone ID: LIB3093-014-Q1-K1-E8
cccacgcgtgcgaccacgcgtacggatggggattggacttgcgtattatgggagtcaccttgagctcgtcataacggttgttatttttcactttttcgccagagcccaatcggccactctcatggccaccgatcaaatcaccgcgtcggcgccctcggagagaggcgccggatggcaaactccgaaaaccgccgacaagaaacacctttcatagcccttactcacgtccgccagaggccacccatcagcgttggatttcgaagcttgaagatcctgcctatcgcctcaatgtcggcggagccactcgtattttcccctctttct

SEQ ID NO: 44100 - DNA, 460 bp, Glycine max
  unsure (1)..(460): unsure at all n locations
  Clone ID: LIB3093-014-Q1-K1-E9
caaaatttccctcaattatttctcaccatcatcaccccctttccttctctgaagaaaaaaaaaagttaatttcttgaacccaatggcttcagagacagaggtgccggatattatttcctctgttttcgaaaggtttcaacaaaacagagacatgtctctgtttctgcccttcctcttcggcttctctgacgccaccccaggacgaaatagcgacgacccagatcacgaaactgctcccacagaagccccacaacgtcaaagaataatcttggtgaaccccttgactcanggcatggtggtgatcgacggtggttcgagcctcgaggctctgtttcgcgaattcaccaacggaaaaggtggtcgaccaccggcttctaaggagtccattgaagccttgccgagtgtggaaattggagaaggtaacgaagattcggagtgtgtggtttgtttggaggagttt

SEQ ID NO: 44101 - DNA, 458 bp, Glycine max
  Clone ID: LIB3093-014-Q1-K1-F1
aaccaaagccccctctggctttggtccttcgctagggttcggggattcaccatttcccatttcgtcgcttcttatttacccccagaaatcccatgatcctcttctctcgtttcgacacttctcaacttctgagggaaattcaatgcagctgtttctgaggggtctcatgtgatttctgtggttctggttcggtttatcgcggatcttgaggaggcttttgctgaagtctgtgactctgtgacaatgccttctacagaaaatcagggctcttcgtcgtcgttttcctcgtttggccgttccatatttggtgccaggcaggagcaggttcattctgtggaagcaagtaatgaatctgattcctgtaatttagagcttggattgttccagaagcatgttacagatcggtttcaagacctttctgcggctagtgatgaggaatttctctcaattggatggat

SEQ ID NO: 44102 - DNA, 442 bp, Glycine max
  Clone ID: LIB3093-014-Q1-K1-F10
gtatggagcatggcagaggcggtcgagtaaggaaaaagaggagctgacctcaacccttaaatcaatgttaagcaacatatcaagcatggctgtgttaattgaacacagtttccttgaagcatacggtggagaatcaagagatggctcttcaactgcaaaattctccactggggacataatatccttgaactcagcagtcaccactactaatgacctcaatgacctttgctacgcggtcctagccattttaaggtcacgctttgcaaaaatggaaggcataaccgctggcctttgcttcaagggacaaagcaaacccagagtggtgtgcattcatgtctggaagtctctccatttttgttactcttggattctcaactctgaccacagaaattggatgatgccatatcttgaacgcttctctatcaacatgaagtatgatatt

SEQ ID NO: 44103 - DNA, 447 bp, Glycine max
  Clone ID: LIB3093-014-Q1-K1-F11
aaaacattctcatcattcacccaacaaaatggctctgcttctgatagtacgcatttcactggtaaccctctggctcggttacaccctataccagcggctacgcttcaagctccctcctggcccacggccctggccggtagtcggtaacctctacgacataaaacccgtccggttccggtgcttcgctgagtgggcgcagtcttacggccctatcatatcggtctggttcggttcgaccctaaacgtcatcgtttcaaactcggagttggccaaggaggttctgaaggagcacgatcagcagctggcggaccggcaccggagccggtcggcggcgaagttcagccgcgacgggaaggatctcatttgggccgattatgggccgcactacgtgaaagtgaagaaggtttgcacgctcgagcttttcacgccgaagcgcctcgagtccct

SEQ ID NO: 44104 - DNA, 445 bp, Glycine max
  Clone ID: LIB3093-014-Q1-K1-F12
cctgcattgagcccaaatgatgaagagattccccatggttttatttttgcaacattcatgttggcttcaatgttgggaagctcgcttgcatcgaggttgatgtcccgttcttcactccgagtagagagctatatgcagattgttttcgcagtttcttctgctgctctgatgctccccattttgaccacgttcttggtagttccctccggagtgaaaggtggaagcatctcattctctggttgcattcagcttcttggcttctgtgcttttgagagttgtgttggcatattctggccatccattatgaagatgagatctcaatacattcctgaggaggccaggagcaccatcatgaactttttccgcattcctctgaacatttttgtgtgtgttgtgctgtacaatgttgatgcattccctatcactgttatgtttggcatgtgct

SEQ ID NO: 44105 - DNA, 465 bp, Glycine max
  Clone ID: LIB3093-014-Q1-K1-F3
caaagctttgacagttgttcatcgattatggtctgaggtgcctggaaagctgaaagattacatatgtcgtcccaagttcaatggatatcaatctctgcatactgttgagatgggtgaaggcaaggttccccttgaagtacaaattcggaccaaagatatgcatttacaagcagaatttggatttgctgctcattggagatacaaggaagatgattgtcagcattcttcatttgtgcttcacatggttgagtgggctcgatgggttgtcacctggcagtgcgaagcaatgagtagagattggtcatctgttggatatgctgattcagtcaatcccccatgcaagttcccttcccatgctgatgattgcccatattcttacaagcctgattgtggtcagaatgggcctgtgtttgttatcatgattgagaatgataagatgtctgtccaagaatttagcgcaaactc

SEQ ID NO: 44106 - DNA, 466 bp, Glycine max
  Clone ID: LIB3093-014-Q1-K1-F4
cccacgcgtccggcttgaaatcctatgtcaacaaagggcactggctgcatttcatgtagatgaaaacaaatggggtgttaatgttcaaactttatctggttcccctgctaattttgcagtatacactgcagttcttaaaccacatgatcggataatgggtttggacttgcctcacggaggacatttgtctcatggattcatgacacccaaaaaaacgtgtatcagccacatcaatttattttgaatctatgccttatcgacttgatgaatcaacaggtcttattgattatgatatgctggagaaaactgctactctgtttcgtccaaaactcattgttgctggtgctagtgcttatcctcgggacattgactaccctcgtatgagaaaaattgcagatgaagtaggtgcttttcttatgatggatatggctcatataagtgggcttggtgctgcatctgtactttc

SEQ ID NO: 44107 - DNA, 434 bp, Glycine max
  unsure (1)..(434): unsure at all n locations
  Clone ID: LIB3093-014-Q1-K1-F5
gaggagggtgtgtttctggtttttggaaatttcagcccccatcgaaaaacaagaagccccaacgatagtaatcatcgaaggaatttgaaaggtcgaaacttgagcatctgggatcgcgaaattggggattttggttaaaagggtataatcttcggaactgattgatggcaaaactgtacgtgaaggcggtgccaccggcggatctgaacaggaacacggattggttcacgtaccctggcgtttggaccagatacatcctcatccttttcttttcttggatcctcgtactctctgtcttcggntgttctcctggcatcgcttggaccatcgttaatctcgcacactttgctgtaacatatgacttttttcactggaagaaaggaactccatttgcagaggaccaagggatctacaatagattgacttggtgggag

SEQ ID NO: 44108 - DNA, 425 bp, Glycine max
  Clone ID: LIB3093-014-Q1-K1-F6
gaggagggtgtgttactggcttttggaaatttcagcccccatttaaaaacaaaaagccccagggatagtaatcggggaacgaatatgaaaggtcccatcttgagcatctgggatcgcaaaattggcgattttggttaaaaaggtataatcttcggaactgattgatggcaaaactgtacgtgaaggcggtgccacctgcggatctgaacaggaacaccgattggttcacgtaccctggcgcttggaccaaatacatcctcatccttttcttttcttggatcctcgaactatatgtcttcggttgttctcctggcatcgcttggaccataattaatctcgcacactgtgttgtaacatatgacttttttcactggatgaaaggaactacatttgcagaggaccaagggatctacaatagattgact

SEQ ID NO: 44109 - DNA, 455 bp, Glycine max
  Clone ID: LIB3093-014-Q1-K1-F7
cccacgcgtacgcccacgcgtccgggacttggcctggcaatttgtagggcgttcgtaaatcgtatggaagggcatatttgggttgaaagcgaacgtattggtaaaggatgtacagtcacttttattgtaaaacttggaatcccagaccgatcaaatgaatttaagctaccttttgtacctaaagtaccaggaaatcatggatctacaaactttgctgggctcaaagttcttgtcatggatgacaatggggttagcaggacagtaacaaaaggacttcttatgcatttaggatgtgatgtaacaactgcaagctcaagtgaagaatgtctgcgtgttgtttctctggaacatgaagtggtcttcatggatgtttgtacagggttagatggttattaacttgcagttcgtatacatgagaagtttacgaagcatcaagatagaccactgatagttgc

SEQ ID NO: 44110 - DNA, 382 bp, Glycine max
  Clone ID: LIB3093-014-Q1-K1-F8
gacaaaccctaacatagcattatgctaagagtctatcaccatcgtactgggggtccgacacatgcttctccccctgaatactttgacctccaagggaacacaacttataaagacgatctatatttaaggaaaatgacagggatgcatcggtggctttgatgcacatgtcatgtggaacattcttacccatcaaatgaaaatgatcacctgtaaagcccactgaattatggtgatggaaatcaaaaaggctcaaaggtgtcaactactgtcaagcctgaaacacaaaaggcacctccacctatcgaagctccagtcatatctttagatgaactgaaggagaagacagacacatgaggtgcaaatgcattaatatgtgaaagat

SEQ ID NO: 44111 - DNA, 455 bp, Glycine max
  Clone ID: LIB3093-014-Q1-K1-F9
cccacgcgtccggtttgggattggagggattgacgctgcgtctcttcctgggctctttcgatccatccctcattcctaatcctccaatccaaccacctcagcctcacactcacatatacacatatctgaacgcgtatcgtccctcctatggcttcaaagcgcatcctcaaggagctcaaggacttgcagaaagacccaccaacttcttgcagcgctggtccagtagctgaggacatgttccattggcaagcaacaataatgggtcctgctgatagtccttatgctggaggtgtattcctagtcactattcacttccctccggattatcctttcaagcctcctaaggttgcctttaggactaaggtgtttcacccgaacatcaatagcaatggtagcatttgtcttgatatcctgaatgagcagtggagccctgcactcaccatctctaaggtact

SEQ ID NO: 44112 - DNA, 430 bp, Glycine max
  unsure (1)..(430): unsure at all n locations
  Clone ID: LIB3093-014-Q1-K1-G1
cccacgcgtncgttccaaccaagcccatggtggttgaaactttctctgagtatcctccccttggtcgttttgctgtgagggacatgcgtcaaactgtggctgtcggagtcatcaagagtgttgagaagaaagaccccaccggagccaaggtcaccaaggccgctgccaagaagaagtgattgcatttgggcaattttgctagcacatgtgatcatcatcgtggttactcctttatagtagttttatccttgcagagtcttaagtgttttgtttaagttatatttttaagtttctgccgatttcatgtagccgtaactttcaaaactaggttcttgatcggcggtggtcaattttcattgctggttgtttttgatgagtactgttttttgttttgatgggtaagaagagtctgagatatttcgaatttcac

SEQ ID NO: 44113 - DNA, 234 bp, Glycine max
  unsure (1)..(234): unsure at all n locations
  Clone ID: LIB3093-014-Q1-K1-G10
ggaacataaggcgggcaagagagannggancttctctcttaaatggacgggggcgaacaggggctcccttcggccaccaccgtcgccgccgccggctataccaacgtatctcctcctccgctcgatgatactgtcggggcttcacactgacctgatgtttcctaacaacacgctgatcggaaacgtggaaggtaacccctgagtccataggaaaaaccccatcacgagcacaat

SEQ ID NO: 44114 - DNA, 60 bp, Glycine max
  Clone ID: LIB3093-014-Q1-K1-G12
tttaaataagaaaataccaattagacggatcaataaaagctttgatttttaaaggggggg

SEQ ID NO: 44115 - DNA, 422 bp, Glycine max
  Clone ID: LIB3093-014-Q1-K1-G2
ctctaccctcccttccctccactttcctccctcttcttcttttgcttctgtttttgaggcgaagaacgatggaattgtaatgctgggaatataattggagaattgggggaggagtaagggaggaaatcatacacaatgcccgagttccccttgagctcgaggttggaaagggtgcaaaatagcttgagagagaatggttctctggtgtatctcaatgtgtatgatcttacacctgccaacaattatctttacgcctttggggttggaatctttcattcgggcatagaagtgcatggtatggaatatggctttggagcacatgaatacccaacaagtggtatatttgaggtcgaacccagaagctgtcctggcttcatcttcaaatgttcagtattgttaggcacgaatgatatgtcttattc

SEQ ID NO: 44116 - DNA, 440 bp, Glycine max
  unsure (1)..(440): unsure at all n locations
  Clone ID: LIB3093-014-Q1-K1-G3
ctctaccgtcccttccctccactttcgtacctcttattcttttgcttctgtttttgacgcgaagaatgatggatttgtaatgctgggaatataattggagaattgggggaggagtaagggaggaaatcatacacaatgcccgagttccccttgagctcgaggttggaaaggatgcaaaatcgcttgagagagaatggttctctggtgtatctcaatgtgtatgatcttacacctgccaacaattatctttacgcctttggggttggaatctttcattcgggcatacaagtgcatggtatggaatatggctttggagcacatgaatacccgacaagtggtatatttgaggtctgacccagaagctgtcctggcttcatatgcaaatgttcnagattgtgaggcaagaatgatatgtcttattcagaatgtcgttctttcat

SEQ ID NO: 44117 - DNA, 349 bp, Glycine max
  Clone ID: LIB3093-014-Q1-K1-G4
gacgagcgagaaaggaagacagaggaacgacgagcacagcactacacagctccgaaataggggggggagaaatgggggatgcgccggatctccgagatctgaataaatgacaaatgtatcattcacagaatgtgcctagggcaagttcaattggtggtgattcattaagtcatgggcagcacatagattggggtgtcagcacaatggatcctggcagtggacgaaatggccttagcaaccactcttatctcacctcaaaacaacgtttacggtggacacatgaattgcatgaacactgtggtgatgctcgtgctgaactcggtgggccacatcgagccacacccaaaag

SEQ ID NO: 44118 - DNA, 435 bp, Glycine max
  unsure (1)..(435): unsure at all n locations
  Clone ID: LIB3093-014-Q1-K1-G5
caaagattggtgtctcgaacactccttcatggtactcagctggagagctggaatacttgacggacactactaccctgttcatagttgagctctttttcattggctgggccgagggtagaagatgggctgacataatcaagccaggctgtgtcaacactgaccccatctttcccaacaacaagctcaccggaaccgatgtgggttaccctggtggcctttggtttgacccccttggatggggaaccggttctcctcagaagatcaaggacttgagaactaaggatatcaagaatggcaaactggacatgcttgctgtcatgggtgcatggttccagcacatctacactgccaccggtcctattgacaacctctttgcccaccttgcagatactggccatgctaccatntgtgctgctttcacccctaagtgaaaag

SEQ ID NO: 44119 - DNA, 449 bp, Glycine max
  Clone ID: LIB3093-014-Q1-K1-G6
gtgcctccgtctttttcatccctaaccccactccacacccttcgacgcgattcctattctgatcgttagtggggcaagggctgtgggtgaggatgaatttgcaacaagttggacagcctaaatcatctaatggatatggttgttggaaatctgaaaaagaaggggcaactaagtctgataataagatcccgtctggaaagtcaaatgccagcagcagattagcaagtgtagtgactggcaataaaggtggtagttatgggagtccttcacatgatcgattagtatatttaaaaacatgccttattgggcagcatgtggaagtccaggtgaaaaatggatctatatactctggaatatttcatgcaacaaattctggcaaagattttggaatcattttgaaaatggctcacttaacaaaggatgctgctttgcaaggaaaagaatctggt

SEQ ID NO: 44120 - DNA, 460 bp, Glycine max
  unsure (1)..(460): unsure at all n locations
  Clone ID: LIB3093-014-Q1-K1-G7
cccacgcgtccgcccacgcgtncgcttcacaactttgctttttctctcttgcaatgtcctcttcttccttctcccccgccactctcaccaccgagcaggagctttccgtcatcgttgccgcccttaccaacgtcgtcgccggctccacctccgcctccagctccttctccctccccgaattccgccttccacagacctctgatcctctcgccgccgcctgcctaatgccgccgccgccgccgccgagcatggacacttgtcgcgagtgcaacatcgcaggatgcctgggatgcaactttttcccggaggagaaaaagaagcagaagagggccaagaagaagtacagaggcgtgaggcagaggccctggggaaagtgggccgcggagattcgtgaccctcgtcgtgctgcccgggtctggctcggcacgttcggaaccgccgaggatgccgcccgggccta

SEQ ID NO: 44121 - DNA, 325 bp, Glycine max
  Clone ID: LIB3093-014-Q1-K1-G9
ctcatacttcctattactcgttcttctgatgaacccacaaataaaaacggggcttttacaggcgaagttttctccataaaccctagaataaacgaaccgaccgaccaagcttgaacctcacgtggaaaaaaaacactgatttttccatctccgagggtgtcgagttagagcatacccatgttggtctctcacggaaatagatgattttacataacataggggtaacgcttcgctcgtggggacacatcgtaggagggaaaagtgactagcacaggggatgaatcgtgggatgcaagttgagtatgcatgaaaatgggacgacgat

SEQ ID NO: 44122 - DNA, 414 bp, Glycine max
  Clone ID: LIB3093-014-Q1-K1-H1
aaaccaaaccccaaaacagcagagcaaccaacaaagtcataatagtattacccacccgccgcagactgaaaaaacaaaaccagatacaatcgcagaataataatgccagaacactcttcatagttgttcatacagtacatagttattctcacaccaaaaccacgtcaacaaattcaaaaactgtgtcaccttccttggtgtgttaatgttaatgcatcaccaccacaagccagagcttcacatcggaaaagagaacccccacctctcttccgatgacgccgccacttcaactccacaaacccatttctcaattcaggtttcaccttgctcgccccatccacctccaccaaactcaccaaacacgccgttccaccatgaacgcttctccaacaagagaataatacccatcatgac

SEQ ID NO: 44123 - DNA, 187 bp, Glycine max
  Clone ID: LIB3093-014-Q1-K1-H10
gcgaaatcgaataagaaatttggctcaaagcctgaaagacaaagcctcggggttcgatgaggggctattcacgaatcgacacgtgtcctccgttcgcgtgcacgtgctacgcgccatcacgcacgccctcgacgagccgccctaagaggaaacaattttcgacgtcctagaggtgaggtcccaccag

SEQ ID NO: 44124 - DNA, 293 bp, Glycine max
  Clone ID: LIB3093-014-Q1-K1-H12
ctcacgcgtgcgaacgaaaaaaaaaagaagagcaattttccctcaccaaagaagaagaagcgggctatggccgatcaacttaccgttgatcagatttacaaggtcaaggaagccttcggtttgttcgacaaggacggcgatggggcgttctatgtctctctctctcaagttatgcgtataagagctgatttgatttatagcgtcgaggtttttgcagatcggagatcctttttgtgataatggaataggaaaattagatgaattctgattctatatcacaatgctttttttgt

SEQ ID NO: 44125 - DNA, 448 bp, Glycine max
  unsure (1)..(448): unsure at all n locations
  Clone ID: LIB3093-014-Q1-K1-H2
cccacgcgtncggaaacttttaggcattacttggttgttcctgtggcgcacattcctactgttgaatatcttcagaggaaaactgacgactattctttgggtaaagaaactgatagctgttgtcacttcagattataagatttatgtatgcatatgttcaaatttctactgtttcaatctatttcatgattgcctattttatacagtgagtcacatgttagaggtggggaagacgttattaaatagagatgcacctcagtcccagcagtacaagtattttagttgcttacaacttacatgggcaatgcttattatttttgtttgtcgagtttcttgtgaaattagattattgacacatgatgttggtttcaattgcatttgctgcccctaattaatgattgcacttataaggttatataacttcttgtgcacattctgttttacactc

SEQ ID NO: 44126 - DNA, 334 bp, Glycine max
  Clone ID: LIB3093-014-Q1-K1-H3
gacataaccaaaccaaccaataagacatgatgatcataatcgtagctcccatcgccgtctgatggcacgccaccgacggcattcgcatcgcaggcgtaccttaccagaactatctctgtcactactctttattattctacttacatttactttcgctgactcggcttatgtttgattctgactcacagaatgtgatgttgagagaaggttccgagattgatgcgaaacaaaaaacggctgagttttgcagtgttcaaatggactaacactagtggacgatgtgcattcgatcattgactagtctgcactttttggcagataataaccgttcaat

SEQ ID NO: 44127 - DNA, 406 bp, Glycine max
  Clone ID: LIB3093-014-Q1-K1-H4
gcaaaacatgctgctggatttaaataagaaaataccaattagacggatcagtaaaagcttggattttgacagtttgaatatcagattcagggagaactgcagattggccaagagtagaagtcattcatcaagtagaagcaaggagatatcttttaataggattttctctaagcttccagtcattgattttgatattgacaaagaaagagcattgaacgtgattgacagactggatgtggtcagataatttgaaagtttgcccgatcgcctttgaaatgaatggaaaggagaaataatacatgtagacatggtagtgggtttcctttctgtgcatatgcaacgttcttgctgcaagcgttgaatgccatatttttgccgcacctttggtactttggattctcattgg

SEQ ID NO: 44128 - DNA, 384 bp, Glycine max
  Clone ID: LIB3093-014-Q1-K1-H5
acaaaaaccattcaattcaaagatagtaggctgccaggcaccgcacaccgccaccggactgtctccgatcctcacaattttgcctccggcatgtctccggccgccggagtcagcgtccccctcctgggggattccaaaggaacgccgccgccggcttccgaccccggcgcggtgttcaacgtggccaccagcatagtccgcgccggaatcatgtcgattccggcgatcatgaaagttctcggcgtaattcccgctttcgcgatgattctcgtggtggccgtgctggcggaactgtccgcggacttactgatgcgggtcacgcactccggcgaaacgacgacgtacgctggcgtcatgagggaggcgttctgatcgggtggagca

SEQ ID NO: 44129 - DNA, 393 bp, Glycine max
  Clone ID: LIB3093-014-Q1-K1-H6
ggaagaaggaaaacctagctgagattagaaaaagcatcaaatggcatatgagaatgccaaaagttctaaaatccttaacaaaccccccagcaacgtgcacgtaaataaaacccataagtcataagccccctaatcttcacctcatctcgatttgggaagcgaaaaatcataaaaccaactaagaacagagcaagttttgcttctgcgtcgtcccctgattccggcaattgtatcccgtgaggtgtgacttgtaagctgctacagtaagaaaaggaacagaagaaacccgaattgttatatttttttgccgaaggattacctggaagcaatcatggatgttgatgcacagccaacgatggatgaaacaattttggttggtgatgatttaatgac

SEQ ID NO: 44130 - DNA, 426 bp, Glycine max
  unsure (1)..(426): unsure at all n locations
  Clone ID: LIB3093-014-Q1-K1-H7
gacccacgcgnccgatcacctataaaanggccgccactgctncactctgcgccacttccaaagcgtctttctcatgagcgaagcccgccccgagaagaagctgcttcatcgcgcttcccaaaatcgcgtttcccaagctccatatcaaacccgtcgctatggctacgctcggcgctcgcatggtggccgacgcacccaccgtcactccaccggcctcgctcgacttcgaaacctccgatttcaagaaagagaagattaacctcgctggacacgacgagtacatcgtgaaaggagggagggatttgttccctctgttgcagggtgctttcaaggggattaagcagattggcgtcattggatggggttcgcagggacctgctcaagcacagaatctgcgggactcgcttgctgatgcaaagtctgata

SEQ ID NO: 44131 - DNA, 458 bp, Glycine max
  Clone ID: LIB3093-014-Q1-K1-H8
cccacgcgtccggaggaaagaaagatgttttttaacggatatgggtatcaagggacatcatcatttgagcagacatttcgatgttactctgcttcgtttattgaaaagcccgaaattgaaaatggtgataaaattataatgcctccttcagtccttgaccgtctagcatttctacgtatggattatccaatgatgtttgaactcagaaatggtgcttctgagagggtttctcattgtggggttctggagttcattgcagatgaaggaactatatatatgccatactggatgatgcagaatctgcttttgcaagagggagacatcgtaagagtgaaattcgtatcacttccaaagggaacatatgttaaattacagccacacacaaaggacttttttgatatttccaatccaaaagctatcttagagaccactttgagaaaattttcctgcttgactac

SEQ ID NO: 44132 - DNA, 420 bp, Glycine max
  Clone ID: LIB3093-014-Q1-K1-H9
gtgatctccaaaatgcagagcacagttttctctctctccccttccctctctctcccaaaacaacctctcaaacgctctgtctctgtttccacttccaaactcaacgtcattctcactccctcttcattcccatgtcaaccatgttctcttgcttattctccatctttcaaactcgctccctcacactttcaccccttccatgccagagcaacctccgtgccggagagcagcgccggcaacactctgctcaatactctggaacttggagccctgtttgggctctggatcctcttcaacatctacttcaacatctacaacaaacaggtcttaaaggtctaccatttccctttaaccgtaagcacccttcagttcgctgtggggtctctcttcgtagcattcatgtggagtttcaatctctat

SEQ ID NO: 44133 - DNA, 376 bp, Glycine max
  Clone ID: LIB3093-014-Q1-K2-A1
tgtatatatataggtgcacataccattggtactacagcttgccagttcttcagtaacagattgtacaacttcaccgcgaatggtcctgacccttccatcgacccttcatttctttcccaactacaatcactatgccctcaaaacggtgacggttcaaaacgagtagcgctagatacgggtagtcaaaccaaatttgatttatcttactatagtaatttgaggaattctcgtggaattctgcaatctgatcaagcactatggagtgatgcttccacaaagacaactgttcagaggtacttgggcttaataagagggttacttggattaacattcaacgtggaatttgggaagtctatggtgaaaatgggcaacattg

SEQ ID NO: 44134 - DNA, 435 bp, Glycine max
  unsure (1)..(435): unsure at all n locations
  Clone ID: LIB3093-014-Q1-K2-A10
cccacgcgtccgnccactttttagantttgtttgaaggcatctaaggagagaaaaatgcacgatttctgggggacgatcccctacggattgatgttagtgggtggtggactgttcgcctacataagcaaagggagcatcgcttctctcgccggaggcgccggctccggtttgcttctcatcgtcgccggctatctcagtctcaatgctttcggcaaacgaaaaaactcttacctcgctctctttctcgagaccgtttgtgcagccatactaacttgggtcatggggcagcgatatttggaaacatccaagattatgcctgctggtcttgttgctggaatcaatgctctcatgactctgttttatctctacaaattagcaactggtggcaaccatctccccaccaaggctgagtgatgatataatgatatatcata

SEQ ID NO: 44135 - DNA, 412 bp, Glycine max
  unsure (1)..(412): unsure at all n locations
  Clone ID: LIB3093-014-Q1-K2-A11
agaaattaagtgaggagttgagattgatgatgaagtctgctatgtgtgcagtggtggttgtagcactgcttcttctggcggaggtggggcccatggctgaggctgtgacatgcaccccaacagagttgagtccgtgtcttccagcaatcacttccggtgctaaaccttccaatgcttgttgcacgaagctgaagcagcaaaaaccatgcttatgtggctacctcaaaaacgctagcttgaagcagtatgttaactctcctaatgcccgaaaaaccgntgcttcttgtgggattccctttccaacttggtaattaattaaaccttcttataattaaaagtgggggatatatatatatatatagataaacagtttaatttatacacactgtgatcctacaaagcattttgacac

SEQ ID NO: 44136 - DNA, 394 bp, Glycine max
  unsure (1)..(394): unsure at all n locations
  Clone ID: LIB3093-014-Q1-K2-A12
caggacccagacagcattgttgcctgtgntaacatgcaccaaaaccaacggggtcatggtcttgggagaggtgacgaccaatgccaatgttgactacgagaagatagtgcgtgacacctgcaggaacatcggctttgtctcaaacgatgtgggactggatgccgacaactgcaaggtcctcgtcaacattgagcagcagagccctgatattgctcagggtgtacacggccacctcaccaaaaaacctgaagaaattggtgctggtgaccagggtcacatgtttggctatgccactgatgaaacccctgaattgatgccattgagccatgttcttgcaacaaaacttggtgctcgtctcaccgaggttcgcaagaacgggaccttgccttggctg

SEQ ID NO: 44137 - DNA, 335 bp, Glycine max
  Clone ID: LIB3093-014-Q1-K2-A2
actcacttcacacaaaccaaagttaattaattaccaacacaaaatggatggaggctgtgtcacagacgaaaccaccacatccagcgactctctttccgttccgccgcccagccgcgtcggcagcgttgcaagcgccgtcgtcgaccccgacggttgttgcgtttccggcgaggccgaatcccggaaactcccttcgtcgaaatacaaaggcgtggtgccgcaaccgaacggtcgctggggagctcagatttacgagaagcaccagcgcgtgtggctcggcactttcaacgaggaagacgaagccgccagagcctacgacatcgccgcgctgcgct

SEQ ID NO: 44138 - DNA, 405 bp, Glycine max
  unsure (1)..(405): unsure at all n locations
  Clone ID: LIB3093-014-Q1-K2-A3
agcacagacacagaaaaatggctctattacttcgttcttcaatttcccttgtcaaccagaaagaaaccaaactcccaaaagccaaagacgaggttcccaccaaagtgttttactttggaaaaaccaacccatctttccgtctcagagcaaagagttccatgcaacaaacacacgtcacacgaaacaacagctttaactccgaagtaacgatgataaacgagaaaagggagaaggttcacgctccatcggttgcacatagccacaatgattcaatgagagtgccagtgtttgtgatgctgccattggacactgtaactatgggagggactttgaataagccgagagcaatgaatgctagtttgatggccctgaaaagtgcangagtggaaggagtgatggtggatg

SEQ ID NO: 44139 - DNA, 289 bp, Glycine max
  Clone ID: LIB3093-014-Q1-K2-A4
gaaaggctagttaaggccagtttttttgttcacttattacctatggtgcctataggagcattgaagacttctgggatggtgaactctgagcaatatgcatctttgagacgttgaaaaatacattgctcctagagcaaatttattctgccttatacccactagttgtagtgattcaagtgagattttgagaagtgttactattgatggtaacaccgaataagtagccaagagttatttttcatttaatgattgtatcttttattcaatataataaagtgagttgagtgaa

SEQ ID NO: 44140 - DNA, 182 bp, Glycine max
  Clone ID: LIB3093-014-Q1-K2-A5
ccggaatcccgggcgacccaccgtccgggaaaccctcctacaaagctcctttcgcgttgccccccacacgcacaattggtcggtgtccactctcgggcgccgcgcatgaccgccggcgtcatgcaccacgacgtctccgcctgcatggttctgccgcgcatgcgtataacctctggacacaa

SEQ ID NO: 44141 - DNA, 440 bp, Glycine max
  Clone ID: LIB3093-014-Q1-K2-A6
ataaggttgacaggctttatgggtggtaaacatgtcgcaatgctccaattgttaaagcaatgaagcagcagactaaggatgtccaaaatgagtttaatatgaggctcactcagactattactgaattcaaagaacaagggctgaataccgagttgtattataaaaacaaagaaatgggagaaacattcagcattgtgcctacaagtgcaataagtggtgaaggaattcccgatttgttattactattgattcaatggacccaaaaaacaatggttgagaaacttacatacagtgaagaagtgcagtgcactgttttagaggtgaaggtagttgaaagccatggaactactattgatgttgttttaagtaatggtgttcttcatgaaggagaacaaataagtgtctgcggaatgcaaggtccaatttgtaccacaattcga

SEQ ID NO: 44142 - DNA, 409 bp, Glycine max
  unsure (1)..(409): unsure at all n locations
  Clone ID: LIB3093-014-Q1-K2-A7
cccacgcgtccgcttttctgatcatctcttatgggtttgaatgatgcatgtaaaatgttgtaggaaagagagggacctgtgagtgtcacaaacatgggagaggagaatgttaaacaaccgttgttggagaggaagtactacaaggactgcccaggttgtaaagtggatcaagccaaagagttgagtgagggaaagggtgtacctgttaaaaatctttttatcatgtggatggtggtgctgtgtgctgcactgcctatatcatctctctttccattcctctatttcatggtaagggatttcaatattgcaaaaacagaagctgatattagttcttatgctggntatgttggctcttcattcatgcttggcagatgtttgacatctgtattatggggaattgtaaccgatc

SEQ ID NO: 44143 - DNA, 339 bp, Glycine max
  Clone ID: LIB3093-014-Q1-K2-A8
cccagcgtccgaacaacacaggcgcttagcaaacgcaaacgcaaacgcaaacgcaaacgcagagcgtgatccattgacgaagatggtgcagcgtctcacctaccgaagcggacagctatgccaccaagtccaaccaaacagggtcgtcaaaacccctggtgggaagctcgttatcagactaccaagaagagggccagcggacccaatgccccgtcactggcaagaggattaagggattcacacttgaggcctcagagtacaagaggtcaaggttacccagaaaccgtatgactgtcaaccgtgcatatggtggagttttatctggaagtgccgtcaggg

SEQ ID NO: 44144 - DNA, 384 bp, Glycine max
  Clone ID: LIB3093-014-Q1-K2-B1
ttccaactccatttacgatttcactgtcaaggacatcagtggaaatgatgtgagtctgaatgattacagcgggaaggttctactgattgtgaatgtcgcctctcaatgtggtttgacacagacaaattacaaagaattgaatgtattgtacgagaagtacaagaatcaaggatttgaaatcttggcatttccgtgcaaccagtttgctggacaggaaccaggaaacaatgaagaaattcaggaagtagtttgcacaaggttcaaggctgaatttcctatctttgataaggttgaagtcaatgggaagaatgcagtgccactttacaagtttttaaaggagaagaaagggggaatatttggcgatggtatcaagtgggacttcac

SEQ ID NO: 44145 - DNA, 179 bp, Glycine max
  unsure (1)..(179): unsure at all n locations
  Clone ID: LIB3093-014-Q1-K2-B10
atccaatcctcncctccataattttccaacaaaatctcaaacataataaataaaaattacatttttattcacaaaaatatctggattcatcttgttctcattttgcccccttttttcttctgctctcccgaatcataaaccctaatcattgtttgggatttcacaggaaagaaatttaa

SEQ ID NO: 44146 - DNA, 397 bp, Glycine max
  Clone ID: LIB3093-014-Q1-K2-B11
agaagattgaacttaaacttattcatcttgaaagaaagaaagaaagaagatgggaattgcagtgggaggtgttgatttgctgagtgaaaaagcggcgatgatgagagagtgtctgcagaagagtgaaaccatcacagacaacgtcgtcaccattctcggttccttcgaccaccgtctctccgccctcgaaaccgccatgcgtccaactcagattagaactcactctattaggaaggctcatgagaatattgataggactttgaaggctgcggaggttatattggctcacttcgatcaatatcgtcaggcagaagcaaaaatacttaaagggccacatgaagacttggaaaactatcttgaagcaattggtaagttgagaaacaacattcaatttttt

SEQ ID NO: 44147 - DNA, 422 bp, Glycine max
  Clone ID: LIB3093-014-Q1-K2-B12
gaagaaaacaaaatggattatacagtttctgcgttgaggtctttgatgggttctcactctccggcgctgggtgccttactggtgccctctgaagattatcacctgagcgaatatgtgtctgcacgagacaagcgccgcgaattcgtttccggcttcactggaagtgccggcttggcacttataacaaagaaagaagcactgctgtggacggatggacggtattttttgcaggctgagaaagaacttagtgctgggtggaagctaatgcgaattggtgaagatcctgctgtagatatctggatggccgataatttgccaaaagaagcatccgttggggttgatccctggtgcatttcaattgatactgctcaaagatgggaacgtgcttttgccgaaaaacaacaaaaacttgttccaacctt

SEQ ID NO: 44148 - DNA, 377 bp, Glycine max
  unsure (1)..(377): unsure at all n locations
  Clone ID: LIB3093-014-Q1-K2-B2
ccttactcactagcctaatttgctcctttagcctcactcctgctctcttctacgtcaaatcctaagaaacccatttgaaattttaaatctcgttctggctaattccatgttcattgtttactatacctcaccactccaagggtctcataaatttcttctgcttccaactctgctgcagaaaaagaaactgttggttctagatacaagtgggtttccagagtagaagtgaggctattgggcatgagataaacagcaagcaccatcatctacgacccttttgactatattataagcaacacaaaaatggagagtgacttgagctgggagcagaacacgctcataaatgagctaattcangggatggaggtagcaaggaa

SEQ ID NO: 44149 - DNA, 290 bp, Glycine max
  unsure (1)..(290): unsure at all n locations
  Clone ID: LIB3093-014-Q1-K2-B3
atggcaactatgactggtgtgagcctttcatgccccacggttttcttcaacgcatcagcctcaccgcaaaacgcgcatgctgtaaagttctcacttccacccagccaagcagtgcgaccgggtagtatcaagttgggtcgcgtgatgaggatccgacccgttcgcgctgcgcctgagcgcatatcggagaaggtggaggagagcataaagaacgcgcangaggcgtgcgccggcgatccgactagcggcgagtgcgtggcggcgtgggacgaggtggaggagctgagcgc

SEQ ID NO: 44150 - DNA, 425 bp, Glycine max
  Clone ID: LIB3093-014-Q1-K2-B4
ggaatcttggaagcccacgatggatcaagaggactatctgacattgaggaggggacagatagtaaaagctgtgccgctgagatgggaaatgtatctgaagtcccaaaatcctcagtatcagctgagaaggtggaaggaatcttggaatcccaggatggatcaagaggactagctgacattgaggatgggacagatagtaaaagctgtgctgctgagatggaaaatgtatctgaagttccaaaacccctagtatcagttgagaaggtggaaggattatctaaggaaggtatagttggcagccaagcaatagtgcaggtatcagaagaatctgaaactgttacgggagatggaattgatgttactccagattgtttggctgtgccagaaactgtgtcaaatgatggggcttcatctttgtgctcttc

SEQ ID NO: 44151 - DNA, 416 bp, Glycine max
  Clone ID: LIB3093-014-Q1-K2-B5
aacactctctctcctccttcacctatattggtttcaaccaaaccaagtgtcccctcctttctcttgttaacagggggcagagttagtgagtaatggcaggaggacaactaggagtgcttaatgcactcgatgtggcaaaaacacaatggtaccacttcactgctattgtgatagctggaatgggattcttcactgatgcctatgatcttttctgcatttcccttgtgaccaagttgttggggaggttatattacacagacataacgaacccgaagcctggtgttcttcctcctaatgtgcaagctgctgtgactggtgttgctctatgtggcactttaaccggccaacttttctttggatggcttggtgacaagttgggaaagaaaagggtttatggcttaactcttatgcttatg

SEQ ID NO: 44152 - DNA, 428 bp, Glycine max
  Clone ID: LIB3093-014-Q1-K2-B6
ataatatcaggatagcagagacttaacatcaaataatccaagtgtaagtttggctagcacgtcacgaggcatttgttctcctgacatttctgtgactcttccaaatacttcaccaaagtcctttcggtctgacaatacaatttctgaaaggtcacatgcgccaccagacccaacaaacatgcaagtgaaaggatctgcttcagatgtatttcgtgtcagtgtttccagtgccccaagtacatctagtcatggatctgcacctgatgactgtgatgctttgggggatgtatacatatggggagaggttacctgtgaaaatgttaaagttggtgctgataaaaatgtaaattatgtcagccccagggcagatgtacttctccccagaccactggaatccagcgtagttttagatgtacatcatatagcat

SEQ ID NO: 44153 - DNA, 265 bp, Glycine max
  unsure (1)..(265): unsure at all n locations
  Clone ID: LIB3093-014-Q1-K2-B7
ctttggaatgcagcattnttgtttcttttggctgaaggttacatactcggggccatggctatgccaggggggctatacattgnatctattttagttggcatgtgctatggagtgaggcttgccattacagtcccaacagcctcagagttatttggactcaaatattatggtctcatatacaacattctcatccttaaccttcccttgggttctttccttttctatggtctgcttgctggcatactatatgatatggaggcaacta

SEQ ID NO: 44154 - DNA, 373 bp, Glycine max
  Clone ID: LIB3093-014-Q1-K2-B8
cccacgcgtccgcccactctttctctttcttgaagaatgagtcatctgctgaaacatatactatggacatggatgctttacataaaaataatcctcccggtgatgttccatttcaaacaaataagtgctccaaggatagtcaaaactcgcttacttctcaaggtgcaacaatttctgctagagagaaaaccatagcaaaatcagtgaatacaacaatactagatataaaccaagagcctcaagagcttcttactgatgaaagtcctgtggttgacagggagactagcacatcaagaacccacagccttgatttggatcactttttttctcatgcagatgagcatgctatgtcaagttctggcaatagtttttt

SEQ ID NO: 44155 - DNA, 424 bp, Glycine max
  Clone ID: LIB3093-014-Q1-K2-B9
cccacgcgtccgcccacgcgtccgccctacgcgtccggtcctcttttctcggctccctttttctctctggcgctctctctcggtctcgctcttcttctcatcaagcacagagttacagactcaccgatcttccgattctctttcgtcttggtttatgagctcgaaggagagacccactcttggtggcacgcggattaagacccgcaaacgaaatattgctgcgccgctggaccctgcagcattctcggatgcagtggtccagatttatttggataatgctggtgatctggaacttattgctaagagtattgaatcttcagaccttaacttttcaagatacggtgacaccttttttgaggttgctttcactgggggtcgtacacaacctggaactaccaaacctgatgagggggaccgccaccca

SEQ ID NO: 44156 - DNA, 421 bp, Glycine max
  Clone ID: LIB3093-014-Q1-K2-C1
tttcattcacccttggtgtgaaacagatgatttgctgctgtaacaaaatggatgctactacacccaagtattccaaggccaggtatgatgaaattgtgaaggaagtctcttcctacttgaagaaagtaggatacaaccctgacaagattccttttgttcctatctctggttttgagggagacaacatgattgagaggtccacaaaccttgactggtacaagggtccaactctgcttgatgcacttgaccagattagtgagcccaagaggccctctgacaagcccctcaggcttccccttcaggatgtgtacaagattggaggtattggaactgtgccagtgggacgtgttgagaccggtgtctttgagcctggaatggtggtgacttttgcaccaactggactgacaactgaagtcaagtc

SEQ ID NO: 44157 - DNA, 432 bp, Glycine max
  Clone ID: LIB3093-014-Q1-K2-C11
ctccaaagtttcggtgctttcggatataacactacctattcagccgccatgcacactctcctccgatccactctcaggaccaagactgcttcatctttagcatatgctgtggtttccagaagtgctcacgaaaatctccttcaggctcccttattgtctagatcaaatagcactgaggcttcattggcaaaggataattcctctaatgatgtaaaaaatggtcaagggtacaaaggtcatagtatgcttgctcctttcacggctgggtggcagtcttctgatttgcaccctctgatcatagaaaagtcagagggaagctatgtatatgacattaatgggaagaaatatcttgatgcacttgctggtctatgggccacttctttagggggaagtgagccacgcctttgtgatgctgccgttgcacaactaaag

SEQ ID NO: 44158 - DNA, 422 bp, Glycine max
  unsure (1)..(422): unsure at all n locations
  Clone ID: LIB3093-014-Q1-K2-C12
gcccacgcgtcgggtactttcttgctaaacagaaggcgaagggcagacacactttttgttttttgggaagcgagaaaaaaaaatgttggggatcttcacagttccgggtgtctgccccggagagctggtggctgccggcacanaacgccgtcgccgaagacgacggcggggaagctgctgaaccggttcgtggagaacaaggcgtcggcggtgtcgctgaggtgggagaacacgtgcagttggcttacacgcaccacaacgagtcaccgtggcatcccagatcatttgctggtaaggatgaaatattctgcttggttgagggggctctaaacaattgggcagcctgagacaaccgtatggactggcccaagtcagccaatgaagtggttttggggattgaagcttacaaagctttacgggat

SEQ ID NO: 44159 - DNA, 390 bp, Glycine max
  Clone ID: LIB3093-014-Q1-K2-C2
gtccctttttacagagtcatgactatggctggagctttgagtctctcccaattcccagttcgtgggtctgtttctttgcccaaaagaagaatacccagaagaagcttttgcattaggggcatgtcagaaatctcttccactttttctgtgagcacccaacaagaagaaccaacttctaatgcttcgtcagtgacaattgcacctccccccaacttcaagccccctgagcctaaacgctttgcaatcagacctgacaagaccagtgaagtatttggagctttgcttcctttgctctttcgctttgctaccggagttttcgtttctgggtattctttttcaattgtttctaacgatgaaattcctccagatgaatatgctttggaacttaat

SEQ ID NO: 44160 - DNA, 424 bp, Glycine max
  unsure (1)..(424): unsure at all n locations
  Clone ID: LIB3093-014-Q1-K2-C3
agaaaacagcatcgaacccgtcgtagcagaaaaacttgtcaccatggtttcttccgacaaggatccacgagaggatgtccttcaagcctggtacatggatgatagtgatgaagatcaaagactcccccaccacaaagaacccaaggagtttgtctcgttggaccaacttgctgaacttggagtccttagctggaaactagatgctgataaccatgaaaatgatccagagctgaagaagattcgtgaagagcgtggttacacctacatggatgtttgtgaagtctgcccanaaaagttgccaaattatgaacagaaaatcaaaagcttctttgaagagcatcttcacactgatgaggagatccgcttttgtgctgctggaagtggctattttgatgttagggatcgcaatgaagcttggattcgt

SEQ ID NO: 44161 - DNA, 228 bp, Glycine max
  Clone ID: LIB3093-014-Q1-K2-C4
acataactatcttgtgtgacaaacggatgcatactggatacaggtgtggaggataacatacactaatacaacggaggaacggtttcttaccattgcgttgaggagggctgaggcttattgaaatatttaaattggaaagcaagattgaatcaacggtacacatttattaatagaacgaacctatacgcttcctactgagaatgtttggtgcgtgtcactcaatctaga

SEQ ID NO: 44162 - DNA, 343 bp, Glycine max
  Clone ID: LIB3093-014-Q1-K2-C5
cccacgcgtccgtgctactctttactttgtcctatttacagatgccgacaacgtcatcccaaaggctcttgattccggcaagagtgttgaaaacgttgagggaaatggtggcccaggaaccatcaagaagatcactttccttgaggatggagaaaccaagtttgtgctgcacaaaatagaaagcattgatgaggcgaacttgggatacagctacagcgtggttgggggtgctgcattgccagacacggcggagaagatcacattcgactccaaattggttgctggtcccaatggaaggtctgctgggaagctcacttgtcaatacgaaacaaaaggagatgct

SEQ ID NO: 44163 - DNA, 390 bp, Glycine max
  unsure (1)..(390): unsure at all n locations
  Clone ID: LIB3093-014-Q1-K2-C7
cccacgcgtccgataagctaccttgctagtttccatcatcgtatctgttagtatttccaaatatacacattttctattttattcatagaaatctttaacttgagaagcattacatggcgctgacgatgatggcggcgatcggcatcggcatgaagcaagagaagaagatgccggcgacgccggcgccggagaacgagctgaagaagcggaatgaggagctcgagaaggagctcanagagagcaaggagagggaggagcagatgaagcgcgaactccanancgcgtgggagaagctgcgcgtggccgangaggctgaagagaggctctgctcccagctcggagagctagaagcagaagccgtttaccacgcgcgggactaccacgcgcgca

SEQ ID NO: 44164 - DNA, 330 bp, Glycine max
  Clone ID: LIB3093-014-Q1-K2-C9
gacccagcgtccttgcaatcaaatattgtttctctttctcaaaccctaccctactggcaaagcaaatcttggtcggaccctcaccacaaaaccatcacccttgagtggaaagcttgacaccatcgacaacgtcaaggccaagatccatgacaaggaatgaattcccccggatcaacaacgtctcatctttgccggaaagcaactcgaggacggccgtaccctctccgactacaacatccagaaggagtcaaccctttaccttgtccttcgtcttcgaggtggccatgcaaatcttcgtcaagactctcactggcaaaaccataaccctat

SEQ ID NO: 44165 - DNA, 398 bp, Glycine max
  unsure (1)..(398): unsure at all n locations
  Clone ID: LIB3093-014-Q1-K2-D1
cccacgcgtccggtaatttctttctgtaacctcatgccatgctcactcagttactcatttttcttgcaccgcctattgtgcgtgaaatgaaatatatcatttgcggaatctctccacggagcaagttttgggcaggtttgagttttagtgtttgaagcattcaaatgatcttgagttggagttggagttggttatcttagtggcttggatgttagatgcctgaagcctgcgttggaggattgcaattgcatactaaagagggttcattgttcatagcttaacaccaaaaagtgtgggcacatgctacagctacatacccgaaaaaaattacatattctttgtatatgtgntatatttgggtttgataattccattggtaaatgtgatttttctaactc

SEQ ID NO: 44166 - DNA, 430 bp, Glycine max
  unsure (1)..(430): unsure at all n locations
  Clone ID: LIB3093-014-Q1-K2-D11
ccatggaaggccaaaattccgccatataaacatgccattgcagcctatagtgttgccatagcgggcctcccttcacaaactgtctatggtggttggcaaaaatctgcaatggcgctgccatttaacaacattgacacttagtagggtaaacttgttagtaatttgtataaaggtacgattttcggatctaagccgcaccagctgtcacatttgggatcataattgaatattatcattaactatatcttgttttgatattttggcttaaaaaaaagctatatcttattttattgtataatggtgttaattattttcgtgatttgctggtgttggtgaatgttttattttttggttgatgcaagcatgggagtgctctcctgggaaagagttcgcatggaacttgntatccctctttactacttctggaatg

SEQ ID NO: 44167 - DNA, 373 bp, Glycine max
  Clone ID: LIB3093-014-Q1-K2-D12
gtgagagtctgagatcgcttttctctctttcgatcttccttttccgcatttctcaacaatcgtttccaatcccacgctaatggcaaatagtgagacttgttgttcaactcagcttattgatggagatggtacattcaatgtttttggggttgaaaatttcatgaaggaggtgaagttggctgaatgtgggctttcatatgccgtagtttctataatgggtcctcaaagtagtggcaagagcacactgttaaatcatttgtttggtaccaacttcagagagatggatgctttttaaggaaagtctcaaacaaccaaaaggaatctggatggctagatgggctggcatagaaccttgtacacttgggatggattt

SEQ ID NO: 44168 - DNA, 298 bp, Glycine max
  unsure (1)..(298): unsure at all n locations
  Clone ID: LIB3093-014-Q1-K2-D2
aaaaaaagctccaccaatggcgggttacagagccgacgacgactacgactacctcttcaaggtggtcctgatcggcgattccggcgtgggcaagtccaacctcctctctcgcttcaccaagaacgagttcaacttggagtccaagtccaccattggcgtcgagttcgccacccgcaccttgaacgtcgattccaaagtcatcaaggcccagatctgggacaccgcangccaagaaaggtatcgtgccatcaccagtgcatactatcgtggggcagtcggtgcacttctcgtgtatgat

SEQ ID NO: 44169 - DNA, 358 bp, Glycine max
  Clone ID: LIB3093-014-Q1-K2-D3
atcgactcgtacctcgttgctggtaccgatggcgtgggaacgaaggtgatgcttgccttcgaaactggaatccacgatactattgggattgacctggttgcgatgagtgtgaatgacattgttacttcgggggcgaagcctttgtttttccttgattactttgccactgggcaccttgacgtggacgttgctgaaaaggttataaaaggcattgttgatggttgtaagcaatctgattgtgttcttttaggaggagagactgcagagatgcctggtctctataaagaaggtgagtatgatcttagtggctgtgcaagtggcattgtgaagaaagattctgtaatcaatgggtcaaaca

SEQ ID NO: 44170 - DNA, 328 bp, Glycine max
  Clone ID: LIB3093-014-Q1-K2-D4
aagacacagccattgtttacttttcattgattgagccaaagctttgtattttctgcgataattttccattgggtggaagaaagtctcaacctttattcgaaagagcaaggatctgagttgagttgagtgatcatgtgtggtggtgcgattatctccgacttcataccggcaggtcccgccagcggggcgcggcgcgtgaccgccgacatcctgtggccgagtttgaagaagcgcttctcgaagccgctgctggacgatgatttcgaggctgggttcagagaattcaaagatgattcggaaatcgaggatgttgatgacgaggacgatg

SEQ ID NO: 44171 - DNA, 305 bp, Glycine max
  Clone ID: LIB3093-014-Q1-K2-D5
cccacgcgtccgcccaactcaatttttctctcatccggcccaatttagcataagccgagcatggccaccgcaacagcagcagccacctcgtccttcatggggacgcgcctcctggaggcccactccggggcggggcgggtgcaggcccggttcgggtttggcaagaagaaagccgccgccccgaagaaagtttccagggggtcgggctctagctccgataggcccctgtggtatccgggcgccaaggcgcccgagtacctggatgggagccttgtcggagactacggattcgacccatttgggct

SEQ ID NO: 44172 - DNA, 385 bp, Glycine max
  Clone ID: LIB3093-014-Q1-K2-D6
ggagggggcagggaatttcaattatatgtatctggtgtattcacggggagatgtggcacagcactagatcatggtgtcgtggctgttgggtatggaacagctaaaggtcatgattattggatcgtaaggaattcatggggttctagctggggagaggatggctacatcagattagaaagaaatcttgctaacagcagatcaggcaagtgtggaattgcaattgagccatcttatccccttaagaatggtccaaatccccctaatcctggaccatcacccccttcacctgtgaagccgccaaatgtctgtgacaactactacaactgtgctgatagtgctacttgttgctgtatttttgagttcggaaatgcttgcttcgagtggg

SEQ ID NO: 44173 - DNA, 410 bp, Glycine max
  Clone ID: LIB3093-014-Q1-K2-D7
gcgcttgtgttgtttttgtgtctcattaatcccacactcagtcactattgctccagcctccacctgctgaaagaaactcctaattgtcaattgttgtaaagaaaagaactgaaaacactgacactgttattctctgaattttctcaccatctacaactgaagttttaaccaatatggaaactgaaaagtctaatgtttcaaaggctgaagaatttaaactccttgccaatgaagtgttcaatgctcgaaaatactcccaagccattgatctatatacacaagcaattgagctgaacagtcaaaatgcagtttacttttctaatcgtgcctttgcccatcttcggcttgaggaatatggtagtgcaatacaagatgccacaaaagctattgaaattgatcctaaatattcg

SEQ ID NO: 44174 - DNA, 429 bp, Glycine max
  Clone ID: LIB3093-014-Q1-K2-D9
atcactggtaaagaatatgcaagaaacagtgtattattagaaagtacataaaattactgtatcatttaatcataaatcagtcacatttgataacttttataaaagcaactttcaaaaattatttttgaggataatttctgatttatggataatgtaaaactttttacaataaaagtgtatgaaaaataaactcctacaatgataaaaaaaaatgtgcaaggagtgtattattagagactctgttgcatttctcatcatatatataatatatataagtaaaaataatttcatattaattaaaaaaagcaattaacataatttacttttactaatcttaagtaaaaaaaaagttatttttaaaatgtctttcattataaagtactttatatcatgaataaaaaagtcattgaaaataggattagaattaaa

SEQ ID NO: 44175 - DNA, 260 bp, Glycine max
  unsure (1)..(260): unsure at all n locations
  Clone ID: LIB3093-014-Q1-K2-E1
cccacgcgtccgggaacaccgggcggtctgaaccggcagggtcttccgggggaccggaagccggacggcggcgacaagaaggagaagaagttcgagccggcggcgccgccggcccgcgtgggccgtaagcagcgtaagcaganaggcccggaggcggcggcgcggctgccgacggtgacgccgctgtcgaagtgcaagctaaggctgctgaagctggagcgcataaaagactacctcttgatggaggaggagttcgtggc

SEQ ID NO: 44176 - DNA, 306 bp, Glycine max
  unsure (1)..(306): unsure at all n locations
  Clone ID: LIB3093-014-Q1-K2-E10
cgagaagccaaaaaatggtggccgttttgaagaaagcaatgatccgcgacgtancgctacaagtcgtttgcatttccctcactattttcagcttcctctggatgcacggcctccctcaaaacctctacgccaagctccgccaccgtcctccaaactctcgcgccgtccaagccaagcgccacttcgtccaaggcgcacagctcctcgcccaagccagaagatccaaaagcgctttcgccgcaacctccctcgccaaacaggccctagccgaggccgagaaggccctcgcgctcgaccccaaagacg

SEQ ID NO: 44177 - DNA, 317 bp, Glycine max
  Clone ID: LIB3093-014-Q1-K2-E11
cccacgcgtccgcccacgcgtccggccttttcttttcttcttcctctgtcttgtcttcaacctcgttttcttttcttcgtcttctatcaccgattccgattcgctactctttcttcttcttccttttttattgatcctctctgcgatcacgaattttcccattttctccgtttcctcggcgaccaaacggaggagaagaacgcagttctgaaaacgattggaaaatgctgggaactgcactgcaattcagcggcgttcgcggcgaggatcggttttacattccggtgaaggcgaggaagaaaccagatcagcgggaa

SEQ ID NO: 44178 - DNA, 355 bp, Glycine max
  unsure (1)..(355): unsure at all n locations
  Clone ID: LIB3093-014-Q1-K2-E12
cccacgcgtccgcgctggtttccaattattttcaggagaattgctgaggtgaaggctaatgaaaggaggaaagctctggaagagatcttgtatgcattggtagtgcagaagttcatggatgctaatatttctttgataccctctgtaaccccagatctttctggtaaggttgatttgtggccaaatgaagatggtaaacttgagctgcttcactcacacgaagcatatgagatgattcaaaaccacctggctctcattctcggtaacagagctggagatttaacatcaatagctgaaatcagcanattcanggtagggcangtctacgcagcatcagtgatgtatgggtattttc

SEQ ID NO: 44179 - DNA, 418 bp, Glycine max
  unsure (1)..(418): unsure at all n locations
  Clone ID: LIB3093-014-Q1-K2-E2
ctttagtggaacttggtttaagcaaatgcgttggagtgaccaacaagggaattgtgcagctagtatctggctgtggctatttgaagatacttgatttgacttgttgtcgcttcatatctgatgcagcaatctctactatagcagactcttgtccagaccttgtctgtctgaagctagaatcttgtgatatggtgactgagaattgtctttatcaacttggattaaattgctcgcttctcaaagagcttgatcttactgattgctctggtgttgatgacatanctctaagatatctatcaagatgttcagaacttgtaagattgaaattaggattatgcacaaacatatcagacataggattggcacacattgcttgtaactgcccaaaaatgactgaactngatctctatcgatgtgt

SEQ ID NO: 44180 - DNA, 435 bp, Glycine max
  Clone ID: LIB3093-014-Q1-K2-E3
cccacttcctccaaagacatcatttttattaccaatcttccaatttcagagaaaattctttgtgggcatctcttaattaaaaaaatgtcaagcttccccaacacggtggcggaaggccgcaggtccagcaaggcaccggaaaaatccactttttctcagacttgcagcctcttgagccagttcttgaaggagaaacgtgcttctgctgattccacctttcgaattggtgggaaaatggaacccatagcgagtaccaagggtttgttaggaagcctgcaaaactctgatggggctttgaaactaagcgcttctgccatggaatttcttccccagcttgtggaaaacccctgcattaaaaagtctagatcacagggaccttgaactccccaattgacaatattctatgcttggaaaatgttgtgtttgatgcctttt

SEQ ID NO: 44181 - DNA, 428 bp, Glycine max
  unsure (1)..(428): unsure at all n locations
  Clone ID: LIB3093-014-Q1-K2-E4
gggcacagaaatatggattgaaaatcatccttgatcttcatgctgcacccggttctcaaaatggttttgagcacagctcttcaagagatggttcacaagaatggggaaaaacagatgaaaccattcaacaaacagttcatgttatagacttcctaactgcaaggtacgcaaaatgccaaagcctttatgctgttgagctaataaatgagcctctctcacctggtgtgacactagaggccttgaacaagtactataaggctggttatgaagcagtgcgcaagcactcttccacagcttatgtggtgttatcaaataggataggacccttcaatcnctaggaactcttcccttttgcaaatggccttatgcgatctgtgattgatgttcactaatacaacctcttttcaagatgtatttaatgacatgac

SEQ ID NO: 44182 - DNA, 444 bp, Glycine max
  unsure (1)..(444): unsure at all n locations
  Clone ID: LIB3093-014-Q1-K2-E5
ttgacattgataagcactctgaatggttgttatttcattccctgggttcattacaagggtcggcaaggagatttctgcattttggtcatggacatgcttgggcccagtctttgggatgtatggaattctgttggtcaacaaatgtcaccaaatatggttgcgtgcattgcagtagaggcaatatcaattcttgagaagctccacttgaaagggtttgtgcatggagatgtgaaacctgaaaactttttgcttggtcaacctggatcagctgaagataagaaggtatatcttattgatcttggtctggcttctaaatggaaggatgcatcatctgggctacatgttgattatgatcaaaaacctgatttatttaagggaacaataaagtatgctagtggacatgcacatttangtaggactggaagtcgaagggatgaccttgat

SEQ ID NO: 44183 - DNA, 418 bp, Glycine max
  Clone ID: LIB3093-014-Q1-K2-E6
cccacgcgtccgcacttcaccaccactttctcctttctccttcttcctcctcctttctgcttcttcattctctcctgccctcttgagcttttctttttagcacggaacatgtgagtgccacaaagggtttgagactttttgaggctttctctcactctaataagtcctaacctcattcacctcttgggtggtgtggtctataatgtaatttatcatttgtgcaaattttttctcagatctatccaacttctcttttttgtccttttattctgtttggaaatcgtcatcatcaccatttgatttgcagggccataaattttctgctttgtttttaactcttccacaccatttccattttttcttcttcttcttctctgggttttttttttcctgtgaaaaaaaaattgagttctttttg

SEQ ID NO: 44184 - DNA, 326 bp, Glycine max
  Clone ID: LIB3093-014-Q1-K2-E8
cccacgcgtccgcccacgtttccggtttgggattggacttgcgtcttatggtattcgccttcacctcgtggtttcggtttttttttttcacttttccgccgttgcccagtcggccactctcatggccaccgatcaaatcaccgcgtcggcgccctcggagagaggcgccggaggcaaactccgaaaaccgccgccgagaaagccgcttcctagcccttactcgcgtccgccggaggccacccgccgccgttggatttcgaagctcgtggatcctgcctatcgcctcatcgccggcggagccactcgtattctcccctctttcttct

SEQ ID NO: 44185 - DNA, 412 bp, Glycine max
  Clone ID: LIB3093-014-Q1-K2-E9
caaaatttccctcaattatttctcactatcatcaccccctttccttctctcaagaaaaaaaaaagttaatttcttgaacccaatggcttcagagacagaggtgccggatattatttcctctgttttcgaaaggtttcaacaaaacagagacatgtctctgtttctgcccttcctcttcggcttctctgacgccaccccaggacgaaatagcgacgacccagatcacgaaactgctcccacagaagccccacaacgtcaaagaataatcttggtgaaccccttgactcaaggcatggtggtgatcgacggtggttcgagcctcgaggctctgtttcgcgaattcaccaacggaaaaggtggtcgaccaccggcttctaaggagtccattgaggccttgccgagtgtggaaatt

SEQ ID NO: 44186 - DNA, 307 bp, Glycine max
  unsure (1)..(307): unsure at all n locations
  Clone ID: LIB3093-014-Q1-K2-F1
aaccaaagccccctctggctttggtccttcgctagggttcggggattcaccatttcccatttcgtcgcttcttatttacccccagaaatcccatgatcctcttctctcgtttcgacacttctcaacttctgagggaaattcaatgcagctgtttctgaggggtctcatgtgatttctgtggttctggttcggtttatcgcggatcttgaggaggcttttgctgaggtctgtgactctgtgacaatgccttctacagaaaatcanggctcttcgtcgtcgntttcctcgtttggccgttccatatttg

SEQ ID NO: 44187 - DNA, 281 bp, Glycine max
  Clone ID: LIB3093-014-Q1-K2-F10
gtatggacaggcagatttggcgtttatggaaaaagaggagctgacggggaaccgttaaatggatggtgagcaacatatcaagcatggctgtgttaattgaacacagtttccttgaagcatacggtggagaatcaagagatggctcttcaactgcaaaattctccactggggacataatatccttgaactcagcagtcaccactactaatgacctcaatgacctttgctacgcggtcctagccattttaaggtcacgctttgcaaaaatggaaggcataacc

SEQ ID NO: 44188 - DNA, 310 bp, Glycine max
  Clone ID: LIB3093-014-Q1-K2-F11
aaaacattctcatcatttttccaacttaatggctctgcttctgatagtacccatttcactggtaaccctctggctcggttacaccctataccagcggctacgcttcaagctccctcctggcccacggccctggccggtagtcggtaacctctacgacataaaacccgtccggttccggtgcttcgctgagtgggcgcagtcttacggccctatcatatcggtctggttcggttcgaccctaaacgtcatcgtttcaaactcggagttggccaaggaggttctgaaggagcacgatcagcagctggcggga

SEQ ID NO: 44189 - DNA, 325 bp, Glycine max
  Clone ID: LIB3093-014-Q1-K2-F12
cctgcattgagcccaaatgatgaagttattccccatggttttatttttgcaacattcatgttggcttcaatgttgggaagctcgcttgcatcgaggttgatgtcccgttcttcactccgagtagagagctatatgcagattgttttcgcagtttcttctgctgctctgatgctccccattttgaccacgttcttggtagttccctccggagtgaaaggtggaagcatctcattctctggttgcattcagcttcttggcttctgtgcttttgagagttgtgttggcatattctggccatccattatgaagatgagatctcaataca

SEQ ID NO: 44190 - DNA, 370 bp, Glycine max
  Clone ID: LIB3093-014-Q1-K2-F2
gcgaatacagcctcactgacttcatctggcctttgaagtatctcaaggttggaaagtatgagaagaggattgatgacatcttgaacaagttcgaccctgtcgttgaaagggtcatcaagaagcgccgtgagatcgtcagaaggagaaagaacggagaagttgttgagggcgaggccagcggcgtcttcctcgacactttgcttgaattcgctgaggacgagaccatggagatcaaaattaccaaggagcaaatcaagggccttgttgtcgactttttctctgcagggacagattccacagcggtggccttctctagtttggttgaatttattaatcatgtgcacttcaatttgaatgaattccaataata

SEQ ID NO: 44191 - DNA, 433 bp, Glycine max
  Clone ID: LIB3093-014-Q1-K2-F3
caaagctttgacagttgttcatcgattatggtctgaggtgcctggaaagctgaaagattacatatgtcgtcccaagttcaatggatatcaatctctgcatactgttgtgatgggtgaaggcaaggttccccttgaagtacaaattcggaccaaagatatgcatttacaagcagaatttggatttgctgctcattggagatacaaggaagatgattgtcagcattcttcatttgtgcttcaaatggttgagtgggctcgatgggttgtcacctggcagtgcgaagcaatgagtagagattgttcatctgttggatatgctgattcagtcaatcccccatgcaagttcccttcccatgctgatgattgcccatattcttacaagcctgattgtggtcaaaatgggcctgtgtttgttatcatgattgagaatgat

SEQ ID NO: 44192 - DNA, 313 bp, Glycine max
  Clone ID: LIB3093-014-Q1-K2-F4
cccacgcgtccggcttgaaatcctatgtcaacattaggcactggctgcatttcatgtagatgaaaacaaatggggtgttaatgttcaaactttatctggttcccctgctaattttgcagtatacactgcagttcttaaaccacatgatcggataatgggtttggacttgcctcacggaggacatttgtctcatggattcatgacacccaaaaaaacgtgtatcagccacatcaatttattttgaatctatgccttatcgacttgatgaatcaacaggtcttattgattatgatatgctggagaaaactgctac

SEQ ID NO: 44193 - DNA, 386 bp, Glycine max
  unsure (1)..(386): unsure at all n locations
  Clone ID: LIB3093-014-Q1-K2-F5
cccggggcgacccacgctccggaggagggtgnnctggnnnngttatttttcnccccacgaaaaacaagagcgcccaacgatagtgatcatgggaggaatttgaaaggtcgaaacttgagcatctgggatcgcgaaattggggattttggttaaaagggtataatcttcggaactgattgatggcaaaactgtacgtgaaggcggtgccaccggcggatctgaacaggaacacggattggttcacgtaccctggcgtttggaccagttacatcctcatccttttcttttcttggatcctcgtactctctgtctttcggtgttctcctggcatcgcttggaccaatcgtaatctcgcacactttgctggaacatatgactttttttac

SEQ ID NO: 44194 - DNA, 400 bp, Glycine max
  unsure (1)..(400): unsure at all n locations
  Clone ID: LIB3093-014-Q1-K2-F8
gacaaaccctaacatattttatccttgtatctatcaccatcgtcctggtcctccggcacatgcttctgcgcctgaatactttgtcctccaggggaacacaacttataaagacgatctatatttaaggaagaggacagggatgcgtcggtggctttgttgcacatgtcaggtggaagagtcttacccatcaaatgaaaatgagcacctgaaaagcccaaggaattatggagatggaaatcaaaaaggctcaaaggtgtcagctcctgtcaagcctgaaacacanaaggcaccttcacctattgaagctccagccttatctttagatgagctgaaggagaagacagacaactttggttcaaaggcattaatatgttaaggaacgtatggaagggtgtattat

SEQ ID NO: 44195 - DNA, 415 bp, Glycine max
  Clone ID: LIB3093-014-Q1-K2-F9
cccacgcgtccggtttgggtattggagtgattgacgctgcgtctcttcctcttctctttcgatccatcccggattcctaatcctccaatccaaccacctcagcctcacactcacatatacacatatctgaacgcgtatcgtccctcctatggcttcaaagcgcatcctcaaggagctcaaggacttgcagaaagacccaccaacttcttgcagcgctggtccagtagctgaggacatgttccattggcaagcaacaataatgggtcctgctgatagtccttatgctggaggtgtattcctagtcactattcacttccctccggattatcctttcaagcctcctaaggttgcctttaggactaaggtgtttcacccgaacatcaatagcaatggtagcatttgtcttgatatcctg

SEQ ID NO: 44196 - DNA, 428 bp, Glycine max
  unsure (1)..(428): unsure at all n locations
  Clone ID: LIB3093-014-Q1-K2-G1
cccacgcgtccgttccaaccaagcccatggtggttgaaactttctctgagtatcctccccttggtcgttttgctgtgagggacatgcgtcaaactgtggctgtcggagtcatcaagagtgttgagaagaaagaccccaccggagccaaggtcaccaaggccgctgccaagaagaagtgattgcatttgggcaattttgctagcacatgtgatcatcatcgtggttactcctttatagtagttttatccttgcagagtcttaagtgttttgtttaagttatatttttaagtttctgccgatttcatgtagccgtaactttcaaaactaggttcttgatcggcggnggncaattttcattgctgggttgttttgatgagtacctgtttttggtttgatggtaagaagagtctgaaatatttcgatttcac

SEQ ID NO: 44197 - DNA, 344 bp, Glycine max
  Clone ID: LIB3093-014-Q1-K2-G2
ctctaccctcccttccctccactttcctccctcttcttcttttgcttctgtttttgaggcgaagaacgatggaattgtaatgctgggaatataattggagaattgggggaggagtaagggaggaaatcatacacaatgcccgagttccccttgagctcgaggttggaaagggtgcaaaatagcttgagagagaatggttctctggtgtatctcaatgtgtatgatcttacacctgccaacaattatctttacgcctttggggttggaatctttcattcgggcataaaagtgcatggtatggaatatggctttggagcacatgaatacccaacaagtggtatatt

SEQ ID NO: 44198 - DNA, 153 bp, Glycine max
  Clone ID: LIB3093-014-Q1-K2-G3
ctctaacgtccgttctctccactgtgtaacctcttattctataaggtcaacctttggggcaatgcctaatggctgcgggccacgccgaatataattggacaattgaggaaacaatgaagaagaagatgatgcagatctcacactataagatta

SEQ ID NO: 44199 - DNA, 459 bp, Glycine max
  unsure (1)..(459): unsure at all n locations
  Clone ID: LIB3093-014-Q1-K2-G4
cggaatcggcacgacccacgcgtcctgaagaagagaattgagagagagtttgaangttcttttctacacagctccnaaatacgagggggagtaattaggtgtgcgtgcgatcccatagatctgaataaatgacaaatgtatcattcaaagaatgttcctagtgcaagtttaattggtggtaattcattaagtcatggtcagcacatagattgtggtggcagcacaatggatcctggcagtggaggaaatggtcttagcaacaactctaatctcacctcaaaacaacgtttacggtggacacatgaattgcatgagcgctttgtgatgcctgggctcaacttggtgggccagaacgtgccccacccaaaaggctgctcaaaattattggtgtacaacgcttgaccatttaccattgtaaaaatcatttacagaaataccgacttgcaaaatatttacctg

SEQ ID NO: 44200 - DNA, 228 bp, Glycine max
  unsure (1)..(228): unsure at all n locations
  Clone ID: LIB3093-014-Q1-K2-G5
gagagcagaaaacggaacgggcacttttacctggtatggcgccanctctaanacattggctgggccgagggtagaagatgggctgacataatcaagccaggctgtgtcaacactgaccccatctttcccaacaacaagctcaccggaaccgatgtgggttaccctggtggcctttggtttgacccccttggttggggaaccggttctcctcataagatcaaggacttg

SEQ ID NO: 44201 - DNA, 435 bp, Glycine max
  Clone ID: LIB3093-014-Q1-K2-G6
gtgcctccgtctttttcatccctaattccactctacacccttcgacgcgattcctattctgatcgttagtggggcaagggctgtgggtgaggatgaatttgcaacaagttggacagcctaaatcatctaatggatatggttgttggaaatctgaaaaagaaggggcaactaagtctgataataagatcccgtctggaaagtcaaatgccagcagcagattagcaagtgtagtgactggcaataaaggtggtagttatgggagtccttcacatgatcgattagtatatttaaaaacatgccttattgggcagcatgtgaaagtccagtgaaaaatggatctatatactttgggatatttcatgcaacaaattcttgccaagattttggaatcattttgaaaatggcttacttaacaaacgatgctgctttgcaagg

SEQ ID NO: 44202 - DNA, 357 bp, Glycine max
  Clone ID: LIB3093-014-Q1-K2-G7
cccacgcgtccgcccacgcgtccgcttcacaactttgctttttctctctttcaatggcctcttcttccttctcccccgccactctcaccaccgagcaggagctttccgtcatcgttgccgcccttaccaacgtcgtcgccggctccacctccgcctccagctccttctccctccccgaattccgccttccacagacctctgatcctctcgccgccgcctgcctaatgccgccgccgccgccgccgagcatggacacttgtcgcgagtgcaacatcgcaggatgcctgggatgcaactttttcccggaggagaaaaagaagcagaagagggccaagaagaagtacagaggcgtgaggc

SEQ ID NO: 44203 - DNA, 382 bp, Glycine max
  unsure (1)..(382): unsure at all n locations
  Clone ID: LIB3093-014-Q1-K2-G9
cttcttcttcctctttctttttctttttctgcacccacaaatcaaaacggcccttttccaaccgaattgtggtccataaaccctanattcaacgaacccgccgaccaagctcgaacctcacgtcgcaaaaaaacacttcttttcccctctccgaggttgtcgtgtcggagcatagccatgttgttccctcgaggaaattgatgatttttcataacattggggtctcgttttgcttgtggggtcaccttgaaggagggaaaagtaacgagctttggggctgaatcgtggtgggtctgttgagtattcataaatctggaactacgatggcggggaacgtggtcaagttctgcactgctctgcgtggaatgggcttcgatcatga

SEQ ID NO: 44204 - DNA, 414 bp, Glycine max
  Clone ID: LIB3093-014-Q1-K2-H1
aaaccaaaccccaaaacagcagagcaaccaacaaagtcataatagtattacccacccgccgcagactgaaaaaacaaaaccagatacaatcgcagaataataatgccagaacactcttcatagttgttcatacagtacatagttattctcacaccaaaaccacgtcaacaaattcaaaaactgtgtcaccttccttggtgtgttaatgttaatgcatcaccaccacaagccagagcttcacatcggaaaagagaacccccacctctcttccgatgacgccgccacttcaactccacaaacccatttctcaattcaggtttcaccttgctcgccccatccacctgcaccaaactcaccaaacacgccgttccaccatgaacgcttctgcaacaagagaataatacccatcatgac

SEQ ID NO: 44205 - DNA, 262 bp, Glycine max
  Clone ID: LIB3093-014-Q1-K2-H12
cccacgcgtccgaacgattaaaaaagtattagcagttttccctcaccaaagaagaagaagcaaacaatgggcgatcagcttaccgatgaacagatctccgagttcaaggaagccttcagcttgttcgacaaggacggcgatggtttgttctctctctatctctctcacgttttgtgtatttgatttgatttgatttatgcgttcgcggtttttgcagatcggggttcctttttgtgataatggattacgaaaattagatgaa

SEQ ID NO: 44206 - DNA, 381 bp, Glycine max
  Clone ID: LIB3093-014-Q1-K2-H2
cccacgcgtccggaaacttttaggcattacttggttgttcctgtggcgcacattcctactgttaaatatcttcagaggaaaactgacgactattctttgggtaaagaaactgatagctgttgtcacttcagattataagatttatgtatgcatatgttcaaatttctactgtttcaatctatttcatgattgcctattttatacagtgagtcacatgttagaggtggggaagacgttattaaatagagatgcacctcagtcccagcagtacaggtattttagttgcttacaacttacatgggcaatgcttattatttttgtttgtcgagtttcttgtgaaattagattattgacacatgatgttgggttcaattgcatttg

SEQ ID NO: 44207 - DNA, 394 bp, Glycine max
  Clone ID: LIB3093-014-Q1-K2-H3
aaaataaccaaaccaatcaataatacatcatgatcataatcgaagctcccatcgccgtcagattccacgccaccgccgccattcgctccgccgccgcaccttcacctcgtactctctctctcacttctctttttttttcttcttccatttactttcgctgactcggcttagctttgattctgacttacggaatgtgatgttgtgagaagtttcggagattgtttcgaaacaaaaaacggcggcgttttgcagtgttcgaatggactaacagtagttgttgttgtgcattcgttcattgactagtctgcactttttggcagataataaccgttcaatgtggagcgccgatgacgtgaacggtgtgcgttatgccgcttcgtgcaggctcgcatgc

SEQ ID NO: 44208 - DNA, 302 bp, Glycine max
  Clone ID: LIB3093-014-Q1-K2-H4
gcaaaacatgctgctggatttaaataagaaaatttcaattagacggatcagtaaaagcttggattttgacagtttgaatatcagattcagggagaactgcagattggccaagagtagaagtcattcatcaagtagaagcaaggagatatcttttaataggattttctctaagcttccagtcattgattttgatattgacaaagaaagagcattgaacgtgattgacagactggatgtggtcagataatttgaaagtttgcccgatcgcctttgaaatgaatggaaaggagaaataatacatg

SEQ ID NO: 44209 - DNA, 268 bp, Glycine max
  Clone ID: LIB3093-014-Q1-K2-H5
aaaaccattcaattcaaagaagttggctgttttgtccgcacaccgccaccgcactttgtccgatcctcacagggttgcctccggcatgtctccggccgccggagtcagcgtccccctcctgggggattccaaaggaacgccgccgccggcttccgtccccggcgcggtgttcaacgtggccaccagcatagtcggcgccggaatcatgtcgattccggcgatcatgaaggttctcggcgtagttcccgctttcgcgatgattctcgtg

SEQ ID NO: 44210 - DNA, 422 bp, Glycine max
  Clone ID: LIB3093-014-Q1-K2-H8
cccacgcgtccggaggaaagaaagatgttttttaacggatatgggtatcaagggacatcatcatttgagcagacatttcgatgttactctgcttcgtttattgaaaagcccgaaattgaaaatggtgataaaattataatgcctccttcagtccttgaccgtctagcatttctacgtatggattatccaatgatgtttgaactcagaaatggtgcttctgagagggtttctcattgtggggttctggagttcattgcagatgaaggaactatatatatgccatactggatgatgcagaatctgcttttgcaagaaggagacatcgtaagagtgaaattcgtatcacttccaaagggaacatatgttaaattacagccacacacaaaggacttttttgatatttccaatccaaaagctatctt

SEQ ID NO: 44211 - DNA, 434 bp, Glycine max
  Clone ID: LIB3093-014-Q1-K2-H9
gtgatctccaaaatgcagagcacagttttctctctctccccttccctctctctcccaaaacaacctctcaaacgctctgtctctgtttccacttccaaactcaacgtcattctcactccctcttcattcccatgtcaaccatgttctcttgcttattctccatctttcaaactcgctccctcacactttcaccccttccatgccagagcaacctccgtgccggagagcagcgccggcaacactctgctcaatactctggaacttggagccctgtttgggctctggatcctcttcaacatctacttcaacatctacaacaaacaggtcttaaaggtctaccatttccctttaaccgtaagcacccttcagttcgctgtggggtctctcttcgtagcattcatgtggagtttcaatctctataagagacctaaagt

SEQ ID NO: 44212 - DNA, 442 bp, Glycine max
  Clone ID: LIB3093-015-Q1-K1-A1
ctagtcccaaagagctaacaagagattcaagaccggcatggctaatgaagaggaacagaaaaaccacctcttcggcatcaaagatctcggtcacaagactctccttcagagtgatgcactctatcagtatatacttgaaaccagtgtctatccaagagagcacgagtgcttgaaagagatacgcaagatgactgcaaaacacccactgaacatcatggcaacaccagcagacgaaggacaacttctgagcatgcttgttaagctcacgaattcaaagaacgccttggaaattggtgtattcactggttactctctgctctccactgccctggctcttccccctgatggaaagatcttggctttggatgtgaatcgcgaatactatgagttaggattgccaataattcaaaaagctggagtggctcacaagattgatttcaga

SEQ ID NO: 44213 - DNA, 445 bp, Glycine max
  Clone ID: LIB3093-015-Q1-K1-A10
ccattactagcacttctgattctcagatgcatagtggaggatttgaagccctgtataaaaaacccaagtcctcagatattgaaaataaagacactaataatgatgaagaattgccatctcttgagctcagtttaaagaggcttagaggagttgaagatgctggtattgcaattcaggatgacaggaatgttttaagacgttctgatcagtctgctttctcaaggtacaatgcagccttaaaccctaagaaatctcccactggatgtgttggaagcaattctcctcataataatagcttagaagttacaaagaaagattcatctcacgatattcaatctcattctagcggcaatcctcctaaccaaaactcaaatggtgctagcaataacattgatatgggttccactactaataatgcttacgctaaatctgcagttataagtga

SEQ ID NO: 44214 - DNA, 445 bp, Glycine max
  unsure (1)..(445): unsure at all n locations
  Clone ID: LIB3093-015-Q1-K1-A11
ggtggatagtggtagtcgtagtaggcatggaggaggaagcggaagaaacgaagagcgcagtgagaatattcgtcggaggattggcgggagccgtgagcgccgaagaccttcgaagcttattcgcgtctctgggctccgtccaatccgtccaaaccatccgaaccaaaggtcgcagcttcgcctacctcgacttcctatccgaccccaaatccctctccaagctcttcagcaagtataatgggtgtctgtggaagggtggaaggctgaggctggagaaggccaaagaagactatcttgtgcgtttgaagagagaatgggaacaaggcgctctagatgatgctactcaaaaaccacctgctgctgctattgaggaggaaattcccagcaccacacactcttncgagtcaaataccaaacacctcaatattttctttcccagattgag

SEQ ID NO: 44215 - DNA, 449 bp, Glycine max
  unsure (1)..(449): unsure at all n locations
  Clone ID: LIB3093-015-Q1-K1-A12
caaactccaacatggaagtggtgaaagtgggggtggaatattggggttggtaggtggtcttgcacaagagtttctcaagcaaaagcttgatgacaatgatgagggatatgcaaagcctgcattggagacaaaagtggaaagtaagcaagaggcatatgctggaccaaccaaacgtggccttccggatggtgggatattgatgagtggatgtcagaccgaccaaacttctgccgatgcaagtcctgcaggaagcgctgccagtgcttatggagcttttagcaatgcaatacaggctataattgaggagactgatggtgcaatcacaaaccaagaacttgttcaaagggcaagagagaagctgaagaactccggtttcactcaaaaaccgggactctattgcagngatcatcatgttgatgctccttttgtgtgttgatctgttctcatct

SEQ ID NO: 44216 - DNA, 443 bp, Glycine max
  Clone ID: LIB3093-015-Q1-K1-A2
cgttctccctcttttctctcaccatcagaaagcgcttttttttttttttttttcttctacctccgtttctccgtctccacatttctccttcacgaactcccgatttttcttcctcttcaatctcgtccctctctgtctctccatccttaaatatacacaacatcttctaaggagaaaggggttccgaaagttacgataaaataaaaatggatccaaacgcggtgaagtccactctctccaatctggcgtttggaaacgtaatggcggcagctgcccgtgattatcagaaggaattgcatgctcaagagaagacacatgcatcaagttcagtacatcaggaggttgaccttgacgagttaatggatgatcctgagttggaaaaattgcatgcagataggattgcagctcttaagaaagaagcagagaaacgggaggaatggaag

SEQ ID NO: 44217 - DNA, 451 bp, Glycine max
  Clone ID: LIB3093-015-Q1-K1-A3
cccacgcgtacgaatttttccatataaatatgcacatgcacaaacgcaggggtctcttcttcagcagatagattgtaacggagcatgtgctgcgaggtgccgtttatcatctcgtccacgcctctgccaaagagcttgtggaacttgttgtagacgctgtaactgcgtgccacctggcactgctggaaaccaagaagtgtgtccctgctatgcaagtttgactactcatggtggcaaacgcaagtgcccttagacttaattggaccactatcctatgcatgcctttgatttatattataaaataaaaataatactatatataacatgttaattgcttaatatgtgctttaagagtaaagaataacatcgtgaaatcaaattacccctttttcaatacgtgttgaatcatcgatcttggtttgtaatttggttgtatattcacaaaattaat

SEQ ID NO: 44218 - DNA, 421 bp, Glycine max
  Clone ID: LIB3093-015-Q1-K1-A4
gaaccaacacaaagatggaatggaagggaataccgttcttgtgcaggttgatggatagatagggatgttggggggaataatagagcgggaaaataaaaagacaacatacataacgctctctcacagcggttgctttataccattgtctatatcataagacgggagttcgtctacactgatcacttgttagagcatgaattcacaatgcccataatttgttcactaaaaaacgatgaacgtgtacgaaccgagccaccaaatcagtatgagggagagaacgcttttgaagtaatggtaatttaagtgcacccatgcctctaattgatgagacagacatgaagtgtgatagtcagccagaggatgcttgtcatgcgatactacgagaggcctagaattatgatcaagaagctaacaaacctac

SEQ ID NO: 44219 - DNA, 459 bp, Glycine max
  Clone ID: LIB3093-015-Q1-K1-A5
cccacgcgtccgcccacgcgtccggagaaattcctccatcatttaacaacctcacattcttgtcaaagttcagtgtggcacataatcgcttagagggaccaattccaactggagggcagtttttaagcttccctagttcaagttttgagggcaacctggggctttgtagggaaattgattctccttgcaaaattgtcaacaatacaagtcccaacaattcttctggttcttccaaaaaacgtggtagaagcaatgtccttggcataacaatcagtatagggatagggcttgcactgcttcttgcaattattctgctaaaaatgtcaaagagggatgatgataagcctatggataactttgatgaggaactcaatggtaggccacgcaggttatccgaagcacttgcttcctcaaagttggtgctttttcagaattcagattgcaaggatcttacagttg

SEQ ID NO: 44220 - DNA, 286 bp, Glycine max
  Clone ID: LIB3093-015-Q1-K1-A6
ccggtcgacccacgctccgccaacctcaaaacttcacatggaaggtgatacgtatttaacaacctaaataatagggaaaatcgggggaatctaaggcttagagggccccctccctcgaagacattctttctcttccctatacaaatttgatgtcatcctgaggctttccaggaaaatcacttcttgccatttattaacaattcatggccaacaattcttttgcgccttctaaaaacgtcgtgaagcacctccttgcatctcaataatatacaacagggctccactg

SEQ ID NO: 44221 - DNA, 238 bp, Glycine max
  Clone ID: LIB3093-015-Q1-K1-A7
gctactcaacaggttgtgaatccggtgagaatgacacaaatcatgatacacatgatcatggacgtggctatggagcatgcttgagggcctgatgcatatacatattcatagaaagtcgatatgaaagagctgatatagaaactaccgtatatgtaactagctcatgtgagacaaactgcgatgcaaacatgatgacatgtgtgaagccacatacgaactcacttaccaaatttcttga

SEQ ID NO: 44222 - DNA, 432 bp, Glycine max
  Clone ID: LIB3093-015-Q1-K1-A8
ctcaaatctgtgaagaaaatctcaatttctaaattgtaattcttagcactactgctagtagtagtaaaaaaaaacaattagaaagtagtagagtgtttttttttctttttttcgtttgttttacttttaagatgggtgagaagagcaacgttggcggcgacgcgattaacacgacactgcttcacgggaagtacgagctgggccggctgttaggccacggaaccttcgcgaaggtgtaccacgcgcgccacctgaagacgggaaagagcgtggcgatgaaggtggtgggcaaagagaaggtggtgaaggtaggcatgatggagcatatcaagagagagatctcagccatgaacatggtgaagcacccaaacatcgtgcagcttcacgaggtcatggcgagcaagtccaagatctacatcgccatggagctcg

SEQ ID NO: 44223 - DNA, 439 bp, Glycine max
  Clone ID: LIB3093-015-Q1-K1-A9
atttgtattggtttagaggaacatagtccgaggaacagccaacacatgtatggtagggagttccaatcgatgttggacggactcgacgaggaagggtgtgttgaagaaccggggtatcaatctgagaagaagcgtcgtctaagtgtggatcaagtgaaggctttggagaagaactttgaggttgaaaacaagcttgaacctgagaggaaggtgaagcttgcccaagaacttgggttgcaacctagacaggtagccgtatggttccaaaaccgtcgagccagatggaaaaccaaacaattggagagagattatggtgtactcaaagccaattatgatgctcttaagcttaactttgacaccctcgatcaggacaacgaagccttacgaaagcaggtagaataatactccttccaaaatataaacaaatttcgattattta

SEQ ID NO: 44224 - DNA, 448 bp, Glycine max
  Clone ID: LIB3093-015-Q1-K1-B1
tcttaataaccgattcttcatctggttcttctcaatatgcatgtgcatcaccctcactgccctcacccttacctacttatatggtttgcaaatggtcaccccaaacgacgtttgggataattcattattcagcatggttggagtcgttatttttatttggatcatacttctaggaatcgtcgtaattttcctctccctacgcctacttttttggattgtcactaaatgccggaataaaaaacaaactgaacaaggagaagatcaaaaccaaagtaaacaagaagatccaaaacaaagtacaggagaagatgcaacctagttctgctcatccatcaggccatgcatcgcatatcaaccttccttacttgtggactattttacattgttaagcaatattattaatcatacataaataaacaaatttgtctttagtgtacgtctcatagca

SEQ ID NO: 44225 - DNA, 450 bp, Glycine max
  Clone ID: LIB3093-015-Q1-K1-B10
cccacgcgtccggtttcgcttctcagacacgcggagaggccgttgatcgtgttcggaaaaggagctgcgtatgcacgtgcagagcacgtgctcacaaagctggtgaattccactgggattccttttctcccaactccgatggggaaaggaattttacctgacacccacgcacttgcggctactgcagcaaggtcactagcgattgggaagtgtgatgtggcgcttgtggtgggagcgagactcaactggcttctacacttcggtgaaccaccgaaatggtctaaggacgtgaaattcatcttggtggatgtgagcgaagaggagattgagctgaggaagcctcacttagggttaattggtgatgccaaacacgtgattgaggttttgaacaaggagattaaggacgatccgttttgcttggggagcacgcatccttgggtggaggcgatt

SEQ ID NO: 44226 - DNA, 431 bp, Glycine max
  Clone ID: LIB3093-015-Q1-K1-B11
gtttcggagctatggcgcaagaagcagtctgatgttatgagattcttgcagcgggtgaggtgctgggagtaccgccagcaaccttctattgtccgtttgacaaggtctactcgcccagacaaggctcgccgcttgggtttcaaggctaagcagggttatgtgatttaccgtgttcgtgtacgaaggggtggccggaagagaccagttccaaaaggtattgtttatggtaagcccaccaaccaaggtgttactcaactgaaatttcagcgcagcaagaggtctgttgccgaggagcgagctggaaggaagttgggtggcctcagggttctcaattcatactgggtgaatgaggactcgacttacaaatattttgaggtcattctggtggatgttgcccacagcgctgttagaaatgatccaagaatcaactg

SEQ ID NO: 44227 - DNA, 456 bp, Glycine max
  Clone ID: LIB3093-014-Q1-K1-B1
ttccaactccatttacgatttcactgtcaaggacatcagtggaaatgatgtgagtctgaatgattacagcgggaaggttctactgattgtgaatgtcgcctctcaatgtggtttgacacagacaaattacaaagaattgaatgtattgtacgagaagtacaagaatcaaggatttgaaatcttggcatttccgtgcaaccagtttgctggacaggaaccaggaaacaatgaagaaattcaggaagtagtttgcacaaggttcaaggctgaatttcctatctttgataaggttgaagtcaatgggaagaatgcagtgccactttacaagtttttaaaggagaagaaagggggaatatttggcgatggtatcaagtggaacttcacaaagttcttagtaaacaaagaaaaggaggttgtggacagatatgcacctaccacctcacctctgaaaatcga

SEQ ID NO: 44228 - DNA, 390 bp, Glycine max
  Clone ID: LIB3093-013-Q1-K1-A8
gcctctccctctacgatatcgccggaactcccggtgtcgccgccgatgtcagccacatcagcgccggatctgaggtagtggggtaccaaggtgacgaagagctcggaaaagctttggagggtgcagatgttgttataattcctgctggtgtgcccagaaagcctggaatgactcgtgatgatctttttaacatcaatgctggcattgttaagacactgtgtactgctattgctaagtactggcctcatgcccttgttaacatgataagcaatcctgtgaactccactgttcctattgctgctgaagttttcaagaaagcaagaacgtatgatgagaagagattgtttggagttaccacccttgaagttgttagggcaaaaactttctatg

SEQ ID NO: 44229 - DNA, 462 bp, Glycine max
  unsure (1)..(462): unsure at all n locations
  Clone ID: LIB3093-013-Q1-K1-A9
gcctacgcactgcggagagagaaattgaggtttcgagataaccagttttctctttgattcatgaatggcaactgcgaggaccgtgaaggatgtttcgcctcacgatttcgtgaaggcttatgcttcccacctcaagcgttccggcaagatggagcttcctgagtggaccgatattgtaaaaacagcaaaatttaaggagttggctccatatgatcctgactggtactacattagggctgcctcaatggcaagaaagatctatttgagaggtgggcttggtgttggtgctttccagaggatctatggtggaagcaaaagaaatggaaaccgtcccccacatttctgcaagagcagcggtgcaattgccagacacattctgcaacagttgcaaaacatgagcattngtgagattgatacaaaaggaggtaggaaaaatcacttctaatggtcgaagggatcttg

SEQ ID NO: 44230 - DNA, 479 bp, Glycine max
  unsure (1)..(479): unsure at all n locations
  Clone ID: LIB3093-013-Q1-K1-B10
tcgaccgcgcgtccgggaaataaagattaggattaggtgttgcgcagtcgcaggcatggccatggctttggtgagcctgaacaccattcataggtcgccttcttctttttcgttttcatctcccaaaccttattcttcctccaactatgcaccacctctcaccctccttccacgatttcggaggcacctcgttcgtatggctcccgacgaggagaagatgactcgccgttcccctctcgatttccccatcgtatggtttccctaatcaaattcattctaagcttattttttgtaattttactttcagtaagtgctgcgaatttggattcggattcgccgtcaccctgctatgtttattgcctgattacctcaattctttgttgaaggataattgatttactgttattacatttccttgcttctaactaanatcaaccaatcaatattggctccggtttagatgcaatgctagtttctgg

SEQ ID NO: 44231 - DNA, 474 bp, Glycine max
  unsure (1)..(474): unsure at all n locations
  Clone ID: LIB3093-013-Q1-K1-B11
cgtccggtctgggcagaggttttcttctaccttgctgagaacaatgtcctttttgagggtattctccttgagcctagcatggtgacacctggagccgagtccaaggacaaggccagtcctcagacagttgctgattacaccctcaagctccttcacaggagaattccccctgctgtccctggaattatgtttttgtctggtggacagtctgaggttgaagctaccctcaatttgaatgccatgaaccaatctccaaacccgtggcacgtgtcattctcgtatgccagagccctccaaaacactgccttgaagacatggggaggccgcccagagaacgtgaaggcagcacaagatgcactcgcattccgtgccaagtccaactcactcgctcagcttgngaagtacactggtgagggtgaatccgaggaagccaagaaaggagtgttcgtcaaaagctactcctactaagatgtt

SEQ ID NO: 44232 - DNA, 468 bp, Glycine max
  unsure (1)..(468): unsure at all n locations
  Clone ID: LIB3093-013-Q1-K1-B12
cccacgcgtccgcgcagtgactaaaccaaagctctcactcgccgtcgtagggtttctcctttcggttagcaacaacaaggatggttgcagccaagaaaaccaagaagacccatgagagcatcaacaacaggctcgctcttgtcatgaagagtggaaaattcaccctcggttacaagacggttctcaaatcacttaggagctccaaagggaaattgattatcattgctaacaactgcccccctttgaggaaatcagagattgaatactatgctatgttggccaaggttggagttcatcattacaatgggaacaatgtggatttgggcactgcatgtggaaaatattacagagtgtgctgccttagcattattgatcctggtgattctgatatcatcaagacactacctggcgaacagtaaagtattatttgaagttccttgcttgatattntctgtttttagttgattc

SEQ ID NO: 44233 - DNA, 435 bp, Glycine max
  unsure (1)..(435): unsure at all n locations
  Clone ID: LIB3093-013-Q1-K1-B3
gaccgacgcgtccgcccacgcgggggcaacaacacgtgangccgnggcgggagccgnggnggcggaggngccggggccggagaccggagaggggnggnggngaaggcggagaaaggcngnaannnanngganncaggggaanngcagcnatggagagaggagcaagngccnncacactnggagngngggggatgggnncactatgctgacccagcttgaagggcatcagaaggctgagagtgcaattgcctttccctctggtacagataagctgtataccggaagcactgatgagactgcaaggattagggactgccaatctggaaagtgagtaggtgtgatcaatcttggtggtgaagtagagagcatgatcagaggaagccctaggggcagagtagggatacccaattttggcaaggcctagaacacacaaaa

SEQ ID NO: 44234 - DNA, 408 bp, Glycine max
  Clone ID: LIB3093-013-Q1-K1-B4
cctttcgctacttgcttcacctttcttcataggaagaccaaattcttcctcaacaaaccaggaatcaaggagatgatgggtgcatgctgcaagagaagacaatccaacataaaattattctcttcaagttctgacctgtcaacctcttctttccttcacatgaagctctccactcagtttcatcaagttttcaagcttattgacactaatggggatgggaagatctcaatcaatgagctcagtgaattgctctcaagccttggatacaacaagtgcactgctgtcaaggaagctgaaggcatggtgaaagtgttggacttcaatagagatgggtttgtggacttggatgagttcatgattgtcatgaatggcatggaagaagaaaaagaagagaaatttggaatggca

SEQ ID NO: 44235 - DNA, 390 bp, Glycine max
  Clone ID: LIB3093-013-Q1-K1-B8
ttgatcttgatgagcctgtagcagatgatttgatggggttttatgagcggatgggtgatagacttgcacatcaggatggtggttctgctgcacacaacaagattttctctgagaggaggggccagtggagagctgcaacacagtctcaggagttttttaggactcttcaacgctattatagcaatgcatacatggatgctatgaaacaggatgcaatcaatgtattcctggggcattttcagccacaacagggcaagcctgctctatgggagttgggttcagatcagctctatgatgcaagaagacatggagatgatgatgcaaggtcatttttcaaaagatccttttgatatggaaacatttttaatgaaagttctacaccgatgtcag

SEQ ID NO: 44236 - DNA, 421 bp, Glycine max
  Clone ID: LIB3093-013-Q1-K1-B9
ggccacgcgtccggggcgggtttggttcaggttttaagggctggattgatgagcattcacttgctgctaccaaaccaggagtaggcaagattgttgctgttaagaagcttaaccaagatgggctccagggtcacagagagtggttggctgaaataaactatcttggccaactacagcatcctaaccttgtcaagttaataggatactgctttgaggatgaacatcggcttctggtttatgaatttatgcctaagggtagcatggaaaatcatctattcagaagaggttcttactttcagccattctcttggagtttgcgaatgaaaatagcactaggggctgcaaagggtcttgcttttcttcatagtacagaacataaagtcatataccgtgattttaaaacgtcaaatatcctactcga

SEQ ID NO: 44237 - DNA, 489 bp, Glycine max
  Clone ID: LIB3093-013-Q1-K1-C1
gtctgagtggtggaagtgatgctgagggtggcgctgcgatggaactcgatttggaggccaatggcttctctgccactagctcccttcacatgccaaaatctccacacgctaaaccctaggcctcgatgtcgcaccttcaagcttttttgtcgaccttcttcttccgccgtcgcgcacacctcgcctcctctctccggcgacctggaccgctacctccgctgctccatgccgcagaactcgccgctccgagtcgcggttcttgtcagcggaggcgtcgatagcagcgtcgctctccggctgctccacgccgctggccactcctgcaccgctttctacctcaagatatggttccaagaagatttcgagaacttttggtctgagtgcccctgggaagacgatttgaagtatgctaaagatgtttgtaatcaggttgatgtaccgttagaagttgttcatttaaccgatgaatactggaacaatgtggtttct

SEQ ID NO: 44238 - DNA, 412 bp, Glycine max
  Clone ID: LIB3093-013-Q1-K1-C10
acatatgtgaagttgcataaaggcaagcttctcgaacgtttactgtagcctatacgtgcttctctgtgaggttacctgtgaagattccaattcaccttttttaccttcaatttttccgccattttgctctttgttcagttgttgtttttccttctgaagcttatttgtgtggcttaccacattctggctcattttgcatgtgctatttaccttcaaagttgtatgttgagtgaattcttttctggattttctctattgcttcatctttaagatcttttgcattccttaaattttgaaactttttgcactttcgatttccatatgcatcattcgcatcactattcactacatatttatgattctcttctttctagatcgtaatcgtatcgttatgatttattctttacatgca

SEQ ID NO: 44239 - DNA, 472 bp, Glycine max
  unsure (1)..(472): unsure at all n locations
  Clone ID: LIB3093-013-Q1-K1-C11
gcgtccgctctcttctttttactctctctctgtctctctctacgctttctcgttcgagatccctcaagggatccactaactgaaggagaaatggggttgacattcaccaagcttttcagccggcttttcgccaagaaggaaatgcgaattctgatggtgggtctcgatgcagctggtaagaccaccatcctgtacaagctcaaacttggagagatcgttaccacaattcccaccattgggttcaatgtggagactgtggaatacaagaacattagtttcactgtctgggatgttggtggccaggacaagattcgtcccttgtggaggcactacttccaaaacacacagggtctcatttttgtggttgacagcaacgacagggacagagttgttgaggccagagatgagttgcacaggatgttgaatgacgatgaactganagatgcagtattgctcgtatttgctaacaaac

SEQ ID NO: 44240 - DNA, 475 bp, Glycine max
  Clone ID: LIB3093-013-Q1-K1-C12
cccacgcgtccgcacgctcgtccccgccgtgcgtcgaccgcctcggcgacgccaagcagcccgtgcgcgacgccgcgaggcggctccttctcactctcatggaggtttcatctcctacaataattgttgaaagagcatggtcctttgcatggacaagcaaaagctggatagtcagagaggaatttgcgcgaacagtcacatctgcaattggtctattttcatctactgagcttccccttcaacgtgctattcttcctcctatatcgcagttgctgaatgatctgaatcctgctgttagggaaacagctattctgtgtattgaggaaatgtatacacaagctgggtcccaatttcgtgatgaacttcagcgccacaatctgccttcatctttgctgaaagctattaatgccaatctagagggaattcaaccaaaagttcactcttcagatggtatttctagtggttataatgctgg

SEQ ID NO: 44241 - DNA, 375 bp, Glycine max
  Clone ID: LIB3093-013-Q1-K1-C2
cgaccgacgcgtccgcctattctcaggtttctctctgtttcttcctacttcatgctatagcacttacaatactcaagaataacctaaccaagcgaaaccaaaccaagacccttatctgcactcacttcacacaaaccaaagttaattaattaccaacacaaaatggatggaggctgtgtcacagacgaaaccaccacatccagcgactctctttccgttccgccgcccagccgcgtctgcagcgttgcaagcgccgtcgtcgaccccgacggttgttgcgtttccggcgaggccgaatcccggaaactcccttcgtcgaaatacaaaggcgtggtgccataaccgaacggtcgctggggagctcaaaattaccaa

SEQ ID NO: 44242 - DNA, 490 bp, Glycine max
  Clone ID: LIB3093-013-Q1-K1-C3
cggacgcgtgggccgccacagccacagccacagccgacaccagatccttccaccaagctcaggtacaaatgctccgttggcgacaagagcttgccctcttaccaagcgctcggtggacacaaggccagtcaccggaaactcgccgacgccgccgaagaccaaccccccagcaccaccacttcctccgccgccgccaccagctccgcctccggaggtaaggcccatgagtgctccatttgccacaaatccttccccaccggacaggcccttggcggacacaaacgttgtcactacgaaggtaacggtaacggaaataacaacaacagtaacagcgttgtcaccgtcgcctcggaaggcgtggggtccacccacactgtcagtcacggccaccaccgcgacttcgatctcaacatcccggcctttccggatttttcgaccaaggtcggagaagacgaggttgagagccctcaccctgtcatgaagaagcctc

SEQ ID NO: 44243 - DNA, 488 bp, Glycine max
  unsure (1)..(488): unsure at all n locations
  Clone ID: LIB3093-013-Q1-K1-C4
tcgaccgacgcgtccgcccacgcgtgcggntngacatgctacgaagacaatctcttcgcccagatcacataaaaatgggtgttttggatgaggctgatgaaatgctttcacgtggtttcaaggaccagatctatgacatcttccagctactgccaggtcaaattcaggttggagtgttctctgctacaatgccacctgaggccctggagattacaaggaagttcatgaataagccagtgagaatcctggtaaagcgtgatgaattgacgcttgagggtatcaagcagttttatgtgaatgttgataaggaagattggaaactggagacattatgcgacctttatgagactttggctatcactcagagtgtcatctttgtgaacaccaggcgcaaggtggactggctcactgacaagatgcgaagcaatgaccatacagtctcagccacccatggagacatggaccaaaacactcgcgatatcatcatg

SEQ ID NO: 44244 - DNA, 451 bp, Glycine max
  Clone ID: LIB3093-013-Q1-K1-C5
cacaaacccgtccctcacactctccaaaccctagcggcactacacactagttctatcgctggctccccaagatggggagcgccgatcccgagcacagagaagaggaggaggcacccgccgttggcgacgacgaggacaccggagctcacgtcgctccaatcgtcaagctcgaggaggttgctgtcaccaccggcgaggaggacgaagatgcaatcctggatctcaaatcgaagctttaccggttcgacaaggacgggaaccagtggaaggagcgtggcgccggcactgtgaagttcctgaagcataatgcttccggcaaggttaggcttctcatgaggcaatccaagacgctcaagatctgcgctaatcatctcattatgcctacgatgagtgtgcaagagcacgctggaaacgagaaatcctgcgtttggcatgctagggatttgctgat

SEQ ID NO: 44245 - DNA, 406 bp, Glycine max
  Clone ID: LIB3093-013-Q1-K1-C6
cccacgcgtccgttctggagctcagggcaagatcaccgctgctgccgggcctcctcgtgacgctgatgattcatggtcaaaacctgtatctggttctgatgaaccgcagcagggtggttggtttcagacttttacaattgctgcttacaaaccatactttgatgttgacacttcagatgttctagagaggattatcgactcactatttccatttagaggatctttcaatgaaaaaactgctaccaaccctgatttgtatggtccattctggaattgcactaccttgatatttggagcggcatctattggcacctttgtgacatatatagcgcacaagctaaagagctaagaatgggattatgacataaatctggtgacttggtctgctggtttggtttatggctat

SEQ ID NO: 44246 - DNA, 436 bp, Glycine max
  unsure (1)..(436): unsure at all n locations
  Clone ID: LIB3093-013-Q1-K1-C7
acggggaatcggctttggaacagacaatgaaatgacaaaacctcagggtttgaaaagcatatgggctggttctgatgtggataagccatctctgattgaatccccatcatcccgagaaaagcatagctgttctaattggtttccaagtaccccgaatggccaagacaagcatggttttcctctggatgatgcagctgcaaatgagaagggaacatggcagatgtggagtacttctccacttgggcaagaaggtttaggtttagttgatggcgcaggaagctggctgttatcctcacaaaggaacataccaaacanggatgattttgtgctttcttcatctcagaagactatggcttctctttttaacaaagaagataacataattatcagtacccattctccacanaatgtatgtcttcctaatggccaaagtggt

SEQ ID NO: 44247 - DNA, 390 bp, Glycine max
  Clone ID: LIB3093-013-Q1-K1-C8
agatatctatttagatctcagaaaaacagtgtttcatttcaatgcattcagtcttattattgttagggtttggcgattcagagagaaagagaaatgggagaacgaaaaggaatcccaattgctctggggctcttggcgatgctcctcttcttcattgcttcttcctcttcctctcacctcgttcgtgcttccgatgacgccgacgacgcgatcttctacgagtcattcgacgaggattttgacggacggtggattgtgtccgacaaggaggattacaacggtgtctggaagcatgctaagagtgatgggcatgatgattatggacttcttgttagtgaacaagcccggtaaatatgctatattcaaaaaacttgacgagcctgatagtct

SEQ ID NO: 44248 - DNA, 444 bp, Glycine max
  Clone ID: LIB3093-013-Q1-K1-C9
ctagtggaagagatgactgctctgtcaaactggggagtatcagcgagagaaatgctctgttaaccagggggaaacctgccaatatatgctgtgttcagttctctgcttactcaacaaatcttctattttttggatcagctgattacaaggtttatggttatgatcttcgtcacactagaatcccttggtgcacattagctggtcatggcaaagctgttagctatgtaaaatttatagattctgaagcacttgtatctgcttccactgacaactctttaaagctttgggacctgaacaaaaccagctcttctggtttgccatctgacgcttattccatgacctttaaaggtcatagttatgaaaagaatttcgtgggattatctgctttggatggatacattgcatgtggttcataatctaatgaggtgtactgttatcacaaat

SEQ ID NO: 44249 - DNA, 413 bp, Glycine max
  Clone ID: LIB3093-013-Q1-K1-D1
cgccgagatcgtagtatcatattcaatatcgtttcataccaaacacatggctttggaagctctcaactcaccaacaacaaccgctccatcttttccctgtgacgacccaactattccatgggcgaaacgaaaacgttcaaagcgttctcgcgaccatccttctgaagaagagtacctcgccctctgcctcatcatgctcgctcgcggcggcaccaccaccgtcaacaaccgccacgtcagccctccaccgccacagccacagccacagccgacaccagatccttccaccaagctcagttacaaatgctccgtttgcgacaagagcttcccctcttaccaagcgctcggtggacacaaagccagtcaccggaaactcgccgacgacgccgaagaccaaccccccagcaccacca

SEQ ID NO: 44250 - DNA, 471 bp, Glycine max
  Clone ID: LIB3093-013-Q1-K1-D10
aagaggatgcggcttgcgcagctctcaggcttatttctgaacggccatggccatcgctccaggcttcttttaaaacgcagttccgcggatactcagacccactgagccccgccgagtctgctgcctcaaatcaatgccatgaagacgatgcaaggaaaagtggtatgctccacgaacgacaagacggtcacaacggaactggtcctgctatcccctcacccaaagtacaagacgcgcgtgacgaagaagaagaagtaccaggcccacgatccctataaccaattcaatgtcggctacatcgtccatctccacaagaccaggcccatcagcaagaccaatgcctttctcgcactccacgttcccaacatgtcctccaacaagccctagccccaacccgatgagctttccattcccttcgaatcccagccccaggcctagattccagagttacacctcaatttcaactctcta

SEQ ID NO: 44251 - DNA, 468 bp, Glycine max
  Clone ID: LIB3093-013-Q1-K1-D11
tcgacccgcgcgtccggttttggttccgcagaagattctgaattctgatgctctagtgcgattccatgggagaggtggtgatcatgagtggagagaagaagtcagttagagtggagggggtggagaaggaagatagtggtggaagtgggagcaaggctggtgaatttaaggggttgatgaggtgggagaagttcttgcccaagatggttttgagggtgctgttggttgaagcagatgattccacaagacaaattattgccgcgcttctcagaaaatgcagctacaaaggttatgtgatggggatctgggttcaatgaaagtctaaggatctaatggctcctttccacttgctttaagagtcttggcagtctggaaactacaggcttacatgatagtgatacaattattttcttacatgatatgattattttcagttgtctatttgccataaagaatttctattattga

SEQ ID NO: 44252 - DNA, 464 bp, Glycine max
  Clone ID: LIB3093-013-Q1-K1-D12
tgaaaagtttgattcttcgataacaaaagactatgattttcaccttcttgatggccgttcaatgagggttcccttcatgacgagcaggaagaatcagtttattagggcttttgatggtttcaaagtccttggtcttccctacaagcaaggtgaagataagcgccaattcaccatgtactttttccttccagaaacaaaagatgggctgttagctttggctgagaagttggcttctgaatctgggttcttggaacgcaagcttcctaataacaaattggaagtaggagacttcaggatcccaagattcaaaatttcttttgggtttgaagcctctaatgtgctgaaggagctgggagtggttttgcctttctccgttggaggtttgacagaaatggtggactctgctgtgggtcaaaacttgtttgtttccgatatatttcataagtcttttatagaaagtaatg

SEQ ID NO: 44253 - DNA, 356 bp, Glycine max
  unsure (1)..(356): unsure at all n locations
  Clone ID: LIB3093-013-Q1-K1-D2
ggagcttttcggggnggatgatgcttcgagggtgagggatttgtttgagaaggcgaatggggaggcgccgtgcattgttttcattgatgagattgacgccgttgggaggcagagaggggcggggctaggaggtggaaatgatgagagggaacaaactattaatcagcttcttactgagatggatgggttttctggtaattctggtgttattgttatggctgccactaacagaccggatgttcttgattcggcgttgttgaggcctggccggttcgataggcaagttactgtggatagacctgatgttgccggcagagttaaaatccttcaggtgcattctataggaaaagcgcttg

SEQ ID NO: 44254 - DNA, 421 bp, Glycine max
  unsure (1)..(421): unsure at all n locations
  Clone ID: LIB3093-013-Q1-K1-D3
aataaaaatgcaccgatatatcaccgtgcatgaaagaaaagcgtgctcttcatttgaagcatccattttttcttttgaccccagcttcagctatctaggtttagggttttgcttcaactttactcattttcccgggaaacaccatttagaatgttaccatctttctttntaattatgttgctgactcgttctcaaaatttggtctttcgctatagaatcatgttaggaacagttttagtttctttntattattgtaaatttcgttacttctgaatgcgtaaatntgtgtttgtcttttggtgccacaattaaattattggaaaaaaaaatgccttgcttttgctgcttgatgtgggcccatccatgcattctgttcttcctgaaaatgagaaagtctgcttcatgctagtacaggaaaagc

SEQ ID NO: 44255 - DNA, 218 bp, Glycine max
  unsure (1)..(218): unsure at all n locations
  Clone ID: LIB3093-013-Q1-K1-D4
cgagccgcgtgctatctcaagctttacgatttcaaaaaaggcaggcagaagagtgtacttcagtgcttgagcttgatcacaagcacagtggggcattgatgctgcnggctcaaacgctagttaccctganagagtaccattcagcactttttgatgtcagcagacttttagagttgaaatcatcttcagaggtttatcaaaatcttcaagctcgtttg

SEQ ID NO: 44256 - DNA, 370 bp, Glycine max
  Clone ID: LIB3093-013-Q1-K1-D5
cccacgcgtccggctgtgcctctcctctcgctgcgttttccaatggcggccataacccggggcctaaatcgcacgtcttccctctcttccgtggcgcgtggattctcatctcacgcatcgccgccgcgcaaggaggagaggaatgtccagtgggtgttcctgggttgccccggcgtcggaaaaggcacctacgccagtcgcctctgcaacctcctcggcgtccctcacatcgccaccggcgatctcgtccgccacgagctcgcctccaacggccccctttcttcccagctatcagaaattgttaatcaaggaaaattggtgtcagatgaaatcatcataagtttattgtcaaaaaggctggctgatgggg

SEQ ID NO: 44257 - DNA, 440 bp, Glycine max
  unsure (1)..(440): unsure at all n locations
  Clone ID: LIB3093-013-Q1-K1-D6
agattcttcagccaaagtagaagctgctcacagttccagaaccccttctggaatttcaaaggctagtccttcatcggttccttccaacttatctattctgtcatatagtgaagcaagtgatttctcaaatcttccaacaccaaggtctgagggcgaaatcttgtcttccccaaatcttaaggcctttaccttcaatgagctaaagaatgccaccaggaactttcgcccggacagtcttcttggtgaagggggatttggttatgtttacaaggggtggattgatgaacacacatttacagcttcaaaacctggatcaggaatggttgttgctgntaagaaactcaaacctgaatggttacaaggtcataaggagtggttgactgaagtggactaccttggacaactacaccatcagaatctggtaaaattgattggatact

SEQ ID NO: 44258 - DNA, 454 bp, Glycine max
  unsure (1)..(454): unsure at all n locations
  Clone ID: LIB3093-013-Q1-K1-D7
nacgcaaacnncaacnngnaancaagggagagagaaaagagcaagcgcagaaaagggcggagaagggagnggnganccgaggaggnggcgnngccggngccaaccnngcaaaaaccatacaacggcaagccaacgacaccctnannganccgaaggaatananngagaaaccatgggcaagnnngaggggaacggntgagccaactgnngctgaaaggatagngatcaaccatagagagtacttcaaaaagggtaaccttgttgtatccagtgctgtcaacataactgaaactgcagtggtgactgaagatggccatcagattgcctatgactttctttgtattgccacttgacacacagaaccaatccccaaaaccaggagtgaaagacttgaccattacaaaggagaaaattgcaagatcaaatctgcaagttcagttttgattgttggggg

SEQ ID NO: 44259 - DNA, 327 bp, Glycine max
  Clone ID: LIB3093-013-Q1-K1-D8
cccacgcgtccgccacgcgtccgcccacgcgtccggtgatttgcattgccgccaccgattgcccaccaactgatgtacataacctcttcacctttccctccttccctaatttatcactaaaaaaacaaacaaataaaaaaaaagtccactaagttggggcacgtcacccatctcgcccttcccctcgctcatctcaaatccatgcttcggaattagggtttccattcggatttcgtaagtctggtgcccaatttcgtgactccgagcgacgtaaaaggggaagggaaagggatgaggatttggggatcggagatcgtgttcgccata

SEQ ID NO: 44260 - DNA, 476 bp, Glycine max
  Clone ID: LIB3093-013-Q1-K1-D9
gcgtcagcccacgcgtccgcccacgcgtccgggaatagttagtgatgttagagatcaaggcagctgcggagcatgctggacattgaggacaactggggctttagaagcagcctatgcacaagcatttgggaagagtatctctctttctgagcagcagctagtggattgtgctggccgtttcaacaactttggctgtaatggtgggttgccatcacaagcctttgagtacatcaaatacaatggaggacttgagacagaggaagcatacccctacactggaaaagatggtgtatgcaaattctcagctgaaaatgttgccgttcaagtcattgactcggtcaatatcaccttgggtgctgagaatgaattaaaacatgcagttgcatttgttcggccggttagtgtggcctttcaggtggtgaatgggttccatttctacgagaatggagtttacactaatgacatttgccgtagca

SEQ ID NO: 44261 - DNA, 377 bp, Glycine max
  Clone ID: LIB3093-013-Q1-K1-E1
tacagggagaggtctcagtgcaatgattttccttggccctacatattaccaaagactgaaggatatggttgatgataagatccattctcgtggaaggggtccagtgcagatcctcacaaggcaacctgctgagggacgctcacgagatggaggtctccgatttggagagatggaacgagattgcatgatagctcatggagctgctcactttttaaaggaaaggttgtttgatcaaagtgatgcttacagggtccatgtatgtgagcgttgtgggttgatagctattgcaaatctcaaaaagaattcttttgagtgcagggggtgcaagaacaaaactgacattgttcaggtttatattccttatgcttgtaagcttc

SEQ ID NO: 44262 - DNA, 488 bp, Glycine max
  Clone ID: LIB3093-013-Q1-K1-E10
tcgaccgcgcgtccgatggaatatggggaaattggtcaaataagagtgcagggcttgaatcattttcagcaacaaacagcaccatatgaatgaggactgaccttgctggggggagggaagaataatttgcatgtctcttctattatggaaattaaaggtggaattttcagcttagtttggttctatgaactaattaattccttttcgaccatatcaaactagtagtacactgcagaaattaatcgtctacacattaacactgattggttttcctgtgacaaatcagtgtgtggacactttaatttggtcccttaaattagtgttcatcagtatctttaaatggcgaataatcagaagaattgccctgcacatttagttagttcaatgtgcacacttcgacttcacagcatttcaatttcagtcattccattttcatatcttattaataagaatggaatatggcaatatgctgaaaatttgtagcaacg

SEQ ID NO: 44263 - DNA, 470 bp, Glycine max
  Clone ID: LIB3093-013-Q1-K1-E12
gcccttcatcgtgtgctccgacagtccgtggtgaacttcctggagcgtcgccggccccttcgggtacggtcctcccgggtgcgccgtcaagtccaacgtcctctccttctggcgcccgtttcatgggtttggtgatttgagattagggtttatggatgggttcttggtggaatttatttataggtcatttggcctttagaatactattcatgtgcttcttgccacagcatttttagcttctttcactatctcatttaagcccttttgttagataaaggaaaactttttttttctttctttttgacagcgtttaaatttgtaggtgatttgaatttgaagtttaatgtcttaatttattctttatctgctattggtttaaaagttctttaggagagaaaatgacatcaaaaagggaaagggaagcggttgatagagtagaggatgaagggcttgataatgagtcgaaaagg

SEQ ID NO: 44264 - DNA, 386 bp, Glycine max
  Clone ID: LIB3093-013-Q1-K1-E2
cccacgcgtgcgattttcaatgggttcggaataggcgaacgggaaagcaggcgacgacacgaacaaataacaacgaatgactaaaacaaaccgaacttcatcgtcatcactcccttaatctccacactctggaagaaccaaattgcgaaaatgggattgattacggtggtgaaggagttgtggagggctttctttttcctttgctcactacaattctggagaatggcgttgctctggactttctctattctttattcttattaccaattgttcaaagattccttatcccattcccagtatttcaaacctctaattcctgagaaatgttccctcttctctcagaaactcgtgtcctatcccaggtgctcccctttcacaactacttt

SEQ ID NO: 44265 - DNA, 491 bp, Glycine max
  Clone ID: LIB3093-013-Q1-K1-E3
gaagctttaagttaggacaagctagaaggtacggatattaattttctgtacaattcacaagagaaatagcagtgccaagtgtaataatatgtacatcaagcatctaaaggctttcataaatcatctttaaattcctacagagggagcaaaaaagcaaacaagaaataacattttctagtcatcagccaaggaaacccttccagtttcatacagatgatacatccaaagaggttcaatcaactcctttgcataggttaatttctccagctcatcatcattttcttctgcaatttccctctctatcctgggaaatatttcttgcagagaagagagcatcatgtcacccaatcccggtcatcaggtttaaacaacttaagacatacaaaccacaagagtcctaatgccattccaaagtccttctggtctagcccaattactgaagaacccatgaaaattacaccgactgcattcattatactgggaattttttt

SEQ ID NO: 44266 - DNA, 467 bp, Glycine max
  Clone ID: LIB3093-013-Q1-K1-E5
caagtccttgctttgactttcctatttcaacctctcttgtaactcacactgcttttgctaggacaacttcaaacgtttagcttttgtcagtactttcaaatcaaaggaaactccttatactcaaaaagagtttgcaatggggttaactaggatgtgttattttggtagttgtcaagttcattccgtttgtaagagttagataccattttagaagctaattctcaagccatccgtaaaggaagttcttgcagttcacagtctatatttattgtatgatgtaacaatccatctgttgattttgcatgttatcagtcctccttcaattgaacctgttatgtttaggcatatatcagttgcgttttgatatgttcaattatggattcgttatgctgttcctcaacctactgtaactgtcctatgctacttagttaatctagtccctacttgggtcacctcatctttgattt

SEQ ID NO: 44267 - DNA, 346 bp, Glycine max
  Clone ID: LIB3093-013-Q1-K1-E6
cccacgcgtccggtactttggactcatgggtgatggccaacctattggacgatacgatgagatgtgggctggatggtgtgttaaggttatatgtgaccatttgggcttgggagtgaagactggccttccatacatctggcacagcaaagcaagcaacccttttgtcaatctcaaaaaggagtacaagggcatcttctggcaagaagaaatcattccattcttccaaagtgccactctttcaaaagagtgcacgtctgtccaaaaatgttacattgaactttccaagcaagtcaaggagaagcttggggcttgttgatccctacttcatcaagctagcagatgccat

SEQ ID NO: 44268 - DNA, 471 bp, Glycine max
  Clone ID: LIB3093-013-Q1-K1-E7
ggaatgggtggtggtggcggtggccatgatccatttgatatctggagttcattctttggtggaagtccgtttgggtcaggtggtagcagtagaggacggaggcagaggcggggagaagatgtggttcatcccctgaaggtctctctggaggatctttacctcggaacttcaaagaaactctctctttcacgaaacgtgttgtgctcaaaatgcaatgggaagggctcaaagtctggggcttcaatgacctgtgctggttgccagggtactggcatgaaggtgtctattaggcaccttggtccttctatgattcagcaaatgcagcattcttgcaatgagtgtaagggtactggagagacaatcaatgacagagacaggtgccaacagtgcaagggagagaaagttgttcaggagaagaaagtacttgaagttgttgtggagaaaggaatgcaaaatggacagaagattaca

SEQ ID NO: 44269 - DNA, 470 bp, Glycine max
  Clone ID: LIB3093-013-Q1-K1-E9
gggaactgccctaccctctttactttaattgactcacaacaagggcacaaaaaaaaaaatgaacaagtcttctggtgctgtttttctcgcacgctctcggcatacgatgttttcgtttcctaattagtagcagcgagattctgaggttgtcgtgaccaaggccatggaactgaaatttgttctctttctgctccttctgcttgctgttgctggttatggactcgcttccaatgcgacactgaacgagacttgtggatacttcgatggttctctcaatagggaccctaaagtgccttgtccaattggttggattatggaccctaacaagaccaagtgctttctccatgttgggaggcctcaatcttggaatgactcagagacctgttgtagtaagtatggtggacatttagtgtcattgacatcgcttccggagctacaatttgcccagggcctatgcggtgaatctataa

SEQ ID NO: 44270 - DNA, 501 bp, Glycine max
  Clone ID: LIB3093-013-Q1-K1-F1
cgaccgacgcgtccgcccacgcgtccggttggggtaggtggtggtggcgccgaaccgcaatggagaagccatcgtcgtcgtcgtcgtcgcgaagaaaatcgagcacgaaggtgaaagcttcaaccgatgcgaacacgaacctgagcatgctcaacgaggaccttctccagaacattctagcgaggcttcctgctctgcatttcgcttccgcagcttgcgtcagcaaatcatggaactctctctgcaatcgcatcctcactcgccccaaactctcttccgcgatttctctcaacccttcgctccccgatgctgtcaacgaggttgttcacaaggttctttcggagccaattcgaccccatgtcgctattgccaatatcggaactggattcagcactgccaagactttgtgccttaatagacagtcgttgggatccaatattcctgttattgttaccgttgcgagtggtattatgggaagggatgctggaaccgatgagttta

SEQ ID NO: 44271 - DNA, 494 bp, Glycine max
  Clone ID: LIB3093-013-Q1-K1-F12
tcgaccggcgcgtccgcttctgtgctgagacaacaatggcgatggctttcaaaatggccactactgggatgtgggtgagggatgagtgcaagggctctttcatggaaatgaagtggaagaaggttcatagatacatagtcttcaagatcgatgagaagtcaaggcttgtcaccgttgataaggtgggtggtcccggcgagagctatggtgatctcgccgcctccttgcccgacgatgattgtagatatgccgtattcgactttgatttcgtcaccgtcgataactgccgcaagagcaagatcttcttcattgcatggtctccaacagcatcaaggataagagcaaagatgctctacgcaacatccaaggatggtctgagaagagctctggatggaatcagctatgaagttcaagccaccgatccagccgagatgggattcgatgtaattcaagacagagccaaatagatgccccctttttttaaagtgggaatc

SEQ ID NO: 44272 - DNA, 460 bp, Glycine max
  unsure (1)..(460): unsure at all n locations
  Clone ID: LIB3093-013-Q1-K1-F2
cgaccgacgcgtccggaagaatacaggcataatatatgagtgtgttcagggcgaacttgaggttgtgaaagagattgctaacaaagtgatctctgataagaaagaagacagtgaaaaccaaaacaatgctgagaaactttcagatggggtgaatgagcgatatgcatttgtcaaagaaacttcaaaaatgccatttctaatgttaggattggacttgccaccacctgctcttttcaaggatgtgatggaaaaaaatataataccacaggttccactctntaacatactaaagaagtttgatggtgaaactgtcacggaggtggtccgtcctcatatagcaaggatgcagtatcgtgttaccagattgcccaagtatatgattctacacatgcgtcggtttactaagagtaatttttttgtcgaaaggaatcctacggtagtcaactttctgtgaagacct

SEQ ID NO: 44273 - DNA, 487 bp, Glycine max
  Clone ID: LIB3093-013-Q1-K1-F3
tgaaaatgatgcttctgtagtggatgctttgtctctaaaaagaatcactagaatacacaaggcgttggactcagatgatgttgagcttgttaaacttcttttgaatgaatcagacattactttggatgaagccaatgctctccattatgctgcagcctactgtgaccccaaggttgtttctgaggtacttggtttgggactggctaatgtcaatcttcgaaattctagggggtacacagtgcttcacattgctgccatgcgtaaagagccttccattatagtatccctacttacgaaaggggcttgtgcatcagatttgacttttgatggtcagagtgctgttagtatttggaagaaggttgacaagggccaaagattattatgccaaaacagaacatgggaaagaaacaaaccaagatcgggtttgcatcgatgttcttgaaagagaaatgaagaggaatccaatggctggggatgcctgtatgtc

SEQ ID NO: 44274 - DNA, 346 bp, Glycine max
  unsure (1)..(346): unsure at all n locations
  Clone ID: LIB3093-013-Q1-K1-F4
cgcctcgaccgacgcgtccgcacccctggagtnttgctcactatgttacctttctcttccttactgtatctgtgatctttggggaatctatttgcggtggtatcgcaaagtggagtcacttgtgcttgatcaactcccaaatggtcaatcctactacacttaaacactgttaccgacttcatctagctttagcccatcttcatatgttgggccattttttatctccttcaactcattatcaaatggttgcgatgtagaatcccttcttttctcatcaagaggcgtctctctggttcattagaaacacaatccccatttcttaagatgaaagattgctaaatgctta

SEQ ID NO: 44275 - DNA, 441 bp, Glycine max
  Clone ID: LIB3093-013-Q1-K1-F5
acgcccacgcgtccgcaaattcaacagttttttcagttttagacgctgaaaattcaacaaagaaggctacacacactgacacaaacaaacaccaagcttgaaccttccctccccatgtttgaattttgctctttcccccaactaacctttagcctccatttccccgaaaaatatccccgcggcgaactaaaccacttcaaatgaccaaaatgcccttcaccttcgtcaaatttccattccacatcctcctcttcctcgtcctctcgctgccctccccggtaatttcgcaggaccagcaaacaaccctcctgggcatcaaacgacaattcggtgacccttccgccctcgggtcatggaaatcctcgtcgccgccgtgcgcatggtcgtgaatccgatgctccggcggcttctgaacggagctccacctcgccgggaaaaaca

SEQ ID NO: 44276 - DNA, 470 bp, Glycine max
  Clone ID: LIB3093-013-Q1-K1-F9
caagattcagcaagtgcgttttggaagcagagaccgaaatacttcgagatggcccgtacaaagcgaactgctcgtaagtgaactggaggaaaagctcccaggaagcagcttgcaaccaaggctgcacgtaagtctgcaccaacaactggtggtgtgaagaagcctcatcgttatcgccctggaactgttgctcttcgtgagattaggaaataccagaagagcactgagctcctaatcaggaagcttcctttccagaggttggttcgtgaaattgcccaggatttcaagactgatctgcgtttccagagccatgctgtgcttgcattgcaagaggctgctgaggcataccttgttgggctctttgaggacactaacttgtgtgccattcacgccaagcgtgtgactattatgcccaaggatattcagctggcaagaaagattcgtggtgagcgtgcttgagttggtgcgtt

SEQ ID NO: 44277 - DNA, 411 bp, Glycine max
  Clone ID: LIB3093-013-Q1-K1-G1
cgaccgacgcgtccgcccacgcgtccgaagactgaaagattccatatcacaaatatattctaaacttgaggacataggggtatctgctgagtcagacctgcggcaccatgtttcccttgttgtccatcctatgcagcaggctctgaatgctgccttgttacactatgaggctgacatcaggaaaagaaatgcaagaggacagaagcctaacggttatgtttagttggagaatgtttcgctctctgcactgcgagcatcatactataacaatttaggaatgtatattccatcaattttgccgtgaacacaaacccgaatggccatttatatcgtgatgaaaaaaatgaatttccatgagaattagtcagcaacagtcttaattgatagttaacatgtaacgtagaattactt

SEQ ID NO: 44278 - DNA, 471 bp, Glycine max
  unsure (1)..(471): unsure at all n locations
  Clone ID: LIB3093-013-Q1-K1-G10
gtgctctctgtgtggtgtggtcgctcagtgtaacaacaacagcaacaacaacgaacgccagcgcanacgcaaacgggaataagagcgagaacattctcttcagctcaacccttttctttttcgatggctaatcggcacacgattattctaatgcagacctcgcagaacagagcaactaggacgttcatggattatgaatccataactcaggccatggatggcatatgtgcactgtatgaaaggaaactgaaggagttgaatccggctatcagaaatctctcttatgacattactgatctctacaacttcatagatggtcttgcggacatgagtgccctagtgtatgatagttcaattcacgcttacttgccgcatgatcgactgtggatcaagcaacgaacattccaacatttgaagaaattagcacactgattaacccctaaactattggcaatttaatgtaaagaaaat

SEQ ID NO: 44279 - DNA, 468 bp, Glycine max
  Clone ID: LIB3093-013-Q1-K1-G11
acttacccttaatagcacgcactctctgttctcatctcctctttgttgtagaagaagaacacacgcgtttctaatcatggttagacttgatctcaacgatgaaggcaacactgcttcgtccttgttctggtcctctgattctcgacacacatagcaaccgaacctcgtcaacgatgagacacgcttccaccgttgtttgttgctcatcgaagaaccaaccctacatcccgaagctcgagccttttagccgaaccaagtttgaaagggccgttaaagaccctcctttaatcgaaaaatctgagaaagagatcttagattattgttcaacgcttgaaggagaccaatcatatagctgctggcaagcttattttgagctgaaagatcttgaaaaagagtccccaagagcagacatagagaggctgattctggagactggtggtgtaaaatccctaataggatgcttgcatg

SEQ ID NO: 44280 - DNA, 373 bp, Glycine max
  unsure (1)..(373): unsure at all n locations
  Clone ID: LIB3093-013-Q1-K1-G12
aaaagaaaaaggaaagaaacagttttaacatataaagaacataaaaaatccaaatgatctatttntaggagatctgacgtggtttgaattttgctggcgttgatcgccgccgcttggtgtctgttaactccagcgagggcgaattcgacgacaatatatgaagagctccggacgcagggtcttccaatggggcttcttccaaagggaatagcgaagtactcgatgaacgcgactagcggggagttcgaagtgtggatgaacgaagcgtgcaacgctaaattcgagaacgaggtgcactacgactccaatataaagggtgttcttggctacggtcggatcggggaattatcctgtgtgtcggcacaagaactct

SEQ ID NO: 44281 - DNA, 355 bp, Glycine max
  Clone ID: LIB3093-013-Q1-K1-G2
cccacgcgtggcgccacgcgtccgctgatacttgctctggtcatagtttgctgtttttgtcagtgcttaagttctggcggcgataccattacaccaggccaattcatcagagatcctcacactctcacctcagctaatagtgccttcaagctaggattcttcagccctcaaaattcttcaaatcgctacctgggaatctggtatctctctgactccaatgtcatatgggtagctaacagaaaccagccactaaagaagagctcttccggaactgttcatatttctgaggatggcaatctcgtggtattagatagcaacaaaaaggctgtttggtcaacaaatttgacacataata

SEQ ID NO: 44282 - DNA, 458 bp, Glycine max
  Clone ID: LIB3093-013-Q1-K1-G4
gtccgcggacgcgtgggccgccaaatcaaataagatggatactgaaatcgttgagagcattgatgtgacagatgatgcaaggagttttagctgggcagtggacagcgccataaggagtgagactgggtccatttttggagaatctcgtgtccgtagctttgcttcgttagtggacagtgccataaggagtagtagtgctactgaagcagatttggaatcatcccctgtccaggcagaagacagggcgatgaggagtagtagtagtggaactgatttgggaacatccccttttcatgtttttgctacggcagcgggtatgaggactgttgctgacacccagagttaccgagaattatttaacctgttagagcttatactgataatacttttattgattaatgagtttgttaaacaagcttatgggattgtgttacgcatgaattaagaatgccatacac

SEQ ID NO: 44283 - DNA, 406 bp, Glycine max
  Clone ID: LIB3093-013-Q1-K1-G5
gatccactcttcggcctttcagcaggtgctcagctctagctcctcttctctcgtctcggatcttccttcaacgcataagctcctcaaatcggttcgttcggcttccggagaggtcgcttgtttcgtctgtgttgtcaatgtaacttaacgacgctccttggtgaggccactcaacgccgaaccgcaacggaacgattctattgttccttttgcagcaactatcgttgctcctgaggttgagaaagaagagtgagattttgagcaaatagctaaagaccttgaaaatgcatattctcttgaaaatatggatagggccctcgagaaatatgggaactacatcgctattgcatatagtggtgctgaagagttgctttgattgagatgcacatttgacgggtcgacccta

SEQ ID NO: 44284 - DNA, 281 bp, Glycine max
  Clone ID: LIB3093-013-Q1-K1-G6
acttactggactgttgcaagccatctgcgtctaagatcttgctgggttacaaatttaggtgggcaacgtcatcggggagtgaagtgatattcacagatgcattgaggagacagctctgaatattcctctaacatgatcctaatagctatatatattgtctcacttggagcactgagaagcccacagctcttaatgctaagatggactgtgaacagaacactgagcttactatacacaactttgatgtcctgttgaatctacccttgtttgtacatgtaatt

SEQ ID NO: 44285 - DNA, 420 bp, Glycine max
  Clone ID: LIB3093-013-Q1-K1-G8
ctcacctttctcctaaaacatctccagtgggttcttcttcttgtattacaacaacgtcgggcaagaccatgaccatggccatggccacgatcctgctcctgttcacggtcttcgcggtttcatcggccctagacatgtcgataatctcgtacgacaacgcccacgccgccacgtcgcgcagcgacgaggagctgatgtccatgtacgagcagtggctagtaaagcacggcaaggtgtacaacgcgctcggagagaaggagaagaggttccagatcttcaaggacaacctgcgattcatcgacgaccacaactcccaagaggaccgaacctacaagctcggactgaaccggttcgcggatctcaccaacgaggagtacagggccaagtacttgggaaccaagatcgatcccaaccggatgc

SEQ ID NO: 44286 - DNA, 343 bp, Glycine max
  Clone ID: LIB3093-013-Q1-K1-G9
tcgagccgcgcgtcagggaagctggaggaattaggattaggttttttattgggtgaaaaaatggtgggaggttctgttggagtaatatcatccgcttgatattaattgtggtaattttaggtttggaatatgcgttgtggtttgagcatatgttactgttatggttggttggtttccgtgttactcctgtcctgtggttctcgtttttgacctctgataatgaatctgtgttcttgaaggaatgaaatgaatggcaagaaattatgatcctaagatttttacaaaaaaaaaaaaataaaactttaaaataaaaaattaaactaaaattgtgtaactttaaaaa

SEQ ID NO: 44287 - DNA, 371 bp, Glycine max
  Clone ID: LIB3093-013-Q1-K1-H1
cacgcgtccgagccactctctccgtccggcccgaccgtctctcgcccggttcggtgtttcccagggcaccggttcaggctccgctgcgaaaaccaatcgcggcgcccgagccgtggcgcgccgcggcgccgcggatacgcatcaggacggtggcgccggtccaggcgagctcgcgcgccgatgactccgcgccgttcgagatgtcggtggagaacgcgctgaagctgctgggcgtgtcggagggcgcttccttcgacgacatacttcgcgccaaaaacgcaatcgtcgccaattgcaaagatgaccaagatgccattgctcaggttgaggctgcatacgacatgttgcttatgcagagcctaactcagcgt

SEQ ID NO: 44288 - DNA, 205 bp, Glycine max
  Clone ID: LIB3093-013-Q1-K1-H11
cccacacgatcgaccatgcgctccgtcattgatgatctcaacgctcctctctcgatcgcttctttctgcttgcgctgactactcctttgttttctagaggcggaagtggtgctcttggtgcatggctcagtaaattcagcactgctgctgccattgaagaaccaattaaaccaccacttaaagttgaacacacccagctcttaat

SEQ ID NO: 44289 - DNA, 466 bp, Glycine max
  unsure (1)..(466): unsure at all n locations
  Clone ID: LIB3093-013-Q1-K1-H12
cgcgtacgctaacgcccgaccctgttcccctctcgtatccgtcatgaaaggaggaaagtccaagaccgaagctaagagagccgagggcaaacttgctgtgaataagaagggagccgccaccaaggctaggaaacccgccggcaaggggaaggcagcgaaagaccctaacaagccaaagaggcctccaagtgctttcttcgttttcatggaggagttcaggaaggtattcaacaaagaacatcctgaaaacaaagcagtgtctgctgtgggcaaagctgctggagcaaaatggaagaccatgtctgatgctgaaaaagcaccttatgtggcaaagtctgagaaaaggaaagtggagtacgagaagaacatgagagcctataacaagaaacaggcggaaggtcctactggtggngatgaagaagaatctgagaagtctgtatctgaagtgaatgatgaagatgatgat

SEQ ID NO: 44290 - DNA, 475 bp, Glycine max
  unsure (1)..(475): unsure at all n locations
  Clone ID: LIB3093-013-Q1-K1-H3
cgaccgacgcgtccgcccacgcgtggggngcactgtttgaaagggctgttagtctgagcctgccaccgaaaaagaggaagttcttattcaaaaggtatctttattatgagaagtcccaaggtgatgaagaacggattgaatctgtgaagaggaaagcaatggaatatgtcgagagtactagggcttgatataaattcaccactgctttagttttgaattcttcaacttgcagacactctggagtctaagctggatatcttaagaccaagctttgtgttagataaggcatgacaactaaacagtacatgttttcccaaatcacctggagacagtatttgatcttggttgcctctgtaaatggagtggttctaacactatgctatagtgtgctgctaagtgctagtgggctttgtacagcataaggtgagttgtgaatgcgtcaaatgagcacgagaaaacctttgagatgaaatat

SEQ ID NO: 44291 - DNA, 483 bp, Glycine max
  unsure (1)..(483): unsure at all n locations
  Clone ID: LIB3093-013-Q1-K1-H4
gccacgcgtgcgagaaaataagggaaagcttttgcgcttaaggccaacatctgctgatgtagtttatagtgaggtcaaggaaggtgagttaattgatgacaaatcaactcaactcanagatgttggttctgtgtcacccatatctctggcccgaaagaagtttagtggtagatatgctgtctcatctgaagaattcactggtgaaatggttggagctaaatctcgtaatatctcttatttaaaagggaaagtagcttcttggattggaattcctacctcgggtgccataccatttggagttttcgaacatgttctttctgataaaccaaaccaggcagtggctgagagggtcaataatttgaaaaagaagtagattgagggagacttcagtgttctcaaggagattcgtgaaacagttctacaattgaatgcacccatccatttggtagaagagttgaaaactaaaatgaagagttctggaat

SEQ ID NO: 44292 - DNA, 351 bp, Glycine max
  Clone ID: LIB3093-013-Q1-K1-H6
agcctacgtcgtggccgtgtcggcgtatgacatgcaccgcaagacgctcgcgcagctgctggagttcgcgcgcacggtcgagagggaggctgacggcggcggcggttccgacaccgaaccgcctacggcgcatttgaagaagcgccttggcagctccaggaggcgtggcaacggcggatatcggcgtggctccgcgtcgctgccggacgtcacggcgatctccggcgggttcgacggggaagagaagcggaacgggccagtgcacgtcgacgggattcctgtggggttgccaaggttgcacacgcttcgtgaaggaaaatcatctcaatctggttcctttaagagaagtct

SEQ ID NO: 44293 - DNA, 403 bp, Glycine max
  Clone ID: LIB3093-013-Q1-K1-H7
cccattttcaaccacatgaccactatggagcctaagttccctgtgaaccatgcaactacaagatatggaggagcaccaaatttgggttattgcttagaccctttatcttgtgacagaaaaatgttaaaagctgttttgaatcaaatcacaaagatggaaaggaatccacttaaccaaagtctaaaagggtcaccaagcttaggagaaggaagttcagagagttatttatctgaagtggggatgccccacgtgtggaattactgatgtgagactttagtacttaaaccctctccttcacctatgccaccatgaaattttttttttaaaaaaaaaacaagaaaaaaaaagggataagggggaagataaaatcaaaccattgttttaagtcatggtgagtacttat

SEQ ID NO: 44294 - DNA, 355 bp, Glycine max
  Clone ID: LIB3093-013-Q1-K1-H8
gcgtccgcttaccttgcactttgttgcctgggtgtgttatctagactctgggaacgttagactgagagtggaacgtgaggttcttgatagtatcattaataggctgcttgaagtcagaggcagaccatggaagcagaggcaactttctgaggctgagatcatgcagctatgtcttgtctccagggatatcttctggaggcagccctacctcttggaactcgaggcaccaattaagatctgtggagatgtccatggtcaatattccgaccttatgcgactgtatgagtatggtggattgcctcctcgatctaattacttgatagtaggagactatgatgatcgtgggaagcaaagt

SEQ ID NO: 44295 - DNA, 488 bp, Glycine max
  Clone ID: LIB3093-013-Q1-K1-H9
gtcgacccgcgcgtccgcccacgcgtacgcccacgcgtccgcggacgcgtgggtttgccttgtgccgtttgcgttgttatgggtacgaacatgagggtggtgtcaggttctggaatctgctcaaagcgcttggtggtggacgcgcgccaccacatgctgggtcgtctagcctccatcgtggcgaatgatcttctgaacggtcagaaagtggaggtcgttcgctgagaagagatttgcatctcggtcgggctgatgatgcagatgatgaaatactcgaggttccttcgcaaacgcatgaacaccagaccctaccatgggcccattcacttccgagccccctccaagatcgtttggcgcaccgttcgtggaatgataccacacaagacaaagcgtggggaagctgctctcgctcgtttgaaggctgatgaaagaatccctacttcatatgacgagaccgagagaatggatgttcctgatgcactcaatgt

SEQ ID NO: 44296 - DNA, 388 bp, Glycine max
  unsure (1)..(388): unsure at all n locations
  Clone ID: LIB3093-013-Q1-K2-A1
ccacgcgtncgcacaaattttatgtgattagtcgcggtatttaaaataaaaaatgaaagtagacaaataaaaaaggaaaggagatgtttgaataaaaataattccccttcaagttcttattttttgagaggacaggacaatatgaatgttttattatgctctatcaacacattaaaaagattatatgatatatctgctgtggaagtaggtcaacatttctattggcaaatagggagtttccaagtacatgcccaagtacttattacttcttgggttgtaattgctctcttattggtttcagccattctaattattcgaaatctgcaaaccattcccgctttcggtcagaatttctttgaatatgttcttgaattcattcgagacgtga

SEQ ID NO: 44297 - DNA, 419 bp, Glycine max
  Clone ID: LIB3093-013-Q1-K2-A10
aaattggagagagatcaagattctaatttgggttcttagattacatagtttttgtgagagtgagtgatagttttttttttttttttatatacaaatataacgaattgagtgctgaggaaaaaaaatgtctgccatggtagaggggtggaagggggagctgacaaagctcagagagaaagttgtcatggcccggaagagcctcttttccaaaggcaaagaggggtcagaagaagaagaaagagtcgtggagaaggaggctcacaaggctatcatggctgttcagagagacagcactcatgaaaccatgtcagaggcaacagtgtgtttgcttatggatagatttgtgccatgctgacgcatgtgcatgtgtgtgctaagtgctcaaaatgtggtgtttattatatattgtggacgattta

SEQ ID NO: 44298 - DNA, 360 bp, Glycine max
  Clone ID: LIB3093-013-Q1-K2-A11
cgctattctactcgcaagcatttcatatcaagagaagagaatggcaggagcagaggggctaaacagagaacagtacgtgtaccttgcgaagctgtcggagcaggcggagcggtacgaagagatggtggagttcatgcagaaggtggtggtggggtggacgccggcgtcggagctcacggtggaggagcgcaacctcctctcggtggcctacaagaacgtgatcgggtctctgcgtgccgcgtggcgcatcgtgtcctccatcgaacagaaggaggaagggcgcatgaacgacgaccacgtgtccctcgtgaagcactacagatccaaggtcgagaacgagctcacgcatgtctgcgccag

SEQ ID NO: 44299 - DNA, 406 bp, Glycine max
  Clone ID: LIB3093-013-Q1-K2-A12
cccacgcgtccgcccacgcgtttgcataatttaagcaagaaaaggacagagaattaggcttgtttgcaatatttgatggccacttaggccatgatgtagcaagctatttgcagaaccaccttttccaaaacatcttgcaacagcatgacttttggactgagacagaaagcgcagtgaaaaaagcttacgttgaaacagatgagaaaatattggaacaagaacttgtgttggggcgaggagggtcaacagctgtgactgcaatacttattgatggtcagaagcttgtagtagcaaatgttggtgactcaagagctattatctgtgagaatggaaaggcaagacaactatcagtggatcatgaaccaagcaaggaaaaaaaatcgattgagaggcgtgggggttttgt

SEQ ID NO: 44300 - DNA, 433 bp, Glycine max
  Clone ID: LIB3093-013-Q1-K2-A2
aatttgaaggcagaggtggcaaggggagcaaaacttaaatgcagtaaatgtaatctaaagggagctgctcttggttgctatgtcaaatcctgtagaagaacgtatcatgttccttgtgcaatggacatctcagattgccgttgggatcatgaggattttctcttgctctgtcctgtccattcaaatgtcaaatttccatgtgagaaaatcaggtccaagaaaaaggcaacacagaagcatcccactttttctcatctgccatctcatcactcaaatcgtcttgaagcttcccaggatgctagtaaaaaattggtattttgtggatctgctctatcaaatgaagaaaaggtatttttgatcaattatgcaagcaaggttggtgctactgtgaccaagttctggacctcaaatgtcacccatgtaattgcagcaa

SEQ ID NO: 44301 - DNA, 398 bp, Glycine max
  Clone ID: LIB3093-013-Q1-K2-A3
atactttatataagtggactatttataaatccaatacaaggttgaaattctaggattaatattcatgttggcggtgtcacctttgaggagcacaagagatgaagggcaaggagagatgatggagagtttctcgattggaaccgatgattttgctgacctttcagaagggaacttgcttgaaagcatcaacttcgatgatctcttcatgggaatcaatgacgatgaagatgtcttgccggatctggagatggaccctgagatgcttgctgagttctccctcagtactgaggaatcagatatggcctcatcatcagtttcagtggaaaataacaacaaatctgcagataacaacaacaacaatgatgggaataatatagttactactgagaaacaagatg

SEQ ID NO: 44302 - DNA, 387 bp, Glycine max
  Clone ID: LIB3093-013-Q1-K2-A4
cccacgcgtccgtgggttcactagaaagaggcacaactgttataattgtggacttgtgcactgccattcatgtagttctaggaaagcattaagagctgccctggctcctaatcctgggaagccatatcgtgtttgtgattcttgttttgtaaaattgaacaaggttgcagaattgggcaacaataatcggaggaatgctatgcctcgtttgtcaggtgaaaacaaggacagattagagaagcctgagctaagattgaccaagacagcagtcccttctaatatggatttgataaagcaacttgatagtaaggcagctaaacaggggaagaaggctgatacattctctctggttcgcacctctcaaccacagtctttgctacagctcaa

SEQ ID NO: 44303 - DNA, 373 bp, Glycine max
  Clone ID: LIB3093-013-Q1-K2-A5
aaaatgtggaagagaacgggttttgtataagaagcagttcaattgatcaactcagatttcagggacctaagtctagctgctaatagactcgcccatcatgccatcaaacttggtggcattggctttggagcctcttttttcggattgtttgctgccattgctgctatttatctgttgattttggatcgtacaaactggaaaacaaatattctcacagcactactcattccatacattttcttcagcttgccttcattaattttcgacgtcttcaggggagagcttggaaaatggattgctgcagttgctgttgtattacgccttttccttccaagacacttccctgattggctggaattgcctggtgctctga

SEQ ID NO: 44304 - DNA, 294 bp, Glycine max
  unsure (1)..(294): unsure at all n locations
  Clone ID: LIB3093-013-Q1-K2-A6
tcgcccacgcgtncgatgccacctgatatataggcatattagctagttaggtaggtatagtagtttaagttaattcaaccatggaagacagggatcactgttgttccaacatttcaacgatgatcacaacaccaaagaaaagaacgggtagaagaagtccaacatcggataagctcaagaatcaacaccgcgagaagcagtcgatgaaaccttaccgtggaataaggatgcggaagtgggggaagtgggtggcggagatcatagaacccaccaaaaggtcgaggatatggttgg

SEQ ID NO: 44305 - DNA, 380 bp, Glycine max
  Clone ID: LIB3093-013-Q1-K2-A7
acacgcgtccgcacaaattttttgtgtttagtcgcggcatttaaaattaaaaatgagagtagacacataaaaaaggaacggagatgtttgaataaaaataattccccttcaagttcttattttttgagaggacaagacaatatgaatgttttattatgctctatcaacacattataaagattatatgatatatctgctgcggaaagaggtcaacatttctattggcaaatatggagtttgcaagcacatgcccaagtacttattacttcttgggttgtgatagctctcttattggtttcaaccattctaattattctaaatctgctaaccattcccgctttcggtcagaatttatatgaatatgtacttgaattcattcg

SEQ ID NO: 44306 - DNA, 397 bp, Glycine max
  Clone ID: LIB3093-013-Q1-K2-A8
gcctctccctctacgatatcgccggaactcccggtgtcgccgccgatgtcagccacatcaacaccggatctgaggtagtggggtaccaaggtgacgaagagctcggaaaagctttggagggtgcagatgttgttataattcctgctggtgtgcccagaaagcctggaatgactcgtgatgatctttttaacatcaatgctggcattgttaagacactgtgtactgctattgctaagtactgccctcatgcccttgttaacatgataagcaatcctgtgaactccactgttcctattgctgctgaagttttcaagaaggcaggaacgtatgatgagaagagattgtttggtgttaccacccttgatgttgttagggcaaaaactttctatgctgggaa

SEQ ID NO: 44307 - DNA, 424 bp, Glycine max
  Clone ID: LIB3093-013-Q1-K2-A9
gcctacgcactgcggagagagaaatttattttccgagataaccagttttctggtttgattcatcaatggcaactgcgaggaccgtgaaggatgtttcgcctcacgatttcgtgaaggcttatgcttcccacctcaagcgttccggcaagatggagcttcctgagtggaccgatattgtaaaaacagcaaaatttaaggagttggctccatatgatcctgactggtactacattagggctgcctcaatggcaagaaagatctatttgagaggtggtcttggtgttggtgctttccagaggatctatggtggaagcaaaagaaatggaagccgtcccccacatttctgcaagagcagcggtgcaattgccagacacattctgcaacaattgcaaaacatgagcattgttgagattgatacaaaaag

SEQ ID NO: 44308 - DNA, 378 bp, Glycine max
  Clone ID: LIB3093-013-Q1-K2-B1
tcggtgatgaccaacaaatacagtgaggggtactttggtgcaagatattatggtggaaatgagtatattgacatggctgaaacactatgccaaaagcgtgccctggaagcgtttagattggatcccgctaaatggggagtgaacgtgcagcctctgtcagggtctcctgcaaatttccatgtctacactgcattgcttaaacctcatgaaagaatcatggcacttgatcttcctcatggtggccatctttctcatggatatcagactgataccaaaaagatatctgctgtctcaatattttttgagacaatgccatatagattgaacgaaagtacgggatacattgactatgaccagatggagaaatcagcaacactt

SEQ ID NO: 44309 - DNA, 415 bp, Glycine max
  Clone ID: LIB3093-013-Q1-K2-B10
ggaaataaagattaggattaggtgttgcgcagtcgcaggcatggccatggctttggtgagcctcaacaccattcatacatcgccttcttctttttcgttttcatctcccaaaccttattcttcctccaactatgcaccacctctcaccctccttccacgatttcggaggcacctcgttcgtatggctcccgacgaggagaagatgactcgccgttcccctctcgatttccccatcgtatggtttccctaatcaaattcattctaagcttattttttgtaattttactttcagtaagtgctgcgaatttggattcggattcgccgtcaccctgctatgtttattgcctgattacctcaattctttgttgaaggataattgatttactgttattacatttccttgcttctaactaaa

SEQ ID NO: 44310 - DNA, 402 bp, Glycine max
  Clone ID: LIB3093-013-Q1-K2-B11
gtctgggcagaggttttcttctaccttgctgagaacaatgtcctttttgagggtattctccttaagcctagcatggttacacctggagccgagtccaaggacaaggccagtcctcagacagttgctgattacaccctcaagctccttcacaggagaattccccctgctgtccctggaattatgtttttgtctggtggacagtctgaggttgaagctaccctcaatttgaatgccatgaaccaatctccaaacccgtggcacgtgtcattctcgtatgccagagccctccaaaacactgccttgaagacatggggaggccgcccagagaacgtgaaggcagcacaagatgcactcgcattccgtgccaagtccaactcactcgctcagcttgggaagtacact

SEQ ID NO: 44311 - DNA, 396 bp, Glycine max
  Clone ID: LIB3093-013-Q1-K2-B12
cccacgcgtccgcgcagtgactaaaccaaacctctcactcgccgtcgtagggtttctcctttcgtttagcaacaacaacaatggttgcagccaagaaaaccaagaagacccatgagagcatcaacaacaggctcgctcttgtcatgaagagtggaaaattcaccctcggttacaagacggttctcaaatcacttaggagctccaaagggaaattgattatcattgctaacaactgcccccctttgaggaaatcagagattgaatactatgctatgttggccaaggttggagttcatcattacaatgggaacaatgtggatttgggcactgcatgtggaaaatattacagagtgtgctgccttagcattattgatcctggtgattctgatatcatca

SEQ ID NO: 44312 - DNA, 362 bp, Glycine max
  Clone ID: LIB3093-013-Q1-K2-B3
cccacgcgttcgcaacaacacgtggtgccgtttctggagccgtggtggcggtggtgccggtgccggtgccggtagaggggtggtggtgaaggcggagaaagtctgtaattattggattcaggggaattgtagttatggagagaggtgcaagttccttcacacttggagtgtgggggatgggttttctttgctgacccagcttgaagggcatcagaaggctgtgagtgcaattgcctttccctctggttcagataagctgtataccggaagcactgatgagactgcaaggatttgggactgccaatctggaaagtgtgtaggtgtgatcaatcttggtggtgaagtaagttgtatgatcagtg

SEQ ID NO: 44313 - DNA, 420 bp, Glycine max
  Clone ID: LIB3093-013-Q1-K2-B4
cctttcgctacttgcttcacctttcttcataggaagaccaaattcttcctcaacaaaccaagaatcaaggagatgatgggtgcatgctgcaagagaagacaatccaacataaaattattctcttcaagttctgacctgtcaacctcttctttccttcacatgaagctctccactcagtttcatcaagttttcaagcttattgacactaatggggatgggaagatctcaatcaatgagctcagtgaattgctctcaagccttggatacaacaagtgcactgctgtcaaggaagctgaaggcatggtgaaagtgttggacttcaatagagatgggtttgtggacttggatgagttcatgattgtcatgaatggcatggaagaagaaaaagaagagaaatttggaagtggcatggagcatgat

SEQ ID NO: 44314 - DNA, 257 bp, Glycine max
  Clone ID: LIB3093-013-Q1-K2-B7
tcggtgattaccaacaaatacagttattgtgtccctggtgcaagatattattggggaaaggtttttatggacgtggcgtgagacactattccaaaagcgtgccctgtaagcgtttaaattggatcccgctaaatggcgaatgaacgtgcaacctcttgtcattgtcttctgcaatattccatgtctacactgcattgatttaacctcatgaaataatcatggtacttgatcttcctcatagaggccatatttcttat

SEQ ID NO: 44315 - DNA, 420 bp, Glycine max
  Clone ID: LIB3093-013-Q1-K2-B8
ttgatcttgatgagcctgtagcagatgatttgatggggttttatgagcggatgggtgatacacttgcacatcagtatggtggttctgctgcacacaacaagattttctctgagaggaggggccagtggagagctgcaacacagtctcaggagttttttaggactcttcaacgctattatagcaatgcatacatggatgctatgaaacaggatgcaatcaatgtattcctggggcattttcagccacaacagggcaagcctgctctatgggagttgggttcagatcagctctatgatgcaggaagacatggagatgatgatgcaaggtcatttttcaaaagatccttctcagatggaaacattcttaatgaaagttctacaccgatgtcagcccccaatgccaagcacgaaaaaattccca

SEQ ID NO: 44316 - DNA, 421 bp, Glycine max
  Clone ID: LIB3093-013-Q1-K2-B9
cccacgcgtccggggcgggtttggttcagtttttaagggctggattgatgagcattcacttgctgctaccaaaccaggaataggcaagattgttgctgttaagaagcttaaccaagatgggctccagggtcacagagagtggttggctgaaataaactatcttggccaactacagcatcctaaccttgtcaagttaataggatactgctttgaggatgaacatcggcttctggtttatgaatttatgcctaagggtagcatggaaaatcatctattcagaagaggttcttactttcagccattctcttggagtttgcgaatgaaaatagcactaggggctgcaaagggtcttgcttttcttcatagtacagaacataaagtcatataccgtgattttaaaacgtcaaatatcctactcgat

SEQ ID NO: 44317 - DNA, 379 bp, Glycine max
  Clone ID: LIB3093-013-Q1-K2-C1
gtctgagtggtggaagtgatgctgagggtggcgctgcgatggaactcgatttggaggccaatggcttctctgccactaactcccttcacatgccaaaatctccacacgctaaaccctatgcctcgatgtcgcaccttcaagcttttttgtcgaccttcttcttccgccgtcgcgcacacctcgcctcctctctccggcgacctggaccgctacctccgctgctccatgccgcagaactcgccgctccgagtcgcggttcttgtcagcggaggcgtcgatagcagcgtcgctctccggctgctccacgccgctggccactcctgcaccgctttctacctcaagatatggttccaagaagatttcgagaacttttggtctg

SEQ ID NO: 44318 - DNA, 390 bp, Glycine max
  Clone ID: LIB3093-013-Q1-K2-C10
gaaaattaacatatgtgaagttgctttttattcaagcttctcgaacgtttactggagcctagacatgcttctcggtgttcttacctgtgaagattccaattcagtttttttaccttcaatttttccgccattttgctctttgttcagttgttgtttttccttctgaggcttatttgtgtggcttatcagattctggctcattttgcatgtgctatttaccttcaaagttgtatgttgagtgaattcttttctgggttttctctgttgcttcatctttttgttcttttgggttgcttaaattttgaaactttttgcactttcgatttccatatgcatttggggcattactattcactacatatttattgttttcttttttctaatgggaat

SEQ ID NO: 44319 - DNA, 357 bp, Glycine max
  unsure (1)..(357): unsure at all n locations
  Clone ID: LIB3093-013-Q1-K2-C11
gtcttttttttactctctctctgtctctctctaccttttcgtcgagatccctcagggatccactaactgaaggagaaatggggttgacattcaccaagcttttcagccggcttttcgccaagaaggaaatgcgaattctgatggggtctcgatgcactggtaagaccaccatcctgtcaagctcaaacttggagagacgntccacaattcccaccattgggttcaatgtggagactgggaatacaagaacattatttactgtctgggatgttggtggccaggacaagattcgtccttgggaggcctacttccaaaacacaagggtctcatttttgtggttgcagcaacgcagggaca

SEQ ID NO: 44320 - DNA, 423 bp, Glycine max
  Clone ID: LIB3093-013-Q1-K2-C12
cccacgcgtccgcgcgctcgttcccgccgtcgtcgaccgcctcggcgacgccaagcagcccgtccgcgacgccgcgaggcggctccttctcactctcatggaggtttcatctcctacaataattgttgaaagagcagggtcctttgcatggacaagcaaaagctggagagtcagagaggaatttgcgcgaacagtcacatctgcaattggtctattttcatctactgagcttccccttcaacgtgctattcttcctcctattttgcagttgctgaatgatctgaatcctgctgttagggaaacagctattttgtgtattgaggaaatgtatacacaagctgggtcccaatttcgtgatgaacttcagcgccacaatctcccttcatctttggtgaaagctattaatgccaggctagagggaat

SEQ ID NO: 44321 - DNA, 311 bp, Glycine max
  Clone ID: LIB3093-013-Q1-K2-C2
cctattctcaagtttctctctgtttcttcctacttcatgctatagcacttacaatactcaacaataacctaaccaaaccaaaccaaaccaaaacccttatctggactcacttcacacaaaccaaaggtaattaattaccaacacaaaatgggtggggggtggggcacaaaccaaaccaccacattcagcgactctcttttcgttccgccggccaaccgcgtcggcagcgttgcaagcgccgtcgtcgaccccgacgggtggtgcgtttccggcgagggcgaatcccggaaactcccttcgtcgaaatacaa

SEQ ID NO: 44322 - DNA, 381 bp, Glycine max
  Clone ID: LIB3093-013-Q1-K2-C3
cggacgctgggccgccacaccacagtccatccgacaccagatccttccaccaagctcagttacaaatgctccgtttgcgacaagagcttcccctcttaccaagcgctcggtggacacaaggccagtcaccggaaactcgccgccgccgccgaagaccaaccccccagcaccaccactttctccgccgccgccaccagctccgtctccggaggtaaggcccatgagtgctccatttgccacaaatccttccccaccggacaggcccttggcggacacaaacgttgtcactacgaaggtaacggtaacggaaataacaacaacagtaacagcgttgtcaccgtcgcctcggaaggcgtggggtccacccacactgtcagtcac

SEQ ID NO: 44323 - DNA, 393 bp, Glycine max
  Clone ID: LIB3093-013-Q1-K2-C4
cccacgcgtccggtttgacatgctactaagacaatctcttcgcccagatcacataaaaatgtttgttttggatgaggctgatgaaatgctttcacgtggtttcaaggaccagatctatgacatcttccagctactgccaggtcaaattcaggttggagtgttctctgctacaatgccacctgaggccctggagattacaaggaagttcatgaataagccagtgagaatcctggtaaagcgtgatgaattgacgcttgagggtatcaagcagttttatgtgaatgttgataaggaagattggaaactggagacattatgcgacctttatgagactttggctatcactcagagtgtcatctttgtgaacaccaggcgcaaggtggactggctcac

SEQ ID NO: 44324 - DNA, 379 bp, Glycine max
  Clone ID: LIB3093-013-Q1-K2-C5
cacaaacccgtccctcacactctccataccctagcggcactacacactagttctatcgctatctccccaagatgtcgagcgccgatcccgagcacagagaagaggaggaggcacccgccgttggcgacgacgaggacaccggagctcacgtcgctccaatcgtcaagctcgaggaggttgctgtcaccaccggcgaggaggacgaagatgcaatcctggatctcaaatcgaagctttaccggttcgacaaggacgggaaccagtggaaggagcgtggcgccggcactgtgaagttcctgaagcataaggcttccggcaaggttaggcttctcatgaggcaatccaagacgctcaagatctgcgctaatcatctcatttt

SEQ ID NO: 44325 - DNA, 399 bp, Glycine max
  Clone ID: LIB3093-013-Q1-K2-C6
cccacgcgtccgttctggagctcagggcaagatcaccgctgcttccgggcctcctcgtgacgctgatgattcattttcaaaacctgtatctggttctgatgaaccgcagcagggtggttggtttcagacttttacaattgctgcttacaaaccatactttgatgttgacacttcagatgttctagagaggattatcgactcactatttccatttagaggatctttcaatgaaaaaactgctaccaaccctgatttgtatggtccattctggatttgcactaccttgatatttgtagcggcatctattggcacctttgtgacatatatagcgcacaagctaaagagcaaagaatgggattatgacataaatctggtgacttggtctgctggtttggttta

SEQ ID NO: 44326 - DNA, 365 bp, Glycine max
  Clone ID: LIB3093-013-Q1-K2-C7
gggaattggctttggaacagactatgtaatgacataacctcactctttgaaaagcatatctgctggttctgatgttaataagccatctctgattgaatccccatcatcccgagaaaagcatagctgttctaattggtttccaagtaccccgaatggccaagacaagcatggttttactctggatgatgcatctgcaaatgagaagggaacatggcagatgtggagtacttctccacttgggcaagaaggtttaggtttagttggtggcgcaggaagctggctgttatcctcacaaaggatcataccaaacaatgatgattttgtgctttcttcatctcagaagactatggctcctctttttaaca

SEQ ID NO: 44327 - DNA, 400 bp, Glycine max
  Clone ID: LIB3093-013-Q1-K2-C8
agatatctatttagatctcagaaaaacagtgtttcatttcaattcattcagtcttattattattagggtttggcgattcagagagaaagagaaatgggagaacgaaaaggaatcccaattgctctggggctcttggcgatgctcctcttcttcattgcttcttcctcttcctctcacctcgttcgtgcttccgatgacgccgacgacgcgatcttctacgagtcattcgacgaggattttgacggacggtggattgtgtccgacaaggaggattacaacggtgtctggaagcatgctaagagtgatgggcatgatgattatggacttcttgttagtgaacaagcccggaaatatgctatagtcaaaaaacttgacgagcctgtcagtcttaaggatggaa

SEQ ID NO: 44328 - DNA, 417 bp, Glycine max
  Clone ID: LIB3093-013-Q1-K2-C9
aaaaatgtttgctagtggaagtgatgtctgctctgtcaaactgtggagtatgagcgagagaaattctctgggaaccatctggaaacctgccaatatatgctgtgttcagttctctgcttactcaacaaatcttctattttttggatcagctgattacaaggtttatggttatgatcttcgtcacactagaatcccttggtgcacattagctggtcatggcaaagctgttagctatgtaaaatttatagattctgaagcagttgtctctgcttccactgacaactctttaaagctttgggacctgaacaaaaccagctcttctggtttgtcatctgatgcttgggccatgacctttaaaggtcatagtaatgaaaagaaattcgtgggattatctgttttggatggatacattgcatg

SEQ ID NO: 44329 - DNA, 371 bp, Glycine max
  Clone ID: LIB3093-013-Q1-K2-D1
cgagatcatagtatcatattcaatatcatttcataccaaacacatggctttggaagctctcaactcaccaacaacaaccgctccatcttttccctttgacgacccaactattccatgggcgaaacgaaaacgttcaaagcgttctcgcgaccatccttctgaagaagagtacctcgccctctgcctcatcatgctcgctcgcggcggcaccaccaccgtcaacaaccgccacgtcagccctccaccgccacagccacagccacagccgacaccagatccttccaccaagctcagttacaaatgctccgtttgcgacaagagcttcccctcttaccaagcgctcggtggacacaaggccagtcaccggaaac

SEQ ID NO: 44330 - DNA, 427 bp, Glycine max
  Clone ID: LIB3093-013-Q1-K2-D11
gttttggttccgcagaagattctgaattctgatgctctagtgcgattccatgggagaggtggtcatcatgagtggagagaagaagtcagttagagtggagggggtggagaaggaagatagtggtggaagtgggagcaaggctggtgaatttaaggggttgatgaggtgggagaagttcttgcccaagatggttttgagggtgctgttggttgaagcagatgattccacaagacaaattattgccgcgcttctcagaaaatgcagctacaaaggttatgtgatggggatctgggttcaatgaaagtctaaggatctaatggctcctttccacttgctttaagagtcttggcagtctggaaactacaggcttacatgatagtgatacaattattttcttacatgatatgattattttcagttgtctatt

SEQ ID NO: 44331 - DNA, 363 bp, Glycine max
  Clone ID: LIB3093-013-Q1-K2-D12
tgaaaagtttgattcttcgataacaaaagactatgattttcaccttcttgatggccgttcaatcagggttcccttcatgacgagcaggaagaatcagtttattagggcttttgatggtttcaaagtccttggtcttccctacaagcaaggtgaagataagcgccaattcaccatgtactttttccttccagaaacaaaagatgggctgttagctttggctgagaagttggcttctgaatctgggttcttggaacgcaagcttcctaataacaaattggaagtaggagacttcaggatcccaagattcaaaatttcttttgggtttgaagcctctaatgtgctgaaggagctgggagtggtttt

SEQ ID NO: 44332 - DNA, 379 bp, Glycine max
  Clone ID: LIB3093-013-Q1-K2-D2
ggagcttttcgtgggggttggtgcttcgagggtgagggatttgtttgagaaggcgaaggggaaggcgccgtgcattgttttcattgatgagattgacgccgttgggaggcagagaggggcggggctaggaggtggaaatgatgagagggaacaaactattaatcagcttcttactgagatggatgggttttctggtaattctggtgttattgttttggctgccactaacagaccggatgttcttgattcggcgttgttgaggcctggccggttcgataggcaagttactgtggatagacctgatgttgccggcagagttaaaatccttcaggtgcattctagaggaaaagcgcttgcaaaggatgttgattttgaaaaa

SEQ ID NO: 44333 - DNA, 375 bp, Glycine max
  unsure (1)..(375): unsure at all n locations
  Clone ID: LIB3093-013-Q1-K2-D3
gaaaggtttcgatgcttttacaaactttatttcgctccaaagttcctttgcaactgaaaaataaaaataaaaatgcaccgatatatcaccgtccatgaaagaaaagcgtgctcttcatttgaagcatccattttttcttttgaccccagcttcagctatctaggtttagggttttgcttcaactttactcattttcccgggaaacaccatttagaatgttaccatctttctttttaattatgttgctgactcgttctcaaaatttggtctttcgctatagaatcatgttaggaacagntttagtttctttttattattgtaaatttcgttacttctgaatgcgtaaatttgtgtttgtcttttggtgccacaatt

SEQ ID NO: 44334 - DNA, 422 bp, Glycine max
  Clone ID: LIB3093-013-Q1-K2-D4
atagatttgaaccatttcataatctgaagccttttttttttttcttgttgcgatcgaattgtgacggagatggcggcgccgaacaggatcgaacgcgcccaccagatgtaccgcgacggaagttacgaggaggcgttagggttctacacggaagcaatcgccttggccaagaccaaccctcagaagatcgctttgcatagcaaccgagccgcgtgctatctcaagcttcacgatttcaaaaaggcagcagaagagtgtacttcagtgcttgagcttgatcacaagcacagtggggcattgatgctgcgggctcaaacgctagttaccctgaaggagtaccattcagcactttttgatgtcagcagacttttagagttgaatccatcttcagaggtttatcaaaatcttcaagctcgtttgaa

SEQ ID NO: 44335 - DNA, 397 bp, Glycine max
  Clone ID: LIB3093-013-Q1-K2-D5
cccacgcgtccggctgtgcctctcctctcgctgcgttttccaatggcggccataacccgcctcctaaatcgcacctcttccctctcttccgtggcgcgtggattctcatctcacgcatcgccgccgcgcaaggaggagaggaatgtccagtgggtgttcctgggttgccccggcgtcggaaaaggcacctacgccagtcgcctctgcaacctcctcggcgtccctcacatcgccaccggcgatctcgtccgccacgagctcgcctccaacggccccctttcttcccagctatcagaaattgttaatcaaggaaaattggtgtcagatgaaatcatcataagtttattgtcaaagaggctggctgatggggaagctaaaggagaatcgggatttattc

SEQ ID NO: 44336 - DNA, 430 bp, Glycine max
  Clone ID: LIB3093-013-Q1-K2-D6
agattcttcagccaaagtagaagctgctcacagttccagaaccccttctggaatttcaaaaactagtccttcatctgttccttccaacttatctattctgtcatatagtgaagcaagtgatttctcaaatcttccaacaccaaggtctgagggcgaaatcttgtcttccccaaatcttaaggcctttaccttcaatgagctaaagaatgccaccaggaactttcgcccggacagtcttcttggtgaagggggatttggttatgtttacaaggggtggattgatgaacacacatttacagcttcaaaacctggatcaggaatggttgttgctgttaagaaactcaaacctgaagggttacaaggtcataaggagtggttgactgaagtggactaccttggacaactacaccatcagaatctggttaaattg

SEQ ID NO: 44337 - DNA, 384 bp, Glycine max
  Clone ID: LIB3093-013-Q1-K2-D7
caaacttcaacttgtaatcaagggagatagaaaatttcaagcacaaaaaatggcggagaacaaagtggtgatcctaggaggtggtgttgccggtgccaaccttgcaaaaactatacaacgtcaagccaacgtcacccttattgatccgaaagaatattttgagattccatgggcaagtttgaggggattggttgagccaacttttgctgaaaggatagtgatcaaccatagagagtacttcaaaaagggtaaccttgttgtatccagtgctgtcaacataactgaaactgcagtggtgactgaagatggccagcagattgcctatgactatcttgttattgccactggacacacagaaccaatccccaaaaccaggagtgaaag

SEQ ID NO: 44338 - DNA, 370 bp, Glycine max
  Clone ID: LIB3093-013-Q1-K2-D8
cccacgcgtccgccacgcgtccgcccacgcgtccggtgatttccattgccgccaccgattacccaccaactgatatacataacctcttcacctttccctccttccctaatttatcactaaaaaaacaaacaaataaaaaaaaagtccactaagttggggcacgtcacccatctcgcccttcccctcgctcatctcaaatccatgcttcggaattagggtttccattcggatttcgtaagtctggtgcccaatttcgtgactccgagcgacgtaaaaggggaagggaaagggatgaggatttggggatcggagatcgtgttcgccatattgctctgtgggaccctttcatgcaccgctcaagctcatcaca

SEQ ID NO: 44339 - DNA, 381 bp, Glycine max
  Clone ID: LIB3093-013-Q1-K2-D9
cccacgcgtccgcccacgcgttcggttatagtgagtgatgttaaagatcaaggcagctgcggatcatgctggacattcagcacaactggggctttagaagcagcctatgcacaagcatttgggaagagtatctctctttctgagcagcagctagtggattgtgctggccgtttcaacaactttggctgtaatggtgggttgccatcacaagcctttgagtacatcaaatacaatggaggacttgagacagaggaagcatacccctacactggaaaagatggtgtatgcaaattctcagctgaaaatgttgccgttcaagtcattgactcggtcaatatcaccttgggtgctgagaatgaattaaaacatgcagttgcattt

SEQ ID NO: 44340 - DNA, 427 bp, Glycine max
  Clone ID: LIB3093-013-Q1-K2-E10
atggaatatggggaaattggtcaaattagaatgcagggcttgaatcattttcagcaacaaacagcaccatatgaatgatactgaccttgctggggggagggaagaataatttgcatgtctcttctattatggaaattaaaggtggaattttcagcttagtttggttctatgaactaattaattccttttcgaccatatcaaactagtagtacactgcagaaattaatcgtctacacattaacactgattggttttcctgtgacaaatcagtgtgtggacactttaatttggtcccttaaattagtgttcatcagtatctttaaatggcgaataatcagaagaattgccctgcacatttagttagttcaatgtgcacacttcgacttcacagcatttcaatttcagtcattccattttcatatcttat

SEQ ID NO: 44341 - DNA, 361 bp, Glycine max
  Clone ID: LIB3093-013-Q1-K2-E12
ggcccttcatcggtgctccgtcgtctcggggaacttctggagcgtcgcggccccttcactacggcctccggctgcccgcaagtccaacgtcttctttggcgcccgttatgggttgggattgagattaggttatggatgggttcttggggaatttatttataggtcattggctttaaatactattcatgtgcttttgccacatttttagtttttcatatctattaacccttttgtagataaaggaaaactttttttttttttgtcaggttaaattgtagtgattgaattgaagttaagcttaattattctttattgtatggttaaagtctttagagagaaaagactcaaaaggaagggagcg

SEQ ID NO: 44342 - DNA, 419 bp, Glycine max
  Clone ID: LIB3093-013-Q1-K2-E2
cccacgcgtccgattttcaatgggttcggaataggcgaacgggaaagcaggcgacgacaccaacaaataacaacgaatgactaaaacaaacccaacttcatcgtcatcactcccttaatctccacactctggaagaaccaaattgcgaaaatgggattgattacggtggtgaaggagttgtggagggctttctttttcctttgctcactacaattctggagaatggcgttgctctggactttctctattctttattcttattaccaattgttcaaagattccttatcccattcccagtatttcaaacctctaattcctgagaaatgttccctcttctctcagaaactcgtgtcctatcccaggtgctcccctttcacaactacttttaggcctgtctgcgtcatcactggtgcaacgtc

SEQ ID NO: 44343 - DNA, 403 bp, Glycine max
  Clone ID: LIB3093-013-Q1-K2-E3
gaagctttaagttaggacaagctagaaggtacggatattaattttctgtacaattcacaagaaaaatagcagtgccaattgtaataatatgtacatcaagcatctaaaggctttcataaatcatctttaaattcctacagagggagcaaaaaagcaaacaagaaataacattttctagtcatcagccaaggaaacccttccagtttcatacagatgatacatccaaagaggttcaatcaactcctttgcataggttaatttctccagctcatcatcattttcttctgcaatttccctctctatcctgggaaatatttcttgcagagaagagagcatcatgtcacccaatcccggtcatcaggtttaaacaacttaagacatacaaaccacaagagtcctaatg

SEQ ID NO: 44344 - DNA, 391 bp, Glycine max
  Clone ID: LIB3093-013-Q1-K2-E5
caagtccttgctttgactttcctatttcaacctctcttgtaactcacactgcttttgctaaaacaacttcaaacttttagcttttgtcagtactttcaaatcaaaggaaactccttatactcaaaaagagtttgcaatggggttaactaggatgtgttattttggtagttgtcaagttcattccgtttgtaagagttagataccattttagaagctaattctcaagccatccgtaaaggaagttcttgcagttcacagtctatatttattgtatgatgtaacaatccatctgttgattttgcatgttatcagtcctccttcaattgaacctgttatgtttaggcatatatcagttgcgttttgatatgttcaattatggattcgttatgct

SEQ ID NO: 44345 - DNA, 388 bp, Glycine max
  Clone ID: LIB3093-013-Q1-K2-E6
cccacgcgtccggtactttggactcatgggtgatggccaacctattggacgatacgatgatatgtgggctggatggtgtgttaaggttatatgtgaccatttgggcttgggagtgaagactggccttccatacatctggcacagcaaagcaagcaacccttttgtcaatctcaaaaaggagtacaagggcatcttctggcaagaagaaatcattccattcttccaaagtgccactctttcaaaagagtgcacgtctgtccaaaaatgttacattgaactctccaagcaagtcaaggagaagcttggggctgttgatccctacttcatcaagctagcagatgccatggttacttggattgaagcttgggatgagcttaacaacaacaca

SEQ ID NO: 44346 - DNA, 400 bp, Glycine max
  Clone ID: LIB3093-013-Q1-K2-E7
ggaatgggtggtggtggcggtggccatgatccatttgatatcttcagttcattctttggtggaagtccgtttgggtcaggtggtagcagtagaggacggaggcagaggcggggagaagatgtggttcatcccctgaaggtctctctggaggatctttacctcggaacttcaaagaaactctctctttcacgaaacgtgttgtgctcaaaatgcaatgggaagggctcaaagtctggggcttcaatgacctgtgctggttgccagggtactggcatgaaggtgtctattaggcaccttggtccttctatgattcagcaaatgcagcatccttgcaatgagtgtaagggtactggagagacaatcaatgacagagacaggtgccaacagtgcaagggagaga

SEQ ID NO: 44347 - DNA, 404 bp, Glycine max
  unsure (1)..(404): unsure at all n locations
  Clone ID: LIB3093-013-Q1-K2-E9
gggaactgccctacccttttactttatattcactcacaacaagggcacaaaaaaaaaaatgaacaagtcttctggtgctgtttttctcgcacgctctcggcatacgatgttttcgtttcctaattagtagcagcgagattctgaggttgtcgtgaccaaggccatggaactgaaatttgttctctttctgctccttctgcttgctgttgctggttatggactcgcttccaatgcgacactgaacgagacttgtggatacttcgatggttctctcaatagggaccctaaagtgccttgtccaattggttggattatggaccctaacaagaccaagtgctttctccatgttgggaggcctcaatcttggaatgactcanagacctgttgtagtaagtatggtggac

SEQ ID NO: 44348 - DNA, 379 bp, Glycine max
  unsure (1)..(379): unsure at all n locations
  Clone ID: LIB3093-013-Q1-K2-F1
cccacgcgtncggttggggtaggtggtggtggcgccgaaccgcaatggagaagccatcgtcgtcgtcgtcgtcgcgaagaaaatcgagcacgaaggtgaaagcttcaaccgatgcgaacacgaacctgagcatgctcaacgaggaccttctccagaacattctagcgaggcttcctgctctgcatttcgcttccgcagcttgcgtcagcaaatcatggaactctctctgcaatcgcatcctcactcgccccaaactctcttccgcgatttctctcaacccttcgctccccgatgctgtcaacgaggttgttcacaaggttctttcggagccaattcgaccccatttcgctattgccaatatcggaactggattcagcac

SEQ ID NO: 44349 - DNA, 358 bp, Glycine max
  Clone ID: LIB3093-013-Q1-K2-F12
gttcttgtgaacaacatggcgatggctttcaaaatggccactactgggatgtgggtgacggatgagtgcaagaactctttcatggaaatgaagtggaagaaggtcatagatacatatcttcaagatcgatgagaagtcaaggcttgtcaccgtgataaggtgggtggtcccggcgagagctatggtgatctcgccgctccttgcccgacgatgattgtagatatgccgattcgactttgatttcgtcaccgtcgataactgccgcagagcaagatcttttattgcatggtctccaacagcatcaaggatagacaaagatgcttacgcaacatcaagatggtctgagaagactctggat

SEQ ID NO: 44350 - DNA, 402 bp, Glycine max
  Clone ID: LIB3093-013-Q1-K2-F2
gaagaatacaagcataatatatgagtgttttcagggcgaacttgaggttgtgaaagagattcctaacaaagtgatctctgataagaaagaaaacagtgaaaaccaaaacaatgctgagaaactttcagatggggtgaatgagcgatatgcatttgtcaaagaaacttcaaaaatgccatttctaatgttaggattggacttgccaccacctcctcttttcaaggatgtgatggaaaaaaatataataccacaggttccactctttaacatactaaagaagtttgatggtgaaactgtcacggaggtggtccgtcctcatatagcaaggatgcagtatcgtgttaccagattgcccaagtatatgattctacacatgcgtcggtttactaagaataatttttt

SEQ ID NO: 44351 - DNA, 408 bp, Glycine max
  Clone ID: LIB3093-013-Q1-K2-F3
tgaaaatgatgcttctgtagtggatgctttgtctctaaaaagaatcactagaatacacaaggcgttggactcagatgatgttgagcttgttaaacttcttttgaatgaatcagacattactttggatgaagccaatgctctccattatgctgcagcctactgtgaccccaaggttgtttctgaggtacttggtttgggactggctaatgtcaatcttcgaaattctagggggtacacagtgcttcacattgctgccatgcgtaaagagccttccattatagtatccctacttacgaaaggggcttgtgcatcagatttgacttttgatggtcagagtgctgttagtatttgtaggaggttgacaaggccaaaagattatcatgcaaaaacagagcatgggaaagaaac

SEQ ID NO: 44352 - DNA, 422 bp, Glycine max
  Clone ID: LIB3093-013-Q1-K2-F4
cacccctcgcttttgctcactattttacctttctctccctcactgtatctgtgatctttgagaatctcatttgcatttgtatcgcaaagtggagtcacttgtgcttgataaactcccaaatggtcaatcctactacacttaaacactgttaccgacttcatctagctttagcccatcttcatatgttgggccattttttatctccttcaactcattatcaaatggttgcgatgtagaatcccttcttttctcatcaagaggcgtctctctggttcattagaaacacaatccccatttcttaagatgaaggattgctagatgcttattgaaaatggttgcagctgtgtaaatcactggtaatgtcacagtaattgctggccagttcaagaaatccgagtcttaacacaatttcaaattttatt

SEQ ID NO: 44353 - DNA, 378 bp, Glycine max
  unsure (1)..(378): unsure at all n locations
  Clone ID: LIB3093-013-Q1-K2-F5
cccacgcgtccgcaaattcaacagttttttcagttttagacgctgaaaattcaacaaagaaaactacacacactgacacaaacaaacaccaagcttgaaccttccctccccatgtttgaattttgctctttcccccaactaacctttagcctccatttccccgaaaaatatccccgcggcgaactaaaccacttcaaatgaccaaaatgcccttcaccttcgtcaaatttccattccacatcctcctcttcctcgtcctctcgctgccctccccggtaatttcgcaggaccagcaaacaaccctcctcggcatcaaacgacaattcggngaccctcccgccctccgctcatggaaatcctcgtcgccgccgtgcgcat

SEQ ID NO: 44354 - DNA, 99 bp, Glycine max
  Clone ID: LIB3093-013-Q1-K2-F6
ttttgttgttattcattctctatgaatggacaatgggtggaaatggatccttatttgtgcaatagagatggatgtaaatgatgtattgtatgactctca

SEQ ID NO: 44355 - DNA, 351 bp, Glycine max
  Clone ID: LIB3093-013-Q1-K2-F7
gaggggcttatagatttagggaatgtgtttactatactagtaataaattgtacaaaaaataaaaatataaataatatgaatataaaaagaacaaacacaaattttatgtgattagtcgcggcatttaaaataaaaaatgaaagtagacaaattaaaaaggaaaggagatgtttgaataaaaataattccccttcaagttcttattttttgagaggacaggacaatatgaatgttttattatgctctatcaacacattaaaaagattatatgatatatctgctgtggaagtaggtcaacatttatattggcaaatacggagttttcaagtacatgcccaagtacttattact

SEQ ID NO: 44356 - DNA, 429 bp, Glycine max
  Clone ID: LIB3093-013-Q1-K2-F8
cccacgcgtccggaagaatggtggatttactggattccctattcttggggttgagtggcaaaaaatggaaaagcctgatctgcgaatggcaacgggcatgaaacctgaccagaaaggtgtgcgtattagaagaattgatcctactgctccagaatctaaggttttgaagccatcagatgttattcttagttttgatggggttgacattgccaatgatggaacggttccattccgtcatggagagcgcattggtttcagttatctcatatcacagaaatatactggggataatgcagcaatcaaagtactgcggaattcagacattttgaaatttgacatcaaacttgatagtcacagaaagcttatttcagcacacagcaagggcaagcctccctcatattatattattgctggaattggttttacaac

SEQ ID NO: 44357 - DNA, 406 bp, Glycine max
  Clone ID: LIB3093-013-Q1-K2-F9
caagattcagcaagtgcgttttggattcagagaccgaaatacttcgagatggcccgtacaaagcaaactgctcgtaagtcaactggaggaaaagctcccaggaagcagcttgcaaccaaggctgcacgtaagtctgcaccaacaactggtggtgtgaagaagcctcatcgttatcgccctggaactgttgctcttcgtgagattaggaaataccagaagagcactgagctcctaatcaggaagcttcctttccagaggttggttcgtgaaattgcccaggatttcaagactgatctgcgtttccagagccatgctgtgcttgcattgcaagaggctgctgaggcataccttgttgggctctttgaggacactaacttgtgtgccattcacgccaagcgtgtgacta

SEQ ID NO: 44358 - DNA, 384 bp, Glycine max
  Clone ID: LIB3093-013-Q1-K2-G1
cccacgcgtccgaagactgaaagattccatatcacaaatatattctaaacttgaggacataaaggtatctgctgagtcagacctgcggcaccatgtttcccttgttgtccatcctatgcagcaggctctgaatgctgccttgttacactatgaggctgacatcaggaaaagaaatgcaagaggacagaagcctaacggttatgtttagttggagaatgtttcgctctctgcactgcgagcatcatactataacaatttaggaatgtatattccatcaattttgccgtgaacacaaacccgaatggccatttatatcgtgatgaaaaaaatgaatttccatgagaattagtcagcaacagtcttaattgatagttaacatgtaac

SEQ ID NO: 44359 - DNA, 424 bp, Glycine max
  Clone ID: LIB3093-013-Q1-K2-G10
gtgtgctctctgtgtggtgtgttcgttcactgcaacaacaacaacaacaacggcgaacgccaacgcaaacgcgaacgcgaataagagcgagaacattctcttcagctcaacccttttctttttcgatggctaatcggcacacgattattctaatgcagacctcgcagaacagagcaactaggacgttcatggattatgaatccataactcaggccatggatggcatatgtgcactgtatgaaaggaaactgaaggagttgaatccggctatcagaaatctctcttatgacattactgatctctacaacttcatagatggtcttgcggacatgaatgccctagtgtatgatagttcaattcacgcttacttgccgcatgatcgactgtggatcaagcaacgaacatttcaacatttgaagaaatt

SEQ ID NO: 44360 - DNA, 386 bp, Glycine max
  unsure (1)..(386): unsure at all n locations
  Clone ID: LIB3093-013-Q1-K2-G11
aattcggtcgcccacgcgtcgttacctatagcacgcactcttgtctatctccttttgtgtaaagaagacacacccgttctaatcattattagactgactcaacgatgaaggcacactgcttcgtcttgtctggtcctctgattctcgacacacatagcaccgaacctcgtcaacgatgagacacgcttncaccgtgttgttgtctcgaagaaccaccctacatcccgaagctcgagccttttaccgaaccaagtttgaaagggccgtaagaccctcctttaatcaaaaatctgagaaagagatcttagattattgtaacgcttgaggagaccaatcatatagctgctggcggcttattttgagctgaagatctgaaaagagtccca

SEQ ID NO: 44361 - DNA, 371 bp, Glycine max
  Clone ID: LIB3093-013-Q1-K2-G12
aaaaaaagaaaagaaaaaggatttgattcagtcacaacaaaaaaagaacaaaaaaaatccaaatcatcgatgggtggtaaatctggcgtggtttggattttgctggcgttgatcgccgccgcttggtgtctgttaactccagcgagggcgaattcgacgacaatatatgaggagctccgggcgcagggtcttccggtggggcttcttccaaagggaatagcgaagtactcgatgaacgcgacgagcggggagttcgaggtgtggatgaaggaagcgtgcaacgcgaagttcgagaacgaggtgcactacgactccaatataaagggtgttcttggctacggtcggatcggggaattatccggtgtgtcggc

SEQ ID NO: 44362 - DNA, 401 bp, Glycine max
  Clone ID: LIB3093-013-Q1-K2-G2
cccacgcgtccgcccacgcgtccgctgatacttgctctggtcatagtttgctgtttttgtcagtgcttaagttctggcaacgataccattacaccaggccaattcatcagagatcctcacactctcacctcagctaatagtgccttcaagctaggattcttcagccctcaaaattcttcaaatcgctacctgggaatctggtatctctctgactccaatgtcatatgggtagctaacagaaaccagccactaaagaagagctcttccggaactgttcaaatttctgaggatggcaatctcgtggtattagatagcaacaaaagggctgtttggtcaacaaatttgacacataatattgcaaccaattcaactgccaaacttttagagactggaaatctagt

SEQ ID NO: 44363 - DNA, 415 bp, Glycine max
  Clone ID: LIB3093-013-Q1-K2-G3
cccacgcgtccgctagatcgttcacggccaccaccaggtaagacgcctcccaacatccccaatttttttttttttttttttcttgatgagcttcttttttgcagtgataaatgagagtttgatttgatagactttcatcacatgtccatgaatataacatttccagtaatttgaatctgactaaagactgttttattaattttcagattattttttaatttatttttaatgaactttagaaaaaaaattagtttattataggaaattttacggtgaatttcagaataaattttcatatgatacgactttattaaataaaaagtatctctatactattttattgctaatttacaaatatctcatttttttatatttatggaaaaaaaattggtttcttattataagaataataatt

SEQ ID NO: 44364 - DNA, 398 bp, Glycine max
  Clone ID: LIB3093-013-Q1-K2-G4
cggacgcgtgggccgccaaatcaaataaaatggatactgaaatcgttgagagcattgatgtcacagatgatgcaaggagttttagctgggcagtggacagcgccataaggagtgagactgggtccatttttggagaatctcgtgtccgtagctttgcttcgttagtggacagtgccataaggagtagtagtgctactgaagcagatttggaatcatcccctgtccaggcagaagacagggcgatgaggagtagtagtagtggaactgatttgggaacatccccttttcatgtttttgctacggcagcgggtatgaggactgttgctgccacccagagttaccgagaattatttaacctgttagagcttatactgataatacttttattgattaatgag

SEQ ID NO: 44365 - DNA, 410 bp, Glycine max
  Clone ID: LIB3093-013-Q1-K2-G5
ctctcttttttctaccttagattccttctccaacaatggctctcgccgtttccactacttcttcctcttcagcagctgctgcagcttctagctccttcttctctcgtctcggatcttcctccgacgcaaaagctcctcaaatcggttcgtttcggtttccggagaggtcgcttgtttcgtctgttgttgtcaatgtaactcaacgacgctccttggtgaggccactcaacgccgaaccgcaacggaacgattctattgttcctcttgcagcaactatcgttgctcctgaggttgagaaggaagaggaagattttgagcaaatagcgaaagaccttgaaaatgcatctcctcttgaaattatggatagggccctcgagaaatttgggaacgacatcgctattgcatttaat

SEQ ID NO: 44366 - DNA, 341 bp, Glycine max
  Clone ID: LIB3093-013-Q1-K2-G6
acttactgtactcttgcaagccaccgtctctaagatcttgtttacaaacaaaggtagtagatcaaggccagtggcgagtggagtgatattcatggatgcattggggagagaacacagggtatacctgaagcagggtcccaagagcgagataattgtctcagctggtgcactgggaagcccacagcttctaatgttgagtggaataggagcagaacgtgagcttaggaaacacaacattgatgtggtgttgaatcagcccttggttggacagggaatgtcggataacccgatgaacgctatctttgtcccgtcccctgtccccgttgaggtatccctcatag

SEQ ID NO: 44367 - DNA, 385 bp, Glycine max
  Clone ID: LIB3093-013-Q1-K2-G7
aggttcttcaaaatgatattgatttgctaaatcccccggctgagcttgagaggaggaaacacaggctcaggcgtgttgttcagtcaccaaactctttcttcatggatgttaagtgccagggttgcttcaacataaccactgtctttatccactctcagactgttgttgtatgcggaaattgccagaccgtcttgtgccagccgacaggcggccgggcaaggctaaccgagggatgctcctttatgaagaagggagactgagtggtgtgccatctttttttgtctgtgattggagagtttcaggaatgccttcttttgttttggatatggtatgctaattgtcttaaatttgtaagacttgagtctacatacttatccaagacact

SEQ ID NO: 44368 - DNA, 378 bp, Glycine max
  Clone ID: LIB3093-013-Q1-K2-G8
ctcacctttctcctaaaacatctccagtgggttcttcttcttctattacaacaacgtcgtccaagaccatgaccatggccatggccacgatcctgctcctgttcacggtcttcgcggtttcatcggccctagacatgtcgataatctcgtacgacaacgcccacgccgccacgtcgcgcagcgacgaggagctgatgtccatgtacgagcagtggctagtaaagcacggcaaggtgtacaacgcgctcggagagaaggagaagaggttccagatcttcaaggacaacctgcgattcatcgacgaccacaactcccaagaggaccgaacctacaagctcggactgaaccggttcgcggatctcaccaacgaggagtaca

SEQ ID NO: 44369 - DNA, 269 bp, Glycine max
  Clone ID: LIB3093-013-Q1-K2-G9
ggaagctggaggaattaggatttggttttttagtgggtgaaaaaatggggggaggttctgttggagtaatatcatccccttgatattaattgtggtaattttaggtttggaatatgcgttgtggtttgagcatatgttactgttatggttggttggtttccgtgttactcctgtcctgtggttctcgtttttgacctctgataatgaatctgtgttcttgaaggaatgaaatgaatggcaagaaattatgatcctaagatttttacatt

SEQ ID NO: 44370 - DNA, 385 bp, Glycine max
  Clone ID: LIB3093-013-Q1-K2-H1
cccacgcgtccgcccacgcgtccgagccactctctccgtccggcccgaccgtctctcgcccggttcggtgtttcccagaccaccggttcagcctccgctgcgaaaaccaatcgcggcgcccgagccgtggcgcgccgcggcgccgcggatacgcatcaggacggtggcgccggtccaggcgagctcgcgcgccgatgactccgcgccgttcgagatgtcggtggagaacgcgctgaagctgctgggcgtgtcggagggcgcttccttcgacgacatactccgcgccaaaaacgcaatcgtcgccaattgcaaagatgaccaagatgccattgctcaggttgaggctgcatacgacatgttgcttatgcagagcctaacctcacgt

SEQ ID NO: 44371 - DNA, 330 bp, Glycine max
  Clone ID: LIB3093-013-Q1-K2-H11
gaaaaaccaaagaagattgaccttggtttcttcattgaggatctcaaggctgctctgtcgttcttttctttgtgctggcactactactcctttgttttctagaggcggaagtggtgctcttggcgcagggctcagtaaattcagcactgctgctgccattgaagaaccaattaaaccaccacttaaagttgaacacacccagctcttaattgatggaaaatttgttgatgctgctactggcaaaacttttccaacgttggaccccagtacaggagatgtgacttctcatgttggtgagggtgaccatgaagatgttgatcgagcatttgc

SEQ ID NO: 44372 - DNA, 408 bp, Glycine max
  Clone ID: LIB3093-013-Q1-K2-H12
ctaactcccgaccctgttcccctctcgtatccgtcatgaaaggaggaaagtccaagaccgaatctaagagagccgatcccaaacttgctgtgaataagaagggagccgccaccaaggctaggaaacccgccggcaaggggaaggcagcgaaagaccctaacaagccaaagaggcctccaagtgctttcttcgttttcatggaggagttcaggaaggtattcaacaaagaacatcctgaaaacaaagcagtgtctgctgtgggcaaagctgctggagcaaaatggaagaccatgtctgatgctgaaaaagcaccttatgtggcaaagtctgagaaaaggaaagtggagtacgagaagaacatgagagcctataacaagaaacaagcggaaggtcctactggtggggatg

SEQ ID NO: 44373 - DNA, 387 bp, Glycine max
  Clone ID: LIB3093-013-Q1-K2-H2
gtcaggctggtcctggattccagttatttggttctgatgcggatgtgtctgatgcgttggtccatctgcagcatggtcctatgaattgctcctcgtcactaaatggttatgcattggctcccaatactgctttgggatctggtagtatcttgcaagagtcctctgctggtcggtcagatgctgatttgaatggtggtttggtggacaatcctttggcctttggtggagatgatccctcacttcagatttttctccccacaagaccagcagattcatccatgcacaatgaattgagagatcaagcaagtgtggctaatggtgtctgcactgaggaggattggatatccctcagtcttggaggtgggactggtggtaacaatggtgatg

SEQ ID NO: 44374 - DNA, 400 bp, Glycine max
  Clone ID: LIB3093-013-Q1-K2-H3
cccacgcgtccggtgcactgtttgaaagggctgttagtctgagcctcccaccgaaaaagatgaagttcttattcaaaaagtatctttattatgagaagtcccaaggtgatgaagaacggattgaatctgtgaagaggaaagcaatggaatatgtcgagagtactagggcttgatataaattcaccactgctttagttttgaattcttcaacttgcagccactctggagtctaagctggatatcttaagaccaagctttgtgttagataaggcatgacaactaaacagtacatgttttcccaaatcacctggagacagtatttgatcttggttgcctctgtaaatggagtggttctaacactacctaatagtgtgctgctaagtgctaatgtgctttgtgc

SEQ ID NO: 44375 - DNA, 358 bp, Glycine max
  Clone ID: LIB3093-013-Q1-K2-H4
ccacgcgtccgaaaaataaaggaatgcttttgcgcttaaagccaacatctgctgatgtagtttatagtgaggtcaaggaagtgagttaattgatgacaaatcaactcaactcaaagatgttggttctgtgtcacccatatctctggcccgaaagaagtttatggtagatatgctgctcatctgaagaattcactgggaaatggtggagctaaatctcgaatatctcttatttaaaagggaagtacttttggattggaattctacctcgtgcatccattggagtttcgaacatgttctttctgataaccaaccaggcaggctgagaggtcaatatttgaaaagaagtaattggggagac

SEQ ID NO: 44376 - DNA, 399 bp, Glycine max
  Clone ID: LIB3093-013-Q1-K2-H5
gaaaaacggactgcatcttcaacctctcgcattccaccgcgaccaaagatcgtctctgtttcaaaccagttctgttttgatcctctgcgacttgtttctctgcttctgcgagctagctattgttcggaaaagcaatggcaagtgcgttgagtagcagagttgaatctgttcgaaactctccctcattaagattttctctcaactgcatcagagcccttagctcttcttcttcttcttcttctgctgctgctgcggtttcttctggtgagaaccctaataaatcaaagcgaaggaagaagaagaacttgttcgaggtggctcagttcttacctaactggggaatcggctaccacatggcttagactcactggaatgaagtttcttacgaaatcactaaaa

SEQ ID NO: 44377 - DNA, 328 bp, Glycine max
  Clone ID: LIB3093-013-Q1-K2-H6
ctctaactcgcgagcgtgtgcgtattacatgcaccgcaagacgctcgcgcagctgctggagttcgcgcgcacggtcgagagggacgctgacggcggcggcggttccgacaccgaaccgcctacggcgcatttgaagaagcgccttggcagctccaggaggcgtggcaacggcggatatcggcgtggctccgcgtcgctgccggacgtcacggcgatctccggcgggttcgacggggaagagaagcggaacgggccagtgcacgtcgacgggattcctgtggggttgccaaggttgcacacgcttcgtgaaggaaaatcatctcaatct

SEQ ID NO: 44378 - DNA, 403 bp, Glycine max
  Clone ID: LIB3093-013-Q1-K2-H7
cccattttcaaccacatgaccactatggagcctaagttccctctcaaccatgcaactacaacatatggaggagcaccaaatttgggttattgcttagaccctttatcttgtgacagaaaaatgttaaaagctgttttgaatcaaatcacaaagatggaaaggaatccacttaaccaaagtctaaaagggtcaccaagcttaggagaaggaagttcagagagttatttatctgaagtggggatgccccacgtgtggaattactgatgtgagactttagtacttaaaccctctcctccacctatgccaccatgaaattttttttttaaaaaaaaaacaagaaaaaaaaaggtataagggggaagataaaatcaatccattgttttaagtcatggtgagtacttat

SEQ ID NO: 44379 - DNA, 387 bp, Glycine max
  Clone ID: LIB3093-013-Q1-K2-H8
ctttcctttcactttgttgtttgtttgtgttatcttgacttttgaaacgtgagactgagaatggaacgtggggttcttgatagtatcattaataggctgcttgaagtcagaggcagaccagggaagcaggtgcaactttctgaggctgagatcaagcagctttgtcttgtctccagggatatcttcttgaggcagcccaacctcttggaactcgaggcaccaattaagatctgtggagatgtccatggtcaatattccgaccttctgcgactttttgagtatggtggattgcctcctcgttctaattacttgtttctaggggactatgttgatcgtgggaagcaaagtttggagacaatatgtctccttctggcttataaaataaaa

SEQ ID NO: 44380 - DNA, 400 bp, Glycine max
  Clone ID: LIB3093-013-Q1-K2-H9
cccacgcgtccgcccacgcgttcgttgtcgcgtgggtttgccttgtgccgtttgtgttgttttcgggacgaagaagaagatggtgtcaggttctggaatctgcgcaaagcgggtggtggtggacgcgcgccaccacatgctgggtcgtctagcctccatcgtggcgaaggagcttctgaacggccagaaagtggtggtcgttcgctgtgaagagatttgcatctcgggcgggctggtgaggcagaagatgaaatacttgaggttccttcgcaaacgcatgaacaccaaaccctcccatggccccatccacttccgtgccccctccaagatcttctggcgcaccgttcgtggaatgataccacacaagacaaagcgtggggaagctgctcttgctcgtttg

SEQ ID NO: 44381 - DNA, 465 bp, Glycine max
  Clone ID: LIB3093-014-Q1-K1-A1
tgtatatatataggtgcacataccattggtactacagcttgccagttcttcagtaacagattgtacaacttcaccgcgaatggtcctgacccttccatcgacccttcatttctttcccaactacaatcactatgccctcaaaacggtgacggttcaaaacgagtagcgctagatacgggtagtcaaaccaaatttgatttatcttactatagtaatttgaggaattctcgtggaattctgcaatctgatcaagcactatggagtgatgcttccacaaagacaactgttcagaggtacttgggcttaataagagggttacttggattaacattcaacgtggaatttgggaagtctatggtgaaaatgggcaacattgagttgaaaaccggtaccgatggtgaaattcgcaagatatgttctgccatcaactagatatatagccacttcaaacaattaataattaaa

SEQ ID NO: 44382 - DNA, 459 bp, Glycine max
  Clone ID: LIB3093-014-Q1-K1-A10
cccacgcgtccgtccacacgctgcttccgattgaaggcatctaaggagagaaaaatgcacgatttctgcttcacgatcccctacggattgatgttagtgggtggtggactgttcgcctacataagcaaagggagcatcgcttctctcgccggaggcgccggctccggtttgcttctcatcgtcgccggctatctcagtctcaatgctttcggcaaacgaaaaaactcttacctcgctctctttctcgagaccgtttgtgcagccatactaacttgggtcatggggcagcgatatttggaaacatccaagattatgcctgctggtcttgttgctggaatcagtgctctcatgactctgttttatctctacaaattagcaactggtggcaaccatctccccaccaaggctgagtgatgatataatgatatatcatatatttgcttactataatacagatat

SEQ ID NO: 44383 - DNA, 459 bp, Glycine max
  unsure (1)..(459): unsure at all n locations
  Clone ID: LIB3093-014-Q1-K1-A11
agaaatttaagtgaggagctagagaatgatgatgaagtctgctatgtgtgcagtggtggttgtagcacttcttcttctggcggaggtggggcccatggctgaggctgtgacatgcaccccaacagagttgagtccgtgtcttccagcaatcacttccggtgctaaaccttccaatgcttgttgcacgaagctgaagcagcaaaaaccatgcttatgtggctacctcaaaaacgctagcttgaagcagtatgttaactctcctaatgcccgaaaaaccgttgcttcttgtgggattccctttccaacttgttaattaattaagccttcttataattaaagtgtgggatatatatatatatatagataaacagtttaatttatacacactntgatcctacaaagcatcttgacacaagcattcaataagatttcaccactttatcgcaacattttaacatg

SEQ ID NO: 44384 - DNA, 442 bp, Glycine max
  Clone ID: LIB3093-014-Q1-K1-A12
caggacccagacagcaaggttgcctgcgaaacatgcaccaaaaccaacttggtcatggtctgcggagaaatcacgaccaaggccaatgttgactacgagaagatagtgcgtgacacctgcaggaacatatgttttgtctcaaacgatgtgggactggatgccgacaactgcaaggtcctagtcaacattgaacaccagagccctgatattgctcagggtgtacacggccacctcaccaaaaaacctgaagaaattggtgctggtgaccagagtcacatgtttggctatgccactgatgaaacccctgaattgatgccattgagccatgttcttgcaacaaaactcggtgctcgtctcaccgaggttcgcaagaacagaacctgcccttggatgaggcctgatgggaagacccaagtgaccgttgagtattacaatgacaatg

SEQ ID NO: 44385 - DNA, 438 bp, Glycine max
  unsure (1)..(438): unsure at all n locations
  Clone ID: LIB3093-014-Q1-K1-A2
actcacttcacacaaaccaaagttaattaattaccaacacaaaatggatggaggctgtgtcacagacgaaaccaccacatccagcgactctctttccgttccgccgcccagccgcgtcggcagcgttgcaagcgccgtcgtcgaccccgacggttgttgcgtttccggcgaggccgaatcccggaaactcccttcgtcgaaatacaaaagcgtggtgccgcaaccgaacggtcgctggggagctcagatttacgagaagcaccagcgcgtgtggctcggcactttcaacgaggaagacgaagccgccagagcctacgacatcgccgcgctgcgcttncgcggccccgacgccgtcaccaacttcaagcctnccgccgccttcgacgacgccgagtccgagttcctcaactcgcattccaagttcgagatcgtcgacat

SEQ ID NO: 44386 - DNA, 407 bp, Glycine max
  Clone ID: LIB3093-014-Q1-K1-A3
agcacagacacagaaaaatggctttaacacttagctcttcaatttgccttgtcgaccagaaagaaaccaaactcccaaatgccaaagacgaggttcccaccaaagtgttatactttggaaaaaccaacccatctttccgtctcagagcaaagagttgcatgcaacaaacacacgtcacacgaaacaacagctttaactccgaagtcacgatgatgaacgagaaaagggagaaggtttacgctccatcggttgcacatagccacaatgattcaatgagagtgccagtgtttgtgatgctgccattggacactgtcactatgggagggactctgaataagccgagagcaatgaatgctagtttgatggaccttgaaagtgcatgagtggaaagagtgatggtggatgct

SEQ ID NO: 44387 - DNA, 415 bp, Glycine max
  unsure (1)..(415): unsure at all n locations
  Clone ID: LIB3093-014-Q1-K1-A5
ggaaacgcctccctacaaagtctcccccacgcgccgcccccccacacgcagcaatttgtcggtgtcccactctcggccgccgcgcatgagccgccggcgtccatgcaccacgacgtctccgccctgcatggcttcctgccgcgcatgcagtataacctctggaacacaattgagcacaacgcggcggcgcgtgaggccccacgcgccacccangggctgtcgctgagtctgcacggggaccacatgcgcgcgtcaccgtcctcggcttccggggcctccaacggcggcggcgtggcggggattcagagcgtgctgttaagctccaagtacttgaaggccacgcaggagcttctggatgaggttgttaatgttaacggcggaattagggttgaacacgcgaagaagctgaacttcg

SEQ ID NO: 44388 - DNA, 472 bp, Glycine max
  unsure (1)..(472): unsure at all n locations
  Clone ID: LIB3093-014-Q1-K1-A6
ataaggttgacaggctttatgggtggaaaacatgtcgcaatgctccaattgttaaagcaatgaagcagcagactaaggatgtccaaaatgagtttaatatgaggctcactcagactattactgaattcaaagaacaagggctgaataccgagttgtattataaaaacaaagaaatgggagaaacattcagcattgtgcctacaagtgcaataagtggtgaaggaattcccgatttgttattactattgattcaatggacccaaaaaacaatggttgagaaacttacatacagtgaagaagtgcagtgcactgttttagaggtgaaggtagttgaaggccatggaactactattgatgttgttttagttaatggtgttcttcatgaaggagaacaaatagttgtctgcggaatgcanggtccaattgttaccacaattcgagctttattgacacctcatccgatgaaggaact

SEQ ID NO: 44389 - DNA, 409 bp, Glycine max
  Clone ID: LIB3093-014-Q1-K1-A7
cccacgcgtccgcttttctgatcatctcttatgggtttgaatgatgcatgtaaaatgttgtaggaaagagagggacctgtgagtgtcacaaacatgggagaggagaatgttaaacaaccgttgttggagaggaagtactacaaggactgcccaggttgtaaagtggatcaagccaaagagttgagtgagggaaagggtgtacctgttaaaaatctttttatcatgtggatggtggtgctgtgtgctgcactgcctatatcatctctctttccattcctctatttcatggtaagggatttcaatattgcaaaaacagaagctgatattagttcttatgctggttatgttggctcttcattcatgcttggcagatgtttgacatctgtattatggggaattgtagccgatc

SEQ ID NO: 44390 - DNA, 410 bp, Glycine max
  Clone ID: LIB3093-014-Q1-K1-A8
cccacgcgtccgaacaacacaggcgcagacgcaaacgcaaacgcaaacgcaaacgcaaacgcagagcgtgatccattgacgaagatggtgcaacgtgtcacctaccgaaagcggcacagctatgccaccaagtacaaccaacacagggtcgtcaaaacccctggtgggaagctcgtttatcagactaccaagaagagggccagcggacccaaatgccccgttactggcaagaggattcatgggatttcacacttgaggcctgcagagtacaagatgtcaaggttacacagaaaccgtaggactgtcaaccgtgcatatggtggagttttatctggaagtgccgtcagggagaggattatccgagccttcttagatgaagagcaaaagaatgtgaagaaggtgttgaagat

SEQ ID NO: 44391 - DNA, 371 bp, Glycine max
  Clone ID: LIB3093-013-Q1-K1-A6
cccacgcgtccgatgccacctgatatataggcatattagctagggaggtaggtatagtagtggaagttaattcaggcatggaagacagggatcactgttgttccaacaattcaacgatgatcacaacaacaaagaaaagaacgggtagaagaagtccaacatcggataagctcaagaatcaacaccgcgagaagcagtcgatgaaaccttaccgtggaataaggatgcggaagtgggggaagtgggtggcggagatcagagaacccaacaaaaggtcgaggatatggttgggttcttacacgacacccgtggccggcgcacgtgcctacgacaccgctgtcttttaccttcggggtcccaccgggcgcctt

SEQ ID NO: 44392 - DNA, 395 bp, Glycine max
  Clone ID: LIB3093-011-Q1-K1-A9
gagtctcttgtgattgttgaatacattgatgagacatggaagaacaaccccatcttgccttgtgatccttaccaaagagccttggctcgtttctggtccaaattcattgatgataaggtttttggtgctgcatggaaatccgttttcacagctgatgagaaagagcgtaaaaggaatgttgaggaagcaattgaggctctgcagtttcttgagaatgagataaaggacaagaagttcttggaaggaaaggagattgggttggtagatattgctgctgtctacatagcattttgggtccctatggttcaagaaattgcagggttggagttattcacaagtgagaaatttcctaagctccacaattggagccaagaatttttgaaccatccaattgt

SEQ ID NO: 44393 - DNA, 319 bp, Glycine max
  unsure (1)..(319): unsure at all n locations
  Clone ID: LIB3093-011-Q1-K1-B10
ccggccggaancccggtcgacacgcgtccgtgaattgtcaatgttcagcagcagcagcatcaacaacaacattcttctacctaggccagaagaaattactgtgtaaattttatgtatggtagttgaaattataagagcatatgtagactaggcgaaatagatgaaaaagattgttcattttctgtgctcattctaactaatttcaaacatatatagtatgcttgcttgtagacagttttttctttcttgtgttaactgttaaataaatatatagcatgttttactaaatatatatatctctacatacttcgagttctaa

SEQ ID NO: 44394 - DNA, 308 bp, Glycine max
  Clone ID: LIB3093-011-Q1-K1-B11
cggacgcgtgggctcctcctcttcgccgccgtggccaccgccgcaatggcggtggccgcgtgcgacgccgacgacatcctgatccgtcaggtggtgccagatgttggcgaagccgaagaggaggacaacctgctgaacgccgagcaccacttcgcgagcttcaaggccaagttcgccaagacctacgccaccaaggaggagcacgatcatcgcttcggcgtcttcaagtccaacctccgcagagccaggctgcacgccaagctcgacccctccgccgtccacggcgtcaccaaattctccgatctaac

SEQ ID NO: 44395 - DNA, 382 bp, Glycine max
  Clone ID: LIB3093-011-Q1-K1-B12
ctctgtcctggcttgcttgtggttgaaatcttaattgagttttctgaaattatgtgcgattaggaattttgatgttaaatttgcacacttataaagaattaaagatgatttctgtgatggttggtttgtgacatgcttctgtgccggaagatgttgatttgggtgcccctccttagagtagttccggtcattggcatacttcatgacaagaaagcattcaaacctgttctaaatccagctgaagtggaagcagtatttgatgcacctttggaaatgtttctcaaggataaaaatcggacgcacgatgagagggagtggatgggagagaagtactttgtgcatttctttgactatggcatcgggcataaaaaatatatcatat

SEQ ID NO: 44396 - DNA, 405 bp, Glycine max
  unsure (1)..(405): unsure at all n locations
  Clone ID: LIB3093-011-Q1-K1-B2
tgaacaactaagatttaacctggatcaaacataggtgccttacagtgaagtgtagaaaagacctgagagaaatttctgaggcggttccattgggatgtagcaggtggtagatactacaatggattggatacttttatggaagtatgctncacacctccaaagattaaaaatctaacctgacgcacccaacaaccctttggtagggaatctccaagtcatcatgaattgagggtaacaaggctggcaaaggctaatatcaggatgctatttaaatatcaataatgtagcccttcttgatgttggacttcctagatatttggttggttaaaatttttaatttagacttgtatactattttatatgncacagattattatgagcagtttcgaaggcatgacttgagtt

SEQ ID NO: 44397 - DNA, 388 bp, Glycine max
  Clone ID: LIB3093-011-Q1-K1-B3
gattgtgtcccgcctttgtaaatacaattgggacactactaggattgggaagaagggtctttacattttgagtttggcaaatagatattgcaactacctttgtataaatctatttctgaagaagcaattacaactttcaagggatgatagcattttgtggcataaggattaaggaggcataaaggaccaattgctttggaatattcactcatgacaaggcacaaggtcatgcgtgtatgccaacacatagtaatgatgtgtgtttttattcagtaggcaactggcagatcgggttttcccttgtcacttttgtataattattttggaagaatttatgatgtcaaagttattgtttaatattaatggcgacattgtatttattatttgt

SEQ ID NO: 44398 - DNA, 370 bp, Glycine max
  unsure (1)..(370): unsure at all n locations
  Clone ID: LIB3093-011-Q1-K1-B4
gcgacgcgtgggcgacgcgtgggcggacgcgtgggcatagtcctcactcttgctgtcacccgcacactgggttggcccttgtacttggctttaaatgtttctggaaggccttatgatagatttgcttgccactatgacccatatggtcccatttactctgatcgtgaacgacttcaaatatatatatcagatgcaggagtacttgcagtatgctatggccttttccgtcttgccatggcaaaaggacttgcctgggtggtgtgtgtttatggagttccattgctagtggtcaatggatttttggtgttgattacattcttgcagcatactcaccctgcattgccacattacacttnctctgagtgggact

SEQ ID NO: 44399 - DNA, 311 bp, Glycine max
  Clone ID: LIB3093-011-Q1-K1-B5
ggttagacactcgcttcgatactctctcctaggtgcgaagctatggaggaagaaaattcagctgagtgaggcactgactgagaagatgttcaaccataatgctgctgaggctcatgatgcagatcataaaccccacatgtgcgatgctgtgatcgatctcttgcatgagattcactctgcaatctacaaaatgcaagctggatgccagatctcataccagagctagcacggtatgggatttcgtcaattcatgtgaaagttccatttggcaaggcaattgaatctagtacttgacaacctacgatatcttg

SEQ ID NO: 44400 - DNA, 234 bp, Glycine max
  unsure (1)..(234): unsure at all n locations
  Clone ID: LIB3093-011-Q1-K1-B7
gtgtttagaagcagagatgcaaggaagggcggncggcggagaatcctaggatttcgagccttatgacnattacttgatttacaatgtcagaaccttcgactccgacgccgacgcttctccacctcaacctaagctcaaatccgccatcacccccgccgccacttcctctctctccgccccgaagaagaccaagggccgcggattccgccaggacactgacgccaaccgcaacac

SEQ ID NO: 44401 - DNA, 443 bp, Glycine max
  Clone ID: LIB3093-011-Q1-K1-B9
gtgtatatggttgccgctgatactgcgtagtcttattctctctccatcaccactgtaaaccgtaattaaaaaaatcttaaaatatcttccttctttctttcttcttctttgctcacactgatacagttactccatcgaattctctctcccctctcttcaaaacgcgctgattctgggaactccccgatttttggtttcgagtttttcgcttcttgcggagaaaaatcgcgtctttctcatcgaactcgtcttccacactgaaattctacttcgcttttgctcttttactacagtttatacagatatacatcaaaactaagtttcatcagctttcaccctcatggctggattgttgcttggtgatgcctctcatcatggaacttctcaaggtgtttctcagagatactctgaagagaagctggaagatggttcgaggtggtact

SEQ ID NO: 44402 - DNA, 435 bp, Glycine max
  unsure (1)..(435): unsure at all n locations
  Clone ID: LIB3093-011-Q1-K1-C1
ggccacgcgtncgaacaacctgaactgcttcaaaaagctgtcagaaagaaacttcaccttgaggattatgtgtgagcagtttcagaacttacttaaaatgggtcccatcagccaggtcttttctatgctaccaggatttagtgctgaattaatgccaaaaggccgtgagaaggaaagccaggcaaaaattaaacgttacatgacaatgatggactcgatgacaaatgaagagttggatagttcaaacccaaagctcatgaatgagtcccgaatgatgcgaatagctcgaggttctggtcgtccagttagggaagtaatggaaatgttagaagagtacanacgtcttgcaaagatatggagcaaaatgaaaggggctaaaatacctaagaaggtgaaatgagcgccttatcccgaaatatgaatgctcaacacatg

SEQ ID NO: 44403 - DNA, 284 bp, Glycine max
  unsure (1)..(284): unsure at all n locations
  Clone ID: LIB3093-011-Q1-K1-C11
gtttttgtacggagggaaagagtataataaagacttttttaattaattacatgattgtgtgtacacatttcanggataactgcaaatgttctttatgcttttcaaaggatgaatattgtgattatttatttggttatgtgattnttattcccaacattgattntgttttaaatattttagaangcttaatgtcactttcgatccattatgtttcgcagttgtttctcactggtacattaagttaaaaagtgtcattctggtccttcaaatttttacaatgctgc

SEQ ID NO: 44404 - DNA, 351 bp, Glycine max
  unsure (1)..(351): unsure at all n locations
  Clone ID: LIB3093-011-Q1-K1-C12
attnttctttcatcancctttggaagattntggagaaagcatttacaatttccatgtgggttggattgaatcaacatgagcaacagaaaagataatactgatgatgagtctagtgaaagaggtatattttcacatctaggctatccaagtgcaccaccctaccctcctccacatggatacccaccatcaggctatccacctccaggagggtatcccccaacagcctatccaccaccagcatatccgcctcccggagtatatccgcattccggttactatccttccgaatatccacctgcatatccgcctccgggagggtatccacccactacttatcctcattcaggatat

SEQ ID NO: 44405 - DNA, 368 bp, Glycine max
  unsure (1)..(368): unsure at all n locations
  Clone ID: LIB3093-011-Q1-K1-C2
cccggtcgacnacgcgtcgtgattgaggatcccgccacaacccatgcatcaccaccaccctgagactcatgagagagtcaaggtggtggagtatgaacaagttcctgagaggcgcgttgtctatgaagagaaagttgcttatgacaacgatcgttactactctccaaggtattgaaattggacaaatggaagaacacctataacgtgttatcatgtggctttttattaagcaggctacctagtataccaaaagcaccactgtgcttgtactaaataaattcctgcttatatatactggccattatgttatatataaaaatcatatgcatgccgtttatataaataaagctatngttgaataataanaa

SEQ ID NO: 44406 - DNA, 409 bp, Glycine max
  unsure (1)..(409): unsure at all n locations
  Clone ID: LIB3093-011-Q1-K1-C3
ccacgcgtncgnatgcatctatggccgacaaagaatctccgagattccttcaagcattcatacctcanagggctcgaatggaactaccagagaatgaaagcggaaaaggaccaacaatcttcaacggaacagaaacttctggagaacgaaaaccaggatcagagcaacaacggtgacgcacccaacctccttaattgcgaagctggctcggtctcttccctgttccaggaactgggtgtggttctctcttgctgctactgctgcttttgctgtggtgcttgtgttgatgagaaataaggagctacatggcagtgcttctattctatcctcgatgctcttggtgaaaaattgtgcatagtacagtgatcaaagtttgtacatctgggtattgattttcttatcattattt

SEQ ID NO: 44407 - DNA, 362 bp, Glycine max
  unsure (1)..(362): unsure at all n locations
  Clone ID: LIB3093-011-Q1-K1-C4
gcccacgcgtncgtatgcctgtcaccgatggatcatctcatatccttggaagaagctcattagctgtacatgcagctcctaaagcggaagggcaatactctgagcaacaatcttctcagcttccacctgatgtggagtctgttttgctgcaacaagtattgaatctgacaccagagcaattaagttccttgccaccagatcagcaacaacaggtccttcagctccagcaggctcttcggcgagatcagatacagccctcataacagggaactcatcaacaattcaaaaatagcatcaacttatttgtatactagcatttgctgtagattagcttcagaatatcaaaattctttcaaccacta

SEQ ID NO: 44408 - DNA, 330 bp, Glycine max
  unsure (1)..(330): unsure at all n locations
  Clone ID: LIB3093-011-Q1-K1-C5
gcgtcggaaacaccaaatacacaagggattagtacgtataattttaaaatatccaaagaacatgtatatntgtgtataatagaaaaggaatactaattggggctctccgttggtagaaaaaataaggcagtactccccagaattccgatccagagtatacttccatccaccgattaaataaataactatcagaaacgaaataatcctttaattnttggaagtccccttttattttacttacacaaaaaagactaggataagaacgaagaaaaaagtgatcccccttttctggttgtcttatatccatatttatggagatagaattcatgt

SEQ ID NO: 44409 - DNA, 451 bp, Glycine max
  unsure (1)..(451): unsure at all n locations
  Clone ID: LIB3093-011-Q1-K1-C7
cgtgcgtctaagcactctanctgttgcatatttctactatttttcaatggcttctgcagatgttgagggccgttgccttgttggtgggcttgcttgggtcaccggcaacgatgccctcgagaaagccttttcaatctacggcgacatcgttgaatcgaaggttatcaacgaccgtgagactggaaggtccagaggattcggatttgtgaccttcgcctcagagcagtcaatgaaagatgcgatcgcaggaatgaacggccaggaccttgacggtcgtaacatcactgtcaacgaagctcagacccgcgccagccgtggtggtggtggaggcggtggtttctgaagtggtggtggatacaaccgcggtagcggtggatatggtggtggtggtggcggcggcggataccgtggtcgtcgtgaaagtggatacaaccgtaatggttggggtgga

SEQ ID NO: 44410 - DNA, 464 bp, Glycine max
  Clone ID: LIB3093-011-Q1-K1-C8
ttctcataattataagagaacacttgcttccaaagatgttcaagcctaaccatcgtcaagaagtagatgcttctggttatgaggaaattattggtgctccacatggttcactgagggataaggagccagatactgatactgatggaagctcggaagacttttacgatgcagagatattggatgagatgacaaccaacaggggagagttgaaacttagaactgtaagcagcttcaatgatagaaaccacagcttcagtgaagacagacacactcaggtttatcctggaaatgctgtctgaatatggtgaaatctcactgcaccaaccattttttaggatgcagaaaggatttgggataatagtatgttcctctgtaaaggagtgctcataattttttgtgtggtccgttaaggttgaagatgatcttctgtggaacaagaaaggattcaatcggtgaaagagatg

SEQ ID NO: 44411 - DNA, 355 bp, Glycine max
  unsure (1)..(355): unsure at all n locations
  Clone ID: LIB3093-011-Q1-K1-C9
ccacgcatattttcacgcttacgtctttcgcancctcccacggaatcttgtaaaaaaatattgaatcctcaaaattcccatccttctaaatccaatgtttgctctttttagcccttctctccctatatattttttcacaagcacctctttcaattctctccgtttcactagctcttattccaaaccaaattaagaagaaactgcaaattattataatatggagaccatgaatgtacaggttatgagatgcttatcacatatggtaattaaaaaaggaccattcactgaagaagaagattttgttctgatcaactatttcaacgtccacggacaaagccactggaactccctcgct

SEQ ID NO: 44412 - DNA, 189 bp, Glycine max
  unsure (1)..(189): unsure at all n locations
  Clone ID: LIB3093-011-Q1-K1-D1
acgcgtcgccacgcgtncgctaattcagccacgtcagcagctctgacaaccagacttgaacgagtatgccanagctgaagattagtaattttcttccaccttcaagattaatattgatccaccaatcacgcgtcctgatgtgacatatatatagggcttcaacttgccctcttcacctatgctaatttg

SEQ ID NO: 44413 - DNA, 183 bp, Glycine max
  Clone ID: LIB3093-011-Q1-K1-D10
cccacgcgtccgccataacaaacaatttcacgatttctctttctctccccttctgaaatttggagggtttcgattctcttcctgcatttgcatcccaactttagatgtccagtaccccaataacagaatttctgttcatcattttctgccttcctttaatagctggagtggaaatggccatcc

SEQ ID NO: 44414 - DNA, 412 bp, Glycine max
  unsure (1)..(412): unsure at all n locations
  Clone ID: LIB3093-011-Q1-K1-D11
ccgggtcgccacgcgtacggcaagttccattgatcgacatctacagaatcaacgatctccaagtgggtctgagctctcntgggaacccatccttcccaatcccttctcagatcacaacctccctcgcttacaatttctgcaaatggggcgcagtcattctcgcccttgtcgccaccttcggcagcatcatcaacagagtcactatcttcatcatccgcttccgcgccaaagccccttctctcccatccctaaccctaaacgacgacaatttttacacctcctcctcctctgacgacgacgacgacgacgataacgacgacgacctaacctactcctcttccgagcccgaagacgagccctccgcgtcttccagtttcatccgtttggacgactatttccgactcagaggaac

SEQ ID NO: 44415 - DNA, 218 bp, Glycine max
  unsure (1)..(218): unsure at all n locations
  Clone ID: LIB3093-011-Q1-K1-D12
acggtcgggtgaaggcgaaaaccaaatcaagatgctgagagtgggcgcaaagaggctgttgggagcgacgtctttgggcgttagggttcccccnaggctgtaccacgagagggttgtggatcactacgacaacccccggaacgttggatcgttagacaagaacgacccgagcgtggggacggttttggtgggggcgccggcgtgcggcgacgtgatga

SEQ ID NO: 44416 - DNA, 413 bp, Glycine max
  unsure (1)..(413): unsure at all n locations
  Clone ID: LIB3093-011-Q1-K1-D2
ggccacgcgtnncgccacgcgtncgccaccattagcgtgcaacaaagaacccccacaaagaaaagcaagccgaagaaaaagaacacccctcacccagtgaaggtagtgtacatatccaaccccatgaagatcaagaccagcgcatccgagtttagggctttggtgcaagagctcaccggccaggacgccgagtccccgccagatcccacccgcttccacggcctaattcaccctgattcctcctcttctgtcgatcacatcaaagaggaggaggacaatgttcacagtgtgaattgtgttgttcctcccgcagtcgccgacgaaaatatgagcctcgccggctgctacgaggaggaacaacaacaacagccttcctcgatggagagtataaataatttcgagccgctggacga

SEQ ID NO: 44417 - DNA, 393 bp, Glycine max
  unsure (1)..(393): unsure at all n locations
  Clone ID: LIB3093-011-Q1-K1-D4
attcccgggcgaccacgcgtccaaacagagtcacaagacnaccctcgaccgaacgttttcagggtgatagacacggggttcgggcaatcttaagaagattaccgtgtgccaaatgggaaggacgtggtcgacatcatcctctctcgcacccagcgtcaaacaccaaccgttgtgcacaaatgctttggttggtgcgtgatgggatcagtgacaaagtggggagaagactgaaaataaaccaatagatcacataaagaaaggatgttaagtgtcagggctgcttcaacatgcagaagaagcatcatccaggcaaattgcatttgggttaacatagaatgaggtaaaagaatgacaagatgcatgggaagaaagggataaggattttgagaagca

SEQ ID NO: 44418 - DNA, 181 bp, Glycine max
  unsure (1)..(181): unsure at all n locations
  Clone ID: LIB3093-011-Q1-K1-D5
ctgcggcaatagagagtagagagtaaacataaaatctgatgcgcgagtggctggtgaaggcagctactgcganggaaaggaaacatttttaacctccaaatccattgccggttccttaagcccatccaaaaaacttggccaggttctttttccgccttgccaatttcgtcggtcttaggtt

SEQ ID NO: 44419 - DNA, 349 bp, Glycine max
  Clone ID: LIB3093-011-Q1-K1-D6
aacccttccatcgtagtttccacatttctcctaccgaatagtcaaaactacccactcacccaggtaggcacaggcagcgatggacgtaggagccggcaacaatcattccccggaagccgtcatatcgcggtggaaattcgcggtgtcgcagcagtaccagcacatgctggacaaaacgacgccgcacgttctccggcggtggatcgggtgcctggtggttgccgccgtgtacgtgctccgcgtgtacttggtccaaggcttctacatcgtctcctacgccctcggcatttacatcctcaacctcctcatcggcttcctctcccctcaggtcgatcccgagattagcgac

SEQ ID NO: 44420 - DNA, 465 bp, Glycine max
  Clone ID: LIB3093-011-Q1-K1-D7
ttcaccattgtcaccgggtgctattgtggggcacgtgaatttgtggctgcaactagaaaaacgggacctgatgacatattgaattctgcagtagctggatttggaactggtgctcttctagggcgtctccaaggtggtcaacttggtgcaatccggtactctgtcatgtttgctgttgtggggacaacagcagattttgctatactgaaactgaaagatgctttgagagatcacactaaaacaatataccaacacattgagaattcaaagaagagtggaacttggttaaaattgccggaatggttcccaatccaagtactcgacgaggaagctcttgctgcaaaacgtgctcaagaagagcagttccttcagcagagggcaaggattcgcagcctaagggaagaagaatcttgagaacttcaattttttggtgatgtatgcgctcatcttggagtaagtgaggag

SEQ ID NO: 44421 - DNA, 423 bp, Glycine max
  Clone ID: LIB3093-011-Q1-K1-D8
cccacgcgtccgtattgcgaatgtgttatcctccatgaacctaatcgagaagacgcatacaggaaacacaagaaaaccagcattcaggtggttgggtgtgaggggaaaaacatggggtggatcagttgacttggctcaaaattcaaatgtcaaagagtcacggaaaaggatgtttggaactgacattggaaacataagttttaaaaggaacaaagttgatttgtccatggatggccagaattctaaaatgcaaaatcaacacgaaaatattagtccacgagctcagttagagaaaatcatcataaaaaaaagatgctaagcagacttcagagagctatcagtttggcccttttgctccagcttatgtgcccaaagttggaacctctgaaaataatagtgtgaaaaaggtgcatgactgggaca

SEQ ID NO: 44422 - DNA, 434 bp, Glycine max
  Clone ID: LIB3093-011-Q1-K1-D9
ggaaggccggtcgaccacgcgtccgtataaataaaccttgtccaaacacgttgattctctccttaaacctcacaattcgtcctggcggtagcaaactcctttctttatttcctcaagatataaagataacctaaaatagcattatatttgctgaatgcaaaattaaaaattccttggaattgcaaccaatatgattgtaattacatctgacttgcattacatcaaattggatcaaacagtattagcatacattgacaatggagaaactcttaatctctagcatgtaaagcatttatggttgacttatgttcctcgatagcattttgtgaatgtcatcattgatgattatgcaagtgggcgttgggagttttaatatattttatgttacgtggtgagatgccatttggatcatggagagaaaatgaacttgatac

SEQ ID NO: 44423 - DNA, 416 bp, Glycine max
  unsure (1)..(416): unsure at all n locations
  Clone ID: LIB3093-011-Q1-K1-E1
ccgaatcccggtcgacnacgcgtcgccacgcgtncgcttgttgttgttgttgttggaagccaaaaccctancagccggcgagaatggcanacgttgaggttgatgtggcggcggcggcggcggcggcggctgcagggcagccaaagaagagaacgttcaagaagttcagcttcaggggggtggatctggacgcgcttctggacatgtccactgacgaactcgtgaagatgttcagtgctcgcgcacgcagaaggttccagagaggtctcaccagaaagcccatggccttgattaaaaagctccgcaaagcgaaaagggaagcaccagcaggtgagaagccagaaccagttcgcacccatctccgcaacatgattattgtgcctgagatgattggtagcatcattggagtctacaat

SEQ ID NO: 44424 - DNA, 420 bp, Glycine max
  Clone ID: LIB3093-011-Q1-K1-E11
ctcacactgaacactcttgtagttaatcgaatttctcattccgcagaaaccttggacgatggccgctgaaacgattccctaccagaacggcgtcgttgccagctccaacgattccaccgccacgggcaagaaatcgcgggagaacgaccgccgccgccgccgccggaagcagaagaagaacaacaaggcatctgaggccccggttcctaactcttccgaagagagtgacgatgcgaaagagaacaacgattcaaaacagcttgttgaacaaattgaaattgagtacgtaccggagaaggcagagttagttgaaggcatggatgaagagtttagaaaaatctttgagaaatttactttcactgatgccactgctttggaggatactgataagaaagatggttcagaagaaaatgcagcaac

SEQ ID NO: 44425 - DNA, 268 bp, Glycine max
  Clone ID: LIB3093-011-Q1-K1-E12
ccgggtcgaccgcgcgtacgcttgatcatattacaggaggcatgtcgaagatccttttggtctgtaaatggaccgtagatagttcatatcggttacgaagacgaggaaaatccaaaagtgatggaagcatatgaacaactgggatccttgttggttcacagtagcagtgccaaagaaccaattaatgattccaacaaagaattattttggattaacaatcaatgacccttccattttttttcattaaaacctttgtattcttaataag

SEQ ID NO: 44426 - DNA, 403 bp, Glycine max
  unsure (1)..(403): unsure at all n locations
  Clone ID: LIB3093-011-Q1-K1-E2
ggtcctctctgagattntgctccaaaaccttccccttcatctgatttgcagagactaacccaagaaaggaccaaccaaaaccaagtgctttcttggagcttggtagagagagaaagtcccactttctctctcttctcttttttctttctgtgtgtgttgtgtgcgtgcgtgcgtctgagggtacatgcaaaacagtgagtttgagatagagaaagaaggagttcaagattgttgttcaattttgcaaaaactgcccatcaagtacttttgttgttttttttttcgattttgcttcttatccaacccgttcttgatttggaaggtgattccgggaaggaattgttagggtgctgctgaggctgttcatcacctatctttgtggtgttgatttgccacttctgat

SEQ ID NO: 44427 - DNA, 410 bp, Glycine max
  unsure (1)..(410): unsure at all n locations
  Clone ID: LIB3093-011-Q1-K1-E3
cccggtcgaccacgcgtgggccaggcaagcnccactaaccaccacacctctnctcgttcacgctacccctttctgctcttcttctacgtttcaagttttaaaagtataaagatggcagagacattcctatttacctcagagtcggtgaacgagggacaccctgacaagctctgcgaccaaatctccgatgctgtcctcgacgcttgcctcgagcaggacccagacagcaaagttgcctgcgaaacatgcaccaaaaccaacttggtcatggtcttcggagaaatcacgaccaaggccaacgttgactacgagaagatagtgcgtgacacctgcaggaacatcggcttcgtctcaaatgatgtgggactgggatgccgacacttgcaggtcctcgtcaacattgagcagca

SEQ ID NO: 44428 - DNA, 414 bp, Glycine max
  Clone ID: LIB3093-011-Q1-K1-E4
ttcaacgatggctacgaattcgattacctcatcctccttccgattagtaacaacgagaatcgctctctggctcttccgaaaaaccccacctctcctttcattccccacaaaaccctttttctcaaaacccatcaccttccagagacttcaaccaacaccaccaccacaatcatcatcatcatcaacatcagcatcccttcaacccatcgaagacctacctccgaagctccaagaaatcgtgcacctcttccaatccgtccccgaacccaaagccaaatacgaacagctcctcttctacggcaagaacctcaaacccctcgaaccccaattcaaaaccaacgacaacaaggtccaaggctgcgtctcccaggtctgggtccgagcctacctcgacccgaaccgcaacgtcgtcta

SEQ ID NO: 44429 - DNA, 453 bp, Glycine max
  Clone ID: LIB3093-011-Q1-K1-E5
atcgatgctcgaatcctggatgccctgtcaaaaagcatgtggaaagggcctctcatgattcgaaagttgtgataactacctatgagggacagcatgatcatgaaatcccccctggaaggaccgtcactcagaatgcagctacaaatgctcgcacaacggccagtaatggcaaggctggaaccaaatctgagggtaatattactgatgatacaggggaacgaagcggcttgggctcagcaagcagattaacagagcaactaaatggcgagtcaattactaagtcaaaggctggtgatatggttgagttttgtgtgatcagcctttctaatgagggtcctgaaattaaattaagtgagcaacaacaacaaaaagataattcagctactaaagacgattctgtcagcaatgatgttataagccattcaagttctgggagtctgtgtagatcaaatg

SEQ ID NO: 44430 - DNA, 483 bp, Glycine max
  Clone ID: LIB3093-011-Q1-K1-E6
ccgaatcccgggcgacacgcgtgcatgaattcacgagttttctatggaaacgattccatttatgtgctgcttagacttcatcagagattgtgtgagaggatacaatcagcaaagattaactcatcatctgctgataggaaatggaaggcttcaagtgatacaagctccaccgatcaatatgacaggttcatgaatgccctttacagtttgctggatggttcttctgataatacaaaatttgaggatgattgtcgagctataattggaattcaatcatatgtcttattcacattagacaagttgatatataaacttgttaaacagcttcaagctgttgccgctgatgagatggataccaagcttttacaactatatgcatatgagaaatcgagaaaacccggaaaatttgttgacatggtttatcatgaaaatgcccgtgttcttctccatgatgagaacatatatcgtattgaatattcacct

SEQ ID NO: 44431 - DNA, 393 bp, Glycine max
  Clone ID: LIB3093-011-Q1-K1-E7
ttcttagctccagagtgcatgtgcgaaagcacaaccataaactattctcaagcttaactctccgatccttcatgagtctattgctaaagagatcaatgaaaatcctgaggcacgatgggaggctgctataaatcctcatttctccaattatacagttgaacaatttaagcgccttcttggagtcaaaccaacgcctaagaaggaactgagaagtacacctgctatatctcacccaaagtcattgaaattgccaaagaattttgatgcaaggacagcttggtctcaatgtagcactattggaagaattctagatcaaggtcactgtggttcttgttgggcatttggtgctgttgaatcattgtcagatcgcttttgcattcattttgatgtaaa

SEQ ID NO: 44432 - DNA, 392 bp, Glycine max
  unsure (1)..(392): unsure at all n locations
  Clone ID: LIB3093-011-Q1-K1-E8
cccacgcgttcnaaaacaaagattaaaaaaatcccttanccaacacaaccatcagggccacctgtgctattcagcaatcagcattcactggtcaaactgctctgaagcagctcaatgagttcgtccgcaagaccggtggcgccggcaaaggtcgcactaacatgcgccgcaccgtcaagagtgctcctcagagcatttggtatggccctgaccgtcccaagtacttgggtccattctcggagcagattccatcatacctgaccggagaattccctggtgactacggatgggacactgctggattatcagctgacccggaaaccttcgccaggaaccgggagctggaggtgattcacagcaaatgggcaatgcttggtgcccttggctgcacc

SEQ ID NO: 44433 - DNA, 459 bp, Glycine max
  unsure (1)..(459): unsure at all n locations
  Clone ID: LIB3093-011-Q1-K1-E9
atcaggttgttaaaatgatggagactgatgaatcggttccttcaatacctgaaaggccaatcgctcttgttgctggaaggcttgatattganagatctgtgagtagtagtggctctggtcagctctctagtccaacgggttatcgatcatatactatagaaagtgatcgccaatcttctaattctagggatgaaagaagctcaagctctaggattttgagtacagattgagattgagtgtcaggaaagtaatttgtttgtacatttagtttatagaatgctgtttttttcttgtagtgttttccgttactaaatccaaattggatgtacaaattttgattcttgctagagtttatatgatggcaagcaagagagtatgatcaagttttgctgaattaagtgtcacagtactgttgtatcagaagcaattcttcaattcattttaagaatcttcttttgc

SEQ ID NO: 44434 - DNA, 220 bp, Glycine max
  unsure (1)..(220): unsure at all n locations
  Clone ID: LIB3093-011-Q1-K1-F1
tcttgatgatgcanatgatgatgctgaggatgaacaagaaaatgaaaatgacttagaagtgacagaagaagctgagcctgttctccggaagcctcctgaaccaccagtggttacaaaaagaagctgaaaggcaactttctaagaaagaattaaagaaaaaggggcttgaagaacttgaagcttgtttggctgagctaggatacacaccgaaggaacccac

SEQ ID NO: 44435 - DNA, 383 bp, Glycine max
  Clone ID: LIB3093-011-Q1-K1-F10
ctttattgcatactcctttcttcatgagaaatgatataatgtcaaagtgtgctggactagcgcaatttgatgaagaactttataaggtaactggtgaaggagatgacaaatatctgattgcaacagctgagcagccactctgtgcatatcatttagatgattggatccaccctacccagctaccattaagatatgctggatattcatcatgctttcgtaaagaagctggatctcatggtcgagacactctaggaatattccgagtccaccaatttgagaaagtggagcagttttgcctcactagcccaaatgacaatgattcatgggacatgcatgaggaaatgcctaaaaacttttaagatttttacaagcgtttaaccttt

SEQ ID NO: 44436 - DNA, 353 bp, Glycine max
  unsure (1)..(353): unsure at all n locations
  Clone ID: LIB3093-011-Q1-K1-F12
gcgcgtacggnggagatgatggttacttcaatatccgaatagggacaaacgaatgtgggattggagaggagttaactgctggtttgccttccaccaaaaacctcgtcagagaggtgactgatatggatgctgacgctgctgtttcattctgaatgcaaatatattattaccttaccaattatattctgtatgggtattgtaattgaaaaatcagaactagatgttgcctgtagtctgaacctctctgttttaaggggaacaatctaaattatgattacgatgttcaaagatgttaagcttttgttgtttatctgttatacgaaataagagattaactgctatagttactattc

SEQ ID NO: 44437 - DNA, 406 bp, Glycine max
  Clone ID: LIB3093-011-Q1-K1-F2
actagtatggagtgtttagccatttgaacaaaaataccgtaatgaagaggtgcggagaaacattcacacaccaaacaaaaactgttattaaaaaaaccatttggtggtgtggccaccatttaaatcatggaggaagaaagagctccatcggcagcagtatcctgcgagaggccaaattaagaacgattggattcaagcttatgagaatcagagtagaagaccaaactctttatatgtaaaggttaacatggaaggggtagccataagaaagaaaatcaatctgatgcttttcaattcttatcagacacttacaagcagattgatcagcatgtttgctaaataccaaaaatttgaggaagttggaaaaagttacacactcaactttcaaaacgaacaagggattggc

SEQ ID NO: 44438 - DNA, 438 bp, Glycine max
  Clone ID: LIB3093-011-Q1-K1-F3
gattttgtgagcccaggtggcttgattcaattaaaccatggtaggcctcagcctctccaatatgtggtcagtgcggcctttttggctgccctatatagtgattatcttgatgctgctgatacacctggatggtattgtggacctaatttcttttcaaccgacgtgctccgtagctttgccaagtcccagattgattacatccttggaaataacccaaggaaaatgagttatgtcgtaggttttggtaatcattacccaaaacacgtccaccatagaggagcatctgtaccgaagaacaagatcaagtatagctgtaaaagtggatggaaatggagggacacttctaagccaaacccaaatacaattgttggtgccatggtttgccgtcctgacaagcatgaatgctttcatgatgttcgtacaaactacaattacaca

SEQ ID NO: 44439 - DNA, 425 bp, Glycine max
  Clone ID: LIB3093-011-Q1-K1-F4
aaacaacactgcaggcacctttagatttttattttcttcactgttcacacacgatttcctcgtttccttgcacattatcctttacctttttttaaacaagccagcccagcttgcttctgttccttctcttctaaccagtatcacctacacggtgtgtgtgtcccttcatcctggaaattagagccacaaacataacacattccgctttgactttggaggcaggtttttgtgctttgtctggttcccaatcaccgtgatatcatggaatccccacaatctgttgtgtcaccattcaagaggtctgtcttgggtgatgcagagaagtataggtctgatgttctgtctaaggacattgaagtcaatggaaaggaacgtgccgtgtgtaatgtggaagaattcattggtgttgttgatgtttacattca

SEQ ID NO: 44440 - DNA, 340 bp, Glycine max
  Clone ID: LIB3093-011-Q1-K1-F5
agcgaccgaagtatcacatcaaccttatcctgattagggttccggttacttaccctacctgtgacgttgcgaaaccttaaatttggcattaggtctgagcaatctggttggcagaacctttggtcttacagagtcaagtattatgtctggattaaacgatcaaattcatactgccttcgatactttcgctgatgcatatgctgatgactctgctgctgactcaaaggattatgtacatattcacgttcatcagcgaaatgagtagaaaagcctgacgaccggtcagggattgaaacaagaattgagctatgacaagatacttaacgacgttctgaaagac

SEQ ID NO: 44441 - DNA, 446 bp, Glycine max
  unsure (1)..(446): unsure at all n locations
  Clone ID: LIB3093-011-Q1-K1-F6
ccacgcgtncgtagggttcacaacttttccttttccttttgcttgcgaatctgaatcaaagagtcaatgatccattcattattcatcatgtcgtcggcgaataaaatcacgctgaagagttcggacggcgaggctttcgaggtggaggaggcggtggcgctggagtcgcagacgataaagcacatgatcgaggacgactgcgccgacagcggcatccctctgccgaacgtgacgagcaagatcctggcgaacgttatcgagtactgcaagaagcacgtcgaggccgcgaatcccgaagacaaaccctccgaggacgatctcaaggcctgggacgctgaattcgtcaaggtcgaccaggccacgctcttcgatctcatccttgctgctaactacttgaacatcaagagcctgcttgaccttacatgtcaaacttgtaccgacatgat

SEQ ID NO: 44442 - DNA, 438 bp, Glycine max
  Clone ID: LIB3093-011-Q1-K1-F7
ggtcgggacgcgtgcgcttgtgttctcttgttcattcatctcacttctaattaaggaacaagctttccaccgatttgtgtcaccaatggctcgctctttctccaacctcaaggttctctctgctcttgtcgccgacggattctccaacactctcaccaggcgtgggtacgcagtagcgacacaaagcgcaacaagaggaggagcagcctccatcagcggcaagtcaggggaagacaaggtactaggaggaggtgctgaaaaggtttcgtgggtcccagaccctgtcactggttactacaaaccggagaacatcaaaaaaattgatgttgctgagctgagagccactgttttgggcaaaaaattcaaccactaggctctacttaatttcaataattaacctttttggtctcacgtgaatatgttatatgatatatgaag

SEQ ID NO: 44443 - DNA, 451 bp, Glycine max
  Clone ID: LIB3093-011-Q1-K1-F8
gcgaatccaaaatccaattacgaagaatgggacatgacactataacacaacaagaacagcattttgccctaatcccactcgcgggactcggaattaacaactagagtgcccaaaagtcaacaatttcgattcttgccccgttcatcatcattacttcttcttcattcattcccccaaccttttctcgtctctctatcagaggggatctatgaccaactgatgatggatggtggctgggtattcacctgaatttgttcattcgtgataccctttgattgagtatccgagcaggttaggaagaatttagttggggaattataattttgctgtgagtggaataagaatcttgattagggtctgtttgttttcttggaagtcttgattttttttcacttgaattgtggctttaatacattacattttgtgaaagttgcttcttgatattgggttt

SEQ ID NO: 44444 - DNA, 444 bp, Glycine max
  Clone ID: LIB3093-011-Q1-K1-F9
gtcgctatgccatggagattagttctgctgcctacaagaacttttggcgctttgacatggagagcctccctgcagatctcatccgcaggggaatggccgtacctgacccaacacagccacatggtctaaagctcatattggaagactacccttatgcagctgatggaatactaatctggtctgcaatagaagactgggttcgaacctatgtgaaccattactaccctcactcaagccttatatgcaatgacaaagagttacaatcttggtactctgagtcaatcaatgtaggccatgctgatctcaggcatgaaagttggtggccaacattgaacaatagtgaggatcttgtgtccattctttccacattgatttggaatgcatctgcacaacatgctgctctcaactttggccagtacccttatggtggctatgtgcctaatc

SEQ ID NO: 44445 - DNA, 279 bp, Glycine max
  Clone ID: LIB3093-011-Q1-K1-G1
ttgatcctggagaagggcttgatagccctctctctctctgctgctgcaattcagacgatttgtcttcacatggaagcattgcttgcttgaaggacgcctttgtctcaaaagagttggaattttcgggttttttgtgggattggagatttagagagtgcccttgcactccctgttttatttcatcaccatgattgcccactgaactatagtaccaagtacccaaatgaagatcaagttctcaaccaaaagatagagattgattctgggccaaaatgtgag

SEQ ID NO: 44446 - DNA, 454 bp, Glycine max
  unsure (1)..(454): unsure at all n locations
  Clone ID: LIB3093-011-Q1-K1-G10
ggccgaccgggcgtacggtgggcatgnanaaacctgnattggacttctggcagcactacatcttcagcatattaatgcgcttagttcttcacagaagttaactgcgtgaagaagggccacaactgcgtgaagggtttatcttcaatggcatcaatccattgtcggcattctagtatatgtgaatatgagagctacaatttcgtagaaattgtgtcggtgtctaaatcgttgattgttttgcaaaattttgagaatgctagtttgttctgtagtacaaccgtccaagtatgaatgaatcaatacgtattgtatggtcctaaatccctataggtattgtctttttttgttcaatggccccaatatagtctcttttctagttagtttttcctggtctcagaatcatgttattagaaccatgtgattttgtaatagaataaaaagttaccaaaaattt

SEQ ID NO: 44447 - DNA, 404 bp, Glycine max
  unsure (1)..(404): unsure at all n locations
  Clone ID: LIB3093-011-Q1-K1-G11
tcgacccgcgtacgggcatcttcttctggtagtttatacacctctgcaagtgcaaactccttcaccagcttcacctgtctccacacanccctttcatgaccacttctttctctgaccttcttgcttctcccacagacaacaacaaaccaccacatggtggtggtggtggtttgtctgagagaactggctctggtgtccccaaattcaagtccacaccaccaccttctctgcctctctctccccctcccatttctccttcttcctacttttctattcctcctggtttgagccctgctgagcttcttgactcacctgttctccttaactcttccaacattctgccatctccaacaactggagcatttgttgctcggagcttcaattggaagagcagttccgggggg

SEQ ID NO: 44448 - DNA, 423 bp, Glycine max
  unsure (1)..(423): unsure at all n locations
  Clone ID: LIB3093-011-Q1-K1-G4
gtagggctttacagtgtttctcttccttcttcttcttcttcttcttcttcttcgntgaatcgcgattgttctgtgcgagagaaagaagagagagatcgaaaatggcgttggctttcgacgagttcggaaggccgttcataatcctgaaggagcaggagcagaagagcagactccgaggattggacgctcagaaagccaacatctccgccggcaaagccgtggctcgcatcctccgaacctccctcggccccaaaggcatggacaagatgctccagagccccgacggcgacgtcaccatcacgaacgatggagccacgatccttgaccagatggacgtggacaaccaaatcgcgaagctgatggtggagctctcgcggagccaggactacgaaatcggcgacggaaccaccggcgtcgtcgtca

SEQ ID NO: 44449 - DNA, 207 bp, Glycine max
  unsure (1)..(207): unsure at all n locations
  Clone ID: LIB3093-011-Q1-K1-G5
cggtagaaatttacagaatttctcttccttcttcttctttttcttctacatcttccanaaatgccgatttgtctattctaaagaaacaacacacatatctaaaatttctttttctttctactanttcttaatgcctttcataatccttaatgatcattatcataatatcatactcctactattttactctcataaaaccaacatctt

SEQ ID NO: 44450 - DNA, 402 bp, Glycine max
  unsure (1)..(402): unsure at all n locations
  Clone ID: LIB3093-011-Q1-K1-G6
gtatttgctctgctaatttgtatttctttttggtgaattgctgctaactttcattcttgtgttctttgtggtttttagtttcaggatgctggaaattcatgctcacactgagtcctgcagggctgctcgattcatcaacggtggacgtgcgatcttgacaggttctccggattgcttaatactggctacagatgtggaaactggatctacaattgctcgtcttgatgatgctcatgagtgatcaaatttcctgcaattacacctttgtcatgatttgggttacagtagattcacaagtatcttcattgctttagaatttgtttgtggtttttgttgtgatgcanggctgcgataaatagattgataaacttgactgagtcaactgttgccttcggagatgat

SEQ ID NO: 44451 - DNA, 406 bp, Glycine max
  Clone ID: LIB3093-011-Q1-K1-G8
cccatttttcacaccaccaacacaagatgtttctccacattgtgttcctcctttgccttctcgcatccacttcccatgccactgtccaagacttctgtgtggcagacctcaaaggtgcagacacccctgcaggctacccctgcaagccacctgctaatgtcacttcagatgactttgtgtacactggcttagctgaagctgcaaatgtcacaaacataatcaatgctgctgtgaccccagcttttgttgctcaattcccaggtctcaatggccttgaactatctgcagcaaggttggaccttggtcctagtggtgttatcccactccacactcatccaggtgccaatgaactactcattgtgcttcaaggtcacatccttgcttgattcatatcttcaggtaacat

SEQ ID NO: 44452 - DNA, 215 bp, Glycine max
  Clone ID: LIB3093-011-Q1-K1-H10
aaccaaaaccatctgctggtgctggaaaatgatctgccaattctgttatttttatgtagaatttagttttgtcagtcactgttttgggtatgtgttgtttttccctgtagtgtagctagttcttctaagaggatcttgtcatgtggttgatattaaagcaccaagtataggctttcttttcagtcttagagaatatctttgaaaattttggatgt

SEQ ID NO: 44453 - DNA, 438 bp, Glycine max
  unsure (1)..(438): unsure at all n locations
  Clone ID: LIB3093-011-Q1-K1-H11
caactgtagtagattntttttcctaattattaattttttattataagatagaagtcgagatgttattatagaaaattgagttgagtattattccgatccactacctgngttatatttgttttgcattttgaattttcatttacatttttttacataaacatatatacgcgcgggtaatgggtgaagctggaattgaaatccttgtgtagttgttgcagtggaagacaaagaagatcaaataaatgggtctagctttaaccgtcggattcctcggccttctcattctatttcacgccgcttattcaactattcagtgtatcctaaaactgattatcaaactagttttgctttttgagtgttggggatcttggatctcaaatttgggtctgattttttgtgcagacaggggcgtgttgaagatactgaagagagttttca

SEQ ID NO: 44454 - DNA, 465 bp, Glycine max
  Clone ID: LIB3093-011-Q1-K1-H12
ctgaaattttcttccctcgtgatgctcttacccttcccacaggctatcataagcggaaaagcggggagtcagaccaagctcacataatgacttcaggaaacctattagttgagatcttaaatgatctgaagcatgcattctggccttttcaacatgatcacaccaaaactttattcttgagggcggcaactgctgctaactgtgttgacagatctgattttgttggagaaagtggctcacaaattgcattagctaaggctgctcaacataggctagatcgaggtgtttggaccagtgtgcgttttggggacatgaagcgatctttgtcggcatgtgaacgtcttatcctgttgaaaaatgatgcaaatgagttaagagattacagcattcttctctatcattgtggattatatgaacagtcactggaatacctgacgaaataccgagatctgaagaactcatcta

SEQ ID NO: 44455 - DNA, 367 bp, Glycine max
  Clone ID: LIB3093-011-Q1-K1-H2
acgcgtcggcacacttgtttcactttctttgtaaacccataactacacacaacctttctctctcttttacagaaacctgagctataaaccagatcaaccttacctctctccacttcttactactgtgaagtttgagtttgtggtgtgcaagatatgaaggattttaccatttaaagagatcaacttgttaagtatatggagaagaaagagatggctgtgaaaactgaggatgcggttgggtcctcttctttcccttgttataattattcaaacctttatccattctcgaacgcgtttgatttctctgaggttgaaaagagctctttagggtttatggagttactgggtgtgcaggactatagtcctc

SEQ ID NO: 44456 - DNA, 365 bp, Glycine max
  unsure (1)..(365): unsure at all n locations
  Clone ID: LIB3093-011-Q1-K1-H3
acgcgtcggccacgcgtnncgccacgcgtncgaactttcatcatgggctaagtttgaaaataggaaggctgctgtctattggaaaaccatgaatggcctccctccttcttcaggagaaaaagctaaacttttctataatccagctgcaactcaacttgtccctaatgaagaatttggaattgcttttaatggaggctctaatcagccaattatgtgtggtggtgagccaagggctatgcttagaaaatatcgaggcaaagctgatgccccaatatattccattcagatatgcattcctaagcatgctctgaacttgatcttttcatttacaaatggagtagactgggatgggccatatagactac

SEQ ID NO: 44457 - DNA, 390 bp, Glycine max
  unsure (1)..(390): unsure at all n locations
  Clone ID: LIB3093-011-Q1-K1-H4
cacgcgtncgcgacgtcttctacaacaaggacagggtcattgagatcaatgtgcgcaccgatcccaatgcgctggtggatctcaccgaggatgctgaggttcaggccgagtttttgtacacggttaagtggaaggagactaacacgccattcgagaagaggatggacaagtactcgcagtcttcatcgctgccgcatcatttggaaatccactggttctcgattatcaactcctgtgtgacggtgttgctcttgaccgggttcctcgccaccattttgatgagggtgctcaagaatgattttgtcaagtatgcacatgatgaggagtctgcagaggatcaggaagagactgngtggaaatatatncatggggatgtgtttaggttcccca

SEQ ID NO: 44458 - DNA, 265 bp, Glycine max
  Clone ID: LIB3093-011-Q1-K1-H5
gtgttctacattacacaatatcccttcgatcaccgtatttacagatctattactgccactgggggtctgtggctttggtgaatttgataatcatctatatatccaacaggccatcgtgactctgaccggaatgctgctgacagatgaacatgcgtatgatggaccctcgcttctcctgcttgagagagtacagccgagtgacatagctaagttctacagaggtttatgcaagaaactgactgaatcaaccactgatgatgaatct

SEQ ID NO: 44459 - DNA, 391 bp, Glycine max
  unsure (1)..(391): unsure at all n locations
  Clone ID: LIB3093-011-Q1-K1-H7
tcctgtcctttttnagttaacaccatctctctctctcttgtgccctttgtaggatttttgaaatgggtctccccaaccaccaanaaaaggataacaataacaatgataaggttgtggatgacggatatgttggaggaggaaagtctttcggttcagtgtcgtgttccatttgcctcgaggttgttgccgataatggggatagatccttgtctaagcttcaatgcggtcatcaatttcacctccattgcattggttcaccattcaacataaaaggagcaatgcattgccctaattgtcggaagattgaaaaaggtcaatggctatatgctaatggttggcgctcatatccttaatttaacatggatgagtggactcacgattaggatcttta

SEQ ID NO: 44460 - DNA, 423 bp, Glycine max
  Clone ID: LIB3093-011-Q1-K1-H8
ctcctctcttgtctgtgcaatcaaaacaacaacattcattcatactgatcacttgcttgcctattgcacattcttcatcacttcattcaacatttctctctcccttagctagtttttaccaatggctgctgcggttagtgctgcagtctcttttccatccaccaagtctacctctctcccaagcaggacctccatcattaccccagagagagttgtattcaagaaggcttcattgcaatacagagatgtttgtagcagtggaagggtagtttccatcagagctcaagtcaccactgaggctccagccaaggttgaaaaagagtccaagaaacaggatgaaggtgtggttgtgaacaagttcaaacccaagaccccttacgttggtagatgcctgctcaacacaaagatcacttgggatgatgc

SEQ ID NO: 44461 - DNA, 370 bp, Glycine max
  unsure (1)..(370): unsure at all n locations
  Clone ID: LIB3093-011-Q1-K1-H9
gcgtacgnccacgcgtncggccttcacaagattggntttgtattccaccggantaaaagaagggagggggggtcatgttctgatgatgaggagattctgtctccacatgataacattaggtcagagaatgctaaggggatgattgctgtgaagtttgtcatggacgagaacatttccggctttcaaactggtaaggttcatgcagaagggggatcaacagaagggagtggtcctgagagccctgccagtgccaagggaaatgtgaaggatatggcgaagaatatttttaaacatgcagaaaaatccgctcgtggcttgaagcacgttctttcttgtaaatcaaggaaattgaaatttaaaggtgagtctc

SEQ ID NO: 44462 - DNA, 386 bp, Glycine max
  Clone ID: LIB3093-012-Q1-K1-A1
gattacgtttgcattgagttgcgctgttccttcctcctgttgttcgtatttatttcatttacgccgccgtcgtctccgccgcagagagcgatgtcttccgtcgaaacggagatggagccactcacgtcgggggccagcaaccgcataattccgctcctcaaggccctcagagcctccctcatcttcgtctacaccttcttcctctccttcctcctcttcgtcctcccccgccgccgccgcctctcccccgcggcggggccgccctctccgaagaagcatttgaggcggcgctggctcgtgcgcgaggaggaggacacgtgccgcagaagggcgctggcgcaggacgtgggaatgggtcgcgacgaaaggtggtaccgctggagcac

SEQ ID NO: 44463 - DNA, 242 bp, Glycine max
  unsure (1)..(242): unsure at all n locations
  Clone ID: LIB3093-012-Q1-K1-A10
acgcattgatgatggtttacgtgtggagcaaacttaatcctttcattcacatgagcttcctgggtctctttactttcactgctgcctaccttccanttgggtctcttggggttctctgtactcgttggtgctagtgcttgggtggatctactgggaatgattgctggccattcatattattttcttgaagaatgttaatcctcggatgacangtcgtangccacttaaaacaccctcattca

SEQ ID NO: 44464 - DNA, 419 bp, Glycine max
  Clone ID: LIB3093-012-Q1-K1-A2
tccagtccaagtcttgggtcagtagagcacataagtgccactgaaaaactaaagaaagaagaagagaagaaaaggcgtcaactagaagcagagttgaaattaatagaagaagagactgcaaagagagttgaagaagcaatccgtaagagagttgaagaaagcttgaaatctgaggaggttcaggtggagattgaaaggcggttggaagagggacggaagagacttaatgatgaagttgcagctcaacttgaaaaagaaaaggaagctgctattattgaggctaaacagaaggaggagcaagcccgtaaagagaaagaagatcttgaaaggatgcttgaggagaaccggaggaaggttgaagacgctcagagaagggaagctttagagcagcaaagagggaggaagaaagattaaagagc

SEQ ID NO: 44465 - DNA, 441 bp, Glycine max
  Clone ID: LIB3093-012-Q1-K1-A3
gcaattttcccagaaaattcatccaacattctctaggcagccaaagacttcccaccgggaacagatccgctctcctcgctgcctccgtcgccgacgcgtcggccaccgctgcttacctttcctcctccgcaaaactctctctccaggacggtggggctcagagagaccacggcggatcctcgccggcggcgagttcggcgtcaacggagaagttcgcgccgcggttcgacgggttgcggttcattgaaacgctgattactgcgcacagatgaacgcgcggtgttcaaacgcgcttttggggttttttttttaccctaatcttttttgatcttgcactgtctaaaaaattgaggaaaattaataacgtgggagatgtttaattgtttttctaatgatgatttgccatttgggcttttgggttgaggaatggacagaaaattg

SEQ ID NO: 44466 - DNA, 402 bp, Glycine max
  Clone ID: LIB3093-012-Q1-K1-A4
cttagccgaggtcacgaggagcactagctagtttcacaatttccaaatggctaggggattgaggaagcatctcaagaggctcaatgctcctaagcattggatgcttgacaaactgggtggtgcatttgcgcccaaaccctcatctggaccacacaaatctagggagtgccttcccctcatactcatcctacgaaaccggctaaagtatgctctgacttaccgtgaagtcatcgctattctgatgcagagacatgttcttgttgatggaaaagtcaggactgacaagacttaccctgctggtttcatggatgttgtttcaatcccaaaaaccaatgagaacttccgcctgctctatgacactaaaggccgattccgtctccattctgtcagggatgatgaagc

SEQ ID NO: 44467 - DNA, 433 bp, Glycine max
  Clone ID: LIB3093-012-Q1-K1-A5
gaacgattttgcaatggatttgaagaagtgttgagtcagtatagggaaggggttcctaatatgcgacttgcaggtcctacttcatttgcaccaattgttgaaatggccatgacaatagttgagcagagtggaggccagtaccatgttttggtgatagttgcagacggccaggtaacaagaagcattgacactgagcgtgggaggctaagtccacaggagcagaggactgtggatgccattgttgaggccagtaaatttcctctttcaatcatattggttggtgttggggatggtccttgggacatgatgaaagagtttgatgacaatattccaactcgggcctttgataattttcagtttgtgaatttcacggaaattatgtcaaagaatattcctccttctcgaaaagaagcagcatttgcacttgcagcac

SEQ ID NO: 44468 - DNA, 391 bp, Glycine max
  Clone ID: LIB3093-012-Q1-K1-A6
atcatagcctttctttcgtagctactactacttgagtttcattaattctttggttcaaaaaagcttagttgttggtagagattgaaaattaggaaaatggtgagtgttgaagagattcgtaaggcacaacgtgcacaaggccctgccaccgtgatggctattggcacggccactcctcccaactgcgtggatcagagtacctatcctgactattatttccgcatcaccaacagtgaccacatgaccgagctcaaagaaaagttcaagcgcatgtgtgataagtcaatgattaagaaacgatacatgtacttaaatgaagagatcctgaatgagaatccgagtgtttgtgcctatatggcaccttcattggatgcaaggcaagacattgtgg

SEQ ID NO: 44469 - DNA, 310 bp, Glycine max
  Clone ID: LIB3093-012-Q1-K1-A7
gctacagaactcctgatcctgtcactgggaaaagaaactactcttacatggatgctgttagaggttatcttggttataaaaggacatgtgtagctggcttccttcaatttttgactttgtatggtactagtattgcttatgtactaaccacagcaactagtctgagtgcaattctgagatcaaattgttatcacaagaaagggcatgaagctccttgtaaatatggtggcaatctgtatatggcactgtttggacttgttcagattgtaatgtcattcataccggatctccataacatggcatgggtttc

SEQ ID NO: 44470 - DNA, 323 bp, Glycine max
  Clone ID: LIB3093-012-Q1-K1-A8
cccacgcgtccgcccacgcgtccgagcattatcaaaagcaagaagaactgggctaagcagaaggggcctcttcagtgatggcatctgtggccctcaaacctgcccctttcactgatgagaagtcctcagttagaggccttccctccctctcaaggaactcctcttcattcagagttgcggccagtggtggcaagaagatcaagactgacaagccttatggaattaatggtggcatggcttttagggaaggagttgatgcatctggcaggaaaggaaagggaaagggcgtttaccagtttgtaaacaaatacggtgctaatgtc

SEQ ID NO: 44471 - DNA, 411 bp, Glycine max
  Clone ID: LIB3093-012-Q1-K1-A9
atacgcttgcgtcttcaggaaattagaggcgttccaccaaacttaaaacaattcatggcaagagaagatatattctaagcttggtcgagttcaaacatgttgtcaaatcatgaattgcatgatgcttgacaaactgaattcatgtttccaggatcaactattccacactggttcaatcaccaaagtagcggaccttcaagttctctctggtttcataataaattccctgacaaagatctttgtatacttctaacacgtctagaatccatagatctagatgatattcccatgcccaacgtgttcatcaatggcatactttgtaagatttcttctaggaactatcacataagaaagctttacatgatcttgcataaaatgaatgagaccactgtgaaattacatacagaggta

SEQ ID NO: 44472 - DNA, 429 bp, Glycine max
  Clone ID: LIB3093-012-Q1-K1-B1
cccacgcgtccgcctcattccagccacacgcttcagaagacatggcctcattgggtgggttacaaaatgtgagcggcatcaattttcttatcaaagagggtccaaaagtcaatgcaaagttcgagctgaagccgccaccatatccactggtaataagacctagagtttgcatgtttacaagagaattcattgtgattttctagtggagctatatttctaatgcacattgaagaaagaatacttagcttttatagttttcaaatttacattctattgaaactttggttagtcttgctttaataaagaaacttaaaaatgaaacgatacatggacataggcatctcaatacatgcatggactaagtactttggttactcttattttctggtcatcatggatccgaagctataatctaacttaacacacaca

SEQ ID NO: 44473 - DNA, 483 bp, Glycine max
  Clone ID: LIB3093-012-Q1-K1-B11
gattggactatttgcttttcctttccaatacttatcaaatggagcacacaatgactacaatgaattatttaaagaaacagatttcaagatgaagacatcctgaatgtaaaacattttgcattcttagtggataagaattaatccttctataaatggcgttcacatttttttttcttttgtgcaatttcgctccccaatctgttatattcctccaaatccaaaagaatggcacaaacggtttcttctaataaccaaacaaattgcattgctttttacaccatagccatcctttcttgtttggttttgatgatctcttcctctctctcattcaagaaattgcaacaataatttgagaccctctttcaatgtaccttgctgcctcttctgcatcatattaagatccttaaaatacgtatgctgaaaataaaccttgacaaaaattttgatacattttgcatcttctctgatacaaattttaatttt

SEQ ID NO: 44474 - DNA, 313 bp, Glycine max
  Clone ID: LIB3093-012-Q1-K1-B12
acgtttcactcctgattatgaacactggaaacgtttaatgtcccagtcttatctagaatctatggtaatttattaatcaaatgtgcgcaatgtcatcgatatgaagtctatctatcgagcatttgctgcagctttgatagatttcaacgtttgggtcataaatgtgcttacaatatactcccctcatacttcttcccattatattttaacgatgtctattcaatatatatcatcattcgtgtgaatcatttaccacctatcctactacctatgatctcctccatgcttatcaatctctttaaaacttaacaaa

SEQ ID NO: 44475 - DNA, 406 bp, Glycine max
  Clone ID: LIB3093-012-Q1-K1-B2
cccacgcgtccgaaaagagattagagagagagagagagaggagacgaatgagacaagatagctgaacataaaggtgaggttacgtgtatctcttgaagtagtgccatgccaccccatcaataataagatcactcaatcaccaatgcatcatcgttgttggaattccagcgctgtgtttggaaattggaactggaggggcttcaggtgccataatctcaaccttagataacagattattgcacagcaaaaaccttgtaaaaggagaattagaatcacctctctctaaggatgttggaaggaaaggctatggtgaaagaaacagacatgtcaaccaagatgcagatccatgccatggcctctgcttctcaggcccttgatctctacgatgtttatgattgcatctcta

SEQ ID NO: 44476 - DNA, 386 bp, Glycine max
  Clone ID: LIB3093-012-Q1-K1-B3
tgacgagtttcatggcatcaaactatggtggtttacacacaaagtaagcaacactccacataggtacatcccttagggttattacggatcctcagacgagaaaaggttctacaagctaacattccataagcgccaccgagatattgataccatgtcttacataaagcatgttttggatgaaggaaaggatattgagatgagaaacagacagttgaagctttacacctacaatactattactgattggtatggttacaagcaatcaatgtggagccacattgtgtttgaacaccctgccacttttgaaacactcactatggatccgagaaagacggaggatatacttatagaccttgcgatgcttaacaagggaaaggattattatg

SEQ ID NO: 44477 - DNA, 390 bp, Glycine max
  Clone ID: LIB3093-012-Q1-K1-B4
ggagtgctcttctctgttctctcaattccttcccaatccaatggattctgcgttctccatcacgaccaatgcgcacgtggcgcttttcagagtgctccaccgtcatttccacggagctcctaaacgcgtcttgcttcgctgcaacctcaaacgccttattgcttcctacagtagcagcaactgctgccgcattccgtgttctttcgcctccgcaccgtcgccttcctcgctcggatccttccgcggactactcccgcgaacgccgccgtgcagtccgcgctgcatttcctttgcttctcctgccggcggtggaaatggcggcgctggaaccggagacggtggtggaggtggcggttctggcggggagtccggagatgttaatctcaaact

SEQ ID NO: 44478 - DNA, 366 bp, Glycine max
  unsure (1)..(366): unsure at all n locations
  Clone ID: LIB3093-012-Q1-K1-B5
aactcccggctcggccgactcctcctaaatagttcactacgattatggcagctcgcattctatgcaggctactaagacactctctcaagaataacaatactatcaaagctgctccaaaacttaactcactattacgacaccctccagcaccaataaacactaacataatacctacactgcgcatatttacagaactaatcactgcacattttctaatacatctcacacacaacctcacatataagcaataatactaagctgcaataggtaacacatttacaacatattaaccctgctcataataatggattactaatgaaacttaaaaataaaacgatacattcacacatgcatnttaatacattc

SEQ ID NO: 44479 - DNA, 269 bp, Glycine max
  Clone ID: LIB3093-012-Q1-K1-B6
gttttgcctgttaaattatttgttccttttgcataattcccaaatgctatgctgtcaatagagaagttttgtaaaattcatttatacaatttccttagttaatgataccctcactttatttctgctcccgttctcggttttaccatgaaccaaatgtgctgtcgacattttcaagattacctacctgtctgggtggttgtattcaaaagaaaattatgaatacactattgaaaaactacaacaacaaacaccgtcatacaaacaaaact

SEQ ID NO: 44480 - DNA, 424 bp, Glycine max
  Clone ID: LIB3093-012-Q1-K1-B7
gttgaaaagaaaccctagcaagtggagcaatggcagacgttgaagtcgatgtggcggcagcagcagcagcagggctgccgaagaagagaacgttcaagaagttcagttttcgaggcgtggatctcgatgcacttctcgacatgtccaccgatgaactcgtcaagatgttcagtgcccgcgctcgtagaaggttccagagaggcctcaccagaaagcccatggccttgatcaagaagctccgtaaagcgaaaagggaagctccaccaggtgagaagccagaaccagtacgcacccaccttcgcaacatgattattgtgcctgagatgattggtagcattattggagtgtacaatggcaaaacctttaatcaagttgaaatcaaacctgagatgattgggcattatcttgctgagttttctatttc

SEQ ID NO: 44481 - DNA, 360 bp, Glycine max
  Clone ID: LIB3093-012-Q1-K1-B8
tctctctctgagactgagaatccgatccttcgtttctgaaattctcccgagatggacgagaacgtgctcgacgatattatccggaggctcctcgcggcgaagaacggtagaacgacgaagcaggtgctgcttaccgaggcggaaattcgtcaactctgtgtttcctccaaagagatctttctcagccaacctaatcttctcgaactcgaggctcctattaagatttgtggagatgttcatggccaatactcagatcttttaaggctgttcgaatatgggggatacccgcctgaagcaaattatttatttctcggagattatgttgatcgtggtaagcagagcatagagacaatatgctta

SEQ ID NO: 44482 - DNA, 491 bp, Glycine max
  Clone ID: LIB3093-012-Q1-K1-B9
cgcgtacgcttcaatcctttcgttattctcttattcattcttctcttctgaataatccagatctctttggacccttttcggcgtcaggcttttcgtgaccggatctgtatggatttgatccagatctacacgccgatggtggttttggccgggtctttcatagatctggtgcgtataggctcagatctacggtaccgaggtgtgtgattcatgttcgtcttgcttttggaatctgtttcgtagaaagtcgtttggtcttgcatatggcatggctcttgaggtatttttttgcaggtacaacagagaatcgatgacaagaacgcagatccgacggtagatccagccgattccgcttgttcgatcgctacagacccctgtatcggatcattaagcagcgtgtctcgcgcgttctacacgtgttgccgatctcggatgttgttaaattagtttatgatgtgaagctattgaatggaaaatatttggatgtatga

SEQ ID NO: 44483 - DNA, 411 bp, Glycine max
  Clone ID: LIB3093-012-Q1-K1-C1
cccacgcgtccgttaagatcaccaaagtacttgtgagtgtatacccaacacaaactaagatcggcatggactactagacccgcgtttcagaagttgagagggaacctatcatggagtattccacaccacgaccaatgatgggcaactaccaccaccctaatgctcaccgtgtcctcaacgagaagattgtttatgaggaggatgtgattggaggatcccgccacaaccacatgcatcaccaccaccctgagactcatgagagagtcaaggtggtggagtatgaacaagttcctgagaggcgcgttgtctatgaagagaaagttgcttatgacaacgatcgttactactctccaaggtattgaaattggacaaatggaagaacacctataacgtgttatcatgtggcttttt

SEQ ID NO: 44484 - DNA, 408 bp, Glycine max
  Clone ID: LIB3093-012-Q1-K1-C10
acgactcagtctttcattctcattgccgtcacatatagagacacgaaacaatgaagtttaacccgagggttttcacaagccggcgcaagatccgcaaggctcacttcaccgctccgtcgagcgtgcgccctgtcctgatgagcgctcctctctacaccgatctccggtcaaagtacaacgtgcggtccattccgcatcgcaaggacgactaggttcacgtcttgaggagaacctacaagggccactatggcaaagcggtccacagtctatctccgcaagtgggtcatccacatcgagcgcatcaccctcgagaaggttaacggctccaccgttaacgatggcattcacccttccaaggttgtcgacaccaatctccgaatgtacaacgaccgcagatccttgctctat

SEQ ID NO: 44485 - DNA, 469 bp, Glycine max
  Clone ID: LIB3093-012-Q1-K1-C11
ctctgatcactctagctgttgcaaatttctactatttttcaatggcttctgcagatgttgggttccgttgctttgttggtgggcttgcttgggtcaccggcaacgatgccctcgagaaagccttttcaatctacggcgacatcgttgaatcgaaggttatcaacgaccgtgagactggaaggtccagaggattcggatttgtgaccttcgcctcagagcagtcaatgaaagatgcgatcgcaggaatgaacggccaggaccttgacggtcgtaacatcactgtcaacgaagctcagacccgcgccagccgtggtggtggtggaagcggtggtttcggaagtggtggtggatacaaccgcggtagcggtggatatggtggtggtggtggctgcggcggatactgtggtcgtcgtgaaggtggatacaaccgtaatggtgggggtggaagtggaggatacggcggtggtag

SEQ ID NO: 44486 - DNA, 477 bp, Glycine max
  Clone ID: LIB3093-012-Q1-K1-C12
ctcttgttcgctactccatttgccgcctctggaactccgaacgttgaacatggacgctgcgaaagaagaatttctcagagactttggtgaacactacggctaccctaacggccccaagtccgttgatcaaattcgagctactgaattcaagagattacaattacaagatcttgtatacttggatcatgctggggcaactctatactctgacctgcaaatggaatctgttttcaatgatctcactactaacctatacgcaaatcctcacagccaaagtgactccagttctgcaactcttgacattgtcaagaacgcccgccagcaagtccttgactactgcaatgcatcttccaaagaatacaaatgtatatttacttctggggcaacagcagcgctgaagctggtaggagaggcttttccatggagttgtaacagtagttttatgtatacaatggagaatcataatagcgttcttgg

SEQ ID NO: 44487 - DNA, 422 bp, Glycine max
  Clone ID: LIB3093-012-Q1-K1-C2
aaacaagaccaactacccacctatggcggcctctgttgtagtgtctacctctctgtctgtgtgtgtcaactatggcgatcatcgtcgtccatccatttccgctctctcttgtcattcgaattccatcaccaaaacaaacctaaaactcagttcgcaatgtttctccaactcgaattcggtagccccgatttattgccgcaagtttgttgctcgcacttcaattggagaaaacgagagcgagagcgagaaggagttagggttcgtgggggaggactctgcggtgtttgaattgggcaaacagaaagtatcttcgtggatttatttcaccgctattttgggagtcgttctctatgttcttaacgtcgcatggattgataattcaactggctacggcaaagcttttattgacgcccgttcaacgc

SEQ ID NO: 44488 - DNA, 416 bp, Glycine max
  Clone ID: LIB3093-012-Q1-K1-C3
cactgacctaaccatttcattatagtcttgaatcaaaggtgacggccttccatggcttccgggggtgcttcctctggaattacagctgctaccatctctacgccaaattccccgcagacgaatggatcatgacgttgtttacttagaggaaagaaattgacggtgaactaggctagagcacctgttgaaggacgatcgattgccactactgtgtcgcgcagttgctgcacctgacagacctctatgagctcccaagcagcacccctcctgcatggcttgatggcactgtaccatgagacttcagctctgaccctcttagtcttggatctgacccgcagagtatccgatggaatgttcacgcagagctagtgcactgcaaatgggccatgtttggtgctgctaacattttcattgca

SEQ ID NO: 44489 - DNA, 420 bp, Glycine max
  Clone ID: LIB3093-012-Q1-K1-C4
cccacgcgtccgcacatttttagttgcaactaatgggaactgttgaagctgcaaacaaggatgcaaatggaagccggctagagaaaaatcctacagttgtttttgtgttaggtggcccaggcagtggaaagggtacccagtgtgcaaatattgtcgaaaattttgggtatactcacctcagtgctggtgatcttctgcgagcagaaatcaaatctggttctgaaaatggcacaatgattcagaatatgattaaagaaggaaaaattgttccctctgaggtaacaattaagctcttacaaaaagcaatgcaggaaagtggcaatgacaaatttcttattgatggttttccccgcaatgaagaaaaccgtgcagcatttgaaaaagtgacaggaatagaaccagcatttgtcctattttttg

SEQ ID NO: 44490 - DNA, 386 bp, Glycine max
  Clone ID: LIB3093-012-Q1-K1-C5
cacaaacttctatcccatctccgtttcagctctttcctgaagaacatgggcgaatcttttggggttgatattgctgaatcactgctggggaaacttgcttcttatgcttatgaagaggcttctcgagcctacggtgtgtatgaggatctgaaggggatcaaagacacattgtcaattgtgaaaggggtgctgttggatgctgaggagaagaaggagcacaagcatgggttgcgcgaatggctcaggcagattcaaaatgtttgcttcgatgctgaagatgtgttggatgaatttgagtgccaaggctcgcaaaagcaagttgttaaagcttcaagcagcgtcagggttaaggtaggccacttcttttcttcatctaattcgcttgg

SEQ ID NO: 44491 - DNA, 459 bp, Glycine max
  unsure (1)..(459): unsure at all n locations
  Clone ID: LIB3093-012-Q1-K1-C6
cgaatatcttgttgtttggagcgatccgagaaaaactctgtaaacatgtgggtttaccaggaggtccttacaggtgatgagcttctctctgactccttccgttacaaggaaattgagaatggaatgctgtgggaagttgaggggaagtgggttgttaaaggagcagttgatgtagacattggtgcaaacccttctgctgagggtggaggagaagatgacggagttgatgatgcagctgttaaggttgttgacattgttgacacattcagacttcaggagcaacccgcattcgataagaagcagtttgttaccttcatgaagaggtttatcaagaatttgactcccaagctcgatgcanagcaacaggagttgtttaagaagcacatcgagggagcaactaaatacctgctctctaagataaagatttccaattntttgttggtgagagcatgggtgatg

SEQ ID NO: 44492 - DNA, 244 bp, Glycine max
  Clone ID: LIB3093-012-Q1-K1-C7
acgcccacgcttccatgctatttactagacacgtttttcataaccaacatttcgagattgttctgacgaacatacatgtgcatcactgttactgaacttaccctgatatacttatatagagtgcacatggacactccaaactaattatgagataattcattatccagcaacatttgcatccataataacattcccatcatactgctaagaatcatcagaacactcctattcctacgcctacttt

SEQ ID NO: 44493 - DNA, 454 bp, Glycine max
  Clone ID: LIB3093-012-Q1-K1-C8
tgcaaacgaaaatagcgaagctagcagtgaacgaaactccgaagccactgcgcagagtgctggaagacaacatcatttctgtgttacggtcatgcggaacctgcacgcagctgcaccagatctaagcccagatagtgtgacccacgtaatccagggcaacgattacgtcaccccgagtttcgtcacagcatgggcgcgcctcggcggaattcgccacgcccgcagagtgttcgtcaaaacggcgcaaccaaacggcgccacgtggaacgccacgttccgagggtacgcccaagccgagtgccacctcgacgtggtcgtttcgttcgcgcgcatgcaccgcgccggcgcgttcccgaactgcttctagttccccatggtagtctagtcttgcgcctatgcgaacgccgtgaaagaaggagaacaagttcgctgcgttgtaaccaaacgcgggttt

SEQ ID NO: 44494 - DNA, 477 bp, Glycine max
  Clone ID: LIB3093-012-Q1-K1-C9
cccacgcgtccgcccacgcgtccgcccacgcgtccgcccacgcgtccggagaaaaaaaaaggcatgtctctcaaggttgtaacagtggtgtttttgctggcaacaatagtagtagccagtgattacactagtttcacctataatggattccaatcttctcatttgtaccttgatggcagtgctgagttcaccaccaatggcatggttaagctcaccaatcacaccaagcaacaaaagggtcatgctttcttcccaagtccaatagtcttcaagaacaccacaaatggaagtgtgttttctttctccaccacttttgtttttgccataaggtctgagtttcccaatttgagtggccatgggattgcctttgtggtttctccaacaaaagaggttccacattctcttccaagccagtaccttggcctctttgatgacacaaacaacggcaacaacagcaaccatgtttttggggtggag

SEQ ID NO: 44495 - DNA, 406 bp, Glycine max
  unsure (1)..(406): unsure at all n locations
  Clone ID: LIB3093-012-Q1-K1-D1
cccacgcgtccgctcaagcattggcaggcagtggaaatggagcagcggttagcaaacacatggagaatgcctcttgacgacaagaaattcatagaaactgctctcctttccgacctccgactcgacggccgtcgcccctccgactaccgcaagctcaccgtcaagctggccaagcaagacggctccgcggaggttcatttgggccaaacccacgttatgaccttcgtcaccgcccaactcgtccgcccctaccgagaccgccccaacgagggctccctctccatcttcaccgagttctctcccatggccgacccctccttcgaccccggcccgccctccgacgccgncgtcgagctcggccgtgtcgtggaccgtggcctncgcgaaagccgtgccatcgacactg

SEQ ID NO: 44496 - DNA, 145 bp, Glycine max
  Clone ID: LIB3093-012-Q1-K1-D10
acacgagtctccccaccatcaacaatctccatactcaccctccctaacaatctcaccattctccattcaaatctccaatcaatcactattcatactccatacatacattcaaccaccatccaccaaaaaaaaactcgacacaaac

SEQ ID NO: 44497 - DNA, 474 bp, Glycine max
  Clone ID: LIB3093-012-Q1-K1-D11
acggtaactgcagcagcgctgagtcgagggcgttcagtgttcaccacagtttacacacgagtacgcattttctcttctcaagttctcagagtgtgcagagaaaatcatggtggacgcagcagaacgtatgtacttggaggatgacgattcatcactcatgaaaactattaagggggcaacaactggtttagttgctggcactatctgggggaccgtagttgccacctggtatgatgtccctcgtgtagagagaaatgttgctcttccacggctgattaggactttcaagatgatgggcaactatggtttgacctttgctgccataggaggagtctacatatgtgtggagcagttggtgcaaaactataggatgaagatggaattagtcaatggagctgttggccgatttgatgctggtgcaactattctgggttacagatgaaggagcatcaaaactgcactttctgctggatc

SEQ ID NO: 44498 - DNA, 478 bp, Glycine max
  Clone ID: LIB3093-012-Q1-K1-D12
acgtaatgcgcgacacagttcccttaatagaattatctagacctctaacagcacagctgaagtggtatgctagagtgatagaaattgaaagtgacagtgatcagagactcctgatctgccagaaacctttcttcaagagacaggcaagctaaaaagaattgatggcctgaagaaactagaccattatatacatatattcattttccataaagttcatttattaccatagagctccaaaagcgggggttgaaaattttggacataaaaagaaaacaacatatagaggaaaaagtgtatccttgtcaatgataccaccacatcatctatgtagccgtaaggtgtacatagggccatgtaattaccaaacaagccacagagcagatgagaaactagtatactggtaggttaatttacttttccatgtgatacacataaacaatattaagattgggaacatggtgataagttattgttgtaa

SEQ ID NO: 44499 - DNA, 401 bp, Glycine max
  Clone ID: LIB3093-012-Q1-K1-D2
cgggaaggtcgtggtgtacgacccctgaaagatcacatctatctccacttgaatcacttgcccgcagatgtgctcgaagagagacttcctggcatctctgaaactgctgctatttttgctggtgtggatgttacaaaggaacccattcctgttttgccaactgtacattataacatgggcggtattcccacaaaccattatggagaggtggttaccattaaaggtgacaatccagatgcagtggtttctggattgatggctgctgaggaaacggcctgtgcatcagtccatggtgccaataggcttggtgcaaattcacttctcgatattgttgtttttggtagagcttgtgcaaatagagttgcagaaatccgtagaccaggagagaaacaaaagcctct

SEQ ID NO: 44500 - DNA, 401 bp, Glycine max
  Clone ID: LIB3093-012-Q1-K1-D3
ggatcatctggcattgatgatggagcttcttgggatgatgcctcgcaagattgcacttggtggatgctattcccgagattttttcaacagatatggagatttgaggcacatccgtcggttgcgtttctggcctcttaataaggtgctgacagagaagtatgatttcagtgaacaagaagcaaataacatgaccgatttccttcttccattacttgattttgtccctgaaaagaggccaactgctgctcaatgccttcagcatccttggttcagtgcaggtccccagactcttgagccctcattgactgctgtgaagcatgatgctattgaaggggaaatatctgaaaaaatgcagaaggaaaaagctgagcaagaggctgtggaagttggcatggggaata

SEQ ID NO: 44501 - DNA, 432 bp, Glycine max
  Clone ID: LIB3093-012-Q1-K1-D4
cccacgcgtccggggagatggcccaaaacttgtgagagaacttttcagagttgccgatgatcgtggctccttctattgtattcattgatgaaatcgatgcagttggtacaaaaaggtatgatgctcactcaggtggagaacgtgagattcaaaggaccatgttagagttgctgaaccagttagatggttttgattctagaggagatgtaaaagtgattctggcaaccaacagaattgaaagtcttgatccagctttgctacggcctggtcgaattgacaggaagatagaatttcctcttcctgatatcaaaacaaggagacgcatctttcagatacacacatcgaggatgacattagctgatgatgtcaacttggaagaaatttgtatgactaaagatgaattctctggagctgatatttaaggcatatgta

SEQ ID NO: 44502 - DNA, 413 bp, Glycine max
  Clone ID: LIB3093-012-Q1-K1-D5
tggagatgaggtttaccagacaaatatatatcaggatgaacgacccttcattagttctagaagggttttgatggacttggggccacctataagcaaggaagtccagcttatttcttttcactccgtgtcaaaaggttattatggtgaatgtggacagcgaggtggatattttgaaatgaccaacattcctccagagacagttgatgagatctacaaggttgcatcaatatcacttagtccaaatgttccagcacaaatatttatgggagttatgctccatccacctcaacctggagatatttcttatgacaaatttgttagggagagcaccggaatacttgaatcactgagaagaagagcaaggctaatgactgatggattcaacagttgcagaaatggggtttggaatttta

SEQ ID NO: 44503 - DNA, 439 bp, Glycine max
  Clone ID: LIB3093-012-Q1-K1-D6
ctgaaaaggaacctgttgttgctgctgctgctaatattgacatcccatggattccagtagagggtaaaactgtccctgtgcaacctttatttgcttcaagtccagaggggagtgttgaggcaaagccgaatgatggaccaaaacgttacaacagctgcaacaagcgagttagtttgacagggtttaatcgtcgatgtggtgaccttttttgtgctgtacatcactactcacacaagcataattgcccatttgattaccgcactgacggtcaagatgctatagctcaagcaaacccatttgtcaaggctgaaaagcttgataagatctaagatttgaagttgaagttccatgccctgaaatgaagctatgcacaatttcatcatgaaatgatccgagtatccttcacattttatacggtgtcatattataatggtatatg

SEQ ID NO: 44504 - DNA, 386 bp, Glycine max
  Clone ID: LIB3093-012-Q1-K1-D7
ctaagtgtcccttcaaagtgtacccttccactaactgctcagcggtgccggaagcattcagcagagggggtgcaatatcaagtctatgggtcactagtactagtagtggtgtggaaagattaattatactatgagaagtgaagaaatattatacttaattagaaggaaataaagtgtatggattgtgtgttacgatccaacgatcgaaagccttgaagtatatcaacaataaaagatatcccttcaattaatttatcattttctctgcaaggctgtagtgatatatgaaagtgaagtatgaacatctaatgagtataaatgcaaaaaatatataattaagcgtatgtaaaaaaaaaaaaaaaaagataatgacaaatagattaaac

SEQ ID NO: 44505 - DNA, 461 bp, Glycine max
  Clone ID: LIB3093-012-Q1-K1-D8
cccacgcgtccggtcgctactcatggaatacttctgatggttttgtatagccatcaagtgatgttgaggattctagtgatgctgatagcttaagtggcagcagtagttgtttgagcaatcgacaagatgaagtgggagatgaatgtgggggtcttaccgagtttgattctggcacatctgtcaattactcttttagtaatttctcctttaagaatctctcccagcttgcatcaatcaactatgatctcaccaagggatggaaagatgacccggcaacgaactctagtgcatagctgtatttattatcctgtgtcaaagttcagaatttggttttcgacctatgatccaagcaattttgggggcataaacacctttgtcatttgtataccttgtacatatttaaaagttcaaaatggttcaagatgtactctttgcttgttagtttacaaggcaacaatggg

SEQ ID NO: 44506 - DNA, 371 bp, Glycine max
  unsure (1)..(371): unsure at all n locations
  Clone ID: LIB3093-012-Q1-K1-D9
cccacgcgtncgccggctgagaaaatagcgactcagaaacacgctcgtcttcacgatcctgcgattccgctctccaacgagtctgcgcaggatgaaaaatcgggaggctagccgtcggtgaagaatcgcgcgattcgccaggaaatcgcgattcaagcacgattcatccccgatacagagattcaaccacaattcaggaaaaaaaaaaacgagacaaactccgtttcgtatcaatagaagctggaatcgtatcgaatcgcgagatacggatcgtgaatcaagtctctgggtgatggctggttcagaacctgtaagtgcagagggagagagtatggctgtggatgctgccccaaggaagccccggattctac

SEQ ID NO: 44507 - DNA, 384 bp, Glycine max
  Clone ID: LIB3093-012-Q1-K1-E1
ttaaaccttgttgcggttgatgataaggccagactgaagccaacgaaactaatgaagccccacgctccggcttctgctttcgtcactcgtctcccgcacgtgccttacttccgcggcgccactgccgcacgtgccgcgccatcggaccctcctcatgacgcccccggaggcctcgaattccgccgcgtctcgaccgccaaacgccgccgcgtcagcctttccgtctgccacgcgagtcgcgtcaccgccgcctcgaatcccggtggttccgacggcgacggcgatactcgagctcggagcagccggcgcggcgtgctgatggcgccgttcttagtcgccggcgcatcaatcctgctctcggcggcgacggcgaaggcggaagag

SEQ ID NO: 44508 - DNA, 418 bp, Glycine max
  Clone ID: LIB3093-012-Q1-K1-E10
cagaaaacgccagaaatccaacttaaaaaaaaaagctacaaccaacaactcgcgaatagaaccacgaaattatagctaattagctaattatccattaaacactgtcagagcaatccgaaaggaaaaaaagagaaaaaacatagccaactccgttccgcatgatataaaagtttaatcaacctcctccattttgctgccctcagcatcagcttcagcctcctcctccagtgggggcatatcagcatcagcttcagctgcatcctcgtcgatgctcagtccaagcttcaacattctgtggatcctgtttccaaaagtgttgggttcgtcaaggctgaaaccagaagtgagaagagcagtctcgaacagcaacagaacaaggtccttcacggatttgtccttcttgtcaacatccgcacgc

SEQ ID NO: 44509 - DNA, 389 bp, Glycine max
  Clone ID: LIB3093-012-Q1-K1-E11
acggttgctttgtcggtgggctcgcttgggccactgacgaccatgccctcgagagagccttctgtcagtactgcgaaatcgttgaaacgaagattatcaacgatcgtgagactggcagatccaggggttttggatttgtgaccttcgcctcggagcagtccatgaaagatgcgatcggagcgatgaatggacagaacttggacggccgtaatatcactgtcaatgaagctcagtcccgcggtggctgcagcggctgcggcggatgaggaggaggatacaatcgtggtggccgtggatatggtggtcgtagtggcggtagcggtggcggtggtggataccgtatccgtgacagtggttatggctgtggctattgtggtggtggtagtggt

SEQ ID NO: 44510 - DNA, 306 bp, Glycine max
  Clone ID: LIB3093-012-Q1-K1-E12
tctacacttacaccatcaaatctaaatgccttctctctcacctacaatgacagaggataacatttcatgattgtttaaaaaataaactgatctaatctcttctgctaaactactctgcaaaattcaaactcataaaaccactgttgaaactgaatatatcgaagaaagttttactgccaaaataatccttgatgatgtcgcaaaagaaattaaagttattgaagtaattgctccaacttttgaaaattaatgtgatattgcaaaattcaaagattaccaaccttcaacatcttaaccaaattaacc

SEQ ID NO: 44511 - DNA, 444 bp, Glycine max
  Clone ID: LIB3093-012-Q1-K1-E2
ttcaggtttcagccttgatgatcccaacacatttgcttcgaggattcacaggatgttgaaggggggtcttagcattgatgaggatgacaatggtggagacgatgttgatatgcccccattggaagaggacggtgctgaggagagcaagatggaggaagtggactaaatgccaaaggtctcgtgttaaatgaattgtggttcgtgtctgttaaatggtggtggatgcagaagtcttttagttttatctttctttttgttttgtttttttgagatatatagggtttttactttttaagtttttgtgatgtgaaaaaaatgtgtctgtcagtctgtgtgttgcatctacctacttttgtcagtaattgttctggatataacatcttttgtcagtaattgttctggatataacatcaatgaaggagaacaagtattacttcctcaaaa

SEQ ID NO: 44512 - DNA, 250 bp, Glycine max
  Clone ID: LIB3093-012-Q1-K1-E3
ttcacgcgtccggcatcctgatcggaaaccgtcttctgcggctactgtcgagcatgcatgaacgacgtctttcagggatgggatggtcagaggaagcggctgtgatatagttcaagttgaaggcggtcacattgtgcgctccacaaggcataaggaccgtcacatcaaagtgtgcactctcaaaggccctattgaccgacgagtgaggttatcggcccacaccgccatccaattttacgacgtccaggac

SEQ ID NO: 44513 - DNA, 419 bp, Glycine max
  Clone ID: LIB3093-012-Q1-K1-E4
cttaagctgataaaacccccttgttgagagctcttcagcatccagaggccttagctacaactgacgctaggagaggaattccattgctgatgctgttattagttcattgtcacaaagtggaagagagcaccatgaggaaacacactactctgatccatgaactagtccaaggaaaggaactaacaatgcaccttactaaccatctgcatacatcttatgcaatgtcccatcagaccaatgaattgtgtgttgataaaatacttttgtctcatgagaaagcactgaccatgctgaactggtgctctattatgggagaggccaataccaccagtggcaacatcatggattaccattggacttttacaaatggtggaagccccagacgtgaggtcgttgaccgtgaatttgaacacaaagct

SEQ ID NO: 44514 - DNA, 461 bp, Glycine max
  unsure (1)..(461): unsure at all n locations
  Clone ID: LIB3093-012-Q1-K1-E5
cccacgcgtccgaaaacggcgtcgtttctctaactcctctgggttccgtcgtgcttcaagtcagaccgtgaattcggttccgcgtgcgaatggaacttacaccgtttcggatttcatgacaaagaagcaagatttgcatgttgtcaaaaccaccaccaccgttgatgaagctttggaggctcttgtaaacaacagaatcagtggtcttccggtgatcgatgaggactggaatctggttggagttgtttctgattatgacttattggctattgattcgatatcaggaggtcctcaaagtgatgcaaacttgttccccgacgtcgatagtacttggaaaacgttcaatgagttacaaaagctgcttagtaagactaatggccaagttgttggtgacttgatgactccaactccacttgntgttcatgaatcgactagtcttgaggaagctgctaggcttgtac

SEQ ID NO: 44515 - DNA, 435 bp, Glycine max
  Clone ID: LIB3093-012-Q1-K1-E6
tgatgaggtctaccttggacagagggacaatccaaattggactgatgacgcaaaggcaattgaggcctttaagaagtttggaaacaagctgaaggaaattgaggacaaaatctcagggaggaacaagaattcaagccttaggaaccgtaatggaccggcgcagatgccctacactgtgcttcttcctaccagtggggaaggccttactttcagaggaattcccaacagcatctctatctaatgagagtgtgtggtgtgtggtagtgtggttttctttccttccaacgtacctctcattgacaaataaacgtgcaaacttatgtgtgcataattttcttatgtatgcttaagttttgtaattggatgctatctagtttttcatatctaatagggtgttgtgtcaaaaaaaatacactagttgttcatgaatataat

SEQ ID NO: 44516 - DNA, 248 bp, Glycine max
  Clone ID: LIB3093-012-Q1-K1-E7
attgacatttacgaagtcaacaaaaaaacaattttaaataaaaaaaaaaaaagaaattcaataaagaccatttttaacaattcgaaccgcgattaaaaaaaacaaaaatcgccacttctttaaaaaactccaattttagtcctccttacttcaacagcataacccttttttcattctaccaaaatttaattaactagcccttattttaaaacttcataactggtaaaaacctggtttttaccaaatta

SEQ ID NO: 44517 - DNA, 361 bp, Glycine max
  Clone ID: LIB3093-012-Q1-K1-E8
cccacgcgtccgcccacgcgtccgcagtctccactttctgagaagagggccaaattagagttggattattagggtttaaccgttcctccccttccttttcaccataatcaacatcaacctcttccaaatcccaatggatccgaccaagaagcgcaagctcgacgagaacggcttcatcaacaacgactcctccgagcccctcaagctctccccctccgacgcccgcaagctcatcgagcgcttcaccactgaccagctcctcgacatcctccaggacacggtggcgcgccaccccgacgtcctcgctgccgtgcgcgctgtctcagaccccgacgtctcccagcgtaagctcttcatccgc

SEQ ID NO: 44518 - DNA, 446 bp, Glycine max
  unsure (1)..(446): unsure at all n locations
  Clone ID: LIB3093-012-Q1-K1-E9
acggtgaactgtgaacatcatcatcacaattaatatgagtagtgcaacaagcaaggcttggatggtggcaactagtgttggagccgtggaggctttgaaggaccagctgggtgtgtgcaggtggaactatgttttgagatgtgctcagcagcacatgaaaaaccactttagatccttgtctcaagcaaaaaatgtttcttcttcatctgctcttgttgcaagcaaattaaagggtgatgagaaggctaaaaaggctgaaaagtccttgaggactgtcatgtacttaagctgctgtggtcctaactgatcttaaaggagagagattatcttacatgctggggattaattgtgatttgaaatgaatatngctttgtgtaaatagagatatgatagattgtatgaaaattgtaatgccaaacaatattaattaatatactattcaatga

SEQ ID NO: 44519 - DNA, 336 bp, Glycine max
  Clone ID: LIB3093-012-Q1-K1-F1
cgcacgcgtgcggccacgcgtccggtcaaacacagtaacagaccatcctgcgctgtgttctctggtttagatctcgagatggcttatctcttgggtcttagaatccgtacaatctaatcaacataacatagatggatgcaagcagttgcatggatgagagcaccaccactgagtcactctctataagtctttctccgacgtcatcgcctgagaaagcgaagccttcttcgatgattacatcgtcagagaaagcttctcttgacccgccgacgtcaaacagactatgccgagttggaagcacagcgagcgcagtcctggatcctgatggcggcggca

SEQ ID NO: 44520 - DNA, 412 bp, Glycine max
  unsure (1)..(412): unsure at all n locations
  Clone ID: LIB3093-012-Q1-K1-F10
cactcttccttaaacttttancacctgctaaatcatcttatctactattgcctttatagcctcatttaaaaaatggtgtccctctcacatactaactcctactcctttatcttttccattacattatcttattcttactctttcaactccaactcaactaaatttaactatattcatacatcatcctctaataaacttcctaattaattcattcaacactcataatttaatcctttgaattaatatcatcctatatattctccacctaccttattcttcttaaatctttcaatcatattaatcttttaatattctacatctttttaaatacttttatttttaattcctaaatgtcatctatttttcttaacacatcaatataccttctctttatcatcaattcatacaacac

SEQ ID NO: 44521 - DNA, 368 bp, Glycine max
  Clone ID: LIB3093-012-Q1-K1-F11
cccacgcgtccgctgactcgtgggtccgctttatagagtataaaagatgtcgcgtttgatcgacagtttttagtgcgcggtggccgtgctactgtgcgccttagctgtctcttcttgggtggatgaggctgctaacccgatactaatggttgctactgtacaaactgatgttattctcatgatacgtcatttccagcactctctgaagtttgctatgttcatgatcaagttcttgaaaagttaccgaaacgaagaatatatgatgcacatgtactaaatattctcgcaaaaccttacgttcatacgctcccacaacaagaaccgtttgccctacactctctctgataatcattttgcttattgtactt

SEQ ID NO: 44522 - DNA, 480 bp, Glycine max
  Clone ID: LIB3093-012-Q1-K1-F12
cgcgtacggtttgaactttcctttcacccatgagaaatctcttctgggacacttaaagttttttccttgaaatcctgatgctgatagctttaagaattggagacaaggtaggactggctttcctttggttgatgcaggaatgagagaactttgggcaactggctggattcacaacagaataagagtaatagtttccagttttgctgtgaaaatgttgcttctaccctggaaatggggaatgaaatatttctgggacacacttcttgatgctgaccttgaaagtgatatcttgggttggcagtatatctcaggaggcttaccagatggccatgagcttgaacgcttggacaatccggagattcaaggggttaaatttgatccacaaggtgaatatgtgagacaatggctacctgagttggcaagaatgccaactgagtggatccatcatccttgggatgcaccgcttactgttcttaaaac

SEQ ID NO: 44523 - DNA, 467 bp, Glycine max
  Clone ID: LIB3093-012-Q1-K1-F2
caaagatgaagtttttcttggttttggtgattgccatgttggcgatggtagcaactggggttgcagctgctgaggcacctgccccaggtccttcatccgatgccaccaccttctttgtacccactgctcttgcttctctctttgttcttgcatttggccttctcttctaattaattcttcaacaacctttggttatttgttacattacatatatggaattcactttgttcagaggtggttgtgttttgtgtttcgttcttctctttttttccaactcagcttgagtagtggttggtcactactctcttgtgagtagaagggtttatttttttgaggatgcattgaattggagatttggagtgagggaggaagagaagtagatgatacaatataggctctttttggtgggttttctggattattatcattattcatattcttatgtaacaaattcattattattcctc

SEQ ID NO: 44524 - DNA, 463 bp, Glycine max
  Clone ID: LIB3093-012-Q1-K1-F4
cgctggtggataacgaaatttcttagacaaaatacaaggatcagaaccgttgaatcaagttgaggaagatggcacgagtctctggaggaagatcaacactgaaccctaacgcccctctttacattcctgccgcgtttcgccaagtggaggatttctctccggaatggtggcagctggtgacgacgctgacatggtaccatgactactggctaagccagcagcacgatgagggagccttctacggcgaggacgacgggtttgatggcaatgatgtcgttgatttgcttcctgattcgtttgatcttgatgctggcgaggatctttttgaagagtttataagatcttctgaatcccaagaagaaactggacccaaagtaactgcatgaggcttagagatgaacccatttaaagaatctacctaccaacctaagagactggacccaaagccttagctttaggtcag

SEQ ID NO: 44525 - DNA, 440 bp, Glycine max
  Clone ID: LIB3093-012-Q1-K1-F5
cccacgcgtccgaagggatctagctgctgcatttgaaaagcattttttgacatatggaggacgtggacatttgtattaacagtgcggggattagtagttctgtaccattccgtgatgatcaaacggatggcacccgaacatggagatacactgttaatgtgaatttcactgctgttattgattccactcgccttgcgattaaaatcatggaagcttccaaaaggcctggtgtgattatcaacttgggttctgcttctggtctttatccaatggtggctgacccaatttacagtggctctaaaggtggtgttgttatgttttctagatcacttcgtctatacaaacgtcaaggaattcgagtcaatgtgctttgcccttgagtttgtgaaactgagatgggaaattagattgatcccaagatcattaatttgagtgggggc

SEQ ID NO: 44526 - DNA, 412 bp, Glycine max
  Clone ID: LIB3093-012-Q1-K1-F6
cccacgcgtccgaatttcatggctattccatctcctaaaattttcctccgcttaacattcttgttctcacattctatagctgtgaagtcctccaatgtttccacaaccccaacattgcatgcaaccttcccatttcctgaagttagcagcttcaattcatctaagctttcaatctcaataaacataaatccaaacatcatcaacacccttcttcagtccctccaagcagcaatatctgaagccacaaaactatctgatctattaaacaacgctggacataacatcatagagaacaaaataggagcagtccaagactgtagagaacttcaacaatccaccttagcttccttaaaaagatcactatcaggaatccgttcccaagacttcagaaaactagttgatgcaagaacct

SEQ ID NO: 44527 - DNA, 299 bp, Glycine max
  Clone ID: LIB3093-012-Q1-K1-F7
acacccacgcgtccaaatctctttaccattccaattctcaaaatctctctaaagttaacattctaagactccttctctacacgggctaaatactccaatgattccacaatccccacattacatccatgctccctattcactgtactagtcacctaaacaatatatctcacccgcacctaaataaacatataccctaccatcatcatcactcttatgacaccaatcctagcaccagcatcaaaaacctcactactcttacatctatataaccacacttgacttaacatcttttcactcac

SEQ ID NO: 44528 - DNA, 409 bp, Glycine max
  Clone ID: LIB3093-012-Q1-K1-F8
acgcccacgcgtccggagattaccaccctatggattaagaacctcaagaagcgcggccacgtaaagacccttctataccgtatcggaacgcaccgtatgcaccccgtctgccgatgaaacgccagtcgcatgcatcaccacacgatcctgttcgacaagtaccatccgggcttattcggtaaggtgggaatgaactacttccataagcttcacaataaattctactcccccatcgtcaacgtcgaaaagctatgatctctcataccccaagactcgaatgaaaaagccctaaaatcgaaagacactgaccctctaatcgacgtcacacatcacagctacttcaaggtcctaggaaactgtgctctgccccacaatcagccttttagtgataaagccaagcttatttcca

SEQ ID NO: 44529 - DNA, 467 bp, Glycine max
  Clone ID: LIB3093-012-Q1-K1-F9
cccacgcgtccggaaacttggagcagctgcaaaatcatgttatctgctattgcctttggaggctcagcgaattggtggttgcgctgtcacgggcgaacgcctactcctttatcttttccggtttcagtgtcttattcttcctctttcaactccaactcaactaagttcaactatattcatagagcatcctctgaaggacttcctaatgagttggttgaagactcaaaatttgttcctttgaatgaggaggatcctatatatggtccacctgccttattgttgttgggctttgaagcagatgaagctttgaagattcgacagcttttgaaagagttggatggtgaattcctaaaggtcatctattgtactgaagacatgattatgcgttcgctttgtgaggcaatgcatacaacacaacccaatgtagaagatgtcaagatagccaagtcactttctcggatatgctt

SEQ ID NO: 44530 - DNA, 428 bp, Glycine max
  Clone ID: LIB3093-012-Q1-K1-G1
cccacgcgtccgcagatgttgttactgtcaattccactgatggaaacaatcctactaaggtgggttctgtgcctaagttcctcttcatatgtggatcaaatgttgtccaaaaaggccttgctagtggtgtcacaggtatggctggtcttggcagaactaaagtttctcttccttctcaatttgcctcagctttcagctttcatagaaaatttgccatttgcttgagttcttctactatgacaaatggtgtaatgttctttggtgatggcccttacaattttggttatttgaactcggatctctccaaggttctaactttcacccctctcatttcaaaccctgttagcactgctccaagttatttccaaggggagcccttaatggaatactttattggggtgaaatctattaaagtctcagaccaaaat

SEQ ID NO: 44531 - DNA, 477 bp, Glycine max
  Clone ID: LIB3093-012-Q1-K1-G10
cccacgcgtccgcccacgcgtccgaatttttttctgtcctcttttcctctcagaggagccgctgagtctgctcaggtgttccttgtcaagagatccttttgtttttgaggtgtgaagggaaagagaaaaaagatgaatcagtgtggttatcagcagaagaaggccttgacaagctgtgaggagatgaggatggaatctgtggtgtgccctaaacctcgaagattgggcctgttgaaccactcaacctttgataaccacatcagacccttgaggccaccctttatcaactaccaatcagaaattgaagattcaggagttggggctgagcttatggacattattctccccaagagatctggggggcaagtggcttcatcaccgccatttttctgtggatctccacctagcagggcttcaaaccctgtgatccaagatgagcaatttggtagtaatggtaatgagagttttggttcattt

SEQ ID NO: 44532 - DNA, 477 bp, Glycine max
  Clone ID: LIB3093-012-Q1-K1-G12
aaaagttcttatcagtgacagagtaaaggatgcataccgatgacgatggcgatgacggcggcgcagttgcggtgcggttgggggtggaggccaacgccgaatcagcagcagcaacgacgtcgtatggttccggtggtgtgttccatcgctatagagaacgcgaagaacaaagagagagcgaaactgaagaagctcttcgatgaagcgtacgagaggtgccgcactgctcccaccgaaggcgtttccttcactctccaacaattcaccgacgctctcgacaagtacgacttcaacgccgaaatgggcaccaaggttaagggcactgtttttgccacggataacaatggagcttatgttgacattactgctaagtccacggtctacttgcctcttcatgaggcttgcatccacagaattaagaatgtggaagaagcaggcataatttctggcgtgagagaggaatttatgatcattgat

SEQ ID NO: 44533 - DNA, 431 bp, Glycine max
  unsure (1)..(431): unsure at all n locations
  Clone ID: LIB3093-012-Q1-K1-G3
gatttcttcattgttttgctctaaaaatggagagagattttctgggtctgagctcaaaagaacgattggctatgatgaaggaagagatgaatattgatattggaagcaaagacacaggtttcacaaatggagcagtggtaaaatggcccttcatgaacaaagtatatgtccatcctcttttgatgtcattcaatcctcctcaggtgaattctgtgaaccatcctcatggtatgaagatgttttcagttcccaatcaagcaatttcagtttccatgggacatccatccctaaagaatcattttgcaactgttggtcagaatatgaatgttgctactgtgaagcaaccactactcggaggaatacctgttacggtgcctcattcagttcatcccatntgtggtgcttgtgctggaatgaccgaaacacgcgtg

SEQ ID NO: 44534 - DNA, 464 bp, Glycine max
  Clone ID: LIB3093-012-Q1-K1-G4
ggcagtccagctgctcgtgctggtatacatcaaggggatgaattgattgagataaatggtgagaggcttgatggcattgatagtgaaactgcagcacaaaggcttagagggaatgctggaacaactgttacagtaaaggtcaaagactcaggaacaagatcttttatccgagaggtcaaacttcctagggagtatattaagctctctccaatatcaagtgccatcatccctcatagatccccagatggtcatttcacaaaaactggctatgtgaaattgtcagccttctctcagactgctgctgaagacatgaggaatgccattcaggaattggaaaatcaaggagtacactcgtacatattagatctacggaacaatcctggtggtttggtaaaagccggccttgatgttgcacagatgtggttagatggaaatgagactctagtgaacacaatcgatagaga

SEQ ID NO: 44535 - DNA, 362 bp, Glycine max
  Clone ID: LIB3093-012-Q1-K1-G5
gggttatcggagaggcgtgaggagtacattgatgaggatgagttgttgaacatgccgaatttggtcgatgaaatggccagaggaatgcaggttagtccccttaggatcacttcctattcttcagatgattcgcctgggaattctgatggagataacctttggagttataccctttgatcactgatttgttgtttgttcagtgagtgagtatggtaatttgttttgtgtttgtttgaaagttcgagtcttgattatgtatgttcaaccttgttaaatatttgaaaggagggctttataacgggattgtgggaatacttgtggtctcgtacaaaagaaaaatgctttgaagtgtgttggggttg

SEQ ID NO: 44536 - DNA, 438 bp, Glycine max
  Clone ID: LIB3093-012-Q1-K1-G6
gagaaaatgaacgcggagtttcctatacttttggtgctgacagggtgacagaattccttcagaagcatgatcttgatttgatttgcagggcgcatcaggttgtagaagacggatatgaattctttgctaacagacaacttgtaactatcttctcggcacctaattactgtggagagtttgacaatgctggtgctatgatgactgttgatgagacacttgtgtgctcttttcaaatattgaagccagtagaaaataaaaagcctagtaagtttggctttgggagcacaactacagttaagcagagtacaacaaaagccaagttccagcaatcattttttggtgctaaagcatgacctgatgagcgcgagtacaattagtaaatgtttggtgcatagccaaagttgacttggaagaaggtgtatcagtgttcgcttcaat

SEQ ID NO: 44537 - DNA, 310 bp, Glycine max
  Clone ID: LIB3093-012-Q1-K1-G7
acacttttgagttgcattgttgcatcaccgcaagtccacaacatggctgcgactgccgctgcaggcatagcttccttgttttcttcttctattaacagtgtcaaatgtcttcgttcctccaagaactgctccattatagacccccttataaccacagtgccctcaaaccgtggcatgtttgtgtcacacttggtggaacctttgtccattgggggtgccattaattcgcacaagttgtgggggcctagaatttctgctgctgttgcacaagaagaagctgttagtgtggctgatgatgaagtagatgatg

SEQ ID NO: 44538 - DNA, 383 bp, Glycine max
  Clone ID: LIB3093-012-Q1-K1-G8
ccactcgtcctcggtcgccgctttctatctcactcatatcctatatacacattactctttatccatatcatcaaagggatttccataaggtccatattttaccatcaatctacctgtctgattcacatcctgactccactctctcaacttacgctaaactctcacaaacactatcctcaatccaatctctcaaacttcctaagcttgctattcacctacttgcactctcaaatccctttatacctaatacatccccaaattgccaattcacatatacttgctacatcaaattcacacccttatctaacactgcttactgatacatactgaattccattctataatcgtacaatcaacgaatacacatcgacatattacatcta

SEQ ID NO: 44539 - DNA, 420 bp, Glycine max
  unsure (1)..(420): unsure at all n locations
  Clone ID: LIB3093-012-Q1-K1-H1
gtcaggttctcttttagctaacctgattgggaatctggctttccctttgctcttgattggaggattgttccttctctcgagacgatccggagggatgggaggtcctggtggccctggatttcctcttgcttttggtcaatccaaagccaagtttcaaatggaaccaaacaccggagtgacatttgatgatgttgctggggtggatgaagccaagcaggactttatggaggtggtggagtttttaaagaagcctgagaggtttactgctgttggggctcgcattcctaaaggagttcttcttgttggtcctccaggaactgggaagaccttgttagccaaggctattgctggtgaagctggtgttccatttttctctatatcaggttctgagtttgttgagatgttntgtggtgttggtgc

SEQ ID NO: 44540 - DNA, 481 bp, Glycine max
  unsure (1)..(481): unsure at all n locations
  Clone ID: LIB3093-012-Q1-K1-H10
ggaaatagctttcctcggttataaccttcaaggtggaaagaaaaacccacccactatcccgattccaataaataccttgctgtctatattttcgcacaataccctctcacccttcaacgatgagttactacaatcagcagcaaccacccgtcggtgttcctcctccccaaggttacccaccgccggattcttacggaaaggacgcgtaccctccgccagggtacccgccgcaaggaggataccctccgcaagcgtatccagcacaggggtacccttcaccctacgcgcctnctcagtacgctcagcctncgccgcaacaacaccagaattcatctggcccaggttgcttaaaaggatgtttggctgctctctgctgctgctgtctgttggatgcgtgcttctgagaggagaagaggttgctttgcacaaatnggatttgaaactgtgttttgactttgaatatcgtcgttagtttttatta

SEQ ID NO: 44541 - DNA, 455 bp, Glycine max
  Clone ID: LIB3093-012-Q1-K1-H2
ggcttgttcttctccctctcactcatatctcacacatcttcctcttcatccctctcaccaaggggatagtgagaagcgcgtggaggacgatgaatcgcgcgttccgattcacatcgtgacggcggcgtcgcaacttcccgtcgaatttctggaaccctcgcctcaatcgaagctcgtcatcggctttgactgcgagggcgttgacttgtgccgcaaaggcactctctgcgtaatgcagcttgcgtttccggatgctgtctacttggttgatgcgattgaagggggagaggagcttatcatagcgtgtaagcctgcacttgagtctaattacatcacacaagtgattcatgattgcaaacgggacagtgaggtctctgatttatttgattgctttcttccttgcttgctctggcccctcttttgtatatgttgaaatttgtggaatgtttattcaa

SEQ ID NO: 44542 - DNA, 391 bp, Glycine max
  Clone ID: LIB3093-012-Q1-K1-H3
gcgtaggctacgtcatgctaatactgatctttttatggctgctgctactcctcctaccaatctgtcaatcattccgagagctctaccaagaggaagcttgtaccgaattcttcatcagcctaattgtcagattgatgagacacgaacaattgctatgcctctggatgtggctagccgcatgaattgcttacacaccagcacactctactattgttcatcgagatctaacgtctccaaatcttttaggtgataagaactggaatgataatgtatgtgactactggttgtcacatgtgaagcacagcactgattttgcatacatgtcaactgctggaacgccggaatgcatggctactgaagatctccgcaatgagccctcagatgagaaatg

SEQ ID NO: 44543 - DNA, 463 bp, Glycine max
  Clone ID: LIB3093-012-Q1-K1-H4
cccacgcgtccgcaaattataatgcaaagcttgctgatttggggctggcaaaggacagaccggcacgtgagaaaagtcatgtctccaccagggtaatgggaacctatggatatgcagctcctgaatatcaaaccacaggaaatctgagtgccaagagtgatgtcttcagttttggagtagtcctgctggaaatgttatctggcaggagggctgtggacaagaatagaccatcaggacaacacaatttggtggaatgggccaaaccatacttagccaacaaacacaaacttttgcgtgtgttggataatcgccttgaaggccaatatgcattagatgaggcatgtaaggtggctaccctctctctgcgatgccttgcaacagaatccaagttgagaccaaccatggacgaggttgtcacggatttggagcagctgcaggttccccatgtgaatcaaaatcgtct

SEQ ID NO: 44544 - DNA, 454 bp, Glycine max
  unsure (1)..(454): unsure at all n locations
  Clone ID: LIB3093-012-Q1-K1-H5
cccacgcgtccggttgccgagcacactgtcagagcccttcagagaaccgtgcctgctgcagtgcctgctgtcgttttcttgtctggtggccagagtgaggaggaggcatccgtcaacctcaacgccattaaccaggtcaatgggaagaagccatggtcactctctttctcctttggaagggcacttcaacagagcacccttaaggcatggggcggaaaagaagagaatgtgaagaaggctcaggaagcccttttggtaagagccaaggctaactcagaggcaactctgggaacctacaagggtaactcacagcttgctgatggtgcctcagagagcctncatgtttcgaactacagctactgatcaatcgaagttggtgttgtttgaagagactaatgcgagtaggaatcggtattatgggtacaacaaccgaatttcttggtgataagtatta

SEQ ID NO: 44545 - DNA, 458 bp, Glycine max
  Clone ID: LIB3093-012-Q1-K1-H6
aaaaaagccaattaattctttacaaagaacaacaagtaaacgcattaaagaaaaaaattagaggacaatatagatacgatcttttatcctataattttatcaattatgcagataagaaagactcatatatttatggatatagatccctatttcaagtaaaaaaaaaccaagtgatttcttgtaattacaacacgtataaaaaagaattattggatatcatagataatctctttatcaagaattatatatcggaagatgcgattctagatatggaaaaaaatatgtatagaaagtattttgattggatgggaatcaatagagaaatactaaatcgttccatatcgaatccagaattttggttcttttcaaaatttgtgatattttatgacgcatataggggtaactcgcaggttataccaatcaaattacttcttatgtcttctaatgaaatcaaaatg

SEQ ID NO: 44546 - DNA, 251 bp, Glycine max
  Clone ID: LIB3093-012-Q1-K1-H7
cccacgcgtccgctctttctctctctctgtgatcttatctccttttaattgttcactcacccggttacactggttgatgcaaaaaaccatggtaccctctatggttggtggttgctgacactcttaatagtcgcaaagtaggtgactagcagtaccttgtaattgaaggaccctgcagttttttttaatggaccggacctaggttggtaaggaatgggattatgggaagcttacccaagtgaccgatttgg

SEQ ID NO: 44547 - DNA, 276 bp, Glycine max
  Clone ID: LIB3093-012-Q1-K1-H8
gctcgaccgcactcgtccgctcacgcgtcctatcttcctttacaactacatccttaaataataataaggacctactataaggcttctttccatcattgtggtggtacatctatcctattactgctacttaatacaaaaacacatcatatctcaaaaccacatgacaatctcttacattcaaaaaatgcctgttacaatcaaactacaacagcatatataaagactactatgaactatcatacaaacactgtatgatatactgaaacgtttaatact

SEQ ID NO: 44548 - DNA, 471 bp, Glycine max
  Clone ID: LIB3093-012-Q1-K1-H9
acggctctctctctctcgctctttcagctttgactttggtggaaactaaagactagtcaaaatggtgaagttcacagctgaagagctgcgtcgcattatggactataagcataatatccgtaatatgtctgtcattgctcatgttgatcacggaaaatcaaccctgactgattctcttgtggctgctgctggtattattgctcaagaagttgcaggtgatgtccgtatgactgatacccgtgcagatgaagctgagcgtggtattacaatcaagtctacgggtatctcactctactatgaaatgactgatgaagctctcaagagttttaagggagagcgcaatgggaatgagtatcttattaatctcattgactcccctgggcacgttgacttctcttctgaggttactgctgcacttcgtattaccgatggagctcttgttgtggttgattgtgtggaaggagtttgtgt

SEQ ID NO: 44549 - DNA, 486 bp, Glycine max
  unsure (1)..(486): unsure at all n locations
  Clone ID: LIB3093-013-Q1-K1-A1
ccacgcgtgcgcacaaattttatgtgattagtcgcggtatttaaaataaaaaatgacagtaggcaaataaaaaaggaaaggagatgtttgaataaaaataattccccttcaagttcttattttttgagaggacaggacaatatgaatgttttattatgctctatcaacacattaaaaagattatatgatatatctgctgtggaagtaggtcaacatttctattggcaaatagggagtttccaagtacatgcccaagtacttattacttcttgggttgtaattgctctcttattggtttcagccattctaattattcgaaatctgcagaccattcccgctttcggtcagaatttctttgaatatgatcttggaattcattcaagacgtgagcaaaactcaaatttgagaagaatatggtcccggggttccttttattggaactttggtactatttatttntggttctaattgggcgggggctctttt

SEQ ID NO: 44550 - DNA, 466 bp, Glycine max
  Clone ID: LIB3093-013-Q1-K1-A10
tcgagccgcgcgtccgaaattggagagagatcaagaaacataaggggttcttagattacatagtttttgtgagagtgagggatagttttttttgggttgttatatacaaatataacgaattgagtgctgaggaaaaaaaatgtctgccatggtagaggggtggaagggggagctgacaaagctcagagagaaagttgtcatggcccggaagagcctcttttccaaaggcaaagaggggtcagaagaagaagaaagagtcgtggagaaggaggctcacaaggctatcatggctgttcagagagacagcactcatgaaaccatgtcagaggcaacagtgtgtttgcttatggatagatttgtgccatgctgacgcatgtgcatgtgtgtgctaagtgctcaaaatgtgttgtttattatatattgtgtacgatttagttgataattaagagaatgaggtttgtaatgg

SEQ ID NO: 44551 - DNA, 437 bp, Glycine max
  Clone ID: LIB3093-013-Q1-K1-A11
acgcaaatccgatcaagagaagagaatggcaggagcagaggggctaagcggagaacagtacgtgtaccttgcgaagctgtcggagcaggcggagcggtacgaagagatggtggagttcatgcagaaggtggtggtggggtggacgccggcgtcggagctcacggtggaggagcgcaacctcctctcggtggcctacaagaacgtgatcgggtctctgcgtgccgcgtggcgcatcgtgtcctccatcgaacagaaggaggaagggcgcaagaacgacgaccacgtgtccctcgtgaagcactacagatccaaggtcgagaacgagctcacgcaggtctgcgccagcatcctcaacctcctcgactccaacctcgtaccctccgtcttcggcagcgagtccaaggtcttctacttgaagatgaagggcgattaccacc

SEQ ID NO: 44552 - DNA, 473 bp, Glycine max
  Clone ID: LIB3093-013-Q1-K1-A12
cccacgcgtccgcccacgcgtccgcagaatgttagcaagaaaaggacagagaattaggcttgtgtgcaatatttgatggccacttaggccatgatgtagcaagctatttgcagaaccaccttttccaaaacatcttgcaacagcatgacttttggactgagacagaaagcgcagtgaaaaaagcttacgttgaaacagatgagaaaatattggaacaagaacttgtgttggggcgaggagggtcaacagctgtgactgcaatacttattgatggtcagaagcttgtagtagcaaatgttggtgactcaagagctattatctgtgagaatggaaaggcaagacaactatcagtggatcatgaaccaagcaaggaaaaaaaatcgattgagaggcgtgggggttttgtatcaaacattccaggagatgtccctcgaatagatggacagctggcaatagcaagggcttttggtgac

SEQ ID NO: 44553 - DNA, 472 bp, Glycine max
  Clone ID: LIB3093-013-Q1-K1-A2
cgcgtcgaccgacgcgtccgaatttgaaggcagaggtggcaaggggagcaaaacttaaatgcagtaaatgtaatctaaagggagctgctcttggttgctatgtcaaatcctgtagaagaacgtatcatgttccttgtgcaatggacatctcagattgccgttggggatcatgaggattttctcttgctctgtcctgtccattcaaatgtcaaatttccatgtgagaaaatcaggtccaagaaaaaggcaacacagaagcatcccactttttctcatctgccatctcatcactcaaatcgtcttgaagcttcccaggatgctagtaaaaaattggtattttgtggatctgctctatcaaatgaagaaaaggtatttttgatcaattatgcaagcaaggttggtgctactgtgaccaagttctggacctcaaatgtcacccatgtaattgcagcaactgatgcacatggagcat

SEQ ID NO: 44554 - DNA, 510 bp, Glycine max
  unsure (1)..(510): unsure at all n locations
  Clone ID: LIB3093-013-Q1-K1-A3
gctgtaccgggccgcaatcgatactcgatagaagtggactatttataaatccaatacaaggttgaaattctaggattaataggcatgttggcggtgtcacctttgaggagcacaagagatgaagggcaaggagagatgatggagagtttctcgattggaaccgatgattttgctgacctttcagaagggaacttgcttgaaagcatcaacttcgatgatctcttcatgggaatcaatgacgatgaagatgtcttgccggatctggagatggaccctgagatgcttgctgagttctccctcagtactgaggaatcagatatggcctcatcatcagtttcagtggaaaataacaacaaatctgcagatgacaacaacaacaatgatgggaataatatagttactactgagaaacangatgagggtattggtatagcagccaattcttcttctgattcgggttcgagtcgaagggaagagaatgtaagcaagaatgatgaatcagtggtgatg

SEQ ID NO: 44555 - DNA, 384 bp, Glycine max
  unsure (1)..(384): unsure at all n locations
  Clone ID: LIB3093-013-Q1-K1-A4
tcgaccgactcgtccgcccacgcgtgcgtgggttcactagaaagaggcacaactgttataattgtggacttgtgcacggccattcatgtaggtcgaggaaagcattaagagctgccctggctcctaatcctgngaagccatatcgtgtttgtgattcttgttttgtaaaattgaacaaggttgcagaattgggcaacaataatcggaggaatgctatgcctcgtttgtcaggtgaaaacaaggacagattagagaagcctgagctaagattgaccaagacagcagtcccttctaatatggatttgataaagcaacttgatagtaaggcagctaaacatgggaagaaggctgatacattctctctggttcgcacctgtaaaccac

SEQ ID NO: 44556 - DNA, 427 bp, Glycine max
  unsure (1)..(427): unsure at all n locations
  Clone ID: LIB3093-013-Q1-K1-A5
aaaatgtggaagagaacgggttttgaagaagaagcagttcaattgatcaactcagatttcagggacctaagtctagctgctaatagactcgcccatcatgccatcaaacttggtggcattggctttggagcctcttttttcggattgtttgctgccattgctgctatttatctgttgattttggatcgtacaaactggaaaacaaatattctcacagcactactcattccatacattttcttcagcttgccttcattaattttcgacgtcttcaagggagagcttggaaaatggatngctgcagttgctgttgtattacgccttttccttccaagacacttnnctgattggctggaattgcctggtgctctgattcttcttatccgtgtagctccttctctaattgcaagcacctttagagacaaca

SEQ ID NO: 44557 - DNA, 459 bp, Glycine max
  Clone ID: LIB3093-011-Q1-K1-A8
gcgataactattccatttctttccaccccacagtttctgaattctgggtgttgagtttcattttgggcatttttttttatctcccttggatgtgttattttcaatccaaaagaccatgcaaaaaactatatttgagaatctgaaagagtgactaggtggtctatctgatcttgtgaagtttgtgtttgtgtgaaaggtgtgaggcttattattcagaagagtttgtgtttgttcacataattgattgtggtgtggtgtgtgtcggtggcaatggaggcaagtttggtggagaggggtagagagagagctggacatgttaacaaggttggttatgttagaagggtcattgcaaagaagaagaaacagctttatcgaagggttaagagacctgagttgagtgtttcaaagacacttcaccaattatttgattcatgcagagaagctttcaaaggccctggc

SEQ ID NO: 44558 - DNA, 264 bp, Glycine max
  Clone ID: LIB3093-009-Q1-K1-A6
cgccgactcggttgctatcagcgagtgagagtgagtgagtggttctcttgcagcaacaaggtttagtgacaccaaacagacgggaaatgggtcgtggggtcagtgctggtggtggacagagttccttggattatctctttggcagtggggtacctgccagcagtgcaaatggtgctcgcactcaaaatgcaagtgctccttcaccaccggttgataagcaaagtccagcaccagcaccagcaccagcacctgcacctgcagaag

SEQ ID NO: 44559 - DNA, 295 bp, Glycine max
  Clone ID: LIB3093-009-Q1-K1-A8
aaaaaggaagcaaaggagcaagatgaggaagctcatggaaagaagcaccaccatgtctttggctgaagcataagcaaccaattatgatcatattccttctacttgtcttatatatatatatgctttcggcttatatatatatgtgtgtctctaagttaatcatcttccagcttattttgggagatcagtatggtttggagaatgtttccttgaaaagggttgctctatatatgcatgtgtcctggggtaagggttagttacatacaatagtatatacttcaatggggtgggaatc

SEQ ID NO: 44560 - DNA, 244 bp, Glycine max
  unsure (1)..(244): unsure at all n locations
  Clone ID: LIB3093-009-Q1-K1-A9
attccagcgacgcccgacgcatacgactgcttgcttcgtttctgcaaacgatcatactattcccagcactagcanaactggtggggaggcgataaatagaaacgctacttcttccccaacatctacttttcaatcaaatacttgtggccgcaccacttcccaaatttagaatccttcctttaacacatgttacagtgccaccacaactgccactacggaatcaacaccatcattcagctctaaa

SEQ ID NO: 44561 - DNA, 411 bp, Glycine max
  Clone ID: LIB3093-009-Q1-K1-B1
gcgagagaggcttgcagaagacattgatgctgccatcaagaggatctcagatgaagcatatgaaattgcggtggagcatataaggaacaaccgtgaggccattgacaagattgtggaagtccttctggagaaggagactctgagcggagatgaattccgtgctatattgtctgagtttgttgaaattccagctgaaaaccgtgttgctccttcaactccagtaccagccactgtttgaatagcctatatatgtaacatctttcatatgtattatcttagaatacagaatgccctctgcagcctgctccatatttgtgaatgattaaagattctaccttactttttcattttttgtagtggtgacaaatgacaacagagagtatgtataaaaaaaaaactgtttttaggtgt

SEQ ID NO: 44562 - DNA, 275 bp, Glycine max
  Clone ID: LIB3093-009-Q1-K1-B10
cccacgcgtacggttccattcgtgaaactaacaaccacgcaaggcctttatcatggcagcgggttgcccaaaggcgacgcgacactcaaggccacctacgctaagactatcgacgatcccaaagacctatatgactcttcaccactcgaccataccgccttctgaatatgccatgaacttcactgttgaagccatccaatcagagaatccaacctatcagtgtgaaccagacaatcaacggtgacccatacattgaaagacctgacaccccacat

SEQ ID NO: 44563 - DNA, 453 bp, Glycine max
  Clone ID: LIB3093-009-Q1-K1-B11
acgctaactgctagctcaatggaggcggtatggttagcccgaacgtggcggcgccggtgaggtgcccttctcgctttgatctaagttatactaacgctctctcgtttacacccaaaagggccccgacaatggcttcaggggagcaaaaagcaccaccccaaacccaaaggttgcaaatttatcccaatacaaattctggggtctcacctttctggagagagaagtatgaaagagaagccaagaggtattgggatgttttctacaagctccacaaggacagagttagttttttcattagtatttattgtgtttttggtctctgtcaatacaaattttgttgctcacttgtgtattcaatcaatactatttgtgattgtggtgcctctcttttgaaaaaggcaaaaattgtgtattattaataataaaaaactgtcattaacactaggagtgtaa

SEQ ID NO: 44564 - DNA, 455 bp, Glycine max
  Clone ID: LIB3093-009-Q1-K1-B12
cccacgcgtccgcagaattaaaatatttctttgagtcaagtcctttagcatcaggcagtgtaaaaaaatgggtttccgtataccaggtattattagacaggcatcattttctacagccaaagcaactcacaaggaacttgaagtcccaaaaggctatcttgcagtctatgttggagataagatgaagcggtttgtgattctggtatcatacttgaaccaaccttcatttcaagaattactgagtcaagcagaagaagagtttggatatgatcatccaacaggcagtctcacaattccttgcaaggagaatgagtttctaaacctcacttctcgcttgagtgagctatatatcatgctttaattgagactcaaacagattagttgagccaaatttgtacaagaaggaacttcttttattgtgatacttccaatttttttcttttataattcaactg

SEQ ID NO: 44565 - DNA, 401 bp, Glycine max
  Clone ID: LIB3093-009-Q1-K1-B2
cccacgcgtccgaagaaacgggccacacaaaaatagtggtgcctactttgtttgacataatggctcaactgcagaagcaacaaaacttctgctttgtccttcttctctttgtggcactgggtatagcttatgctagagaagcttttgaagttagcttccaacagaactacaagattgcatggggaaagcatcatatcttctttctacagcatggtagagaagttcaactctcaattgataagacttcaggggctggtttcagatcaaaattggagtatgcttctggattcttccaaatgagaataaagatacccaacaaggactgtagaggagttgtgacagccttttatctgacttcaactgcctataaacatttgggaagcaaacatgacgagattgac

SEQ ID NO: 44566 - DNA, 385 bp, Glycine max
  Clone ID: LIB3093-009-Q1-K1-B3
cgcagagatggacgcatatcacaggcttccgatgtgagtaacttgcctgctccttttgacgctgttgatgttcagaaacaaaagttcgcagcaaagggtctcaacactcaagacctcgtcacccttgtcggtggacatagcattggtactacagcatgccaattcttcagtaatagattatacaacttcactgcaaatggtcctgactcttccatcaaccctttatttctttctcaacttagagcactctgcccacaaaatagtggcggttcaaaccgagtggctcttgatacgggtagtcaaaccagatttgacacatcttactttgctaatttgaggattggccgtggaattctgcagtctgatcaagcactttggaatgatc

SEQ ID NO: 44567 - DNA, 398 bp, Glycine max
  Clone ID: LIB3093-009-Q1-K1-B4
cccacgcgttcgggaagtcgatgcccaccctatccgagctatgaagctttctgtctcacctgttgtgcgtgttgctgttcaatgtaaggttgcatcacatcttcccaagcttgttgaaggtcttaagcggttggctaagtcagatcctatggttgtttgtaccattgaagagtctggtgaacacattgttgctggtgcaggagagcttcatcttgagatctgtctgaaggacttgcaggatgattccatgggtggagctgagatcatcaaatctgaccctgttgtgtcattcatggagactgttttggagagatcatgccgcaccgtgatgagcaaatcacccaacatgcacatccgtctgtacatggaagcaagaccattggaggaaggtcttgctg

SEQ ID NO: 44568 - DNA, 356 bp, Glycine max
  Clone ID: LIB3093-009-Q1-K1-B5
cccacgcgtccgggtcaacaccgtattgaaaacagttgagccgacagaaagctctttgcggagctggaactccgaggaatttgggtctctgggtgaaaagcccaccatcctggtctccgagagacttggagaggcaggactgcaggtgttacgcggtgttggacacgtggaatgcgcgtatgagctctcgcaggaggagttgtgcacgaagatctcgtgctgtgacgctcttatagtgaggagcgggacgaaggtgacaagggaagtgtttgaagctgccaaaggaaggttgaaggttgtgggaagagccggcgtggggattgacaacgtggatttgcaagcagccaccgaatttg

SEQ ID NO: 44569 - DNA, 392 bp, Glycine max
  Clone ID: LIB3093-009-Q1-K1-B6
cccggacttcctccccctcctccgcgcctcctccctcccctaccagctcaccgccccggccgtcgcgctcctcctcgtcttccgcaccgaggcctcctactcccgcttcgtcgaggggaaaaaggcctggaccatcgtcatcgccggcaacttcgccatcaagcacgcgctcttacactacatcattgccttccccattgcgcttaagtgccacgtgctgtatggttcggatgttaggagtgatcttcagcatttgctagaagtggatgatctggcggtggtcatgaattcgaagcaccggcctcgctgcattattgagtttatatcgcagagcatccgtttactgaaattggaggagtctagaagaaatgccctggaatcaaagatgactt

SEQ ID NO: 44570 - DNA, 299 bp, Glycine max
  Clone ID: LIB3093-009-Q1-K1-B7
aaactttcctcccaccttgagttttacctactatgaatcacataatggctcagctgcacatacaacaaacctccttctttccccttcctctatttgtgacactccttataacttatactctataagcttttataaatagcttccaacataactacaatatttcataatgaaagcatcataccttctttctacatcatcttcaataacatcaactctcaatttataatacttcaggaacttgtttcatatcaaaaatctaatattcctctgtattctttccaatcagaataaaaattccc

SEQ ID NO: 44571 - DNA, 349 bp, Glycine max
  Clone ID: LIB3093-009-Q1-K1-B8
aaactctgaaaccctcaactcaaatccaatcctttggtgggtttcgaattggagggcaacgaaattctaaacacatggactcagctctgtcgcggttgcatctccacaatctccctcctctttcctccgccgctcaccgccctctcttgcagcctctcgccgccgccgcttctttctaccgctcttctcctcctctcccacgcctccgtctctcgccgcttctcgctgctaacaccctcaccgctaatgacgtctcgccaagaagtggactatacactgtcggtgactttatgacaaagaaagaggatttacatgtggtgaaacccacaacatctgtggatgaaagctt

SEQ ID NO: 44572 - DNA, 396 bp, Glycine max
  Clone ID: LIB3093-009-Q1-K1-B9
cttcaattcaataatttagtaaaaatgttgtcttctctgctgaacccttccttcaccaccagccttccaatccattcaattttaatccctaataaccgccgcgcctccaccgtagtatcatgcacctcctcacacctcaccaccaacaaccactcccatgtttcttcgccgccgaacatcaaggacgaggcccgccgccgccccgcggcggagaacgacttcacggcgaagtacgtccccttcaacgccggcttcgactcgccggaaacctactcgctcgacgaaatcgtgtaccgcagccgttccggcggactcctcgacgtgcagcatgacatggaggctttagggcgcttcgacggcgcgtactggcgcgcgctgttcgactcgcgcgtgggg

SEQ ID NO: 44573 - DNA, 382 bp, Glycine max
  unsure (1)..(382): unsure at all n locations
  Clone ID: LIB3093-009-Q1-K1-C1
cccacgcgtccgcaacgcagtcctttttctatttgtatgtttgtatgagactganaaagatagagagatagtgtgtgcagaagatgtggctattcggcagaaaaggggcttctgggttttcatcatcatccactgcagagcaagtcactgaaggaattgatggaactggtttcactgccattgtcacaggggcatccagtggtattggcactgagactacgcgtgttcttgctttgcgtggtgtccatgtgattatgggtgtgagaaatatgcttgctgctaaagatgtcaaagaaacaatactcaaggagattccctccgctaaagttgatgccatggagttagatctcagttcgatgaagtctgtcaagaaatttgcatc

SEQ ID NO: 44574 - DNA, 357 bp, Glycine max
  unsure (1)..(357): unsure at all n locations
  Clone ID: LIB3093-009-Q1-K1-C11
tcgtcttaccagaggaagaatcctcagaacctgtaaatccatcaaaggacaacatggatgattgcacacttctgctttcttcaattgaatctgangagaatgtgaagttaccagtctcagctaaaatcaaacaccaaattggaaagcttttagtcaactccaatttcagagccatattttcaccagcaactcttggagcgattgttggctttattgttggagtagttccccagatacgtaaattgatgattggcggcgatgcttcacttcatgtgattcaagactcagttaccatggttggtgaagcagccgtcccagttataacccttataatgggagcaaaccctccttaaaggt

SEQ ID NO: 44575 - DNA, 465 bp, Glycine max
  Clone ID: LIB3093-009-Q1-K1-C2
ggcctaccatgattgaagtggctgaggagctagatcttatcaggcgcagtgggtgggcgaccatggaggaaaccatatgcatggcttcttcggttgggtccgtgtgttcatcgcctcgaaatggaagtgttaattcacttagaggtgttagttttgagagagctgcaggacttgggagtgagacattgattgttccccacaagactgatgtttttttgcaatcaattgaggaggtgaaggacagctctcctgtgtctgtgcatgatagttggttaagtggaactagctcaccttcaacaaatagcttgttaggacatgtagttcagtgacatatatacttattttgggtggaacacctattatttgaatggcaaaagtcattaatgttttccttttctcttttggaggtgtaggatataaccattttggtgtatgattggcaccaagattctgctttcggttttc

SEQ ID NO: 44576 - DNA, 475 bp, Glycine max
  unsure (1)..(475): unsure at all n locations
  Clone ID: LIB3093-009-Q1-K1-C3
gcgaaagaatgcattanagctctagataatgaccaagggcatatacctttcagaggaagtaaattgactgagagttctgcgagattcatttgtcggtgattcgcgcactgtaatgatatcatgcatttcacctagctcaggttcatgtgagcatactcttaacacattaagatatgctgacagagttaagagcctgtcaaaagggaacagctctagaagggatcccctttcctcctcaaaccttagagattccactgtgttgcctggctcttcagtcttatctcgtgatgaaaccatggaggatgaaataacttatgtttctagtgacaagaatcgatttggttggcccaaacagctggaaagagaaccctctcctccaaacaatgtaaaccgtgttccaagtggtagaatggggggaaatttggcaccatctatgtattctgatccacaaaatggtcaaagaggtagtcaaaat

SEQ ID NO: 44577 - DNA, 462 bp, Glycine max
  Clone ID: LIB3093-009-Q1-K1-C4
cccacgcgtccgtcttgatatctaaaaggagcagggtagcccatcattgacaatatctaaggtgtgtgctctccatttgctccctattgaccgatccaaacccagatgaccccttggtgcctgaaattgctcatatgtacaagacagacaggtccaagtatgaaacaactgctaggagctggactcagaagtatgcaatgggctagcatgttggaataaggcattgtattataggataggacgtgatccttccatttttaaaagacattaatgtataatctatcttttcattcccgctgttgacatattgaggataggtaacagtgcggtgcggaggattttttagtttgtttgtatgaaacttctcttgtgagtgctgggaattgggaaatacatgtagctgatattcttctgtgtgttccaatttatttatctttacatactatgcttagtatgctaaaa

SEQ ID NO: 44578 - DNA, 360 bp, Glycine max
  unsure (1)..(360): unsure at all n locations
  Clone ID: LIB3093-009-Q1-K1-C5
ccggaattgaattcccggcccgaccgacgcatttttttttcaaaccactcaaatattggcaagcactcctagcattccatcacacataaaagctggggcttattctgaatatgggaacacaaaaaaaattctcaaatttgaatctaacatacctataccagacatcaaggaagaccaagtcctcatcaaggttgtggctgcagcccttaacccaatagattataagagggctcatgggttnttgaagaacactgattctcctttcctactgttccggggtacgatgttgctggtgtggtggtcaaagtgggaagtcaagtgagtaaattcaaagttggggatggggtttatggtgacatc

SEQ ID NO: 44579 - DNA, 462 bp, Glycine max
  Clone ID: LIB3093-009-Q1-K1-C6
acgcgtacgcttgcttccacgcgtacgcattcacccaatttttttctgtcctcttttcctctcagaggagcctctgagtctgctcaggtgttccttgtcaagagatccttttgtttttgaggtgtgaagggaaagagaaaaaagatgaatcagtgtggttatcagcagaagaaggccttgacaagctgtgaggagatgaggatggaatctgtggtgtgccctaaacctcgaagattgggcctgttgaaccactcaacctttgataaccacatcagacccttgaggccaccctttatcaactaccaatcagaaattgaagattcaggagttggggctgagcttatggacattattctccccaagagatctggggggcaagtggcttcatcaccgccatttttctgtggatctccacctagcagggcttcaaaccctgtgatccaagatgagcaatttggtagt

SEQ ID NO: 44580 - DNA, 393 bp, Glycine max
  Clone ID: LIB3093-009-Q1-K1-C7
gtgagaatttgccaaagaagaagaagaagaaacatggtggaaggttagagagtgagagagtgtgaagcatggaagtgggtatgcttccaatctcagcttcaaagagaggaaaactcttggctgctggttacaccactctcgatgccattgctcgtgcctcccccacccaccttgttcgagatattgatgtttctgagagtgaagccacggaaattctgaatcttgcaagcaaacctagtgctttggagagaccgaatgggtctcacactgctgttgttggtgatctggataacatccttggtggaggaattaagtgcaaagaagtcactgaaataagtggagttccaggcattggtaaaacacaaattgggattcaacttgcggtaaatgttc

SEQ ID NO: 44581 - DNA, 418 bp, Glycine max
  unsure (1)..(418): unsure at all n locations
  Clone ID: LIB3093-009-Q1-K1-C8
cccacgcgtccgaaagaatgtttacttaagggatatctggccatccactcaagaaattgcagaggctgtccaatccagtgtgttgcctgacatgttccgaagtacatatgaagctattaccaaaggtaacactatgtggaaccaactacaagttcctgctgagaccctgtactcatgggaccccaagtcaacatatattcatgaacctccatacttcaagggcatgaccatggatcctcctggagctcatggtgtgaaagatgcctattgtctgctgaattttggtgacagtataacgaccgatcacatttctcctgctggtaacattaacaaggatagtcctgctgcaaaataccttctggagcgaggtgtggaacaaaaagacntcaactcttatggaagtcgtcgtggcaatgat

SEQ ID NO: 44582 - DNA, 276 bp, Glycine max
  unsure (1)..(276): unsure at all n locations
  Clone ID: LIB3093-009-Q1-K1-C9
aattctttatctctatataatgacctaatcttatacctcatccaccaantaatggcaagagtcattcaaaccataaccccatactctacactctaactatccccacacatccctaccaccgttcatatcaacttactttaacaaataaaaacctacccactcactctacaccctatcacatatcaacaaatgtggaagagatcataaataactctcataactcatacaccgcacatcctaccatcggtcattacttttctctcttgaacaaaccat

SEQ ID NO: 44583 - DNA, 468 bp, Glycine max
  Clone ID: LIB3093-009-Q1-K1-D1
tgctatttgtcttggtactgctaagggtcttgcatttcttcatgaagaactttcaccacctattgtacacagagacatcaaagctagtaatgtactacttgacagagatttcaatcccaaaataggtgattttgggctggctaaattatttccagatgacatcactcacattagcacaagaattgctggaacaactggttacttagcaccagaatatgcattaggtggccagttaaccaagaaggctgatatatacagctttggggttcttatacttgaaataattagtggcagaagcagtgccagaaggacaaacgggggaggatcacacaaattcctcttggaatgggcctggcaactttatgaagagaggaaattgttggagtttgtagatcaagacatggaagaatttcctgaggaagaggtaattaggtacatgaaggttgctcttttctgcacacagtcagc

SEQ ID NO: 44584 - DNA, 366 bp, Glycine max
  unsure (1)..(366): unsure at all n locations
  Clone ID: LIB3093-009-Q1-K1-D11
atgcctcaacgaggaactactgattaatttatgtatgatcaacttcatgtattaaagatggggttctgcgctacgtatactaattaataataaaattagagctgcagctctaacagtgtgtgatatgaataattacttgagaggggggatacgacacaccttcttgagttcataaatttcaattccgatctttttggttgtggtgtattattaataacaatttgttattattaattattaagtgacttctataataacaatttgttaactttactacttcctctactttgttataaatgtatctttctgtgttaagttgaggtcttctttntatatattaataaaattgtattaaattttatgcac

SEQ ID NO: 44585 - DNA, 409 bp, Glycine max
  Clone ID: LIB3093-009-Q1-K1-D12
gcccgcgccgccctccagacctccgccatcgaggccaaatgcctctccgtctctggtgagggctcccacctctccgccctcctctgcctcctcctcgccgcgctcccgcgcctcttccccgccgacgccgccctctccgccaccttctgcctccgcgggctctgggctctccagagcggcctctccctctacgccgacgccttcatccccgagggctgccaccgcctcctcgacgtcaccagcggcgtcgagggctccacacagtgcgatctggacgagtccaagctccgcgccgtcgccatccttgatctcgcattcttgatccacgccatcatcgtggtcctaatcgtgctcctcacttatgccctcttcgccagaagcttcggcgggaggaggctcggatcctatg

SEQ ID NO: 44586 - DNA, 299 bp, Glycine max
  Clone ID: LIB3093-009-Q1-K1-D2
aaaaaaaaggcgaaaattggaaaggggaatgaacctttttccctgggggggggcatacaatacattttttaccccccttttttttgcccaaattgccctttttgggggaatgaataaaaaaaagtaaagaaggcttgttacccccttcctcatttggggtagttgggaaggccccaaaccttaagggggaagtgggcccaaataaccccccaaatgcccccaaaaaaaaaccccccggggaacttggcccccccataaaaaatttggaactgatcgggctcctttttggggccccttaa

SEQ ID NO: 44587 - DNA, 397 bp, Glycine max
  Clone ID: LIB3093-009-Q1-K1-D3
cacacaattccaattcctctggatctcgtctcgatcgatagatctcgaacatgagcactggggagcttctcaacatcgaacctctcgaactcaagttcccctttgagctgaagaagcagatctcatgttctcttcaattgtccaataagaccgatagctatgtagccttcaaggtgaaaacaaccaatccgaagaagtattgtgttcgtccgaacactggggttgtcacgcctcgatctacgtgtgatgttatcgttaccatgcaagcgcaaaaagaggctcctgctgatatgcaatgcaaggataagtttcttcttcagagtgtaaaaactgttgatggtaccagtccgaaggatatcactgcagacatgttcaacaaggaggcaaggcatgtggt

SEQ ID NO: 44588 - DNA, 466 bp, Glycine max
  Clone ID: LIB3093-009-Q1-K1-D4
ctcgcaagcggagccccaatttctccttcacgaaccctaattcactcttcccattcgaaatctcgatcaccttttcgattcaacctttctctcctcgctaatctcttcgttcgcctcgcacatcaaggtgagggattgaaattgaatcctcaagatgccagctacagcaggaagggttcgcatgcctgcgaacaatagggttcacagcagtgcagcgcttcaaacccatggtatatggcaaagtgccatcggctatgatccttatgcacccaataaggaagacaagaaggattcttctcaaaatctgccaaatgcagagcctgatgctgagaatgcatatgctagcttccaggggcttctacagcttgctaagataacaaatgctgaggtggatgtatcccgtggggcctgcaaaaagtgtggccgtgttgggcacctcaagtttcagtgcaagaactatgtgaaa

SEQ ID NO: 44589 - DNA, 446 bp, Glycine max
  Clone ID: LIB3093-009-Q1-K1-D5
cccacgcgtccggtggttcacacttcacacggagaacggagtcggaggatccgttttcgcgggccggcaaccccaccgagtaacaaacgaagaatctctaccctcttcgctttcacttctcgccaagtttagttaagcaaccagacaatgaagcacactgacaatggagctttcaactcggaacacaaagttcttcttcaccaatccattgcccgttacttgaaacacagtggcttctacaaaaccctaaaaaagtttcgctctgaagcgcaattcgagaaaaatgatttgaagggatccccagttgatctggaagaaatgtgcctcaagtattttgaaatatgtggcaaagatgccaagtcaaatcttaatgatcagaatgagcaaggtgtcaacagcaaaaacaaagaagagggtaaatccaaggaaaagaaaaaaagaatagc

SEQ ID NO: 44590 - DNA, 384 bp, Glycine max
  Clone ID: LIB3093-009-Q1-K1-D6
atggcttctgcttctaatgccatcatccaatgcacctcttcttcttcttcttcgtttgagtatgacgtgtttgtgagcttccgcggtgaatacacacgcaacagcttcaccgcttttctttttgaagctctgaaaaaacaaggcatcgaggccttcaaagatgataaagatatcaagaaaggcgaatccatagcaccagaacctatacgaaccattggaaggtcttatggtttccctggtggcctttccaaaggcctttccttcctaaactggtgcctgcgtgaactagcacatatctggaattgctttcaaccatctaccagacatcttctggctattttctatgatgttgatccatcacaagtgcgaaaactgagtggagac

SEQ ID NO: 44591 - DNA, 452 bp, Glycine max
  Clone ID: LIB3093-009-Q1-K1-D7
tcggctttgatttctctctcctcgactcgatcccaattccactagggattcaattgcgatgcgattccgagcttgttagatccacgacaaggtttcgtttcccagattcttttgtaaaaaaaaattcttcctctgcccaacaggtaagttgtaaaaaaatggaccatgacaagactgggtgccaagctcctcctgaaggtcctatattgtgcatcaacaactgtgggttttttggaagtgcagctaccatgaacatgtgttctaaatgccacaaagacatattgctgaaacaggagcaggccaagcttgcagcatcatccattgggaatattatgaatgggtcatcaagcagcactgaaaaggaacctgttgttgctgctgctgctaatattgatatcccagttattccagtagagcctaaaactgtctttgtgcaaccctttatttggttc

SEQ ID NO: 44592 - DNA, 363 bp, Glycine max
  unsure (1)..(363): unsure at all n locations
  Clone ID: LIB3093-009-Q1-K1-D8
ttcctctcnatctcgnttttatttttagatctcgaacatctacactggggaagttttcatcatcaaactttttaaacaaaactacccattttatctaaagaatcaaatctcaacttctcttcaattgtccataaataccctatactatctatccttctaggcgaaaacaccctttcctttaaaatataaaaaaaaaatccaacacagttgttgtcacccctcaatcttccttttattttatcattaccattctaacacataaatatgcttccctctaattttcaattcaatcatttatttttttttcacatttatcaatctttttatattaccattcccaataatatcactgcatacattttc

SEQ ID NO: 44593 - DNA, 396 bp, Glycine max
  unsure (1)..(396): unsure at all n locations
  Clone ID: LIB3093-009-Q1-K1-D9
ccggggggacgactctttctgttgttgtanaactcgttcttgttcttttgatgctctgtgtttgtttttgtaaagtcgggcacctgaaaatgtcttgctgctgtgttaactgtggttgctgaagctcctgcaagtgcggcatctgctgcggaggctgcaagatgtacccagacttgatctacactgtttcaaccaccaccgagaccttggtcatgggagtggcacctgttaaggctcaatttgagggtgctgaaatgggtgtgcccgctgagaacgatggctgcaaatgtggaccaaactgctcctgctacccctgcacttgcaagtgaggtgttgggagagcaagctttaagcagtgatagcccttaattaggaatatatgataaactattaatg

SEQ ID NO: 44594 - DNA, 454 bp, Glycine max
  Clone ID: LIB3093-009-Q1-K1-E1
cccacgcgtccggagagagagagagaatttcatatacatgctatgatttttctttttgaagtgcattaaaatgaatgagcagaaaccttgtttttctttggtctcactttagctagcatagttatacaatttactgattgatggaagctgttattattgtttatttggtttttttaagtatttgatttgatgattcaaatgtgaaaaaacaaaattgtgcacatggtttcgtgcaatttttatatggccacatggagtatctaagtatagaagtatttgatgcccggtcattatcattacttgatcatgaaatttttattaacagcaaccaggcattgggggtgaagtagtgccacaccaggataactcgtttctttatactgaaccacaaacgtgcaccgggctgtggctggccctagaagatgcaaacatattaaatggttgcctttgggca

SEQ ID NO: 44595 - DNA, 394 bp, Glycine max
  Clone ID: LIB3093-009-Q1-K1-E10
gaacccttcgcttactatttcaagggtagtgctcttaatttgttccctgttgaccgaccctaatccttaccatcctttggtcccttaaattgcccacatgttcaagacagacacgaacaagttccagtcaactgccacaaactgtacccagaaatatgccatgggttaagtgaccttgtggtatgtttgagggagagcctttctactctcagtgtttaggtctctcagcccttgtaggaatatttgtcgttttaaatcatgattaaagcccctccagttgaagatgaatgggggaaaacgtttctcctgctgtttgtattgcaaatgttcatggtaatttagaacagtgaaatgtttgcccaattaaaagttatgctcaagtttttaaccgttc

SEQ ID NO: 44596 - DNA, 385 bp, Glycine max
  Clone ID: LIB3093-009-Q1-K1-E11
ctttttctctctcttccctcttcaatcttcacattttctctatggaaaatcatgggaacgagcgaatcttggaccagtccttttacttcaacacttaacgggtcgactcgcccgagtctaagattcgtcgagttgactcgtccgattcgggtattaactcgtccgagtctcaactcgaatcggtcctcgactcgtcggaggtgcagctacaagacgacatttttaacatgcttgacgacacggacaatgtgcccgagcgtgactcggtgcagggtcttgactcagtgatcaaaagcttcgaggatgagataaatgctccaggttcggattctggttccggtgacccggcccaggaacccgactccggggagctacaatctaactt

SEQ ID NO: 44597 - DNA, 265 bp, Glycine max
  Clone ID: LIB3093-009-Q1-K1-E12
cccactccttcggtcggtacctgatatttcttgagttgcaaaaattaaaacaatggtttcggctgagaccatgaacatcccgtacggcttgtgcttcaaggtttatgccaaggtcatcgaagttgagggcccctgtggaaaatctgttcgagacttcaagcacttgaatctcaattttgagcttatcactgacgaaaacggttaattgaagctgaatgtggacgcctgcttcagttctcgaaaaacatccagcgccattcacacc

SEQ ID NO: 44598 - DNA, 401 bp, Glycine max
  unsure (1)..(401): unsure at all n locations
  Clone ID: LIB3093-009-Q1-K1-E2
acgctttcgcgtctcagcnctccagtttcggatcttctcccttctcttcaccaatttccaggattntgaaaaatggcgagattccaaaccgaggattgatggaagccagtgttcaaccaagggtcgatcatgcttcgtccagggacccagcgggcacactttttaactgtgaagggtggtcgatgcttaagatggtgatgcnagaaaggggtcgttctgatggtcctcaatttcccgccaaatgccgaattggctgaatgggtttggttggtggaatgagacttggaatggatcattattcactggccagaaattgatcnaagtggatantgatgaaaagaggggtgctacttgtgacccttgcgcaatgcccaaaattgacatgttcaaaaggatcaatg

SEQ ID NO: 44599 - DNA, 352 bp, Glycine max
  Clone ID: LIB3093-009-Q1-K1-E3
gacccacgcgtgcgcccacgcgtccggtgttagggaggacaaataccgcccctttatgcgcgaagacagtgagaagaacagcaaatggagatatggtgctcctccaaattatgacgttgtcaacaaattatttgatgaaggcagaaccaaggtatggcctccgggttcacttgaagaaaaggtgcagactttagtgaagaattgggagatggaaatgttccacaaggaggatttcaaggataacagatcagtggacccagagaaatacactttcagcctaaacggaaagaagcctattagtttggaagagaaaaagaagcttggaggaaggtatattccactgctgcaaacc

SEQ ID NO: 44600 - DNA, 314 bp, Glycine max
  Clone ID: LIB3093-009-Q1-K1-E4
cccacgcgtccgcctgccgctactttccctttcccggttaatctgctcccgagtttgctcagtcatgaaaccccaaccctaatcctaatcccaatcctctcatccttcaatttaaacccccattcccattgctatcttgtcatttttcccgacaaattgtctctccctcttccgtttcattctcacaatttcaaacatgaatcgtgtatcggtgttccggtagagcatatgacgaaggaggttatcggaactgcgaatcgattgcatgggtttagagaatgccagagcttcgtaaaggagtgcgacgtgggcgt

SEQ ID NO: 44601 - DNA, 409 bp, Glycine max
  Clone ID: LIB3093-009-Q1-K1-E5
ccgaattgaattccggggccggccgacgcattcgcaccatactaattggtttggctggttcaattctgaccaacaccttttaattttcgacttgcttgaattttattggaagccatggattgttcatcatggattaacacttccttggatctcaacattaatccccgcagagttcatgaagaagttcccaaggaggtagaaagcgagcttttctctttgggaatgaccaagtttaacgtggaagaagagtctactagtgacttggaagaggaactgaagcgggtgactgcagaaaacaagaagttggccgaaatgctctcagtggtgtgtgagaactacaacactttgagaaaccatttgatggaatgcatgaggaaaaatggtgaaaacgaggtcagcccaacatcaa

SEQ ID NO: 44602 - DNA, 450 bp, Glycine max
  unsure (1)..(450): unsure at all n locations
  Clone ID: LIB3093-009-Q1-K1-E7
acgcgtccgcccctcntccgcttttctgttatcgccatggatttcgagagtagaaggcttcatgggctgatctccgttgttgccatcgttgctcttagcttcacagctgaaaaatgcagggaacttgttggggaggaggggtcatctcagagtggaaagtttacgatcttaaattgcttcgatatgggttctggaactgtagcatgtgctgtcaaggaaggtgtgaagctctatttttacaatattaggtcttctcatgctgaaagagcaaggagccaagcaattgagtctgcccttgttgatgctgttgctcatgggatgtccccaacggattctgcaaaacatgctcaaaaagaaggtaagaaggctgcaaacttggcttcccgtcaagccaagcggattataagtcccatcatttcttctggattggacctttttgaggctttttac

SEQ ID NO: 44603 - DNA, 304 bp, Glycine max
  Clone ID: LIB3093-009-Q1-K1-E8
cccacgcgtccgttccttttgaaggttagaagtgctacaatacaaacaatggcagctactgaggaagatgtgaagcttttgggtattgtgggaagcccatttgtgtgcagggtccagattgcccttaagttgaagggagttgaatacaaatttttggaagaaaatttgggcaacaagagtgatttgcttctcaaatacaaccctgttcacaagaaggttccagtgtttgttcacaatgagaagcccatagcagagtctcttgtgattggtgaatacattgatgagacatggaagaacaacccca

SEQ ID NO: 44604 - DNA, 376 bp, Glycine max
  Clone ID: LIB3093-009-Q1-K1-E9
cccacgcgtccggttttgcattaccctcagaggaccaactcttgggattatccgtggggaggcacattttcttgtgtgccaccatcgacggcaagctatgcatgcgagcctacactccaacaagtagtgtggatgaagtgggtttctttgatctactcatcaaggtgtacttcaaaggtgtgcatcccaagtttccaaatggaggactcatgtctcaacatttggactctctacccattggatccatgttggacgtgaagggcccattaggtcacatagaatacaccggaagaagcaacttcatggttcatggaaaaccaagattcgccaagaggttggccatgttggctggtggaactgggatcacgcccattta

SEQ ID NO: 44605 - DNA, 428 bp, Glycine max
  Clone ID: LIB3093-009-Q1-K1-F1
gcgctgcattccgcagggtgagagtgtagacggggaatagaattgtgttcatctatgaaagaagagaacgacacaaactataagatcatgaaacggggaatttagtttttggagaaaaggaagtaaagacacactccctcctcctcctcctcctgctctgtctccggcttcaatttcggattccaaattgagttgatttcggagattataaattttcttttacttttttatttttgcgaaaaaatggaagaggcaaaggcattgcaccagcaacaacaacaacaacagcagcagcaacaacttctgctacaacaacagcagcaacaacaacatcaacaacattatctgctcttacagcagttgcagaagcagcaacagcaacaacagcaagctgccgccatttctcgcttcccttccaacattgacgc

SEQ ID NO: 44606 - DNA, 303 bp, Glycine max
  unsure (1)..(303): unsure at all n locations
  Clone ID: LIB3093-009-Q1-K1-F10
ctaaggcttattttccttttcttttagaattcgaacacgctttgcgtcttcaaagggaagaggatgggagaatggaaggacactgangcttacgaggaagagctcatcgactacgaagaagaagaagaaaaagctcccgattccgctaaacccgttactgaatctggcaagaagggttatgttggcatccatagttcgggatttccagacttactgttgaaaccagagcttcttcgagccattgtagattcaggatctgagcatccttcagaagtgcaacacgaatgcatccctcaagcaatc

SEQ ID NO: 44607 - DNA, 363 bp, Glycine max
  Clone ID: LIB3093-009-Q1-K1-F11
gccacttcaagtttggtatcttcttgttcttctctggctgggtcctcgtcatgtctgtctgcgtgcttttcctgttgcccgagactaataatgtccccatcgaagagatgaccgagagagtgtggaagcagcattggttctggaagaggtttatcgatgatgccgcggatgagaaagtagcccatgtctctaatggtaatggatttgatccaacctccaggttgtaaatcatttgcattgagtattttagactctagagtaagtacagtacatgcttatgtgggttagtaacaaattaagcaagttatttttttatttcccccaccccatccatgttggtggcctatgcctgcaacaacattc

SEQ ID NO: 44608 - DNA, 289 bp, Glycine max
  Clone ID: LIB3093-009-Q1-K1-F12
tgaatctcagaattctctaaaagagatctttttctgctctttgaagaaagaaggggctttgcttgattttggagatgtctctgctctcagatctcatcaaccttaacctctccgataccaccgagaaggtgatcgcagagtacatatggatcggtggatcaggaatggacctgaggagcatagcaaggactctcccatgaccagttagcgacccttcagagcttcccaagtggaactatgatggttccagcacatgtcaagctcctggtgaagacagtgaagtgattta

SEQ ID NO: 44609 - DNA, 353 bp, Glycine max
  Clone ID: LIB3093-009-Q1-K1-F2
gccatcctgcattatctgtttagctcaaataattttgtgaagcatttttattggtagaaatggagagtgagtcggtgaaacgcagaattcacatgattgctgctcactttgcacccaatgatgatatttcaactacccacgttctgcctatgaactgtagtggcagtctgaactctgtgctccggagatgtgataataaggtgtattttgcacgccaagcatctgcttctcttggttattttatgaggcagacttcaattgaagagggtggctcaactggctttattgctcccaaaacccatcctggtgctgctgcatctgaaagtccttctaatgcaagagcaccatgtttt

SEQ ID NO: 44610 - DNA, 419 bp, Glycine max
  Clone ID: LIB3093-009-Q1-K1-F3
gcggtttattagtattattatcactagctacctgctatcaaagcatcacaaatggcttctacagacaaggctggcggcgaccctgaatacagaacatcttcaactccagctcctgctggtgttgattactttaaatttgatgtcatcctaaggtttctattgtttgcagcatcactggtagctgttgtggtgatcgtcactgctaatcaaacagaggttattcgtgttccacagcctgtgccatggccagccaagttcagatactcaccagcctttgtttattttgtagctgcattgtccgttactggcctctacagtatcattacaacacttgcatcactctttgccagtaacaagccagccctcaaaaccaagttgctcctttactttatcttatgggatgcgctgatattggggat

SEQ ID NO: 44611 - DNA, 426 bp, Glycine max
  Clone ID: LIB3093-009-Q1-K1-F4
gcgcccacgcgtccgtccatttcaaccgacacgccactacccttctctcacaaatctatttccggtccagtccctcagagagagcaagatcacccttctatagagagaaaacacacacacacacacacaaaacaaaactcttaaagagggtgaagattttttggaacagaataagagtatggcccttacaaaacaaatcttgggttcttcattgctagagaggtccatgtttgttccttcttcttccccttcatcacttctcaaccaaactcggttcttagttcctttggagaacaagagagttgtgagggtgaagagagctgcaaagtttcctgtggcagctataagtgaggatttgatgaaaggttcttcttcttctccttcatcatcatcatcttcatccccctcttcttcttctcttctggg

SEQ ID NO: 44612 - DNA, 310 bp, Glycine max
  Clone ID: LIB3093-009-Q1-K1-F6
gccatgttgaatgttactttcatgtgcaggtctagcatatttgacgccaaggccggaattgctttgaatgacaactttgtaaaacttgtttcctggtatgacaacgaatggggttacagttcccgtgtgattgatttgattgtccacattgcatccgtggcttaaagaattgagtctgagcttggatatcatcgctacaccgttccaaatttttatcttaatcgagtttattttagtgtgaattcggaataaacactttgtgttgctgtgagagatatcattgaaaaacagtgcaatatgttgagttggt

SEQ ID NO: 44613 - DNA, 419 bp, Glycine max
  Clone ID: LIB3093-009-Q1-K1-F7
ggaaggcgggggcgacgacgcgtccgtgatttgcagcaagctcttgagctgcaaagtttgaggctaatgggtctgcaacttgtggagatcaagaagcatcaccagcgtgcactctccactggaagcccaattccttcccccactcactctcctaacatgttcaaccaaaatattgttccttcttttcacatcaattcagaatccccaaaggagagtggttcaacttctgctccagctagtactgcatcagtttctgctggtcaacagccggtcaacatttctgttggcaaggaagtggttgtcaatggcgagaatggatataaagaaagcaatggcaagcagaactctagtcatgacgattgggatttgcaagaatgtttggagcataatcttcctgatagcccttttgcttccccaac

SEQ ID NO: 44614 - DNA, 277 bp, Glycine max
  unsure (1)..(277): unsure at all n locations
  Clone ID: LIB3093-009-Q1-K1-F8
cttacacttgnactattcatgaatacgctaatttaacactcaggtcatctcccatataaatatagctaattaaccagattgttgagggattctttaggtggtaaaaccaaaactatcattattgccacaatatccccttccattcactgtctggaataaacccttagtaccttggattatgcacaccgtgcctaaaatatcaagaacaaaccatagattaatcacaaaatgatgaaatctgcaatgattaatgatttgtattcagaaattgacagac

SEQ ID NO: 44615 - DNA, 413 bp, Glycine max
  Clone ID: LIB3093-009-Q1-K1-F9
cccacgcgtccggcttgccgtcaacaacgattcctttcggttttctgtttctctggattcgggttcatttttacggctaccagaatgtccagctcatcggaatattcggcattttccggcccccgcccggccaagtcgccggccgagaagtccactttctctcagacttgtagtctattgagccaatacatcaaggaaaaaggtgccttcggagaccttaccctcgggatgactcgcacccccgatacttacggttcccctgagacatcgtgtcactctgcaacaaccatggagttgtttcccaccatcatcaagcaacggaacccaactactgtggatttcctatctccccagagtgcttatcctcaccactcagaggttccaaccatggtcaaatcaagtgcatttaagtc

SEQ ID NO: 44616 - DNA, 366 bp, Glycine max
  unsure (1)..(366): unsure at all n locations
  Clone ID: LIB3093-009-Q1-K1-G1
gcgctgccaacacattgatgagtactgctatctcagccttcccatctctcctttcttcctcaaaatccagatttgccaccgcagttcctctttctagctttggtgtcaccaatgcctcttcttctcgcttttctatgagtgctgactggatgccaggccagcctagacctccttaccttgatggttcagcacctggtgactttggattcgaccctcttcgtcttggtgaagtaccagagaatcttgagaggttcaaagagtcagaactcattcactgcagatgggccatgcttgctgttccagggattttggttccagaggcattgggcttaggcaactgggtaaaggctcangaatgggcagcag

SEQ ID NO: 44617 - DNA, 186 bp, Glycine max
  Clone ID: LIB3093-009-Q1-K1-G10
ccttccctaaatataccttcacattctcctcctctgtctgatactcctctaaaactctactttcatttaaataaaaactttcccctttattatattaaccaccattatatttcttttcaccaaaatcctatcacatcatcttcatatcatcttcctttcctattaccttcttctattttctccatc

SEQ ID NO: 44618 - DNA, 465 bp, Glycine max
  unsure (1)..(465): unsure at all n locations
  Clone ID: LIB3093-009-Q1-K1-G11
ggaantaccgggccgaccgaggcgtacgcccacgcctccttccaaatcaatcaaattctttgagttgaacacaggggccaagattccttgtcttgtgttatggacttggcaagctgaacctggtgttgtagctgaagctctcaccacagccattcaggttggatacaggcatattgactgtgctagtgcgtataagaatcaagcagagattggttctgctcttaagaagctttttgatgatggtgtggtgaagcgtgaggacttatggatcacttccaaactctggtgttcagatcatgcaccagaagatgtgccaaaagcattggataaaacattacaggaattgcaacttgactatcttgacctctatctgatccactggccagtccgcatgaaaagtggaacatttggactcaataaagaatatcttgagcaaccagacattcccaatacatggagagcaat

SEQ ID NO: 44619 - DNA, 407 bp, Glycine max
  Clone ID: LIB3093-009-Q1-K1-G2
cccaacacgacgagactgtcaccaatgacgaaattgctgctgacctcaaagagcatgtgatgaagcgtgtgatcccagagaagtaccttgatgagaagaccattttccacttgaacccttcaggccgttttgtcattggtggccctcatggcgatgctggtctcaccggccgcaagatcattatcgatacttatggaggatggggtgctcatggtggtggtgctttctccgggaaggaccctaccaaggttgataggagtggtgcttacattgtgagacaggctgctaagagcattgtggcaagtggacttgccagaatgtgcattgtgcaagtgtcttatgccattggtgtgcctgagcctttgtctgtgtttggtgacacctatggcactgggaaggatcatgat

SEQ ID NO: 44620 - DNA, 265 bp, Glycine max
  Clone ID: LIB3093-009-Q1-K1-G3
cccacgcgtccgcaaacttttcacaaaattaaagagacccagttgatttttttctctttaggctgaggtattttgaagcatcgaacatgctacaacggcggcttctggagacggagctgagcatgccaccgtcgtacggcggcagcggcggaaacaacacgcgcgacacgttcatcagcgacgcgaacttcgacacaaacatggtgatcaatcctggcggcgctgctgtgcgctttgatatgcgcgctgggcctgaactccatcg

SEQ ID NO: 44621 - DNA, 464 bp, Glycine max
  unsure (1)..(464): unsure at all n locations
  Clone ID: LIB3093-009-Q1-K1-G4
gacgcaccgattgacataaccctataccctaatccctaatcancccgaccccagcatggtgaagaataaggtggcccggtngtggctcaacagctctatatgtgtcctcatcnatcgccgtcgtcccctccnctcctccgccgtcgccagcccccttcgaacagcccaccgcgtccctccgtctcccgcccgtcgtgacccccctttgaacccaccgcctccgcgtcctccgtcgcctccctccgtccacgatcctccgccgacgcagagaatcgatgattcgccgcgggaagatcacggcgacggctttcgttccgcgcacgatgtgtctcgccaggcgcaattgctggccgagttgtcgaagaaggtggtggatatgagcgagttgcggagcctcgcgtgtcaaggtattcctgatgctgctgggatacgttctactgtgtggaagcttttgcttggatatc

SEQ ID NO: 44622 - DNA, 343 bp, Glycine max
  Clone ID: LIB3093-009-Q1-K1-G7
cccacgcgtccgcacgcctcagtagaccatggcctcattgggtgggttacaaaatctaagcggcatcaattctcttatcaaaaaagagggtccaaaagtcaatgcgaagttcgagctgaagccgccaccatatccactgaatggtttggagccggtgatgagccatcagacacttgagtttcattgggggaaacaccacaagacatatgtggaaaatctgaaaaaacaaattgttgggacagagcttgatgggaaatcactagaagagattatagtgacatcatataataagggtgacattcttccagctttcaacaatgcagcacaggtatggaaccatgac

SEQ ID NO: 44623 - DNA, 360 bp, Glycine max
  unsure (1)..(360): unsure at all n locations
  Clone ID: LIB3093-009-Q1-K1-G8
gtggaaagagggaaccgtacaaagaagataacgctaacgcggtgaccctttttgtgtgttgacattaaagaatggagaaagagggatgaaagaagattttgggaaggaaatataaaacatttattcattgtcaccaaattttgttccctgcaagagagagaagaagaagttgttgggttgagttgggtttggattggatttctaatctaatctatacctttctttttcctatgcttttaaggcacanatccttctcccttctctcttctttcttcttcttctcctgacccttattattattccttgcccttaccctttangcaagggaaggaagaaagaataactnatatatnatcttta

SEQ ID NO: 44624 - DNA, 407 bp, Glycine max
  Clone ID: LIB3093-009-Q1-K1-G9
ccggggcggccgacgcgtacgcccacgcgtcctcccactcgtccggtccagattagtaccacaaaaatggagaaatagaatagctgaatatcgtatagctcaaaataaaaatttaaccaaatgcaattcatatgaaaaaagccaattaattctttacaaagaacaacaagtaaacgcattaaaaaaaaaaattagaaaacaatatagatacgatcttttatcctataattttatcaattatgcagataagaaagactcatatatttatggatatagatccctatttcaagtaaaaaaaaaccaagtgatttcttctaattacaacacgtataaaaaaaaattattggatatcataaataatctctttatcaagaattatatattcgaagatgccattctagatattg

SEQ ID NO: 44625 - DNA, 466 bp, Glycine max
  unsure (1)..(466): unsure at all n locations
  Clone ID: LIB3093-009-Q1-K1-H1
gaccgagccattcttcctttagcatcaaagataagaggcaaaccggttaggatcagtgcagagagagagaatgggacttggcttgtttttctcttttatccacttggtaacttcggctattgtcgaatccgtaaggcgaaggagagcaatcaaggagggatatcttaacaatgccaatggtgtgttgcatatgtctgcaatgtggcttttcccacaactttgcttgggtggaatagctgaagcattcaatgcaataggccaaaatgagttctattacacagagtttcctaggaccatgtccagtgttgctgcttccctttctggactgggaatggctgcaggaaaactggtgtctagttttgtcttcagcgttgtacaaaatgctacttcaagaggggggaaaagaggttgggttttggataacattaacaagggntcgtatgacaagtactactgggttatttct

SEQ ID NO: 44626 - DNA, 194 bp, Glycine max
  Clone ID: LIB3093-009-Q1-K1-H10
caccatcttaaaaaccattttttctcattctctcaatctaacaaactttcttcttcttcttttatatccacatcactttaacattttaaagcaaatcaatccgaataatcttttataactttcatttacttaagcttctttcttcccaactatatattatcttccccacaacaaaaatattcttttctcttttc

SEQ ID NO: 44627 - DNA, 325 bp, Glycine max
  Clone ID: LIB3093-009-Q1-K1-H11
caagagccttctctttgttccgttccgcgaccatgtctcatgagacatgcccttgcgtaaagaacttccttcttttggattctgatgggaaacgtgtcgcagtcaaatacttctctgaagactgggcaacgaatagtgccaaggaaaattttgagaaagttgtcttcaacaagactcagaagaccaatgcccgcacagaagcggaaatagcaatgtttgagaataacattgttgtttacaagtttgtccaagatcttcacttctttgttaccggtggtgattatgaaaatgagcttatcttagccacagttctgcaggcattttt

SEQ ID NO: 44628 - DNA, 367 bp, Glycine max
  Clone ID: LIB3093-009-Q1-K1-H12
cgcgtaaccccacgcgtgcggctggaagaatatggcttcatttgtttctacccactgtatcctgcctagcggggttggatttgtgcatgaccaagatcgttcttgtggtagaactaacactttgcatcttcaaaatgctcctaaaagccctagctctctctcctttttgctctccgtgcgagcttcagaaagtagatcagatgccgttgttgttcagagcaagggtcgatcgtctttttctcaaacagctgctgtgaggcatcttacaggttctgttaccagagcccatggactttcgtttgctgtggttgttgctagatttaaatgaaattgtaccaaaccgctctttgaaagtgctttgggtact

SEQ ID NO: 44629 - DNA, 359 bp, Glycine max
  Clone ID: LIB3093-009-Q1-K1-H2
aaaaacaagagcaaattgggatcgaagaatttgaagaacaccacaagcaagatgcatgttggtgtggtgctcaacacgcaatcctactgcagaggcctagaacctccttcatcttctccttccgtcgtttccaacaagggaacaaggactttgagtttcaggaggctgctgctgcgtccttctcttgggattcatttatcgcgtagctttgctttaaagtgtgttgttactccgaacccagctgtggaattgccattaactgctgaaaatgtaaaaagtgtattggatgaaattcgaccctatctcattgcaaacggtgggaatgtggctttacatcaaattgatggcaatgttgtgcg

SEQ ID NO: 44630 - DNA, 349 bp, Glycine max
  Clone ID: LIB3093-009-Q1-K1-H3
acgcccacgcgtccgcgagaatgttgggtaactattgggttacaataaaagacatggaaaccaggcactgaaatatgcatatctattagttttgggccaaatttagaacaccaaggaaaaaaatgatcttgctgactcaacaagtgcacccacttctcaccttttcctctacctataagtctaattctccattgcacccccatgttcaactcaaggttggggttggtgtggttaccccattttcccaagtgcccattatgcccttttgcaaaggaaggccttacaggaggaggaggaaggggagcaggtgttcctcttctgctgcagcacaagctccgttgccacctga

SEQ ID NO: 44631 - DNA, 289 bp, Glycine max
  unsure (1)..(289): unsure at all n locations
  Clone ID: LIB3093-009-Q1-K1-H4
gcggttaacgatggctctgatgggcggttttgctagaataaacaataatgagatcactgttttagtaagtgatgcggaaaagggtagtgacattgatccacaagaagcacagcaaactcttgaaatagcagaagctaatttgaataaggcggaaggcaagagacaaacaattgaggcaaatctagctcttagacgagctaggacacgagtagaggctatcaatgtgatttcataacaagttgatgcgtccgaatatcggaataactaaaaaaaaaaaaaaaccananna

SEQ ID NO: 44632 - DNA, 338 bp, Glycine max
  unsure (1)..(338): unsure at all n locations
  Clone ID: LIB3093-009-Q1-K1-H5
gaattaaaccatggagtgtggcagcaagtgttggaattgtggaggccttgaaagaccgaggcggatgcaggtggaatcatgccttaagatcagctcaacaccatctcaaaaaccatgttggctcattctctcaggctaacaagctttcttcttctgctatgatatccacaacactaaaacatgagaaggcaaatcaatcagaagagtctttgagaactgtcatgtacttaagctgctggggtcccaactagatatcataagcccaacaacaaaatattcttttctcttttcaattctaggaatcaagcaagcttaantagtctcaaatgatgatgagt

SEQ ID NO: 44633 - DNA, 317 bp, Glycine max
  Clone ID: LIB3093-009-Q1-K1-H7
gaagacccggggcgaccgacgcgtacgcccacgcgtccggagaatttctatggtgctctaacacggaacttatctacggcttcgatgagggaggaagtagtgaagcctgcaacacacgtcgttgggagctcttattataaaaccataaagaatggcttcaatgacacaacaactgatattcagaccaaagcttcttttaagtatgctgcttcgagaggggtagtatggaacgccatttttatatgtcaatggattcttgttgcctgatactggagctgctgttgactacaagacttggagaaaggtcattgacccat

SEQ ID NO: 44634 - DNA, 311 bp, Glycine max
  unsure (1)..(311): unsure at all n locations
  Clone ID: LIB3093-009-Q1-K1-H8
cccacgcgtccgcccacgcgtccggcttgatgggaaatcactagaagagattatagtgacggcatataataagggtgacattcttccagctttcaacaatgcagcacaggtatggaaccatgacttcttctgggagtgcatgaaaccaggtggaggtggaaagccatccggngagcttctagaactgattgaaagagactntggctcatttgaaaaattccttgatgagttaaaggctgctgctgcaacacaatttggtcaagatgggcttggctggcatatagagcaagcaaatttgatggggaaaatgc

SEQ ID NO: 44635 - DNA, 401 bp, Glycine max
  unsure (1)..(401): unsure at all n locations
  Clone ID: LIB3093-009-Q1-K1-H9
gggggcgaccgacgcgtacgctcatatcctcaatcaccccccctctcactctctcttcccttcctctggtggcgagagtggggactcctgctaggaagaggctgatgagagacttcaagaggctgcaacaagacccgcctgcagggatcagtggtgccccccaggataacaacataatgctgtggaatgctgtcatatttggtcctgatgatactccatgggatggaggcacgttcaagttgacactccaatttactgaggactatccaaataaaccaccgactgtacgatttgtgtctcgcatgtttcatccaaatatttatgctgatggaagtatttgtntggatatattacaaaattcagtgaagtcctatttatgatgtggcctgctatactcacat

SEQ ID NO: 44636 - DNA, 462 bp, Glycine max
  Clone ID: LIB3093-010-Q1-K1-A1
ccactcttctaatgtctagttctgagagcacaaacgcgagaactagaacagcgtcatggttggctaccccattctttgttatcgttctcccggtggccgtggctgcgcttctctaccggctcgaaccattcaagccggttcttttgccggtccagctgggccggtccaccgtggcggttccggctcgtaacggccacatgcaagatggatcggaacgtgtgggtgagggacacttggagggcccggaagacttggcctacgacgctgcggcacgtgtcgtttataccgggtgtgaggatgggtggatcaagcgagtcacggtgaatgactcggtggttgactcggcggttgaagattgggtcaacacaggaggaaggccacttggactagttttgaagccgaatggagaactcataattgctgatgcggaaaagggactgctgagagtgtcaagtgagaagg

SEQ ID NO: 44637 - DNA, 440 bp, Glycine max
  Clone ID: LIB3093-010-Q1-K1-A10
cttgagttggaagtcatggcgattggtaatgataatcagccacaacaatctgaaggcaaagggtggaatttgttcaagcttccctttcgccattcaacttcaactcctcacaatcacaatcaagtttccacctccaattctgtttcttcctttgccaaatcgctcctcccctcaccacgtcgtcttaagcttgatccttccaacaagctctacttcccttatgagccgggcaagcagggtaggagtgccatcaggattaaaaacaccagcaaatccaacgtagctttcaagtttcaaacaaatgcacccaagagttgtttcatgcgccctcctgggggcattctggcaccgggcgagagtataattgcaactgtgttcaagtttatagaacatccattgaataatgaaaagccagaaaaaactggactcaaattcaaaat

SEQ ID NO: 44638 - DNA, 263 bp, Glycine max
  Clone ID: LIB3093-010-Q1-K1-A11
cccacgcgtccgctagaagcattagcactaggagcagcaacaactagtctcagctggaatgggctcttcagtgatggcatctctggcccttaaacctgcccctttcactgttgagaagtcctcagtgacaggccttccctatctatccaggaactcttcttcattcagagttgtggccagtggcacgaatatcaagactgacagaccttatgcaatcaatggtggcatggctttgacgtatggatctgatgcatctgtcatgt

SEQ ID NO: 44639 - DNA, 361 bp, Glycine max
  Clone ID: LIB3093-010-Q1-K1-A12
ctcacgcgtccgttgaaaccaaaatctccaatactagacatgtcaactctaatccggagatggcaatcatatcatacacactatactacttctatgattctggttgaatcctacatactgttaacactcatgaataaccattctgtagagccacgaatccggtctagattctcaactatcagaagagcatgagaaccttctacagcagcgataatgggaattccaattccaattcccattttatctccggtcatgtcgccgtttattgctgctgcggatgagaacaccaacacaaataacatcaacaacaatgggaagacaaagtcaccgaatttgcgcggtagcaacgacgacggaatgc

SEQ ID NO: 44640 - DNA, 486 bp, Glycine max
  unsure (1)..(486): unsure at all n locations
  Clone ID: LIB3093-010-Q1-K1-A3
gcggttgatcactctgtcttctctttctctctggtcatttgatgtctctccccaccaaacggtcgagcaccgctggttcctccctgtcgccgccacctcctatgaaaaaggccaagtccctcctcctccgctcctcctccgacgaccacgacgccgttttggacccttcctccatgcctctcgacgacgatctccccaatgcccgcgccgccaatctcgcccgcaagaaagccaccccgccccaacccgccaagaagctcctcatcaagctccacaaagctaaaccaacattgcccacaaatttcgaggaggatacatgggcaaaactaaagtctgccatttgtgctatatttttgaagcaacctaactcttgtgactnggagaagctntatcaggctgtgaacgatctctgcctttataaaatgggtggaaatctttatcaacggattgaaaaggagtgtgaagcacatatatctgctgcactgc

SEQ ID NO: 44641 - DNA, 369 bp, Glycine max
  unsure (1)..(369): unsure at all n locations
  Clone ID: LIB3093-010-Q1-K1-A5
aatcactctatcttctctttctctctgtccagtttatgtctctccccaccaaactttcagtcacggctttttcctacctgtcgccgccacctcctattaaaaaagccaaatccctcctcctacnctcctactccaacaaccacnacnccttttttgacccttcctccattcctctctacaactatctccccaattcccgctccgccaatctcgcccgcaagaaagccacccctccccaacccgccaaaaatctcctcatcaagctccacaaagcttaaccaacatttgccacaaatttccaagaagatacatgggcaaaactaaaatcttccatttgtgctatatttattaaacaacctaactcttttt

SEQ ID NO: 44642 - DNA, 372 bp, Glycine max
  Clone ID: LIB3093-010-Q1-K1-A6
cttcttctctggtctctggcttccttggtacgggaagaactcaatcttgtccatttcgcttgggtttttctttcttcgatctcttcaccttcctttcgaccactctcttatcaccgctcgctttcttaactagagccctctccgttgagggtttctccaggtgtggtttgatttacagtttctgatgctgaagaaataaaaaagcttgaaggcttttgctcttctgtgtgaaaaatgttggaaagtggtgcgaaattcccaggaataatagatctcaacaaaaataataacaactactatgatttctctcaaggcttttaccataagcttggggagggtaccaatatgtcaattgacaagtgtgggagcttg

SEQ ID NO: 44643 - DNA, 379 bp, Glycine max
  Clone ID: LIB3093-010-Q1-K1-A8
cataccatcattcactaaattcatatgggtttgtctccattggttactcattttggccggccgaatatgaaaggggggctaacataccttacattatcgcaactcaggcgatcaaggagcgaaacatcattcacaaggtcacatcttcattaactgcatcaattattgttgaacatgtaatttatgaaaatgtcgatagtgaagtcatttgtatttttccttctatagagtaagtgtttctacaccttgtatttgagagagctgcatatattgagcagtctgaagctctgctataagatgaacagtcacctactaaatcggatagttttacaggcatgaagaaaaacaatgcatcttacaaatctagaaaaagtggatc

SEQ ID NO: 44644 - DNA, 309 bp, Glycine max
  Clone ID: LIB3093-010-Q1-K1-A9
acgtagggatcaagtactaccttctttgggtgatggaagatgatgccttggcatcatgcgactccgttttatatcaaagttctgttacaaccttttgaatctttatgaaaaatccatttaattgttttcatgagtgtgtatttgtgtgtacgtatgtattctagtatgctatatatgcacttagtatgtatgtatgtattctactttgtgcgtatgtatgtatgtctggattgactaattgtttaagcttctaatcaacggtttttgctaattcatggcaaaaaaaaaaccaaaaaatttacaaaaacc

SEQ ID NO: 44645 - DNA, 267 bp, Glycine max
  Clone ID: LIB3093-010-Q1-K1-B1
taccgatgaaggtgtaaaggcattgaagagttctacagccattgtgttacaccctggtcggagtacgattaccttgaatctaccacctcagaaaccaggatcttatgttctcggagttcttactgggcagattgggcatttgaggtttagatctcatagtttttcaaaagtgggtcccgctaatagtgttgatttaataagtattgaaaagccagttaacccaatcttgaaggtgtcaaaccttgaagccctggttatccttaatcc

SEQ ID NO: 44646 - DNA, 345 bp, Glycine max
  Clone ID: LIB3093-010-Q1-K1-B10
cccacgcgtccgcccacgcgtccggtgaaaggtaaagcaaacatgcttgatcaggtcgaacaggctacaatcatggacaaggttgctggccagctccatctccggtctggtgtttctggtattaggagttatgaatgagcctactgtcaccccacaatgtaccaaagaccctattttgggaattactcgaatgctgcattgcagtatcctgagatgccctcatgcaaagctactatggatttgtctgctgctgcaacaactggctgctcctgctttggtgctgctccagcagagtaaggccattttcttatagactttctcatgggaggtgtttcaccatctgtc

SEQ ID NO: 44647 - DNA, 420 bp, Glycine max
  unsure (1)..(420): unsure at all n locations
  Clone ID: LIB3093-010-Q1-K1-B11
gatgaaacgaacacttcagaccagtcccacatacaaccatcccaagctgaagttctggtttgaaatcttcaaactaagaagtactcctttccagagtacatggagaaaatgagcgaactaaaagttcttatcatgacaaattatggttttcatccctgtgaacttgaaaattgcaaactacccagctctgtatcaaacctgaaaagaatcagactagagcggatttctgttccccacgtaggggcattgaaaaatcttgaaaagttatccctctacatgtgtagtaacataagtcagatttttgaaaatggtaccatcccagtttcagattcatttccaaaactatcagatttgaacattgactattgcaaggatatggtggaattacctactgngatctgtgatatttacccactaaag

SEQ ID NO: 44648 - DNA, 332 bp, Glycine max
  unsure (1)..(332): unsure at all n locations
  Clone ID: LIB3093-010-Q1-K1-B12
acggttttgtgtttcacatttaaagcaacactgattagaaaggaaagtgaagttgagagggtggtgaggaagaacaagaaatgggggttggttcccaggatgccatcaagcagttccaggcattcattgaccaagttgaggagcctttgcgaacaacgtttcagaatgttcatcaagggtttgtcaccgaaactttaatgcggtttctaaaagcaagggactgggatccttgcaaggcacataaaatgttggttgactgtttaaattggagggtgcaaaatgagattgacaatatattatctaaaccaattgttcctgctganttatacaga

SEQ ID NO: 44649 - DNA, 397 bp, Glycine max
  Clone ID: LIB3093-010-Q1-K1-B2
gcgtcaacgaaggcggcttctctcgtctcgtctctgcttttctcctttcgctttcgcttttcgtgtggccgccggtaaggcaattcgatacctctgaaccctaaccagacgcagccaccgttttgggtttccatccccctctcatactttgcctgattgctttcatgtttcgtttctctcttttcatttcaatttttatacggttcgccgttgattgtatcgagcaaaaaagtaaagaaaattataattgatttttgtcttgtggtttttttattgattgattagggttgtgtgaatcattgaaaaaaatattgaatcctccgttctgatttttttggagggttagggtttggaaatttggggattttttagggtttggggttgatatacgtttctc

SEQ ID NO: 44650 - DNA, 378 bp, Glycine max
  Clone ID: LIB3093-010-Q1-K1-B3
cacaggaaatagtatcttcgtttgttcaatatgtttggttcatcaggcatggcacaggaatcgggtgtgttcatggttagccagacaattggcagtgttttgtgctgcaaatgtggaattccaatgcaacccaatgctgctaatatgtgtgtcaagtgtctgcgatcggaagttgatattacagaaggactgctgaagcgtcttgtgctggtgcattgccctgagtgtgagagttacttgcagccaccaagaagttgggtcaagctgcagctggaatcaaaggagttgctgacattttgcttgaagaaattgcagaagaatttgaattcgaataaagtgaagttggtgcatgccgagtttatttggactgagccccat

SEQ ID NO: 44651 - DNA, 406 bp, Glycine max
  Clone ID: LIB3093-010-Q1-K1-B5
cactgctcttgcttctctctttggtcttgcatttggccttctcttctaattaattctgcaagagcctttggttatttgttacattacatatatggaattcactttgttcagaggtggttgtgttttgtgtttcgttcttctctttttttccaactcagcttgagtagtggttggtcactactctcttgtgagtagaagggtttatttttttgaggatgcattgaattggagatttggagtgagggaggaagagaagtagatgatacaatataggctctttttgttgggttttctgtattattatcattattcatattcttatgtaacaaattcattattattcctcattgtactttctttatatggggtgtgacaatgtaatcttatggtggattggtttggtttc

SEQ ID NO: 44652 - DNA, 411 bp, Glycine max
  Clone ID: LIB3093-010-Q1-K1-B6
cccacgcgtccgttttatttcaggcacaagcaacaatttgtgtcagcaaggctttgaagtggtggaagaagaccctaaagcctaatatgattgagatccactcggcacaagaactggtccattctttgctcaacgctggtgattcattggttgtggttgatttctattcacctggttgtggaggctgcaaagcccttcatcctaagatctgtcaaatagctgaattgcacccaaatgcaatctttcttaaagtcaactacgaggaactgaaaaccatgtgtcacggtttgcgaattcacgtgttacccttcttcagattctatagaggtgcggagggtcgagtttctagcttcagctgtaccaatgccactatcaagaaatttaaggatgctttgacaaagcatgggaatg

SEQ ID NO: 44653 - DNA, 256 bp, Glycine max
  Clone ID: LIB3093-010-Q1-K1-B7
cccacgcgtccggtgaaagcatgtcctcggaggttactttaagggatgtcccaccgggagcttgcaaggctatgcttaactttttatatgatgggcaattgaatgacaaagttatagattctggtgctttgttgctccaactccttctattagctgatcaatttggagtgacttttcttcaacaagaatgctgcaaaatgcttttagaatgtctctcagaggactcagtatgtccactcctccaagtggtttcttc

SEQ ID NO: 44654 - DNA, 286 bp, Glycine max
  Clone ID: LIB3093-010-Q1-K1-B8
tcttacacccacgcttcctctaaccccttatcctacgcttttaccctaacttatctctcatttaagtctgcttcatatacactgaacttaatcctatacaaccaacatattcaccaatacctacaatctccctctacctacctaactcaatcaatattatcaattcaaatcttacaatctacaacacaacaatattacctcataaatattaaagaatctacctcaaaccactcactctatacactaatccaaatcatctactcaaagatcccacatatacttatca

SEQ ID NO: 44655 - DNA, 362 bp, Glycine max
  Clone ID: LIB3093-010-Q1-K1-B9
acggcccaggcctccgagacaacagtgtacttgggatagttataataactctgccccatggtctcgggtaggaagctccaacagtaacagttctgccagagttcagcagaagtttactaaagaaaaccgaggttctacaagagaagagcatgttgacaattttcattatcaagatggccgaagaaatgaggtttattttgatgatagaacagcaaattctgagttgtccagtgcacctcctttgagctcctttaagagtaggacctcttctgaaagctcatgggatggatcatcagccaaatcctcaaaatcaactagggagagaagggggaggaaaaatacttcctcaatagcatctcctg

SEQ ID NO: 44656 - DNA, 360 bp, Glycine max
  Clone ID: LIB3093-010-Q1-K1-C1
acacatctttgtgtttcaaaaatggaaccgaatggcaaccaactcacctctttcttccaccagcacgagcaacagcaccaacaccaccagccgccgccaccaccgcagaccacggcgtctccgaccaacgggctcttgccgaacgcggatgggtcccacatactttacccccactctgtggcgttcgctgtttcgtcgcagcttgaaccggcgaagcggaagcgcgggcggccgaggaagtacagaacgccggagcaagctctggccgcgaagaaagccgctacgacgttgtctcattcgctctctgtggacaagaagccccactaccctgcgttcccttgctccaagaaatcccattcc

SEQ ID NO: 44657 - DNA, 237 bp, Glycine max
  Clone ID: LIB3093-010-Q1-K1-C10
attccagcctcggccgactcttacgcaaaaaaaactcttattaaatttcaatttggtctaaactttctcttaatgctaatgggtataggctcaaattatctactgccacataatatccatctactaaccacttcatcacgactctaccacatacgccatcccaacaacaatcgtcatcactcactatcgttccatccctttcatcatcatcatcgccatcatctctgaccacaaacc

SEQ ID NO: 44658 - DNA, 268 bp, Glycine max
  Clone ID: LIB3093-010-Q1-K1-C11
gcaaattgcaaaatcaaaactttagagaacctatcgattaggtatgtcttcttccgatgttgattatgtgaatggcgctttggaatcatacaaataaaccccaacgtgtttcatcatcgattcacccaaattcaacgaaacaacatcctcatatcaatggagccatcggatccaactcacgcttctccagatgaatttgattctctgatggaagaactagaatctgcccatgaacatgtgcatgaccgtattacgcgccttgaaacga

SEQ ID NO: 44659 - DNA, 407 bp, Glycine max
  unsure (1)..(407): unsure at all n locations
  Clone ID: LIB3093-010-Q1-K1-C12
aaaaaattgataacatcacacagcattaggatgtatcagcaacaagggtcagatccgacaaagcaatcaccggcaaccggttttccggtgagctatagcaattcaacaacgtattcgaccaacgaggcttcctacgctccagtcccacctccccagcccaaacctcttgtcgattggtccaccggcctctgtgactgcttctccgaatgtggaaactgttgcatgacgtgttggtgtccatgtgttacctttggccgagttgcagaaattgttgacaagggatccacatcatgtggtgctagtggggctctgtatacgctgatttgctgtgtcattggctgtggctgcctatactcttgcttctaccgncccaagatgagacgacagtatggtctaaagggaaatgg

SEQ ID NO: 44660 - DNA, 426 bp, Glycine max
  unsure (1)..(426): unsure at all n locations
  Clone ID: LIB3093-010-Q1-K1-C2
gccattgattctgtgttcgatccgctgagagaattcgcaaaggacagcgtgaggctcgtgaagcgcgtgccacaaacccgatcgcaaagaattctccaaggttgccgtccgtactgcaattggtttcgtcgtgatgggattcgtcggtttcttcgtgaagctcattttcattccaattaacaacatcattgtcggatctggttaggatgaagggaactacaattgcctcagaattcaagttgtcaagcaaaaggaggtagacagagttcccacatcaatagatcattttatgcccccaatcttagttctgttttcatttttgttttttcttatatctggaagcgttactttagatgtaaaattttatttatcctttgttagaccttgacacatntgtttgatttaagataaggaggaaaaaacaat

SEQ ID NO: 44661 - DNA, 351 bp, Glycine max
  Clone ID: LIB3093-010-Q1-K1-C4
acgtgatcatagtcgtagacatgatcagaagcgtatagtgatattagatcagatggattgatactgtcagcaaaatgcagaaagattaaacatcacgttgttcccacagtactaatgatgtatcatacacctgtcaaatccatgacatcatattgcatctaggctcatcaccatctctcttcagccctgcctaatacaccaattgtttgaaagccatcactaaatgccattcaactgcccatgatcatagccaaccttaacccacatagcacttagatctttgacgacacttccggccacatacaagctggaaaacatatggcgctttacactgcgcttgcttgctcatac

SEQ ID NO: 44662 - DNA, 438 bp, Glycine max
  Clone ID: LIB3093-010-Q1-K1-C5
acgcccacgcgtccgagatgatcttgaaagagcagtggatgatggagtgaacacttacaaggccgtgtgcagggatagccgctttgtacctggagctgcagcaactgaaattgagttagctaaaagggtgaaagacttctccttcaaggagacagggttggatcagtatgctatagcaaaatttgctgaaagttttgaaatgattcctagaactttggctgagaatgctgggttgaatgcaatggagatcatatcttctctgtatgcagaacatgcatctggaaatgccaaagttggcattgatttggaagaaggcgtatgtaaggatgtctcaaccttgagcatttgggatctccatgtgactaagttatttgctcttaaatatgctgcagatgctgcatgcactgtactacgtgtggaccagattattatggcaaa

SEQ ID NO: 44663 - DNA, 465 bp, Glycine max
  unsure (1)..(465): unsure at all n locations
  Clone ID: LIB3093-010-Q1-K1-C6
ccaagtctcagaaacgtataggaagatgtgtagtttggttttgttgtccgtgttattgctcggtctccaacgtcctctctcatccttctcagccaactccgaaggaaacgctcttcatgctttgagaagcaggctttctgaccccagcaacgtgcttcagagctgggacccaaatctcgttaatgcttgtacttggtttcatgttacctgcgactccaacaatcacgtcattcgcttagacttgggcaattctaagctctccggaactttgggaccagaacttgcccagctaccccacctccaatacctggagctctacaagaataacataagtggcaacattcctcgggaactttctaaattgaagaaccttattagtatggatttgtatgacaaccaatttcatggcaaaatccccaagtctttttgcaaacttgactcactntaatttctacgcctaaaaca

SEQ ID NO: 44664 - DNA, 424 bp, Glycine max
  unsure (1)..(424): unsure at all n locations
  Clone ID: LIB3093-010-Q1-K1-C7
gtgtttgcggctgaggattccgaacgagcgaccttcttcgtttctcgcaaagtttaagtcaggatgggtaaggaaaagactcacatcaacattgtcgtcattggacatgtcgactctgggaagtcaactaccactggtcatttgatctacaagcttggaggtattgacaagcgtgtgattgagaggttcgagaaggaggctgctgagatgaacaagaggtcattcaagtatgcctgggtgcttgacaagctcaaggctgagcgcgaaagaggaattaccattgatattgctttgtggaagtttgaaaccaccaagtactactgcacagtcatcgatgcccccggacatcgtgactntatcaagaacatgattactggtacctnccangctgattgtgctgtccttatcattgacttcaccactg

SEQ ID NO: 44665 - DNA, 442 bp, Glycine max
  unsure (1)..(442): unsure at all n locations
  Clone ID: LIB3093-010-Q1-K1-C8
acggttttccttccctcacaccatcatcttcggccttgtctttccgatcattatttcttgcgtcctgggcctcgtcgttgggcctgagtagcaatgcgacgaccatctacgaggtcctgagcgagcacgggctgcccatgggcctgttcccgcagggcgtgcgggagttcgcggtgggcgaggatggtagcttctgggtgcgcctcgacgaggcctgcaacgccaagttcgagaacgagctgcattacgagcgcaacgtctccggccacctcagctacggcatgatcgacgccctctccggcctcgaggcccaggatctcttcctctggttccaggtcatgagtatccgcgtcgacgtccccagcaccggcctcatctacttcgacgtcggcgccggcttcaagcgcttncccttgtccctcttcgaaaccccgcccgaatg

SEQ ID NO: 44666 - DNA, 281 bp, Glycine max
  Clone ID: LIB3093-010-Q1-K1-C9
ttcacttctctagtctgttcataacatcactaaaaacagcttccgaaagatttaccataatcgtctcttctcgatctcaaggcatccatctctgtatcacataactcatgctctgtatcacagtactattcccatcaacacttttctctcactatgactcatgttctcgacgccaccaccaccctcggtgccgttccaccaacagtacgacttcaccgaccgcaatattcggtttgatacctacttctacatggccataggtaattctaccagtccatcta

SEQ ID NO: 44667 - DNA, 442 bp, Glycine max
  Clone ID: LIB3093-010-Q1-K1-D1
ttatcaactcactcatcaatctcgtttggtctcactaactattacttcatcatgtcgtcgagcgcaggtggtcaagtcatcaaatgcaaagctgcggtttcatgggaggcagggaagccacttgtgattgaagaagtagaggtggcaccaccacaagctggtgaagtgcgtttgaagatcctctacacctctctttgccacactgatgtttacttctgggaagccaagggccaaactccattgtttcctcgtatatttggtcatgaagctggagggattgtggagagcgtacgtgagggtgtgactcatctcaaaccatgggaccatgcccttccagtgtttaccggggagtgtggagaatgccctcattgcaagtcacaggagagcaacatgtgtgatcttctcaggatcaacactgataggggtgtcatgatccatgaca

SEQ ID NO: 44668 - DNA, 369 bp, Glycine max
  Clone ID: LIB3093-010-Q1-K1-D11
acgcaaacaatggagttcccacactcccttcgatgtcaatacggcatcccttctcaccgtctctttccctacaatttcatccctgaaaaccatgttcactggacagaaacccctgactctcacatattctcagctgacatccctggtgtgaagaaagaggagcttagagtggatgttgaggactcaaagtacctcataatcagaactcaagcagtggataaatccacagaacctgcgaggaagtttgagaggaagtttaggctgccatggagggttgatcttgatggcatctctgcagggtatgaagattgagttttaactattacagttccaagatcacttagtagaagtttctacattgacccttct

SEQ ID NO: 44669 - DNA, 451 bp, Glycine max
  Clone ID: LIB3093-010-Q1-K1-D12
cccacgcgtccggtgctgtgtttcagttgcaagccttacgcgctatggtacaggctgatccggaaatattgcagcctatgctacaagagcttggcaaacaaaatcctcatcttatgcgattgattcaagagcatcaagttgacttccttcgcctaattaatgaacctgttgaagggggtgagggaaatatactgggacagctggctggtgccatgccgcaagcagtgactgtcacccctgaggagcggcaagcaattgagcgtctcgaagcaatgggttttgatcgtgcaactgtattggaggtgtactttgcttgtaacaaaaatgaggagctggctgccaactaccttttagatcacatgcatgagtttgatgaataattagatctcctttacaatttgtcaaaatatttgtttaatgtttcctttagaatggtctttgttatgtaatg

SEQ ID NO: 44670 - DNA, 232 bp, Glycine max
  Clone ID: LIB3093-010-Q1-K1-D2
gcgaaatacactgaatgcagcattcatagtaatgtctgtaattataaggctagcatatcatactagatcagggtgtcatagtactaccatgcgtcgctgacacctcatttgtcgcataaagacgactgttgacagaagactcctctgacgtaacatcacctgattccgaatagtattcttctaacccctgcatgatacactactacaaccctgtttaattgttcgacctcat

SEQ ID NO: 44671 - DNA, 417 bp, Glycine max
  Clone ID: LIB3093-010-Q1-K1-D3
cccacgcgtccgcaagatctatatgataaggcagcttcaaagttcaaagacataaagctttacgacggcttcttgcacgaccttctgtttgagcctgagcgtgaagagatagctcaggacattatcaactggatggaaaagagattatttactatttgaaaatgttagtatatatatatatatatatatatgggggggttaataggaaagggaagacacaagggaagaaaaagggatgccatgtttgtaagtgtagaaaattgaagtcgccctgggaaatggggggaggcggatgcagataggtttattcatcttttcattttagtgttttgaatatatgtattgtgtgaagatctttgttttatcaagaaacttgtacattttatagacttaaatatttcagtagtgtttccattt

SEQ ID NO: 44672 - DNA, 478 bp, Glycine max
  Clone ID: LIB3093-010-Q1-K1-D4
acgcccagatctcgggttccaatcgtcgagcgatgtccaaggcacgcgtctacaccgatgtcaatggtctgggccccaaagagtactgggattacgagtccctcaccgttcaatggggtgatcaagatgattatgaggttgtgcgcaaagtgggaaggggaaagtacagtgaggtttttgaaggcataaatgttaatagcaatgagcgttgtgtaatcaagattctcaagcctgtcaagaaaaagaagattaaaagagagataaaaatacttcagaacctttgtggggggccaaatattgtcaagcttcttgatattgtcagagatcagcactctaaaactcctagcttaatatttgagtatgtcaacagtacagattttaaagttttgtatccaaccttgactgattatgacatacgctattacatatatgagcttcttaaagccttagattactgtcattctcaaggcataatgca

SEQ ID NO: 44673 - DNA, 480 bp, Glycine max
  Clone ID: LIB3093-010-Q1-K1-D5
gcgtacgctaaacctaaacctaaacataaacggtatgtttaaatcccctgcccaattttcactagaacgtattactcccaaaccaatcttcgatcatggccgccgaatcacaacctcaactaatcgaagagagaagagaggagcaagaacttaagtacctggaatttgtgcaattcgcgaccatccaggccctgatgcgctgcaccatcctctactcctacgccaaggagcgcgcgggtcctctgaagcccggcgtcaacaccgtcgaggaggccgtgaagaccgtcgtggctcctgtctacgacaggttccacctcgtccccggcgaggtcctcaaatacgccgatcgcaaggtcgccgaattggaccgtcacgttccctacaacgtgaagaaggtctacttccaagcccgctccgtcgtctacgaagtcctccgtgatggtgtctacgcctacaccaaaatcgtttactcgaagtatg

SEQ ID NO: 44674 - DNA, 465 bp, Glycine max
  Clone ID: LIB3093-010-Q1-K1-D6
cccacgcgtccggaaaaaaggttttagatcgtaaaaactaatcactacgaaaacaagggatagcgaagatggctctgcccaaagctaaggagatcgtgtcgtccaattccgtcgtcgttttcagcaaaacctattgccctttctgcgtcgatgtgaagaagctcttcggtgacctcggtgccaattacaaggccatcgaactcgacactgaatccgatggaaaagagctccaagcagcattagttgagtggacggaccatcgaaccgtgcctaatgtgtttattggtggaaaccacattggtggctgtgactcaacaactgccctgcacactcaggggaagctggttcctctgctgatatctgctggagctgttgccaaatcaactgcttaaaggatctcccatttctaggttatgcagttaaataaaaataaaaacccaagtagttgggtcggttatataattc

SEQ ID NO: 44675 - DNA, 301 bp, Glycine max
  Clone ID: LIB3093-010-Q1-K1-D7
acgaagtccttcctcctagagacccactgtgtgcctacttcagagcccgctatgaaaggcttgctgcttcaaaatagtcttatttaaggatatttgttgaacaacttgtgtcttgttgagttattgctgtttgaatttcatgtaaaatgatactagctatatgtaaatcccagaaaaaaaaaaaaaaagaatcctaggatcttgttttcgttttggccatttcagttaataaagaaattatatttttcgaaaaaaaaaaaaaaaacacacataaaaaaagataatgaaaatatacatataa

SEQ ID NO: 44676 - DNA, 472 bp, Glycine max
  unsure (1)..(472): unsure at all n locations
  Clone ID: LIB3093-010-Q1-K1-D8
acgcgcccctctttacattcctgccgcgtttggccaagtggaggagttctctccggaatgggtgggtctggtgacgacgctgacatggtaccatgactactggctaagccagcagcacgatgagggagccttctacggcgaggacgacgggtttgatggcaatgatgtcgttgatttgcttcctgattcgtttgatcttgatgctggcgaggatctttttgaagagtttataagatcttctgaatcccaagaagaaactggacccaaagtaactgcatgaggcttagagatgaacccatttaaagaatctacctaccaacctaagagactggacccaaggccttagctttaggtcagttagatgatatgtttgcatcatgttatccgtagcttcaactntctgtaacttcttgtataggcaaaggtttcaaaccttcaatctatccttctcttgcttttgccaaaatgttat

SEQ ID NO: 44677 - DNA, 350 bp, Glycine max
  Clone ID: LIB3093-010-Q1-K1-D9
aaattctaattaaaaaacatattgttattttctaaaaacaatgctaggatcttttaattaatttctcttatttatattcactcctactttattcaatcatatttctcaacaaaattcccaacctacgcttcttcaatccaattctaatattatccatatacccttacttaattctctagctcttgatcgcaacctacttaaatcctctattaatcttaattcactaactctcaaaaaacacttaaacttatcacaacactaaattaaacattttaacaatttaaactatcaaactaacattaaatctcaattatagattccaatattgaaatttttaatatatcctaaaa

SEQ ID NO: 44678 - DNA, 442 bp, Glycine max
  Clone ID: LIB3093-010-Q1-K1-E1
tttgaatacttcttatgcaactatagtgaggctgagagattggtccataattaatcaaaatgtgggctatattccacaaagcttttgctcatccacctgaagagctcaacagccctgcatcttacaaaggttccaagaagcctaaggttcccgaggaaactctcaaagatttcctttcccaccatcctcacaacacttgctctatgagctttggtgatgctgctgttctagcttatgtccgtcctgatcaatctttctctcgtcatcaaaggctgttttgtgggatcgatgacatatattgtctcttcttggggagcttgaacaacttgtccctactcaacaagcaatatggattgtcaaagagtactgatgaggcccatgtttgtattgaagcttacaagacactccgtgacccgggtccataccctgcagatcaagttgt

SEQ ID NO: 44679 - DNA, 357 bp, Glycine max
  Clone ID: LIB3093-010-Q1-K1-E10
attgatatattttaattacttgctgtggggttataatttttccacatctgtattatttcctgtttataattatttgcttcttttatccacgaaaggcaaaagagttagcatttaggatgggaaaaacaattgagttgtatggattccctacatctgtgaatgtgtctgatgtaaagacatttgtagagcagtatactggtgaatgaactgtgttcgccattaaattaagacatggaaaaggtcatgttccaagagcatttgcaattattcaattcaccaccgcaaattctgctacatctatgatgtccatagctaacagcattttgagaacattgcggtatggaacctcctatttaa

SEQ ID NO: 44680 - DNA, 326 bp, Glycine max
  Clone ID: LIB3093-010-Q1-K1-E11
acggcgatggacctcggaacctatgaagtgcgagatggagtggacattctaggaagatgcgatgggtagtttgcaaaaatcctcacaaaagacgctttgaaattcgttgctgagctgcaacgtgagttcaggagcgatatcaagcatgcattagagagcataagagaggcaaagaagaagtacaatgaagggactcttccggggtttgatcctgccaccagtcacattagagaccaggagtggctgtgtgcacctgttccaccagctgctgctgataggaaagtggagatcactggccctgtggacagaaaaatggtcatcaatgc

SEQ ID NO: 44681 - DNA, 458 bp, Glycine max
  Clone ID: LIB3093-010-Q1-K1-E12
cccacgcgtccggcgagaaacagtttgagcgtcatgtggagacagagcgctttattggtgtgcgtgttattactagtccagcaaatttgtgctaccagtgagcaagagcatgcttgccccccttcttcctgtggcaaaatcacccacataacttatccatttcgattaacaggcgacccaaaaggttgcggtgacaaatggtatgagctagcttgtgaaaataatgttacggtgttatatttgtactctggaaaatatcatgtgcaggctatcaactacaacaatctcacaatccgtgtggtggatccgggtgttcaacagccatattgctcctccattcctggctacttcttgtctcaatcaaatttcagtgcaattgatgaaggggatccatacctagcctttcaaaatcgagattattcttggaagtacgttttccagcatatagttttcttaaa

SEQ ID NO: 44682 - DNA, 462 bp, Glycine max
  unsure (1)..(462): unsure at all n locations
  Clone ID: LIB3093-010-Q1-K1-E2
acgcccacgcgtccgatttttgttggttcgagtgagcgagggaagatgtactctagagattcatggggtggtccgttggagataaacgcgacggactcggcaacggaggacgagcggagccggaacctgcaggacgtggacagggcggcgctgtcgcgtcccttggacgagacgcagcagagctggctcctaggccccggcgagcagaagaagaagaagtacgtcgatctcggctgcatcatcgtcagccgcaagatcttcaagtggaccctcggcaccctcctcttcgccgccttcctcgccggcctcattgccctcatcgtcaacaccgtcccccgccaccgncacaaacacccccctcccgacaactacacccttcgccttcacaaggccctcatgttcttcaatggccaacgatncgggaagttaccgaagcataacaatgtgtcttggaggggaaac

SEQ ID NO: 44683 - DNA, 410 bp, Glycine max
  Clone ID: LIB3093-010-Q1-K1-E3
gctcgtacgattcgtctcagtacttgttctccgaaaccgattcggttccttacatagatctggattactcggccaggtatcctaagacggagcagaaaagttccgccaccgccgacggcgtcgttccggtgcatagcaacttcgagccgttcacctacggttacaagtacaacactactctctcacagtcacagtctcatatgagccagagtgtatcttctccgtcgtcgatggaagttggagttgtgccggacgggaacactatgtcggagatatcgaactgcagctacagcaaagtggcacctgtgacggtgactgcgcatttctcggcggcggataaggaagctagagtgttgaagtacatggagaagaggaagaacctaaagttcgagaagaccattcgttacgca

SEQ ID NO: 44684 - DNA, 437 bp, Glycine max
  unsure (1)..(437): unsure at all n locations
  Clone ID: LIB3093-010-Q1-K1-E4
cacacatacacccacacttccgcctatacttatacccatacctaaaaaacctaaagctaaggttaattcatcatgcccacattcctctcttcttactccttaaccttctaaactaaccttatatcctttaccaacaaatatctttcaaatcatctttcacaatcaatatctttcaaccttnacacctaattttcctcaaatcaaccaatcttatactacatataactcttctatattaccaccttccacttattatcaaaacattcatctttctacctcaataacctatatttcaaacatcataatctcaattnaaacacattaaccaacatatccatatctactttcantctttcaaccccactcacatcattcattccatccatcatttcttaatcaaaatnctcctntanctaacctcantataaaacattttc

SEQ ID NO: 44685 - DNA, 411 bp, Glycine max
  Clone ID: LIB3093-010-Q1-K1-E6
caattttcattttcatgcctctcagattcactggattatgttttttctgtcgcacaagccctgtttcttcttcagtggaactcctattccttgttgcaatcgaaaagggtccctttgtctgttcttgtctactgttgttgatgtctattactgttgctgatgggaattggcttgtgattgtgaacacacccaattcctcgccattgcaacacacccactcgtctttctctaaacgcagatgggataaggagttttctgagctccagagtggatagtatctgaatcagattcataacataacaattcaattgtggttttttgatattttggaatcaatggattcttcacaagggtctaccattgctggtttcgtggacaatgcatccattaagagaaatgagtctagttttg

SEQ ID NO: 44686 - DNA, 392 bp, Glycine max
  Clone ID: LIB3093-010-Q1-K1-E7
aaagttttattcctcctaaactctatcgcctatatccacaattcttaaattctttgctaagctttattataaaaatgaacattctctctccacaacatattcctcaaaatcttcacactcatccttcatcctaagctcaactctatatacgtcccaatcttctcaaacattttctccctctaactcccaacttaatcctcattctcacattacacattcctctctacaattacaattttaacaccaactattcacctctctttacatatacttccccaatcattcccaatcttcctatttatcatatcactacaacttaaacaactctcaattcaaacctattccctatttattatcatctactaaatcacttcattacttaacctctatta

SEQ ID NO: 44687 - DNA, 441 bp, Glycine max
  unsure (1)..(441): unsure at all n locations
  Clone ID: LIB3093-010-Q1-K1-E8
cacacttcctcccactcttccgcctatacttatacccataccttaaaaacctaaagctaagtgttttccatcatccccacattcctcacttcttactcgttaaccttctaaactaaccttatatcctttaccaacaaatgggtttcaaagggtctttcaaagtcaagaactttcaacctttagacgtaattttccttaaagcaactaatcttatactgcatataactcttgtatatttccaccttccacttattatcaaaacattcatctttctacctcaataaggtatgggtcacacatctggatgtcaatggtaatgcattaaccaacatatccagatctactttcnatcttttatcccactcaaatcattcatcccatccatcatttcttgatcaaaatggtcctttagctaaccttattacaaaacattttctggat

SEQ ID NO: 44688 - DNA, 293 bp, Glycine max
  Clone ID: LIB3093-010-Q1-K1-E9
ttaaagttgaataatatctgctgagcatgaaaagttccccaaccatgaaggcaatcgttgtgttcattttactcttggcctctatttttttccttcccagttcaactcttgctcgacaactggaggtggtgacaggcggtacccagaaccctaataatcccgcttttaaatgtagccgccgcggcagttataggccttgcgccccatctaactcgccaccaagaccaccatgtaatgggtacattaggtcttgccacatcgcatcggcaccaagaccaccatgtaatcagcat

SEQ ID NO: 44689 - DNA, 462 bp, Glycine max
  unsure (1)..(462): unsure at all n locations
  Clone ID: LIB3093-010-Q1-K1-F1
cttctccaccatctcttcgcccataacctaattagtgctcaatcacaaatcatcaatttctcgatgggcatgatgatgatgatgggttcaaacacaaaaccccttgtgcacctttctcttctaattttggttctcttttcttcttcaaccgaatccctcagattcgaactccaatctgggcacaccaaatgcatctccgaggacatcaagagcaattccatgaccgtgggcaagtaccaaattgttaactccaacgagggtcagcctcttcccgattcccacagagtcaccgtcagggtgacttcgtcttatgggaacaactatcactacggggatcgcgttcagacggngcattttgcgtttgcggcagtggaggctggagaatacatgactatgctttgtgctgtggatcacaaccctgtggaaacgttgactgtggattttgattggaaaacggtgttg

SEQ ID NO: 44690 - DNA, 277 bp, Glycine max
  Clone ID: LIB3093-010-Q1-K1-F10
gactcgaacggtgaagaagcacagggagtagcggcattgaatatgcagatcttcgtgaaaactctggcagcgaagactataaccctggaggtcgcgagcagcgacaccatcgacaatgtcaaggccaaaattcaagacaaggaatgcattcctccggatcagcagagtttgattctcgccggaaagcagcttcaagatggaaggacccttgccaattacaacatccataatgaatcaacccttcatctcgtactcaggcttcgcggtaacatcattg

SEQ ID NO: 44691 - DNA, 301 bp, Glycine max
  Clone ID: LIB3093-010-Q1-K1-F11
gggtaaggctacggtcgggtggtgatcatgaaacttcaagaatacttaagctcacagactcgttgtggacaaacatatcattgactacagttgaggacttgtcctttgctaatttaaaggatgttaaggatgtgtatcaattgaatgatggttttccactattaaaacatctgcatatccaagaaagtgatgaattgttgcacatcattaactcaacagagatgtcgactccctattctgcatttcctaatttggagactctggttcttttcaatctatctaatatgaaagaaatatgcta

SEQ ID NO: 44692 - DNA, 312 bp, Glycine max
  Clone ID: LIB3093-010-Q1-K1-F12
acgctcaatctcccactaaatgccaagctccagctcctgtatcatgcgccgtatcctggggctcgactccatcatcaaactgaaaacaacccttttctcagaactcttctgcgcactgtgtgacctaggcacctacatacgcatagatctagccttatccttagtgaacaacttagacctcaccaccacactgatcttcactgctctctacaacattgtcaccagtctcctcttcggcctcctcatgccggtccagaccatgaagtacatcatcaacgtcatcatctccgcagcgacctccctaaccatccc

SEQ ID NO: 44693 - DNA, 361 bp, Glycine max
  unsure (1)..(361): unsure at all n locations
  Clone ID: LIB3093-010-Q1-K1-F2
tccgggtccggccgcgcgtgcttccacgcgtccgcttcttccttcactttcgtttggggtaaagggcacagcttctgcaacccagcctaggtctcaagaagctggcggttatgatgacgtttttatgcagcagagcttgctctttgatgatagtctgaaggatttgaagaatctgagagcacaattatattcagcagctgaatattttgaactctcatactccaacgatgaccaaaaacaagtagtggtagaaacattgaaggattatgccatcaaagctcttgtaaatacagtggaccatttangttctgtgacctacaaagtaaatgatttgttggatgagaaagtcgttgaggtttct

SEQ ID NO: 44694 - DNA, 440 bp, Glycine max
  unsure (1)..(440): unsure at all n locations
  Clone ID: LIB3093-010-Q1-K1-F3
gacgtgtgaatttcattaggcgtggagaatttcgcagaaagcgttacatnacagatatttagaaattcttatatatcgaattggagtgngngtccagattgatggcgagtaggcttgtttaaatgcacttggaggctcgtaagtggttaggtatagtatttgttgattaatcttaaggaattgggaatggacaaatgcatttcgnnngttggcgggtccccggttttcctttttgannaatatagttngcttcaaagtcgtnngttaagaacctttttgctgcnnaagttgtgaatacaaattattnngggttattaaatgtttgacttggtaaaacgtgcttactgcannngcttggaaattgtgttattgaaggaagaaatcccttgaaaagaattgattgggcttttagcanngaatcaaaatttaacgtttttgtt

SEQ ID NO: 44695 - DNA, 452 bp, Glycine max
  unsure (1)..(452): unsure at all n locations
  Clone ID: LIB3093-010-Q1-K1-F4
acgcaggaaccctataagcaagatagaatgagtgtgcgactgtggaaatatgtgtccaccttttggcatgtttcaagggagaggcttcatcaaatatattccaaacttagacaggagcaaaatgaggcaggggttggcccctctcacgctaatgggtcagtatctgtttcatttagcagaaatggaaatccattccatcgccatatggagagccagagaggattaaaaaatatggctccctatcaaatgccagaaccagttgataatactgggaaatctgaggcatggaaacgaagaagaagaactgaaagtgacaatcatttccagggtcagccaccacctcaaaggaccttaagtaatggaatccggattactgatcctaactcactncggatcctaagtgctgggccatcggacaaacgctttgctagggagaaaccttataggacaca

SEQ ID NO: 44696 - DNA, 406 bp, Glycine max
  unsure (1)..(406): unsure at all n locations
  Clone ID: LIB3093-010-Q1-K1-F5
ctgagaatttggactactgctagttctgggttccgccgcagtgcctcgtctactactgcntggtcntatttcctacaccctttgaagcaaagtttccgcctttgtcctacgactcctttttgttcccgtacggttctcccgttgattccaccgttggtggctccagctagaccgatagcgactaggaatatcaactcgttgccgagttaactcgccacttaactcgctcctctcttcaacctgacaccgagtctgtgggtcggtttgtgtctggttctcctcaatccacgctttgcgcgtttggaagtgggtgtagttgctgcaaagggtcgagccagggtagcccatatggtgtttgcaagttgtcctctgcgaagaccacttgggatctgctgcatgctgcttc

SEQ ID NO: 44697 - DNA, 403 bp, Glycine max
  Clone ID: LIB3093-010-Q1-K1-F6
aatccaaaatctcttcaaacagcttagctttcaatttaagttccacaatatatagttaggtcttttctataggttatggacaacttcatatcaattgctttgacctcgataagtgcaatgtgtgccacatatatgacgaatattaaaacaatctgattctgcatttttacaaatgcataattattatacatgctagatgctatggcaaacttgaacctattaatatggttctatgattatataacttatctcgttcatactctcctccttcacctttctgcttatttccactcatatgttgtacaatcaaacctactacatatagcctcttgactcattttccttattccatgtttataccataaacttgcttatctcatctaaatataattcatcctattta

SEQ ID NO: 44698 - DNA, 471 bp, Glycine max
  unsure (1)..(471): unsure at all n locations
  Clone ID: LIB3093-010-Q1-K1-F7
acgaagttagagtatacaagtgatgtacaacggttacctcctgatcttgcttttgtncttgaattgcgtccatacctacattcataagatggtatcaaagcatatccaaaattaatccaaagggtcacctaccatagttatccactcacctcaccccttgcttctttgggatgggaattggatctttgaaactaaagatcacatttcaatattaaaattgagatagacaatgggaagagatggtaaaacaattctagatcaaatcttgcaactggtacaatagatgcagtgaacagctcaacctggaaagaaaagaaagcaaaaacaggccctgagatggggatagagggaaaaaattgaaaacgaagcataattcatattgtaaaaagacaatatcactaatggaatgaatgtttagaggtttattccgttatcaagcatactgcatccaaatgaatggtcagtcacaaa

SEQ ID NO: 44699 - DNA, 442 bp, Glycine max
  Clone ID: LIB3093-010-Q1-K1-F8
actgaatgtgctgtgtatctttggacagttttcatgttccattgcaatggttggtgcgtcgcttggacactaacggctgtgtgtggtactaacatatgccttcgccaggtaacagcgaaggcagtgtatggagccattgccaagtataaagtgactcattcttgtgcatcaccagtggttcttaacacactaattaatgccccatctgaggacaccattcttactctaccccatgttgtgcatgtgaatacagctggggctgcacctactccttctgttctttccggcatgtctgaacgtggatttcgtgtcacacacacttatggtctctcagaaacctatggcccctctgtctactgtgcctggaaaccataatgggaatcacttccccctgaaaaccaagcccggctcaatgcaagacaaggtgttaggtacattggct

SEQ ID NO: 44700 - DNA, 385 bp, Glycine max
  Clone ID: LIB3093-010-Q1-K1-F9
caagctcccaatatagcaagcagcaaacatgatttcttccgtgtcctttccagcgtgtcttcgcgccgttaacttctccggcaacgccatggcttcgccgtcgtgccgcgtcaaatcccggccaatagtcgccttcgccaccgccactgccaccgctgaagctcgctcttcctggacggagcaaccgagaccttcctatctgaactcctcttgctcttcgctttacgatatcctcggcatccccgctggcgcctctaaccaagaaatcaaggccgcgtaccggcgactagccagagtctgccaccccgacgtggcggccatcgaccggaaaaattcgtccgctgacgaattcatgaagatccacgccgcgtactctactctttct

SEQ ID NO: 44701 - DNA, 405 bp, Glycine max
  Clone ID: LIB3093-010-Q1-K1-G1
cccacgcgtccggcgaaatcagttttctacaatgggaaggaaaaagacagaggatgctggccgatcggcgaaggtaaaggctggtagcaaagatcctcctaagaaggaaaaaatttctgtgtctgccatgctggccagtatggatgaaaagcctgataaacctaaaaaggtcccttcttcctccagtaagccgaagccgaaatctgctccaaaagcttccacatacaccgacggaattgatcttcctacatccgacgatgaagatgatgatgatctcttggaagagggggaagccaaaaagtccagtcagcagcatcaaagggttgatttgaaaccacttgatgtgcctattgctgataaagagttgaaaaagcgcgaaaagaaagatcttttagccgcacatgc

SEQ ID NO: 44702 - DNA, 275 bp, Glycine max
  unsure (1)..(275): unsure at all n locations
  Clone ID: LIB3093-010-Q1-K1-G10
attatcagtcctttttcattcggggtttttacctaaccctacaattcggcgatcgttccantttaaatttttcgctttcatcgaatagctgtttatatataaaccctattccccctattcaccatgggaattgaatatataaataagaaaaaagccaaaaaaaaagaagtttaaaaagttttattttaaataagtaattctgttatttttcctgtttcttgactcaggaacttatctttttccacggaaaatcatttacaatattaactctaaat

SEQ ID NO: 44703 - DNA, 176 bp, Glycine max
  Clone ID: LIB3093-010-Q1-K1-G11
caagccgtttccaaatctgggaataagacttcattctgggtggatgaagcaccgcaatcgaaaaacattcctttagaaagtgcacctgttgcctcagaaaacatgccttcagaatctgcaactgttgcctcagctgaacctgaaaacaatccttcacaagctgcaatttttgattc

SEQ ID NO: 44704 - DNA, 473 bp, Glycine max
  Clone ID: LIB3093-010-Q1-K1-G2
acgcccatttccataatcactttttcctacttgcttgtccatccatcccttgactaattaattatgcctgacaactaccaatggccgaagagaaacaccacaagcaccgtctcttccaccaccacaaggacgaggataataagccagtagaaaccgatactggttacgacaacacatcatattccaagccttctgatgactatgactctggtttcaacaagccatcgtatgagtcttctggcggtggctatgaaggtggttacaacaaaacatcttattctagtgatgagccagcttctggtggtggctatgaaggtgggtacaagaaaacaggttattctggtggcattgatgagacttctggtggctatggcgctggtggtggtggatactctgacgtcactgatggtggctacggcaaaccaagtggtggctatggcgccgcttgtggtggtggtgtgtaccctgacact

SEQ ID NO: 44705 - DNA, 387 bp, Glycine max
  unsure (1)..(387): unsure at all n locations
  Clone ID: LIB3093-010-Q1-K1-G3
acgccttagttcccaaccttacattattaactgcaccaactcatctgcctctaccaaacaaaactgcacagcataaccctctggctaaaaccctctctctgtctcccttccttctcatcttcaccaccaccaatggcgtcgccgccgccaccaccttctctcctcctcctcttcctcaccctcgtcgccgccacggcttcctccctcacctgcaccacccaaaagctcacggactccaagaacaacctctactccaactgcctggacctgcccgcgctcgattccttcctccactggactcacgaccccaccaacgcctncctctcggtggccttcgcggcggcgcccgccaactccggcggctgggtgtcctgggggatcaacccc

SEQ ID NO: 44706 - DNA, 449 bp, Glycine max
  unsure (1)..(449): unsure at all n locations
  Clone ID: LIB3093-010-Q1-K1-G5
tcattaatcaaccaccaccttaacacatcagctctatgatntccatcttcanccacttggaagtctctcattcccagaactgcagcttttctttgctcccagtaaaaagcactaattctaagcccaacacacaatccacttcctactccgctgagtccaaaaccgccataaaagtttccaatctatcacaaccctgtgtatccaagcaaaacccgccccttttgaggcccagatttgcgccttacttggactgattacactgctttgaatccattgtacccttctaaattgatttcttcagtctccaatctcaattcagatggcataaaaatcatacgcgattcaattcaatntatttttacttaatagtttaattagtagtttataaagctatgtactgtactcgaaagattaaatgaataattacaaaaattaaattacaatcttcc

SEQ ID NO: 44707 - DNA, 134 bp, Glycine max
  Clone ID: LIB3093-010-Q1-K1-G9
ccccaaaccctaatatcactctccttctatactccattttactaaatcatactaccttcaactcaaattccatttatacaccaccatctccgactactaccacctatacaaccacctaaaatcccttcatctcc

SEQ ID NO: 44708 - DNA, 431 bp, Glycine max
  Clone ID: LIB3093-010-Q1-K1-H10
cccacgcgtccgctcaaatcctctgttaggatataaaaattagggttttgcatttcgggtcaggcagactcagacatgggaggaggcaatgcccagaagtcaaagatggctcgcgagaagaacctcgagaagcagagggctgccgctaagggaagccagttggattcaaacaagaaagccatgtctattcagtgcaaggtgtgcatgcaaacatttatatgcaccacatcagaagtgaagtgcaaggagcatgctgaagccaaacaccccaaatctgatctccatgtttgttttcctcatcttaaaaagtgaaagagtgcatgttgagacatgatatatcaatatatggcctgttatatagtctctatccacagagatcttcaatttcttttataacaaatatgcctgggtggttgggtcttggggggtat

SEQ ID NO: 44709 - DNA, 217 bp, Glycine max
  Clone ID: LIB3093-010-Q1-K1-H11
cacgcatccacataaactctcccttaagcttttacaatctaagaaagaactaacggacaagacactttttaaaagggcacatcccacaccaatcctcatactaactccatacctaaccccccacaaaaccacattaaccccatactaaaactaccacaactcctatcacttcaaaacctttcacataaccaacaataacaccatacataaccacaaa

SEQ ID NO: 44710 - DNA, 358 bp, Glycine max
  Clone ID: LIB3093-010-Q1-K1-H12
gactcgcatactgtttctactttctacgatagacatgggatacgcacgtgccttgggaggcaagacagcagtagccttctacagctgcgtaagcagaagagcaaggtggttctgtgcagctgatgatgctttcctctgccatggctgcgacactttggttcattccgcgaaccagttagcaagcatgcacgaaagggttcggcttcaaactgcttcctcaaaagtaaccaccacgcacgcatggcacagtggattcacacgcaaggcaagaaccccgcgtcacaacagcaagcactttgcgctgcaacagcgtctcaaagacgaagttctcttcaacaacaccagtgttcttcccctc

SEQ ID NO: 44711 - DNA, 187 bp, Glycine max
  Clone ID: LIB3093-010-Q1-K1-H3
accttatcatctcaaaatctcttcttcaataattcctttctcttttccttcttgatattttaaacacgctaaaacctaatagatccttcttaaatgttacccacaatcattcacctcttcctttccctaaacaccttcccatatgttcatttccacccaccattacgaactattgactactacctca

SEQ ID NO: 44712 - DNA, 467 bp, Glycine max
  unsure (1)..(467): unsure at all n locations
  Clone ID: LIB3093-010-Q1-K1-H4
acggtgcaacgccattgcacttggcagctcgtcatagacggtctgaatgtgtacatattctattggacaggggtgctcttgtttgtgcttcaactggtggatatggctgtcctgggagcactcctctacatctagcagctagagggggatctatagattgcattcgtgaattgttggcatggggtgctgatcgtcttcaacgcgatgcatctgggcggataccatatatggttgctctgaaacacaaacatggagcctgtgcatcattgctaaatcctacatctgcagaacctcttgtctggccgtctccattgaagttcatcagtgagcttaatcctgaagccaaagctttattagagcaagcattgatggatgcaaacagagaaagagagaaaaacatattgaaagggagttcttactctctgccatctncatcacattctgatggggtagctgataatatgtct

SEQ ID NO: 44713 - DNA, 462 bp, Glycine max
  unsure (1)..(462): unsure at all n locations
  Clone ID: LIB3093-010-Q1-K1-H5
acgtttttctatatggaagcctgtttggttacgggggaagatcatcctgcggggggcttactgcgtcggaggaggcccgcgacaagatgatattctccggcggcggtgaccgcgacgaggccgatctctacctccaagctgtcgacgaaatccagcgctctctctcctccgtctccgtctccgtctcctccgacaaagttaactccgccatccagatcgccatggcccgcttagaagacgagttccgcaacatcctcatctcccacaccaaccccttcgacccctcctccgaagacgaaccctcccaaaccctagactctctttccaccacctcttccccaaaacaccctctcaccaacgaagaaacaacagaagaagaatccgactccaaccataacaccatctctactcctcttttccgtttcaacagtgacggcgcttgcttctctgntcgctcttctg

SEQ ID NO: 44714 - DNA, 224 bp, Glycine max
  Clone ID: LIB3093-010-Q1-K1-H6
gaaaagttttgggcttgagattgagttagattactcttcagcgaggatggaatatcagctcggagtcttttgaggtagaggatttcactgctagacaagtttattagaaacttttgtaggctgtgcaaccttagctttagtatccatgctgtccttccataacaagtctggttgaatctcattttttcctgtaaaaatgacttttcggtggatatcatcatctg

SEQ ID NO: 44715 - DNA, 123 bp, Glycine max
  Clone ID: LIB3093-010-Q1-K1-H7
tacatctatctcttcttcttcaatacaaacaatttcaaaattttcttctaatgcttttcctaacaaaatccttaaatatattttctataactcacattctaacctatatctttcaacctcata

SEQ ID NO: 44716 - DNA, 405 bp, Glycine max
  unsure (1)..(405): unsure at all n locations
  Clone ID: LIB3093-011-Q1-K1-A1
gcccacgcgtncgcagaagttgacttggagacaatagtcttgttcttcagatctctggtttttggtttcctggccatggcggaatcatttctcttcagcattgcagagtcactcctttcaaagcttgcttcgcaggcttatgaagaagcttctcttgtgctgggtttgtacgaccatctcaaaaaccttaaagacaccctatcattagtccaggctgtcctgttggacgctgatcaaaagcaggagaagaaccatgagctgcgggaatggctgaggcagctcaaacgtgtcttctttgatgccgaaaatgttctagatgaatttgaatgccaaacactgcaaaaccaagttatcaaagctcatggtaccaccaaagacaaggtaagtcacttcttatcaacttct

SEQ ID NO: 44717 - DNA, 378 bp, Glycine max
  unsure (1)..(378): unsure at all n locations
  Clone ID: LIB3093-011-Q1-K1-A11
acgatttgaaggtaatggagtgatagaaatagtgtgatggatggatttcacattcaggtcttttgtggactacaaagaaaagaaatgggtanggattcctggggaatacatacagtataggatgcagtggcctcatttttttttttttccttttctcttttaattttttttaccttgctctgattaattactcgtaaagcataactatttggtgaagatctgtgccatccatcctgcttcatttgatgttttttgttagctaggtcagttttgcacagctagatgtcagttacctggatgttgtgatcacaccgatccaacatttgagtttttgttcaaggaccatgctgacatttanggtccatgtggttcatgtaa

SEQ ID NO: 44718 - DNA, 368 bp, Glycine max
  Clone ID: LIB3093-011-Q1-K1-A12
cccacgcgtccgatgatcatgagcgagaagtgtttgaagaagaagaagaagaaggagaagaagagggggaagttggtggagtgagagtggccagtgtagaagaggaaaatgcggcggcgattgcggagattgtgggtgatttttcagggttttctacttcgaatgaagatgattcttctagcactagcactggaccaaggtctaataatatatctcccaatgggagaatcaagcgtgttattaccgcgggtaactggcagaagggtgagcttttggggcgaggttcgtttggttctgtttatgaagggatttctgaagatggattcttttttgcttgtaaagaagtttcactacttgatcaagggaat

SEQ ID NO: 44719 - DNA, 370 bp, Glycine max
  Clone ID: LIB3093-011-Q1-K1-A2
aatctgaatctggatctgaatccgatgcatctccttcttctctgcaagatcttctcaatcctgcggactgtgacttggtgttatgaatcaaccatcagacaaatcaaaccatgaggaggcgagcgttaacagaataagaacaggattgctgagttggcttgcaggattgggcccttggatgatcctgttgggaatatgctttttctgttaggataattgtttgcaattctggtattgctagctttctctaaaacctgcaaaaaaaggaacgaataattagcaaatgaagcttataaattgtcaacccatgtcatgaatttgcaagcaaaaatacaaagttcttttccttatcttatccctttctttgaag

SEQ ID NO: 44720 - DNA, 328 bp, Glycine max
  unsure (1)..(328): unsure at all n locations
  Clone ID: LIB3093-011-Q1-K1-A3
aatcaacttcgttacaatgtgtccaaaggcatctccatcgatatcaaaccttgacaaaaggggttcggatggctttgatcagatananaaccactatgatcgattcaaaagaaatcaagtccccctacttgaatggctattattgtgaatagcaacaatgaaaagccatttggtgggggctaataatattaccaacaatgaaaagccaaagccaccacgtcgtaattggggtggtagatcatcggtttcaattaagttgtgtcaactaggtgtaagtatacaactacttaggtttgntctgattttttcccttttagtgctacatact

SEQ ID NO: 44721 - DNA, 417 bp, Glycine max
  unsure (1)..(417): unsure at all n locations
  Clone ID: LIB3093-011-Q1-K1-A4
cgaccacgcgtggccacgcgtncgccacgcgtccggcacgcataggtcctctgttaccctattggatctggcttttcggaggatatggagtgttcctgaagctttgatcactgctgagatgggtaccatgttccctgaaaacagtggttatgtggtttgggtttcgtctgctttgggtccctattgggggtttcaacaaggttggatgaaatggctgagtggggtgatagacaatgcattatacccagttctatttcttgactatctgaagtcaggaatccctgctttaggtggtggattgccaagagttattgcaacatggggtcttactatagntctcacttacttgaactataggggtatgaccattgtgggatgggttgctgtttgtttaggggttttctcactcctcccttt

SEQ ID NO: 44722 - DNA, 354 bp, Glycine max
  unsure (1)..(354): unsure at all n locations
  Clone ID: LIB3093-011-Q1-K1-A5
agggangacaaataccgcttctttatgttcgaagacagtganaaaaacaggaaatgtggatatgttgctcctccaaattatcaccttttcaacaaattatttgatgaaggcagaaccaaggtatggcctccgggttcacttgaagaaaaggtgcatactttagtgaataattgggagatggaaatgttccacaaggaggatttcaaggataacagatcagtggacccagagaaatacactttcagcctaaacggaaagaagcctattagttttgaagagaaaaagaagcttggaagaaggtatatttcactgctgcaaacctctataccaaaaaaactgaagccttacaaccca

SEQ ID NO: 44723 - DNA, 326 bp, Glycine max
  unsure (1)..(326): unsure at all n locations
  Clone ID: LIB3093-011-Q1-K1-A6
gntgaggatcatgaatggtggtggaggtctttcctttgtgttggatcaactggcttgttcatggacggctattgcttgtattactactatgcacgatcagatatgtctggttttatgcaaacttcgttcttctttggttacatggcctgtatctgctatggcttcttcctcatgctcggtagcgtaggattccgtgcctccctgctctttgttcgtcacatataccggtccatcaagtgtgagtagctggggtttgaaggtgttggtaaagttcatattatttctgttaggagaagagaaaagggtcntgtattatttttttcttt

SEQ ID NO: 44724 - DNA, 336 bp, Glycine max
  Clone ID: LIB3093-011-Q1-K1-A7
cccacgcgtccggttgttaccaacaaaagaatcaacgagaaatatcatctcattgactcaagaaatggacgaattcaaatcgagcttcagtggagaactccttgataatggctggtaccagttgcattgcacacacaaatttccagcgtacataattgtgtaaagcaatttttcttctgataaggtttggatgaaagccttcaaacttgatttctcattattgttgataaaaacaataacgtcagtgactcaatactgtcttacgagttacgctcccatagaatgttgttcataactctattgataatttgatattcaagttctgttcctctgttt

SEQ ID NO: 44725 - DNA, 426 bp, Glycine max
  unsure (1)..(426): unsure at all n locations
  Clone ID: LIB3093-009-Q1-K1-A5
gccgtgatttataggctcatanaatcaggtgggcgcatgtagtatattgggtatgtgccctaatcaatctgtggagccagatgnnggagggtgacattanntggaattcaaagggcgcccatctaaagtcgaagggcgggtttattctgactcgaaacannatacgagtgtggatgccctgccggtgtgtagtagtattacaattaaaaggttatgaattttntgttcgagcaagagatccccgtaataattttttttaagttacctatttcttggtgcttatcatttanntttgcctggttgttaaacaagcgtggatgaaatgggatttcaccttgagggaaacgaagcttattctacaaatgaactatttccaaccgagaatattattattttgggtattataattaacgtaaatccctctct

SEQ ID NO: 44726 - DNA, 447 bp, Glycine max
  Clone ID: LIB3093-007-Q1-K1-A5
agacaatggagaggtgttggatgaaggcgtgcaggggtattctttgattttcaaagggagtggagttgaagaattgactcgaaagtttgaggaagaaacagggctagagggaatcattgtgtgtaatcggagtccattgaatggaaagctttatcctcttcgcttgcagcttcctccaaacactgtcaccatgcgggttgttttggttcttcccttgtcaaatttggcaagagactttgaggaacaaggcttactgtgagaagccttaaaattttccaacgaagacctatgtatatgtactgatcgaagccagttcagaatttaagaattaatgtgttctagtccattgcatttattaagcagagttcatcgtggtcctgtgtgggaagcttagcgttgtcatgggatgggtcataaatgaaataatcctttatcaatgacatgtgc

SEQ ID NO: 44727 - DNA, 438 bp, Glycine max
  Clone ID: LIB3093-007-Q1-K1-A6
cggacgcgtgggtgaagaccaccactctcttctggcggcggcgtgccggttgggcagggcgggggggcatttacagcggggcctctttcggattcggcctcagctggtaccgtgaagcgcaggggcagacctcgtggttctgtcaacaaaaataagaagaatgatagctctaactcctctaagcattctgggccaggatcttggtttactccgcatgtcattacggtgaacgctggagaggatttgtcagcaagaattatgacaatttcccagagtacttcaagaaatatttgcatcttaacagcaaatggagccatatctaatgtgacacttcgacaacctgcctcatgtggtggaactgcgacttatgaggggcgatttgagatcctatcacttcgaggctctttttttcgcgcttgaacttaaaaagcttggggg

SEQ ID NO: 44728 - DNA, 330 bp, Glycine max
  Clone ID: LIB3093-007-Q1-K1-A7
cacgcgtacgcccacgcgttcgctttccttcttcttctttttcttcttccttcatagcaaaagccgtgggcgcgagacccgagagtggaaaagaccctccacaaccaccttcacgtggctttctggccacagtacaagaaatcacaagaatctatagttcactgccacctagaccttctattgaagaagtagaagctgccacgtccactggggacaccctcaacaacgaggagcaaatcaaacttaacgaaatctcaatgcaacaacaaccttctcacgatgatgtccctcaagacctcttctctgtcctgccacaactcaaaaagacta

SEQ ID NO: 44729 - DNA, 397 bp, Glycine max
  unsure (1)..(397): unsure at all n locations
  Clone ID: LIB3093-007-Q1-K1-A8
tctcacttcaagggcaagtaccatgatgagcttatcgccaatgctgcgtacattggcactgctggaaagggtattcttgctgctgatgagtcaacagggacaattggcaagcgtttggccagcatcagtgtagagaacattgaatccaacaggcgagctcttagggagctgcttttcactgctcctggtgttcttcaatatctcagtggtgtcatcctctttgaggaaaccctctaccagagcacagctgcaggcaagccctttgtgaatgtcttgaaggaagctggtgtgcttcctggcatcaaggttgacaagggcacagtcgagcttgctggaactaatggagaaaccaccactcanggtctagatggccttgtcagcgttgtgccaagtacta

SEQ ID NO: 44730 - DNA, 408 bp, Glycine max
  unsure (1)..(408): unsure at all n locations
  Clone ID: LIB3093-007-Q1-K1-A9
cccacgcgtccgcaattctccaagcttctcaccaagaaacaacatgcctgagatgcgctccccaagccttcttgacttcccttcccttgctctaagccctgttacaccattgaatgatgacccttttgacaagtcctccccttcattggggaactcgtcagaggaggataaagccatagctgaaaagggcttctacttgcatccctctcccatgaccactccaagagactcagaaccacagctcttgccgttgttcccagttacctcacctagagtctcatcacaatcaccttcttgatcttgatgagatgaaaagagatngtgttcctgtgctgtggatgattggttaattacatcatgnggtttttatttttgatttgaatatgggttatgggttcctctatcaac

SEQ ID NO: 44731 - DNA, 331 bp, Glycine max
  unsure (1)..(331): unsure at all n locations
  Clone ID: LIB3093-007-Q1-K1-B1
gcacgcccacgcgttcgcaaaaaagaggcaaacattttatgtgaaatanntgttcaacaaactgcacaagcgtagagtgtctcttgagcagtaataagaccagctgtcgaagggatggctccaaccgatgtaatatcgtacagcagaggcatataacatgcatggagaattcaagctacatttcgagggggtctggttatttattaaattatattgtggaccatttgcgaattatgatcggattatctcaatggtgtatgggagatcaatttttctcttccctattggcaaagagacgtggaacatcttgacgagaattannaatactttt

SEQ ID NO: 44732 - DNA, 400 bp, Glycine max
  unsure (1)..(400): unsure at all n locations
  Clone ID: LIB3093-007-Q1-K1-B12
gaattattgtcttcacatttgagcctaattgttaaggcttcaggttttttcttaccttgggctggctggaagcatttcaaataactgttctgtgaattgttatgtagttgggccagaacacactgtcttggagtctttggaatttgatttggttacaattgaagcagccacaaacaatttttctgaagaccgcangattggcaaagggggttacggagaagtgtacaagggaatccttcctaaccgagaggaagtagctgtaaagagattatcaacaaattctaagcaaggagcggaggaattcaaaaatgaagtgttgttaatagcaaaacttcaacacaaaaatttggtgaagataggtaggattttgcccagaagacagagaaaaaatacttattta

SEQ ID NO: 44733 - DNA, 419 bp, Glycine max
  unsure (1)..(419): unsure at all n locations
  Clone ID: LIB3093-007-Q1-K1-B2
gagggtccgacccacgccgtacgacacttaaagatgctaaagtcacaccctcttcgtgttaaattggaagtgagaaagtgcgaatttgctgcagggcgtgtgatattttatagacaatacatggtggtcttgttatgcttcagctggtaagggcttgatgaaaaatataaaacaaaagaggttgaaggggaatagccttggggaagaagtcttaacgaagttaaatgagcatttgcaaatggggaaaggaagaattctctattcaatcttcaaggacgtggtgagaaaagcaaaaagaaagctaatacttccggacttttcaaaggcgaatatcaaattattccacttnnnctagtcgaaaagaagggcaaagagaggctcctcagagagagctctcttttggggaaagaagcttgtga

SEQ ID NO: 44734 - DNA, 298 bp, Glycine max
  Clone ID: LIB3093-007-Q1-K1-B3
agaagacgagttgaaaaaagtcacggcacgtggtatcagagatatatctcaaatctacacaaggcttcttactaggctctgggtgatgggcactaaaaaaatggactacatttggttcacacatggtgtcatatttccactgctccatacacagccgcatggggtataagatgttatatacaggggagaccagttgatttgactcctgagctagaggaggctgctacaatgtatgcagtcatgcgagatacacagtacatgcagcaagatatgttcaaggaaaagttctggaatgact

SEQ ID NO: 44735 - DNA, 398 bp, Glycine max
  Clone ID: LIB3093-007-Q1-K1-B4
cccacgcgtccgcattactattggatctggaactaatatacaagacaattctcttgttcatgttgccaagtctaatttaagtggaaaagtcttgccaactatcattggagataatgtcactgtaggtcatagtgctgtgttacaaggatgtactgttgaggatgaggcatttattggcatgggtgcaaccttgcttgatggtgtatatgttgagaaacatgccatggttgctgctggagctcttgtcaggcagaataccaaggatcccttatggagagggttgggggaggtaatcccggcaaggttcttgagaaagctcacagaagatgaaatgaccttcttctcacaatctgccttaaattattctaatttggctcaggctcattctgcttgaaatg

SEQ ID NO: 44736 - DNA, 305 bp, Glycine max
  unsure (1)..(305): unsure at all n locations
  Clone ID: LIB3093-007-Q1-K1-B5
caaccctcttctattgatattttatcctaattaattggatttagccattttgattgtcaatgacttatatttagttggttttctattgtgcttgcttcagtaccatccagacgtgtgcagagggagcaattgtggggtgcagtttcacgaaatcaacgaggcttatgatgtgcgttacatatcctgcaactacccttttctctaaatttcagttgcatatttatttgcaccgcgtagaatgaaaacataaaactgctagttttatatatgaattgtgatcatcntccaattagcataagtcaaac

SEQ ID NO: 44737 - DNA, 367 bp, Glycine max
  unsure (1)..(367): unsure at all n locations
  Clone ID: LIB3093-007-Q1-K1-B6
atttcaacactggggtgatggtgatggatttggtgagatggagagcgggcgactacacaaggaagattgagaagtggatggagattcaaaaggagagaaggatctacaagttggggtcactccctccctttttgctggctttcggtggtaatgttgaggccattgaacatagatggaaccaacatggtcttggaggggataatgtaagaaatagttgtaggactctgcatcctggtccagttagtttgctacattggagtggtaaagggaaaccatggactaggctngatgccaagatgccttgctcagtggattttctttgggcaccttaatatctctacataccccatcaccatacataccatca

SEQ ID NO: 44738 - DNA, 463 bp, Glycine max
  Clone ID: LIB3093-007-Q1-K1-B7
aatttgtaattatattattacacacatatatatatagttgaggaataaaacaaaggctctgatatcaaagcagacacagctagctattcacaatggccctgcgggttcatttctcaatagtttccatagcggttttggctctatgcacttctgcagattacttttcggctaattttagctatgctggtccaaatggacctgagtactggggaagcttgagtccatcttatgcagcatgctcacatgggaaatctcagagtcctgtggaacttatgaagactgatattgtcatcaacaagcagttgaagaatctaaacagaaactaccttcctaccaatgccacacttgttgacaacatattcaacattggggtgcactttgaaggaaaagtaggggatattaatataaatggaaaaaattactccttaaaacaattgcactggcattctccatcagagcacat

SEQ ID NO: 44739 - DNA, 410 bp, Glycine max
  Clone ID: LIB3093-007-Q1-K1-B8
gggctttctaggcttgcattgacagaaacatctcatatctcaaccgccccacaagggactgcaggttatgtcgatccccaataccaccagaactttcagctttctgataaaagtgatgtctacagttttggagtggttttggtagagataataactgccatgaaagtggttgattttgctcgacctcgaagtgagattaatttagctgcacttgctgttgataggattaggagaggtgctgtagatgagatcatagaccccttccttgaaccacatagagatgcttggacactgtattctattcataaagtggccgagcttgcatttagatgccttgcttttcatagtgacatgaggcctactatgatggaagtagcataagagctagaacacattagacgcagtggatg

SEQ ID NO: 44740 - DNA, 471 bp, Glycine max
  Clone ID: LIB3093-007-Q1-K1-B9
gtcgaagcatgccgttagggacaaaaatcagctgcttttcctggtacttaagtttgcagagggcattgctgtggttgacctaaaagattcttacccaaatgtgatggaagacttgcaggtaaattatttcttttagttaattgttttgcatgaaaatgaaaatttcttggcattcatttttcggtaacattggtggaattttgattatagatatatatgttcaactctcacattgccttgggctctttgagcaactattgatatcttacagatttgatttcttcatgtgcatagttaatttttggaagagtcatgtgtgctaaaatcacgaatcagtatgacagaagctcaactaatcaaatgttattggcaataccatggatgaatataaaaatcaaatatttcaggggacaaagaaaacagtataagtaaaaattagtttaaaaactagttatgcctacttgtggtctt

SEQ ID NO: 44741 - DNA, 482 bp, Glycine max
  unsure (1)..(482): unsure at all n locations
  Clone ID: LIB3093-007-Q1-K1-C1
acgaagtgcttgaattggttgaattctaagaaacccaattcagttctttatgtcagctntggaagcttggctcggttaccctctgagcagttaaaggaaattgcttatggtcttgaagcttctgaacaatcgttcatttgggtggtgaggaatatccataacaacccatcagaaaacaaagaaaatggaagcggaaactttcttccggaagggtttgagcagaggatgaaggaaaaggataaagggttggttcttagaggttgggctcctcagctgttgattttggagcatgttgcaatcaaagggtttatgacccattgtggatggaactccactttggaaagtgtgtgtgctggtgtgccaatgattacgtggcctctctcggccgagcaattntcgaacgagaagttgataactgatgttttgaagattggtgttcaagtggngagcaaggagtggtggtcgtggaattcagaatggaa

SEQ ID NO: 44742 - DNA, 395 bp, Glycine max
  unsure (1)..(395): unsure at all n locations
  Clone ID: LIB3093-007-Q1-K1-C10
cccacgcgtntcgccacgcgntccggccacggttggctttcttaaaacacatggatggcggggataatcgtgccaacaactttgtctctaggtccatgaccatgggttacggcacttcctaccacagaactagtttaaggaacaacaacaacaacaacaacaacaacgtttctgtttcttcaccaagatctgcgagattctacgacgccagattcgaagatcaacaccacccccacttnctctccgcttgtttcctctgcaaaaaatctctcggggacaatagagacatcttcatgtatagaggggacacaccgttttgtagcgaagagtgcangcaagagcagatggagatagacgaagcccaagagaagaataggaacctttcttcatcgatg

SEQ ID NO: 44743 - DNA, 460 bp, Glycine max
  Clone ID: LIB3093-007-Q1-K1-C2
acggttggaaggaaaatctgggtgcaagtcaagctctttaaagaatccctggcatcaagttcccggagagacattccaaaccttctggttctgcacctgagattcaagcttcgtcttcaacaactgatgccagtctagcgttctttaaaagttcaaatgcctcatcctcagttggagggaaggcctctcttcaacccaaaagaactccagtgtccaaagaggagattgaagcaattttgttgggtggcagcttctaatcgagcttgtccaagggcagactatattgtgcactcatttttttggatctaattcgtcattttccaaagtttatggttctcttttgttgccaagtgttggcataaacaatacaccgagtacaattgtcaataattgatatactcgttgaattttccacttatggaaatcgaatattgactctggacaaaaagagtttcaagtt

SEQ ID NO: 44744 - DNA, 473 bp, Glycine max
  Clone ID: LIB3093-007-Q1-K1-C3
gcgccaaaacctcttctgtatattttttccttcttcttgtgatcattcctctcatttgggggcgcggtgctgtttgtgatcaacctgcaaattctgatctttttcccttcctgattcggattcggataccctgttgcgtttttctttctgggtgtgttttatttcggccaaagtttctgttttgcatagtgggaagtttaaaaagggattaattctatgtgggcatcgttcatattggcaaatcaatgttaactctatcatcagtgtggttatgaagtaatatggaagtgctccttgcgcgcatagctcatcaacgacaacatcaaggacaatagcatgtcgttttacattggtcgtgaggcttcaaagctatggaagagaatttgtgcagagacgactacagaggtcaacctccttgctgagaatggaagtaccttctggctggtcttgtttgtcagtatatacatggtttg

SEQ ID NO: 44745 - DNA, 381 bp, Glycine max
  Clone ID: LIB3093-007-Q1-K1-C4
cccacgcgtccgcccacgcgtccgcccacgcgtccggtccacggacttcagagaaaagatgggtacattgcaaagacaattgatgaatgtgagattttccggaagtgccatgaaactgactggagaaatagaagaggaaatagttaatgtctctatcgatgatgttgttttgcaacttaagaatggtaaggatgaagaatttgcggttgcacttttgagactaaaggagttcatgagcagtgaaagactggatggtggcttgattgatgaggaaagcaactctttccattcttttcaatcgtctaggttcatgtaaggctgacaataggttgaccatcattcgattgctaagaagtattgctttaggaaatgatgagaaaa

SEQ ID NO: 44746 - DNA, 297 bp, Glycine max
  unsure (1)..(297): unsure at all n locations
  Clone ID: LIB3093-007-Q1-K1-C5
gaanacccgggccgaccgacgcgtaccgcaaaaccttaagtatcggatcaggttttagtaattttgttggtagaacctttcgtcgtagggtgtcaattattatggctgaatcacaccatcaaattcctactgccttcgatccttttgctgatgcaaatgctaatgactcgtttgctgtgtcaaaggagtatgtgcatattcgcgtacagcaacaaaatttaatgaaaagcctgacaactcttcagggattgaaaaaagaattcaactataacaagatacttaaatattttaacaaag

SEQ ID NO: 44747 - DNA, 456 bp, Glycine max
  unsure (1)..(456): unsure at all n locations
  Clone ID: LIB3093-007-Q1-K1-C6
cagacggcttcgcaaatacgggctccgatatgacgatttgtacgatccttactacgatctagatgtgaaggaggcgctgaatcggcttccgaaagaggtggtggacgctcgccacgcgcgtcttaaacgcgccatcgatctttccatgaagcacgagtacctccctgacaatcttcaggcaatgcaaacaccattcaggggctaccttcaggatatgctgactcttgtgaagagggagagagccgaacgtgaagcattgggaggtttgcccctatatcaacgatccattccttgagtgcattaattattttgattgaagtgggaaggttaaattgtattgatgttgtgatagaatgttttcttttaaagaagaaaatatggacaagctttgtggtataaactntataatgaatgcantttttaatggtatcaacctggcgcaggcattttattaat

SEQ ID NO: 44748 - DNA, 450 bp, Glycine max
  Clone ID: LIB3093-007-Q1-K1-C7
aaagagatcacatagcagaatggcttctactcaatgtttcttgcaccaccatgctcgtacgacccctgccagatccccatcacaacgcatcatggttagcaccaagcctaaccagcttgtttgcaaggcacagaagcaagaggatattgatgtcagcccaatctctcgccggttagctctaaccgtgctcattggtgctgctgctgttggctccaaagtccaacctgctgatgcagcttatggggaagctgccaatgtgtttggaaagccaaagacagacacagatttcctgccatacaatggagatggattcaaactatcgattccctcaaagtggaacccaagcaaagaggttgagtacacaggtcaggttgttagatatgaggataactttgattcaaccaccaacgtggttgtcaccatcactccgactgataagaagtctatcac

SEQ ID NO: 44749 - DNA, 443 bp, Glycine max
  Clone ID: LIB3093-007-Q1-K1-C8
aaaaaaaggaacaataataataaatgtagcatgggaagaaaaaaaaaaaagagaaagggaggggggaaataaggtgggccaagtcgtctagaaacctcaacattttttagagggattttgctattaaaatttgacttgagtgacggtgtagattataatagtattagcatatatatctctatcgtatgtactacgagagtttgatgggtttggagtaatttttatttttatgttggtgactcattaatattgagttggcataattcctctaggaggggagagggattttgcaacatgttactgtgggagagtaaatgagagaagaaaaagaagggaaacactgaaacagtggtagaagaatttaatgtgatttgttctttgtaacctgtgagtgtggaagaaaacaagtgagttgcgggctggaattcaaaagttgcattaat

SEQ ID NO: 44750 - DNA, 484 bp, Glycine max
  Clone ID: LIB3093-007-Q1-K1-C9
cccggggcgaccgcacgcgtacgatcccatacaattatttaaacagctttttcttcttaataaaggcactttaaaacagggtcgtttaatactaaagttgcgtaccccctatcctccggatctttattctcttgctctctcaaatgtaacacgaacatcaaaaacagtctgacatttagtccattctttaacatattcattctaacatgtattattttttccaaaaatttcttcatctatatttaacttaatcttaatgaaaataaagatactgctcttcaaatttatttgcctatttaaaaacaaatatccttccttatcatgtatatggattcaaactatcaatataccatcaatttaacctccgccccactctataaaatccaaactttcttactcttacatgccaacatatatttcttttatacaccaacctaaatttaactaacattccgactttttacaactttattacttacaaaac

SEQ ID NO: 44751 - DNA, 445 bp, Glycine max
  Clone ID: LIB3093-007-Q1-K1-D1
ctctggtctctggcttccttggtacgggaagaactcaatcttgtccatttccctttgggttggctgtcttcgatctcttcaccttccattcgaccaccctcttatcacagctcgcgttaacttaagccctctccgttgagggtttctccaggtgtggtttgattttcagtttctgatgctgaagaaataaaaaagcttgaaggctttgctcttctgtgtgaaaaatgttggaaggtggtgcgaaattcccgggaataatagatctcaacaagaataataacaactactatgatttctctcaaggcttttaccataagctgggggagggtaccaatatgtcaattgacagcgttgggagcttacagacaagtaacggcggaggatctgttgcgatgtctatcgataatagcagtgttgggtccaatgattcccatactcgcatgtt

SEQ ID NO: 44752 - DNA, 491 bp, Glycine max
  Clone ID: LIB3093-007-Q1-K1-D10
cgaatcccggtcgaccacgcgtccgttctgtctgagtcaagctttttggttaatctctccagaatcattcataaaaccttggtgtagctccgagctactggtttgcaatccaaccatattgaaatttgctgaaatgctttccctcaatggtagatctgtgaattacaccaagggaagtttcatctttcccggtgctcagccctatccccatcgcaacttttctgaggaagttgctattcttgatggctactttggcaagcttagtgcaagaagcaatgcttatattttgggtggccaagacaaatcacagaactggcatgtctactctgcttctgcagattctgtaactccatgcgacaatgtttacactctagagatgtgcatgactggcctggatagagagaaagcacaggttttctacaaagaacaatctgcttcagctgccattatgactgttaattctcgcattagaaaaattcttccagattctg

SEQ ID NO: 44753 - DNA, 447 bp, Glycine max
  unsure (1)..(447): unsure at all n locations
  Clone ID: LIB3093-007-Q1-K1-D2
ccctaacatagcatcatcctaaggcacatccttctccccctgaatacttggccctccggggggacgcgacttataaagacgatctatatntaaggaagaggacagggatgcgtcgggggctttgttgcacatgtcaggtggaagagtcttacccatcaaatgaaaatgagcacctgaaaagcccaaggaattatggagatggaaatcaaaaaggctcaaaggtgtcagctcctgtcaagcctgaaacacaaaaggcacctccacctattgaagctccagccttatctttagatgagctgaaggagaagacagacaactttggttcaaaggcattaataggtgaaggatcgtatggaagggtgtattatgcaaccttaaacaatggaaaagcagtggctgtgaaaaagcttgatgtttcatctgaacctgaatcaaataatgagtttt

SEQ ID NO: 44754 - DNA, 469 bp, Glycine max
  Clone ID: LIB3093-007-Q1-K1-D3
tttttctctctctcactctctttggcttccatcttcgtcaccacccgcactatgcaatcccgaggggttcttgattccaccatccgtaagtgatttgtggtgaaacctaagtttctgggctggttttgtggaatctggtgaagttttggattttgggggtgttggttgagtagagtgggtgaattggattggactagttggttgaagtttggtgcaagtgagttgagatatgagtgtggtggggtttgacattggtaatgagaactgtgtcattgctgtagttaggcaacgtggcattgatgttttgttgaattatgaatccaaacgtgaaaccccggctgtggtctgcttcagcgagaagcagcggattttggggtctgctggtgctgcttctgctatgatgcacatcaagtccacaatatctcaaataaagagactaattggaaggaagtttgcagaccctgatgtg

SEQ ID NO: 44755 - DNA, 430 bp, Glycine max
  unsure (1)..(430): unsure at all n locations
  Clone ID: LIB3093-007-Q1-K1-D5
gaanacccggggggaccgacgcgtacgcccacgcctccggaaccaccaactgtttactttatggatcgatccccaatccttccgagagagcctttcataagggatgtcatccncacgaatttgctgatacaggcaatgtaccaagtgtctgtcttgcttgtgctcaatttccgaggcataagcatactgtgtctgagccatgacagaaaagctcatgcaatcaaagtgaagaatactttgatattcaatgcatttgttctctgtcaaatctttaatgaatttaatgctcgaaagccagatgaattcaacatattcaaaggagtcacaagaaactacctctttatgggtatcattggattaacggtttggcttcaaatttgcatcattgaatttcttggcaagtttacaataacaagtgagcttaatttga

SEQ ID NO: 44756 - DNA, 441 bp, Glycine max
  unsure (1)..(441): unsure at all n locations
  Clone ID: LIB3093-007-Q1-K1-D6
ggccggtggtgcgaatttcgtgcagagggttctctcttacgtggtgaatgaagtgggtgtgaatggtcttgccaacagccctgcatttcagaggtttgcagtgaggacatcaaaaagaattggagatatttctaacaaagctgttcagaagaggcaggagctagctgagcagatcaaggacatctcaaaaaatatggagtcattcaagaaccagtaattttggtattcttgctacattgctgaagttaatggagtcctgattttctttagccaaagatgttgctggtgacaaggctgggtgtttgtaaatttcttttgttgtaatatattttggttcttaactcgtgatctcaaaagttgggatgcaagggtttttcagtttgcttggtgaactgaaaacaggattaggaggatattatngctagtttacgatactatcac

SEQ ID NO: 44757 - DNA, 474 bp, Glycine max
  Clone ID: LIB3093-007-Q1-K1-D7
caaataccatttcattcattcttacatattgcttaattttatctgaattttgaaacgcctgctgaatggctttttcaagagttgcattgttaatatgcacggtaattgggtattttgtgattgcctctgcgggcaatttttaccaagattttgatatcacttggggagatgggcgtgctaagatactcaacaatggcgagcttctcactctgtctcttgacaaagcctctggctcgggtttccaatccaagaacgaatacctttttggtaaaattgatatgcaactcaaactagttccaggcaactctgctggcaccgtcacagcctactacttatcttcaaaaggagcaacatgggatgagattgactttgaattcttgggtaatttgagcggtgagccatacatccttcacaccaacgtgttcagccaaggcaagggcaatagggagcaacaattctacctctggtttgacc

SEQ ID NO: 44758 - DNA, 477 bp, Glycine max
  Clone ID: LIB3093-007-Q1-K1-D8
cccacgcgtccgaaagaactgaaacaagtcagacaactaaagctaaaaagcctaccgggcctgctcccttagagaagcatgtggctcgttggggtgatgagtctgatgaagatgaagataaagataaaaatgaagaagaacctgtgagaacaaaggaggaagaggagctgatactgaaggctgagaaggcaaggaaggaggaagaggaggcaaagttgaaggaaaagcggaggctagaggagattgaaaaagctaaggaggcactgcagagaaaaaagcgtaatgcagagaaggcccaacaaagggctgccttaaaggcacaaaaagaagctgaactgaaagagaaggaaagggagaagagagcaaagaagaaggaaagaagaaagacatcttctgctgtcactgctgagaatacagaacaagaatctgctcataccacagaaactctaacaagtgtggaagaaagtgacctgactg

SEQ ID NO: 44759 - DNA, 469 bp, Glycine max
  Clone ID: LIB3093-007-Q1-K1-D9
cccacgcgtccggtttctctgcctaataggattgaaagatgggtcaagcactagggggctgtgaagttgatcagtcagatgtggctatcaaggagcattttggaaaatttgatgatgtcctagaacctggatgtcattgcctgccttggtgtcttgggtaccagattgctggtagtttgtcactgcgtgtgcagcaacttgatgttcgatgtgagacgaaaaccaaggacaatgtctttgtcactgtggttgcatctgtgcaataccgagctgtgtctgagaaagcatctgatgcattctataggcttaccaacacaagggagcagatccaatcatatgtttttgatgtcatcagggccagtgtaccaaagttggagttggattctgtctttgagcagaagaatgatatagcaaaggctgtggaggaggagcttgagaaggccatgtcaacctatggatttgagatagt

SEQ ID NO: 44760 - DNA, 477 bp, Glycine max
  unsure (1)..(477): unsure at all n locations
  Clone ID: LIB3093-007-Q1-K1-E1
agaaacatggcttgagaaggtcaggttgtccgcgtccacaccggtgatgcgtggaaccagcggctggggaatggaaaagactcccaaaaattgattgtggtggattttactgcttcctggtgtggtccatgccgttttattgccccagttctggcagagattgctaggcatactcctcaagtgatcttcctcaaagtggatgtggatgaagtgaagcctgttgcttaggaatattccattgaggccatgccaaccttcctcttcttgaaagaatggcaagatcgtggataaggttgttggtgctaagaaggaggagctgcaactcaccatagccaagcatgtatctgctgctgctgcttcttcttgaagtgaagtatcatcatatgaaagaagatcaagaataatgcattntaatgttttcaagtcagtttgcatgttttctctatggatattgagttggcagaacattgagtgatg

SEQ ID NO: 44761 - DNA, 477 bp, Glycine max
  unsure (1)..(477): unsure at all n locations
  Clone ID: LIB3093-007-Q1-K1-E10
attttcttctggaaatctcgatcaccataatgctgcttttcttcaagctgatctgctggaggtagtggactntataaatgatgcaattgtatcaatggactcttttgttagtgcatacgaaccagcagctgttttcttctcttgcccagttgaaatgagttatgggaatgaggaactgctgagcctccttgcccgattgcatgattcacttattccatcattgcaaaagggattccgtatgatttttgctgacaaacaagatggcacagtatctaatatcttagtaagtttgaagatgttaaaaattagattggtaaagtttggttggcaactattgcacttgtgctatctaagtgatgaagtgttcaaagatagcatccctcttctagctgccacaaagatgtttcctgccaatgtagaggacccagtcatcagagctgatattcttgttcaaacatttagagagatcaattcagt

SEQ ID NO: 44762 - DNA, 342 bp, Glycine max
  Clone ID: LIB3093-007-Q1-K1-E12
tgatatagttggcctttgtgcattgaggttcttaatctcccaagatttgctttctgaaagtttattgaagtccatgtatgtttcttttcttgcgggatgcttccggtcagtgcgttttggtttagaggaagctcatggaaaaggacaagcattgcagttcaactggttatatgagaaaggagcctttgtctgggattctgaaggcaaagtctctgttgattctaccaagattgaaagagcagttgaaagcctgagcagggagatactcaccatacaagccaatggtgataaaaagactgctggtttgcttcttctgaaatactgtgtgttgacagaaccact

SEQ ID NO: 44763 - DNA, 362 bp, Glycine max
  Clone ID: LIB3093-007-Q1-K1-E2
gcgcaacaaacaaagagggtttgccttgggcccgttgtgtttgtttccggaccaaaaaaaaagagggggtgaggtcttgaatcttggccaaaccggtggtggttgacccccccccacccatgctgggtcgtctagcctccatcgtggcgaaagagcttctgaacggccagaaagtggtggtcgttcgctgtgaagagatttgcatctcgggcgggctggtgaggcagaagatgaaatacttgaggttccttcgcaaacgcatgaacaccaaacccttccatggccccatccacttccgtgccccctccaagatcttctggcgcaccgttcgtggaatgataccacacaagacaaagcgtggg

SEQ ID NO: 44764 - DNA, 390 bp, Glycine max
  unsure (1)..(390): unsure at all n locations
  Clone ID: LIB3093-007-Q1-K1-E3
ntccgcaaaagctattggtatggggaactcatttcaaaaaaagggggcactacttttttgacttgggcctgctttggaagaaaaggtggatgggtcaaatccaaggggaccaaaacaaaaaaccgaagctttggctggcttatctaatgcatttggttcatcttctgaaaaagcatcccgtttggcacaaaataaattggatgggttagggccaaggggaccaaagcaaaaggcaaaaactttaaccggtttaaactctgcatttaattcaatatctgggacgaagacttttacttctaggccatcctgaagaagtcaaggatcacaaagagctgcagcagtagctgctctttcacagttcttatggctgaaaagaaaaaatcaccggat

SEQ ID NO: 44765 - DNA, 278 bp, Glycine max
  Clone ID: LIB3093-007-Q1-K1-E5
ctcagtcgcttctcgaaccctactttcttccgcggtgattgcatttgaattcctgtaatggggattgataatatttttaaaaatgaagctagtgaagaaaaaggagagcgtgccagaatggcttcttttgttggagccatggctattgctgacttagtgaagacaaccttggggccaaagggaatggataaaattttgcagtcaacaagtagaggacgtgaaggtactggcaccaatggtggcgctacaatcttgaaggccctccatattgataaccc

SEQ ID NO: 44766 - DNA, 299 bp, Glycine max
  Clone ID: LIB3093-007-Q1-K1-E6
ctcacgcgttcgtccctctgttttgtatcgtattgaactgaggcccacttctatcgagagggaggtgtttccaaagattgctttcaagaaaaagctataatgcaatggtcctgccagaatttttgatggacattggacaaccgatggattatattgctggcctaaagctttacctgcactcattgaggaagaagtcatcttctaagttggccaatgactctcaaattgtagggaatgtcattgtggatgagacatccaaaatttgcgaatgatgcctcattgtacctgatgtttctatt

SEQ ID NO: 44767 - DNA, 445 bp, Glycine max
  unsure (1)..(445): unsure at all n locations
  Clone ID: LIB3093-007-Q1-K1-E7
ggaaaacccgggccggccgacgcatacggatggtttgtaccataccacaccgattcgattatggatgtcgccgtctccncaaaggctcggtgtcaatactatacacacgctataaccatttgcaagaactaaaggccttctactaatccaaagctggagttaaaggcctgatctactccggcatcaccaaactcccaaaaattttcgtccggccgccagaagacctcgccgccgtccacccaatatccgacaaccctgccggtgcccagttcacgatccccataattgacctcgacggccttaccggcgagcgctccagcatggtggctgcagtccggcgggcggccgagacggtggggttctttcatgtggtgaatcacagaattccgctgaaggtgctgaaagatacgatagcatctgtgcatgagttccactagctgccaca

SEQ ID NO: 44768 - DNA, 461 bp, Glycine max
  Clone ID: LIB3093-007-Q1-K1-E8
gcgtccgcccacgcgtccggtgacctgcaacaacagaattataaggtgggtggggttgaagggtgtctgttgtttttgctgggatgccagcacttctcctaactttgggagccttgttcgtggtggacacccccaacagtttgattgaacgtggccgcttggaagaaggaaaaacagtgcttaaaaagattcgtggcactgacaacattgaacttgagttccaggaattgcttgaggccagtcgtgtggctaaagaggtcaagcatccattcaggaatcttctcaagcgcaggaaccgaccccaacttgtcatttccgttgccctacagatattccagcaattcacaggcatcaacgcaatcatgttttatgccccggtgctgttcaacacgttaggattcaagaacgatgcatccctgtattctgctgtgataactggggctgtgaacgtgctcttcact

SEQ ID NO: 44769 - DNA, 472 bp, Glycine max
  Clone ID: LIB3093-007-Q1-K1-E9
ctttcaggtgtatttgtgttctaattatctattttagaagaacatggaactacaaggtatgggtccaagtaggtaaatttgaaatcttatttctttgtactgatacttgtggtttgcataataatgtttcattgttttgcaaatgatgtaattcaataatcaaaataatcatacttccaaagacatatagtatcatttttaggggaatttagtttatacaagatattcatcttggtaataagatgccgtgacactgatgctttggtaattaactatattttgttattctttacgagacccacacaattattctagaaacagaatattaaaactagtagagcgtgtgtgctataacagttaacagaatttaatgctttctaatttgtttttgctccttttctttagacaaccatgctggcctgcgactaaatataacgaataagactgaggatttcacccctgttaattaatt

SEQ ID NO: 44770 - DNA, 474 bp, Glycine max
  unsure (1)..(474): unsure at all n locations
  Clone ID: LIB3093-007-Q1-K1-F10
cccacgcgtncggcacgaatatctttgttgttggagcgatccgagaaaaactcttgtaacgtgttggtttaccaggacctccttacaagtgatgagcttctctctgactccttccgttacaaggaaattgagaatggaatgctgtgggaagttgaggggaagtgggttgttaaaagagcagttgatgtagacattggtgcaaacccttctgctgagggtggaggagaagatgagggagttgatgatgcagctgttaaggttgttgacattgttgacacattcagacttcaggagcaacccgcattcgaatagaagcagtttgttaccttcatgaagaggtttatcaagaatttgactcccaagctcgatgcaaagcaacaggaagttgttaagaagcacatcgagggagcaactaaatacctgctctctaagattaaagatttccaattttttggtggtgagagcatgggtgat

SEQ ID NO: 44771 - DNA, 399 bp, Glycine max
  Clone ID: LIB3093-007-Q1-K1-F11
catgtgaagtgggcgtggaaaccttagaaatctagcatctggcctggtaactcaacaatgggtggggggaaacttgccacccggggaaacaaacaagaatcaataactgatccacttttgtcaccatttatctgcaacgtgccttttccaaagtctaacaatttccatccagatgaaaactccaggtccaacaataaggatatagacattcctaatgcaaaaaggtatgggagtttttccttcaatatttgtaattgtgggaactggtaagttagcataacaagagaaaacttatagtggggagtgcatgagcagcatgacgtatagaagatttactttttctccctttggtggctttgctatcttctgttcttttttgcgggttaatgaggcttggaa

SEQ ID NO: 44772 - DNA, 288 bp, Glycine max
  unsure (1)..(288): unsure at all n locations
  Clone ID: LIB3093-007-Q1-K1-F12
gtgttatgggagataaattgttatcaacatttcaaagtccttctgggtccattcaaagaagaaaagggagtaggttgcctgaaaatatctacataaatattgacctcattcctaaaactgcaagaccttctattacatgcctcgctgttggaatgaagaagattgttaccacacacaataccaatgatatcagattatggaaattcaaaagcaagatttcttttgtaaattaagtatttaataccctgtacactgaatannattgtggattattttatagctgacatc

SEQ ID NO: 44773 - DNA, 394 bp, Glycine max
  Clone ID: LIB3093-007-Q1-K1-F2
ctcattcactggcctcaaggcaagcgcaggcaaagtgagtgccgccgcagttaaagtctcagctccgcaagccacaaagttctgcggcatcaaagctttcctcaaagacgttggaatcgctgttgtggccactgcttcgagcgcagttctagctagcaacgccatggccattgaagtgttactgggcactgatgacgggtctctggttttctcttccaactctttctccggggcccctggggaaaagatcgtgttcaaaaacaacgcaggtttcccccacaacgttgtgttcgacgaggacgagattcctaacggcgtggatgcagggaaaatctccatgagcgaagaagaccttctcaatgcggctggtgagacttacagcgttactttggat

SEQ ID NO: 44774 - DNA, 394 bp, Glycine max
  unsure (1)..(394): unsure at all n locations
  Clone ID: LIB3093-007-Q1-K1-F4
cccgggggggccgaggcgaacgaagatgtcnaagcgtggtcgtggtggttggttggggaacaagttccgcatgtcggggggtgttgcattggcggcgacggtgaactgcgccgacaacacgggggcgaagaacctctacatcatttcggtgaaagggatcaaaggccgtttgaaccgtcttccctctgcctgcgttggcgacatggtgatggccaccgtgaagaagggaaaacccgatctgaggaagaaggtcttgccagctgtcatcgttcgccagcgcaagccatggcgcccaaaggacngcgtctacatgtacttcgaagataatgctggtgttattgtcaatcccaagggagaaatgaaaggttctgctatcactggtcccattggaaaa

SEQ ID NO: 44775 - DNA, 377 bp, Glycine max
  unsure (1)..(377): unsure at all n locations
  Clone ID: LIB3093-007-Q1-K1-F5
caaaacctaaaaaatttattttcataccatccaactcaacaattgctgctcgtttaattattaccaccaacctcaaacaaacaaaaatcaataacttatccactcttctcaccatttatcttcaacactccttttccaaaatctaacaatttccatcctnattaaaactccacatccaacaataacaatatacacattcctaattcaaaaaatcatattaaaatttccttcaatattaacaaattttataaactgcatacaatcataacaacataaaacttattatcatcaattcatcaacaatatgaccaataaatatttactttatctccctttaccanctatactatctactcctcttttttaccatataataa

SEQ ID NO: 44776 - DNA, 373 bp, Glycine max
  Clone ID: LIB3093-007-Q1-K1-F6
ggccaatgctgacatagtaaaacaataacatgctcacatccaatcacatgtatcagggggggtgagagagattgcgaactatatcacatcacaaggacatctggcatcagaaagcactacacaattaagttttatgaatgaacacaagacagtacacgcgtcaacttagaatttacaaatcaaggatccaagcgaaatcacagcacaggaatcaacaaactgccaacaattgactgatcaagagatacaaaaatcagaaaccgaaagtgtgtatgaaaattacgcccttcaaacattacccaatacagcatctgtacgtattgaaacttataaaagcattcaagagatacatacagaaacaaaattcgctgtg

SEQ ID NO: 44777 - DNA, 470 bp, Glycine max
  Clone ID: LIB3093-007-Q1-K1-F7
cccacgcgtccgatctcaccactaagtttattattatcaaaaccaaaagctagcaggctacgttgcaaagcaacacatggcttctacagacaagcatggcgacactgaatacagaacatcatcttcaactccagctcctgcgggtgttgattactttaaatttgatgttatcctaaggtttgtgttatttgcagcatcactggtagctgttgtggtgatcgtcactggtaatcaaacagaggttattcttgtgccacagcctgtgccatggccagccaagttcagatacacaccagcctttgtgtattttgtagctgcattgtccgttactggcctctacagtatcattacaacacttgcatcactctttgccagtaacaagccagccctcaaaaccaagttgctcctctactttatcttatgggatgcgctgatattggggataatagcctcagcaacaggcacagctg

SEQ ID NO: 44778 - DNA, 500 bp, Glycine max
  unsure (1)..(500): unsure at all n locations
  Clone ID: LIB3093-007-Q1-K1-F8
gaanacccggggcggccgacgcgtacgggcccttgcccttggcgctgatctgattctttactccttaacaaaatacatgggtgggcagcatgattcccttggtgggtgcataagtggttcaactaaggtggtttcgcaaattcggactttgcaccatgttttgggtggtacacttaacccgaatgctgcatacctattcatcagaggcatgaaaacgctgcatcttccgtgtacagcagcagaattcaacaggaatgaggatggccgaacttttagaggcacatcccaaggtgaagcgggtctactatccaggcttgccgagtcatcctgaacatgagcttgccaagaggcagatgactggtttcggtggtgttgtcagttttgagattgatggagatctacataccacaataaagtttattgattcactgaaaatcccttatattgcggcctcgtttggtggctgtgagagcattgtggatcaacctgctattttgtct

SEQ ID NO: 44779 - DNA, 470 bp, Glycine max
  unsure (1)..(470): unsure at all n locations
  Clone ID: LIB3093-007-Q1-K1-F9
cttcagaagacatggcctcattgggtgggttacaaaatgtgagcggcatcaattttgttaggaaagagggtccaaaagtcaatgcaaagttcgagctgaagccgccaccatatccactgaatggtttggagccggtgatgagccagcagacacttgagtttcactgggggaagcaccacaagacttatgtggaaaatctgaaaaaacaagttgttgggacagagcttgatgggaagtcactagaagagattattgtcacatcatacaataagggtgacattcttccagctttcaacaatgcagcacaggtatggaaccatgacttcttctgggagtgcatgaaaccaggtggaggtggaaagccatccggngagcttctagaactgattgaaagagactttggttcatttgtaaaattccttgatgagttcaaggctgctgctgcaacacaatttggttcaaggtgggct

SEQ ID NO: 44780 - DNA, 215 bp, Glycine max
  Clone ID: LIB3093-007-Q1-K1-G1
caacaacccccccgccacccttcacgatttcctcgcccgcctcgaagacgagctccgcaagatccacgccttcaaacgcgaactccccctctccatgcttcttttaaacgacgcaatttcagttctgaaggcggaatcgcagaaatgcagggtcgcgcgtgattctgcgccggtgctggaggagttcattccgttgaaaaaggagcgtggtgatc

SEQ ID NO: 44781 - DNA, 338 bp, Glycine max
  unsure (1)..(338): unsure at all n locations
  Clone ID: LIB3093-007-Q1-K1-G11
gtgtagaattattatggacgataaaattctctctctgatccaagtgcatacgtaccccgggctcaggctcgatggtatatatgaatttaattatatgtgttaattaatataaagtcttttaattataattatcacgaggtatatattaattgtttctttttcttttctctatagttgttcctagaattctcaatttgttatgttgttatgaattgtaggaaattagttgatctacttagttgtgatttgtaaattggtgcgtgacgatgatccatcattttctgcatctaactgtatttagtggtgatgaattgaagcacgttattgtttgtgntnna

SEQ ID NO: 44782 - DNA, 451 bp, Glycine max
  Clone ID: LIB3093-007-Q1-K1-G12
cgtacgcttaacagtgccaaccaaggaataagggattaaaattgtccgttttgcggactcaaaacgttccgtttttggagaagataccaatgaaaaaaagttggtgaaaggaaggtgtagtagtgatggtgatgaatcaagagggattagagtgaagctaaagatgacaaaggaagaagcggcacgtttgctatcaaaatgcaaagaaggaggagttctcgagttcaaggatgttgctcgtgagcttgtggccctcccactgaaccgagttagtgttgtgtctgctttacacgaacgataatgatgcattgctcaaggtcttttatataaactcctatctcaatatgtttcattaagttgtattagtgaaagattcaaaaaactatatatatatatatatatatatatatatatgtagctgggtactctaggaaaattttaaagtttatgc

SEQ ID NO: 44783 - DNA, 305 bp, Glycine max
  unsure (1)..(305): unsure at all n locations
  Clone ID: LIB3093-007-Q1-K1-G2
gcgaaaaccaagagatggttagaggaaacaccttatatgaaaaatatcattcttatgctcggccttgttggtacctgcatggtgattggagatggtattcttacaccagctatatctgttttatctgccgntggtggcatcaaagtgaatcacgctgatttgagtaacgaaataattgtgctggttgctgttgtaatattaggtgggttattcaacatgcaacattatggtacaaaataaagttggttggctatttgctccaattggcccttctttggtttcttctaattggaggcataagaata

SEQ ID NO: 44784 - DNA, 178 bp, Glycine max
  Clone ID: LIB3093-007-Q1-K1-G3
ctttcctcaaccttctttcttcttatatatcgaacatggctaagtatcattcaagtgggaaaagctgttccattactgctatagccttcctgtttattcttctaatcacttatacaggcacaacagatgcacaatccggggtatgttatggaagacttggcaacaacttaccaacccc

SEQ ID NO: 44785 - DNA, 420 bp, Glycine max
  Clone ID: LIB3093-007-Q1-K1-G4
acgcgtacgatcacaaccgccatgctcaactagcttgaactgtatatttcgatattcaaatgggggacggccacaaatacccgagtgtcacgccttcaaccttacctcgccaaaagaaaccctccatacgacgatatcatggagctgctatggcacaacggccaggtcgtggtgcatagtcagaaccaacgttctctgagaaaacttccgccggtgaccaactcccacgactcctctcccgccggtccttcaatgactagagagattcgaccgctggtggagaatttcaatcagcatctcttcatgcacgaaggcgaaatggcttcgtggcttcactatcctatcgacgacgactagcctgcgttggatcaaagcttcggcgccgattttctctattctccgcctacgacggctaacaac

SEQ ID NO: 44786 - DNA, 468 bp, Glycine max
  Clone ID: LIB3093-007-Q1-K1-G5
attaagatcaccaaagtacttgtgagtgtatacccaacacaaactaagatcaacagggacgactacacccgcgtttgagaagttgagagggaacctatcatggagtattccacaccacgaccaatgatgggcaactaccaccaccctaatgctcaccgtgtcctcaacgagaagattgtttatgaggaggatgtgattggaggatcccgccacaaccacatgcatcaccaccaccctgagactcatgagagagtcaaggtggtggagtatgaacaagttcctgagaggcgcgttgtctatgaagagaaagttgcttatgacaacgatcgttactactctccaaggtattgaaattggacaaatggaagaacacctataacgtgttatcatgtggctttttattaggcaggctacctagtataccaaaagcaccactgtgcttgtactaaataaattcctgcttatata

SEQ ID NO: 44787 - DNA, 326 bp, Glycine max
  Clone ID: LIB3093-007-Q1-K1-G6
cgtacgcaaagtaccatggcttctgcgggtgttgatttccgatgctaagttaataacactcggtggggcttctgacaacgtgggagctgtacaaagccttctcttagtacggtgacttctatgaatcgaagattatcaacgatcgtgagactggaagatccaggggatttggatttgttaccttcgccttcaaggattcaatgagggatgcgatcgacgggatgaactgtcagaaccttgatggacgcaacatcactgtgaacgaagctcagtcccgctgaagccgctgtggaagcggtggctgttacagaagtggcggttgatac

SEQ ID NO: 44788 - DNA, 473 bp, Glycine max
  unsure (1)..(473): unsure at all n locations
  Clone ID: LIB3093-007-Q1-K1-G7
ggaaaaatggtttcgctgaaactgcagaagcggctcgccgcgagcgtgctcaagtgtggcagaggaaaggtttggcttgaccccaatgaagtcaacgaaatctccatggccaattctcgccaaaacataaggaagctggttaaggatgggtttatcatcaggaagcccaccaagattcactctcgctcacgtgctcgtcgaatgaaggaagccaagaggaaaggacgtcactctggatacggtaagcgtaagggtacaagggaggcaaggctttccactaaaattctatggatgaggagaatgcgtgtgctcagacgcttgcttcgcangtacagggaatctaagaagattgacaagcacatgtatcatgacatgtacatgaaggttaagggtaatgttttcaagaacaagagagttttaatggagagcattcataagtccaaagctgagaagggcagagagaagaccttgtc

SEQ ID NO: 44789 - DNA, 226 bp, Glycine max
  Clone ID: LIB3093-007-Q1-K1-G8
tttctctcaaacatttttcctttctaaccactaacaaactcaacggggccgtttcataacaaatgtgcgcccccaataatcccctaaactacttatacaggctcatcacatacactatcccatctctttaaatgcacaatcatcatcagcatacccaccactaattactttacgtcactcatcaatcaaaccaaccttcccaacatgcaaatttaccatccaagcc

SEQ ID NO: 44790 - DNA, 280 bp, Glycine max
  Clone ID: LIB3093-007-Q1-K1-G9
ccgggccggccgacgcgtacgcccacgcttcctctttgctgaaactgtatttttatgggctgcatattatttgctggtgttggtgcttttcaaacatatagttgctccctattcgtactagttatctattgaacgcaatgactcatcctggcagaaggctttcagtgacattaggtgcaataaaaattacctatattgaaggaaccaccacatgcaatgttataatccttggaataaaacaaatttaatatattcagtccaggttgctcttcaaatacta

SEQ ID NO: 44791 - DNA, 437 bp, Glycine max
  Clone ID: LIB3093-007-Q1-K1-H1
catcaaagtttcacttcagccttatcccggttaaggtttcgggttttgacccaacctttgacgtatgcgaactcttaaatttcggatcaagtctgagcaatctggttggtagaacctttggtcttagagagtcaagttttatgtctgaattagacgatcaaattcctactgccttcgatccttttgctgatgcaaatgctgatgactcgggtgctgggtcaaaggagtatgtgcatattcgcgtacagcagcgaaatggaaggaaaaggcctgccaaccgttcagggattgaaaaaaagaattcagctataacaagatacttaaagatgttaagaaagagttctgttgcaatggaacagttgttcaggacccagaactaggacaggttattcaacttcaaggtgatcagaggaagaatgtttctaccttcctggtcc

SEQ ID NO: 44792 - DNA, 379 bp, Glycine max
  unsure (1)..(379): unsure at all n locations
  Clone ID: LIB3093-007-Q1-K1-H10
cccacgcgtncgcttttctctctgaatactctctactcaatacattgcgctctagtctcgtgtcaggatattaattttaggttcttcgttacgcgttgtgttgcgttgtgcgtgagaaagtgcgcgtggtgaaaaagcatggcttctcagctcctgagacgaaccttcggaagtcgtttccttgcaaaccctagggccttctcctccgctgcttccactccgatccgcgccactctcttccccggcgacggcatcggccccgagatcgccgattccgtcaaacagatattccaagcagctgatgtcccaatagaatgggaagagcactatgtaggaactgaaattgaccctagaacgcagagctttctgacatgggaaa

SEQ ID NO: 44793 - DNA, 369 bp, Glycine max
  Clone ID: LIB3093-007-Q1-K1-H11
agcaaatgcagaaagaatttataaaacacatcaaagtataattcgctttatttcaaatttacacaagtattttcatactagaaatccgaattcacataattcttgtgacatctcctttttgtcacaagcatatgtattttttaatttattacacacccgaattattaacataaacatctataagttaagatctgtttttcaatatcatggaatttttttttttctgaaaaatgaaataaaggattctttttttggagcacaaggaatatttcattataaattaaaacataataaccctctcaattctgtaataaatcaatggacaaattggttaaaggatcattattatcaatatgacttatctaaaag

SEQ ID NO: 44794 - DNA, 205 bp, Glycine max
  Clone ID: LIB3093-007-Q1-K1-H12
cccacgcgtccgcttaaaattccatttagggacttcccaaacacgtcactaatcgtatcagcaatgcaccatgcgcttgagctgcaatggatgccgcgttctccgcagagggtgcaccactgagtgccccattcgcatctccctccaatggatcaattcccctaactcccaatccaacgcaaccctcttccttgcaaagttctat

SEQ ID NO: 44795 - DNA, 251 bp, Glycine max
  Clone ID: LIB3093-007-Q1-K1-H2
atttctagcaatggccaagatcaaggggtacgagctgatgcataagacgaatgctcatcttctttatcaactcaaagacctgaaagcggagcttggcttgcttcgtgttgctaacgtcaccggtggtgcccctaacaagcttctccagatcaaggtggggaggttgaacattgcccatgttttgacggagatttctcataagcagaaggctgcgttgagggatgcctacaagaataagaagtacttgccta

SEQ ID NO: 44796 - DNA, 187 bp, Glycine max
  Clone ID: LIB3093-007-Q1-K1-H3
tctactcgttcgtccactctgtctgtatttcttggtcgaggtatcacactcagaagccacataataacagagtgcctcctctaacaacactctatcggcatgaattatgagctcgaaggcacgaccgactgttctgggcccgcggataaagaccacgacccaacatattgctccgccgatagaccct

SEQ ID NO: 44797 - DNA, 254 bp, Glycine max
  unsure (1)..(254): unsure at all n locations
  Clone ID: LIB3093-007-Q1-K1-H4
gggggcgaccgcacgcgtacgaaaataatccatcatccaatgtattattttttctcctctacttctanaangatgtgagagaggttcatagtcagatagaagtacacgaggcaaaataatccatcatccaatgtattttttgtacatagaatcatcctctcttactgtaaaagcttaaattgaaatggaaaatttcgatctagaaaagatctatatggccaatcaatcaccactataataaaaaggattttact

SEQ ID NO: 44798 - DNA, 367 bp, Glycine max
  Clone ID: LIB3093-007-Q1-K1-H5
aaaactcagaaccctaactatatccatggcatcgggtggaacagaagcttttccagattggggtaaacactgccagcaccgcgattgcaaccagctcgattttcttcctttcacctgcgacggttgccaacagatcttttgtttggaacacagatcctacaagtcccacgcgtgcctgaaatccgaccacaacagcagaaaggttgttgtttgcgaagcatgttccatgtccatcgagaccaccggccatgtgggacaagacgaggaggcaatcttgcagaagcacctcaagtctggtaattgtgaccctaccaagaagaagaaaccaatttgtcccgtcaagcgttgcaaggagggtttgacgttt

SEQ ID NO: 44799 - DNA, 153 bp, Glycine max
  Clone ID: LIB3093-007-Q1-K1-H6
acgacggcgacctacgcgtacgcccactcatactcttgtatgagatgttaatatctaatcctccttcctcgattgaagaggggggcattgaggatgagctcatctacatccctctttttgccgacaatgattttctatcacatacgcatacac

SEQ ID NO: 44800 - DNA, 458 bp, Glycine max
  Clone ID: LIB3093-007-Q1-K1-H7
atcgcgaagactagatctgatctgagagaatggctcctcggtctagcagcaaggacgcccgggaccttttccgcgctctttggtctgcttatgctgcaacccccactaatctcaagatcattgatctctatgtcatctatgccgtattcaccgctttcatccaggttgtttacatggctttggttggatcatttccatttaactccttcctatcaggagtactttcttgtgtaggaactgctgttcttgctgtttgtctcaggatccaagtgaataaagagaataaggaattcaaggatcttgcacctgagcgcgcttttgcggattttgttctctgtaatttggtgcttcatttggtgatcatgaacttccttggttaaattgggtttgtgtggccggtggtggttctgattgaacccttggataataaaaattaaatagtagtatacctagacttt

SEQ ID NO: 44801 - DNA, 478 bp, Glycine max
  unsure (1)..(478): unsure at all n locations
  Clone ID: LIB3093-007-Q1-K1-H8
agctaagaggcgcagccgtagcaaaagctcgtggaattgctagcaatggcgaggatcaagggttacgagctgaggcagaagacgaaggctgatctgctgaatcaactgaaggacctgaaggcggagcttgccttgcttcgtgttgctaaggtcaccggtggtgcccctaacaagctttccaagataaaggtggtgaggttgaacattgcccaggttttgacggtgatttctcagaagcagaaggctgcgttgagggatgcctacaagaataagaagtacttgcctctcgatctccgccctaagaagaccagggctattcgcaggaggcttactaagcaccaggcatcattgaagacagagagggagaagaagaaagagttatatttcccactaaggaaatatgctatcaaggtgtaactntagagcaatcttatcggttaattggacatttacctnctttatactcgacaagttttga

SEQ ID NO: 44802 - DNA, 280 bp, Glycine max
  Clone ID: LIB3093-008-Q1-K1-A1
aatccttattgtatttgatcagccaaggatattatcttgtcacagttgtcagaattgtctagactgtgacttaaatcatttgaagaggccaagcacacaagctctatggagaaagaggcagcgctactctggaaactcggcatgaagatcatttccccaggaacacattcgaatacaccgtggctgcactcctctacttgttcgcttggcctcttcacatgatctaagtcacagtctagacaattctgacaaccgtgacaatgaaatatccttggctgat

SEQ ID NO: 44803 - DNA, 213 bp, Glycine max
  Clone ID: LIB3093-008-Q1-K1-A12
ctaaacttcacttcacactctcactttaggttcaatttttagtcatattcacccctttccggataagttactatcattttaacgaccatcctacaactctctcaatggtattcacccatagaatactaacaattacaatcaccaatatgttaacctggaattctacatacttcacagctcttgaatgagacacatgaactcatactatctatt

SEQ ID NO: 44804 - DNA, 353 bp, Glycine max
  Clone ID: LIB3093-008-Q1-K1-A2
aattacccgggttcgagcccgacgcgtcacgtaatccgttattgtaatttgaatcatgccataggagtattatctatgtcacgagttgtcacgaattcgtctaagactgggatcttaaatcatttggagagaggcccaagcatcacaagctctatggagaagagaggcaacgtcatactctgagacatcatcatgaatcctcatttcccacaataacacatattgaatacactcgtggctccactcctctactcgtttgcttggcctcttcacatgatctaagtcacagtttagacaattctgacaaccgtgacatgataaaatccttgcctaatcaaatactttagggattc

SEQ ID NO: 44805 - DNA, 105 bp, Glycine max
  unsure (1)..(105): unsure at all n locations
  Clone ID: LIB3093-008-Q1-K1-A3
nccacgcgtccgnccacgcgtccggttacaccgctgggaataatcttcgcggagaacacaaagtggctttttttggcatatttgatgggcacggtggtgcaaaag

SEQ ID NO: 44806 - DNA, 323 bp, Glycine max
  Clone ID: LIB3093-008-Q1-K1-A4
agctaaaacaatacttcaggccagaatttttgaatagattggatgaaatgattgtcttcaggcagctcacaaaactggaggtgaaggagattgctgacataatgctcaaagaggtgtttgatagactgaaggtgaaagatattgaacttcaagtgacagaaagattcagggacagagtggtggaggaaggttataaccctagttatggagctagacctctaagaagagccataatgcgacttttggaggacagcatggctgagaagatgcttgccagagagatcaaggagggcgactctgttataagtgatgttgattctgat

SEQ ID NO: 44807 - DNA, 244 bp, Glycine max
  Clone ID: LIB3093-008-Q1-K1-A5
aatccttattgtatttgatcatgccactactatatcttgtttgcttaccttcaacaaatcaatgatccactcaaccccattcccattcccaatccacctctttctcttttcttcgcaaaacgccccattctcaacccatcaatttcagtctctcttcctttcacttttcacgcctatcccttatcacaaccaaacacacccttaacctcacttccacacatgccttcacttccgaacaacaaac

SEQ ID NO: 44808 - DNA, 341 bp, Glycine max
  Clone ID: LIB3093-008-Q1-K1-A6
cgtgcacattgctgagagaatgcgcagaaaaaatgcatcattgccaatgataaggggtggagaaggagtcactcctcttcacttggctgtgttacaaggaagaagtgaaatggcttggtatctgtttgataaaactagagaaacactgtacgatgatgattggtttcaagtgtttctcatttgtgtaaactctcgactttatgaactggccctggaaatgctcaatcagaaggaatcgctagcttttgctcggggtgataacgatgagacagctttgcatgttttggctcgaaaagccttggattgtggttgccgaagtccgctacgatatccaaaacacg

SEQ ID NO: 44809 - DNA, 343 bp, Glycine max
  Clone ID: LIB3093-008-Q1-K1-A7
gctatccattcctgcccctggtcaaataggctatggttggatggctttctcaacctgagactggtgccttactgcaaaggagctatctgatctaagaaatcattcgctataagggactgaatttgagaactgacatttattagatactttttcaacaatcgtgacattttccctctcactactgctataatccgactgtatgtaaaacaggtccattatgcacaactcatagtattggagctgtatgtaaaataactacatcatgtatattgtgcttccatattccccttttgagaaaaaagattcttgatatagaaattttggcactcatcttttcgattat

SEQ ID NO: 44810 - DNA, 371 bp, Glycine max
  Clone ID: LIB3093-008-Q1-K1-A8
gtaaaatcttggtcctcctcatccacaacacaaagatcaaatcctacgcaacgtgtggttaaaccaaacccgcgtgctccttttccatttctcatttccttcaagtacttcagttctcagcacaccacatcacctttgcagcagcctccataatattccaattcatcaccctcttttcaatattcccttattatcgctttgattcgctgatttttttaattctttacctcaattttaataagaatcagtttttgtagttatgatttgttgtagtaagattaattaactattcagattcagttattgccagctttgatttcttttttattgttcttaaattaggtttgcaagtaaaccccaaccccaaaccc

SEQ ID NO: 44811 - DNA, 432 bp, Glycine max
  unsure (1)..(432): unsure at all n locations
  Clone ID: LIB3093-008-Q1-K1-A9
gcggcttcgctcgctcgctcgctctctcttcccttaccctctgctgcggcgaaaaccgatacgagaccgttggccgttgaatgaatcttccaccacacgattcgatcaatctcaatggcgtgttttgattggtaaagtacgcgcgacggaacgaggcatggcagaagtggctaaaccgagttctgtgcctccgagctctcatcgaattggttcaggacctttgaaaagtggatctttggttagaaagaagacaccgtcagaacttaggggagagttgttgaagcgggcaagtaatgtggaccttactgatgaatctcaatccaccttggctgatcctacgaagaccactgangtggacaatggatttaaaaaacaagttatggaagcccctatatcacagacacacgggtgatgaagatttgtgcaaaaagc

SEQ ID NO: 44812 - DNA, 400 bp, Glycine max
  Clone ID: LIB3093-008-Q1-K1-B1
ctcctccaccaaggtctgcaccagcacctgcttttggtccatcctctgaaccagctactttgattgttggagaaaccgctggctggattgttcctggcaacgcttccttttacacagcttgggcctctggcaaaaacttcagggttggagacgtccttgtgttcaactacgcatcaatacacacaacgtagaggaggttacaaaggccaacttcgatgcttgcagctcagcctctcctattgccactttcaccactccacctgcgagagtgaccctcaacaaatctggtcaacatttcttcatctgtggaattccagggcactgtttgggaagtcaaaagcttgccatcaacgtcaccggcagcaagaacggcaccccacctttcggcgcgggccccccc

SEQ ID NO: 44813 - DNA, 391 bp, Glycine max
  Clone ID: LIB3093-008-Q1-K1-B10
cccacgcgtccgcccacgcgtccgctttaaccgaaacccctagttctattcacgcgattccggagaaccagagcgtcttctccagagaattgaacttttctgagtatggtttcgacccaaagactgggaacaatcagaatcaccattctctgaagccggaatccggcgagattctcagcttcggcgagagcaagagaacctcctacggcggcgtcaatgggaattccaattccaattcccattttttctccggtcagtcgccgtttgttgctgctgcggatgagaacaccaacaaaaataacatcaacaacaatgggaggacaaagtcaccgaattcgcccggtaccaccgacaacggattgctttccttaacttccggcgggatttttcc

SEQ ID NO: 44814 - DNA, 458 bp, Glycine max
  Clone ID: LIB3093-008-Q1-K1-B12
gacgcccacgcgtccgcccacgcgtccggtaacgcatagctttcaattggagaaaaagagtgttaggataggttacatgctatctgctagagctctcagcattatttggggtgacactgagcaatactggaactggacaaccgataccaattccaggtcagacccttcagtttttctattgtaatttttggatcatggttagtgtatctgcctatcatgatttctgggatattctattttttctgcaacgagataattgcaattataactgtcatgttaccagtgatatctggctagtaatctacgaactattctagcagaatttaaattaaaaaaataaaaaaaaacgtcttactgtgtttggatggagtatttcaaaatttcaggaaatttaaaattcaggaaaattaaaatgcatcaattaaatccttgaatttttaaaattccttctttgaata

SEQ ID NO: 44815 - DNA, 289 bp, Glycine max
  unsure (1)..(289): unsure at all n locations
  Clone ID: LIB3093-008-Q1-K1-B2
gtggaaatgtcgggatcggaggacgagggaggagaagagtacctcttcaagatcgtcatagggggagactctgcggtgggcaaatccaaccttctctcccgctacgcccggaacgagttcaacatgcactccaaggccaccataggtgtcgagttccagactcagtgcttggaaatcgactccaaggaagtcaaggctcagatttgggacaccgccggccaagagcgattccgcgccgtcacctncgnctactaccgcggcgctgtcggcgccctcattgtctacgaca

SEQ ID NO: 44816 - DNA, 323 bp, Glycine max
  Clone ID: LIB3093-008-Q1-K1-B3
gcacagaagaagaagacgaagaagaagaagaagaagaacgatagtaatggaaatcaagcccggtttgtcagcactcgttaccggtggtgcctctggaatcggcaaaggtcttgcactagctcttgcacagaagggtgtatttatcacgatcgtggatttctctgaagaaaagggaagacaagctgcaatcctcgtcgagaaaattaactccaattttcattctaagttaggatttccgtctgccatatttgcgaaatgtgatgtgagtaatgcaagggatctagctgctgcatttgacaagcattttttgacatatggaggac

SEQ ID NO: 44817 - DNA, 375 bp, Glycine max
  unsure (1)..(375): unsure at all n locations
  Clone ID: LIB3093-008-Q1-K1-B4
cccacgcgtccgcccacgcgtccgggtagttggtagttatagttgttgtcccagatatggaagaagcaggtttaggagattgttgttcctcgaattcgacgattacgaggaagagcgataagcgaaagcagcaacaccaacaacaagagaagccatacagaggaataaggatgaggaagtggggcaagtgggtggcggagattagagaacccaataagcgttcgaggatctggctgggttcttacgccacccccgtcgccgccgcacgcgcctatgacaccgncgtcttccaccttcgaggccctttcgctcggcttaacttccccgaattgctgtcccaggacgacgacgtttcgacccaacaacagggcaaca

SEQ ID NO: 44818 - DNA, 383 bp, Glycine max
  Clone ID: LIB3093-008-Q1-K1-B6
cccacgcgtccgcccacgcgtccgggaaagtccaacttgcaaaagagcttggcttgcggccaaggcaagttgctatatggttccaaaaccgaagggcaaggttcaagaccaagcagctagaaaaagactatggcgtgttgaaagctagttatgacagactcaaaagtgactatgaaagtcttgttcaagagaatgacaagttaaaagcagaggtgaattctctggagagcaaattgattcttagagataaagagaaggaggagaattcggatgacaagtcatctcctgatgatgctgtcaattcttcttcaccccacaacaccaaggagcctatggattaattaattatttcaaaaaatgcaccaccaccaccaccatctgaa

SEQ ID NO: 44819 - DNA, 302 bp, Glycine max
  Clone ID: LIB3093-008-Q1-K1-B7
attcggtcgaccacgcgtccgtgaggtggaactaccctcaattggaatgccatgaaccaatctccaaacccgtggcgcgtgggattctcgtatgccagagcccttcaaaacactgacttgaagacatggggaggcctgccagagaacgtgaaggcagcacaagatgcactcgcattccgtgccaagtacaactcactcgctcagcttgggaagctcactggtgagggtgaatcccaggtagccataaaggagttgttcgtcaaaagctactactactaagatggttgcagtgaacatgatac

SEQ ID NO: 44820 - DNA, 318 bp, Glycine max
  Clone ID: LIB3093-008-Q1-K1-B8
acgttcaaaagctacaatgggaggttttggaagccaaaattggtaactggattcatttcatgcgtattgctgtgaaagtgttgtttgctgctgaacggaaagtttgtgatcagatatttgaaggatttgactcacttagtgatcagtgttttgctgaagtaactacaaacagtatttccatgctacttagttttggagaagcaattgccaaaagcaagagatcacctgaaaagttatttgtacttttggacatgtacgaaatattgcaagagattcatgcagagattgaaatactctttaaaggctcagcttgcacta

SEQ ID NO: 44821 - DNA, 346 bp, Glycine max
  Clone ID: LIB3093-008-Q1-K1-B9
cccacgcgtccgcccacgcgtccgtccaaacccaccacaccaccattattcatatctcattcgctaggctttcactctgccttactcactctctactttgctcatcatcgtagatgaaccaacacttctagtctctcttactttataaccatgtaaaaatgagtcacctaatgaaaaattagtagcttcttgttgtgctttttattttgtttgtgttgagataaatttgtttgtttgtttggtattgttttgtgttttatgaattatttgatgggtgaagaaggagaagtggtgagaaagcaaggacaaaggggtgttggtggagataagtggtacttgtatagct

SEQ ID NO: 44822 - DNA, 381 bp, Glycine max
  Clone ID: LIB3093-008-Q1-K1-C1
gttgacctcatctacttcgatggaattcgcgtcttcttcatcatccttcccaaaatccaaagcccgatggacatacgatgtgttcatcaattttagcggagaagatctccgtaagaatttcatttctcatctctcttatgccctttcaaaagctggaatcaacactgtccttgacggccaacaaatggagctggaagaactaatcaaaccagaaaagtctcagatctcaatagttgttttctccaaaagttatactgaatctacttggtgtcttgatgagcttgcaaaaatcattgaaatccatgaaacttatggccaaagagttgtggtcgtattttacgaaattgacccatcccatgtacgtgatcagaagggagattt

SEQ ID NO: 44823 - DNA, 417 bp, Glycine max
  Clone ID: LIB3093-008-Q1-K1-C10
ctccgtctctctactctcttattctcaacgtcaaacccaaaaccccttcttcttcttcttctctcgcgccgcaataataatactaaaacatgtccaactctgacggagccactaacgccgtccctcccaacgacgccaacaacaacacaatcgttgagtaccagcagcgaaccaccaccaccaccgccgccgccgccgccctcgccgtcaagaaaccgccttccaaggaccgccacagcaaggtcgacggccgcgggcgccgcattcgcatgccgatcatctgcgccgcccgcgtcttccagctcacgcgcgagctcggccacaagtccgacggccagaccatcgagtggctcctccgccaggcggaaccctccataatcgccgttaccggttccggaacaactccggcaagctttt

SEQ ID NO: 44824 - DNA, 352 bp, Glycine max
  Clone ID: LIB3093-008-Q1-K1-C11
cccacgcgttcgcccacgcgtccgcagagaactagtctcctactctcacccgcaagaaaagggtggcgtctcacatcgttggatacccccgtatgggtcccaagagagagctcaagttcgctctcgagtctttctgggatggcaagagcagcgccgaggatttgcagaaggtgtcttctgatctcagggcatccatctggaagcagatggctgatgctgggatcaagtacatccccagcaacactttctgtcactatgaccaggttctcgacgccaccgtcaccctcggtgccgttccaccaatgtacggctggaccggcggcgagattgcgtttgatacctacttctgcat

SEQ ID NO: 44825 - DNA, 324 bp, Glycine max
  Clone ID: LIB3093-008-Q1-K1-C12
attagtccctactcaacacgcaatatggattgtcaaatagtactgacgaggccatgtttgtgattgaggcttataagactcttcgtgaccggtgtccataccctgcgaatcaagtggtcaaggaacttgatggcagttttgctttagctgtctatgacagcaaggttggcagtgtctttgcagcactgggttctgatggatgagtgaagctgaatcggggtattgcaactgatggatctgcggtgatctctgatgatctagaagtcataaaagagggttgtgccaaatcctttgctacctatgcacagggtgtatgtttcacag

SEQ ID NO: 44826 - DNA, 306 bp, Glycine max
  Clone ID: LIB3093-008-Q1-K1-C2
cccacgcgtccgcccacgcgtccgggcctgtcggcgctgccggaccagcgcagatccgacgggatgctcctgacgccgtgcgggacgccggcctacgtggcgccggaggttctgaagaagaaggggtacgatgggtcgaaggctgatatatggtcctgcggggtcatcctctttgctcttctttctggctatttgccctttcaaggtgagaatgtgatgagaatttacagcaagtctttcagagccgattatgcgttccccgaatggatttcccctggggctaaaaacttgatctccaatttactc

SEQ ID NO: 44827 - DNA, 187 bp, Glycine max
  Clone ID: LIB3093-008-Q1-K1-C4
gtttaataaatggctgtacatttttttacttataatatgatcacaattaacaaccatgcacagcctgaccatgcacaaccttaaaaaaatgtacagccatttattaaggttgtgcatggtaaggttgtgcatggttggtaatggtgatcatattataagtaaaaaaatgtacagccatttattaatc

SEQ ID NO: 44828 - DNA, 275 bp, Glycine max
  Clone ID: LIB3093-008-Q1-K1-C6
caaacacagacagacagagagagagaaagagaaccaaaccaaataaagctcttggttggttgacccttgtgcttattttttgttgctgagaaagagcaaagaagaagaataagaagaaggttttgatcggatgcgatgagcacacaaggacaagtgattgatgaggcggttctggatgacataatccggcgcctaacggaggtccgattggcccgacccggaaagcaggttcagctctccgagtctgagatcaagcaactttgcgtcgctttcag

SEQ ID NO: 44829 - DNA, 363 bp, Glycine max
  Clone ID: LIB3093-008-Q1-K1-C7
acggaggaccagtatatattacatactgctgaggcccagaatattacccttccattcgcgtgcgggcatggttgttgtactagctgtgctgtacgtataaagaatggaaagattaggcaaccagaggcactagggatatcggccgaattgagagacaagggttatgcacttctttgtgtgggcttcccaacctctgatgttgaagtggaaactcaagatgaagatgaggtatataggcttcaatttggacgttattttgctcgaggaccattgtaaagagatgactatgccttggagttggccatggctgacgagtaagcaatgtataaaatctgacaattattggaacaaagaatgtgaata

SEQ ID NO: 44830 - DNA, 322 bp, Glycine max
  Clone ID: LIB3093-008-Q1-K1-C8
tcgcttacaccatgtgatttgaatgcagataatgtctatagtccaactgctggtgcagcggtagcgagtcatatggatgttgacaagctagcattcactggatctaccgagactggaaaagttgtgcttggattggctgcgcaaagcaatttgaagcctgtgacattggaacttggagggaaatcacctttcatagtgtgtgaggatgctgatgttgaccaggctgtagaacttgcgcactatgctttgttctttaatcaggggcaatgttgctgtgctgagtctcgtacctttgtacatgagcatatctatgatgaggtct

SEQ ID NO: 44831 - DNA, 387 bp, Glycine max
  unsure (1)..(387): unsure at all n locations
  Clone ID: LIB3093-008-Q1-K1-C9
gcggtttgttacaaggctctactctactgctgcacttggtgctctagaaaattcagtggtgatagatcgcgtcngctactctctctgtagccaaaccagcccttcaggcaaatgggaaaggcttctctgaattctctggcctccgcagctcatcaggcttccttcccttttctagaaaatcttcagaggatttccattctgtcattgccttccagacctatgcagttggaagcagtggaggatacaagaagggtgtgacagaagcaaaactgaaggttgccataaacggatttggaaggattggaaagaacttcttgaagtgcttgcacggtcgcaaagactcccctcttgatgtcattgccaataacgacacccgttgccttaaac

SEQ ID NO: 44832 - DNA, 410 bp, Glycine max
  Clone ID: LIB3093-008-Q1-K1-D1
gtagaacactgcgactcttcacacttttcttcttcccttcgtcttcagcttctgcttcttcggttgttgctgcttcaaaacagtgagaaaaatatggggttctcctcctttctgggtcgcgtcctctttgcttccctcttcatcctctcagcatggcagatgtttaatgaatttgatgacactggtggacccattgcaaaggagttgattcccaagttcactgttctgaagagaaatttatcctccaaactgggggtaaagacaccagatattaatgtgcggtcagtcattgcctctatcatatttctaaagggggttggaggaattctattcgtgcttggcagtacatttggatcttatcttctgctcttgtatctggggctttctactccaattctatatgattttta

SEQ ID NO: 44833 - DNA, 438 bp, Glycine max
  Clone ID: LIB3093-008-Q1-K1-D10
gtcgccggcgccgcggcggccggatacggcctcggctcccgcttcggcggaagccgctacggtgcgctcggtggagctgtcgccctcggcgcggccggcggtgctgcggcgtacgctctgaacgcggctgctccgcaagtcgccgccgtgaatttgcacaactacgtcgccgcgttcgacgacccttcgaagctgaagaaggaagagattgaggccattgcgtccaagtatggtgtgagcaagcaagatgaggcattcaaaactgagatttgtcatatatattccgagtttgtatcttctgtgcttcctcctggtggtgaggaacttaaaggtgatgaggttgataggattgtcagcttcaaaaattttttgggaatggatgacccggatgctgctgctatgcccatggaaatgggaaggaaatttttaaggcaaagg

SEQ ID NO: 44834 - DNA, 407 bp, Glycine max
  Clone ID: LIB3093-008-Q1-K1-D11
gcgaaaacagcatcgaacccgtcgtagcagaaaaacttgtcaccatggtttcttccgacaaggagccacgggaggatgtccttcaagcctggtacatggatgatagtgatgaagatcaaagactcccccaccacaaagaacccaaggagtttgtctcgttggaccaacttgctgaacttggagtccttagctggaaactagatgctgataaccatgaaaatgatccagagctgaagaagattcgtgaagagcgtggttacacctacatggatgtttgtgaggtctgcccagaaaagttgccaaattatgaacagaaaatcaaaagcttctttgaagagcatcttcacactgatgaggagatccgcttttgtgctgctggaagtggctattttgatgttagggatcgc

SEQ ID NO: 44835 - DNA, 343 bp, Glycine max
  unsure (1)..(343): unsure at all n locations
  Clone ID: LIB3093-008-Q1-K1-D12
gcgtgattaaatgaatcggggtattgcctggcatcaagtcataccctggaatgaaataagacagagtaacgttcntcttaaattccttggtagttacataatacaattttagatattcattgaaaaaaatgttgacttgaaccttttctgaatgccaggaggattgcacaagtaaaagagaaccaatgtcaaattgctgtagaagatgttatgtacttgctgattttttacaagttttctgagatcagggtccctatggttccaaagctttctagttgtctttataatggcaggctagagatattgccttctaaggactgngaactagagtctattcatagct

SEQ ID NO: 44836 - DNA, 354 bp, Glycine max
  Clone ID: LIB3093-008-Q1-K1-D2
gctgcctgaatgaaatgagagaacatttccagtatgcatgccctctctgctcaaagtcagggtgtgacatgtcaaaggtttgggagaaatttgaccttgagattgctgctacacgaatgcctgagcaatatcaaaataaaatggtttggatcctgtgcaatgactgtggtaaaacttctcacgttcagttccattttgtggctcaaaagtgtccgaactgcaaatcctacaacacacgacaaacatgaggcggagcatgtggccacgattattcattggcttcatcaaaagccttcactcgagagctctcttgatgttgtcgtgacttgtgaaagcagtgaaaatagatgtgca

SEQ ID NO: 44837 - DNA, 296 bp, Glycine max
  Clone ID: LIB3093-008-Q1-K1-D3
cttacgcctacggtcacacagaatatcacgtgtctgtatctacactctgcgtcatctatatgggagtcattcttatatatcagtcgtacatccttgtacatggggactgaagatcattgcaagttctatatcacgaggcaatttgctagctcatatgatgaccaatgcgatcttactcctcatggcttgaagaccttctcttgccgatctcttgctgcaaacgatcattctgagctgttaatgtagctgtgccacgactgcgacatggaatgcagcatcacttttgtaagacagcg

SEQ ID NO: 44838 - DNA, 390 bp, Glycine max
  unsure (1)..(390): unsure at all n locations
  Clone ID: LIB3093-008-Q1-K1-D4
cccacgcgtccgggatcttatcatatcatattgcaaggccgattctgatgattcattgtccgaaggaaatgcaggttctattaatgtcagcaacattttaactggcaagtgtcttgcaaagataagagcaagtaatggcttacccatggtgaaggaatgcagttgcagcgatgacaattgttcaagtagtgcttgcaattcagggaaacgaaagcgttcctccagaattaggagcacagttgcggaagccttggaagacattactgctctcttctacgatgaagagcgcaacgagatctataccggcaataggctcggtctggttcatgtctggtctaactaaagcactgttaaacttattcttgccttgnggtttctcattagcattta

SEQ ID NO: 44839 - DNA, 212 bp, Glycine max
  Clone ID: LIB3093-008-Q1-K1-D5
gaaagactgcaacgactcacgaaagtggctaccatcagtactacaatcgcaccgagagacgcagtgatttgatagacccaatcattgccattaactgaatgtacaccttaaatcccgtttaatatctactgcgttcgttactttctaacgggcagctatatcatcttatgaacatatctgagtatttcacccgagaaataagggatacgtat

SEQ ID NO: 44840 - DNA, 410 bp, Glycine max
  unsure (1)..(410): unsure at all n locations
  Clone ID: LIB3093-008-Q1-K1-D6
cgggggttcaatcacaatggcttccgcagtgagggtggctttgagatccttcggtagtcgggctagaagcttcgtcaagagctcaaccacgccgtttgtgttcacttcgtcttccgcatcgtgcatctctcgtgcttcgagggttttgtcggttatgataagcgttgattcgttgatgcctcttcacagtgctgtcgctaatgctaggctcacctccaatatcgccttcgattccacctgctggagctcgctttctcgaggtactacttctctccttgttattttactcgttttgagttatctntttgcgcaataatcgcaattaacaatgatcttatggatgatggatatgttctagaacacacacacgcatgcttgcgtaattgcttctttttttttataaaaataat

SEQ ID NO: 44841 - DNA, 341 bp, Glycine max
  unsure (1)..(341): unsure at all n locations
  Clone ID: LIB3093-008-Q1-K1-D8
ggggaatggttcctccctcagttgcttccttcctcttgtgtccacccagttcccccgttcagtttccattcaataattcaaacaccagttaatggctacccttctattccaccacaattcgcctcagatattctcttcctccttcttcttctcacagcattaaacgccgtcgttttcatgactccataattcaccggaagcagaacaacaacaagaagcagcagcagcagcgcgagttcacatgggattgggaacaaccgcgagaagcagaagaagaatcgtcatcgaagaaggttctagaacangaacacacaacaacaccaacaacgccgatgccgatg

SEQ ID NO: 44842 - DNA, 379 bp, Glycine max
  Clone ID: LIB3093-008-Q1-K1-D9
gcggtggcattgtgggcggagcaatggccggaaaacaggtcggcggcgagggcctatcggttaacgctgggtggaatgtcgaagaaccagctctacgatatcatgtctcagatgaagagtttgatcgaacagaaccagcaacaggccaagcagatcctaatccaaaaccccatgttaaccaaagcgcttttccaggcacaaattatgcttggaatggtgcaagcacctcaaacggttccaaaagttcagccaatggttccgcagaacaatctgcagtcagtacaaccaacacaaaaaccaaatattcagcctgctccattattgcctgggcttggtggtgcacaggatcaagcaggtgtatctcaaacccagattcctc

SEQ ID NO: 44843 - DNA, 376 bp, Glycine max
  Clone ID: LIB3093-008-Q1-K1-E1
cccacgcgtccgcttcgccgtttcagctgaagagccatccgcaggtaagcaatggttaagcagaataatgttatccccaatgggcacttccggaaacactggcaaaactatgtgaagacttggtttaatcaaccagcccgaaagaccagaagacggttggctcggcagaagaaggctgtcaagattttccccaggcctactgctggatctctcaggcctattgttcatggccagactctgaaatacaacatgaaagtcagagccgggagaggattttcactggaagaattgaaggctgcaggaattcccaagaaacttgctccaactattgggatttctggtgatcaccgcagaaagaatcgttctttggagagtc

SEQ ID NO: 44844 - DNA, 439 bp, Glycine max
  Clone ID: LIB3093-008-Q1-K1-E10
cagatatgaaatcctaggctacgaaaacgcgaataaagcatgaaaaggcaattttccccatggactagatacgtgtacacggtggtctttattgttggtgatgaagacgaggatgtggaggtcgtagccgggagggtggtacaagaacggagtggaaggaaagctacgaagaagatgagtaaaaaatctgatacagagggtgcaccgtataaccatgtgcacaaaattaatcctatgatatataaaagtgatccacaataaatccctaacacaactagactagtccaccttaacttttttgaataaaatagtttaattatcaattaactttatcaaaaagacaactttttatactataattaatgtactggacaaaacttaatttgataaaaccattaacttcacctattcccttaacatttattaaaaggtatttaag

SEQ ID NO: 44845 - DNA, 356 bp, Glycine max
  unsure (1)..(356): unsure at all n locations
  Clone ID: LIB3093-008-Q1-K1-E11
cgaaacagtttccatctctctcacaaaatgacaacaatatcaaattgctcccttctcttcctgttcctggtcctctccaccctccacatagcttccaccctctcaacccccaccaacttcatcaagtcctcctgcagcaccacccagtacccagccctctgcatccagtccctctccgtctacgcctccaccatccagcaagacccccacgagctcgtccagacagccctctccctctccctcaaccacaccgaggccaccaaaaccttcgtcgcaaaatgcaacanattcagaggcctcaaaccgagagaatacgctgccttgaaggactgcgctgaagaaatcagtgacagcgt

SEQ ID NO: 44846 - DNA, 248 bp, Glycine max
  Clone ID: LIB3093-008-Q1-K1-E12
gcggtaaagactaaagagagttgtggcgtggtggtggctgtcgctattgaaatggcagcgtcgtggtcagagaagcatgtgatggtgataggcatatacgactgtgagcagagcacgtacgcgttgaattgtgctgtggataactttattccgagcccaatttgtaagctcgttcttatgcactccaggcccacctccacctacactgtgagcttctcctgccctgagaggtttattctgttacgctc

SEQ ID NO: 44847 - DNA, 460 bp, Glycine max
  Clone ID: LIB3093-008-Q1-K1-E2
cccacgcgtccggcatctctcgctttgtgttggaagaggggaatcgtagatctgatttctggctttcttttaataataattttgtgatcagaattattgagctgaagaaaagacaatgggattgtgggaagcttttctcaattggctacgcagccttttcttcaagcaggaaatggagttatctctaataggacttcagaatgctgggaagacttcccttgtaaatgtagttgctactggtggatatagtgaggacatgattccaactgtgggattcaatatgaggaaagtgacaaaagggaatgttacaaataagttatgggatcttggaagacaacctatgttccgcaacatgtgggaacgttactgtcgtgcccgttctgctattgggttaatgtgtgatgccgccgatccagataacattagcatatcaagaagtgagcttcatgatttgctgagc

SEQ ID NO: 44848 - DNA, 444 bp, Glycine max
  Clone ID: LIB3093-008-Q1-K1-E3
gagagagagggctgcgctgcagctgcagctgcacctgcagaatcttttatcagcgatagcagcaatgtcttcgtcgaaagatgcagacccaagcctgggttacctgactcgcaaggacacggaggtgaagcttccgcgtccaaccagggtcaagaacaaaacccccgctcccattcaaatcaccgccgagcagattctccgcgaggcacgtgagcgtcaagaggccgagatccgccctcccaagcagaagatcaccgaccccaccgagctcggtgagtaccgtctccgcaagcgcaaggagttcgaagacttaatccgccgcgttcgatggaacatcggcgtctggatcaagtacgcgcaatgggaagaatcgcagaaggacttcaaacgcccgcgttccgtctgggagagagcgttggaggtggattacaagaaccacaccct

SEQ ID NO: 44849 - DNA, 371 bp, Glycine max
  Clone ID: LIB3093-008-Q1-K1-E4
cccacaggcacgctgagcatggaacacagaaccctagaactcaacctggcttcagcaaaggagctgaaagacttgaatatattctcaaagatggatgtatatgctgtgctttcactctccggcgatcaaaagaccaagactcccgtccacagaaacggcggcaccaacccaacatggaattttccggtcaagttcacttttgatgaatcggtggcgcggcagaaccgtttggccctcgaaatcaagatccgctccgagcgcgccctcgccaccgataaggacatcggccaggtccacgttcctctcatggaactcctcaagcaacctggcgacgggaaatccttccagcacgttagttaccaggtcagaaa

SEQ ID NO: 44850 - DNA, 280 bp, Glycine max
  Clone ID: LIB3093-008-Q1-K1-E5
ggatgatggtgcagtcagtagtataagcaaagtggaaaccttccaagaaaagtgttgggcatagtgctcacgagaagcaagtctgggtccataaatcttcttcagggtcataaaatatctgcgtcagggcatcattcctgctatggtctccgtataggacgtaatcctcaactaattcaggtcaacctgagtctgagcgacttgaaagagcctctgcacaataaagggaatgcaaagttacagacctcgttgacatgattattacttgaaacagattggc

SEQ ID NO: 44851 - DNA, 221 bp, Glycine max
  Clone ID: LIB3093-008-Q1-K1-E6
acggtgaaagcgaactcaaggcttagcatatccttgcgaagcttatcacaacctatgtcggttagagacatagcaaggacttgagatgtttgtgctctcactgttatttcagagcatgcacagcagaacgaccgtgacagtttcacactctaactatgggactcgccagacttgctagaccacatgatgatcctcgccggatcatgcaaacacacatctta

SEQ ID NO: 44852 - DNA, 266 bp, Glycine max
  Clone ID: LIB3093-008-Q1-K1-E7
cccacgcgtccggtttcgaatagattatcctatgtctttgggaatagtgctgcaatggctggaagtcaggaggaggtgacccttttgggagctactggaagcccatttgtgtgcagggttcatattgccctcaagttgaatggagttcaatacaaatatgtcgaagaaaatttgaggaacatgagtgaactgcttctcatattcaacccagttcacaatggatgtatcagtgtttatctacaactagaaacccatatcaaattctc

SEQ ID NO: 44853 - DNA, 476 bp, Glycine max
  Clone ID: LIB3093-008-Q1-K1-E8
acgcccacgcgtccgccgaccccaaacgctcgaagaaaaaagccaccgaatcttcttctggcgcgaccatctgcgacgacgagatggacgaggacgggaagaagtccggcgattactcgaagaagtttcagagactgcggagcgaggaggacgaactcgccattctgaagggcgtggttgagttcacatcgaaaacagggctggaccctcttaagttccccaatgccaacgctttccacgatttcatgaataagtcgcttcacgtggaatttttcagcgaccagctgaaggagaagctccgaatgctcaagaagaagttcgagacccaggcaggaaaagggaagaatggagatgcccctaagttttccaaaccgcacgatcagaaattctttgaattgtccaaaaaggcttggggaagtgaggatggtggtgtagccaatggctccgtggagaagcccaagtccaatgggaatgct

SEQ ID NO: 44854 - DNA, 262 bp, Glycine max
  unsure (1)..(262): unsure at all n locations
  Clone ID: LIB3093-008-Q1-K1-E9
ctgtgggaaaattggttgggaggaccttctgatcatgaaagtgctccagttggtagaattcgtggattttattttcctgaagatgacaacgtgtacagtgttgaactcagggaacttcttaataggagaagtgtctctaacctccttcgcagcagttttcgtgagagtcttgatcagttgatacagtcatatgttgaaaggcaaggtcatgctaacattgactgggaatttcaagaaacaactncttcttctgcctcagtag

SEQ ID NO: 44855 - DNA, 434 bp, Glycine max
  unsure (1)..(434): unsure at all n locations
  Clone ID: LIB3093-008-Q1-K1-F1
gcaaaagagaggaacagaacagaactgagagaagcaagtgaaacactcaatcacctaggctagaatcgtctcgtcttcattccttttttttccggtttagagaattgaaaagatttcattgataattgagcaaacacaatgagtgctccacctcatcatgatgatgacgacgacaacgaagaagttttccttgatgagtctgacatcatccatgaagttgccatggataatgaagatcttcctgacgctgatgatgattctgaactcctcgaagaggatgaggatggtgattttgtgcacaaattcactgctcatacncgggagttgtactcagttgcctgcagcccaacagatgcagacttggtggctactgcangcngtgatgacagaggatttctctggaagattggccaaagggattgggcttttgagct

SEQ ID NO: 44856 - DNA, 369 bp, Glycine max
  Clone ID: LIB3093-008-Q1-K1-F10
aataaaacactaagatccttataagtttccctcgatcggcgaaaatatgtctggtttccttagcaacgtctttggtttcaacggaaacaacaatggcactgaggatgcctttaaaaactcaagaggaggaggacaagacttcaaggacgcggagttcaacactggtgtgcaagttgccaaggggagacacgctccttgcagtggtaacagtgggactaaaagtgcttttaacaactctggttcgggaaaacaggatttcggaaatgctatgtttaacactggtgctaggtactactaatttatataagaccttcctcttggaggggctggcttcaaaacatacatataatcataggtatgggaataaaa

SEQ ID NO: 44857 - DNA, 352 bp, Glycine max
  Clone ID: LIB3093-008-Q1-K1-F11
gcgcccacgcgtccgtgattttactgtaacatgaaatatggcttctggttctatgccaccttctggtacgggttcatctcaaggtggcaactctgttctcaagagaagacgggaatatgataatacaaatgatttctcacgtggaggttcattccctgctatttcaacaattgctgaaagttcaagcacggtaacaagaagaacggcgaatacagtatacgattacgaatacagaacagagaacgtgaaagtagtggaggaagaaccgatgagaaaatacagaggagtgagacagaggcccatgggaaaatgggctgcggaaataagagaccctttcaaagctactagggtg

SEQ ID NO: 44858 - DNA, 353 bp, Glycine max
  Clone ID: LIB3093-008-Q1-K1-F12
gcgcccacgcgtccgctgattcattcacccaggttttgtgtttctgtcctctattcctctcagagcatccggtgaatctgatcaggtgttccttgtgaagagatccttacgtttttgaggtgtgacgggaaagagataacgtaaaagatgaatcagtgcggttatcaccataagaatgctttgacacgctgtgacgagatgaacatggaatcaatggtgtgccctagaccacgaagattggacctgttgaaccactcaacctttgatgaccacatcataccctggaggccaacctttatcaactaccaatcagacattgaagattcaagactctgtgctagactcttggacat

SEQ ID NO: 44859 - DNA, 389 bp, Glycine max
  Clone ID: LIB3093-008-Q1-K1-F2
ggagaagtggtgagaaagcaaggacaaaggggtgttggtggagataagtggtacttgtatagctgcttacaagactgtaaatattggtgctgtttaatacacgagactagttctctttcgatggtcccttttgagtgaaaaaccttgtcttctcagctttctttcgagagatcttaaagacattgactaacaacaataaagtggatcaatcaaaagacttacttcttcttctaacaacaataagatcacatctttcccactcatgaagagacttaacagctcagattcttccagtgccctcatgacaatttgtccatcaacagaggaacatagtccgaggaacagccaacacatgtatggtagggaagtccaatcgatgttggacggac

SEQ ID NO: 44860 - DNA, 427 bp, Glycine max
  Clone ID: LIB3093-008-Q1-K1-F3
ccactttcaagtcagttacaaagaaacaagtgacaatgacaagaacctcctaatatgcagtggtgagttgttctatgttcctcagcgccttatcagcgattttgttgagcttgttaaccttgtgggggacctagaaatccatcagaaggttgcaattcctatgttctttgtctccctagattctcctcagaattttgaccccgttcttgatagaatgatctacaagcaaaatcccactgcaaattccaccactctttattctgccaaagtccctgctgttcatccattgagtgtatcaagtgagccagactttataaagcctatcagaattatggcagaaggggatccactcctgattgaattagtttgaaagtagaactctttcttactggtaatacctacctgaccagagaagatgccagaaaca

SEQ ID NO: 44861 - DNA, 423 bp, Glycine max
  Clone ID: LIB3093-008-Q1-K1-F4
cccacgcgtccgcccacgcgtccgcttccttgtttcttttaagatatttttggtcacataggttatggtctgcctctgcgtagtgcttcaacagccccctgctcgctcgatcatcttgattattttttaagccttttaaatgcccaacatcttgttcttgatgtttgagattgatgtatccaattcttagtgaaatcttcttttccgggtgtatgatcaattctactgtgagacgacgcaggacccatttagttcaatccttctccgttgcttttctttactggctctactacgtttcatgatttctaattattattaattaaataaaagcctattatatctcttcttacatatttttatctgggtctgggtcctgcgtagtccatttttggttttggtaagtatttggtactactatgacta

SEQ ID NO: 44862 - DNA, 317 bp, Glycine max
  Clone ID: LIB3093-008-Q1-K1-F5
ctcttttgaaccttcgtgcttccttccacgatccttctactctcatcaaaccccaagtgatagaaagctgaaaaaagggtttctgaaatatcagctaatgttactgagtgcgtaatcattgagatctgccttcatcttggggtgattttgttgatgggtgcttgctggagtaataggattaaggctgtgagtccttccaatacagggatcacttctagaagtgtcagcaggagtggccatgacatcagctcaaatagcacgagctcatcagcctacatacccgtcacttctcggagtgagggtgagatctcgcaatc

SEQ ID NO: 44863 - DNA, 392 bp, Glycine max
  Clone ID: LIB3093-008-Q1-K1-F6
acgcccacgcgtccgcattggtgactgttctagcataactcaacgtaaaatcatggatgagatgagagccatatttgaggctgcagacaaaaataactccggcaccttaactattgaagaattccaggaggtgatggatgacattatcttaagatatccacaagttgagcaatatctaaagcagaagcatctgcgtgattttaccactctgtggaaagatttgcaagggaatgaaagcaaggaaatagacatccaagcgtttaagctggccctttctcatgcagattcacaggtgaagagtctgccagcaactgctcaggttgctgcccaacagggtgcatatctagctaggtgctttaatcgcagggatcatactgaagagaatcctgaag

SEQ ID NO: 44864 - DNA, 259 bp, Glycine max
  Clone ID: LIB3093-008-Q1-K1-F7
acgcgcaggactttacgttgcatcagcattattctaacgatgcgacataggcgggtttacgaccctgggatatggtcgcgataatggcactgactgaagacaccattcaacaatcttagaaatctggattcgcaatcatactcaacatgctcctgacagtagtcactagatacttgtggctcacacggctgatatcgcttaaatgtaaaggactacgcctacctgcaaaggtcgagcccttactgatgagtctcgtatc

SEQ ID NO: 44865 - DNA, 388 bp, Glycine max
  Clone ID: LIB3093-008-Q1-K1-F8
cgcttttggaactttccatgggaaattcttacatacccaagtcattcaacccaaaagacgttggaccatcgcttgatgaactcatcgtcgaaccctatttcaccaggttttcttctgaatgatgaatcaaagtgaggtaaccaggaagagacttttttcacttgccctaagattatggatatttagaaggagtggtagtttagaggagagaacatatcaatagtgcttccgcaatgaccacatcaacattagtggcaacattctgctagtggaggtgcacttcacatgggcaatatgagaatggtaatatggtttgcatatggaatcattgaaataaatgggttttctttttttgggaaagacattttataatgatgaactaaaacaa

SEQ ID NO: 44866 - DNA, 377 bp, Glycine max
  Clone ID: LIB3093-008-Q1-K1-G1
ggcaaacgcattaagttacaaatctgggatacagctggtcaggagcgatttcgaactattaggacagcttattaccgtggagccatgggtatcttgctcgtttatgatgttactgatgaagcatctttcaacaatattagaaattggattcgcaacattgaacaacatgcttctgacaatgtaaacaagatacttgtgggtaacaaggctgatatggatgaaagtaaaagggctgtgcctacctccaaaggtcaagcccttgctgatgagtatggtatcaagtttttcgaaaccagtgcaaagacaaacatgaatgttgaggaggttttcttttcaatagcaagagatatcaagcaaaggcttgctgacacagattc

SEQ ID NO: 44867 - DNA, 453 bp, Glycine max
  Clone ID: LIB3093-008-Q1-K1-G10
aatttccggtcgaccgcacgcgtgacgccacgcgtcctgtaggtaaacatttgtggtattgtattttgtaactacctcatttttaaggttctgggccaccgtaacttgcagcctgactctgaagctcagcttctgactattcactttgaatggaatggtgtcctaaaatctgtatccagcactttggttggagtgagccctgaatttgaaattgctttgtataccctgtgtttctatgttggtagggaggataaccacattcagcttggtccatatggggttaatatcaagtgctatcgattgggtgatcgaattggatctgttttccccattgcagattcttgaattttcagtttccatcattggtaatagttgttccctatgaaatcgtttgttatgcatacttgagaacttgtaactcatgggtttaaaagcaacaataccaattagatc

SEQ ID NO: 44868 - DNA, 302 bp, Glycine max
  Clone ID: LIB3093-008-Q1-K1-G11
gcggcaacttcattccattcccaattcccactgaactcaccaaaccctattcagcatttcccccaagtcaccgtgacaccatgggctcctccgcgatggtgttggacccgaaaccctcatcggagcctccgccgttcctcccgtcgacgaaatcggactaccttcaaggcagcttcggcggcgacgccaccgcctccgacgaggacgacctctacagccgcctgaaatccctccagcgccagctggagttcatcgacatccaggaggagtacgtgaaggatgagcagaagaatctcaagcgc

SEQ ID NO: 44869 - DNA, 398 bp, Glycine max
  Clone ID: LIB3093-008-Q1-K1-G12
gcgtttatattcaaacatggcaagatcgccaaactcagcattcaatgactgattctacttctccgaacttgataacatctttgcataccaactcccacaaaacaaagtttccttctttaccagggaagaaaactctgtacaccaaacttaatttctcattttctattccgttcaataaatcgatacgtgtgaaatccattgacacgaccatatatgatcaacttatagcctatcaagacttgtacaatattataacgctgcagaatagttcatatattataagagtaacattgtaaagtgaaaactgcagaacacttgaccttactcctactgcatttgatgcaatatcatagagttttggaaaagtaattatcaaatgtttcaagaaagaaaaatga

SEQ ID NO: 44870 - DNA, 370 bp, Glycine max
  Clone ID: LIB3093-008-Q1-K1-G2
ggagccagaggacaccctttatgaaggttccatatccagagatctagttgctgaagtggctgtggaggcattggcttatcctgaggcattttataaagttgtggaaatagtgtctcgccctgatgctcctaaacgcccataccatgacctttttggttccataaggcaacaatgatgcctgagatttggacttgattgcagattagcaaatgttgatttgctttatggtggcaaatttgtatctcaactgtgttcctatgtgtgttgtttcattcaattggtacactagaataatgtgtaaatatttcagtatatctttaaatttattctcctacctgccaaattaaaggttggtagataattcagcact

SEQ ID NO: 44871 - DNA, 401 bp, Glycine max
  unsure (1)..(401): unsure at all n locations
  Clone ID: LIB3093-008-Q1-K1-G3
cccacgcgtccgcagaacgcttctcctgctcctcaaagcgcatcgtctgatgctgctgttgggcctgacgcttctcagaatgaccaagatgccaaaaaccctccaaggtataatgcattgatttttgaagctctatcagcactgaaagatagtaatggatccgacatgaatgccattattaaattcatggagcaaaaaaatcatcaggtaaaccaaaattttaaaagggcattaagtacacggttgaggaggcttgttagtcaagggaaacttgaaaaggtaccaaatggttacaaggtgaaaaaggaagcctncttcgggacaaagtcaccttcaccaaaagcaaaggatgtccggccttcacaaccacaacggcaatcttcagcttctctctttatgac

SEQ ID NO: 44872 - DNA, 399 bp, Glycine max
  Clone ID: LIB3093-008-Q1-K1-G4
ctctttctcttcgagggtttgggtttctcttcctcccttggagaaaaagaagagccaccggtgcgacgccgttcgtgcatttttgaggtgccgctgtcatgtttgggcgtggtggaccaaggaggagtgataactccaaatattatgatattctcgggatttccaaaaatgccagtgaagatgaaatcaagaaggcctatagaaaggcggctatgaagaaccatccagataagggaggagatcctgaaaagtttaaggagttaggtcaagcatatgaagttttaagtgatcctgagaagaaagaactgtatgaccagtatggtgaagatgcccttaaagaagggatggggggaggaagctcgtttcataatccatttgatatatttgaatcattttttg

SEQ ID NO: 44873 - DNA, 269 bp, Glycine max
  Clone ID: LIB3093-008-Q1-K1-G8
cagaaacccataaaggggtctccatatccaagggggtactatagatgtagcagctcgaaggggtgtttggcaaggaaacaggttgaaagaaacagatcagacccaacaatgttcatagtgacttacactgctgagcacaaccaccctgcacctactcacagaaactctcttgctggttccacacgccagaagccattggcacctcaaacagccaccaccactgaagaagactctgaaaagagcaagagcttcacaaaacccacttcccc

SEQ ID NO: 44874 - DNA, 312 bp, Glycine max
  Clone ID: LIB3093-008-Q1-K1-G9
cgaccgcgctgcgaaacccagctctgatgttcataggctgggcttttcggacacgaagaataagaagggtcatgagcgcatctgcagaaagcatgaacgagaagaagggttgatgatcaagccccagagcttcactccccccatcgacacctcccaatggcccattctcctcaaaaactactatcgcctcaacgtccgcaccggccactacacccccattccctccggctactcccccctgaagcgccccctctccgagtacctcaaatacggcgtcctcaacctcgacaagcccgccaacccttcctccca

SEQ ID NO: 44875 - DNA, 450 bp, Glycine max
  Clone ID: LIB3093-008-Q1-K1-H1
cccacgcgtccgtgaaattcgaacaatgattttttcattttctttttaatacttttttggtggagactccctaagaatctgtcgatatttccaattaaatcttcttgttcctgtgaaggtcctataaaaaaaagggctatgccctttctttactcagaagggccttattccaagttccaccaaacaagtttttattcatttgaaacatctttttttccgaatacaagaaaaaattcatttcaatttcaattatttctataagataaaatcgatatagatagattttatcttatagaaataattgaaaaatacattcaattatgtcttcgcgtatcaaatattttcttttcatatcgatgcgtacgatatttttccagccattaattgatgggaaaccgaaactttcacttaccggtttttctttttaataatggatttcaatttttttta

SEQ ID NO: 44876 - DNA, 445 bp, Glycine max
  unsure (1)..(445): unsure at all n locations
  Clone ID: LIB3093-008-Q1-K1-H11
aattaaccgggtcgagccgacgcgtgacgctcggtgggagggtacgattgggccgatctgatttttactcccgacgggnaagagccgtggaggacagatgctggtgtacagtttcagctcttcatnctcgcttgcttagcgaagggactcgacgttagggctgctttttgagttgacgcttttggatcagagtgggaaggagagacacaaggtgcatagccattttgagaggaccctcgagagtggaccctacacgttaaaataccgtggtagcatgtggggttacaagcggttttttaagagaacagcactagagacatcagattaccttaaagatgattgccttagtgttaattgtagtgttggtgttgtgaagtcacacacagagggccttaaattatataaaatccaaattccgtcttctaacatggttaaccaatttgga

SEQ ID NO: 44877 - DNA, 460 bp, Glycine max
  Clone ID: LIB3093-008-Q1-K1-H12
gtcgaccacgcgtgcaatagtgaactttttgattcctaaattctctagaattcgaaattctaatttcgttaggggaaagagattgtttgtgtgtgagtgagtatggctggaaaaggcgagggtcctgctatcggaatcgatttgggaacgacgtactcttgcgtcggcgtgtggcaacacgatcgtgttgaaatcatagccaacgatcagggtaacagaactaccccatcctacgtggctttcaccgacacagaacggttgatcggcgatgcggcgaagaaccaggtcgctatgaacccaaccaacaccgtttttgatgctaaacgtttgattggaaggcgtttttccgatgcatcaatacaaggtgacatgaaattgtggccgttcaaagtgattccttgcccttcttaaaaacctatgattgtggtgaactacaagggggaggagaaacaagttttcg

SEQ ID NO: 44878 - DNA, 317 bp, Glycine max
  Clone ID: LIB3093-008-Q1-K1-H2
tgatgccgtacgtagtaaagcatataacaaaattcggaggtttaggtgtggctggcatgaagcatgtttatgtaagcaatgtatagtttgctttatttccatgttacattttgtgctatatataattgttaacactcgttgtggttctgattgctagacattcaagggtctaatgtgggtccttaaggtgttcattaattttgaaccctgtaaacaactgcaacactacccatgtggttgattctctacatttgtatcttttgctctataatctgtaaaaaagtcttctcctagatagaatgtgctcccttaccaaa

SEQ ID NO: 44879 - DNA, 292 bp, Glycine max
  Clone ID: LIB3093-008-Q1-K1-H3
cggtcttggaccgattacctcggcctgaccgtcggcgggacgctctccaatgccggcgtcagcggccaggccttccgctacggcccgcaaaccgtcaacgtaacggaattggaggtggtgagcggcaaaggcgaaaccttagtctgttccgaatcacaaaattcggaactcttcttcgccaccctgggaggattaggccagttcggcatcataactcgcgctcgagtcccggttcaacaagccccggacatggtgagatggataagggtggtgtacacagaatttggcgact

SEQ ID NO: 44880 - DNA, 445 bp, Glycine max
  Clone ID: LIB3093-008-Q1-K1-H4
attcccggtcgacgacgcgtacgcgatcttggaccgattacctcggcctgagcgttggctggacgctctccaatgccggcgtcggctgggaggccttccgctacgggccgcaaaccgtcaacgtagcggaattggaggtggtgagcggcaaaggcgaaaccttagtctgttccgaatcacaaaattcggaactcttcttcgccaccctgggaggattaggccagttcgacatcataactcgcgctcgagtcccggttcaacaagccccggacatggtgagatggataagggtggtgtacacagaatttggcgacttcactcgagacgcatagtggctggtgactctccgagagggtgatggttttgattacgtggaagggttcgtttatgtcaacagtgacgacccttgcaacggctggaccaccgtccccgtgggccccaacca

SEQ ID NO: 44881 - DNA, 67 bp, Glycine max
  Clone ID: LIB3093-008-Q1-K1-H5
acgcccacgcgtccgcccacgcgtccgaaaaaaaaaaaaaaaaaaaaaaaaaaaaaaaagaggaagg

SEQ ID NO: 44882 - DNA, 446 bp, Glycine max
  Clone ID: LIB3093-008-Q1-K1-H6
catcaaggtctggcaggtaggaaagagtctcaaacttcttcttgccaactggtggcgacacgtgcatgcattgcactcttccaccgttgctagcaatggaggtaatgtcattgttggtctttctggtggggaagccagccatggacttgaggccagtgaatggagcaaccatgccggcaccggcacggttgacagtggtaacagctggggaagagatcattgaggaagccatttggcaaaggaagtagaataccttcttaggaagggatggattccttgcttggaattcgagttggagcacggtttcgtgtaccgtgagcacaacaggtcaccaggatactacgatggacgctactggaccatgtggaagctgcctatgtttggttgcactgatgcttctcaggtgttgaaggagcttcaagaggctaagactgcataccccaacg

SEQ ID NO: 44883 - DNA, 338 bp, Glycine max
  unsure (1)..(338): unsure at all n locations
  Clone ID: LIB3093-008-Q1-K1-H7
gtgcgattcgtctggaaatcgcgattcaagcacgattcaggaacaaaaacgagacagcctcggattcgtatcgaatcgtgcgatacgtatcgtgaatcgaagcaaatgaagattgtttcagttgcagttaggtcaatcagtgctaatttgccaaaccagtttcatcagagccacttgctcagaagtctttccacttggaaatttacagataatgcaactggtaatcggcagtttaacaattcagaatctnctgaggagtctgagcagtttggtggaaatcgtgggaaatatgcccaacttgatntcatatttgaaaagtttaatcaacagggaatggc

SEQ ID NO: 44884 - DNA, 388 bp, Glycine max
  Clone ID: LIB3093-008-Q1-K1-H9
cgaccgcgcgtgctgccatgtggctgatgctgcatcaggagaagctttaggtctatgttgtggccactgaagagtggcacagtgtatatgacttcttggaagtcccgttcggctatgtgggactcaattggagggaccatgtcgtcattgacaagagatactttcgcccctctgaagtcgataacctcaaaggggacgcttccaaggccaagaaagtgcttggttggaaacctaaagtggggtttgagcagcttgtgaagatgatggttgaccgggacattgagatggctaataaagagaatgttcttgttgatgctgcctacattgatgcttatcaacaaccttgaatctcatcttcaacttgatgaaaatggggttttgctgtttt

SEQ ID NO: 44885 - DNA, 410 bp, Glycine max
  unsure (1)..(410): unsure at all n locations
  Clone ID: LIB3093-009-Q1-K1-A1
cgatgagttactacaatcagcagcaaccacccgtcggtgttcctcctccccaaggttaccgagcgccggattcttacggaaaggacgcgtaccctccgccagggtacccgccgcaaggaggataccctccgcaggcgtatccagcacaggggtaccctccaccctacgcgccttctcagtacgctcagcctccgccgcaacaacaccagaattcatctggcccaggttgcttagaaggatgtttggctgctctctgctgctgctgtctgttggatgcgtgcttctgagaggagaagaggttgctttgcacaaattggatttgaaactgtgttttgactttgaatatcngcgntaggttttattattctatgttgatttacatttcggggatatgaaatattggttccgaa

SEQ ID NO: 44886 - DNA, 266 bp, Glycine max
  Clone ID: LIB3093-009-Q1-K1-A10
ggcctttgtaatcggttgtttttatcttcatcagagaccagactgcttttccctccgttcgtacttcttacagatgcttaattgggtttatgaacacacatgatgattaaggattcggcaagcataatgtatattttcggagtctcttttaagtgcttggttataatcacaaaattgtgcttataaataagctttgtgctggatctatttcaaacttactagtgcacatgatgtggtggtgtgaaatgtttgatactttgattctc

SEQ ID NO: 44887 - DNA, 367 bp, Glycine max
  Clone ID: LIB3093-009-Q1-K1-A11
cggacgcgtggggttgcggcgccacctgttcaagtcttcattcctccttgtcctagaccttgcgattacaattaattcaaagacattttgataaacaactgttccaatatcgactcttgtggatgagtagattgcttgtaaataaaaggagctgcaagaaagtgtggcaggggagttcaatttggagaaatggaacgccacaactgcttgtacatggagctgcatatcttctgtatgataggttgcacacttgatatgattatcacattgctgatgtttgttcaatttgtggaagcatgcttacaacaacattcatcaaaccttaaaattggccagttcgtaagattggtgtgcttccccctggaag

SEQ ID NO: 44888 - DNA, 254 bp, Glycine max
  unsure (1)..(254): unsure at all n locations
  Clone ID: LIB3093-009-Q1-K1-A12
gcaatcgtcaccggctcgtcccgcggaatcgtccgagaaatcgcgcttcacctcgcctcactcggcgcgcgactcgtcgtcaactacacctncaactcgggccaagccgactcaatcgcggggcaaaataacggcgggttcggcaacaagaaaacgggcggcgtcctggtccaaggccgcctggtccatcccggttaagggaagtcgctcttcgactcgggcgagcgcgccttcgactcggcgatccacattct

SEQ ID NO: 44889 - DNA, 381 bp, Glycine max
  unsure (1)..(381): unsure at all n locations
  Clone ID: LIB3093-009-Q1-K1-A2
acgcaaataacattccttctggatagagaatctataagctttttgctcatagcctcacaagcgcgcttgcgttctctttttcccattgttagtggtttttattgatttctgggtcagtgtggttttttcctgttccacgagtttggtcaagtttccagtgaatttgttaggtgtgatccatgtagccgatctcacctagtgggataaggctttgttgttgttgttgtggtggtggttttgtgattattgngctgccatggatctggttggatcttctggtttgagtcctacagggtccaagtgaaagtcaaagtttcgttttttatggggtgagtgattcagctgctgaatgagtttgaaatggtgggtcaagtttagctg

SEQ ID NO: 44890 - DNA, 369 bp, Glycine max
  Clone ID: LIB3093-009-Q1-K1-A3
gcgttttctcacaatttccctgttcttgaagggcacagaagagggtttcttttcgtttcgtttgaatggggagcgaagaggagaacggcgaattctacctgcgatactacgtcgggcacaagggcaagttcggtcacgagttcttggagttcgagttccgccccgacgggaagctccgctacgccaacaactccaactacaaaaacgacaccatcatccgcaaggaggtttacctcacccccgccgttctccgcgagtgccgtcgcatcatctccgagagcgagattatgaaagaagatgataacaactggccggaacctgatcgggtggggcggcaggagctggaaattggtattgggaacgagcaca

SEQ ID NO: 44891 - DNA, 426 bp, Glycine max
  Clone ID: LIB3093-009-Q1-K1-A4
cccacgcgtccggttatcaagcccatgctcgacttcctccgccaaaccggttcctacctaagggtgaatgcctatccgttcttcgcttacgctgcaaactctgataaaatctctttagactacgcgctgttcaaggaaaaccctggcgtggttgattcgggtaatggtttaaaatacaccaacttgttcgacgctcaaatcgacgccgtttttgctgccatgtcagcagtcaaatacgacgacgttaagattgcagtttcggaaactggttggccttctgctggggactctaatgagattggagccagccccgacaatgcggcgtcgtataacggaaacttggttaagcgcgtcttgagtgggagtgggacacccttgaagcccaatgagtcactcgacgttttcctcttcgcgcttttcaatgag

SEQ ID NO: 44892 - DNA, 451 bp, Glycine max
  Clone ID: LIB3093-007-Q1-K1-A4
caaaggcggcatctgaagcatcttcaaagtttggaccagccttggcttcaggttcaggtgtctttgtgtttgagaaggtgtccactttcattgttacagaagaaaaagaagttgaagcccctcctgcagtagaaactaaaacagaagaagaaacaagtagtgttgtcaaagagagggagacagtggttgaagaagaaaaaaaggaagaggaaaaaccacaagcagacgagacaagtgatgagaaaaaagtggaagaaaaacaagctgagactgctgctaaagaggaagagaaacctgctgaaccagcagaaccaccaaagccttgaaaatttcgttctgaacagaagctatatatatgtagctgcttcatgaagatgcagaagatcatatacgtgcattcttagtttgcatatagtccaaaattgtcacataccattcccttattctttta

SEQ ID NO: 44893 - DNA, 436 bp, Glycine max
  Clone ID: LIB3093-005-Q1-K1-B7
cccacgcgtccgtttttttcttccaacgctcctcctccttctcatagccttcgccacctgtgtctccggccgccgtgacctcgtcggagactttctccggctgccctccgaaactgataacgacgacaacttcaagggcacccggtgggccgtcctcctcgccggttccaatggttactggaattacagacatcaggctgatgtttgtcacgcctatcaaatattgaggaaaggtggtctgaaagaagaaaatattattgtttttatgtatgatgacattgcattcaatggggaaaacccaaggcctggagtcatcattaacaaaccagatggaagtgatgtttataaaggagttccaaaggattacaccggcgaagatggtactggtgataacttttttgctgctttacttggaaataagtcaacactgactggt

SEQ ID NO: 44894 - DNA, 404 bp, Glycine max
  Clone ID: LIB3093-005-Q1-K1-B8
ctagcttccaaaccctaacactcctcttcctcttcgatcatcacctctccacaatgccgccgaagttcgacccctcccagatagtcgacgtcttcgtccgcgttaccggcggcgaagtcggcgcggcgagttccctggccccgaagatcggtcccctcggtctctcccccaagaagatcggagaagacatcgccaaagaaaccgccaaggactggaagggcctccgcgtcaccgtcaagctcaccgttcagaatcgtcaggcgaaggtcacggtggtcccctccgccgacggcctcgttatcaaggccctcaaggagcccgagcgcgaccgcaagaagaccaagaacatcaagcacaacggcaacatctcgctcgatgacgtcatcgagatcgctagggttatg

SEQ ID NO: 44895 - DNA, 409 bp, Glycine max
  Clone ID: LIB3093-005-Q1-K1-B9
cccacgcgtccggtttgtttagtaaaaatcgaaaaatctgaagcaaaagaaacggcagacacagtgagcttagaatcattcaggataaaggttaacccctttttcaagggcccctgccaagaggttgctcaatttggttcggaattattgggggaatattttcctgatcaaaacttaaatctggaaaaagtgcacactgcaaagcttgttgctactaatctatgccttgttgcgttctacttttctgatttagatggatgttacttccctgggttcaaatagcaatacccaaaccgaccaacaccctttgttgatggagcagccagaaacccataacggtcatcagcatgtaattgacattacaaggaatggtgaagctctaactacgtcatctcgaatgatcaatact

SEQ ID NO: 44896 - DNA, 360 bp, Glycine max
  Clone ID: LIB3093-005-Q1-K1-C1
cttaacaacagcacaaagcgggttactgtctgttcaagctaccatctctctctctctttctgagtgcctccttgccagaagttaaaatggcccatgaaactttcctattcacatctgaatcagtgaacgaggtgcaccctgacaagctgtgagaccagagctacgatactgtgctctatgcgtgcttggagcacgaccatgacagcaagtgcgactgtgaagacctgaataagaccaacatggtgatggttttcggagagatcacaaccaaggccaacgtggaactatgagaagattgtgcgtgacacatgcaggaacattggttttgtctctgatgatgttggtcttgatgctgacaac

SEQ ID NO: 44897 - DNA, 269 bp, Glycine max
  Clone ID: LIB3093-005-Q1-K1-C10
gcaattcaaacttcacggcgtgcatcatcatggctcgtctcgcgatcgctgtcgccgacgtgctcctggtggccatatacgcctgcaccgatacggcgcgtccctgcaggaccttcataatcttcatctactagatccgcatccctaaatccaacaccttctgcactagcaccgtgatacgatcctttacccctatgtacatcaacgactaacccaacggtaaaaccttgtactactacgaacatttatttcaccaaggcacttaactt

SEQ ID NO: 44898 - DNA, 334 bp, Glycine max
  Clone ID: LIB3093-005-Q1-K1-C12
caacagcatcggcggcgacagtcactctccgacaacaacacttccgcggcgaaaaatgtctctggtggcgaacgaggatttccagcacattctgcgtgtgctgaacaccaacgtggatgggaagcagaagataatgttcgctatgacctccatcaagggtattggaaggagattcgccaacatcgcttgcaagaaggccgatgttgacatgaacaaaaaggctggtgagttgagtgctgcagagttggatagtgtgatgactgtggtggcgaaccctaggcaattcaagatcccggattggtttttgaacaggaagaaggattacaaggatgga

SEQ ID NO: 44899 - DNA, 439 bp, Glycine max
  Clone ID: LIB3093-005-Q1-K1-C2
cccacgcgtccgagagcatggagtgtggcaactagcgttggagttgtggaggccttaaaagaccaaggtatatgtaggtggaatcatgctttaagatcagctcaacaccatctcaaaaaccatgttggttcattctctcaggctaacaagctttcttcttctgctatgagctccacaacactaaaacatgggaagacaaatcagtcagaggagtcattaaggactgtcatgtacttgagctgttggggtcccaattagatgccataaggccaataaaaaaattggatctttctctttcaatttctaaaaatgaaacttaatctcaaaagattattatgggtgagatttctggggtcatactggataggattgaaagattgcttggctgatgtgacaatcaagttggaaattttggtaaatgattatggttaacattggc

SEQ ID NO: 44900 - DNA, 217 bp, Glycine max
  Clone ID: LIB3093-005-Q1-K1-C4
ccggacttaattgctggaccgacgcatgcgtaccatcgatctatctgaaagccttcaaatggtatcatcggatatcggatactggataccggaggttctgcttagcgtcagtggttgtattgtgccgctgaatgcggcgctgcatgctaacgcagtcgtgaatacggcctacatggccttctacgccgtttattcaatcgagtaactgtacacggac

SEQ ID NO: 44901 - DNA, 368 bp, Glycine max
  Clone ID: LIB3093-005-Q1-K1-C5
cccacgcgtccgcccacgcgtccggtaaaggagtaaacactcattttttatcatccgaagatatgtgtggcatcatattaatcttccatttataaatatatcaaattggcctccaaagatatgtgcagtatcaaacgtcggtaaatgtcacatttttgccatcagattggtccttgaaagaccactgttggcattaatcatttgaagtacgaatttaatgtcacgaataaatggaaggctaatgtcatgttgcgtatatctttgaagggcaaaaaatgagcttttactctattaaggaagtgaactgagtattatcaatattaaatttcttttgtcctggctaaaataagctctcaaatgggttttga

SEQ ID NO: 44902 - DNA, 393 bp, Glycine max
  Clone ID: LIB3093-005-Q1-K1-C6
gcagatcttcgttaagacactcaccggcaagaccataaccctagaggttgaaagctccgacgaccatcgataacgtcaaggccaagatccaggacaaggagggtatccccccggaccagcaacgtctcatcttcgccggaaagcagctcgaggacggccgcaccctcgccgactacaacatccagaaggaatcaacccttcacctcgtcctccgtctccgtggtggcatgcagatcttcgttaagaccctcaccggcaagactattaccctagaagtcgaaagctccgacaccatcgacaacgtcaaggctaagattcaggacaaggagggaatccccccagaccagcagaagctgatcttcgccgggaagcaactcgaggacggacgcaccc

SEQ ID NO: 44903 - DNA, 418 bp, Glycine max
  Clone ID: LIB3093-005-Q1-K1-C7
cccacgcgtccggagagactgagacagtgatatggcgtatctgagattctcacacgcaggagcacagccacacctcacactagggtttccttcaccacctcaatttctctctattgctgctccaaaattctctccctcgtcttctaccatcaggtgcaaaggttttagtagattgatagtgaatcagaggctggtgactgtttttgcaacaaatcccaactctgtaggtgaaaaatcacccacagaaggatcagatgtaaatgaaactagcaatgctgctcaaggacctcctctccttactattctggctggattctttgtcctttttgttgtttgttggagcatttggtccattataacgtggctgataagtttaatagttaatgtacctgctccaaaataaattttattgtaatgt

SEQ ID NO: 44904 - DNA, 259 bp, Glycine max
  Clone ID: LIB3093-005-Q1-K1-C8
ttaaccctatctcaaattcattcagattctcccttcccctttttgatttttcttagaaaactcccaacttcgaatcaatatgaagaaagtggtgctaaaggtggaactccatgatgacaaaatcaagaaaaaggccatgaaagcagtatctggtatttcaggggtagagtcagtctcagtggacatgaaagaccagaaaatgactataattggggatgttgatccttgaacaagaggtggaaaagttacaaaattcagt

SEQ ID NO: 44905 - DNA, 387 bp, Glycine max
  Clone ID: LIB3093-005-Q1-K1-C9
cccacgcgttcggtaaataatctccatccacatcaaactagacttaccctacctacctggtggttaaaggcacaccaaccccaccaaaactattagcatcatctactttctagcttattgttcaagagttgtgatcaagaatgagttcaacaagccgtgcttggacttggaccgtggcggcaagtgttggagtggtggaggccttgaaagaccaaagtatatgcaggtggaacagtgtgatgagatcagcacaacaacatgctaaacataatatgaagtctttgtctcagaccaagaagctttcttctcaatcatctgttatggcttcagccaaattgaaagatgagaaagcttagaagtcagaggagtccttgagaaccgttatgt

SEQ ID NO: 44906 - DNA, 333 bp, Glycine max
  Clone ID: LIB3093-005-Q1-K1-D1
attttattgtcatggctgagctgtcaagagattgtagctgcagaaaatctcttgtactgctttggaatgattttggagttcattgcgttcattctgttgcggatcaaacaccccgacgcatcccgaccttacaagataccggggggaactgctggagcaattatcatgtgtatccctacgacaatattgattggtgtggtgttgtttttctccacccttaaagtaatggttgtaagccttattgctatggcaattggccttctgatgcatccttgtctcaaatttgttgagaagacgagatggatgaagtttaccatagttctgaactccctg

SEQ ID NO: 44907 - DNA, 328 bp, Glycine max
  Clone ID: LIB3093-005-Q1-K1-D10
caaaaaagaaaatgatgctcggagagcaccatcgcgcgaatccaacggttcacgtgccaccgtggccaacccacgacgatccaacggccgagatgtactccgcgtttttaacaaacgacgtcaatgctggtgagtactctccgtactatcttcaagaagcactaacggctctgcagcgttttctgccgtctaacgaaacggacgctgactcggacacggaggctcaacccgacgcggcggtggacgcgtactcgtgcgaccatttccgcatgtacgagttcaaggtccgtcgatgcgcacgtggcaggtcacacgactggacggagtg

SEQ ID NO: 44908 - DNA, 315 bp, Glycine max
  unsure (1)..(315): unsure at all n locations
  Clone ID: LIB3093-005-Q1-K1-D11
ncgccacgcgttcggattcttcttcataaccatattattggataaaaattttaaatatcttatacacatgtcatagtttggttatggtggaattaaaatcattctatttgggttcattagctgtgctaaaatacgaagaagacattgctatgtatactgntaaagcggcaaatgatccaagaacatgcaaccgcgtcgttatttatcggccacagaagaatatcatatcacagaatgagttgacatcattgtgggagcaaaaatgtggtcagacttttcacaaggctttcatttcggaagaagaaattgtcaagc

SEQ ID NO: 44909 - DNA, 434 bp, Glycine max
  Clone ID: LIB3093-005-Q1-K1-D2
cccacgcgtccgcccacgcgtccgcccacgcgtccgttttatcttccgttccatgtctatgcactgaaatggcgtccatgtctacgtgcatcactgtgatccccacttgtgggctaccgcggcggctactttccttcaccccgaagcagccaatatcactcccttgcgtgattggaggagtcccgaaaagagtatgggattctagggttttggtggcgaggccggggggcgcagtggaaagcgaccagttgccttcggatgtgagaaagcgaacgatggatgccgtggatgggtgtggagggagagtgaccattggggatgtggctagcaaagctggccctaacttggattaaggccagaaagctcttcaagctcttgctgctgatgcggatggctttttagagggttctggggaaggtgacgttccggatgga

SEQ ID NO: 44910 - DNA, 421 bp, Glycine max
  unsure (1)..(421): unsure at all n locations
  Clone ID: LIB3093-005-Q1-K1-D3
aatggatgagtttttaagtggatttcattgggccaatgaacttgtgtgatgaatgaccatggagtctgtggagtgtgcttagtttttttgatgggttagttaatggatatgacctgaggtgggtgagttctctctgtttagataagttctgtgtaatattgtatgagtctttttggtggttgggataatattataactgaatttgtttaatgtggtggaatgaaaggaatgattgattgatgagacaatttgaggcgctgtgacagtgattctgttaagatcttttttaaattgtcataataagatatggcaaatatgttgtgcatcagttttttttttttagcaaagttngtgtatgctntttagttattctctaaatgaaaatattgataatacagaatggtcattatgtttcttttaa

SEQ ID NO: 44911 - DNA, 423 bp, Glycine max
  Clone ID: LIB3093-005-Q1-K1-D4
atgcaacccaccccctaaaactccaaaacacccacctgtcccaaagccacctttcccaaagcaagcatgttgccccagagacactattaagtttggtgtgtgtgctgatgtgttaggtttgatcaacgtgcatcttgggaagccaccaaagaccccatgctgcaacctcattgagggtctcgctgatcttgaatctgcagtgtgcctctgcactgctctcaaagctaatgtgttgggcatcaaactcaatgttccagtgaacttgagcttgctactcaactactgtggaaagggtgttcccaaaggtttcgtctgctattaatgaataaacacttctataatgtgtagtttcctaatgtaaagtatgtctcaaggttctatttcgctatagtcgatattcatcatgctttgtactttgtactt

SEQ ID NO: 44912 - DNA, 398 bp, Glycine max
  Clone ID: LIB3093-005-Q1-K1-D6
aattgccttaaggaacgttcgagaccacagaggtttctctagtcttcttctgtggagagcttgttttctcttgtgcattcatctcacttccaattaaggaacaagctttccaccaatttgaatcaccaatggctcgctctttctccaacctcaaggttctctctgctcttgtcgccgacggattctccaacactctcaccaggcgtgggtacgcagtagcgacacaaagcgcaacaagaggaggagcagcctccatcagcggcaagtcaggggaagacaaggtactaggaagaggtgctgaaaaggtttcgtgggtcccagaccctgtcactggttactacaaaccggagaacatcaaagagaattgatgtgctgagcttagaaccacggttttgggc

SEQ ID NO: 44913 - DNA, 411 bp, Glycine max
  Clone ID: LIB3093-005-Q1-K1-D7
cccacgcgtccgaaaagattgggctttggaatgtgggcaaaactgcacatcacgggaatgcatgttgaagggaaggtcttagttggggtgaagtttctcccaacatggccttttattggccgtttgcgtgtatgctttgttgaacctccatattttcaaatgactgtcaaacctatgtttactcatgggcttgatgtgactgaacttccaggcattgctgggtggctagataagctgctgtctattgcttttgaacagacccttgttgagcccaacatgctggttgttgatgttgagaaatttgtttcaccacaacaagagtcttggttcaaagtgaatgagaaggagcctgttgcttatgcaaaagtggaagttattgaagcatctgagatgaagccatctgatctaaat

SEQ ID NO: 44914 - DNA, 386 bp, Glycine max
  Clone ID: LIB3093-005-Q1-K1-D8
cttttctttttgtgaggctttccaaatttgggcagtatttgtatttacccttccactgagtttttctttcttgggacatagaaattgacagaagagagtgagcacacagaggcacttggtatagtatatatactattgcttttgcgtgctcacttctctttctgtcaacttccagtgctggaaaattccttacaattctggctctgctttgttccaaattccaaatccaaacaaaccccaaccccaccccagacacactctcgatctttctccacactctgatgaactgaagaacatcaatggcttcttcagcagatataggatgaagagttggattcatcctaatcactaaacatacatggattgagaagatgtcattttatatt

SEQ ID NO: 44915 - DNA, 367 bp, Glycine max
  Clone ID: LIB3093-005-Q1-K1-D9
cccacgcgttcgcccacgcgtccgcaaaacaggagctccgagaggttcaagccatggggatggacctagctgaagggttcagcagttaaggaaaagagacgaagattttgagctcggaaccattgcgatggccatggcttccaaccatcttcgaaacctcaatcgcatctccatccaccattttcaggctctcctcaacgatactaccaggttcttctccgacgctgcttcttcattgcctcaaccgcaacctccctcatcatccttgaagcacaatgagctcgccaagttcgccgccatcgccgatacctggtgggattctgaaggcccctttaaaccattgcatgtgatgaatcctacgagactt

SEQ ID NO: 44916 - DNA, 326 bp, Glycine max
  unsure (1)..(326): unsure at all n locations
  Clone ID: LIB3093-005-Q1-K1-E1
gttattcttctagaatcacgagaaagacttgatggncgtattcacactgactactcattaggcgttctgatgacctgggtgcatcgtggttgcatggagattgcaaggagaatccactggctccattgattgggaagctgggactacctctgtaccgtactagtgaggataattctgtcctttatgaccatgatttggaaagctatgcactttttgatatggatgggaatcaagttccccaagagttagttacaaaaattggtaaaatatttggagtgattatagaagagacanataatgtacgagaggaattcagcgaggatatg

SEQ ID NO: 44917 - DNA, 430 bp, Glycine max
  unsure (1)..(430): unsure at all n locations
  Clone ID: LIB3093-005-Q1-K1-E10
acgctttggttcacgcctacggatcagtcaactcagataactttaacatccatccagaaagcagcgcgattcgtggattgtagttgagtgctttatccaggtcacagagctcataggacaatggggagctctctagctacgcctatacactctatatgatggctcaattcaacaagcggaactggcaacttcaacatgaccatgatagatgtgcatctgtcattacgtaggatcctaagacaattcatgttaatttcagttttcagatttccactacattctcataccaatcacccataccctccttcgaatgcgacacatggcatatttctccaagcctncacagtgctcatcaaatctacgcatccagaacaccgagcttgactaacatcacaatcccttacatagactcatgtcttacgacaactat

SEQ ID NO: 44918 - DNA, 351 bp, Glycine max
  unsure (1)..(351): unsure at all n locations
  Clone ID: LIB3093-005-Q1-K1-E11
cttcagagaaacaacggagggaaggagatggaaaacaatgctgaatctggaaaatccaaaagggaaagggaaagggattccaattcacggagggaagtacgttcgctacaacatcttaggcaaccatttccaagtctattccaagtacgctcccnctctccaacccgttggtcgcggcgcatacggcatcgtttgctgtgcgacgaattcggagacgaaagaaggagtggcgataaagaagattgggaatgcctttgacaacaggatcgacgccaagaggacgctcagggaaatcaagcttctctgtcacattggaacatgataacataataaaaattaaagacataattc

SEQ ID NO: 44919 - DNA, 405 bp, Glycine max
  Clone ID: LIB3093-005-Q1-K1-E12
gagtgatacacatcacattttctcaaagtaatttattaattaataaataaatggcggcggcggcagcagtgacggtgctactcccacctaggattccgaccgccaccaacgttacccgctgctctgctttgccttctctgcctcctcgcggcaccaacactaaaaccactttgctcttatcttccctcaaccacttctcagtgtcccgaaaatcttctctgcttcagaccagagcttcttcagaggaatcatcctcagtagatgccaatgaggtgttcacagatttgaaggaaaagtgggatgctctcgaaaacaagtccacagtacttgtttatggtggtggggctctagctgctgtttggctatcgtcgaatctcgtgagcgccatcaactctgtgtccttgc

SEQ ID NO: 44920 - DNA, 335 bp, Glycine max
  Clone ID: LIB3093-005-Q1-K1-E2
gaacacagcaactgaaattggtgctctttagcttcaacaatctctcatgcaacgcatcagccgaatctagtggcatatctcagccttcactttcacaacactgccaaaaaaaaagaagtagaaaaaaagaaaccctttacttctttttagggacgcaggtcgtgtttgtcttgttttggctgctgacactatcatagttttttgttaggtgaaatcaagcccactaatgtgtgtacgcattagagaagggcattgaaacaaagtgtgatttctggtggagcttgattagtcatcttctatgctgtctttggtaacagaaaacatgggcttactct

SEQ ID NO: 44921 - DNA, 371 bp, Glycine max
  Clone ID: LIB3093-005-Q1-K1-E3
attatatcgtttacaatgttcctttaccccctaacgactatccatccagctcatggacattgtgaatgaaaagcctgagttgtttgccgtttccattgatccaaatttctctttttatctgcacaatgattttctgtctgtctttcccaacaaaaaggagccccatggcatcatactgcatagaaacaaacgccaatatggaaaattagatgagctttctgcaatatgctctgccatggaaggtgttaaagtaattaatggattggaatgtaagatagcttgcagctcatctaagatttcttatgttcttgacacacaagaatttttcttccgaccaagaaagaatagacgaacgccttcagggaccacaa

SEQ ID NO: 44922 - DNA, 345 bp, Glycine max
  Clone ID: LIB3093-005-Q1-K1-E4
gaacatttttcaattttcatgactttctgaaggatggaaaatgaagcctcgtgtcggtggtgctcttgcagtgcacgcaccctcgtgtcaatattcgctgcaattcttgtcctattacaaccaaattgcatcgctaagcaacagcaccaaccatgccctccttcatcctgcggcataattggcaacatatcgttcccatttcgcctcatagacgacccaagccactgcggcgacacaaggtaccagttagattgcgtgaataacgcgacgctgttaaccttgctctcggtaaaataccatgtacaagatatcgattacaagagatacagaatcaaggttagtgac

SEQ ID NO: 44923 - DNA, 203 bp, Glycine max
  Clone ID: LIB3093-005-Q1-K1-E5
agcatatataggacgttatacaccatcaatgcatgtatctcgttactctgctcatggtaggggcttttatacctagacttatcgttatgatgccacaaggtgagatgaaccctatttaatgtggaacttttggatctgctgccaggggtgcatatcctgtgactgctttcagatgatattagacggttgatctggtggatatt

SEQ ID NO: 44924 - DNA, 444 bp, Glycine max
  Clone ID: LIB3093-005-Q1-K1-E6
gtcgtcgtcgttaattcgcctccgccgcaccatcagaacactctcgggcatctcccactcgttgtccgcgactcatgcggcgtcgttttcctcccccatcgggtgcggcgtttcatggagtttgcagtcaccgaagaagggtgtggttcagtcccgttcattcaggtcaagctcaatttcacttctatcttttcgatcctcgcagcggcagaacaacatccccgatgagattggtcccgataccattctcttcgagggctgcgattacaaccattggctcatcgtcatggaattcaaagacaacaacaaaccctctcccgaagacatggttcgcgtttacgaagagacttgtgccaagggtcttaacatcagtttggaagaggccaagaagaaaatgtatgcgtgcagcacaacaacttacataggccttcaggcagtcatgac

SEQ ID NO: 44925 - DNA, 452 bp, Glycine max
  Clone ID: LIB3093-005-Q1-K1-E7
ccgactacctttgttcttcacctttctccctctctatatataccctcaaaacaaaccctccattatcaaatctcccatattgttcttcaattctctccaacgttaacaaccttcattccatcctcgtatcggttattattaattttaattccacgtaatgggcaactacgtttcatgcaccttggcgcctcctttgatgaagaattccaaggccacgagggttatcatccccaccggtgaagtcaagcaattcaaagagatcgtgaaggctgcggaactcatgctcgaacaccccaactattttttggtcaattctcgttctttgcatataggaagaagattctctgctctcggtgctgatgaagagttggagttcggcaacgtgtatatcttcttcccgatgaggaaagtgaactcttttgtcacctgccctgacatggcaatactcttct

SEQ ID NO: 44926 - DNA, 251 bp, Glycine max
  Clone ID: LIB3093-005-Q1-K1-E8
cagacgtgcgcacgctgtgcgtactcggtgaatagaataagtatggctaccgtcccaggagggtttatatgggcggtcgtaatgaagaacaactctttcttggtgaaagagctctgatggggcactcagatcgtgcagtacaactgagagccctacactctttacaacttcaacactttcaagtacttagttttggcatacaagaataactgacaatgttcaaccttgtggtaacgaccagtatgagttgc

SEQ ID NO: 44927 - DNA, 407 bp, Glycine max
  Clone ID: LIB3093-005-Q1-K1-E9
cccacgcgtccgcccacgcgtccgcccacgcgtgcggcaaaatgttcggggcttgtgctgtgggttttcccaggttttagagctccaaaccttcagatccacctcattcgtctccagatcttccttcctggataacgttttcgggttcgagaaggcacttgtgttgtttttcgtacgaaatggagactaaacagagttcggtgacggttacgctcagttactgcgcgttgacgtgcgccgcggaatttctcgcgactttgctagcttctgctgtcgtcaaagcctcgcttttggccccagatctctaccggctgctattgatcaacacgcctactgccaaaggagagagcaaaattcagagtgaagacaagcaacgtgatgcataaggagaacatgggtacgatgat

SEQ ID NO: 44928 - DNA, 413 bp, Glycine max
  unsure (1)..(413): unsure at all n locations
  Clone ID: LIB3093-005-Q1-K1-F1
cggacccgtggccgcgcactctctcttttctctcttaacacaaaaaccctatcgttcttcggggtttcgccgattctcgccatgccgaaagccaaatccgacgccaaagccgccgatagccggttgaagcgcaagggcgctggtgctggaaggaagcaatcgaagaaagctgctaaggatcctaacaagccaaagagacctccaagcgctttcttcgttttcatgtccgagttcagagagcagtttaagaaggagcatcctaacaacaaatccgtcgctgttgtcggtaaagctggtggtgacaaatggaaatcgctgtctgatgctgaaaaggcccccttcgttgccacggccgaaaagaagaaacangagtatgagaaaactatnttggcttacaataagaaattggaggg

SEQ ID NO: 44929 - DNA, 435 bp, Glycine max
  Clone ID: LIB3093-005-Q1-K1-F10
tttctcttctcaatgtctcaagtgtgccgagaaaatcatggtggacgcatcagaacgtagatgcttggaggatgatgatccatctctcatgaaaactatcaagggcgcaacaactggtttagtggctggaactatctggggtactgtagttgccacctggtatgatgtcccccgtgtcgagagaaatgttgctcttccagggctgattaggactatcaggatgatgggcaactatggtttgacctttgctgccatacgaggagtctacataggtgtagagcagttggcgcagaactatacgatgaagagggatttagtcaatggacctgttggctgatttgatgcaggtgcaactattctggggtacagatgaatgagcatcaaaaccgcactatctgctggatcagcatatgcattcacatatgaattccttga

SEQ ID NO: 44930 - DNA, 347 bp, Glycine max
  unsure (1)..(347): unsure at all n locations
  Clone ID: LIB3093-005-Q1-K1-F11
ataatctaccaatttgctggactaatagtaaattgaggcaaaaaatggaatctaaagagtccatcnttgtgaagctnntgctgattctgcatttgtccgttctctgggtttcacaggagtttgatttctactactttgttcagcagtggccaggatcatattgtgacacgacacagaacagctgttgctaccctacaactggaaaacccgctgcagattttggcattcatgggctttggcctaattacaaagatggttcatacccatctaactgtgattcagacaatcgttttcagccatctcagatatcagacctcactagtagcttgcaaaggaactggccacac

SEQ ID NO: 44931 - DNA, 464 bp, Glycine max
  Clone ID: LIB3093-005-Q1-K1-F12
ataaatctcaccacattctgctgagactaattactcgaatagaggcacaaaatggaatctagagagtccatctttgtgaagcttatgctgattctgcattcgtccgttctctgggtttcacaggattgcgatttctactactttgctcagcagtggccaggatcatattgtgacacgacacagaacagctgttgctaccctacagctggaaaacccgctgcagattttggcattcatgggctctggcctaattacaaacatggttcatacccatctaactgtgattcaaacaatcgttttcagccatctcagatatcagacctcactagtagctcgcagaggaactggcccacactagcatgcccaagtgggaatggggttcaattctggacccacgaatgggacaaacacggtacttgctctcagtcagtccttagacaacatgactattttgaaacacctct

SEQ ID NO: 44932 - DNA, 426 bp, Glycine max
  Clone ID: LIB3093-005-Q1-K1-F2
acccgtagaaacctgtgacactctggttctcttgcggctagggttttagcgcaggtggggctagatttaaggaagatgggtaaggaaaaggttcacatcagtattgtggtcattggccatgtcaactctgggaaatccactaccactggtcacctgatttacaagcttggaggcattgacaagcgtgttattgagaggtttgagaaggaagctgctgacatgaacaagaggtctttcaagtatgcctgggtgctggacaaacttaaggctgagcgtgaaagatgaatcaccattgatattgcttatgggaaagttgaaacaacaaagtgttattgcacagttattgatgcgcctggacatatggatttcactgagaatatgattactgggacatcccaagctgactgtgctgatcttatcattgaa

SEQ ID NO: 44933 - DNA, 422 bp, Glycine max
  Clone ID: LIB3093-005-Q1-K1-F4
aaagaactggttacaagcctcttaagtgaaacagtgctggccaagcaaaatgggtcttggcgtgatcgggttcgtcaaacttagaatttgcacccttaaagttgatgctgataatagaaaagttggctgaatgttgaatgaagttgagctttaaccatgtctaaagcattcaattttgcgttgctcagtctgtatatggtgtgagatgggctttaaccgtgtatacaacttgtatctggttcctatgcaactggcattattttcaagcctataatcactagtgaggtaagctatgtgttactgtttatcatttttagagggggaagcagagtgatgtgtgaaacgccatttgtcttttgtgtaattccagtttcatagttaagtatttagaaggaaaactttgcaataggatgatgctattc

SEQ ID NO: 44934 - DNA, 368 bp, Glycine max
  Clone ID: LIB3093-005-Q1-K1-F5
cccacgcgtccgcaaattttggtccaattgcaactgtttaaatattgttactatagtctacgacatgcttgacttgggaagagtgtaacaaagtacctgatgcatgtgtttactaaaagaatatatgtatgtgtgtaatggttttcaactttggttttatgtaataaattgattgtgagtccgtaattgatcattgaagtaatcgtatgtaattcttactttaaaaaagaggaggattctatcgtcaattgaacagaaagaagaagctaaagggaacgatgtgagtgtgaagaggataaaagagtataggcagaaggtggagtctgagttgtccaatatctgcagtgatatcatgacttgtattgatg

SEQ ID NO: 44935 - DNA, 449 bp, Glycine max
  unsure (1)..(449): unsure at all n locations
  Clone ID: LIB3093-005-Q1-K1-F6
ggctggagaaaattgagaacctccagagtcatgacaacacagagatttatgaaaaggcgggcaagattcttgagacatactggttggaggaggaagatgagactatgcctccaggggatgcttctcagtcagggttcaactttggtagcagtgacgctcctactgtgccatccggtggattcaactttaattagaagatattcatgctctactggggagttttgggtggtctatccgtaaagtcctccattatgacgcgacagcagttgggggataagtcaacgtcttgtcattgtcctaatgtccttgggtcgtacgaagtccagcaagttaatacatggttgctggactggcttgngttttttgcaatgcctggtatttcatatctcatggtgtaaaatgctntgtggctatatttttttgccaccgtagagaatactagagtcttc

SEQ ID NO: 44936 - DNA, 255 bp, Glycine max
  Clone ID: LIB3093-005-Q1-K1-F7
gtctcgcgaacattgagagcctacagagtgttgacaacacagcattgtatgaaaaggcgggcacgatccttgagacatactggttggacgaggaagatgagactatccctccataggattcttttcagccatgcttaatgtttggtagctgtgactctcatactgtgccatacagaggattcaactttaattagaagatattcatgctatactggcgagtttcgcatgcggtatccgtatagcactgcatgatga

SEQ ID NO: 44937 - DNA, 426 bp, Glycine max
  Clone ID: LIB3093-005-Q1-K1-F8
cagcgttagaactctcgtgtcttctttaaccctcaatcagcaacgtgcgccctcctggggtcaagctcagtcagcactgcaccgcaaatttttctttgcccctttcgatgagtaacgccacagactccgccggcgagatcccaccggagacgaggtccgccgagagtgacggtggtgggccccggcccacgattaagatcaatgttacgcacggttcctctcaccacgatttacacctcccggcccaatcaacttttggggatgttaagaaactccttgtcaataaaactggtttagagcctgcagagcaacgacttttcttcacagggatagaaaagggtgataaccagcgtttgcaggctgaaggtgtaaaggataagtcaaaaacttatcttttggaaggcattggtagcacagagaggaaac

SEQ ID NO: 44938 - DNA, 347 bp, Glycine max
  Clone ID: LIB3093-005-Q1-K1-G1
ccatcttcaacttcaacacttaaactccttttagtttcaataatccacaccccaaacccggggctttccctatttattatcatcttagttttccctaggaccatatattataccatatttatatatcttcacatacttaataatatataataatgggtgttgtacggacgtgggagagcaggagggcggagctggaggcctttcgccggagcctggtggcagccgccggcatccagcggcggaaagacgatgagggggggagaacccacaagtttgtttcctcctatgaacatgatgatggaaagggtaccttaatctgtgtcacttgtggagtttcctactttggt

SEQ ID NO: 44939 - DNA, 461 bp, Glycine max
  Clone ID: LIB3093-005-Q1-K1-G10
tctgaatcttgttcctgcctgggaaaacaacgattctatcatatgaatcagcgctgtttggggttgtctcctactcctacaccctgaattgaagcccgcctttgttttcctccaattcacttcttcgctagctcctgcttccacattccctttcccggattcgaactataatggcttgtgggagtaagagcgggaaaagtgagatcagtgaaggaggtgcaaatgattcagtggctgtgggagatgtgatatttgtcaagcttcgcggtagctcatggtggcctgtacaggttgttgatgaaaatagtgttaataagagtgttaaaccgagcaaacggaccaaacgattgccgggagacatccttgttaggcattatggaagctatacatactcatatgctgatcctattaaatgtcgtgatgagtttaagaggatacttgaacgtaatgatggttctctc

SEQ ID NO: 44940 - DNA, 308 bp, Glycine max
  Clone ID: LIB3093-005-Q1-K1-G11
cggaaaatctccttttgggatgaagtttcactaaacccttgtttttttctctttgcctttctctccttcttctgctccttgtcgacagtgtaagatcttttctcgccctcatttttggtccacaaattgtgctccacgcactcattaggttaagagaatccagcataaaagggcaagtcatgggttttaaatttatttatttttaaagtgttgaatttgaagggtcagaatgagatgtttcatatatatcttggatctgtctccttgaatgccattatgtttgtagccttcatttgaggtaaaggaaa

SEQ ID NO: 44941 - DNA, 433 bp, Glycine max
  Clone ID: LIB3093-005-Q1-K1-G12
aaaaaactcaactttgaaattcttaaaaccctaactggtccgaaccattggagccaccgtgcaatagttcctcctctcactctctccctcaacacaccattgattttggtttcagctttatttggaagagggttgtaacgctgacgtgaaatttttctgaagacaaagatgcaggcttgtacaacgatgagttctttgcagcaacaacctatttggaccaaagggttaaatttccctgcaaaagggtatggcagcaataacgggtttctacctcaggtgaggttctgcaatattaagccatccaaagcttctcatgttgaagcaagtttagtcactgggaagccgtcatctgtgcctttctctgtgcctgaaattggaggcgacggaagtagcttcctggactatggcttgagtgaagctgatcctgatgttc

SEQ ID NO: 44942 - DNA, 365 bp, Glycine max
  Clone ID: LIB3093-005-Q1-K1-G2
gtcagtactagctgaggggtgtaaataagtgacttttggaccatgcaattgcaattttccttatgtgaaaagtgattatctataattaatttgtgttctatatttgactaagatcctgcaaccataggaagcacttatcgcttgtaattttcaatgatcaaaattttacatttgttcttttttgttggcttcttcatctgtggcaattaagtttctatcacggaatacaaaagatggctcctatttcaagaatctacccaagtcaagtgccattaagctcattgatttcgggagtacatcatttgaacatcaggatcacagttatgttgtttcaacaagacactatcgtgcaccagaagttatct

SEQ ID NO: 44943 - DNA, 460 bp, Glycine max
  Clone ID: LIB3093-005-Q1-K1-G3
aacccccaaaccttcatccgtcgatgcccactggatggctctgccatccgagcctcaccggcgtcgccgccacaaccacatctccaccttcctccaatccaccgcctccaacttcgcctctctcttcaaccccccaaaccctccctctctagcactccctcacccgccctcctccttctccctccctctcttcttcgcgccgccgctctcctcctccaccgccgttgactctgccactgccgagcccgctcgccctgccgcgaaatcggtccgcatagcgcggctcggcgccaatgggaagggcggcggcgggcctgtgttcgtggggcaggtgttcagcatgtgcgacctctccggtacgggcctcatggccgtttcgacgcacttcgacattcccttcatttcgaaaagaacccctgagtggttgaaaaaagtatttgcagcaatcaccaagagtgag

SEQ ID NO: 44944 - DNA, 212 bp, Glycine max
  Clone ID: LIB3093-005-Q1-K1-G4
ttaatttagagtgggttttttcatttgaaggtgctgcagctactactgtggcacaacattgggcttttagttgaatcaggtttgttttcagcatattatttttgttgtgtatcacggtttaatttttttttccaccacaaaagataagtgtgggttcgcgtgctgaaatgctatgggtacttcttaattcttatgggtatgtttgatagttc

SEQ ID NO: 44945 - DNA, 332 bp, Glycine max
  unsure (1)..(332): unsure at all n locations
  Clone ID: LIB3093-005-Q1-K1-G5
agatgaggaagtcgcccgtgtatatattgctgaagtggtgcttgcattagagtatttgcgtgtcactgcgtgtggttcatcgtgacttgaagcccgacaatttattgatagcacatgatggtcacatcaagttaacagactttgggctttctaaagttggtctcatcaacagcacagatgatctgtctggtccagcagtgaatgggacatcactacttgaagaagatgaaactgatgtatttacatccgcggatcaaagggaaaggagggagaaacgttctgcagtgggcacacctgattacttagccccagagatactnttgggaactgga

SEQ ID NO: 44946 - DNA, 357 bp, Glycine max
  Clone ID: LIB3093-005-Q1-K1-G6
cggacgcgtgggttggagttggacttatgggctacatgggaaacaaggggtcagtttggagtagtatgtctctctttcagtcacgtatgtgctttgtttgttcccatttgacttctgatcagaaggaacgggctgaacatatgcgaaactctgatgttcattaaattctaatacgcacttgcttctcatcatctgtatttgacgcagatcaaccactgactataccatctcatgaccagattttctggttccaagatttgaattatcgtatcaatatcatggatgctgaggttataaaattggtggctctaatgaagtgggatgagttgaagaactatgatcagctactcacagaat

SEQ ID NO: 44947 - DNA, 314 bp, Glycine max
  unsure (1)..(314): unsure at all n locations
  Clone ID: LIB3093-005-Q1-K1-G7
cccacgcgtccggtttcttattacagtagttgacgcggcactgcacagtagtagagaaaagctaacgcgtgtaaatgaagtagtgagtagagcaagagcgacaaagagagtgccaggtgtgtgaaggagctcgttacttgggatccagttgttgttattcttaatcggagatcgcagcggcggattgcatgagcggcggatcggaggcggtgtgagcagaggatcgaaagatgtctgcgatcatagtgtgcgggaagagatcagcgctgttccaagaccttccttccaagaggatccgttgntcctcttcttct

SEQ ID NO: 44948 - DNA, 350 bp, Glycine max
  Clone ID: LIB3093-005-Q1-K1-G8
gccacatctgctttaaaagcctgtacttttgaacctctctcgtgatcactctaatatggtgggggtggttttgaacgatcgatttgtgaagaaggtgcgcgtgaagtgcaacgacgatgataccatctgcgaccttaacaagcttgtggcggctcacactggctcaagagccgtcaagatccgcatccagaagttgtacaccatctacaatgatcacattactctcaaggattacgagatccatgaccgcatgtgtctcgaactctactacaactctacacaacaaggtgtgccttatgcgtaatatactatgtgcttctaatgggataagcgcttaatgtaattctgac

SEQ ID NO: 44949 - DNA, 243 bp, Glycine max
  Clone ID: LIB3093-005-Q1-K1-G9
gcctcaacaacccagttgagtaactaacatagttcatgtgaagaacaagcatgtgctactaagaggactagtgcaccgaccatgcgaacgaatccgacctgaatatcggcgaaagtaccataccattacaacttccacatggtcccaacgatgtcttgctcaaaaatcatgcacttgtctcgccatccgcatatgaagaatatcatcaacaagccccaaagccctctcaatagacatgcttac

SEQ ID NO: 44950 - DNA, 376 bp, Glycine max
  Clone ID: LIB3093-005-Q1-K1-H1
acagagaagagaagttgatgtcaacagcagatgctcctcctccgttccaagaagcagcgcgatgcgtcgtgtgcaattgcagtttcaacaccttcagaagaaggcatcactgtcgatcctgtgggagaacattgtgcaatgaacattcatcagatcaaatggctataccacaattcggcatttactcagatgtacgagtatgtgctgatcgtttcaacgactaacagtctgggaaggatgaaccacagactgcttcagagggacgcacagtgtcacagatccactttctaaatgagacctcgacacatatgttgattcaacgtccataccaactgcagagaataagcttgtgttgggcatttaagagtcgtaatgt

SEQ ID NO: 44951 - DNA, 401 bp, Glycine max
  Clone ID: LIB3093-005-Q1-K1-H10
cccacgcgtccgtgttcacaatgagaagcccatagcagagtctcttgtgattgttgaatacgttgatgagacatggaagaacaaccccatcttaccttctgatccttaccaaagagccttggctcgtttctggtccaaattcattgatgataagattgtgggtgctgtatggaaatctgttttcacggttgatgagaaagagcgtgagaagaatgttgaagaaacatatgaggctcttcagtttcttgagaatgagctgaaggacaagaagttttttggaggagaggaatttgggttggtagatattgctgctgtcttcatagcattttggatcccaatttttcaggaaatatcatggttgcagttattcaccagtgagaaaattcctatactctacaaat

SEQ ID NO: 44952 - DNA, 244 bp, Glycine max
  Clone ID: LIB3093-005-Q1-K1-H12
ctcttcttctcttgcggctagggttttagcgcagcttcttctagatttaaggaagacgggtgaggaaaaggttcacatcagtcttgtggtcattggccatgtcgactctgggaaatccactaccactggtcacctgatttacaagcttggaggcattgacaagcgtgttatcgagacgtttgagaaggacgctgctgacatgaacacgaggtctttcaagcatgcctgggtgctggacatactt

SEQ ID NO: 44953 - DNA, 354 bp, Glycine max
  Clone ID: LIB3093-005-Q1-K1-H2
gccgcatatgcagcaaaagcctgcacttttgaacctctctcgtgatcactcttcttcctggctgtaaatttgtaaccttcacacttttcagaacacccagaagctctagcctcaccagcaccacatattgctagctagcgactccgagatgccaagcaaagaggattcacctttagtagaagcaaagcttccactattagaagctcaccctttaacagatgaaagagaacaagaccaaagtttcccacgaaggttttggcttgagtcaaagaggctttggcacatagtaggcccttcaattttcagccgtattgcatcctactccatgttagtcataacacaagcctttgcagg

SEQ ID NO: 44954 - DNA, 452 bp, Glycine max
  Clone ID: LIB3093-005-Q1-K1-H3
agagctttgtgaaacataaagttaaagcagggcatattgcagagggagcaaaccgaatatttgaaaacttgttctactttttattatcactgttgcatttatttcagatatttagtatttgcctacaagtttgttctttagtttaaacacagacaagacgactctttatggcggctataaccaatttgaacttttcttccttgtgtaaaaaaaggttttgtgtgcgtttgtgcgtgttggagttggctttttgaagtgggtgccatgctgaagttatatgtgtatgtgaaagatgaagaacaatagagataaagaaaaaggtaacgacgtttaccaaagttacagacagcatcacacgttgtcaatgccaatgatgttttctggtttgaacagagagaaggagatgtcagccatgatctctgctttgacacatgtggtttgtggagaagatg

SEQ ID NO: 44955 - DNA, 208 bp, Glycine max
  Clone ID: LIB3093-005-Q1-K1-H4
atcaatcaataacataaataacacttcttcttgccttttaatatatttctctctcttcccgtcgtggttcacctttcaacacttaattagagaccacccaatttccttgccgatctttttccaggggaaagtttggatggtttgtggtaagaagtaaaattttggtgaataaccggaaaggtgaaggtggacctggattatatggata

SEQ ID NO: 44956 - DNA, 381 bp, Glycine max
  Clone ID: LIB3093-005-Q1-K1-H6
gaagatgcagcttcgtcgatcttgcttcttctttcatcattttgcatcgcgttaggggtggcagattttcaatttcccttcttttcgctacctttctcgcatagaatctcgcaattcctacgttgttccgtttccgcaactcatcaattcgaaagttattgcttcacaaggtgaatttgcatttaggaggttgagcatgtcataaaggaaaaaaatggaggtcgaggtgccaatctcgcttgatttgaataatcaacttcagccagagaccgtagtttcagttcaaaatggggatcctggagtttcctcttctgttgccaatgctgttaacccgcaacaagccgcttcaaaaaaaccgggcaagcactgggctgcatggac

SEQ ID NO: 44957 - DNA, 445 bp, Glycine max
  Clone ID: LIB3093-005-Q1-K1-H7
cccacgcgtccggtttgaatcgtgaaaatgttcagaaaccagtacgacacggacgtgacgacatggagcccggcggggaggctgttccaggtggagtacgcgatggaggcggtgaagcagggctcggcggcgatagggctccgatccaagacccacgtggtcctcgcatgcgtcaacaaggctaactccgaactctcatcgcaccagaagaagatcttcaaggtcgacaaccacatcggcgtcgtcatcgtcggcctcaccgacgacggccgcgtcctctaccgctacatgcgatccgagtgcatcaactataactacacctacgagtcaccggtccccgtaaggagactcgtcgttcagctcgcggataaagctcaagtttgcacccagcggtcatggaaacgttcttatggagttggactcctggtaactggattagatgaat

SEQ ID NO: 44958 - DNA, 384 bp, Glycine max
  Clone ID: LIB3093-005-Q1-K1-H8
gtcttcttctctaaaataaaaaaccctactttctgaacctttcaccgcatcgccaccgatgccctatctccactaatcaaagaaaagaaaatgagtagacgctcgagcagaactgtctacgttgggaatctacccggtgatatccgtgaaagagaagttgaagatttgtttctgaagtacggacacataacacacatcgacctaaaggttcccccaagaccacctggttatgcatttgtagagtttgaagatgctcaagatgctgaggatgcaattcgtggtcgtgatggctatgattttgatggccaccggttacgggtggagcctgcccatggtgggcgtggtcattcatcctcaaaagatcggcacaatagtcacagcaat

SEQ ID NO: 44959 - DNA, 268 bp, Glycine max
  Clone ID: LIB3093-005-Q1-K1-H9
gttgcgtggtcgtcacgcacgggtaggatggttgcgaggcgttatgtgaaaacggtgcgttgaaagtggcaccgttcgaggctgatcaggttgatcccaccggcgccggtgactgttttctcatcgggtttgcagcgacgattgtgaggggcctgcccgtgcctgatgcggctctggaagggaacttcttcggatccattgctgtagctccagtaggacacgccaagcttgacttcaacttgattcagatggttaaggatgagatgca

SEQ ID NO: 44960 - DNA, 378 bp, Glycine max
  unsure (1)..(378): unsure at all n locations
  Clone ID: LIB3093-006-Q1-K1-A1
gacaacgttgttgaacagcgaatattcgaggctgttcggcgaagacacggacttgtacaaccgcattgtgttgggcgccctattgccgcactctgtgtggggcccactcccgcgcttcctccagacgtggcttcgcaattacctcggcggcgttctcctctacctcctctctgggctcttgtggtgcttctacatttattattggaagcgcaacgttcatgtccccaaagatgctattccctctcaaagagccatgctcttgcaaatatctgttgctatgaaagccatgccgtggtactctntacttccaactgtttcggagtacctggtagaaactggctggacaaagtgctatcctagattatataatgttggttg

SEQ ID NO: 44961 - DNA, 211 bp, Glycine max
  Clone ID: LIB3093-006-Q1-K1-A10
gccaattattcttaagactctctctttctgtcccattgtgagcattcttactcctggtctcttccgcgagatatccaggaatgcttattccccaattgcttctttacaggccttactgtgcatagcttctgagtgtctttggggctgtggcttaattattaattttaacttcatgggttgaattcgtgggggttccaccattgttggagga

SEQ ID NO: 44962 - DNA, 205 bp, Glycine max
  Clone ID: LIB3093-006-Q1-K1-A11
attgaacttgcctttttctgatgcagttggaaccttttcctttggtcttctttccgtctctggccctctggttaatggtaatgctggtgggacttaaggaccaggggttgcttcttcccttttggtttcaaaggaagagaattttcaattttcaatttttcattgggttctctgaaatggagagagatttcatgcgtctcaactt

SEQ ID NO: 44963 - DNA, 316 bp, Glycine max
  Clone ID: LIB3093-006-Q1-K1-A12
cccacgcgtccggctagctaccctctcttttggggtatttcttttcattctccaaaaactctttaattttccttcccttttctgtgctattctctcctcactggtcaaaaggtttgtgggattttgctaatttggtgcaaatctgattcctttgacaaatccctcttgatctcctggcttattgaaaactactacaattccgagttgctttttttccctagttgcttttctgggccttgaaatcttgcttggagaaggctcaattttggtggaaacctctaccacaagaaagcatagtttttttgggttaatcata

SEQ ID NO: 44964 - DNA, 450 bp, Glycine max
  Clone ID: LIB3093-006-Q1-K1-A3
caaccaaaaccaaaaccagaagataacaattaaaccgttcttcttcgattcaagttcgaagaagaagcgatgagttcgggtagcagccacagcagtgagaaggagaaggagaaacagagggtgagtcgcacgtcgctgatactgtggcacgcgcaccaaaacgacgccggatcggtgcgcaagctcctccaggaggatccctcgctcgtcaaggccagggactacgacaaccgaacgccgctccatgtggcgtccctccacggctggatcgacgtcgccacgtgcctcatcgagttcggcgccgacgtcaacgcgcaagatcgctggaaaaacacccctctggcggatgcggaaagagctaagaagagtaatgtgatcgagctcttgcaatcgcatggaagattgtcttttgggcaaaatggaagccatttcgagccgaagccggtagcg

SEQ ID NO: 44965 - DNA, 433 bp, Glycine max
  Clone ID: LIB3093-006-Q1-K1-A4
cccacgcgtccgcccacgcgtccgttgttccttctccttgtgatcttcttcaaccttcagagtgagaaaacacattcagaaaccacgtttctctcttcttcttcttcttcttctttttcttctctcgaggtcattattaagtattcaccatggaggcaccatcttccaccaaacccaacgacccaacaaaaccttccaacactttcaccacccttagtctggaggccggcccggcccaagcgagcccactccgaaaaatgtttgccgtggcgttcatcgccgacggcatacagttcgggtgggctctccagctctctcttctaaccccctacgttcagcttttaggagtcccccacgctgcggccttcttcatctggctctgcgggcccatcttcgggctcgtggtacagcccattgtgggctactacagcga

SEQ ID NO: 44966 - DNA, 334 bp, Glycine max
  Clone ID: LIB3093-006-Q1-K1-A5
cccacgcgtccggccatttgtatatttgatgatgttgctgagcacggtcgtgaagccgctgttaaatattatgattcttttcttccattcttactcgaagcttgcaatgatgaatatcccgatgttcgacaggctgctgtttatggtgttggtgtttgtgctgagtttggtggatctgttttcagcccccttgttggagaggcactttcaaggttagatgctgtgataaggcatccaaatgcactacatgctgataacataatggcatatgacaatgccgtctcagctcttggaaaaatatgccaattccatcgtgatagcataaatgcagcac

SEQ ID NO: 44967 - DNA, 435 bp, Glycine max
  Clone ID: LIB3093-006-Q1-K1-A6
aacaaaactaaagaaagcggtttcacagaccgagaaatcccaatcctatggcagaggaagggaaacccgatgaacagctctttcagcttctctccaatcttctccaccaggtggaatcactgacgaatcaagaagaagttgagctgcgttctaaaattgaaactcttggattagaggttacaaaagttccttcaaagtcaacgcagcaccttaacgagttggaaatagctgaggagttggataaattatcagcaagattggataatcttgatgagatgatatcatcatcaatggcttcagatccacaggtgcagtcactcttgagtgatacagccgatgtgtggatgccagttatcactgctacttctgaagaaaggcgcaacttcacagcggctactggagacagcaccctccaaactgatgtggaaaagtcta

SEQ ID NO: 44968 - DNA, 447 bp, Glycine max
  unsure (1)..(447): unsure at all n locations
  Clone ID: LIB3093-006-Q1-K1-A7
ttcttcttcttctctcgcgccgcaataataatactaaaacatgtccaactctgatggagccactaacgccgtccctcccaacgacgccaacaacaacacaatcgttgagtaccagcagcgaaccaccaccaccaccaccgccgccgccgccgccctcgccgtcaagaaaccgccttccaaggaccgccacagcaaggtcgacggccgcgggcgccgcattcgcatgccgatcatctgcgccgcccgcgtcttccagctcacgcgcgagctcggccacaagtccgacggccagaccatcgagtggctcctccgccaggcggaacccttcatcatcgccgctaccggctccggcaccactccggcgagcttctccactgtctccgaccacaagcccctncttccttcccctacccccttcatcctggcaaacgcattcgccctgacgac

SEQ ID NO: 44969 - DNA, 139 bp, Glycine max
  Clone ID: LIB3093-006-Q1-K1-A8
aacagatctaatgcacacacaatgaccttaaatcacaacaatgtcctagtcttatctgcggtgctcacgctgctcttctatctactactgacactacgcgagctcggagaggaacatccgctagtcctgcagtaccaca

SEQ ID NO: 44970 - DNA, 326 bp, Glycine max
  Clone ID: LIB3093-006-Q1-K1-A9
gagaaaggcgtggacgagttcccgttctgcgtgcacctggtctcgtgggagaaggagaacgtctccagcgaggctttggaggcggcgcgcatcgcatgcaacaagtacatggccaagttcgccggaaaagatgccttccacctgcgcgtgagggtgcatcccttccacgtgctccgcatcaacaagatgctatcgtgcgccggggccgacaggctccagaccggcatgaggggcgcctttgggaagccgcaggggacgtgcgctagggttaacattggtcaggtgctgctctcggtgaggtgtaaggatgctaacagtcaccatgc

SEQ ID NO: 44971 - DNA, 432 bp, Glycine max
  Clone ID: LIB3093-006-Q1-K1-B1
caacggacaagcttcgttctggcgaagaatggcggcgccgggctcatccgccggcggcggcggagggacggcgaaggctacggtggcggagcagatctcgcaggcggtgcagtccacctccaacctcctccaccttatgcggcactcttctcctgcccaggctcaactggttaagcttcctaagaatcttttggcaaaggtttccaccatcaagaatacagagcaggttttggagcagttgcctggggtgatatcatctcttgacgcacacatggaaaatgggttgcaaaatgttccacatctaaagaccgtggttcaggtactttcaaatatggaaagtagccagcttagcttgctatcccgaccccatcctctccagaaggaacttgaaccaggaaaccaatctcaaggaaccggttaaagaatctcatg

SEQ ID NO: 44972 - DNA, 363 bp, Glycine max
  Clone ID: LIB3093-006-Q1-K1-B10
caattttctagggtttatacaattttcgatggcttcttcagatgttgagtaccgttgctttgtcggtgggctcgcttgggccactgacgaccaagctctcgagagagccttctctcagtacggcgaaatcgttgaaacgaagattatcaacgatcgtgagactggaagatccaggggttttggatttgtgaccttcgcctcggagcagtccatgaaagacgccatcgaagggatgaacggccaaaaccttgacggccgtaacatcactgttaacgaagctcagtcccgtggtggcggtggcggcggaggcggtggaggtggtggatatggtggtggtcgccgtgggtggatatggtggtggtg

SEQ ID NO: 44973 - DNA, 213 bp, Glycine max
  Clone ID: LIB3093-006-Q1-K1-B11
cggacgcgtggtcgtacacgagcatccgacattacaattcactggctatcaaaaccggaaccgacacacactcacttcttgaccatcttaacctcatctactatataccttatcgtctaagagtctctatctcgatctaacactataacacactgctaggaattcggcacttaagcttagtctttgacaagctgaccgcctttacgtccccaa

SEQ ID NO: 44974 - DNA, 452 bp, Glycine max
  Clone ID: LIB3093-006-Q1-K1-B12
gcgggtctttcaaaaaaaggattagcttattttaataaatacatccaaccaaccccaatccttttaccgattaacatcttagaagatttcacaaaacccttatctcttagttttcgacttttcggaaatatattagctgatgaattagtagttgttgttcttgtttctttagtacctttagtagttcctatacctgtcatgttccttggattattcacaagcggtattcaagctctcatttttgctactttagctgcggcttatataggtgaatccatggaaggccatcattgaccagttttctacaaaatagtccttttcgtttagcttgccgcacatatattgcggctcaatataatctacttagtaaacatctatatctatctacctatatctatatagatataggtagatagatatagatagatattcgattagcatatattagcata

SEQ ID NO: 44975 - DNA, 401 bp, Glycine max
  Clone ID: LIB3093-006-Q1-K1-B2
atcaaaaggtctgttagttcagacaaaggagaagaagcaactgagagtaaaaaggtcatatatgaggatgtgtctttggaaagaggttctttcttgggtgcaacaagccatgagggcattccgtgctcagaatttagaaagtgccaaatcaagactcaatctctgtgcagaggacattcgtgatcagttagaaaaagttggtaacacttcagagttatgttcacagctaggagcagtcttgggtatgcttggtgactgctgccgagcaatgggtgatgccagttctgcagttgcttattttgaagaaagtgttcaatttttgtcaaagttgccaaaagatgatttggagattacccatacactttctggttcacttaacaaaaattggagatcttaaatat

SEQ ID NO: 44976 - DNA, 452 bp, Glycine max
  Clone ID: LIB3093-006-Q1-K1-B3
gcttctctgattacaaaaatcacttttggggagatggggaggttcgaaaaccatgttgtcaaaggaggcatcaagttgccaattgggttcaggttttgtcccaccgatgaagagcttctccttcactacctcaagaagaaggcgtttgctcaacaattacccgcttcagtcatttcagagtttgacgtgtttcagactgagccatggaaacttccaggtgaattgagggaaaataggtacttttttagcaatagatcaaatggaaacatcaagagacctgctggttctgggtgctggaaatctgtaggcaaagaaaaacaaatcatccattcagagagcaatcaagtaattgggatgaaggaaacactgtttttttgcaaagggtcccatgagacaagaactcagtgggtcatgcacgaattgcgccttgtagctttctacccatgtcagat

SEQ ID NO: 44977 - DNA, 442 bp, Glycine max
  Clone ID: LIB3093-006-Q1-K1-B4
gctttacgcatgaggcagaaagaggaattcatcactgagtttcatgatcaaataaggggagatcaagaaagagagaatgaaatggaaaaacctgaagatggtcatatggacaatttctttgatgatggttttgattcttatctgctttctggttcagcagaaaactgggtaatgccaattacagatgattcaagtgatgtcaaaacccttcaaggagattcctcagttcactgtgtgggtgaatttcctaagaaggattttaagattaagcgcattgaggattgggtagttggtttgcagcattgtggaccacctctagaggaaacaaatgaagatttgtctaaagttattgaacctttagttgatgttaacacagtaaatggcgtgacagctgccagtgtggataataaggtcactccaagaatggaagcagctaaaagat

SEQ ID NO: 44978 - DNA, 272 bp, Glycine max
  Clone ID: LIB3093-006-Q1-K1-B5
ctcaattgaaactatgaaatcaacacacgccatgtgtgacgctctgaaaggcgttacataggccatcttgcaaatgaattggcaggtgtacatgccataattgcaaaaaagcatgcaagtctttgagagacagaatgagaagatggaatggacatacgagatgatgggcgatgccgtagatgatgcttagctaggagatgtagatgaagaggaaactgtagacctttgttaccaagtccttgatgtgattctcattgacatttaccaagatc

SEQ ID NO: 44979 - DNA, 438 bp, Glycine max
  unsure (1)..(438): unsure at all n locations
  Clone ID: LIB3093-006-Q1-K1-B6
caaaaacttaccgatttttcgagcaattggaagctttagacggaaaccactcacttcttcctccgacaacaaccgttggtgatgatgttgtcctgaacgcggttccgtgttcggttagtgcggcggcgcacgagcattcgagttcgacgacgtcgtgttcggggaagaagaagaggaagctgacgcagtttctggaggggttgatgagggaagtgatagagaagcaagagacgctgcagaggaagtttgtggaagtgttggacaagtgtgaaaaagatcgaatggcgagggaggaagcgtggaagaaggaggagctcgaaaggatcaagaaagaacgcgagcttctggctcangaaagatcaattgctgctgccaaagacgaagttgttcttgcttttcttagaaagtttgcagaagcagaaggcacggtgcagttac

SEQ ID NO: 44980 - DNA, 447 bp, Glycine max
  Clone ID: LIB3093-006-Q1-K1-B7
cccacgcgtacgcttcttttgaggaagttaagttcactggttcaagtatttcgggatccacaaggtggggacgtaaaggattgggatttcgatggagactgacagacctgacggccggactcccaatcaactgagacccctggcctgctcctgctctatcctgcatcgcgcccatggctcggccagttgggctcaaggagaaaccaaagtgcttgctgccgtttatggacccaaggcggggaccaagaagaatgaaaaccccgaaaaagcatctattgaagttatttggaaacccaagactggacaaattggaaaattggagaacgagtatgagatgatattgaagagaactttggagagcatttgcattcgaacgatatatcccaacaccaccacttcggatatagtccacgttgtacacgatgatggtgctcttcttccatgtgc

SEQ ID NO: 44981 - DNA, 443 bp, Glycine max
  Clone ID: LIB3093-006-Q1-K1-B8
cccacgcgtccgcttctgtcccgtctgacaaattatctcatgtgtacactgccattttgaagcctgacaatgagttgcaaattttgattgatggggaacagaagaagaaggtaaatttcttatctgctgatgattttgaaccccctcttatccctcccaagacaatcccagatcctgatgataaaaaacctgaggactgggatgagagagagaaaattccagactcaagtgcagtaaagccagatgactgggatgagaatgcacccttggaaattgttgatgaagaagctgagaaacctgaaggatgggacaatgaacctgaggagatagatgatccagaggcaacaaaaccagaagattgggacgatgaggaagatggtgaatgggaagccccaaagattgagaacccaaaatgtgaagcagcccccggttgtggtgagtgg

SEQ ID NO: 44982 - DNA, 217 bp, Glycine max
  unsure (1)..(217): unsure at all n locations
  Clone ID: LIB3093-006-Q1-K1-B9
cggacgcgtgggcggacgcgtgggtccgtattagaattcggggtgtttcaaaaccggaacgaacgtggcctncttcttccccagcaaaacctcatttcccaaaaaccaaaacccctctctgtctctctctccctctaacactctcacacacttccaccatggcggcacttaagcttctnctctcccaagctcgccgncattccttccccaaacgcgc

SEQ ID NO: 44983 - DNA, 368 bp, Glycine max
  Clone ID: LIB3093-006-Q1-K1-C1
ggaatgaccataatttatctctgcatgtcatcgggcccgctgcctctggtgcctctgattcacacacttctgattctagtaataattataataccacggttactactagtgccacggggactatctcagctactgcagaaacagacccaaaagggaaacgtccaattcgggagggttagttagcttagtctagcttcactatattgctgttattctttttgcaatgtaagtatgtgtggtgttgaactaagtagaatgtaaatagatcgaggctataggaatggcgatcgaggcttaagtgaattcttattctttaattaatgttacaagtgagaaattatgtaatctctcattttccatggtttaca

SEQ ID NO: 44984 - DNA, 306 bp, Glycine max
  Clone ID: LIB3093-006-Q1-K1-C10
attctaaagtgtttgttgttggatctggtgctttgggatgcgaatttttaaaaaatcttgctctcatgggagtttcttgtggaagtcaggggaagctcactattactgatgatgatgtgatagagaagagtaacttaagcagacagttccttttccgtgattggaatattggacaggccaagtccacagttgctgcttcagctgctgcagctataaatcctagttttaatattgaagctctacaaaatcgggttggttctgaaactgagaatgtgttaatgataccttctgggaaaacttgagtgt

SEQ ID NO: 44985 - DNA, 404 bp, Glycine max
  Clone ID: LIB3093-006-Q1-K1-C11
atcagaaacgaagaagaagaagagagtcagcgcagaaaaccctagaaacaaaacatggcggaaaaattagcccccgaaaagcgtcacagcttcgttcacaacggtcaaaaggtgttcgagtgggatcaaacccttgacgaggtcaatatttacataactcttcctcctaacggtcattccaagcaattctactgtaagattcagtccaagcacctcgaacttggcatcaaaggcaatcctgcgtatctcaaccatgatcttactagcccggtgaagacagattcttctttttggaccttagaggatgacataatgcacataacactgcacaaaagagataagggtcagacatgggcttctcccatattaggtcagggtcagttggacccttacgctactgatct

SEQ ID NO: 44986 - DNA, 446 bp, Glycine max
  Clone ID: LIB3093-006-Q1-K1-C12
cccacgcgtgcgcaacactatgaccctctcactatcagtctcactaactcccttaacttagtgaaaactcaaaacactttgcagtttcactatgagctaccacaagcgccaacagcacgacccatgggttgcacggcgtccaagctcgcaaaccaggacaccgtgcagccggtgcaagggagcggaaccacctcatgaacgaggcggtctacgcgcgccatgacctctctgatgtccactgcgactactgccggaccgtctgcctcatcggctccgtcctctccagcttatccgtctgcgaatccgtctacagttgcgaccacactctcgacgtcttccataacaaactccaacaccaccaacaacaccgtcgacaacaccgttagttaacccttcaccttcgcctacgctagcgacaaaactcgccagcagcaacacacggcggc

SEQ ID NO: 44987 - DNA, 443 bp, Glycine max
  Clone ID: LIB3093-006-Q1-K1-C2
cccacgcgtccgcccacgcgtccgtagattagagattgagagggaggagtacgtggaaggcattttgacctatcgctcgcgcgaaaccaaatctctttgtttctcttaattcctttatagtagcaagtgaagttgaagttgcaggtgtgtgtctcatggcgtctgttattcctcgatgccttcctcccccaattccaattgcacaccgacgaaaggcgcaggtggtgaaatcgtgtcaccaaaacgagagctctgcttcggctcacacagaccactcctcaaatccaaaggaactccgagtaacagtttccaggcgtaattgtctctcatgtttgtgttctactatagttttgattagtgattgcgccatgcctatttttttaccaaaggcattcgctgctgatggaaatggaatcatggaaaaacctgtgtgcagaaattgc

SEQ ID NO: 44988 - DNA, 368 bp, Glycine max
  Clone ID: LIB3093-006-Q1-K1-C3
ctcattccctcagatctactgcacgtgtatgggaccatagtagcgagggctgtgcctaaatatctctatactgatatctctcatctcatctatatctcgtattactgccttgctccctatctggcgaccaatatatgatgtgatgaaacacagctatagatacaacgtgcatgtatgtggctgctaatcccagagctactaccctcagagatgactggttcgaaaccccgctactgggacaatgtgtgataggatattataccacagaaatcaaagacgcaattatcagaccgaatcgcattacatgctacggagctgtggtacattcggccgttgtttaaagcagcatagccggacactagcttcaa

SEQ ID NO: 44989 - DNA, 436 bp, Glycine max
  Clone ID: LIB3093-006-Q1-K1-C4
cacactactacttctccctctctccctctctaatagtaacagtaatagtaatatacataacataaccaatggaagcacgtgcaggagccaatcaacgtattgcaagaatctctgctcatcttcagccttcaaatttccaggaagggagtgatgttcttcttaagagaggtgagtgcagagcaaaaggtggggcacctggattcaaagttgcaattttgggggctgctggaggaattggtcaatccctttctttgctgatgaagatgaacccattggtttcagttcttcatctttatgatgttgtcaacacccctggtgtcacagctgatgttagccacatggacactggtgctgtggttcgtggctttctggggcagcaacaacttgagagtgcactcactggcatggacttggtaatcatacctgctggggtgcc

SEQ ID NO: 44990 - DNA, 417 bp, Glycine max
  unsure (1)..(417): unsure at all n locations
  Clone ID: LIB3093-006-Q1-K1-C5
attcatcactagaagtgttggatgcatttctatttctaactaattattgtgcttattattattgttgagaaagaaaagaatggcaaagttaataaaattctttgagttgaacacaggggccaagattccttctgttgggttaggcacttggcaagctgagcctggtgttgtagccaaagctgtcaccacagccattctggttggatacaggcatattgattgtgctcaagcgtataacaatcaagcagagattggttctgctcttaagaagctttttgatgatggtgtggtgaagcgtgaagacttatggatcaccttcaaactctggtgttcagatcatgcttcagaagatgtgcccaaagcattggataaaacattgcangatttgcaacttgattaccttgacctctatctgat

SEQ ID NO: 44991 - DNA, 436 bp, Glycine max
  Clone ID: LIB3093-006-Q1-K1-C6
gagataacttggatgtggtgtcatgttctgtatgtcagatgggtgttttaattcgggatgctcacaagtgcaatgcatgccaaggttattgtcacgagggctgttcaacaagatcaacagtctcggcaaatgaagttgagtacttgactacatgcaagcaatgctaccatgccagattacttgctcagaaagagaatactaatgaatctccaaccagtccattactcctacaaggacgagagaataactctgggacatttttgaatggatcaaggcctaaatctcatgatcaagtactgaaatcttccaggacaaaggctaataatcccaacgtgaaacatgttactcctgtgacggctttgaaaggaacaaaggctaaatattatgaacaagaaccgacttctaccaagacaaaggataataatcattttggcac

SEQ ID NO: 44992 - DNA, 445 bp, Glycine max
  Clone ID: LIB3093-006-Q1-K1-C7
gatgatttgattttgatttggatggttgcgccagaggaataattaataacactaataggataggtttgtggggaaaattggaagcatcgatcggaaaatgcaatccttatcgttaagtatgagtctgaggagtagtagtttagcgaattttctgttgctgagttcagagacgagagtgagaagaagaagaaggagtgtcatcgtagcgtgtgctttggagggagacagtggtagcagtagcacaagctcctttctctctcggacccaaacctacgcccttcttaagcaacaattgcaagtggctgctaaatctgaggattacaaggaagcagctagaattcgagactcgttgaagcaatttgaggacgaggagcctgttttgcgtctgaggagactattgaaggaagcaattgctgaagagagattccaggatgctgctagttac

SEQ ID NO: 44993 - DNA, 441 bp, Glycine max
  Clone ID: LIB3093-006-Q1-K1-C8
gaaaaactggttcttttcgcgttgcgttttcttggtctccccgtcgattcttcttctgaaggttaatacttcggaacttttagtttcctctcctggcttctggttggagtttccggcgaccttgtcggagattttgttgtttatttttcgcaccccttgtgaaacttctcaaagaaaactaagaatgtttcttgttgattggttctatggaattttggcgacccttggtctgtggcaaaaggaggcgaagattttgttcctagggttagataatgctgggatgaccactttgcttcacatgctcaaagacgagagactggttcagcatcaacctactcagtatcccacttcggaggagttgagtattgggaagataaagtttatggctttcgacttgagtggccaccagattgctcgtagggtctggaaggactattacgc

SEQ ID NO: 44994 - DNA, 395 bp, Glycine max
  unsure (1)..(395): unsure at all n locations
  Clone ID: LIB3093-006-Q1-K1-C9
cccacgcgtccgcccacgcgtccggcataactgaacaaacaaagcaaccctatgtcgaaggtggtttgtgtcaccggagccagtggcgccattggatcatgggtggccctcctgctcctccagcgtggttatacggtccatgccaccgtccaagacatcaaggatgaaaatgagacgaaacatttggaggaaatggaaggagcaaagagtcgtctccatttttttgaaatggatcttcttgacatcgactccattgccgctgccataaagggttgctccggcgtaatccacctcgcatgtnctaacatcatcggtcatgtcgaagatcctgagaagcagatactggagccggcgataaaaggaacagttaatgcgttgaaggcggcaaaggaagc

SEQ ID NO: 44995 - DNA, 452 bp, Glycine max
  Clone ID: LIB3093-006-Q1-K1-D1
cccacgcgtccgttacaataaaaacactcaaaagaggagaaaaaaagaagaaaagaatggtaacaatagctggtggtgtgagtctttcaagccctagcagggtatttgctaatgctaagggaatagactcagcacaaaaggcccaggccgtgaggtttccagctctgtcgaggcccattcaaaagtggcctggtttggtgaagacccggcccgttcgggcgacgccggagaagatatcggagaaggtagaggagagcataaagagcgcggaggaggcgtgctcgggaggcggcggtgacgcggaatgcgcggcggcctgggacgaggtggaagagctgagcgcggcggcgagccacgccagggagaagcagaagcagtctgacccgctcgaaaattactgcaaggacaatccagagactgatgaatgccgcacctatgataattgatgactg

SEQ ID NO: 44996 - DNA, 279 bp, Glycine max
  Clone ID: LIB3093-006-Q1-K1-D10
aagaataatttttgtatcacgttgaattgatcatgtaaaaaattacaaatgaacatagaagaaacaaaatagaaggaggggaggaggagaatcatggaatattgtacgtgtgcagctgcccatgcttctctagcttggttgccgagtaatattagttgcacctccacattcattgttttatcatcagaaaacctcacattaaaattcttttatattcatttaatagtaagaagatgcttaaaggaggttgcataaaaaaaaacacaatgatatctaaaa

SEQ ID NO: 44997 - DNA, 390 bp, Glycine max
  unsure (1)..(390): unsure at all n locations
  Clone ID: LIB3093-006-Q1-K1-D11
ggataagagagagaaagcagggtgcgtgtttttagagagagagagaggaggaatcaggcgaattgtgtgtggtttggtttggggcatggaagggctgggcatgctgaagcagctcattggtcagcttcagcagctcttggacacttaccagtctcaatctcattcttcttctactctcattcttcaacctcctcacactctcctctttcaacaacaacaccccagatggacgacctcccttgacattgaggatagctctgtagatgacttatgtggccttgtaatgacagctagaaagtctggcagtttcaggatgtcagatcctgtaaagcctncaccttctaagaagtctcgaagagacagaagcaggggcaaatcatctggaagatc

SEQ ID NO: 44998 - DNA, 453 bp, Glycine max
  unsure (1)..(453): unsure at all n locations
  Clone ID: LIB3093-006-Q1-K1-D12
cccacgcgtccggccaccgcaagcaacaatgacgtcgccgccgccaacgacggtcccgtgatgagccttatcaacaagcgcctccgcgctctccgcaagaagctgaaccgcatcctcgccatggaagaggccgtcaccttgggcaagcccttgaacaaggagcaggaagaggttctacgctccaaaccctccgtcctcgccctcatcgatgagctcgataagctccggcaacctctcgccaccgctctctccgaagagctccaaatcaacggcacgtcttctcaaaaccctcgccacgagaccgagaccgaaaacgaaaccctagctgagagctccggctcgactgagccgaactcgaactcgaggaacgacgtcgttgtggaggaccttgctaatttgctctatnttggttcacttttcgatgtgaagagtgactttgcgtccacgatgctt

SEQ ID NO: 44999 - DNA, 422 bp, Glycine max
  Clone ID: LIB3093-006-Q1-K1-D2
ggtggttggcggattaaccctaatttgtatgaagaagggaaggtttgccttagccttctaaatacatggacaggcagaggaaatgaagtatgggatcctaaatcttctagcatccttcaagtcctagtttcactgcaaggcttagtactcaactctaagccttacttcaatgaagctgggtatgataagcaggttggaacagccgaaggagagaaaaattcattgtcatacaatgagaatacctttttacttaactgcaagactatgatgtatcttatgaggaaaccccccaaggattttgaagtgctcatcaaagaacattttaggaggcggggtcataacatccttaaggcttgtgatgcatatatgaaaggttacttgattggctcgctgactagagatgcctctgtaagtgaaaagag

SEQ ID NO: 45000 - DNA, 410 bp, Glycine max
  Clone ID: LIB3093-006-Q1-K1-D3
ctgttatgtacacattgttagccaagagttgcattaaaactgttcacatcatttgtttttgcatggactgaagttcataagaaatcaatcattagtaatatagtatgtgaagaccaagagggacactgtgaacgagccatgttaaaatcagtcagatgctcccatgtaatatatgattatgcagtccaaaatgatctgttagtgtatcattattaatttattatagaactataatatttatataaatattttaattttcgttaaataaaattattataccagcagaagttagtataattcaaactgttagtattacacgactttttttttagaataattaagacaaagctagtttgtaaaagaacatgattaagtgaaagcaatacaaaatgttgaaacaaagtcagttg

SEQ ID NO: 45001 - DNA, 450 bp, Glycine max
  unsure (1)..(450): unsure at all n locations
  Clone ID: LIB3093-006-Q1-K1-D4
cccacgcgtccgaaaaagagttctttcaaaatgcaaacagccttaaccttcgctgcccccaacgttgtgccattggcacccacaaagagtgtctcccatattaccatctttcctaccaaattgaaagccccgcgctcctcacctcgttactctccgattagggttgcaaccgtggagcccgacacttcaactgtcgactacaactctgcgttctcagtgtttcctgcagaagcatgcgaaactgtaagaggggaagcctgcatggcggagatgtaccctgaaacgaagctacagccagaggctaagactccacgagtcgttacagagaacgttgagagagagtatcttgaatacgatgatcctaanacgtaagatatataggaatcaattcagatacactcttattatagaggtttttaaagtgacaactaaatagaaatcatcatggac

SEQ ID NO: 45002 - DNA, 414 bp, Glycine max
  Clone ID: LIB3093-006-Q1-K1-D5
gaagaacatacagtgatcgagtgcgtattcggattgttgggtactggattcgcgatcgtggcggctgattcatcggctgtgcacagcattctcgtccacaagtacaacgaggacactatcatgcttctctatttccacaaactcatcgacgttcgcgatcagctcggatacagggttcaattcactgagtacattcagaaaaacgtctgcttgtatcagatccgtaacggcatctatattaccaccgtcgactacgccaatttcacacagggcgaacttgccactgctctacgcaagaacccatactctgtgaacatacgttttgctggccatgacaaacatacaggcccttgactgcactatattgactacattgcaacgcttcagatgcttgaaaagggagctcatggttat

SEQ ID NO: 45003 - DNA, 426 bp, Glycine max
  unsure (1)..(426): unsure at all n locations
  Clone ID: LIB3093-006-Q1-K1-D6
agtttctcgacgagggtttctcgctggggaagtcactaaccagcaagaacctcgtcgagctggcatccaaagggggacagaggaacgccatcaacgttgttctgacatccgctgacgtggcagtcgaaggtttctgtatgagccgatgtgggacccacggctcctcctcttctgcatctcacgtgaagaagaacaacaacggcaagaactacaagttcgcttacatctgggtcggaaactccgaaacccaatgcccggggcaatgcgcttggccattccaccaacccatttatgggccccagagcccacccttggttgctcccaacaacgatgtgggacttgacggaatggtcataaacctcgctagcctncttgccggaaccgncaccaacccattcggaaacggttacttncagggtcccgcgg

SEQ ID NO: 45004 - DNA, 439 bp, Glycine max
  Clone ID: LIB3093-006-Q1-K1-D7
gttcagttctgaacggaaaagcaccgtcgcaccttctctgaggcttctattgtctgtcgcgagtgtccatggtgagggttagtgtgctgaacgatgctctgaagagcatgtacaatgctgagaaaaggggaaagcgccaagtcatgattcggacatactccaaagtcattatcaaattccttttggtgatgcagaagcacggatacattggagagtttgagtatgttgatgaccacagggctggtaaaatcgtggttgaattgaacggtagactgaacaagtgtggggttattagtccccgttttgatgtctgcgttaaagagattgaaggttggactgctacgcttatgccctcaagactagttgggtatattgcattgactacctctgccggcatcatggatcactaataagctaggagaaaaaatgttggtggtaa

SEQ ID NO: 45005 - DNA, 449 bp, Glycine max
  Clone ID: LIB3093-006-Q1-K1-D8
aaaaacttaagttcattccttgtgttttgctttcttcctcaaaaccaaacatgtcgaacacatgctgcaactgcgactgcgctgacaagactagctgcaccaagggaaacagctatggtgttattgtagagactgagaagagttacatcgagactgttgtcatggatgttccagcagctgagcatgatgggaagtgcaagtgtggcactaactgcacttgcacggactgcacctgtggccattaaggaatatgtatgaaaatgtaattgccatgtgtttggcaatacaaatatccaaataatgtaatcttcgtatgaataaatgtgtgtgctgttatcctacttcaggtctgtgtagtcatgcagtctgaatcatttcaagctcctgtcttaggtaatataacagccatggtatgtggcattctatggtgtattagactaaaataagtg

SEQ ID NO: 45006 - DNA, 437 bp, Glycine max
  Clone ID: LIB3093-006-Q1-K1-E1
gtaaataccatgactatgaccacaagtgaaccattcatgtcaaacatgcatgtgacttttcatatatctcataataaaaccgcaagccattaatgtcaaaatataataacagactaataaactcaacaaggaggagaagatgtcgactccggactaggaagagactgatgagggaattataaaagattgcaacaagaatcctacagctggcatcagtggggctccccaagacaataatattatgctttggaatgctgttatctttggcccagatgacaccccttgggatggaggtacgtttaagttgacacttcagtttacagaggattatcctaataaaccacctactgtgcgctttggttctcgaatgtttcatcctaacatttatgcggatggcagtatatgcttggacattttacaaaatcagtggagcccta

SEQ ID NO: 45007 - DNA, 434 bp, Glycine max
  Clone ID: LIB3093-006-Q1-K1-E10
cccacgcgtccgaaattctcaactttcctaactttagcaaccatccaagaagttggtcagttgcttgtctctccttgaattataaaaccattcacagtcttgaacccaatttcactctttgcacctcaaacaccttataagcctcaatttcacaaccaaaaatgcaaagttcaatctcacaatctgagatttgcatcactgattaccttctaccccaagaagttccatctcaatttcaatttccagatatgagcaacaataacataccaatgaaccataccaaccttcaaatgcctcaaatcacatctttctccaagcctccaaggtcctcatcaaatctaagcaaccgcaaaccgggcttgagaaacatcacaatcccttcattaccttaggtcttacaacaactatgtaacaaacaacaacctcatcaacaa

SEQ ID NO: 45008 - DNA, 250 bp, Glycine max
  Clone ID: LIB3093-006-Q1-K1-E11
tgcatgcgtactctaatattgggctcaggacctgtgtttgcactgctggaatgtcaaggatgtgcatcatctcatttcaaggtctgaatttgtcaccacttaaatccgaacttgttctctgtacgatcgtctaattctatatgggtaatcgagagctatcccatctacatcgagatacgggacactagacaaacccgactatcttcagagtcacctgcattgaaagagtgtcctagttgtaactaacata

SEQ ID NO: 45009 - DNA, 431 bp, Glycine max
  Clone ID: LIB3093-006-Q1-K1-E2
ctttctctctctcaggcgttctactgaggaataaagttgattctgaatatgaactgtgggggtcttcatccgaacgcctttgcagactgtgaagagatgagaggccctgtgaattttgttgaacagaaggagcctgtcatttgccctaagccgcgccgagttgtggttgtatctaacatgcctatgaggcattcgagatggcatttcaatccacaggctgagggttctgactcaaaatctggggcagagctattagagataatgtttaagaaggagagccatggagaggaattttcaaatcacgtagcttcatcttctccattatcttgtgggtctcctgctgtccgagctgcatatcccttagtccaggatgctcgattcggagatgaaaagctttgttcgacattattaatttcatcgccctcaagttt

SEQ ID NO: 45010 - DNA, 431 bp, Glycine max
  Clone ID: LIB3093-006-Q1-K1-E3
cccacgcgtccgcccacgcgtccgcaacaacaaaaaaagaagaaaattttagaacaatggaggcatcaaagatgaagtttttcttggttttggtggtttccgtgttggcgatggcagcaactggggtttcagctgctgaggcacctgccccaggtccttcatccgatgccaccaccctctttgtgcccactgcttttgcttctctctttgttcttgcatttggctttctcttctaattttccaacaaccctttggttatttgttacatatataatgtgcagaggtggtggttgtgttttgtgtttcgttcttcacttttttttccaactcaacttgagaagtggttggttggtcactactctcttgtgagtagaaaggttttttttttttgaagatgcattgaattggagatttggagtgaggaaagatga

SEQ ID NO: 45011 - DNA, 432 bp, Glycine max
  Clone ID: LIB3093-006-Q1-K1-E4
caccgattacccaccaactgatatacataacctcttcacctttccctccttccctaatttgtcactaaaaaaacaaacaaataaaaaaaaagtccactaagttggggcacgtcacccatctcgcccttcccctcgctcatctcaaatccatgcttcggaattagggtttccattcggatttcgtaagtctggtgcccaatttcgtgactccgagcgacgtaaaaggggaagggaaagggatgaggatttggggatcggagatcgtgttcgccatattgctctgtgggaccctttcatgcaccgctcaagctcatcacatcactgccagcacctgcccggctcgctccatcctcgatttcgtgttaaggttttcagatttcacatgccaactttccaattctcttggatccattgccgtcaccgagggagatg

SEQ ID NO: 45012 - DNA, 360 bp, Glycine max
  Clone ID: LIB3093-006-Q1-K1-E5
gggacagtttggaggacctacagaggatgttcgtggagatggtgggggaagatcatggccatgggatcggctttgacttgaaccaggatcagacggctgggaagcgaggacgcgtaaatggatcaaagggcaacgcgctcaagcgcagcaactcccgcagttagtgtgccgtactgaatccgtcttgtaattttcttacttgacattggatgatgattgaaatgaaaatccttttggtgggattaaattaagatttgctgaacaactactaggacattagtaatgctgtaccttagttatggaacaatacaatacaccaagtgcgactgtgcaaattgtgctttgcattctagtactaaa

SEQ ID NO: 45013 - DNA, 446 bp, Glycine max
  Clone ID: LIB3093-006-Q1-K1-E6
ctttctctctctcaggcgttctactgtggaataaagttgattttgaagatgaactgttatggtcttcagcagaacgcctttgcagcctgtgaagagatgagaggccctgtgaattttgttgaacagaaggagcctgtcatttgccctaagccgcgccgagttggggttgtatctaacatgcctatgaggcatttgagatggcatttcaatccacaggctgagggttctgactcaaaagctggggcagagctattagagataatgtttaagaaggagagccatggggaggaattttcaaatcaggtagcttcatctcctccatttttttgtgggtctcctccgggccgagctgcaaatcccttagtccaggatgctcgtttcggagatgaaaagctttgtccgacattattaatttcatcgccctcaggtttactatctccatcatc

SEQ ID NO: 45014 - DNA, 414 bp, Glycine max
  Clone ID: LIB3093-006-Q1-K1-E7
cttacaacttctgttacactcggcatatgctccacctctcactcaagtaattactcctaagggttatattagtcttcaaatccgtatactctctacactgacagaaacccttctgtttctggtcatatggtctctttcagaacctgctctcttttctctgttagtgtcttctgatttatacagatccgatccaaactatagagaatgtcagaaacaccccataggaagacagcgagccttaccccaaaacgaggtcagatcaaggctcaaatgattactagccttgtgaattcatcggtctccactatctcatatacaggggaatcgcttcgaaacgtgattggaaatgcagccggctcatgttctgcatctgttaccccacccacaagtaatggctacaactctgaagccaac

SEQ ID NO: 45015 - DNA, 449 bp, Glycine max
  Clone ID: LIB3093-006-Q1-K1-E8
cggacgcgtgggggaaaactctggacaaaaaatggagtgctacacaaggccaaacaggagtgacatccacctctcagcagaggaagaagccaccatagaagcaaagaccagagagtactttgatggaatcgcaccacaccgccacacaaagcctcaacgaagtgactattcagctcaatatgtcgatgctttctccaatagcccatcactcttctttaactataccagaattaacacaattccaactcctccagaatgatccccaagagaagaaatcggtgtacaatggaagtcaagtaccggaagaatttgtggaaacagagtattaccaagatctcaacagcgtggacaaacaccaccatacgactggaacaggatttatcaaagtagagaaaaatggaaatgactttcacatagaaccagataatgacactggttgccatcactct

SEQ ID NO: 45016 - DNA, 278 bp, Glycine max
  Clone ID: LIB3093-006-Q1-K1-E9
atcgcacatactctcataatggttgatctaatgtcatataatataatacaatctgggttaggggttattatactcaacctcaacgttaaatgcatcacatgatgtgttcatgatcaactgcttgattgactcttgatacacatagattcctatactcaacttagatacacgctcacgacgatatttgttgtacgtcgaggtatctacattacatacctatgctcgagcttattatccgaacctaatttgaaaggaccgttaatgacatctcatttgat

SEQ ID NO: 45017 - DNA, 410 bp, Glycine max
  Clone ID: LIB3093-006-Q1-K1-F1
ctgaacataagttcctgtactgatttggaagagataccagattctattgtaaaactttctaagctaagacttcttgacctctcaaactgcataagcctttcaagtttaccagaggacattggtgatctatgtaatctcaggaatctcaatatgacaagctgtgcaaggtgtgaattgccatactcagtaaccaatcttgagaatttgaaggtggtggtatgtgatgaagagacagctgcttcatgggaagcattcgaagctatgcttccaaatctgaagttagaggttcctcgagtcgaggttaacttaaactggcttcattctattagctcctaagacatgacctggttcatgggaagcatttgaaactatgattccaaatctaaagtttgaggttcctcgagttgatg

SEQ ID NO: 45018 - DNA, 338 bp, Glycine max
  Clone ID: LIB3093-006-Q1-K1-F10
gaatcacgctgatttgagtaacgaagtagttgtgctggttgctgttgtaatattggttggggtattcagcatgcatcattatggttcagataaagctggttggctatttgctccaattgtccttctttggtttcttctaattggcggcataggaatattcaacatctgtcaatatggcagcagtgttctaaaagctctttcaccattgtatatataccgctatctacaacgagaaggcaaagatggatggctttcccttggtggcattttgctcagtataacagggacagaagctctttttgctgacctagcacactttccagtttcttgtgtacaga

SEQ ID NO: 45019 - DNA, 452 bp, Glycine max
  Clone ID: LIB3093-006-Q1-K1-F11
ggaaaaccctagctagtagtctcagttcgtttgagagagaaaaaatggcagagggtctcgttctccgcggaaccatgcgcgcccacaccgacgtcgtgacggcgattgccactcccatcgacaactccgacatgatcgtgacggcgtcgcgcgacaaatccatcattctctggcacctcaccaaggaggacaagacctacggtgtcccccgtcgccgcctcaccggacattctcacttcgtccaggacgtcgtcctctcatccgacggtcagttcgccctctccggctcctgggacggcgagctccgcctatgggacctcgcggctggcacctctgcccgccgcttcgttggccacaccaaggacgtgctctccgtggcgttctccatcgacaaccgtcagatcgtgtcagcctctcgtgaccgcacgatcaagctgtggaacaccctgggt

SEQ ID NO: 45020 - DNA, 461 bp, Glycine max
  Clone ID: LIB3093-006-Q1-K1-F12
atccttctcttctgaataatccagatctctttctgcccttttctccgtcacgcttttcgtgaccggatctgtatggatttgatccagatctacacgccgatggtggttttggccgggtacgacaaaccttcgatcgtattttgctttatataggtacaacagagaatcgatgacaagaacgcagatccgacggtagatccagccgattccgcttgttcgatcgctacagacccctgtatcggatcattaagcagcgtgtctcgcgcgttctacacgtgttgccgatctcggatgttgtaaaattagtttatgatgtgaagctatggagtggaaaatatgtggatgtaggagatttcgggatgaatggcctcaaaacgctttgtcgtttgtggctattgagtcctgagtgatcttgtcatccgacctttgccatgacaggtgcgcttgcatggcaggtcaaa

SEQ ID NO: 45021 - DNA, 406 bp, Glycine max
  Clone ID: LIB3093-006-Q1-K1-F2
attggaaatgaagcatggtacccctgaatctccttccttccatcgactgggtccaagaggcacttgaatatcaagttacatacatttctgtggtgaaagcctagcctattatttctatgaatcaaacgcgagagcaacgtcctttatgaaatgcttagtgagcatacaatacaggatgaaaacttgacataaacatgtttaatttgattatgataagcgaatccttttttttatatatatttttaaatattttataccctttgtcgtggcattttgatttggtttctctttatggtaatactactaattaaatattatgttgaatgggttggttgtgcgtttggttggttgcttttttaacctttacataactggtttattaatttggggcctatgatctgtatct

SEQ ID NO: 45022 - DNA, 443 bp, Glycine max
  Clone ID: LIB3093-006-Q1-K1-F3
cccacgcgtccgatccctctaatcactctagctgttgcaaatttctactatttttcaatggcttctgcagatgttgagttccgttgctttgttggtgggcttgcttgggtcaccggcaacgatgccctcgagaaagccttttcaatctacggcgacatcgttgaatcgaaggttatcaacgaccgtgagactggaaggtccagaggattcggatttgtgaccttcgcctcagagcagtcaatgaaagatgcgatcgcaggaatgaacggccaggaccttgacggtcgtaacatcactgtcaacgaagctcagacccgcgccagccgtggtggtggtggaggcggtggtttcggaagtggtggtggatacaaccgcggtagcggtggatatggtggtggtggtggcggcggcggatacggtggtcgtcgtgaaggtggatacaa

SEQ ID NO: 45023 - DNA, 453 bp, Glycine max
  Clone ID: LIB3093-006-Q1-K1-F4
ctagtgtgcacccttgttgccttgcgtgcgccggttgcgcagccccctatcgtgcgcatgcgggccaatcacctgaccgaaactactaacaccggcatgacaatcgttcaccagcgccacagaacccagatctcgggttccactcgcccagccatgtccaaggcgcgtgtctacaccgatgtcaacgttctccgccccaaagagtactgggattacgagtctctcaccgttcaatggggtgatcaagatgattatgaggttgtgcgcaaagtgggaaggggaaagtacagtgaggtttttgaaggcataaatgttaatagcaatgagcgttgtataatcaagattcttaagcctgtcaagaaaaagaagattaacagagagataaaaatacttcagaacctttgtggtggcccaaatattgtcaagcttcttgatatggtcagagatcagcac

SEQ ID NO: 45024 - DNA, 446 bp, Glycine max
  Clone ID: LIB3093-006-Q1-K1-F5
gttctgaaaccactctcgcgtcgttaccatgccgcaaggggattacatagaacgccacagaggagactatggctaccgtctcgatcacttcgagcgtaagcgcaagaaagaggcacgtcaagttcacaagcgctctgcaattgcccagaaggctctgggtattaagggcaaaatgattgccaagaaaaattatgctgaaaaggcgcagatgaagaagactttggctatgcatgaagaatcatcgtctaggcgcaagactgatgataatgttcaggatggagctgttcctgcatatcttcttgatcgtgataacacgaccagagcaaaggttcttagcaacaccattaagcaaaagaggaaggagaaggcagggaaatgggatgttcctctacctaaggtacgtcccgtggctgaagatgaaatgttcaaagtggtccgaactggta

SEQ ID NO: 45025 - DNA, 407 bp, Glycine max
  Clone ID: LIB3093-006-Q1-K1-F6
tccaaaatttccacgacgaggcaccgcaatggacgaaccgaacgacgcacaagacaacagggaactctacgcgctcttgaatgagtattcagaagcttccgatgaagaaattcgcagagcgtatcgtcaatgggcgcaagcctatcataccgataaataccaagctcctcacatgaaggatattgctacggagaactttcagcgaatatgcgaagcgtatgagattctttcagatccaaataaaaggcagatctatgatatctacggcatggaggggttgacctctggtttggaacttggtccaaagcttaatggaactgaagagatcaaggcagaactcgagagattgaagaggatgaaggaacgcgagataatggcggcgcattttcaacccttcggtacaattg

SEQ ID NO: 45026 - DNA, 397 bp, Glycine max
  Clone ID: LIB3093-006-Q1-K1-F7
actatatataggtttttatagggtatcctttgtgtgaaactcaagagacctcgttttcaggggattttctgtttgatgtccataaggattatcaattatgttatatatggtctgggatacagtcttgacttacagtttttaacttggttgttttcattgttatggcaaaaaaaaaaaaacaaaaaaaaaaaaaaaaaaaaaaaaaaaaaaaaaaaaaaaaaaaaaataaaaaaaaaaaaaaaaaaataaggacaacacttatgaacgttcccaacatcgaacccctcctgcctaccttatacatcgccattactgcgacccaaacacatgtcattaggccgaatctttacaccgaagtggctggggaacccatggcgttaccctacttaattacctt

SEQ ID NO: 45027 - DNA, 448 bp, Glycine max
  unsure (1)..(448): unsure at all n locations
  Clone ID: LIB3093-006-Q1-K1-F8
cccacgcgtccgaaaacatagtactattaaagagagatatcaaagcataaggcaaaagcatattcttccaaggttttattcttttctatttctaaaacagcgtttgcttttgtgtttggtcttagacgcagcacgcccccaccactgtttcaaccctcaaattgtgtcttcttcgctttctggttttgattaggttttgttccatttgaaacaatattcatcgatccatcgccaaacatgccttctagtcacttgcttcttgaggaacctattaggatggtctccatccttgaaccatccaagcctagttttttctctgcaatgacaaagattgttggtaccctgnggcctaaatctagatccgtcgaaactatntctggttgtctcaaggctggcatgtctgtggctcgttttgacttttcatggcatgaccctgagtaccaccagg

SEQ ID NO: 45028 - DNA, 334 bp, Glycine max
  Clone ID: LIB3093-006-Q1-K1-F9
gcattattttgaggataatgtgaaggaaatcctaaattttcgtggatttaattctgaaattggcctccaaattcttgttgataaatcactcataaccattagttacgggaagatttatatgcatgacttgttgagagatttaggcaagtgtattgttagagaaaaatcacctaaagagccaagaaagtggagtagactatgggattgtgaagatctctacaaatttatgtcgagcaataaggaagcaaaaaatctggaagccatagttgttgaagatgaaccagggatgttttctgaaacaacaatgagatttgatgctctatcaaaaatgaaa

SEQ ID NO: 45029 - DNA, 303 bp, Glycine max
  Clone ID: LIB3093-006-Q1-K1-G10
tgcagatcttcgtcaagaccctcaccggatagaccatcacccttgaggtggaaagctctgacaccatcgacaacgtcaaggccaagatccaggacaaggaaggaattcccccggatcagcaacgtctcatcttcgccggaaagcagctcgaggacgggcgtaccctcgccgactacaacatccaaaaggagtcaacccttcaccttgtccttcgtctccgtggtggcatgcagatcttcgtcaagactctcactggcaaaaccataaccctagaagtcgaaagctctgacaccattgacaacg

SEQ ID NO: 45030 - DNA, 369 bp, Glycine max
  unsure (1)..(369): unsure at all n locations
  Clone ID: LIB3093-006-Q1-K1-G11
attttatccaattgaaattttaaaaatgactgggataaacttaagaattcaattattgaaattgaataagtaaacaatttaattggattggtcgaatggtatcaaaaaaatggagtactaactcccatttcttatttattattgaattaaccgatcaacttgctttgttatcgaacatttctttttgatttcaaaaattttccggaaaaaatttgaatctatttttatatgcgaatcaatcctactacttctggtcctgaggtttctgcgcttganaaaaaaaaatctgggacgtatcgccaaaatattggtcccgtacttaaaggaacttttcccccaagtaagaagcctaatttttaccacgctttt

SEQ ID NO: 45031 - DNA, 228 bp, Glycine max
  Clone ID: LIB3093-006-Q1-K1-G12
attttatccagttgaaatcattgaactgacttggataaacttaagaatgcaattatggatagggaatcagtgaacacttcaattggattggtctaatggtatgaaaaaaatggagtactcactccgatatattattgattattgcattaacctgtcaactcgctctgtaatggtgcacttctttccgatctcaaaacttatgcagaaaacagcagaatctatctggat

SEQ ID NO: 45032 - DNA, 307 bp, Glycine max
  Clone ID: LIB3093-006-Q1-K1-G2
cccacgcgtccgcccacgcgtccgctggttccgtaagaaaagaaaggatgggagtgaagtaaaaattaacatgaaatgaactttttgatagagggccaaaatggcatttcgtttatttattttattaagttagtgttacatataagatgtctgtaaaaatataaattatgaagttgtatatataaatatatgtttgctgctgaagatttttcattcgtgaatgaaaccgagaaaaaatgaacaaaaaaaaaaagaaagaaaatcacaacaaaatgaccgttacacttgccagcaacctaaataaaaa

SEQ ID NO: 45033 - DNA, 443 bp, Glycine max
  unsure (1)..(443): unsure at all n locations
  Clone ID: LIB3093-006-Q1-K1-G3
ctcactgtgtctgtctatgtgtctcttacacccttccattttctccttctcttcctcccatggtgtaattgctccaactatggccgtggacctcatgacgacgggttgcagccgaaacgacaacatcaatagtttcacaaccaaagccgaggaaaatgccgtccaagaagctgcttccggcttagagagcatcgagaagctcatcagactcctctcgcaaacccaaacccaaacccgccatcaaatcaacaacaatagctctaatgaaatcgccatcgccatggactgcaaggtcgtcgctgacgtggcagtctccaagttcaagaaggtcatatccctcctcggccgaacccgtaccggccacgccaggttccgacgcgcccctctccccaaccaaaaccaacacactcaacctncctccgaaccacccgtgttccacgcta

SEQ ID NO: 45034 - DNA, 392 bp, Glycine max
  unsure (1)..(392): unsure at all n locations
  Clone ID: LIB3093-006-Q1-K1-G5
agcatcgtcaggcaaatgcaaaggcaatggccgcttcctcactgttttcccctgttctcccgtacaccaaattctcctcctcaactctgcgcttcacgaactcaaaaaattccatctttgccctctcgtgttcttctccgaagagcattcctgtgacggagaaggaggtgctccaagccatagctgactccgacggcaagaacctcccatgcgtcagaacctacgacaacgacctgtctcagctcactctcgtcggaaccgtcgatttcaaccaagctttgacggccgncgccgtcgacggcggtgaagtcgcctacgatcacatcgacgccggcttggacgccatggtcgtcgaaaccgtgttccctgctccttctagcgaccacgccact

SEQ ID NO: 45035 - DNA, 449 bp, Glycine max
  Clone ID: LIB3093-006-Q1-K1-G6
gtgaaaacgaatggaggttgatgatcgagagagagcttttgggccgggagattatgaatgttatagcatgtgaaggttctcagaggattgagaggcctgagacatacaaacagtggcaggttaggaatacgagggctggtttcaagaagctccctctgaatgaggaattaatggccaaattgaggactgcgttaaaggaatggtaccacagattttgtcttggatgaagataacaactggttgcttcaaggttggaagggccacattttgtatgcttccacttgttgggtgccagcataatgagatgctactggactgggttcagaactcatactatactgaaggttttggtatccttggtttggctacctctacttgcttaaccttcaggtgctgtgatgaagatggcaacaagctttgcacgaaagtacttggtaaaactatggcac

SEQ ID NO: 45036 - DNA, 227 bp, Glycine max
  Clone ID: LIB3093-006-Q1-K1-G7
gaaaaagacatttgtcaatgtttgaaagtattgaaaattatctagaacaaaataacttgatgcctattagatattcatacaaggaagttaagaagatggcgggaggttttaaagacaagttgggtgaaagaggatatggctctgtgttcaagggaaaattgcgtaacgggtcttgtgtggcaataaagatgttaggtaaatcaaaaggaaatggccaagattttatt

SEQ ID NO: 45037 - DNA, 332 bp, Glycine max
  Clone ID: LIB3093-006-Q1-K1-G8
cccacgcgtccgctgacaagctgaggtcattggtgcgaaaattgactacttcaaaatgacgtggtgcctatcagatactcatactaggctgtgaacatgacgacctcaggttataccgtcattgcgctttaatgatgatatgcctatagcatcactgtgaaagtgcatgacgtgcttcgagctataattgacttcttcggcaagtacctccgatgcgtccaagcctacatcaacgacctggctaacatcactctaacatgttctgacaatataatccaagctatggcattctgcgtccatgactgaaaacgagctctcgtctatcacatcat

SEQ ID NO: 45038 - DNA, 285 bp, Glycine max
  Clone ID: LIB3093-006-Q1-K1-G9
ttttgaattaaattgaccatgcggtaacatcttatgggcaacctacctagccatctgaaatgggtgattttcgtgaattccttgtaacatatatacatcatactgcagactatgccaaaggaagacggagaagatctatgaagctccttatctatctgatgatcgttctgacaaaaaatcactggtaaaactgttaaaatttatccatagacacaatgaacagacagaggagatactcaacatgtgatagtgatagctatttcttagattccgtgctagatttat

SEQ ID NO: 45039 - DNA, 439 bp, Glycine max
  Clone ID: LIB3093-006-Q1-K1-H1
cccacgcgtccgcccacgcgtccgcccacgcgtccgggaagatgagtttgagggcatcagagatagcgaagaagttgaatctgcaacctcacccagaaggtgggttttacgtggagacattccgagaccattccgtccagctttcgacctctcagctcccccccgaatacaaagtggatcgccctgtatcgacctccatctattttctcgttccttctgggagtgtgtctcgcctccatcgcataccctgcgccgaaacctggcatcattacatcggcgaccctctcaccgtatgtatatcttcatctctctctttcttttttaacctaatctgatatgaattgtattgcaagtagtggaattgaatgagaaagatgggagcgtaaaattcacttgccttggatcagatctgactcagaatcaagtgccgcagtacacg

SEQ ID NO: 45040 - DNA, 246 bp, Glycine max
  Clone ID: LIB3093-006-Q1-K1-H10
cccacgcgtgcgccgagtccaggttccgctgtagatcgtagcacaaatatgtacgtgctaatgtatcgctagaaagactaacgtatgtcctgcaaggatgcatggacagactgaagtataagggataacggatactatgtacggtacagactctcgagccgttgaagtcctagatcggctcatataccggtgcatcaaacgtaagtacattcggcgtgaacagctcattcgagagtgcaccattct

SEQ ID NO: 45041 - DNA, 430 bp, Glycine max
  Clone ID: LIB3093-006-Q1-K1-H11
caaatgtgcctggtcaattaggggaccgaatttcataactgagtgctttaggggaagaagaagcgaaacacagtgtcagtatctgagttttttcttcaaactcaaaccctaacaaacaaaaaccatgtatcgttgtttctcttccattcgccatggccgtggatcttccctcgcatctcttctcgcgccgaaacctgcacttccattcaacgccgctctacgacctcgccgtttacctcaaaacgacgggcatgttagaggattttctagctcgaatttagattggaggaggcttattgtgaacccgaatgtgaatgcagatgcaaatgctcatccagaatctatgcaggatatagaggaaagaaacttcgaaaagtggaattatatgagaccgaatatgaatccagatgcaaatgcttcttcaaatttt

SEQ ID NO: 45042 - DNA, 354 bp, Glycine max
  unsure (1)..(354): unsure at all n locations
  Clone ID: LIB3093-006-Q1-K1-H12
cccggtcattggtcctcatcacaaccacaatgtgaacctcgtttgacaaacagcttctttcacggagctactcactggcagtgatcccaacaaagggtgtgatgaggctaataacancatgatgttcaacaaagcagcatgtagactgcaatggggttcatcaacaacacctatggactactttctggggctttcctcttctagaacaacgacacacaatcacaatcaccttcatcatcatcaatattcttcatcttcttctagtgggttcttattggcacaaatgcaactaggacattctgttcctgaggcaatgaatcatgtttcaggattcaacaacaatgtgagtggtga

SEQ ID NO: 45043 - DNA, 455 bp, Glycine max
  Clone ID: LIB3093-006-Q1-K1-H2
gcgtccgcccacgcgtccgctgacaagctgaggtcattggtgcgaaaatggcaaactctaattgaagcccatgtggatgtgaagacaactgataactacacattgaggatgttttgcattggatttaccaagagaagagctaaccaagtgaagagaacctgctatgcacaatcaagccagattagacagattcgtaggaagatgagggagatcatgaccaaccaggcaacatcctgtgatttgaaggagttggtccgcaagtttattcctgagattattggaaaagagattgagaaggcgacatctagtatttaccctttgcagaatgtgtttgttcgtaaagtcaagatcctgaaagcccctaagtttgatcttgggaaactgatggaagttcatggagattactcagaggatgttggtgccaaagtagacagacctgctgatgaaataatggc

SEQ ID NO: 45044 - DNA, 392 bp, Glycine max
  Clone ID: LIB3093-006-Q1-K1-H4
aaagattctaaagaaatataactaatattctttagaataatcaaaaagaatattaaattcaaataaattttagatagaaaaaagacttaaaaaggaggatttgaaatgcgagatctaaaaacatatctttccgtggcaccagtagtaagtactctatggttcggggctttggcgggtctcttgatagagatcaatcgtttttttccagatgcattgatattcccttttttttcattctagttattgacacggaaaggggtgaagaagattatagatccaattaagtattaaatatatgtaattaatatgtaattaatctcctcttctttatttcgtcttttatttcttcttttttttacaattgtaatagaataagttaggaaagagaaaga

SEQ ID NO: 45045 - DNA, 369 bp, Glycine max
  Clone ID: LIB3093-006-Q1-K1-H5
cccacgcgtccgcgtaacgcattcaccacgatggtgaccaaagcgatggaggtggtgaaggatctggacgtgaagcggtacatgggtcggtggtacgagattgcgtgcttcccgtcgaggtttcaacccagtgacggcaccaacaccagagccacctacactcttcgagatgacggcaccatcaacgttcttaacgagacttggagtggcggcaaaagaggtttcattgagggcactgcttataaggctgatcccaacagcgacgaggccaagttgaaggtcaagttctgggtgccttcctttttacccatcattcccgttactggggattactggcttttgtacattgaccaggattatcactatgct

SEQ ID NO: 45046 - DNA, 428 bp, Glycine max
  Clone ID: LIB3093-006-Q1-K1-H6
caattccaaattttcagtttcttcctcgcttttctgcaaaatcatctaaatccgtttctgatcctgaatcatcagtttttcccttgaaagatgggaggtggcaaggacaaacacaatgaagaagagaaaggagttttctcacatctggctcatggagtagctcaagctgctcatggttaccctccaggggcatacccttcacctactggggcataccctccttaccaagggtacccacctgctcatggctacccttcacaaggtggctatcctccggctggttattcccctgctggctatcctcctgctgctggtggttacccccctgctggttaccctccacatggttatcctggatcatctgctccacatggatctcatgcgcctgggcacggcggtatgggggcattgcttgcttgtggtgctgc

SEQ ID NO: 45047 - DNA, 427 bp, Glycine max
  Clone ID: LIB3093-006-Q1-K1-H7
gggctaatgtccaagtcttttggggatccatatatgggttgggctccttttgtagaagatgttgttgttactcaccagacacggacgggattgccagaagagactttccctaactacgacctctgggagaaccctctgacaccctgcatgtgtagagcctgattacagcaattttatcgataacaatgggactttactcaagatgcatttgggagaaatatgccatctaagttatgaattctatctatctacagggtaaacgacggaatctgggctcctgtcaatgcaagctttgaggtaggaggggcagtaaatagaaatttgaagcagtgatattggcttgaagggaatgagattggactggtggttatcactttaatgaacagatttcctattctgagtattctctttgccgagaccaggtgga

SEQ ID NO: 45048 - DNA, 403 bp, Glycine max
  unsure (1)..(403): unsure at all n locations
  Clone ID: LIB3093-006-Q1-K1-H8
ctcgttcaatcaccagcgattaagcgtgtctctcctaataccaaaacgctaccgttttgctcttttatttctctatggattgcaagaagcgagttcgggatgactcggacgagtcagttctggaatcgcccgaggcgaagcgactcanggacgatttactcgagttcttcgacgacgccgacgacgcaccttcctctcaggaccttgactccgtcatgaagagcctgcaggaggagatttccggcgtggcctcagattccggcgagtctcaggcgcagatcgggtaccttctggaggcctccgacgacgagctaggtcttccacccgccggaaactcgtcggcgccggaggagaagaacgtggagaccgagttggtccgagtcgcgtntgactcgtccggaat

SEQ ID NO: 45049 - DNA, 244 bp, Glycine max
  Clone ID: LIB3093-006-Q1-K1-H9
cggacgcgtgggcggacgcgtgggtgcttggcagatcgttgcacagattcctccatcctagggtagtgctagaaagagtaaagtatgtcctgcaaggatggtagcagaaacggaatcggaatggataacgggaagtatgtccgttacacgcctgagcaggttgaagccctagaaaggctctatcacgattgccccaaacctagttccattcgccgccagcagctcattcgcgagtgccccattc

SEQ ID NO: 45050 - DNA, 164 bp, Glycine max
  Clone ID: LIB3093-007-Q1-K1-A1
cacaaagagaagcattagcactaggagcagcaacaactagtctcagctgaaatggcctcttcagtgagggcatctgtggccctcaaacctgcccctttcactgttgagaagtcctcagtgagaggccttccctctctctcaaggaactcttcttcattcagagt

SEQ ID NO: 45051 - DNA, 195 bp, Glycine max
  Clone ID: LIB3093-007-Q1-K1-A10
gcctatacgaacctaattcattatttcagggttattaattagaacccaagggaagaaggcgggtaggtggaaaccaaaaatggcaatggaaggtttttttggacaccaaatatttttactttcattttttggctggaaggataaaaaaatggtatggttcaaccttaaacttatttggatggaactggtaatagc

SEQ ID NO: 45052 - DNA, 172 bp, Glycine max
  Clone ID: LIB3093-007-Q1-K1-A11
aataccggttgggccggtcctaccggatatcttgatctggtagaagggatgccaggttctgctcaatccctttggtccacttcatgttcgcaagaatttattaatcgccacatgacataatcaaatggacttttagcaattttttttttacatatattttttccttttttta

SEQ ID NO: 45053 - DNA, 425 bp, Glycine max
  Clone ID: LIB3093-007-Q1-K1-A2
acgcgtacgcgtacgcgattgttagtgtggacgatttggaagatataattggggggcatgtatggttgggttccatttgtatacttggtggaatctggcatatcttaaccaaaccttttgcatgggctcggcgtgcacttgtatggtctggagaagcttacttatcttatagtttaggtgctttatctgtttttggttttattgcttgttgctttgtctggtttaataataccgcttatcctagtgagttttacgggcccactgggccagaagctatttcagctcaagcattacttttttagttagagaccaacgtcttggggctaatgtaggatctgctcaaggacctacaagtttaacgtaatatcttatgcggtccccgacaggagaagttatttttgggggaaaaactatgccgttttggg

SEQ ID NO: 45054 - DNA, 434 bp, Glycine max
  Clone ID: LIB3093-007-Q1-K1-A3
aaaaagtttctctgactcttggcagcgcgaagcttggaggagcaccgtttgtcatggcggggccacgatcggaaactgaatccgctgagaaaagaacattcctttcacaattttactctcactatctcggaaaccgaatccacgctctctatccctacttctccacaaatttcttgtccaccttcgttctccgcttcagatcaacgcagcgtcgggaatgtctccctcttccgctaccttcctcttcactcgacgctgccttgttcatgaccaagagatctagagtgcatgatgttttggaggatatattagagcgtgttttgataaatttgcatagcgtccaaaagaatctgcagttctggcaggccagagctaagaggtcagattccgagaaggcacgtttcatgatatttgagaggggtccaagggctttt

SEQ ID NO: 45055 - DNA, 293 bp, Glycine max
  Clone ID: LIB3093-003-Q1-K1-A4
aggaagcagaacgctctgtgatggtaaatgtgggaggtcctgaaaatggcgctacatccatggagatgaaaagtgaagacatcgatagagatgaatagagatgggagtcagtcaaagcagaatgaatttctgacctagatggtactttatcagggctgactatatgcttgactcaggtcaccaacacaactcagctgcttgtgacgttagcaatcaacttcatttgctgtgcatacgttggagtgactattcggtacactataatgagaaatatggatgatgttcaacttaag

SEQ ID NO: 45056 - DNA, 455 bp, Glycine max
  Clone ID: LIB3093-003-Q1-K1-A5
gccggccttagccccttgggaaccgttttgtgggttgtggcgttggaccgaagggccaggaggctggtcgagcaggcctttccctccaattaacatcgtggtttggccgatgtcatggtgaagaaaataaactgctcacctggatttacggctgtgttcttgggaagcagggttaatcacaagaatcaaattccgtctgttttcttgtatgcaattcaacataagatttataaatatacctatgctccaatcacaattacttttgctaagcttggcttgttgaaaactaagcagttctgaggtatttgttgccttctataatgtgaccattttgtgcttgactagtgacaacaaatcttgctagttgacgtcaatgtttggtgaaaaattatgtaaagtagcataagccgccacaacatttgaagagaaagctgaaaacaaataaaggctatcat

SEQ ID NO: 45057 - DNA, 368 bp, Glycine max
  Clone ID: LIB3093-003-Q1-K1-A6
gccacgcgtccggttcgggtggttataaaattagggactgatcctattctccggacaataaaaaaacttgcagtcgtgcctgcttaaccggcatttttcctctctctttaactcaggaggttagtacgtggatggttcaaacaggttaccaaagctgagggaagaggtagatttgctcggattcagaggaggctacttgttatagaggttaagaaaaggattatgcagtaccaaaattatgttgatcaagggttggagagagatgcacaatatatgtttggattggcactctataccctggatcgcctgtatcagtctgtcaagtggcacgcagaagctactggagagtggggacggggtagtgcact

SEQ ID NO: 45058 - DNA, 419 bp, Glycine max
  unsure (1)..(419): unsure at all n locations
  Clone ID: LIB3093-003-Q1-K1-A7
gnngaggaccaaccganntttcatgttcctagcagcagcagcaatggaggccgtattggaagcgatctttcgttatcaatgtccgatcaacaacaatggcaagccgggcctccacatttgttagcaactgctgcagcatcatcaggattcccacagcaaattagaccctcccaaggttggctgcagaaaaatgggttccactctctcatgagaccctcatgaccatcctcaagattttttctaccatgccattttgcattttgaaaaataatctccccctactatttgttttgtgaacatgtacaagtgaaagtgaatgcagtttagattattattatgtaatgtccaacctcccccttctttaggaagcccatacataactgtaactttactattggggtgaaagacaagaagggatg

SEQ ID NO: 45059 - DNA, 446 bp, Glycine max
  unsure (1)..(446): unsure at all n locations
  Clone ID: LIB3093-003-Q1-K1-A8
cccacgcgtccgcccacgcgtccgctactttctcttctctcttgtcaccaacctcgatggaaatagacatggacatggacttctccggttacagcacaatcaccaacacaatcccctcttctgatgatgactatggttgcaactggaaccattggtcccccgtcgtcaactgggacgccttcaccggcgcccacgacgacttccaccacctcatcgactccatcatgtgcgacagcgccgccgcggaggaggacaacctcagccccgacgatcacgccgccagcaactcccccttcgcctccgtcacggaggaggaggacgacgacgccgacgaagaaaccggccccgtcgacgattccaagggcctgagagtcgtccatctnctgatggccgccgcggaggccctcactggtgctcccaagagccgcgacctggctcgagtgata

SEQ ID NO: 45060 - DNA, 196 bp, Glycine max
  Clone ID: LIB3093-003-Q1-K1-A9
gttttctatgagcacaatctccaagctgttcatgaaccggttttggattggtttggtgtggcaaattcccataggaatgtctctggtgaggaagagtctgacttcaagagtggagaatgttgaggaaagccttgacatgtcagtgttggacttgcctgagttggccttggattgcattcttgagaggcttcccccc

SEQ ID NO: 45061 - DNA, 437 bp, Glycine max
  Clone ID: LIB3093-003-Q1-K1-B10
ggccactcttcttcttcccacgctcctccttctcatacccttcgccaccctcgtctccgcccgccctcacctcgccggagactttctccgactgccctccgaaaccgataacgatgacaacgtccagggcacccgctgggccgtcctcctcgccggttccaatggctactggaattacagacatcaggctgatgtttgtcacgcctatcaaatactaaggaaaggtggcctgaaagaagaaaatattattgtttttatgtatgatgacattgcattcaatggggaaaacccaaggcctggagtcatcattaacaaaccagatggaagtgatgtttatgaaggagttccaaaggattacaccggcgaagatgttactggtggtaacttttttgctgctttacttgaaaacaagtcggcacttactggtggcagtggga

SEQ ID NO: 45062 - DNA, 398 bp, Glycine max
  Clone ID: LIB3093-003-Q1-K1-B11
cccacgcgtccggtttaccgtatagaccacaacacgcgaacaacacaaagacatcaatctgttgttgttgttgttgttgtttttccagaatggacccttgtccttcatcgaacacgaacaccgtgaacggtttctacacgttcgtgagccggggaatggaggagctggagcgagccttcctagccaacaacaacttcatctccgtccagttcctccagaaggtggtgtccctcctccgctccctccacacccagctcacccttctcgtccacaagctccagctccccctcggcgacaagtggctcgacgagtacatggacgagacctccaagctctgggaaacctcccacctccttaagtccgccatctccaacttcgaacctttctactcacagggc

SEQ ID NO: 45063 - DNA, 449 bp, Glycine max
  Clone ID: LIB3093-003-Q1-K1-B12
attttatccaattgaaattttaaaaatgactgggataaacttaagaattcaattattgaaattgaataagtaaacaatttaattggattggtcgaatggtatcaaaaaaatggagtactaactcccatttcttatttattattgaattaaccgatcaacttgctttgttatcgaacacttctttttgatttcaaaaattttccggaaaaaatttgaatctatttttatatgcgaatcaatcctactacttctggtcctgaggtttctgcgcttgaaaaaaaaaatctgggacgtatcgcccaaataattggtccggtactagatgtagcttttcccccaggtaagatgcctaatatttacaacgctctgatagttaagggtcgagatactgttggtcaacaaattaatgtgacttgtgaagtacagcaattattaggaaataatcgaat

SEQ ID NO: 45064 - DNA, 345 bp, Glycine max
  unsure (1)..(345): unsure at all n locations
  Clone ID: LIB3093-003-Q1-K1-B2
ntccggaaagatgagttttgagggccttcaaaattagccgaaaaatttaaatcttccaccctcacccagagaggtgggttttaacctggagaccattccgagaaccattccgtccagctttcgacctctcaacttccccccgaatacaaaatggatccgcctgtatcgacctccatctattttctcgttccttctgggagtgtgtctcgcctccatcgcataccctgcgccgaaacctggcattattacattggcgaccctctcaccgnatgtatatcttcatctctctctttcttttttaacctaatctgatatgaattgtattgcaagtagtggaattgaatg

SEQ ID NO: 45065 - DNA, 434 bp, Glycine max
  Clone ID: LIB3093-003-Q1-K1-B3
ccaagccttccttgaagaaccaacagaaggggtttggaaatggaaatccaagtaatggggaagagcggggttcttgtgggggggggaactgggtacatagggaggaggatagtgagggcaagcctggcactgggccatgagacctatgtggttcagaggccagagttgagcctccagatagagaagctgcagaggctcctctccttcaagaagcaaggtgctcatctcattgaggcctctttcaatgatcacaagagccttgttgatgctgtgaagcaggttgatgttgtcatcagtgccatctatggtgttcacatcaggagccacagcatcactctgcaactcaaacttgttgaggccatcaaagaagctgggaacgttaagcgtttcttgccttctgaaatttgcctagacccagcaaggatggggcatgc

SEQ ID NO: 45066 - DNA, 428 bp, Glycine max
  unsure (1)..(428): unsure at all n locations
  Clone ID: LIB3093-003-Q1-K1-B4
gatttgccatggtagcctgttttagaactgtttctttaatttcagtgttgatagtatggataatagggaagaaaaggatcaatccaggtggagacactgacaaggttgaactggagtaaattcctgtcagctcttacagtggagttcatcctgaggttgacaaagaggctagcctagtggtattgttcccaaataaaacatatgaaatcaaggaccttaccatatttgaaatattaaaggccactgaaaatttcagtcaggcaaacataataggatgtgggggttttggtttggtttataaagcaacgttaccaaatggaactacagtggccatcaagaaactntcaggagatttgggtcttatggaaagggaatttaaagcagaggtggatgctttgtccacagcacagtatgaacatctggttgca

SEQ ID NO: 45067 - DNA, 455 bp, Glycine max
  Clone ID: LIB3093-003-Q1-K1-B5
gggatttgctgttcgcatgaccaaggaaattagtgctcttgcacccagtaccatgaaaatcaagggggttgcacctcctgagagaaagtacagtgtctggattggtggttctatcttggcatcacttagcaccttccaacagatgtggatctccaagggtgaatatgatgaatctgggccagccatcgttcatcggaagtgcttctaaagttgggtcaagtcgagctggatggtgatcaagttcttcatgcacccagtcctgtgccatatttcagtaaagtttggttgacttatttggtatttgaagctttgggtttttaatagatatatctagtttaatgaatggatttgtaagttgagtatgttataagtttctccgttaggtcaccttggaagccagactttttatgcaattggcggatggtattggaaccttgtaggttctgcttggtttg

SEQ ID NO: 45068 - DNA, 479 bp, Glycine max
  Clone ID: LIB3093-003-Q1-K1-B6
gaattcccggatttgggcatggttacctgggattcaatagtgataggggaccattgggcgccattaaagaaggcaggggtggctggggtgaccgatcattaaaagaggggcttaaaccacttaatcaggagatccatttgcttaagcagctttcacaatccaacattggtcaatactttgggagggatttgggagaagaaacactttcccgttatttggaatatgtctctggtggttctattcataaattacttcaggaatatggggccttcaaggagcctgttattcaaaattataccaggcagattgtctctggactttcctatcttcatgggagaaatacagtacataaggatatcaaaggggctaacatactagttgatcctaatggtgaaatcaagctggcagactttggaatggctaaacatataaattcttcttccttcatgcttttctttcaagggagtccatactggatg

SEQ ID NO: 45069 - DNA, 440 bp, Glycine max
  unsure (1)..(440): unsure at all n locations
  Clone ID: LIB3093-003-Q1-K1-B7
ctttgtaatgacctgtgattcagcagttcagctgcggaaggccgggaaagtcactgtcagagaatcaaacttgaaaaaattaggtgctacccattttagaaccggcgtagcaaacgagcatttcgaggtgacaaagtttgcactgttggagaccataaaagaagctgtaccagaaatgtggtcaccggctatgaagaatgcatggggagaagcttatgatcagctggtcgatgccattaaatctgaaatgaaaccaccctcctcttagactccagtttaagcagntcctttccttccctctcaattctcaaattggtatattaataaaagtgagaaagtttaggcttgtgcttttattttgtgtgaatgtaatatactttgtgtacgtagacttggctattgngagttgctaggttgggaagtgtttcgcattcaacaat

SEQ ID NO: 45070 - DNA, 399 bp, Glycine max
  Clone ID: LIB3093-003-Q1-K1-B8
gccacactttgtatttcactcgggactacgatcattgctacaagaatgaaagaaaggcggggggcctggcaacctatcacgtgccatatggagtgcacattcggggaagattcgatgcaaaattcgcaaaaatgcttgcaaaagatgcttcgaaatacgctgctgaactgcaacgtgagctccagaacgatatcaagcatgcattaaagcgcacattagaggccaagaaaaagtgcaatgaaaggtctattgcagggtttgatcctgccatcaatgacatcacaaagcacgtctgagtgtgtgcacctgtttcaccacctgttgctgatactaaagctgatatcaaatgccctgtcaacagaaagatggtcataaatactgtcaactatgcagttaact

SEQ ID NO: 45071 - DNA, 383 bp, Glycine max
  Clone ID: LIB3093-003-Q1-K1-B9
ctttcttcttttttagctatccctctcttgaaaaatctagatctcgttcttccttgatctgcgttacgcttttagtgaccggatctgtatggatctgaaccagatctacacgccgatggtggttttggcctggtctttcatagatctgatgcatggaggctcagatctactgtacagaggtgtgcgattcatgttcgtctctcttttggaatctgtttcgtagaaagtcgtttggtcttccatgtcgcatggctcttgaggtatttttttttgcagatactgtagataatcgatgagaagaacgcagatccagccgcttccgcttgttcgatcgctacagacgcttgtatcggattattcatgattgattcataagcagcatg

SEQ ID NO: 45072 - DNA, 449 bp, Glycine max
  Clone ID: LIB3093-003-Q1-K1-C1
ccaacccgtccggtctaacttgttaagtgttaggtgtaaaacttctaccatacacttgtgagtagtaaaatttacatcggttgcaagaaaaagtattgttaacactcaaattttgttataaaattcaacggttgaaaatttagtagaacgattaatttttatgttagttgaatgaggtgaagattaatataagtgaatatagaattgatgacgtatcaatattaatcaaataaagttagtcaaatatgaacaaggtcattacatatatctacactattagtcgaatgatagaatttgactaatattaatgttagttgaatgagaatgagaccaattcagttgattgtgcagctaaataatcttcaatatttactaagcatgaaagttagcttaacatggataagatcaaatatattacctacaatgttagtcaaatggtagaattcggt

SEQ ID NO: 45073 - DNA, 153 bp, Glycine max
  Clone ID: LIB3093-003-Q1-K1-C10
ggcaagtaccatttttatcaatcttatcacccttttgcattgcacctacaaaagggccaccccgtcttcccttctcaacttggacttcatctaattcaatactacaacttctggatcacttaattgaattgaattatcttcaaaaagagagaa

SEQ ID NO: 45074 - DNA, 383 bp, Glycine max
  unsure (1)..(383): unsure at all n locations
  Clone ID: LIB3093-003-Q1-K1-C12
gtatttcttcatcggttgttcaagtaaatggccttcgtcaccactgctgaaatntntnatgcggaccgccagttaattttgagtggggaacttcttgcccttcagccagtttttcagatttacggtcgtcgacaggtcttctctggacctatagttaccttgaaggtgtttgaagacaatgttttggttcgtgagttccttgaagagaaaggcaatggaagagtgcttgttgttgatggaagcgcgagtttacgctgtgctatattgggtggcaaccctgtggtacaagctcaaaacaatggattggcaggtattgttgtgaatgggtgtattaaaaatgtggaataaatcaatggttggtgatattggaattgagaggccct

SEQ ID NO: 45075 - DNA, 181 bp, Glycine max
  unsure (1)..(181): unsure at all n locations
  Clone ID: LIB3093-003-Q1-K1-C3
cacccacgcctcacaagcctctatctactcactatatatacatacttaaactctctattacatcccaanataacccgccccgcaattatacacacactatcctcaaccttcaactaaaaccctacaacaaaacttattaaatctacccctaacataactaaaaacattatatcaacaaccc

SEQ ID NO: 45076 - DNA, 425 bp, Glycine max
  Clone ID: LIB3093-003-Q1-K1-C7
cccacgcgtccgctcttctcccacctaaaaggataattccaggtgatgcatcgaggggccgtagtgatacattgctgtttgaagatgaattagagaaggcaagcaatgcacttcttgctcgagcgtggtcacccgggtggagcaatgctaacaaggcattgacaacattcataaatggtccactgattgagtactcaaaaaaccgcaggaaagcagacagtgccactacctcacttctctcaccccatttgcactttggtgagttgagtgtcaagaaggtcttccatctagtccgcatcaaacaagttttgtgggccaacgaaggaaacaaagctggtgaagagagcgtgaacttgttcctcaaatctataggtcttagagaatattcaaggtacattagtttcaaccatccctacagtcatgaa

SEQ ID NO: 45077 - DNA, 440 bp, Glycine max
  Clone ID: LIB3093-003-Q1-K1-C8
aaaatggtggtttaattctatgttgtttaataggaagttagaatacaggtgtgaatgaaggaaatcaatggatagtcttggtcctattgaaaataccagtctaagggaagaccctaaaattttaaccgatatagaaaaaaaaattcacagggatttggattatttagaaatggaaggttttttttctagcgatctgaatactgtttctaagaatgatgatgatcattacatgtatgagactcaatttagttttaacaataatattactagtttcattgatagttgcattgagagtttcaatttaggtgatattgacaaatacaatgatatttatttttatagttacatttttttgaagggcagaaattgtagtgaaagcgataattctagtactagtataataactagtacgaatgatacaaatgatagtgattccacta

SEQ ID NO: 45078 - DNA, 279 bp, Glycine max
  Clone ID: LIB3093-003-Q1-K1-D1
tgtacggcgtcgaaccggggaagaaagcctttttcgatctacagccacatcgttgaatcgaaggttatcaacgaccgtgagactggaaggtccagaggattccgatttgtgaccttcgcctcagagcagtcaatgaaagatgcgatcgcacgaatgaacggccaggaccttgacggtcgtaacatcactgtcaacgaagctcatacccgcgccagccgtggtggtggtggaggctgtggtttcagaagtagtggtggatacaaccgcggtagcggtgga

SEQ ID NO: 45079 - DNA, 204 bp, Glycine max
  Clone ID: LIB3093-003-Q1-K1-D10
ggaaactgtttaaagtaaacaccttatcgcatatgctttaatacctgaaataaaggggaggctttctatccttgggagtttgtcaactttaactgaaaataaactaattcacacccttccagaaccaaataatgtctttactaaacacaccaaaatttttttccaaaggaatcctttaaaattttaccatccatattttctttc

SEQ ID NO: 45080 - DNA, 430 bp, Glycine max
  Clone ID: LIB3093-003-Q1-K1-D11
attaccaacatcggttatttatataatcgatgttggtaattttacgttaacatcgggttggtaaaaaccgatgctaacaataatactatcaacgtcggtacttttaacatcggttcaaaaaccgatgttaaaagtcataaataatcgatgtagaaaacatattttctaatattcttgatttgattctactggttcccatggtcaccccaatcatcgatccaagtcaagactcaagcaaccctcttcaccttcatcattcagatgggtctggcctcgttctcacatctcaaccccttgatcataagaattacataacctagagcagagcaatgaaggtagtgctctttgtcaaggacaaaatagcattcattgatgacacccttctgaagcctgacgaagacgctcctacctatgctgcttggacgggtgc

SEQ ID NO: 45081 - DNA, 418 bp, Glycine max
  unsure (1)..(418): unsure at all n locations
  Clone ID: LIB3093-003-Q1-K1-D12
cccaaccttgagtggtatccaaaggttttgaattgactcctatagaatgtctccaatttgtgcgttacacggtgcaaataaagtgtgtaaaggtgtttcgtattgttttcacttgcttgggaagggaaaagaatatttgtggaggattgattgtgtcctctttgtgaaaaacctttctgtgttgtaaaaaattacacatgtaagtctagcttttttgtattaacagaaaaaggtctggtttttgttgttgtggtagggcatgatggttgtccacatataaaacatttggtttatttagtgacactgtaactgcccctttcattgagatagggatgtaggtgtaaactgttatgttcatgcgtggatgattntataacaggcaaggcatgcatcttgaagaaagcatgattatttgtcc

SEQ ID NO: 45082 - DNA, 400 bp, Glycine max
  Clone ID: LIB3093-003-Q1-K1-D2
gagactgatgggcaatccaaaccagaacttgttcaaagggcaagagagaagctgaagaactccggtttcactcaaaaaccgggactctattgcagtgatcatcatgttgatgctccttttgtgtgttgatctgttctcatctgatgcagagaaagagagaataatatgtgttgtttatagtctgcttgtgtattgctgtatagttggagactcaaaatgaagttaatgttttcatccagttatcatatgctgctctattatcaggaattatattccttcaacattttagcccttgttgtgtctttgctgctacatgaccattgtgctgggagaccaaactatcagagcaagttccatgcaccaaaccacagattttggctttggaagtctgaatatattg

SEQ ID NO: 45083 - DNA, 325 bp, Glycine max
  Clone ID: LIB3093-003-Q1-K1-D3
agccttccggttaattccaatttgaccttaatatgttcggatggattttttttaacgggcccccccaccgggcttaattcctaacccaatcaattcaaaatttggttgaaattagtcgggccccccgcatttcaatcccggtacctttgccattattggcccaactatgctagttaaatggtgtggaagtaataataatggtcatcttttgtcgatgggaataaaatcttcaagtactcaactgacttggcctttttgctctatcattcaagtcaattattgtgcagtagcctgctgcagctacaaattgcatgcttagatactg

SEQ ID NO: 45084 - DNA, 232 bp, Glycine max
  Clone ID: LIB3093-003-Q1-K1-D4
tccggttgatgctttcttgaaaccctatttcttggaggcttatcgtcctttcaaaaaaagaaatctattttttgtcccgggaggggttaaaaatgtaaaattcaaaggcatttaaacccatcctggggaggattgggttggtgctccaaacacttaaattttctgtgaaggggagcctttggaaaaaaaagatgaaaaaagactggaccaaatttggtattattatttgggt

SEQ ID NO: 45085 - DNA, 462 bp, Glycine max
  Clone ID: LIB3093-003-Q1-K1-D5
tcggccacgcgttcggttggctggaagctttattaagtcgcaagcattttttaatcaatggtgggccttgattggttaccttaacatgggggttattaccatcaatggtattggctgaaaagaaatctggtgagaaagaaggagaagataaaggggttattggggccatcaaatccttatttgatcctaatgagaaaacaaagtctggaaaggtgttgccaaaagcttacttaaagtcagcaagagaagtagtgaaaacaatgcgtgaatctttaaacgaagtcactgatgataatgctaaatttagacggactgcagactcagcaaaggagtcaattcgggagtatttgggcagttggaggggaaatcagactgttgctcaagaagaatcatatgttattttggaaaaagtaatcagatctttggcaaacttttactcaaaggcagggccatcagctccac

SEQ ID NO: 45086 - DNA, 429 bp, Glycine max
  Clone ID: LIB3093-003-Q1-K1-D6
tcggttcaattttaaatccaaacaaattccaaggcgggtttttttttcttttattttccattccggctgagaaggaagaaaaaagtgtttcctttccgccattgaaggaaccgaccaacctgaaccgggccttgattgattcttggcctgggccaatttttggtggaatttaacggccagttacctcccccttcgatgttataaaaattcaattcagggttagcttagagcccacatcttcatgggcttattacggaacgatttggctgcagcatcaaatacactggttgtttcaagcaccaaagacattctagagaagaagcgtcaggggtttggcggcaaatggccgcatgctatgttatccatatcagcttacatttaagtttacacagtgagaacttgccttgttttcaatcaagatacattatt

SEQ ID NO: 45087 - DNA, 434 bp, Glycine max
  Clone ID: LIB3093-003-Q1-K1-D7
gtggtgaggttgagaagattcctgggttcgatttcgcagactggttgaagaacacggtttcggagaatgatttcgttgtgatgaatatggatgtggagggtactgagtttgatttgattccaagattgtttgaaactggggctatctgtttggtggatgagatttttcttgagtgccattacaataggtggcagaggtgttgccctggacagaggagccccaagtatgagaaaacttatgatcagtgcttgcagctcttcacttctctcagacaaagtggagttcttgttcatcaatggttttaattaactttgtagaattgcctgatggatgatgggtcaaaccctatatgcatgttcttagcttctgcatgtttcttctttttagttttcttatttttttcccaagccaatatagaagagagagagtgagag

SEQ ID NO: 45088 - DNA, 262 bp, Glycine max
  Clone ID: LIB3093-003-Q1-K1-D9
acgacccacgcgtactaataaattcatatcattttacacactttcctttctttttaaaagttctataccacgacgcgcttaattatccaaggtacatctccctacctttttaacttgtctcttcacacattttgttaattctttacaactaccattttcactcacgtataactgttctactgtctccaataaaaatttaaattcatctctctctcacaataataaattcacaacaatctcatcttacaacaaacatttcttc

SEQ ID NO: 45089 - DNA, 457 bp, Glycine max
  Clone ID: LIB3093-003-Q1-K1-E1
cccacccgtccgtaataatcaaaccaggaggggggggatggtcctacatcctctagtagggggtgcggtggaggagatatacaacatggctatatctacatcagaaagaatggcatcagtctcgaaaaggattacccttaccgtggtgacgagggtaaatgtgactcaaataagaaaaatgctattgttactattgatggccacggatgggttcctacccaacttgaggaagccttgaaacagggcattgcaaatcagccagtggccgtacctattccagcagacgactatgaatttcaatattatacatcaggtgtattcaaagggaaatgcggtacagaattaaatcatgctctcctgcttgtggggtatggtacagaaaaagatggagattattggatagcaaagaattcatatagtgataaatggggagagaatggctatatcagaatacaaa

SEQ ID NO: 45090 - DNA, 443 bp, Glycine max
  Clone ID: LIB3093-003-Q1-K1-E10
attgtcatctcttcttccaccaaactttcggagttttctttggttaattagtaaaaaatggcttaattaatttgtccttccagaggatcgaatgagatagaaagggtactggaggggcaattaattaattaatctctagtgagtatatatataaatatggagagcctggaagaaagagtgtttatgttgatgaatgaacaatattattattccaattccaatgtatcagatcagctgcatatgcatcatcatcgctctgtgtctgtggagaatctaaacctatggtgggaaaacaacaccgactccgatgactcagccgagcgaattttgtattgggaatctcagatctcactgcttcagctgcttgaaggctaactcttcggattgcatcacctgtttgagaagacgagtggttgacgggctctgcgaaagaggattcagta

SEQ ID NO: 45091 - DNA, 444 bp, Glycine max
  Clone ID: LIB3093-003-Q1-K1-E11
ggaccgtgcaggacgtatgcatggggacatttcgtgcttgttttgtatataaagagatgtgcatcgccaccgattacaaaactaaatcaatcgaaggtatgtgcatcttaatccaaatgtggatatgagaacgatgcacgactttggctccaaagaggactcctctcgtaatagaaaataaatcactcggacacaggtggttgcgacgtgaaaatcaacatattgacaatgatgatctgatagtttttcgtcacaaattggatatcatgaaacgatataaggtaagaagatcataatgtatttgttaaataataaataatatgtcatgtctcagtgaaaattagcaactgtgttgttgtatacagtttctgtggaagccttacacagcaactgttatgtcactgttgccttcaatttgtttggttggaagtgtaacgtggtggc

SEQ ID NO: 45092 - DNA, 451 bp, Glycine max
  unsure (1)..(451): unsure at all n locations
  Clone ID: LIB3093-003-Q1-K1-E12
gtttgcttctcaagtctctcgaagcctctttctctctcttctaggttcgtttctctctccgcctcgttcttgtttcttcggtgattttatgtgtgtgtttgtgtataacggtggtcgtgtgttttgagtagcttgaaacacgtttgacgaacgatgttttactacgttgttgtgtcttgtttattttaaatcatagtcttgtaagttcgtagatcgtgaatttgcttatgatttatttcttagatataaaaaattatggggttttgttggggattttatcatgataaaataaaagctttctcttttcttgaatgaaattggctntttttgtaacttttgttctgttttgttatgattttttgtttagcaccttcctattgattcctgattccgggagtttgatgattggccttcattaggtattataatttgtggatttgattataaatat

SEQ ID NO: 45093 - DNA, 417 bp, Glycine max
  Clone ID: LIB3093-003-Q1-K1-E2
cccacgcgtccgctctttcaccattaaagcaattaggaaagaggtttttgattgaagctggcgatatgaggaaggggaacaagaagaagaacaagctggtgtggatgatagcgacgccgtttagggtgttggggaaagcgagggacatgtacgtgagcagcataacgaagtgcggtcacaacatgaattacagcaaccccgtggatgctgctggcagattccaggctttgcccaggagttacagtgctgccacgtcacgctccgacaacaacgaggatttcgccgaacttttgagagcggcttccgccaggactttgggcaacataatcgatgtagatttggttgtaaaacagcaggcccaaacccagacccggcccgtttcctcaaatgggttgcccaagtcgacgagcgttggca

SEQ ID NO: 45094 - DNA, 447 bp, Glycine max
  unsure (1)..(447): unsure at all n locations
  Clone ID: LIB3093-003-Q1-K1-E3
acggcgtcggccaacgcgtccgccaacccgtccggcaatttttttaactccacaaagttatttctgaattatgctgaaaatgaaatggtcaggattaaagcagatgagagaaaagccttgtaccttgtaaaagaagttacagagtactttcatgggaatgcaacaaaggaagaagcccaccctctcagaattttcatgattgtaagagactttctgaatatcttggatctagtgtgcaaagaagtggaaaagatgcactgatagaatcgttggtggttctggcagatccttccgaatacctccaaatgcatcattacctgttctcaacagatacaatcatccaaagcaggatagaagctcagatgaggagagctcatccccctagtgttgtgaatatgaaagataccatangctntcagactaacagtgaaagtaaatgaatgaatg

SEQ ID NO: 45095 - DNA, 409 bp, Glycine max
  Clone ID: LIB3093-003-Q1-K1-E4
cgtttatttcaccggattgaacctgggcctttaaaagggtaccccttatattaatcatccttatatggtctataaaggggtaaagatatcccatggggatctatttggttagttttctatcgggatgtatataggtgaataatccaacatgcctttttgtgaagtaaaaaaactaccctcgatccatgcctcaaaagggttgataataagtaaaaaaaatcaatgaattcatgataaaacccttctgcgtttttttattataaatttttttgtcaataaagggatcaaggggttgggggatcaaatggtaaagttcttttgttggtaaattggaggattagaaacatgactattgctttccaattagctcgttctgcattaattgctatttcatttattttattgatta

SEQ ID NO: 45096 - DNA, 406 bp, Glycine max
  Clone ID: LIB3093-003-Q1-K1-E5
ttcccttggtcaggatgacattaaaccgggttattttaacgtattgtgcccctgggtggcttgttgttgtggaacctttcttcatggtctggggaacattggggggtttctcaacaacttggcttccatggaagcatggtttgggtgctatctacaccccctgttgaagagcaaaagaggttgtctctgttgatggcttcggccttgtttcagggcgcttccattggacctctgattgatttggctattgccattgatcctagccttattgttagtgcatttgtggcaacttctttggcttttgcttgcttctctgcggcagctttagttgcaaggcgtagggagtacctctaccttggtggttggctttcttctgggctgtccattcttatgtggttgcactttg

SEQ ID NO: 45097 - DNA, 452 bp, Glycine max
  unsure (1)..(452): unsure at all n locations
  Clone ID: LIB3093-003-Q1-K1-E6
tcggccaagccttcggttgctaccaacactgaacttaacccaaccttggcaaagttgattcgggaaaggtgattgaaattggccggttcggttagaactgaaggaaagggtcctgtgagaagaaagaagaagcttgtccacaggacaccaaccacagatgacaaaaggcttcagagcaccctgaagagaataggggtgaatgccatccctgctattgaagaggtcaatatctttaaggatgacgtagttatccagtttctaaatcccaaagttcaagcatccattgctgctaatacttgggttgtcagtggttcaccgcanacaaagaagttgcaggatatactccctagcattatccaccaattaggaccagataacttggaaaacctgaagaagctagccgagcaattccagaagcaggctcctgaaggggccgctggttcaaccacagc

SEQ ID NO: 45098 - DNA, 301 bp, Glycine max
  Clone ID: LIB3093-003-Q1-K1-E7
gacccacgcgtacgcatacacttttttaaatatataatttttatttttgcaacacattctctattccgcgcctcgttttaatttctacacctctaaactcaacctacaatacacaatataagcacctcttaataatttatttaaaactaatcaaatactaatttaactcattcccaaatcccttcccaacatacattacaataacacccttcaaacttgtaaaacactatcttctaaaaacaatcaaaacagatctcccacatcacactctcactccatctattattaaccaccactttta

SEQ ID NO: 45099 - DNA, 406 bp, Glycine max
  Clone ID: LIB3093-003-Q1-K1-E8
gccgccgttgcggaaaaaccgccggagaagaaaaggagcagcctaagaatgacacggagagaaagctcgaggaggtagcccccaagaaagacgacggacccatccctgtcgtttacaaactcgacttgcattgcgagggatgcgtcaagaagatcaaacgcacctgtcgccacttcgaaggtgtggaaaccgttaaggcggatctatcgtcgaacaaggtgactgttaccggtaaaatggacgccgagaagctgcgagataagattgccgagagaacaaagaagaaggttgatatcatatcagctccgccgaaaaaagaagccgccgttgcggaaaaaccgccggagaaaaaggcaaaagacaagaaacctgaggagaaaaaaccagaagaaaaacctaaaaagag

SEQ ID NO: 45100 - DNA, 429 bp, Glycine max
  unsure (1)..(429): unsure at all n locations
  Clone ID: LIB3093-003-Q1-K1-E9
gttgaatcgcgattgttctgtgcgagagaaagaagagagagatcgaaaatggcgttggctgtcgacgagttcggaaggccgttcataatcctgaaggagcaggagcagaagagcagactccgaggattggacgctcagaaagccaacatctccgccggcaaagccgtggctcgcatcctccgaacctccctcggccccaaaggcatggacaagatgctccagagccccgacggcgacgtcaccatcacgaacgatggagccacgatccttgaccagatggacgtggacaaccaaatcgcgaagctgatggtggagctctcgcggagccaggactacgaaatcggcgacggaaccaccggcgtcgtcgtcatggccggcgcgcttctcgagaaggccgagcgccttctcgagcggngaattcaccccatc

SEQ ID NO: 45101 - DNA, 442 bp, Glycine max
  Clone ID: LIB3093-003-Q1-K1-F1
ccacgccttccggcaggtcttggtgattacttgggaggtaaaggccattcctgggttggggggaccagggttcctgagggtcaaccccttctccaagctggtgtccatactgttgttggcactcctgggcgagtgtttgacatgctgcggaagcagtctcttcgcccagattgcataaagatgtttgttttggatgaggctgatgaaatgctttcacgtggtttcaaggatcagatctatgacatcttccagctgctgccatccaaaattcaggttggagtgttctctgctacaatgccgccagaagcccttgaaattacaaggaagttcatgaataagccagtgagaatcctggtaaagcgtgatgaactgaccctggagggtataaagcagttttatgtcaatgttgacaaagaagagtggaagctggagacattatgtg

SEQ ID NO: 45102 - DNA, 456 bp, Glycine max
  Clone ID: LIB3093-003-Q1-K1-F10
ctctttgcacctcagcacagtttcccatcgaaaactagcccatctttttccctcgtaccttttgcttcagcaacaacaacatcgtcgtcacaaatctagagatagatagatagatagagagaaacggttgaattgaagatgaaaatcactgtcatgactgctgatgaacaaatcatcacgttagatgtggatccccacgaatctgtggaaaacgtcaaagcattgctcgaggttgagacaagtgtgcctcttcaacaacagcagcttctgtttaatgggaaggaagtgaggaattctgagaagttgagtgctcttggtgttaaggatgatgatttgctaatgatggtgtctggtgctggcgctactgcttctagtggatctacgaatgatttgagcttaaatgctgatggatctgctgtcaaccctggttctttccagcagcacattagacatgat

SEQ ID NO: 45103 - DNA, 456 bp, Glycine max
  Clone ID: LIB3093-003-Q1-K1-F11
gcaagtcgaaaagatcatctctccctctctctcacacatcccagccatgagcctgtgcggtataggcagaaaccagagaacattccgcccgaaaaaaagtactccttctggaagtaagggagctcaacttagaaaacatattgatgccacgttgggtagtggaaatctgagggaagcagtaaagctacctcctggggaggatttaaatgagtggctagctgtcaacactgttgatttcttcaaccaggtgaatctgctttatggtacccttacagagttctgtactcctgagaattgtcggacgatgtctgcaggacccaagtatgaatatagatgggcagatggtgtacaaattaagaaacctattgaggtttctgctccaaaatatgtagaatacctaatggactggattgaagcacagcttgatgatgaatccatattcccacagaagcttgg

SEQ ID NO: 45104 - DNA, 385 bp, Glycine max
  unsure (1)..(385): unsure at all n locations
  Clone ID: LIB3093-003-Q1-K1-F12
aaaagcttgcagagatactgaaaaatagactcaaccaatatgttcaaggaaacaaagagggttttgttaatgatgcagaagctgaagtagcccggctatctaatgcagcttatggggttgatatgttgaataccattggctacatatacgcaaggcaggcagcaaaagagctagggaagaaagcaatttatttgggtgtgccttttattgctgagtggtttagaaacaaagggcactctattaaatctcaagttacagcagcaacaggggcaattgctttaatccaattgcaggaggatatgaaaaagcaactcagttcagaaggcgactatactgaagaagagctnngagatacatgcaaatcacaagaaataaatgatgacta

SEQ ID NO: 45105 - DNA, 426 bp, Glycine max
  Clone ID: LIB3093-003-Q1-K1-F2
gcctggtgccgttggtgttgttttcggaacgaaaaaaaaaatggtgtcaggttctgaaatctgcgcaaagcgggtggtggtggacccccgccaccacatgctgggtcgtctagcctccatcgtggcgaaggagcttctgaacggccagaaagtggtggtcgttcgctgtgaagagatttgcatctcgggcgggctggtgaggcagaagatgaaatacttgaggttccttcgcaaacgcatgaacaccaaaccctcccatggccccatccacttccgtgccccctccaagatcttctggcgcaccgttcgtggaatgataccacacaagacaaagcgtggggaagctgctcttgctcgtttgaaggtttatgaaggaatccctcctccatatgacaagaccaagagaatggttgttcctgatgcact

SEQ ID NO: 45106 - DNA, 444 bp, Glycine max
  unsure (1)..(444): unsure at all n locations
  Clone ID: LIB3093-003-Q1-K1-F3
gtttcgaaccgcatggtccactctgcttaactccgctcccacttcttctccttccttctctcggatcatcactcctcgtttcgctttcgctccaatcactcgcatctctctccgaaacggcgtccgtagcaaggcgatcgaagcagtgaagttggagaatggaaggccgagcgcgagcgagttcgtagtcagcggaagcggaaacgcaattccgagttacgtcgtggcgccaaacgcgcgtgttcaggatttggttaaccgaaacgacactcgcctccggatattctccggcactgccaatccggctcttgctcaggaaattgcatgctacctgggcctggagctaggaaaaattaagataaagcgttttgctgatggtgagatatatgtccagctgcaagagagtgtcagggggtgtgatgntgttcttgtgcagcccacatg

SEQ ID NO: 45107 - DNA, 457 bp, Glycine max
  unsure (1)..(457): unsure at all n locations
  Clone ID: LIB3093-003-Q1-K1-F4
cccacgcgtccggttgaatgccctctttgtatgtagtatcttaaccaccttattaataactcatatgtatatatatcctcttaacatacatcctccaaatacacacaacanaatcataaacaacactgcaggcacctttagatttttattttcttcactgttcacacacgatttcctcctttcctttcacattatcctttacctttttttaaacaagccagcccagcttgcttctgttccttctcttctaaccagtatcacctacacggtgtgtgtgtcccttcatcctggaaattagagccacaaacataacacattccgctttgactttggaagcaggtttttgtgctttgtctggttcccaatcaccgtgatatcatggaatccccacaatctgttgtgtcaccattcaagaggtctgtcttgggtgatgcagagaagtataggtctgatgttc

SEQ ID NO: 45108 - DNA, 462 bp, Glycine max
  Clone ID: LIB3093-003-Q1-K1-F5
cttcgggcatgcagatctttgttaagacccttacccgccagactattaccctagaagtcgagagctgcgacgccattgacaaccgtaaggcttaaaatcaagaccagggaggtattcccccaaaacaacaaaagcttatctttcgccgccagcaacttcaaggccggcctacccttgcttcctccaccatcaaaaaggggtaactctcaacttggtgtgcgtcttcgtggtggtatgcagatcttcgtcaagacccctacggtaagactattaccctcgaggtggagagctccgacaccattgacaatgtgaaagcgaagatccaggacaaggaaggaatcccaccggaccagcagaggcttatttttgctggcaaacaactagaagatggaaagaccctcgctgactacaacatccaaaaagagtcaactcttcacttgggtgtgcgtcttcgtggggggt

SEQ ID NO: 45109 - DNA, 190 bp, Glycine max
  Clone ID: LIB3093-003-Q1-K1-F6
cttcggtaaaaaaattaaaaccggggcggcttattctgaccgatttgaatgttggcctttgttcccccccttattgttggaggtattcgaacctgaaccggggttgcaaatttaaaaggccttttttaaacattggaaggtagggtcctcttttttgcccgttgccacgggccgaaaccacaactttttg

SEQ ID NO: 45110 - DNA, 213 bp, Glycine max
  Clone ID: LIB3093-003-Q1-K1-F8
gcatccccgaaatctttaggaagaaattcttgcaatcgaagatgagaggtgattgattagtttgtgttgtaaattattatgtgagctacagtcaagagttcattaattcattaaacgtatgtacttgtctcatagaaaagttgaaatgaactataaatttttagggttaattaacattttaatccctgcaaaatacatattttttactcctaa

SEQ ID NO: 45111 - DNA, 407 bp, Glycine max
  Clone ID: LIB3093-003-Q1-K1-F9
ggaaagttttcaaagccaagcaaatacgagctttacccaattttcttgctgttgaattttgcactgttcaatcttcaaaatcacatttttctcgatcttcaccttctgggttgctttttttttttctcttcttcttcttcttcttcttttgttttcgctatggaatcgaaaaacctgcgaggtttacgctggggaagcagtcgtcgcttgccccagaacgccataacaaagaagcagagctccaaaaagatggggaagctgttgatcagggtgtgaggttgatgtattcggcattcgaaggcgatgtggatggaattcgcgaggcgttggagtctggtgtgagtgtgaattacaaggatattgataatcgcactgctctttatgttgcggcgtgtgagggcttcact

SEQ ID NO: 45112 - DNA, 66 bp, Glycine max
  Clone ID: LIB3093-003-Q1-K1-G1
cttcgatcattcttccgtcccttccgtttcaacaccggtcaaccgttaaaattccccttgattttg

SEQ ID NO: 45113 - DNA, 365 bp, Glycine max
  Clone ID: LIB3093-003-Q1-K1-G10
cccacgcgtccgaaagaattggaggggagataattggggttgtaccagccgcgccgccaggtgtggttgtggatgaggacgatatgaaagttgattatgagcatgagaaggagaatccgagggagagggatagggagaggagttttgtgaaggagagtagggaggagaaggaggagaggatgcatcgcgagaaaattcgtgaggagaggaggaaggagaggtagagggagaggatgttgtaggccaaggatgctgctatggggaagaggagtaagattacgcgggatagggatcgtgatattagtgaaaaggttgctctagatatggcctgtactaaaccagagactgaggttatgtatgatgag

SEQ ID NO: 45114 - DNA, 448 bp, Glycine max
  Clone ID: LIB3093-003-Q1-K1-G12
cctagccactctcccggcgtcacgatgcagatcttcgtgaaaaccctaacgggtggaacgatcacgttggaggtggagtcttcggacaccatcgacaacgtgaaggccaagatccaggacaaggaaggcatccctccggaccagcagcgcctcatcttcgccgggaagcagctggaggacggccgcaccctcgccgactacaacatccagaaggagtccacgcttcacctcgtcctccgcctccgtggcggcgccaagaagcgcaagaagaagacctacaccaagcccaagaagatcaagcacaagcacaagaaggtcaagctcggcattcttcagttctacaaggtcgacgattctggaaaagtccagaggctccgcaaggagtgccccaacgccgagtgcggcgccggcaccttcatggccaaccacttcgaccgccactactgcg

SEQ ID NO: 45115 - DNA, 411 bp, Glycine max
  unsure (1)..(411): unsure at all n locations
  Clone ID: LIB3093-003-Q1-K1-G2
ctgtcactcaccgaccctccaccgcaacccatatataaataccacttttgaacccaaccaaacacgcgcgatcgcaatggccatggctcttcgcagactcaacaaacctttctccaacgccacttccatttatcgccagtcctcttcgctctccgctcacgaaaaacacaaatctcgcgccgattggataaagcagctcaacgatcctctcgaggccatcgatcccgagatcgccgacataatcgaactcgaaaaggcgcgtcaatggaaggggttcgaacttataccttcggaaaatttcacgtcgctgtcggtgatgcaagcagttggatcggtgatgacgaataaatacagtgaaggatatcctggtgctagatactatggaggaaacgaatacatngacatggctga

SEQ ID NO: 45116 - DNA, 436 bp, Glycine max
  Clone ID: LIB3093-003-Q1-K1-G3
cttcctaccaaaaggcaccttctaacttgcttaagatctttttgcaaggaggccaaaaaaatatctggcaggttgcgaaaaaagggttgaccccctctcagattggtgtcattctcagagattctcacggtattgctcaggtcaatagcgtcactggcagcaaaatccttcgcatcctcaaagctcacggacttgcgcctgaaattccagaggacctgtaccatttgattaagaaggcagtttcaattaggaagcatcttgagaggaacaggaaggacaaggactccaagttcaggttgattcttgttgagagcagaatccaccgacttgctcgctattacaagaagactaagaagctcccaccagtctggaagtacgaatcaacaactgctagcactctggttgcttagagaatgtatcaactttcatgggtttt

SEQ ID NO: 45117 - DNA, 436 bp, Glycine max
  unsure (1)..(436): unsure at all n locations
  Clone ID: LIB3093-003-Q1-K1-G4
ctggaagaacctcttcacgaaagtgcgaaacttgatcagtgttggacgcgccttctnctncgcctccgccgncgccaacgccatgggtgacgttcagatccacaagaccaaactctgcatcatcggaagcggtccctccgcccacacagccgccgtctacgccgctcgagccgagctgaagccgatcctcttcgagggctggatggccaacgacatcgcccccggcggccagctcaccaccaccaccgacgtcgagaacttccccgggttccccgacggcatcctcggcggcgagctcatggaacgctgccggagccagtcgctccgcttcggcaccgagatccacaccgagaccgtctccaaggtcgatttctcgaaccgtcctttcagggttttcaccgattcccgaaccgtcgaggccgaatccgtcatcgtc

SEQ ID NO: 45118 - DNA, 449 bp, Glycine max
  unsure (1)..(449): unsure at all n locations
  Clone ID: LIB3093-003-Q1-K1-G5
cccacgcgtccgtctagctatctcgcatgctccctctcacttccacttccaggcataggctgttggaagtgctgtcctctaggaaagttgaagtcggagaccgtcttagccattcagctggcatttctactgctacaaataactatgctgccaaaggatatgcttccgatcgaatatttgctccttatactgtttacaagggcaaagctgcattctcgttgatcccttgtcttccaactttcactaagttgaattctgggactgttgtagttgatcgacgtggttcaatcatgatgactttcatgcattctattggagagcgcaaatatgactgggagaaaagacaaagatttgctctctcagcaactgaagttggttctttgataacaatgggcgctcaagattcctgtgatttctttcatgacccttcaatgntatcaagtaatgct

SEQ ID NO: 45119 - DNA, 278 bp, Glycine max
  Clone ID: LIB3093-003-Q1-K1-G6
gttaaggttccagggatcaaaagattggcttgaaccaaaataagcacggctcttttcaacgttagggaaggtgatgatcttagatacggactcatagggttcggtttctaaggtaaaatgatacctaagttttgggggtggaggctatgtaaatagtggctcaatgcggttgcggatgaggtcagatgaaaatgtacttcttggaaaatacgtggcttgtgtatattatatgaaactagaatatcaagatgtattgattattaccatcaacgattata

SEQ ID NO: 45120 - DNA, 370 bp, Glycine max
  Clone ID: LIB3093-003-Q1-K1-G7
ctcacgcgtacacaaaaaatgagattgtggcaaaacaggaagcttctgcttatatgtgaagaaaagctgcagatctgcacaaatgaggatgccaaagccggtgcatatatacgaacgagaaagctgaattgctatctgaagagcatgagccaggaaactatagttacaaagcatacacatttggtaggagagagcataaagattaaccgatcaagtgacactgaagaacttgaacaggtaccagaatgacacactgagaagaaattaaacatcaacgattatggtaatttcatacaggaggaataacaagagatggaaaacgaaactgaaacgcacttgacttaaactgcaacagaaagtgtaccataag

SEQ ID NO: 45121 - DNA, 265 bp, Glycine max
  Clone ID: LIB3093-003-Q1-K1-G8
gaaaactaaggaaggaaggaagagtgagcgtgaaagatgccttgggcgaggctttcagggtctccaaggctcgacgttgctattgacatgggcaatccatttctcaatctcactgttgatggtttccttaagatcggagctgtcgcagccacgcgatcagctgctgaagatacttatcatattatccaaaaggggaatatctcaagtcatgatttcgagaaaacgttgaaaaagatgtgcaaagaaggtgtatattggggaacta

SEQ ID NO: 45122 - DNA, 260 bp, Glycine max
  Clone ID: LIB3093-003-Q1-K1-H1
ttgcgttttaaccttaagttccggtcttttcgttcttttaaccaatttcaaggtttggaaaaagggcaatttccaacccaggttggaggaacccggggtcaacaaaggtcgatcaggtttcgtccagggatagcgggcacacttaactgtgaagtggtcgtgctagatggtgatcagaaaggcgtctgaggcctaatccgcaatgcaatgtgatgttggtgtatagctggatgtcatatcctgcagaatgacatggttat

SEQ ID NO: 45123 - DNA, 278 bp, Glycine max
  Clone ID: LIB3093-003-Q1-K1-H10
cttcaaccagcatctgcgcttacttcttataccgtctacatttccatttccgtctgcaacatacatacatagctaggttcagagaacgacattgatcaacgctccctactctttgtttacagggtccaacctagatcctgtatctacgccttgcctttccaacgatcctgttatgcctcgatttccaaccaaaagcatgacgagatcgtgagggaaattctgcaataaaaccggcaaatgttcacatacgctcttacattctttcccattttgtgcat

SEQ ID NO: 45124 - DNA, 380 bp, Glycine max
  Clone ID: LIB3093-003-Q1-K1-H12
cacgcgtccggcaaccagatggtcttttgcataggaatgcaattggtgaagctgaagaaaatcccaaatcgactgctattgacacttcccaagcagatagggtggcaatggaagaagatgatattaatgaaataggagaagaagagaaagaaaaattaaatgacgtagattacttgacagggaatccacttcctaatgacattctcttatatgctgttcctgtttgtggtccttatagtgcagttcagtcttacaaatatcgggtgaagataattcctggaccggcgaagaaagggaaagctgcaaaaactgctatgaacctattcagccacatgtcagaagcaacaactccggagaaggagttgatgaaagcctgtaca

SEQ ID NO: 45125 - DNA, 356 bp, Glycine max
  Clone ID: LIB3093-003-Q1-K1-H4
cccacgcgtccgaaagttagggttggtaccttggtttttggctggcaaatctgaatcgagtaataatcaatcatcataatgtcgccggcaaaaaaaccactgaaagttcggcggcagcttcgaggggacagcgtgcctgatctaacataacacatatcgagacgactgcccacgggatccttgcaacggacagcaatctggcaaggacgatctgaagagcactgaggcgcaatccaaacaaacctcgagacactaaagctggacgccatttgtaggtcgaccagccacctttgactatctggtgcactatgaaataaagctgtggactactgcaactgaccgcatgacaaggagac

SEQ ID NO: 45126 - DNA, 460 bp, Glycine max
  unsure (1)..(460): unsure at all n locations
  Clone ID: LIB3093-003-Q1-K1-H5
cgattggagtaccttttacctttctggttgaaaaccggccttcaacctaacctcaaaaaagggattcgggattgcaagctaacatccaatctgaaaatgcacaagttgaaaatgaaagtgctattactgtagaaaattcatattttggacagataatatcaaactcactcattttactttgttatgagaatgaattgagcctacactctntaaattttgtgattgagggtagcagtaagtacatacgaaaggtgaaccttgtacaacgatgctgctggactacaactttcaagaaagatgagaaagagtgtgttttggttcttctgtatcaaagtggagacattgaattaaggtccttgccagctttggaagtgttgggagaaagctctttaatgtcgatcctcagatggaactttgaaaccaacatggtgaagacgatattgtcttcatcaaatggaaa

SEQ ID NO: 45127 - DNA, 439 bp, Glycine max
  unsure (1)..(439): unsure at all n locations
  Clone ID: LIB3093-003-Q1-K1-H6
cacgcgtccgtccacgcgttcatccacgcgttcgggatccagtttgtttacaggctacggcacaatcgccataaccgaaaccaagaagtcccccttctccgtcaaagtcggcctagcccagatgctccgcggcggcgtcatcatggacgtcgtcgacgccgagcaggcccgcatcgcggaggaggccggtgcctgcgcggtgatggccctggagcgtgtccccgccgacatccgggcccagggcggcgtggcccgcatgagcgatccgcagctcatcaaggatatcaagcgggccgtcaccatccccgtgatggccaaggcccgcatcggccacttcgtcgaagcccagatcctcgaagccatcggcatcgactacgtcgacgagagcgaggttctnaccctcgccgacgacgccaaccacattaacaaacacaacttc

SEQ ID NO: 45128 - DNA, 358 bp, Glycine max
  Clone ID: LIB3093-003-Q1-K1-H7
ctccacttttcaatcaaatcaattccaatgtcggctctcttctccttcatcttcccatccagctgaaaagggaggagagagtgtttgcgttgcggcaatggaggaaccgagcaaactgaagcgtgccatgattgattcctgggctggggcaatttctggtggaatatcacggacagttacctcgcccctcgatgttattaaaattcgattccaagttcaactagagcccacatcttcatgggctttattacggaaggatttggctgcagcatcaaaatacactggtatgtttcaagcaaccaaggacattcttagagaagaaggcgtacaggggttttggcggggaaatgtgccggca

SEQ ID NO: 45129 - DNA, 347 bp, Glycine max
  unsure (1)..(347): unsure at all n locations
  Clone ID: LIB3093-003-Q1-K1-H8
acgaagaagcanacggagtagcggcattaaaaattcagatcttcgtgaaaactctgacggggaggactataaccctcgaggtcgagagcagcgacaccatcgacaatgtcaaggccaagattcacgacaaggaaggcattcctccggatcatcagcattagattttcgccggaaagcatctcgaagatggaaggactctggccgattacaacattcaaaaagaatcaacctttcatctcagcctcatgctaagtggtgacatcattgatccttaactcatggctttggctcgcaaatacaaccaacacaagatgatttgccgcaagtgctatccccgtctgcattct

SEQ ID NO: 45130 - DNA, 400 bp, Glycine max
  Clone ID: LIB3093-003-Q1-K1-H9
ctgaattatcgtgttttgatcagaatctgattagaaaatcacataatttcaaatcggagcgctcgtgtaaaaaaaggaagagaataaaatggaatcggaggatttggtcaaacaggaattggaggaattgcagaaacaattggggaagaagcaaaagtttgaagcttctgtttcgtctcttaaaacccttcttcaacgcacttacccatcagcttacccggcgcttcgtaaatccttttattcagttctatgccgacttgctactgtgttgaagaccaggtatacagcaccatgtttctggaatgctggactgggcctttttgagcaagctcatttgcttgtttctgatccttatgagaaggaccacttgaatgcttgcattgctcacgccaaggaacat

SEQ ID NO: 45131 - DNA, 431 bp, Glycine max
  Clone ID: LIB3093-004-Q1-K1-A1
cagcgatcgaagtttcacatcagccttatccagtttagggtttcggttccttaccctacctttgacgtatcgaaaccttaaatttgggattaggtctgagcaatctggttggtagaacctttggtcttagagagtcaagttttatgtctggattagacgatcaaattcctactgccttcgatccttttgctgatgcaaatgctgatgactcgggtgctgggtcaaaggagtatgtgcatattcgcgttcagcagcgaaatggtaggaaaagcctgacaaccgttcagggattgaaaaaagaattcagctataacaagatacttaaagacgtttagaaagagttctgttgcaatggaacaggtgttcatgacccaagactaagacaggttattcaaactcaaagtgatcagaggaagaatggttctactttc

SEQ ID NO: 45132 - DNA, 398 bp, Glycine max
  Clone ID: LIB3093-004-Q1-K1-A10
taattaccgggccgaccgactcgtacgtatggatccaccacgctcactgtcaatccattaataaccaaaagttttatttctataaaggcaacttcccatccttccgtggcatttattctgaatgactagctccaataacgctttcactttgactcaagctgagtacgctgccatatggtatcgcgtctactacaatggcaactgttttttgaccctatcataactcgttatagccttgttggatatttatcccaatcttaatcacaagcctgccatcatgcggtcttacaatgtcatcaacaaaaatgactattgtttcataaataataactaaatccgctatcttctgctcttcatacactactacaattaatttgtggaccaatttttaaatctat

SEQ ID NO: 45133 - DNA, 216 bp, Glycine max
  Clone ID: LIB3093-004-Q1-K1-A11
gcgcttcacgcaagagtaaacttttacgctccattccgttctttcacgatgggaaaccaaaaggggctgggcgtctccaactatcgcgaaacccgccgggctttgtacgctgtgagctccagaggacttacatgctatgccgcgactgtctagacctacactttgttctatgaacattgctgatgctcatgatgatacgatttcatccgaagctag

SEQ ID NO: 45134 - DNA, 465 bp, Glycine max
  Clone ID: LIB3093-004-Q1-K1-A12
ctctgacgtcactgatggtggctactgcattctcaagtggtggctatggcgccgctggtgggggtggtgtgtaccctgacactaccactgatggtgggtacagcaaaacaagtggtggtgggtatgatgatgaggttgactataagaaggaagagaagcaccacaagcatcttgagcaccttggtgagttaggtgctgcatctgctgctgcttacgccttgcatgagaagcacaaggcagagaaagacccagagcatgctcacaggcacaagatagaagaggaggttgcagcagcagctgcagtgggatctggtgggtttgccttccatgaacatcatgagaaaaaggaagcaaaggagcaagattaggaagctcatggaaagaagcaccaccatctctttggctgaagcataagcaaccaattatgaacatattccttctacttggctatatatatatatgctt

SEQ ID NO: 45135 - DNA, 395 bp, Glycine max
  Clone ID: LIB3093-004-Q1-K1-A3
acgctcacgcgtacgctctaatcactctagctgttgcaaatttctactattattcaatggcttctgcagatgttgagttccgttgctttgttggtgggcttgcttgggtcaccggcaacgatgccctcgagaaagccttttcaatctacggcgacatcgttgaatcgaaggttatcaacgaccgtgagactggaaggtccagaggattcggatttgtgaccttcgcctcagagcagtcaattaaagatgcgatcgcaggaatgaacggccaggaccttgacggtcgtaacatcactgtcaacgaagctcagacccgcgccagccgtggtggtggtggaagctgtggtttcggaagtggtggtggatacaaccgcggtagcggtggatatggtggt

SEQ ID NO: 45136 - DNA, 433 bp, Glycine max
  Clone ID: LIB3093-004-Q1-K1-A5
tcgttcacgcgtccgattttcaaaagcttttgtgagaaaaatgctgatggccaatcaatgctggcgtctacgctaattccacagccatattccatgaatcatgcattcctcgaggaggatgtcaatatgtcttttggcagcatgctattacacagacttactttgggtgaaaatggtgatcttgagacttgttgcagagctgctagtgttctatctcatatgttgaaggaccatctccaatgcaaggaaagggttttaagaattgaaattgaggcagcacccatgcaatctttaggagctccagagccactaatgcatcgaatggtgaaatatttggctgttgcttcttccatgaaattccatgatggaaagtctagtacatcaggaaactcttatgttcaggccattatcttgaaattactgattacctggc

SEQ ID NO: 45137 - DNA, 250 bp, Glycine max
  Clone ID: LIB3093-004-Q1-K1-A6
tctgcaacaacttcttcttgagtgttttctcagttcctcacatcatgtaccgctttgcaacctccctcgcctccaaagctagaattgccaggagcagcactcaacagattggaagtagggtcacttggaacaggaattatgcggtcaaagacattaattttggtgtggaagctcgagctctgatgcttaaaggtgtcgaatagctcgctgatgccgataaagtaacaatgggcctctaggggcgtaatgt

SEQ ID NO: 45138 - DNA, 355 bp, Glycine max
  Clone ID: LIB3093-004-Q1-K1-A7
aacacgcgtacgcctacgcgaaggtttaggcagggtctagagagaggaaaacgttggccggagaacacgaccggaaagcgaatatatgctgattccagaaatgtctagcatcaagtcctcacaccaaagataggataccagcgcccacatactattaacgcacaacccaaagttcaggaccaatgctactggacctctgacctcaaaacggtgcacttgcaggtaccaacatcatggacagcaccaatcgccaaggaagaagaatgtgaacaagctagcaaagcaggcaataatggcactagctgctgtagtgcaaacactggcgacagctcatgatgcatcatccgccaagact

SEQ ID NO: 45139 - DNA, 391 bp, Glycine max
  Clone ID: LIB3093-004-Q1-K1-A8
cccacgcgtccgtttcgcgctcgctctgttgtgaatagagattcatcacttccactcggcccattctccgctttcttcaaatcgtaaacttttttgggattgaagaccgaatcgaaattttcagggtacaatggcttccaacatctcgcccgctgcctttgataaagaacaggtaggcattcttttctcttcctccaactttggtaaaactgatctggtggttgatgtggttaatttgataccccaatgtggtttcaagtttaaattttcttttttgggtgttatttgattatttagtttttggatgtggttcaataattcatgtggtcatggagcagatatttggaatggctgaaaaggagatggaatataaggttgaattattcaacaa

SEQ ID NO: 45140 - DNA, 359 bp, Glycine max
  Clone ID: LIB3093-004-Q1-K1-B1
acggactatcgaaggatgagattgagaagatggtccaagaggcggagaagtacaaggccgatgatgaggagcacaagaagaaggtcgacgcaaagaatgctttggagaactatgcctacaacatgaggaacaccattaaggatgagaagattgcatcaaagctttctgatgacgacaagaagaaaatcgaagatgccatcgagagtgctattcagtggttggatggaaaccagctagcggaagctgacgagttcgaagacaagatgaaggagcttgagagcatttgcaacccaatcattgcctaaatgtaccagggtgcaggtgctcccgacatggctggaggcatggatgaaagatgt

SEQ ID NO: 45141 - DNA, 322 bp, Glycine max
  Clone ID: LIB3093-004-Q1-K1-B10
tcgctctgacgtcactgatggtggctacggcatttcaagtggtggctatggcgccgctggtgcgtgttgtgtgtaccctgacactaccactgatggtgggtacagcaaaacaagttgtggtgggtatgatgatgaggttgactataagaaggaagagaagcaccacaagcattttgagcaccttggtgagttatgtgctgcatctgctgctgcttacgccttgcatgagaagcacatggcagataaagacccatagcatgctcacaggcacatgatagaatatgaagttgcagcatcagcttcagtgggaactggtgggttt

SEQ ID NO: 45142 - DNA, 462 bp, Glycine max
  Clone ID: LIB3093-004-Q1-K1-B11
acgacttttccttcgattttttagatagttccacaagaccatagaaaacttctagcatccaggggcttgtattgacctgacgcagacgaaaagcgggatcgcaatcggttttgcatttaccgcaaacaggaggagtcctgtggcgttcggatcaatcgcacggcgccaagcttaccgttgtcgtttgggtgctggtggcgcacgaggcccctcgtcgaattgcacattgacgaaacacaatggcgaggcaatttcgaagaacaaatggtttgcacggtccccatacgacgggtcagatcagcgcatggattgccctgttggcaaccttggtgcaatttttgctcgtcgtttctccaatactgtcgttggaagctttcatccctgttacagttgtctttgtgggcctcgtgagtggttccttttactacggataccttgcgcagttcattgattcaatggaca

SEQ ID NO: 45143 - DNA, 280 bp, Glycine max
  Clone ID: LIB3093-004-Q1-K1-B12
cgcatagtcactaaacatttggaaagccttatccaggtatgttaagcaagtcgggtgcgtgatgtgcataggggtgtaaatttctattcacatttatgctgttctacagtgttgtcacatagtggctatcgcggcactatcaaatttctattcacatttattcttctgctggacatggcttaaaaattcggaaacaggatttaatatcccattccaatactggtccagcaatattagggatgggttctgtgcttaaggggggctgggggggcttagagta

SEQ ID NO: 45144 - DNA, 417 bp, Glycine max
  unsure (1)..(417): unsure at all n locations
  Clone ID: LIB3093-004-Q1-K1-B2
ggaatgcttggtcaggctggcagtggcaagcttcgtgtgtctgttggtcaaagcaaacttgcagcaaaagttgctaaaaaatttaaggaaaagaattatggtagtagtggtgctacctctggtttgacatcaagtcttgcattcacaccagtgcagggtattgagctgacaaatccacaggctcatgcacaccaacttggtagtggaactcaaagcacttatttctctgaaacaggaacattttcaaagatcaagaagacatgaaaccatgcatgaatgcaaattcttgttcaatgcctggattattcttggtgtccaatgcctaaaaattgttgattccgatggatattactttatatgtntattggagatttttgaagaataaccatgtatgttggtgatacgttcccttggata

SEQ ID NO: 45145 - DNA, 354 bp, Glycine max
  Clone ID: LIB3093-004-Q1-K1-B3
ctcaccactaagtttattattatcaaaaccaaaagctagcaagctaccttgcaaagcaacacatggcttctacagacaagcatggcgacactgaatacagaacatcatcttcaactccagctcctgcgggtgttgattactttaaatttgatgttatcctaaggtttgtgttatttgcagcatcactggtagctgttgtggtgatcgtcactggtaatcaaacagaggttattcttgtgccacagcctgtgccatggccagccaagttcagatacacaccaacctttgtgtattttgtagctgcattgtccgttactggcctctacagtatcattacaacacttgcaccctctt

SEQ ID NO: 45146 - DNA, 438 bp, Glycine max
  unsure (1)..(438): unsure at all n locations
  Clone ID: LIB3093-004-Q1-K1-B4
gtggaactcttggcctttctacagcaactgtcaaacttttgagtagtgatggtagcacacatgttgcttgttctgttggtacaggaccagtggattcggcatacaaggctgtggatctgattgtgaaggagccagtaacacttcttgagtactcaatgaatgcagtcacggaaggcatcgatgcaattgccactacccgggttgtgattcgtggggagagtgaaacaagtactagtactactcatgctttaactggagaagctgttcttcgaacatttagtgggactggagcgggaatggatgtcgttgtttccagtgtcaaggcctatattgctgcactaaacaagatgttgggtttcaaggaaacatctncatctgctgaaaaaattccagtttcttcattgaagatttgagaatttgtgttgctgctttggtaac

SEQ ID NO: 45147 - DNA, 394 bp, Glycine max
  Clone ID: LIB3093-004-Q1-K1-B5
aaaaaaaaaaaaactttcgaaagattttatccaattgaaattttaaaaatgactgggataaacttaagaattcaattattgaaattgaataagtaaacaatttaattggattggtcgaatggtatcaaaaaaatggagtactaactcccatttcttatttattattgaattaaccgatcaacttgctttgttatcgaacatttctttttgatttcaaaaattttccggaaaaaatttgaatctatttttatatgcgaatcaatcctactacttctggtcctgaagtttctgcgcttgaaaaaaaaaatctgggacgtatcgcccaaataattggtccggtactagatgtagcttttcccgcaggtaagatgcctaatatttacaacgctttgat

SEQ ID NO: 45148 - DNA, 231 bp, Glycine max
  Clone ID: LIB3093-004-Q1-K1-B6
ttcacgcgtccgactacgcgtaggtttactttaactgtgatgttatgaatgagttatcttgacttttgaaacgagagactgagaatggaacgtggggctcttgataggatcattaatagggtgcttgaagtcataggcagaccactgaaacatgtgcaacattatgaggctgacatcaaacagctctgtcttgtctacaaggatatcttgatgaggcagaccaacctgttg

SEQ ID NO: 45149 - DNA, 450 bp, Glycine max
  unsure (1)..(450): unsure at all n locations
  Clone ID: LIB3093-004-Q1-K1-B7
accacgcgtccgctcattcgctctctctacactaatcaatggacgactctcacaacaggaagcgactaaaccaccaattgacaatgcacccgcgactttgttgataactcctacgacactcacgcacttgactagacccagattaaactctcaggcgtagacccggaccttttcaacatgctcaatgatgcctagaacgtcacggatcgtgaccctaccatgcaaggtcttgactactgaatcaagagttacgaggaagaaatactttcttcggttacgaacccaaatctaagcgccgaagcagaagtgtntaatgcgaacctagggtacttgctggaagcatacgacgactagctatggttgccagcggcggtagcgcccggcgaggatgcgacagatccataaacacttgattcgggccgacttggatctgacggagtgcaactgact

SEQ ID NO: 45150 - DNA, 381 bp, Glycine max
  Clone ID: LIB3093-004-Q1-K1-B8
gtggtaatgttgcaaaggactatttaagtagaatggagaaagaagtcgggaagaagattaagttgcggtctcctcaagcaaattcagcatttcagaaactgtttgggcttccacctgaggaatttctaatcaacgatttcacctgtcatttgaaaagaaaaatgcccctgcagggcccgctatttctatcagcaagaataattggatttcatgcaaatttgcttggaaataagacaaaattcttttttctttgggaagatattgaagacattcaggttattcctactacattctcatcaatggggagtccaataattgtcataactcttcggaagggtagaggtgtaaatgcaaggcattgttgcaaaacacaagatgaac

SEQ ID NO: 45151 - DNA, 91 bp, Glycine max
  Clone ID: LIB3093-004-Q1-K1-B9
caacacgccctcaagttcagccaaatgttccatttgataccaaccacacagggaaactattatgtgttgaatgacatattccggttgaact

SEQ ID NO: 45152 - DNA, 233 bp, Glycine max
  Clone ID: LIB3093-004-Q1-K1-C1
gagatattgccttctaaggactgggaactagagtctattcatagctcgtaagttttggatatgataagggaacacataactactgtaactggcttgagagcaaaatctagtgtaactgagtgttgggcaacaacccaagttagacaattcttacttgcccgggtttacgttgcctccatattatatggttactttttgaagtcagtttcattgaggtaccacctataacggaa

SEQ ID NO: 45153 - DNA, 435 bp, Glycine max
  Clone ID: LIB3093-004-Q1-K1-C10
cggacgcgtgggcgaaacaggtggggtcgtacaaagcgaaggaacgtctgtggaagacgcgtgctgtcgattctgtcctgcaggaacattctggatacctccagtcgattcaaaggtcgttgacggctaccaataacagcccgtggaagcgtaacgacttgttcctacccaacgaacgtatctggagtacacctcgtccctctcagatccgaacgcattcgcagtattcggacccctttccccatcaagagcgtcttcggcgccaacccacggaagccgaaattcgaccagacgcggttcttgcaacgctcgattgggaacccttcgaacgagcctggacctcgcctttgccagcccatgtgaccacggctattgctcgggactaatactactggacaccgaatgttcccacgtaccgtgctatggaaaaacgtt

SEQ ID NO: 45154 - DNA, 387 bp, Glycine max
  Clone ID: LIB3093-004-Q1-K1-C12
tcgcccacgcgtccgcttctcagtgctttgactaacacgacgtcgtgatgggatttttgaaaaggatagccggatatctagggtttggaaaccacgaacacgattccaaggatgaggcccgcgatggtcaacctcgtaccacacaacctcgtaaaggcttcagtgtccctgcccaggtcgtcgtcgatcgcccccacctcgctcccgttctcactccttctacttccggcgacggtggaattcaaggtctggattggtatgtaaagcgtcttaagatggatgaagatggtgatttagcagatgaattccttgatgaggtttcattatagagcccagaaggacatgcagtagatcatcttaaaaccaggccaaggttaaacccaacaa

SEQ ID NO: 45155 - DNA, 344 bp, Glycine max
  Clone ID: LIB3093-004-Q1-K1-C3
tccacgcgtccgggcacttctaatgatcattttgtgcattcgtctagtgctggaccattctttacagtgtctgtcataattggaggaagaaggttggtgtaaatatgacagacaaacatttcatgttgatgctggttttattgatcttacaatgggaagtggacaagggcatcacaagcgtaagagccctggaattccttcagtctacgagggaggcagtactagtagatactttaatgctgggagttcaactgatcttcctatatcttcagaattggggcaagagaagccaaatattgattctcaatatatgccctgggatcattttactatgacacccacat

SEQ ID NO: 45156 - DNA, 391 bp, Glycine max
  Clone ID: LIB3093-004-Q1-K1-C4
tccacgcgttcgagagcttgcacctattggtatcttctacaatatcctctcatagtgctctggttcttcttcattttcattatcaagatgtctttgctttcggatctcatcaacctcaatctctcagaatccacagaaaagatcgttgctgagtacatatgggttggtggatctggtatggacctcataagcaaagccaggactcttcctgggccagtgagtgaccctgcaaagcttccaaagtggaactacgatggctctagcacagaccaagctccaagggatgacattgaagtcatgctatacccacaagctattttcaaggacccctttaggagaggcaacaatattcttgtgatttgtgatgtttacacccccgcttgtgagccac

SEQ ID NO: 45157 - DNA, 460 bp, Glycine max
  unsure (1)..(460): unsure at all n locations
  Clone ID: LIB3093-004-Q1-K1-C6
gaaatcccaatcccacacaaatggcatgctcagccacctctgctgctctcttctacggaaaccccacacctctcttctctcccaaatcctccctctccctccctaacaactctctccacctcaaccctctgcccacgcgcccttctctctccctcacgcgcccctcgcacactcgccgctccttcgtcgtcaaagcctcctccagcgagcttccgctagttggaaacaccgcaccggatttcgaagcagaggctgtgtttgaccaggagtttatcaacgtgaaactatctgattacattgggaagaaatatgttgtgctcttcttctacccgttggacttcacttttgtttgtcccacagaaatcactgctttcagtgaccggcatgcanagttcgaggcactaaatactgagatattgggtgtttcagttgacagtgtgttctcgcaccttgcatggat

SEQ ID NO: 45158 - DNA, 461 bp, Glycine max
  unsure (1)..(461): unsure at all n locations
  Clone ID: LIB3093-004-Q1-K1-C7
atttgagtgtggttcttcatttcggacattcatatcttcttcgtcctctgaatcaagtttcgactttatttgagtagttttgctctttccttccaaaatgagccggccaatggaggaagatactgctggtaagaatgaggaagaggagttcaacaccggaccactatctgtactcatgatgagtgttaaaaataatactcaggtactgataaattgtcggaacaacacaaagctgctgggtcgagtaagggcttttgacaggcactgcaacatggctcttgaaaatgtcaggtagatgtggactgaagtgccaaagactggtaaaggaaagaaaaagtcccagccagtcaacaaggattgattcatcagcaaaatgtttctgcgtggagattctgtcatcattgntcttaggaatcccaaatgagattctgtcatcaacttgtataaagaaatggctctgt

SEQ ID NO: 45159 - DNA, 460 bp, Glycine max
  Clone ID: LIB3093-004-Q1-K1-C8
attgtttaaacctaattctcatttcttcatcgttcgattcttctcctcctaaagatgcagatcttcgtgaaaactttgaccggtaagaccatcacccttgaggtggagtcctccgacaccatcgataacgtgaaagctaagattcaagacaaggaagggatcccacctgaccagcagagacttatctttgcgggtaaacagcttgaggatggtcgaacccttgccgactacaacattcaaaaggaatccactctccacctcgtgcttcgcctcaggggtggcatgcaaatctttgtcaagactttgactggcaagaccatcaccctcgaggtcgaatcctcggacaccattgataatgtcaaggccaagatccaggacaaggagggtatcccttcagatcagcagagggtgatatttgctggtaaacaacttgaggatggaagaacccttgctgattaca

SEQ ID NO: 45160 - DNA, 151 bp, Glycine max
  Clone ID: LIB3093-004-Q1-K1-C9
tcggcagtattataatagaaagaggactcacagtttaagagatagggagctatagccatgatgaggaaaactttcaaagaggtgaaagcaaaagaattcttcttttccttttttatatatacttgggtgctaaactgtgtgagttcattga

SEQ ID NO: 45161 - DNA, 359 bp, Glycine max
  Clone ID: LIB3093-004-Q1-K1-D1
acgctgacgctatcgaatcaactatcatgtcagccgacgagcaccacttcgagcaccatgccgaggccagagcctacaaaagatactctcaaaaagacggtaccataggcaagaacagctacatgaacatctacggccggatctgcagggttgcctacgttgctactgacaaaactgctaagcacagtgacgctcactgtcactctgagggaaacgatattggcactgacaagaaaactgacgatatactggccgatattgacaactgtgatgacacccatgagaatcgtactgagtaccggactaatgaccatgccaatgatagagcttagagtcgacttactggaaatggtaacgct

SEQ ID NO: 45162 - DNA, 443 bp, Glycine max
  Clone ID: LIB3093-004-Q1-K1-D10
cacgcgttctttttattatcacttttgcatctatttcagatatttagtatttgggtacgggtttgttctttagttgaaacacctacgtctctacgtggctgctatacccaattttaactttaattatcttccctttgtgtgaaaaggttttgtgttagagttggctttttgaagggcgtgcattgtgaaattatttgtgtatatcaatgatgaagaactatagataaaatggtaacgaagtttaccaaagttacatacagcagcaccactcgttgtcaatgccaatgatgttttccggttttaaccagatagaatgagatgtcagccatgatcaatgcttttacacctgtgggtttgtgagattaattctttgttcatcacaatattggatatactaatagtgcaaatgttggtggtggtggtgttgatgatgtttcatatat

SEQ ID NO: 45163 - DNA, 424 bp, Glycine max
  unsure (1)..(424): unsure at all n locations
  Clone ID: LIB3093-004-Q1-K1-D2
ataatgtgagcaaggatgtgaaatcagaagaaggtgagagaatgtgtcctatacctgatggattgccaaaatctgctgatgaacttagggaagaggagcaagcaagaatgcctgattcaccatacactaagcttcttaggaccatgggcaggcaccctgcatggtactctcctgcccctgaccatgaaacagattgatgaatgatgattcccatacatactaagctcaaagggaatgaatatattctctttgagggaacaagtaataacatagtggagtagctataatacccctatgtgaatggaatgagtgtatattttgggctttntctacaaatgtaactagtaattactttgcataactcctaatgttatatatgtttcaaggagtgataagttaaattggnggacaatatactttcatc

SEQ ID NO: 45164 - DNA, 339 bp, Glycine max
  Clone ID: LIB3093-004-Q1-K1-D4
cccacgcgttcggtggctcctggcggcacgtgtggcggtatcggctataaataaaggggtctctcttatgttctaagtttgaagcggcgccaccatagttggtgtagctagcgagggagggatatagggggaagcgtttattcattcattaagatggcatcggagcttcaattgcccccaggcttcagattccatccaacggaccaggagctggtgttgcactatctctgccgtaaatgcgcgtcgcagcctatcgccgttcccatcatcgccgaaatcgacctctacaaatacgacccttggacctacccggtaacattatcttcaacttctgatata

SEQ ID NO: 45165 - DNA, 401 bp, Glycine max
  Clone ID: LIB3093-004-Q1-K1-D5
agttcatctccgttaagattctccagttgctgtttccgattctatcactcgtgttgtgcgcgtgcatagtgaatactcgtgcttgaacgagaaattaattgttaatttccaagtatgaccagtgtggttggtgtgagagcgatgccacgatctagttccgccatgcaccaccaccgtcagagctccgataactgcatgttcgacgctcacggaaggcggttacactctgcggcttacgcgcaggagctcgggactcgatcttcgaacttgaggagaaacgacgatgatcgtgttctaaccagtggcttgcttgatctgcattcgtgcgataccgagcttttacctgagggacaaaggtttgatggctacgaatcgattctttttggcaacaaacttgtacc

SEQ ID NO: 45166 - DNA, 462 bp, Glycine max
  Clone ID: LIB3093-004-Q1-K1-D7
ccatcgagtagcaacaatgtcgaagcgaggtcgcggaggatcggcagggaacaagttccgcatgtcactgggtctgccggtggttgcgacggtgaactgcgccgacaacaccggcgcgaagaatctatacatcatatcagtgaaggggatcaaggtaaggctgaaccggttgccgtcagcttgcgtgggtgacatggttatggccaccgtcaagaagggaaagcctgatctccgtaaaaaggtgctccccgccgtcatcgtccgtcagcgcaagccgtggcgcctaaaggacggggtttacatgtacttcgaagataatgctggggtcatagtgaatcccaagggtgaaatgaaaggttctgctatcactggtcctattgggaaggagtgtgctgatctgtggcccaggattgcaagtgctgcaaatgctattgtttaagctgggtttttagtttatgtaat

SEQ ID NO: 45167 - DNA, 314 bp, Glycine max
  Clone ID: LIB3093-004-Q1-K1-D8
acgcctacgcgtccgcccacacgtacgacttaatcaaatcagggtgtaaatcaacttgcgtggaagagaaaaaagaaacagacgaacgagaagaaagaaaacagaacagacaaaacgagacgagaacaagctatacattatatgaatgaatctgatcactggaaggctgaaaacagacgacaggctgtagagtgcttgccatggatctggagctggcctagaacgaaaacactgatctgcgcaaaaagaagctcatggccgacaaggatcgaagtggaatgcagatgcgcatagaggaggggggagacatgtac

SEQ ID NO: 45168 - DNA, 391 bp, Glycine max
  Clone ID: LIB3093-004-Q1-K1-D9
acggtcaaattaattgcggcgctgtcttcctggagctgagatctatggagggtaacttgcaaagatctggcctgcggcgtcgccggagaattttgtgcgtctaggtttctcccgtcaagcgttttaccagcggtacgggactctgtgtttagaagtcgagtctcggaccggttttttgttgctgtgcccggaaggaaagatggaccacgcgtgccacaaacgttcccatgaaaagaagaagctctttctggtgcacaaccgtgttttggctcggccgaagaacgactgcccacgggtctggggtgtatctgatcttcttgacctaaagaacgggaatcaagtcgccgctttcgttgaagcaaagatcgaagagcttgatccaaaggcgaaa

SEQ ID NO: 45169 - DNA, 429 bp, Glycine max
  Clone ID: LIB3093-004-Q1-K1-E1
gttctagcaagtgttgcaatggaagcagagtcggataccaagcagcagcagacgatggaaggaagttattcccaaactatgcaaattgatccgaaaagggctcgatttccatgctccgttgtgtggtcaccacttcctgtgatctcgtggttcattccttgcatcggtcacattggcatctgcagagaggatggagtgatattggattttgcagggcctaattttgtgtgtgtggacaattttgcatttggagctgccacccgctatattcaaattcccaaagaaaagtgttgcgttcctttagtccagtctgtgtacaatggtgaggaacactacattcaagatgaaactaaaggagatttgaggacttgggatgatgcactaaagaaaagcactcaagaattccaacatttatcttacaatctcttt

SEQ ID NO: 45170 - DNA, 364 bp, Glycine max
  Clone ID: LIB3093-004-Q1-K1-E11
gatgtagtggtgcttaccgtggctccggcatcggtatgtgcctgtgactacctctttttgggctggatcaccatcaaatcccacaaaggtgctttgacgagtgacgagcgtgctcagcagaaccgtgatcggaatcgtaagcactcaaggtctactagacttcgcagaaaggcctacgtgcaaaagttgcgcgaactcgtctagggttctgattccgaacgtacggaagaagtactactaaggatatttgcaatacagcatcttgcggataagcaaaacgttctgaaaaaggttgtgcggaacttattacagtttggttccaactactaatcggactatcgcaagtttagtaccattttataag

SEQ ID NO: 45171 - DNA, 251 bp, Glycine max
  Clone ID: LIB3093-004-Q1-K1-E2
cggacgcgtgggctagagaaaaagatatgggtcatgatcatgaatggtctgaaagaaagcatcgtgatgatagaaaaacgggcagagaacgatcccgtgaccgtgaacgatctcgagaccgggatcgtgatcctgaccgttaaaaggatctccgtgagcgttacaggcacagagaagatagggatgggtatgcagatcatcataagttcagagaccgggaagcagagcacgatgatgaatgggagaaggga

SEQ ID NO: 45172 - DNA, 360 bp, Glycine max
  Clone ID: LIB3093-004-Q1-K1-E3
acgattacgcgtgcggtgagggtgcacgttggcatcatcaagctataaaagaaaagaaaagataaaaagaaggttggagttagatacacacacatcacaaaaagaaaaaaaaaaaaaagaagctacattgcttcatgttggagacatcaaacatggcaactggtgccaccccagatggattattctggtcagtgtatgaagggtgcatatcctgctacgataactgcgtcgagcgacgaccctaacaccgtaactgtggctgtgcactccataacaagtcacttattaattgcacgcacaaggttccaaagtgtaacaatgtgtcataccctatgaagagggcatggagtgaaggaagct

SEQ ID NO: 45173 - DNA, 461 bp, Glycine max
  Clone ID: LIB3093-004-Q1-K1-E5
ttgttttctgtatctaaaaaatcttgtttttttgaacataaagaaataaagaagccattgcaattgccggaaatactaggcctactagaggaacaaaaatggaaggaaagtttatcataaaatgggtacctcgatttactatttgtaccttatatatattatttttatatttatatagattctttttttttttttttatttttttattcttatttatattattatataaagatagtctataatcactagaatttctatatatttatacttagtatataataattctagtgattatagctaagccaatatatatcataatataatatacccttttcttattcaaagaatttatggctatgccttatcatttttagtcaaagaaaagaaattatggaattgaaataactcactcagaacgccctttaaaagattacgcggtacgattgaatcaaataagccct

SEQ ID NO: 45174 - DNA, 328 bp, Glycine max
  Clone ID: LIB3093-004-Q1-K1-E6
gttccaagataatacctatggataacatttgcagatcaggcatttgggagttatctgatgatattttaactaagattttagcttctatgggcccaatggacctcactagggtttctgcaacatgtcatcatttaagatccttggctgcttcggtaatgccttataccaagttaaatctgtttgctcatcagaggacagcagttgagtggatgttgcatcgtgagcgaaatgctgagcttttgccacatccgttatttgtagctctgtcaactgaagatggctttagtttccatgtatatactgtaactggtgatattgttactgggga

SEQ ID NO: 45175 - DNA, 415 bp, Glycine max
  Clone ID: LIB3093-004-Q1-K1-E7
aattgctttgcatgggacttgatactacatggagaggaataccttgtgcaaacgtcgttggttcattcaacaaaacttcttcctttaatacagcgaagctggttgagtacaatccagtccacattgtatcattatgagagatggagcgccagactggtgctagactgattcttacagctggcgctaatgataccatagtgcctgactacgatgatgaacccactagagatatagcgtatgtgcttgtagtcaatggattatcatatgcagatgttagaatatgatagagctaaagacagtggagacagttcaattacattgccactctttgattcaacaagtctacgatctcttaactcatgtgaagagacaatagctaatacctacagatgactgggctcttttgaagagaacg

SEQ ID NO: 45176 - DNA, 269 bp, Glycine max
  Clone ID: LIB3093-004-Q1-K1-E8
actacgcgtccggttggagtgagcgaagaatatgtattctagagattcatggggtggaccgttggagataaacgcgacggactcggcgacggaggacgagcggagccggaacctgcaggacgttgacagggcagcgctgtcgcgtcccttggatgagacgcagcatagctggctccttggcccctgcgagcagaataagaagaagtacgtcgatctcagctgcatcatcgtcagcctcaagatcttcaagtggaccctctgcacaatcc

SEQ ID NO: 45177 - DNA, 450 bp, Glycine max
  Clone ID: LIB3093-004-Q1-K1-E9
acgcaaggtctggtctttcaccaccatcagcagcaacatgcaaatagtaccgacacgtcgaaacgtcggggaattgatggcatgtcaggtagcgccctccagatacagccaacagggcgctacctggagggcccactgcatccggctttttgggcggcgatcagctggcagcagctgctgcacgagccatacaaaaccaagggcggggacggaagaagtctcacgctcagattgatcgaagacgggagcgaaatcgaattctggcacggcgaactcgccttcgcaaaaagttcttcttcgaatcgcttcagaaggaaataatggatttgcagcgtgaaaatctagttctcaaggagctggtcaaggtcaacattagcggggaagaaggaaagaaaatattggaagggtgcaatgccgtcgagaatcttccattgtctgttctggaagctt

SEQ ID NO: 45178 - DNA, 461 bp, Glycine max
  Clone ID: LIB3093-004-Q1-K1-F11
caactacgcatacgaagtatgcaaggactgtaacgatgtcctttaaactattcggccgaccgttgagtgaaaataaaataggggaaagtagcatgtcgaaaaagcccgcttgctggaaagcggataattccaaaaaataatgggtgaagtaggttacttatgaatagaatgttaatttcaaatcggagtcaaaggctgggttacatgatcaaatgttttaaccgcaatcgaatatttgtaagagcttgtgagactaaaagaaatcgatatcaagagttacctcttacagccactattacactagatgtaatatgtatgactaaacgagttctaagggtaaatatactagttgtagtagtaactgtgggattgcctaagtcttcaaagagatatggtaacggaggattaataataacagctactaaaataggagtttttagtaatacgtctaaagtaatgtt

SEQ ID NO: 45179 - DNA, 85 bp, Glycine max
  Clone ID: LIB3093-004-Q1-K1-F12
gaattcccatatcgacgcacgcgtacgcttgaatgtaacctatacccactactaattcaccgatcaccctctctacacacggcaa

SEQ ID NO: 45180 - DNA, 364 bp, Glycine max
  Clone ID: LIB3093-004-Q1-K1-F2
gaaattgacggtgaattttgtgttatttgacagttaaaggaagaaatgggtgtctctgcagattagacattatagtgtgaactccaaactctgtaaccctcaactcaaatccaatcctttggtgggtttcgaattggagttcaaccaaattctaaacacatggactcagctctgtcgcggttgcatctttacaatctccctcctcttttctacgccgctcaccgtcctctcttgcagtctctttgcgacgccgcttctttctaccgctcttatactcctcttccacgcctccgtatattagtcgcttctcgctgctaacaccctcaccgctaatgacgtctcgccaagaagtggactatacact

SEQ ID NO: 45181 - DNA, 337 bp, Glycine max
  Clone ID: LIB3093-004-Q1-K1-F3
attttccagcaagccaagctacacttcggctctcgtacggtgcttccttcagtttccgccgccgatggcgactgcggcggcgctcttttctcgcctccgccgctcgcggccgtcctcctccctctccctcctatctacttcacgtgtcctctcctctgctctccctcctccgcttcccgctcctgcatcacctcactctccaaccctcgcctttctcgacgcgttccgctcacgcgctttctcctctcacatttccgacaatcgagaaccggagctgaactcgttcggtgtcgactcaccgcttaactcggagcttctgaaagtgattgctgatact

SEQ ID NO: 45182 - DNA, 367 bp, Glycine max
  unsure (1)..(367): unsure at all n locations
  Clone ID: LIB3093-004-Q1-K1-F4
cgcgtcgcttcgcaccagtttcaccgcacgaatatcttgttgtttggagcgatccgagaaaaactctgtaaacatgttggtttaccaggacctgcttacaggtgatgagcttctctctgactccttccgttacaaggaaattgagaatggaatgctgtgggaagttgaggggaagtgggttgttaaaggagcagttgatgtagacattggtgcaaacccttctgctgagggtggaggagaagatgaaggagttgatgatgcagctgttaaagttgttgacattgttgacacattcagactttangagcaacccgcattcgataagaagcagtttgttaccttcatgaagaggtttatcaagaatttg

SEQ ID NO: 45183 - DNA, 358 bp, Glycine max
  Clone ID: LIB3093-004-Q1-K1-F5
catacaccatcaacttcttcttcttcttcttcttcttcttcttgcgttttttattgttcattcaatttctttttcttctctcatcatctcaaccaacaaatcatttaattgcaatcatctatggcgtctttcgacccgaacgtagattcaagtaattccgacacgttgcgagaatccaatcacaagaagcgcagaaaaatcggagaccacgccgccggcgatctcgatttcgccgccgacgtcccttggagatccgacgtggagcagcggatctactcccgccgtctcgtgtaggctctccgtcgcactccgtcatcggcgaccaagcctagagccgccggccaggtccgcgagacct

SEQ ID NO: 45184 - DNA, 236 bp, Glycine max
  unsure (1)..(236): unsure at all n locations
  Clone ID: LIB3093-004-Q1-K1-F6
aaaaaatggcttctagttcagaatctcaatctcagtctaaaccgctccaagaccgagttgcaatcgtcaccggctcgtcccgcggaatcggccgagaaatcgcgcttcacctcgcctcactcggcgcgcgactcgtcgtcaactacaccttcaactcggcccaagccgactcaatcgcggcgcaaatcaacgccggttccgncaccacgacaccgtgcgccgtcgtggtccaagcc

SEQ ID NO: 45185 - DNA, 353 bp, Glycine max
  Clone ID: LIB3093-004-Q1-K1-F7
aaaacacgtccgctacgtcagtgtaatactactactcttaacagcgtcatgactaggccgcggaacggatgcggtgcactggacgaatttatggaccaaaggatcgatacggccgctcaatcggctcggtagacatcgtcaggacacgagagtgattgctacagcgcactagtttacagttgacacaagcgcactaagatgagctaccacagcccaggccatctcggtcgaacaaaacggtgacagatcggatgatgcggagacccagttcgaactcgaacgctgcaagtgtgacctatcgatccaaatgcccttcaggatatcaagctagatgtaccggacaagttactaca

SEQ ID NO: 45186 - DNA, 268 bp, Glycine max
  Clone ID: LIB3093-004-Q1-K1-F9
acgcaagctctgatagacagtacgatcttactctgcttggtcttacaacggatgccggatcttgctctagattttctctcgatccgtgggagaacgattcgtaaagcaaaaaaatggtaaaagaacatactagcacattctatcgatcgaaccagtcacagaggaaggcgagcgatacctctacatctagtgacgataccgaagaaattcatctcgtggactaatcgccaagtgtgatgagcacctatctagatcatgaagagattta

SEQ ID NO: 45187 - DNA, 406 bp, Glycine max
  Clone ID: LIB3093-004-Q1-K1-G1
ctactggactatcaagaggattagcggccaaaggtatctatccagcagtagatcctttagattcaacgtcaactatgctccaacctcgaatcgttggtgaagaacattatgagactgcgcaaagagttaaacaaactttacaacgttacaaagaacttcaagacattatagctatccttggcttggacgaattatccgaagaagatcgcttaaccgtagcaagagcacgaaaaattgagcgtttcttatcacaaccttttttcgtagcagaagtttttaccggttcgccaaggaaatatgttagtctagcagaaacaattagagggtttaaattgattctttctggagaattaaatggtctttctgaacaagccttttatttggcaagtaaaatcgatgaaactac

SEQ ID NO: 45188 - DNA, 171 bp, Glycine max
  Clone ID: LIB3093-004-Q1-K1-G12
ttcgtatttagaggccatgtctcccttgtgacaatgtgtgctgctgctcatgtctgatcttgagtactatcttgaggataagtcaatgctttattaatacagtgcgatgcatcaggtgtttttgatgaacaatactatattaccttgtgcgtaatgtgtatgactcttacc

SEQ ID NO: 45189 - DNA, 428 bp, Glycine max
  Clone ID: LIB3093-004-Q1-K1-G3
ctcacgcgttcgaataattgtgaggcgagggtaaggtcgcgttgtgttgcgtcgtgtcgtgcgctgttcctctgtttctcgtttttgtgttcagaccgaaccctagctccgcatcgcaaccatgtcgaccaagcaaggtggaaaagctaagcctttgaagaaacccaagtctgataagaaggattacgacgagattgatgtggctaacattcagaagaaaaaggaagaggagaaggcgctataggagttgaaagccaaggcgcaacagaagggaagctttggaagttctaggctcaagaaaagtggaaagaaataagggctctttatcatgattgtatgcattcaatattgagccctgtaattacagttgctaccatgataacttctcttaatattgtgggctactttattgctaatgtgtactgaac

SEQ ID NO: 45190 - DNA, 424 bp, Glycine max
  Clone ID: LIB3093-004-Q1-K1-G4
atttaaaaacccggaccgtcgtatcgttccaccggcgccgtcaacctccaatgctcgaaccagcatccttccactcaaccgcgcacttgcactcgtcggctcaagctaccaccgcagcacgcctcagccgccgccagttaacaagcatttgctcataaagaaggaaggaagatggtgtttgggcaagtagtggttggtcctcctggctctggaaaaacaacttactgcaatggcatgtctcagtttctcagtcttattggaaggaaggttgctggtatcaatttggatcccgctaatgattcggtgccctatgaatgtgctgtgaacatcgaggatctcgtgaaactaaatgatgtaatggtggaacattaggttggaccaaatggaagtcttgtgtattggatggattatcttgagaaaaata

SEQ ID NO: 45191 - DNA, 343 bp, Glycine max
  Clone ID: LIB3093-004-Q1-K1-G5
ctactgggcacctacaagggacgatcgtgttggcgtctgcaatggaattttccgcactgacaatgttcctaaggatgacattgtcaagcttgttgacaccttccccggccaatctattgatttctttggtgcactcagggctagagtatatgatgatgaggtgaggaagtggatttctgttgttggtgttgacttcattgggaagaagcttgtgaactccaaggaaggacctccaacctttgaccaaccgaagatgactttgagcaagctcttggagtatggtaacatgcttgtccaagaacaagagaatgtgaaaagagtacaactggcaaacaagtacttg

SEQ ID NO: 45192 - DNA, 334 bp, Glycine max
  unsure (1)..(334): unsure at all n locations
  Clone ID: LIB3093-004-Q1-K1-G8
atacgcaaaaggccacacaanaaaaggacattagaaagaaagtccgggagcaaccacaagagggaggagaccctccatgtgggagggcacacacgagaggagcacaaaggagaacaccatggagagcacaaaggagaacacaaaggagaacaccatggagagcacaaaggggaacacaaaggacaacaacaacatggggagcacaaggagggactagcggctaagatcaaggacaagatccatggagatggccatgacaagggtgagaaaaagaagaagaaagacaagaagaagaaggagcagggagatgaccatcatggccatagcaccagca

SEQ ID NO: 45193 - DNA, 359 bp, Glycine max
  Clone ID: LIB3093-004-Q1-K1-H1
ggaaggtataggaagcagacgcaagatcatgagcaagagcgaaagcagtagagaatatggaaggagaagagggttctcagcagccacagatggtgctcgcggacaagctattccttctccggcaacccgatgtgcaagacattgacaaggttcgctacaaagaggatgtcttcactcatgtcaaggaaaacgatatggtccctctgtacgaaaccctagacgctgattccgtgtaggacttggatcgtgcccttttggactctatgcgcgctaaaattgacgacgagctcaacaagcttgacgaaaagattgctgatgccgaagaaaacttacgagagagtgaaattcgcgaggctcat

SEQ ID NO: 45194 - DNA, 440 bp, Glycine max
  Clone ID: LIB3093-004-Q1-K1-H10
ctttctccgcgtcgtttcgcaaccgacgtgcatcttggatacgggaacagtgtgccaataggagctctcgggcaggcaagggacctgctatcagaagttaccggcggagaaagacagctttggaccttgaccttaaccgtttaccggctggtgagaatcgtgagcaggagggaccttcaactcaggcggtgcctcaagaaattcaacttgaacagcagccacaggttactcaacctccgatgattgacgtggaagccattgatgatgatgttgttgaatgtaccccaagggcttttgctgaggctaaaaacaattcaagaagaattcgtaggaagactgtagttgatattgatctagaagatcagactaggcgcaacaaacgccgaagagaattgccaaatctgattattaattgtgataagtatataaatttggaaggc

SEQ ID NO: 45195 - DNA, 239 bp, Glycine max
  Clone ID: LIB3093-004-Q1-K1-H2
acgcccacgcgttcgtccacgcgtccgaaggactttaggttgggatttgggaatataggttattcgcgtggcgaagatgattgaggtggttttgaacgatcgattggggaagaaggtgcgcgtgaagtgcaacgacgatgataccatcggcgacctgaagaagcttgtggcggctcaaactggcacaagagcctgcaggatccgcatccagaagtggttcaccatctacaaggatcaca

SEQ ID NO: 45196 - DNA, 373 bp, Glycine max
  unsure (1)..(373): unsure at all n locations
  Clone ID: LIB3093-004-Q1-K1-H4
gcgcccacgcgtccgcttcttctatgggttggcttagtcggttcataactgccgtggctttcttagccatcggagtgatattctcaccggagacactggggtcaaaatcaaccacactttccacctacctcaaactcgctcacctgctctgcttctccaccgccttcggcgccgctctgtgggtaacattcatcggcggcatcatcatgtttaaaaatctgccgcggcatcagtttgggaacctgcaaagcaagatgtttccggcgtatttctcgatggtgggtgtctgctgcgccgtattggtggctgcctttggctaccttcacccgtggaaaactttctncaccactgagagataccaacttgggttttt

SEQ ID NO: 45197 - DNA, 452 bp, Glycine max
  Clone ID: LIB3093-004-Q1-K1-H6
cccacgcgtccggataagtactactataatagtataactaaggaaggagtaagggtgatggtggttctgatctgacttttggcggtgtgggagtcacgagagcagcaaggggaagtcacaagagtcacaagaatggagagaggttcgggcaagctgagcaggaagaaaagtggtggtggaaacggacaggttctagacggttctaatattatggagttggttggaaaccagcaagttttcaccaccttcgtggaccataagtttcacgagttagacacagacaaagatggcaaactctctgtcaaagagctccaacctgctgttgctgacataggagctgctcttggtttgcctgctcacggcactaaatctgattctgatcacatctattccgaggtgttgaatgaattcacacatgggaagcaagaaaacgtgagcaagaatgagttcaa

SEQ ID NO: 45198 - DNA, 455 bp, Glycine max
  Clone ID: LIB3093-004-Q1-K1-H8
cccacgcgtccggggcagctcgtgtgggagatcgtcaagaaaaacaattccttcttggtcaagcagtttggaaggggcacccagagcgtcgaattcagcagagagagcaacaatctctacaacctcaattcgttcaagtactctggtttggcaaacaagaaaactgttactgttcagcctgagggcaaagatcaggctgtgttgttggctacaaccaagacaaagaagcaaaacaagcccgttgcattgctccacaaatctgtgatgaagaaggagttcaggaagatggcaaaagctgttgaaaaccaggtggccaaaaattactacaggcctgatctcaagaaggctgcccttgcaaggttgagtgctgttcacagaagcctcaaagttgccaagtctggtgtcaagaaaaggaatagacagggcgtgagagtcgctggtagggagtgaaaggg

SEQ ID NO: 45199 - DNA, 356 bp, Glycine max
  Clone ID: LIB3093-005-Q1-K1-A1
gaccaagccgtccggaaggataaggatggttgaattttcaggctccaatgggaattcaggaaagttgggtttggattgcagatgtgtttattttaatggcctatatatgccgtgggaatgaagaaaatctgaggtggatattcaggttttccaatccctcggattgctatgctttatatgttttccttacgtttatctgtataatttaaatagaactaggagtattgagcttcttttgtttcatctgtattggattgctatgcatacatttggtaagtgattgtgtctactttgtacttcttcagtttcttggttcttgtaatgatctgaaaaccatggcaattaaattgaagagc

SEQ ID NO: 45200 - DNA, 432 bp, Glycine max
  unsure (1)..(432): unsure at all n locations
  Clone ID: LIB3093-005-Q1-K1-A11
tagaagaaaatgtngacagaaaggataatgcatgaatgcatcaagaagttattgggtcaggatcaggatccggatgaagaagatatttgaagctttgccaacctgatgaactcttttgggggagaatatgcatcttccagaccccgagcatatggatgcatattttgaaatgatgagatcattatcaaacaacatgaatttatcttctaggttgaggttcatgttgaaggatgtcattgatttgagaaagaataaatggcaacaaagaagaaaggttgaaggtccgaagaagattgaggaggtgcacagagatgcttctcaagagaggctggcccaagctagtangctgggtcgtggtccaggcaacaatccacctcgaaagatccctatggattttggtccaagaggatcatcaatggtatctcctaatgc

SEQ ID NO: 45201 - DNA, 295 bp, Glycine max
  Clone ID: LIB3093-005-Q1-K1-A12
gtagtacacaacagcgtcagatccggctcagtcattgctgcatacaacgatgagaggatggaagtagtgcgacgtggagtgtcagtcttgatgcgcactgagtgatctgtaggacgtcttttaaagagaggagtgcatacagagctggagtgcctatggtgccagatcaaagtgatgctagagcacaatattacgtcacgaatttagtcggctatgcaactgtatacgcactatgatgagaatgcttctgcaaagcctaggtacacccgtgaaaatagtgatggtgattactaca

SEQ ID NO: 45202 - DNA, 428 bp, Glycine max
  Clone ID: LIB3093-005-Q1-K1-A2
aaaaaatagtataagtgaaagaaaaaagtaatctttttaatattctcttcccattaccagtgtgtgtttttttaatggggtgtgtcagagtctgtttcctatgattctgtctctaggtctgtagattagatcagaattgaatccaagtggtgcagaattcagagcagcatttggtgtccaaaagaagaggagtaataggagagaggtgataaaggtgtcaagaatggggatacctggtgttgatggagaattgaagaagattttgaacgctaacatggacgaagctggtgctagaaagccttcacgttaagctttcaaggatattcaacttggaattgatcatatattggttaagaccccatgtgatggaataaaaaatggaagagtcatatgagaagagctcaaaaggcctagaaatcttctgcaaa

SEQ ID NO: 45203 - DNA, 468 bp, Glycine max
  unsure (1)..(468): unsure at all n locations
  Clone ID: LIB3093-005-Q1-K1-A3
gcgctttgatcactgtttttcaaaagttggggttaacaaccaccccttattcctaacattagggtatttggaaacctggtttccaagttttggtgggggcctcctggggctaatataaaacccagaaaaatttttacctaatttcggccaaggggttcctccgttttttccacttcccagtcacaatatgcagacagcgttgaatctgaagcaggagctgatactatnngactataaatcttaaccgatgaagagtggaagaagcggctcacaaatgaacagttctatattactcgtcagaagggaactgaaagagctttcactggggagtactggaatactataaaccccgggatttaccattgcatatggtgccacacacctttattcgaatcatctactaagttcaatagtggaactgggtggccattctattaccagacaattgggaaaaatgtgaaatcaaag

SEQ ID NO: 45204 - DNA, 318 bp, Glycine max
  Clone ID: LIB3093-005-Q1-K1-A4
cccacgcgtccgacttgctcacagatatatgtttatctgtctccatcattttctcgagagcggggattttctggggtgcatctttcttcttgttaatctctccccgcctctatgtaacatcccgcttatctgaatccctttctgctcatcatctgtctttcaagctaagatattctcagtagactatgaattcagcataaagcaaacttacaaggctttttcgaaagccatgtgttctcagaaacgagatccatgttttattgccgaatttcgctagtcatattaatataccatcattgattgttcctttgaaaccag

SEQ ID NO: 45205 - DNA, 337 bp, Glycine max
  Clone ID: LIB3093-005-Q1-K1-A5
ctttggtcactcttcttctcttgcggctagggttttagcgcagcttcttctagatttaaggaagatgggtaaggaaaaggttcacatcagtattgtggtcattggccatgtcgactctgggaaatccactaccactggtcacctgatttacaagcttggaggcattgacaagcgtgttattgagaggtttgagaaggaagctgctgagatgaacaagaggtctttcaagtatgcctgggtgctggacaaacttaaggctgagcgtgaaagaggaatcaccattgatattgctttgtggaagtttgaaacaacaaagtattattgcacagttattgat

SEQ ID NO: 45206 - DNA, 416 bp, Glycine max
  unsure (1)..(416): unsure at all n locations
  Clone ID: LIB3093-005-Q1-K1-A6
cccacgcgtccgaaaattgataacatcacacagcattagtatgtatcagcaacaagggtcagatccaacaaagcaatcaccggcaaccggttttccggtgagctatagcaattcaacaacgtattcgaccaacgaggcttcctacgctccagtcccacctccccagcccaaacctcttgtcgattggtccaccggcctctgtgactgcttctccgaatgtggaaactgttgcatgacgtgttggtgtccatgtgttacctttggccgagttgcagaaattgttgacaagggatccacatcatgtggtgctagtggggctctgtatacgctgatttgctgtgtcattggctgtggctgcctatactctngcttctaccgncccaagatgagacgacagtatggtctaaagggaaatg

SEQ ID NO: 45207 - DNA, 467 bp, Glycine max
  Clone ID: LIB3093-005-Q1-K1-A7
aaaaaaaaaaaagagatgggaatttggaatagcgggggggttcactaggatcctgcactccgggaagccggaccagttcatggatgagatccccacttttgttgctcagcctttgcctgctggaatggatcagggttacatagtccttaacagaccatgggcatttgtgcagtggcttcaacaagcagatattaaagaagattacatattgatgtcagagccagaccatataattgtcaaacctatacccaacttagccagagatgggctaggagctgcgttccctttcttttacattgagcctaagaagtatgaaacagtgctaaggaagtactttcctaaggagaaaggaccaatatccaatattgatccaattgggaattcacctgttattgttgggaaggaattcctcaagaaaattgctcccacttggatgaatgtttctctggcaatgaagaaggatcctg

SEQ ID NO: 45208 - DNA, 427 bp, Glycine max
  Clone ID: LIB3093-005-Q1-K1-A8
cccacgcgtccgaacaattatgaagtaggaaatatgattgctgaagcattgagcagagttggtagaaagggtgtcgtgacccttgaggagggaaagagtgctgataacagtctgtatgttgttgaggggatgcaattcgaccgtggttatatttctccatacttcgttactgacagtgagaaaatggctgttgagtatgagaactgtaagttgctgttagttgacaaaaagataaccaatgcacgggatcttatcaacatactggaggatgctattagaagtggacaccctatattgattattgctgaggatattgaacaagaagctttagcaactcttggggtgaacaaacttagaggatcacttgagattgcaacacttaaggcccctgggtttggagaagcgcaagaccagtaccttgatgata

SEQ ID NO: 45209 - DNA, 233 bp, Glycine max
  Clone ID: LIB3093-005-Q1-K1-A9
accacgcgtacgaacacgcgtacgaccacgcgttcgagtgcatccaaagccgttgaagaagggtcactgttttgagtttgtccgcgaaggaaagaaactctatatctagctatccttatggatcggtaccagaaggtatacaagccaacagctcaaactgcaatctatgaaaacgagatccggattactgacatgctacgatgcgtaactacattacttacgccatgagcttg

SEQ ID NO: 45210 - DNA, 285 bp, Glycine max
  unsure (1)..(285): unsure at all n locations
  Clone ID: LIB3093-005-Q1-K1-B1
gttgcaggaaaaatggtttcgctgaaactgcaaaaccggttcgcagccagcgtcctcaagtgtggcagaggaaaggtttggcttgaccccaatgaagtcaacgaaatctccatggctaattctcgccaaaacataaggaagctggttaaggatgggtttattatcaggaagcccaccaagattcactctcgctcacgtgcccgccgaatgaaggaagccaagaggaaaggacgtcactctggatatggtaagcgtaagggtacaagggangcaaggcttnccact

SEQ ID NO: 45211 - DNA, 275 bp, Glycine max
  Clone ID: LIB3093-005-Q1-K1-B10
gcgacacatacggttagcatagtaacaatcgaaaaatctcacgcacacgcaatggccaacacaggtagctctagaatcatacatgattaaggttaatctccttctgtaacgccccgctcatatgaattgctacatgtggatcataagactatgacctaatgatatccgtgagcaagactcatagctggtaaaagtgcaaagtgaaaagcttgtcagatcctaaaccaagcctcgttgcatcctactgttcagaaatagatagatgctactatcct

SEQ ID NO: 45212 - DNA, 259 bp, Glycine max
  Clone ID: LIB3093-005-Q1-K1-B11
gtgactgctctcattctatcttcctcaatggttctaatttaatttgacatgcatacattggagtggacggaaccacaaactcagggtgatctattatctcctagggcaggacacactggtatcactattgatgaaagctggctgatagttcgaggtcgagataatacatgtggttgccctgaaaccctggtattagacatgtctaagcttgattgatcagtattcactgttgtcaagcacaaagattcactttctaatg

SEQ ID NO: 45213 - DNA, 58 bp, Glycine max
  Clone ID: LIB3093-005-Q1-K1-B12
gcaataccagttgttattataaggcacagcacattaattcacttaactattacaccta

SEQ ID NO: 45214 - DNA, 356 bp, Glycine max
  Clone ID: LIB3093-005-Q1-K1-B2
actagctgcagtgactgagctcaatttcaacatgattggcttcatgggggctatgatatcaaatttggcatttgtcttccgcaatatattctcaaagaaagggatgaagggaatgtctgttagtggaatgaactactatgcttgtctttccataatgtcactgttaattctgacaccttttgccattgctgttgaaggccccaaggtttgggctgcaagctggcaaacagctgtatctcaaattggtcccaattttgtatggtgggtagctgcacagagtgtcttttaccacttgtacaatcaagtctcatacatgtctcttgatcagatttctcccttaacatttagcatttgaa

SEQ ID NO: 45215 - DNA, 419 bp, Glycine max
  unsure (1)..(419): unsure at all n locations
  Clone ID: LIB3093-005-Q1-K1-B3
gaccaagccttccggtacgtgcaaggtgaaatattagggtggaatccatgactggccggggttacaagctgaagggaagtttgacccaaatgaccaagaaatattagaacatttggaggcaaaagtggcgtctgatgcatgcaagcttcatccccttattgacgagttcataccaacgcttgaaggcgaaaatgggatctgttatacacacccagaaaagctaccaggtgcttcatgttttacttaatttattttattttaattattttttgtctaattaattagtatagtttcgtgttttagaatacttattgcatatacacatcattgaattctcatttattgggagacacgtcttgatgtgcacgataccgcatgcatgaaattaatngntttagcaatgaaatgatttttttttc

SEQ ID NO: 45216 - DNA, 408 bp, Glycine max
  Clone ID: LIB3093-005-Q1-K1-B4
ctctctttctctttctcactcactctcactctctgtcacggacagacagagaaaaactcaggcgcccacgttcacacttccctcacaccatcccttactgttccttcttcttcttcttcctttgtttttttctcttaatggaatgatggaacacaacatcatcgttaacaacaacaacgtgatcgcaccgtttgtcataaaaacctacaacatggtgaacgatcccaccaccgataaactcatcatgtggggcccagccaacaacagcttcatcgtccttgaccccctcgacttctctcactccctccttcctgctttcttcaagcacaacaacttcttcagcttcgttcgacaacttaacacttatgggttcaaaaaggtggatccggatcggtgggaattcgcaaa

SEQ ID NO: 45217 - DNA, 320 bp, Glycine max
  Clone ID: LIB3093-005-Q1-K1-B5
cccacgcgttcggaaacattctaacacgcattacccagctttacattcatttttgttcgtgagttccaatggctggggaggctgcttccttggttcctgcttcttttcctattgctaaagagggaaagtctggtgtatctctcagggacaccacaatgtttggtgtttcattgtctgatactctcaaatctcacttcagctctccctcatcgacttgcaaaagggaattccaactcaaatttggccctttgagggttcagtcagtggcaacaactactccaggagtcaccaaggcttcaccagaaggcaagaaaactttt

SEQ ID NO: 45218 - DNA, 299 bp, Glycine max
  unsure (1)..(299): unsure at all n locations
  Clone ID: LIB3093-003-Q1-K1-A3
acccacntnaccttccactcgtcattttcactttttacgcgcctcaaaaccaccccgagtcgctttttatcacatatcgcacacatattntcccctctttaccttacatatgggtgctcacaaaacatagcttgttatctatttttaaatggccaaacagagctgtaccgtcaacgacaaaacctatgctagccgttctaaattattatcctttgaattgctgggatacaactataccatgattgggttcatccattacatttcttataagcacttcatacacaaaattataaagctat

SEQ ID NO: 45219 - DNA, 348 bp, Glycine max
  Clone ID: LIB3093-001-Q1-K1-B4
cgtgtgtctcatgaaccattacataaactctttacctttgtttattcataactactatatatgtatatagaccctccttaaacccttttcttcaacagccaacaaaaaacaagtctttttctgaaaacttaatttctctctgattttctccctcacttttatttctctctttctggattattctctctgtgtagattgtggcgtgttctcgatgatgatgatgatgagccgcagcggcgccaaccgggtagcgaacaccgcaatgtttgtggcgaagggtttaagcggcgaagttggtggtttaagagcattatatgggggtggtgtgaggagtgagagcactttggc

SEQ ID NO: 45220 - DNA, 448 bp, Glycine max
  Clone ID: LIB3093-001-Q1-K1-B5
gttgaggttgctgagaaatctacattgcaaagtcagctggaggaaattgaagggaaactggcacaagctgaatctagactaaatgaagaggttgaaagtgttcaagctgctgcttctcaacgagaagcagatttaagttcaaagttggaagactatgcacaaaaattcaatgatagaaatgtattgaatgataaggttgcagaacttgagaaagagttgcaacttgcacgggatgctattgctaaccagaaaggagcagagtcccagaagttggaactagaagcagcattgaagaattctcttgaagaacttgaactaggaaaatgatatctctctttacagaaacaagtgacagatctagagcagaaattgcaagtcgctggtgataaatcctcagtcaagggcgatgagggtgttgatcagaaagaagggttggaagtaaaatcca

SEQ ID NO: 45221 - DNA, 402 bp, Glycine max
  Clone ID: LIB3093-001-Q1-K1-B6
tggttcactttgcaggcacaaggcctcgatatcactgcagaggactaccacgggtgagaatgatctattaattatcttctagtgatcatcactttcatttttctctctctcccaagtctaaacttttcgttcttctcactccgaccaagtttcgtgcacggaaggctaccttacgactccatcgacactgatcatcagttacggaacctcctcttgagcatcaaacaaagaaaaattgtatgttactactctataatggatattttctttattattattgtattctaatcatcctaatatttttgcttttatcaggtttttactaattctgacaggattcacgcgatgagggcgctggataggcttggggtcaaggactgtttcgagcaaatcatatgcttc

SEQ ID NO: 45222 - DNA, 277 bp, Glycine max
  Clone ID: LIB3093-001-Q1-K1-B7
cactgatcctttcatttgcaaattgcaaatgcagaaaggaaaagcggattctgtctccatccggagttcccttcctgaagatgttgccctcaaaattgcttcgctgcttcaggtgcgggatttgtgtgccttaggttgttgttcgaggttctggagggaactctgcttctcagattgcatttgggagtctcttgtcagaaacagatggcccttactctcttccttccatttcccttcttcttccactcattctcccaatttcaagaagtggaggaaa

SEQ ID NO: 45223 - DNA, 382 bp, Glycine max
  unsure (1)..(382): unsure at all n locations
  Clone ID: LIB3093-001-Q1-K1-B8
ctttgagggatggaactgatgcatctggcaggaaaggaaagggaaagggtgtttaccagttggtagacaaatacggtgctaatgtcgatggttacagtcctatctacgacaccaaggactggtctccaaccggtgatgtctacgctggcggtacgactggcttggctatctgggctgtgactctacttggtcttttagctggtggtgcacttcttgtctacaacacaagtgctttggttcaatagactttgcaaatcgatgtttaagttataacatagtccatgtaactatctaaaaatgaagaactattcgtgaagtactttgtggatatgttccttctgttctataaatgantggatgtgaaaaaaacttttttgttagt

SEQ ID NO: 45224 - DNA, 429 bp, Glycine max
  unsure (1)..(429): unsure at all n locations
  Clone ID: LIB3093-001-Q1-K1-C1
ggagttgtaaattaagagcatggctgcacaagctcttgtatcatcatcttctcttaccttctgggcggaggctgcaagacaaagtcttggaccaagatcactccaatctccatttggcttctccagaaaagcctcctttcttgttaaggcagctgctaccccccctgtcaagcaaggatcagacagacctttgtggtttgcatcaaagcaaagtctttcttacttggatggcagccttccgggtgactatggatttgaccctctgggactttcagaccctgaatgaacaggagggttcattgagccgaaatggctagcatatggtgagataatcaatggtcgttatgcaatgttgggtgcagttggtgcaatagcacctgaaattctatgcaaggctggtctgatccctcangagacagcactcccatg

SEQ ID NO: 45225 - DNA, 432 bp, Glycine max
  unsure (1)..(432): unsure at all n locations
  Clone ID: LIB3093-001-Q1-K1-C10
atatattctcgccggccaaaattaaaattaaaattaaattaaataaaaaccctagcttcgtttttctctttctctctctctctctaactactctgtttctctctctacggtagatcggcggcgaggaggatatggacgacgacgacgagatccagtcgcatccttcgccggcgagcggatcccctccgtcgtcgccgagggcgaacggtcggataacggtgacggtcgcggctccggcgccgncaccaccgncgaacagtctggcatagcgctttccaatcagcaacccgccaaagggaaccggcgaagaagaagccgccgccgccgaagggaagattgctggagcgaaggtgcgacggccgtgctgatcgacgcgtggggagagaggtatctggaactgagcagaggaaatctgaagcagaagcactggaa

SEQ ID NO: 45226 - DNA, 450 bp, Glycine max
  Clone ID: LIB3093-001-Q1-K1-C11
gtcagggagtgatcactgatcctcaccttttaccacacacctacttccaaacccacatgagggataacatgaccatgactgccactactgatcaatggatgcagttctatcaacaacctctaatggatagccatggccatgatcatgatcatgatcatgatcatcatgctttggcaccaaacaccacagaaggcttctctagttcttccactcctaccatgccttcatcagagagcaatagcatcttgagccaattgagtccaaagggtaatgtatccaaaccaataagaagaaggtctagagcctctaagagaaccccaactacacttctcaatgccaaccccaccaattttagagcattagtacaacaattcacagggtgtcctcgcacaaccatgtcaacactaggggtccataagggccctattaccttgaattttcaacaaggaa

SEQ ID NO: 45227 - DNA, 438 bp, Glycine max
  unsure (1)..(438): unsure at all n locations
  Clone ID: LIB3093-001-Q1-K1-C12
atcgttttctacataatacaaacctctctaatttttgaagcttattatacccaatctcgatatgcagatcttcgtgaaaaccctaactggcaagacgatcaccttggaggtggagtcctctgacaccatcgacaacgtgaaggccaaaatccaagacaaggagggcattcctccggatcaacagcgtttaatcttcgccgganaacagctcgaagacggcagaaccctcgccgactacaacatccaaaaggagtccaagcttcaacttggtccttcggcttcgcgggcggatgcaaatcttcgtcaaaacccttactggcaaaacaatcacgctagaggtggagtccttcgacacaatcgataacgtgaaagccaagattcaagataaggaagggattcctccggatcaacaacgtttgatcttcgccggaaaacaac

SEQ ID NO: 45228 - DNA, 356 bp, Glycine max
  unsure (1)..(356): unsure at all n locations
  Clone ID: LIB3093-001-Q1-K1-C2
cccacgcgtccggtccccaagacccccgagatctcatccttgctttctgctgctcctttggagggtgctgctgatcaggttcagaagaccaacaactcgcaagatgtggtggctgcacaagatgattctgcaaaaaccctttccgaagagcttgcagacattgaatcccagctcaagttctttgagaccccttcttttcttgatgaagcctgggctgatgctacattggcgtctttgctcggcggagacgcaactcatgacgccgncggaaaccctatgaacctttggagcttcgacgacctgcctttcatggcaggagtcttctgaacacccttaatttcccttttatgaaatta

SEQ ID NO: 45229 - DNA, 462 bp, Glycine max
  unsure (1)..(462): unsure at all n locations
  Clone ID: LIB3093-001-Q1-K1-C3
tttgcattggagcaacaattgcacacagcaagacaagagctgagtcatgctttgtatcagcatgatgctgcttgccgagttattgcaagactaaaaaaggaacgagatgaagctaggtccttacttgcacaagcagagaggcagttccctgtttctgcaccaaatgccataacagcaaatgcccccgtcctgagcaatgggaaaagagctgctgaggatgaggatctggctcctggtgcaaagaaaattcatcctggaatatcttctagcataatttctgagctaactgattgcaatgctgctctttcccagcagagaaagaagcgacagattcctccaactttggctcctgtcgaagctctagaggcatatacccagatatctagtcatccctttcacaaaacaaacaaacaaggcattatatctctggatatcctntattctaaggacttaatngcaact

SEQ ID NO: 45230 - DNA, 370 bp, Glycine max
  Clone ID: LIB3093-001-Q1-K1-C4
caaacaaacaaacaccaccaacaacaaccactcctcttctttttcaccctcgaatccacgctggctttacaccgcgtttggatctccgttaaacaaaaccattaaaatgtagcgagagaaaaacaaaaccgcaaaagaaaatcagttaatttattaattttatttttttatggctttccacgaccatctccagcacgaaatagcgttccagcgtttcacggaggagcaagagttgaccgagaacagagacatgcagcagaggctcccaccttcgacatggctcaacaacgttaacgcgcgtcaacagaatttcctcgacaccgagaagagcgtggatcggaacaaccgaaagcgagagcaattgcgaatc

SEQ ID NO: 45231 - DNA, 402 bp, Glycine max
  Clone ID: LIB3093-001-Q1-K1-C5
ccacggtatatcaacaagaagagacaaaattattgcactggtaatgattatactagccgtggttacaagtgtgcttgccatttccaccaacatatttaatgcttttagtagcaagtcataaatacaagctggttctctcttttctccccttctctctctctctctctctctctctctctctctctctctctctatatatatatatatatatatatatatatatatatatatatatatattatagaaaaatgtatttggggagagagggtgtgactggggagattctaggggcaatttggttgctgcggcgattgtgttacttgtgtaatttggatgccttgattattgtagaattcatatgtcttgcggcagcatttctatgtaaagtagcaaatactatta

SEQ ID NO: 45232 - DNA, 411 bp, Glycine max
  unsure (1)..(411): unsure at all n locations
  Clone ID: LIB3093-001-Q1-K1-C6
gtgacaaccatcattggaggaggtgactccgttgccgctgtggagaaggttggacttgcagacaagatgagccacatctccactggtggtggtgccagcttagagcttcttgagggaaagcaactccctggtgtccttgctcttgatgatgcttgagcaaaaatcattcgttcctttgaagtttgtgctttatattattattatggttgggtttcagccaacagtggattaaggtacaatgagagctgcgagctcttgctcctgtagaggcttaatataggataggtttcaaaataagagggttttgtggcatccttggtgttgcattgagctttgatctaattgttcttgaacaatgttcatttccaaatgagtttactttgttggttaaaaaaaaaaannnnnnnnnna

SEQ ID NO: 45233 - DNA, 434 bp, Glycine max
  Clone ID: LIB3093-001-Q1-K1-C7
attttctttactcaaactttctttcatgacaacctaacagtataagagggggaatttataataagcaagcgtgtgttgagattaaataacacggaaatatgaaaactcagaaactgtgactcattcctctttgactccgattccgcattgcattttccttgtgttacactctcccttcctcttttctttaatcattcgtcttttcaaaaccttaaaccatactaccacatatatattaaaaaaacaaactactataacctattgaaccccccaaatcaactactattccttaatttcttaaatccatggtttcttcctccgaccaaacacactattgagctaattaagacggaaccatgtcgccgatgaagttctgggttacgcagcccaacaaacaacacgccgtgaagctgacccaattgaagctcgaatta

SEQ ID NO: 45234 - DNA, 455 bp, Glycine max
  unsure (1)..(455): unsure at all n locations
  Clone ID: LIB3093-001-Q1-K1-C8
cccacgcgtacgaccacgcgtccgcaacagcttgaaaaggctgccataaatcatgggcgacagattgtcaggtttactcagcggaatatactaagggtgtatccaaaaggtactcgcattgactcatcaaattataacccattaattgggtggatgcatggagctcagatggttgcatttaacatgcaggggtatgggagatctctttggttgatgcatggaatgttcagagccaatggagggtgtggttatgttaaaaaaccaaattttctattggagactggtccagatgacgaggtcttcaatcctaaagctaagttacctgtgaagactactttgaaggtgactgtatatatgggggaaggatggtactatgatttcaagcatacacactttgatcaatattcacctccagacttctacacangaatggggattgctggagtccctaatga

SEQ ID NO: 45235 - DNA, 155 bp, Glycine max
  unsure (1)..(155): unsure at all n locations
  Clone ID: LIB3093-001-Q1-K1-C9
cgnntccgcttttgtctcaatttcgtaccgcccctcaacccagccgtgaatggacccctcgtctccgccacccgcgcggcgcacccgcatacccctccgtctaccccacttcccaggagccacctccgagccgcnctgcctccgcgtantccccc

SEQ ID NO: 45236 - DNA, 441 bp, Glycine max
  unsure (1)..(441): unsure at all n locations
  Clone ID: LIB3093-001-Q1-K1-D1
gacagacagtggcaatgcatggaggggacagtatgaagataactcagctgcctcctttaataggtaaaggaaggatgtcaaatgctgacacttaagagagatcaacttgtgcatttcaattggtggagaaccaacttaacctaataaaacttttggttggtgattctcaaatgaaaagtacacatgcatttcaaatgatgcagtttattggggtattgtagaagaggtggactcacataactgcatcctagttttcttcaccacatcacttttgatggtgtctagtttagatcctcaaatatagcaagagcagtttccgttactactgatgccacagatcctatacctttggaatcaactnttcttgtggttgttggattaagatttctttttcattttttgcaaggtacagcagaatagggcagctagtgtataatatga

SEQ ID NO: 45237 - DNA, 405 bp, Glycine max
  Clone ID: LIB3093-001-Q1-K1-D10
atgagactcgtgaaaagatgattcaggaaagaaaatctatggaacaacagcttccgaaacaggctagcaagtccaatgatttaacaacaaatgggacagttatgttgcccaagtctcatgatggagccttgaagaatgaatcagctactacagatgaagcaggacaaaaggagaagctggtagaagtgaatggatcaactcaagcatctgaagactgttcaaagaactgctaaacccgtgacagtgcaagacaagagagtggttaaagaatgtagcttccagtatcccctccccctcttttcaatcccttttcatacattcctttagtatggagcgagttttggtgttttcttgttccttgttatccctgtttattttgtttgtccttgggattctaatggatgt

SEQ ID NO: 45238 - DNA, 442 bp, Glycine max
  Clone ID: LIB3093-001-Q1-K1-D11
ctagttccacggatgcgggttgttaagggaacaggcaaagctatcaattacttgacccctcccagaatcttacttgctttgatcactgcttggttacggcaaggtcgctggtttgatgatcagggaagagcattatatgcagctgaagcagaccgacttcgtaattgggccgaagatcgagcccggttttctttcactgatgcaatggaaatgtacacagagaacacctggttatcagtcttctcactttcagttgtctgtgccttcataattctttccagcacaggcagcaatttgcctggaacatgacgatgtattgctggcaatgcaaaaatgcatttgcttttgtggacaggtaattggtgcctgaaatcatcaagacaatagaatgaatctaaagtctaagttataaacaaagtggatctggttttttcccaccatg

SEQ ID NO: 45239 - DNA, 288 bp, Glycine max
  Clone ID: LIB3093-001-Q1-K1-D12
gaaaaactgtaggaaagtgatagcacagaataggaggggagctgagctgacgatgattcagtatgagagcgagtataaaatgtgggacagctgcatgatcgataaacaggagttctcgccggagagagaagctgtgcctgaatcatttgatgatgaagttaactcagagatagaagaaggtggtgagagctttgatgagatcaatggatatgctgtctcagagaacactgatgagagcgggagcccaccatctggacaactgctattgaagaagaagaagaaaccttt

SEQ ID NO: 45240 - DNA, 437 bp, Glycine max
  Clone ID: LIB3093-001-Q1-K1-D2
cttcgctagataccgtgtcttttgtactcattattgggtctgcaaacaaagacaaggagagagagaaagaattgatggaatagaaaaaggaaataaaagaatgaattggagaccacacactccaccgttctcatctaaaacttgcctctcactggttctctccatggaatagaaaaaatataaacgatacatccaaaggaagagagatagagaaaaaaaaacttgataagtgatttaataggaaagaaagagagaaagaagacattgaggagaaaatgatatggaagaaaaaataaataatgtttataagagttgaacgaaacaacaaggacaagtagttagtgtggagtgtacacttcaacttgttctaaaataaataaaattattttgttaattttgtttacacaatatgttaattattttctcaaatttttttt

SEQ ID NO: 45241 - DNA, 438 bp, Glycine max
  Clone ID: LIB3093-001-Q1-K1-D3
cccacgcgtccggttatcaacccactcttagtactgaaatgggttctttacaagaaagaatcagcttctaccaaagaggggtccataacttctattcaagcagtttatgtacccgcagacgatttaaccgatcctgcgcctgctacgacatttgcacatttagatgctactactgtactatcaagaggattagcggccaaaggtatctatccagcagtagatcctttagattcaacctcaactatgctccaacctcgaatcgttggtgaagaacattatgagactgcgcaaagagttaaacaaactttacaacgttacaaagaacttcaagacattatagctatccttggcttggacgaattatccgaagaagatcgcttaaccgtagcaagagcacgaaaaattgagcgtttcttatcacaaccttttttcgtagca

SEQ ID NO: 45242 - DNA, 378 bp, Glycine max
  Clone ID: LIB3093-001-Q1-K1-D4
gaatcttgttgaaattttggaaaaccagaatccaatagatgttgcgaaatacatgaattttgtcagtgccccccaagctggtgctatagctacattttcaggcacaacacgagacacctttgaaggaaaaacagtcatggagttgagatacgaagcttatgttccaatggcaatacgctgtatcaagtcaatctgctcatctgctagagcatcctggaacctacattccattgctgccgctcatcgtctaggcacagtgcctgttggtgaaacaagtgtctttgtcgctgtctcatctgtccacagggccgatgcactggaggcttgtagattttttatagatgagataaaagcacaagttcctatttggaaaaagga

SEQ ID NO: 45243 - DNA, 455 bp, Glycine max
  unsure (1)..(455): unsure at all n locations
  Clone ID: LIB3093-001-Q1-K1-D5
ttcaagtttcatatatgggattccctggaacaactggggctacttacatagactacggagtgactgatgagtttgtttcaccactagggtatgcaaatatatattcagagaagattgtacatctcccccattgctactttgtaaatgattataaacagaaaaatcaagatgtgttagatcccaactgcccacacaaacgatcagattatggtctacctgaggataaatttatatttgcatgcttcaatcaactgtacaagatggatcctganatatttaatacatggtgtaatattcttaaacgtgtacccaacagtgcactctggctcctcagatttcctgcagctggggaaatgagactgagagcatatgctgctgcacaaggggtacaaccggatcaaattattttcacagatgttgccacgaagaatgaacacatcagaagaagttcttta

SEQ ID NO: 45244 - DNA, 435 bp, Glycine max
  unsure (1)..(435): unsure at all n locations
  Clone ID: LIB3093-001-Q1-K1-D6
acaacaacaacgacgacgacactttgacacacctaaccctccaaattcctatctctcttcgaatggaatccgcagctctgtcgcgcataggcctggcgggcctggccgtgatgggccaaaacctagccctgaacatcgcggaaaaggggtttcctatctccgtctacaaccgcacagcctcgaaagtggacgagaccgtagatcgggcccgcaacgagggctccctccctctcacgggccaatacacccctcgcgacttcgttctctcccttcagcgccctagatccgtcatcatcctcgtcaaggccggcgcccccgtcgaccaaaccatcggcgncctctccgaccacctcgaccccggcgactgcatcatcgacggcggcaacgagtggtacgagaacaccgagcgccgcatgagcctcgtcgccgacaaag

SEQ ID NO: 45245 - DNA, 439 bp, Glycine max
  Clone ID: LIB3093-001-Q1-K1-D7
tttccttctgtctctctctgacctctgatatttctatattttggttctctgtgtctgtacgatcaggatccaacggtccaaaatgttcggggcttgtgctgtttgttttcccaggttttagagctccaaaccttcagatccacctcattcgtctccagatcttccttcctggataacgttttcgggttcgagaaggcacttgtgttgtttttcgtacgaaatggagactaaacagagttcggtgacggttacgctcagttacggcgcgttgacgtgcgccgcggaatttctcgcgactttgctagcttctgctgtcgtcaaagcctcgcttttggccccggatctctaccggctgctattgatcaacacgcctactgccaaaggagagagcaaaattcagagtgaagacaagcaacgtgatgcagagggagaagatggt

SEQ ID NO: 45246 - DNA, 433 bp, Glycine max
  Clone ID: LIB3093-001-Q1-K1-D8
aaaataaaaggagactcaaaaaagagttctccgtcaactgaatctccatcatttttccccttgcgcttcttcgtgttttttcttctctctcacttttgcttcttcacgatccactctctctgtttcgttgtggtggtgctgatcgcctgcgttcatggtgatcgagcatgacattgagagctgcgggagcagagcggtgcaatcttcgcacgcgcaccaccctcggcaccaccggcagaagctggaggtgtccaatgaggtccttcgacgaattcaggaatcggattgcgaggaggcgcacgttccaggcttcgacgatcagctttggctccacttcaatcgccttccggctaggtacgcattggatgtgaatgtggagagggcagaagatgttttagctcataagaggttgcttaagttggcggaggaccct

SEQ ID NO: 45247 - DNA, 382 bp, Glycine max
  unsure (1)..(382): unsure at all n locations
  Clone ID: LIB3093-001-Q1-K1-D9
cacaaagagaagcattagcactaggagcagcaacaactagtctcagctgaaatggcctcttcagtgatggcatctgtggccctcaaacctgcccctttcactgttgagaagtcctcagtgagaggccttccctctctctcaaggaactcttcttcattcagagttgtggccagtggcaagaagatcaagactgacaaaccttatggaattaatggtggcatggctttgagggatggaactgatgcatctggcaggaaaggaaagggaaagggtgtttaccagtttgtagacaaatacggtgctaatgtcgatggttacagtcctatctacgacaccaaggactggtctncaacccgtgatgtctacgctggcggtacgactg

SEQ ID NO: 45248 - DNA, 423 bp, Glycine max
  Clone ID: LIB3093-001-Q1-K1-E1
atcatatatggctagtagttgtttctccatgacaacaccaatcttcaaaattcgcttcttcgtgattcttatgctttattgggataagttcatctcaattgtcctctgacttttactccacaacttgtcctaatgcgctttcaaccattaagagtgcagtggattctgctgtgagcaatgaggctcgcatgggggcttccctcctacgtcttcatttccatgattgttttgttcaaggatgtgatgcatcagtgctattgaatgatacatcaagtttcacaggtgaacagacggcagctggcaacgttaattccataaggggttttggtgtaatagacaacatcaagtctcaagttgagagcttatgtcctggtgttgtttcttgtgctgatattctcactgtaactgcaaaggaactctgtg

SEQ ID NO: 45249 - DNA, 428 bp, Glycine max
  Clone ID: LIB3093-001-Q1-K1-E10
gatgcacaaggcttgcctattgatggaaatagaaatgttctttaccagcgtgtacagaaagcaaggagaataaatcgatctcgtggtaggcccctttgggttcctcccgtggaagaggaggaagaagaggtggatgaagagctggatgcattaatttcacatataaagctggaggaaggaaatacagagttctggaaacgtcgctttttaggagaaggcttaaatggtgatcaagaaatgccaacagatgcagctgaatcagaggtccctgaagttctggatgacgttgatgctatagaagatgcttcaaaagaaggtgaagatgatgaaacggatgatgatgaggaggaagcataacaggcataagaagaagtagaaccagcagagaacctagatgtaaacaggattaaggagaacgaagttgaagc

SEQ ID NO: 45250 - DNA, 285 bp, Glycine max
  Clone ID: LIB3093-001-Q1-K1-E11
gattgacttgtgtccaccacggtgacccatttctgtatcttctggtgaaaagctaatttgttcactctaataagtgtacagtgctaaagggtaaactttgaaacctagcttcctagttgaatcatcagaagcttataagtcgaatccatatttttctggacgtttagactttctttgatttccctgggaaatgatgatgatgcttgaagatatgggattttgtggggttttggatatgttttctgctccccttggaaaaggggatattaccgcccggcaaactga

SEQ ID NO: 45251 - DNA, 333 bp, Glycine max
  unsure (1)..(333): unsure at all n locations
  Clone ID: LIB3093-001-Q1-K1-E12
gtgataaatatggaagtagaggtgaaaaatcagagcatcaaaagaaaaccccatctaaatcaaaatcagaacaatttgatgggagtgggcccttacgaggaaattacaaggagtatgattcanaaggaaaatcaccatctgattctggatctgctgaagttaagcatcatttgagtgatggagaaaatgctaccagtgaagaaaattctaaactctttggagatgtgtttcaggaaccaattagaactgcaaaggactcaacaatcctgaatgataacgggacactgacttcagtgaatggtaaccttcagtcagaaaagtcaagtgaaaatg

SEQ ID NO: 45252 - DNA, 374 bp, Glycine max
  Clone ID: LIB3093-001-Q1-K1-E2
cccacgcgtccgattcaaacaaccccttcttcactttcattcaaaaccaaagtcccacaccgaggaaaaccataaaattttagctctccacgtgtatttgaatcaaagtcttttctaatggtaggtgttgaatttggttaaccagtcttggaggtaatgctaatagtaattgctaagtgcttacaacaatgtttttcactttcttagacaattttcttttctccaacaccatgttcttgctgttgttgcttgtgaaaccgtattattaatcagtttatttatctgttcttccctgttatgtcttaatttgcataggtagatgtatagaactgattgttactccttggtgatttgagggtcttgcgttttgaagt

SEQ ID NO: 45253 - DNA, 426 bp, Glycine max
  Clone ID: LIB3093-001-Q1-K1-E3
agcgagcgagcgagcagtttcaaagagaggatttgggattgggaaggcgagggattgcgctgcgtctgttcctcttctctttcgattcatccctcattcataatcttccaatccaacaacctcagcctcacactcacacatacacacatctgaacgcgtatcgtccctcccatggcttcaaagcgcatcctcaaggagctcaaggacttgcagaaagacccaccaacttcttgcagcgctggtccagtagctgaggacatgttccattggcaagcaacgattatgggtcctgctgatagtccttatgctggaggtgtattcctagtcactattcactttcctccggattatcctttcaaacctcccaaggttgcctttaggactaaggtgtttcatccgaacatcaacagcaatggtagcaattgg

SEQ ID NO: 45254 - DNA, 398 bp, Glycine max
  Clone ID: LIB3093-001-Q1-K1-E4
gaaaaccctaaccattccaatgtgctatcgcaattacctctctgcactccaatgacgcgctgctgcggcattcggattccgtgatctgattggcgattgggatccaatcttcatcaatccgattttgttgaaatggagcactatgatctgcaaagacaaagaagggagatgaaaaataaaggaaggaatgttgtgtggtcaattgcgatggataagtgtctaattgaagccctggcagctcaggcaaaacgtggaaacaaaattgacaaatgtttcaatgaaaatgcatacacggctgcctgtgtagcagtaaacacttgcttcagcttgaatttgaataatcagaaagttatcaaccgtttgaaaacaattaagaagaggtatagagtaataaaaga

SEQ ID NO: 45255 - DNA, 430 bp, Glycine max
  unsure (1)..(430): unsure at all n locations
  Clone ID: LIB3093-001-Q1-K1-E5
ctcgtttgttctcattttatcttttttctctctctaaaattctagagcgagaaaagggagagagatcaaagtggtgcaacagttcaattgatgaacaagtgattgactattgatatctccttttgactttccaattcatgttctcaatttccctttgatttctccttctgggatttttttcccctccccctcctcaatttgatactcattttttgaaggtttcacactggaacaattgttggaaaaaaaaatctccaatggttgagtttttcttgttctctgtttggtcttaaatgtgccatcatgatcatcaaaagcatatgaacaacaaagtggggtttgcaaggagtaatgttcattggattggtgaaccaatatttttccagaattggcattatctttggaggattngatattttctggtgatcat

SEQ ID NO: 45256 - DNA, 394 bp, Glycine max
  Clone ID: LIB3093-001-Q1-K1-E6
ctttccaaaggatgttgttgacttggttaagaaggatcttgaagtcaagaaggcagctgtggagatagaatcaaatgggtatcatcttttgtttgattttttacatctgcataaggtggaccttaaaactggcttgcaacaacctatagctttgattgatgaggcagggtgctgttttttccccgaaatctatgctgcttctgatgaaaaaccttataatttgagcaaacaggaatgtggaagaagtccggactcatatgcatctaacgaaataaaattacatttagaagttgaaataaatggtgtggatcaatccaggttgagtgagtgcagtggggagtccaatgctctagttaagggtattcaaattgatactaaacaaaactgctgtcaa

SEQ ID NO: 45257 - DNA, 131 bp, Glycine max
  Clone ID: LIB3093-001-Q1-K1-E7
caaaattgttgattaagaatgttgggtggttaaacagttcattacagcttccttgtaagttgtaacacagaaatacatatagacttgtatataaacttatcaattaaaatgacatttgtggttaagtgtat

SEQ ID NO: 45258 - DNA, 412 bp, Glycine max
  Clone ID: LIB3093-001-Q1-K1-E8
cccacgcgtccgctttttcctactttcttctccatccatcccttgactaattaattatccctgacaactaccaatggccgaagagaaacaccacaagcaccgcctcttccaccaccacaaggacgaggataataagccagtagaaaccgatactggttacgacaacacatcatattccaagccttctgatgactatgactctggtttcaacaagccatcgtatgagtcttctggcggtggctatgaaggtggttacaacaaaacatcttattctagtgatgagccagcttctggtggtggctatgaaggtgggtacaagaaaacaggttattctggtggcattgatgagacttctggtggctatggcgctggtggtggtggatactctgacgtcactgatggtggctacggc

SEQ ID NO: 45259 - DNA, 447 bp, Glycine max
  Clone ID: LIB3093-001-Q1-K1-E9
aaagaaatagtatctgggtacccaggatattgtagttgtaagatgggttatctcaattgagtggtgtcatcttcaagccaggttcatgttgcagatgatgcaattgtgagcggcgggggtctaagtcacaatggaaaattcagctacgggtatgctagctctcctggcaagagatcttcaatggaagatttttatgagacaagaattgatggtgttgaaggtgaaattgttggccttttcggagtttttgatggtcatggtggtgctcgtgctgctgagtatgtcaagaaaaacctgtttagtaatttgatcagtcacccaaaattcatttctgacaccaaatcagcaataactgatgcatacaatcatactgacactgagttgctgaaatcagaaaatagccataacagagatgcaagatcaactgctttcactgctattttaggt

SEQ ID NO: 45260 - DNA, 411 bp, Glycine max
  Clone ID: LIB3093-001-Q1-K1-F1
cccacgcgtccggtgccatcctgcattatctgtttagctcaaataattttgtgaagcatttttattggtagaaatggagagtgagtcggtgaaacgcagaattcacatgattgctgctcactttgcacccaatgatgatatttcaactacccacgttctgcctatgaactgtagtggcagtctgaactctgtgctccggagatgtgataataaggtgtattttgcacgccaagcatctgcttctcttggttattttatgaggcagacttcaattgaagagggtggctcaactggctttattgctcccaaaacccatcctggtgctgctgcatctgaaggtccttctaatgcaagagcaccatgttttgctaaacctgcaagggcagaatcagtctttacaaattcagtggt

SEQ ID NO: 45261 - DNA, 434 bp, Glycine max
  Clone ID: LIB3093-001-Q1-K1-F10
cgctaattaacccttttctccccagcattcaatttctattagtatccaaaccttgattgcgttgttggattttcttgtgggtagggggtttctcctctctttctctgcagtttgatggatcgggaaggaggatccaacgccggatcttgctactactccgttctcgggattcgtagggatgcctccttctctgatattcgcactgcctaccgcatactcgctatgaggtggcacccggacaagtgggctctgaatcccgcaaccgccggcgaagccaagcgccggtttcagcaaatccaagaagcctactcagttctctccgatcagtctaaaaggtcaatgtacgatgcggggctctacgatcctttggaggaagaagaccaagtccgtaaagttttttcctttcattttttttcaattactatttttataag

SEQ ID NO: 45262 - DNA, 435 bp, Glycine max
  unsure (1)..(435): unsure at all n locations
  Clone ID: LIB3093-001-Q1-K1-F11
ataaagctaaggagaaatattgagaagcaggaagaagcaagttatggcgacgaagcagcttccgcagatcgccattctgggagctggtatctttgtgaagactcagtaccttccgagactctccgagatctctcatcttttcattctgaaatccatttggagccgcactcaggaatcagctacagctgccgtagacatagctcgtaagcattttccccaagtagagactaagtggggagataacggttttgatgacatcattcacgatggatcaatcgatgctgttgccgtggtcttggctggacanaatcangttgacatctcactcangttgctaaaggctggtaaacatgtgctttaagaaaaacctgcagcattctgtacaagtgaattggaagctgcattggctaactacaaatctatttcttctgatgc

SEQ ID NO: 45263 - DNA, 403 bp, Glycine max
  unsure (1)..(403): unsure at all n locations
  Clone ID: LIB3093-001-Q1-K1-F12
gccctccccagccattaactgaaaaaaaaaaccaaaaaaccaaaaatactacaaattgttttcagtttctccgncgncgcacaaccaccaccttcttcgttcggatctccggcggacctactatccctactactactctactctatttacacgggangaacaaaaactattccccttccccaaaaaaaaccccaaagcggctcgggtaggggttaagtttggaccatttcgtggaatctaatttttcattcggaaaaatctaattttgaggccgcgagatggccgagattcaagtgcagcatcagagtccggtgtcggcgggttcttcttcaaacggcggcgtggcgaacgccccgaacaacgcgaaccagttcgtgacgacgtcgttgtacgttggcgatct

SEQ ID NO: 45264 - DNA, 390 bp, Glycine max
  unsure (1)..(390): unsure at all n locations
  Clone ID: LIB3093-001-Q1-K1-F2
catggatccagtgagcgtgtggggtaacacgcccttggcgacggtggatcccgagatccatgacctcatcgagaaggagaagcaccgccaatgccgcggcatcgagctcatcgcctccgagaacttcacctccttcgcagtcatcgaggccctcggcagcgccctcaccaacaaatactccgagggcatgcccggcaaccgctactacggcggcaacgaattcatcgaccagatcgaaaacctctgccgctcacgcgccctccaggccttccacctcgacgcccaatcctggggcgtcaatgtgcagccctactccggctcccctgccaacttcgccgnctacaccgncgtcctcanaccccacgaccgcatcatggggctggatctccc

SEQ ID NO: 45265 - DNA, 384 bp, Glycine max
  unsure (1)..(384): unsure at all n locations
  Clone ID: LIB3093-001-Q1-K1-F3
gtaagaacttgtttttctttctcaaactgctccttactagatttgaagaggaattgggcatggtgagttaggcacatggttatttgctttatttttgtcatatagctcttatgttaaactctgcttcgaacttgtcttgtaaaaaaaattgatggtgtaatttgtaaatccgtttccaataagttgttattgttgacataatgtgcataaagttaagtggtgtgttgcattattactaaatgtaatgaggacttaatcatttgcggtgagacagttactgctaatataattcacaaaaatttatgtgacatacataatattttctggcattatttcagcanatcttgcaagccaagatcaccaatttgaaaatatctgcaaaaa

SEQ ID NO: 45266 - DNA, 453 bp, Glycine max
  Clone ID: LIB3093-001-Q1-K1-F4
aaggtatagattagattagaaatccttctcccttctctcttctttcttcttcttctcctgacccttattattattccttgcccttaccctttaggcaagggaaggaagaaagaataactatattattatctttattgtaatctatctttttattataattataattataattattgttgttattattccttaaatatggattcgccgtgtctctccaacgattcggtttctggattcaaagacaaggagtcaatggttgacccctttttggtcgaggctctccagaaccctcgtcaccgcctcaccattttgaggatggagctggagatccagaagtttttgaataatgctgatcagctgcattttgagtttcatcatttcccttcttcctatctccgactggctgcacaccgtgttgctcaacactacaacatgcaaacaatggttcaagat

SEQ ID NO: 45267 - DNA, 442 bp, Glycine max
  Clone ID: LIB3093-001-Q1-K1-F5
gtgatacagaggtagtttctgaaaccacaaaggctggtggcctacgtggaaaattgaataaggtggtgttggcttacagtggtggcttagacacatcagtcattgttccatggctgagagagaattatggttgtgaagttgtttgcttcactgctgatgttggccaaggtataaaggaattggaaggtttagaacagaaagccaaagccagtggagcctgtcaattagtggtaaaagatttgaaggaggaatttgtcaaagattatatatttccttgcctgcgtgctggtgcagtttatgagaggaagtatttgcttgggacctcaatggctcgccctgtaattgcgaaggccatggttgatgttgccaaagaagttggagctgatgccgtttcccatgggtgtacagggaaaggaattgatcaggttcgattagagctcac

SEQ ID NO: 45268 - DNA, 421 bp, Glycine max
  Clone ID: LIB3093-001-Q1-K1-F6
cccacgcgtccgcgtgtccatagttgcaagttatctaagcccagtttgtgtttcactgacacgccgtttccagtaacaacaaaacatcatgctttctcgcccctcacatcaatttttctgtttctgagatccgcgccttctcttcactttcagatggttctgtctctgtagctcggaatcagacgacaggagaatttgctgggggagagtttcaatttttcaaatcctgtcgttgattcatttgggggaggaggatggaaagaaagtgaataaccttctggaaatgaatagaggggaaggagcgaatgatggtttttctggacctggaccaaatgattcgcttcttactggtcttattgatgatgttgccttgaattgacttgcttggcttactggatccgattatgccgcactatcgtgt

SEQ ID NO: 45269 - DNA, 432 bp, Glycine max
  Clone ID: LIB3093-001-Q1-K1-F7
cccacgcgtccgcacaactacaagaaagaacttccttataaccaaaaccaacaacaactatggcgaagttatcagaagcactacgatgatcagggtcgcaaggtcgacgagtatggcaatgttgagaggcaaactgacgaatatggcaacccggttcatgccactagtgtcacttatgtagccaccaaaagtgttggtggctacaatgatgacgctaataagcaacatgatattactggtgtctatcccgagaaagacaccggtagacatcattttggtcgtggttacgacggtgacactaacaagcaacatgatgctactggtgtttatcccggaatagacattggtagagatcatgggactaccggtgtttatggcctaaacaccgacagacatcatggaacttctggggtgaatcccgggatagacacc

SEQ ID NO: 45270 - DNA, 346 bp, Glycine max
  Clone ID: LIB3093-001-Q1-K1-F8
gcaaccttcacctatgaatcgtttatgctgacagtcctgccattcctaatagcttaggaaatgaatggtgtgtgtgtggttggtagggtttgtaaatggccaggctgtatttggtttgaaaatgtgtggtcgaattactttactattgccagcctttaatatgctagtactccctgttgttttactctataagtaaccagatccaaaatactatggttttcaaaaaaaaaaaaaaaaaaaaaaaaaaaaaaaaaaaaaaaaaaaaaataaaaaaaaaaaaaaaaaaaaaaaaaaaaaataaaaaaaaaaataaaaaaaaaaaaaaaaaataaaaaaaatttataat

SEQ ID NO: 45271 - DNA, 262 bp, Glycine max
  unsure (1)..(262): unsure at all n locations
  Clone ID: LIB3093-001-Q1-K1-F9
tgaaattttaaaaatgactgggataaacttaagaattcaattattgaaattgaataagtaaacggtttaattggattggtcgaatggtatcaaaaaaatggagtactaactcccatttcttatttattattgaattaaccgatcaacttgctttgttatcgaacatttctttttgatttcaaaaattttccggaaaaaatttgaatctatttttatatgcgaatcaatcctactacttcttgtcctgangtttctgcgcttg

SEQ ID NO: 45272 - DNA, 412 bp, Glycine max
  Clone ID: LIB3093-001-Q1-K1-G1
ggcaatttgtggggcttgctgagatgattggtcctgttgattttaacaagagtgttgagtattggcagcaagacaagtggaatggttgctttcctcttaagtggcacattgttaaggatgttcctaacaatttgttgaggcacattaccttggacaacaatgagaacaaacctgtcactaacagtagggatacacaagaggttatgttggagcctgggctgaaattaattaaaattttcaaggaatataccagcaagacatgcattttggatgattttggcttctatgaggctcgtcagaaaactattttggagaagaaagcaaagcaacaattcccaaagcaggtatgggaagggaaacctgctgatgagaagattgagataaatggggaagttaatactcaaaaatctga

SEQ ID NO: 45273 - DNA, 443 bp, Glycine max
  Clone ID: LIB3093-001-Q1-K1-G10
gtgatatcctcatttgagcaagctgctggaataggctcagcaagaacgtacactgcgcttgcggtgcaaacaatttcgaagcaatttcggtgtttgaaggatgcaataacggggcaaatcagagctgcaaacaagagtttgggagaagaggattgttttggtgctaaaattgaaggatctaggctcaaatatgtggaccatcatctaaggcaacagagggctattcagcaactgggaatgatccatcacaatgcttggagaccccagagaggattgccagagagatcggtttctgttctgcgtgcttggctctttgaacactttcttcatccttaccccaaggactcagacaagcacatgcttgctaaacaaacagggcttaccaggagccaggtttcaaattggttcattaatgctagagttcggctttggaagccaatggt

SEQ ID NO: 45274 - DNA, 440 bp, Glycine max
  Clone ID: LIB3093-001-Q1-K1-G11
ctcggaggacacaaggccagccaccggaagctcgccggagaaaaccacccgacctcctccgccgtgacgacgagttcggcgtcgaacggtggtggtaggacccacgagtgctccatctgccacaagacgttttcgacaggacaggccttgggaggacacaaacgttgtcactacgaaggcggtaacagcgccgtaaccgcctctgagggagtggggtccactcacacaggaagccaccgcgatttcgatctcaacctcccggcttttccggacttctcagcaaggttcttcgtcgatgacgaggttaccagtcctcatccatccaagaagtcccgtttcaatttgaccatacccaagattgaaatccctcaatactgatccatagatccaaaaaaattattcagtgtttttttatatatttttttaagttatttgggatt

SEQ ID NO: 45275 - DNA, 431 bp, Glycine max
  unsure (1)..(431): unsure at all n locations
  Clone ID: LIB3093-001-Q1-K1-G12
cccacgcgtccgcacaaatattgcagcctatgctacaagagcttggcaaacaaaatgcccatcgaatgagattgattcgagaccatcaagctgacttccttcgcctgataaatgaacctgcagaaggtgctgaagggaacatattggggcagatggcttctgcgatgccacaagcagtaaccgtcactcctgaggagcggcaggcaattgaacgtcttgaagcaatgggttttgatcgtgcaatcgtattggaggtgtacttcgcttgtaacananatgaggaattggctgccaactaccttttggatcacatgcatgagttcgaggaacaatagatctcctttcgaatttgccaaattatttcgtgtcatcttttttctcgatgggtctttgntacatactatgtttaatgaggtaatgcttttgataat

SEQ ID NO: 45276 - DNA, 457 bp, Glycine max
  unsure (1)..(457): unsure at all n locations
  Clone ID: LIB3093-001-Q1-K1-G2
cccacgcgtccgcccacgcgtccgtctcggggagaatcacccagaaagagttatctaaaagctgttaaaaaagtggcaaagacagagaaagatgctcaaataagacttcaactttatgagccatctgaatttcatgtggtgaacccattgaagaagacaagggtagggaaccccgttgggtacaaattggttcccggtgccacagcagctagcctgctggatccagaagatccaccacagaaaagagcagcttttaccaacaaccaattatgggtcactccttacaacaaaagtgagcaatgggctggtggcttatttgtttaccagagcanaggcgatgatactcttcaagtctggtccaacagggatcgtccaattgagaataaagacattgtgttgtggtacacaatagggttccatcatataccctgtcaagaggactaccctatcatgccta

SEQ ID NO: 45277 - DNA, 337 bp, Glycine max
  unsure (1)..(337): unsure at all n locations
  Clone ID: LIB3093-001-Q1-K1-G3
cccacgcgtccgaattcccaccgcaaggtaaaaaaaaaaaaaaaaaaccagtggtgcgcgatgccaccgaagttcgatcccttgcaggtggtggacgtgttcgtccgagtcaccggcggcgaggtcggcgcggcgagttccctcgctccaaagatcggtccattgggtctctccccaaagaagatcggagaagacattgcgaaggaaaccgcgaaggactggaagggcctccgcgtgacggtgaagctgacagtacagaaccggcaggcgaaggtgacggtggtgccctccgccgccgcgcttgtcatcaaggcgctgaangagcctganagggaca

SEQ ID NO: 45278 - DNA, 454 bp, Glycine max
  Clone ID: LIB3093-001-Q1-K1-G4
gttcttcttttcaagttcataaacttcattggcagcttcaccatattccaaagagatcatcggtatgagatatgtgtcttctgagtatgatgatgaagaagaagaaattcaagaaagttactcttatgtccatgattctattgagtcagatcatctagtagcagacatcatttgtggtggagagacccttttgtttgtgcacaagaaccagcctcagaggactcattcttcttctgatgaattcacaagcccccgggatagccttgctgaagacttagaagaaaactattcaacagaaaccttgtcttttcacaagtcacctttggtttcagactttgaaaatgaacaagatgcagaagaatttccagcagaagatgctgattctgttccaaattctgtcccagctgaaagcaggcccacatcgcccatcacactgaacctctacaaaagcgac

SEQ ID NO: 45279 - DNA, 440 bp, Glycine max
  unsure (1)..(440): unsure at all n locations
  Clone ID: LIB3093-001-Q1-K1-G5
gttcgatttcgcagactggttgaagaacacggtttcggagaatgatttcgttgtgatgaagatggatgtggagggtactgagtttgatttgattccaagattgtttgaaactggggctatctgtttggtggatgagatttttcttgagtgccattacaataggtggcagaggtgttgccctggacagaggagccccaagtatgagaaaacttatgatcagtgcttgcagctcttcacttctctcagacaaagtggagttcttgttcatcaatggttttaattaactttgtagaattgcctgatggatgatgggtcaaaccctatatgcatgttcttagcttctgcatgtttcttctttntagttntcttatttttttcccaagccaatagagaagagagagagtgagagtgagagttctttatttttaaaaattctctac

SEQ ID NO: 45280 - DNA, 445 bp, Glycine max
  unsure (1)..(445): unsure at all n locations
  Clone ID: LIB3093-001-Q1-K1-G6
aaagagttctttcaaaatgcaaacagccttaaccttcgctgcccccaacgttgtgccattggcacccacaaagagtgtctcccatattaccatctttcccaccaaattgaaagccccgcgctcctcacctcgttactctccgattagggttgcaaccgtggagcccgacacttcaactgtcgactacaactctgcgttctcagtgtttcctgcagaagcatgcgaaactgtaggaggggaagcctgcatggcggagatgtaccctgaaacgaagctacagccagaggctaagactccacgagtcgttacagagaacgttgagagagagtatctngaatacgatgatcctaaaacggtatttcgaggagaggcttgtgatgatcttggaagaactntctgtgagaccgagtatcanaagggtgtctactagagaaatgtgaaaacc

SEQ ID NO: 45281 - DNA, 362 bp, Glycine max
  Clone ID: LIB3093-001-Q1-K1-G7
accaaggcaccatgtaaaagctgcttgaaggatgctaacatctctatcaaggatgttgatgaggttcttcttgttggagggatgactcgagttcctaaagtccaagaggtggtttcagagatctttggaaagtctcctagcaaaggagtaaaccctgatgaggcagttgccatgggggcagcaatccaaggtggtattctacggggggatgttaaagagctactactcctagatgtaacaccactctctctcggtattgagactttgggtggtatctttacaagattgatcaaccgcaacactactattcctactaggaagagtcaggtcttttcaacggagctgacaatcaaactcaggta

SEQ ID NO: 45282 - DNA, 437 bp, Glycine max
  Clone ID: LIB3093-001-Q1-K1-G8
cccacgcgtccgcccacgcgtccgcccacgcgtccgcccacgcgtccgcccacgcgtccgagcaaatgtaaggcaagttttcgaagatagtctgggccaactcttctgcaccgtgcctttgcttgaataatgaattgtcaggggtaaatttatgtgtggatccataaaaaaaaggtagtaactttaagttagatcttcttttcgaattccatagtatgcatatcatttaaatgcaacagagcaatacatctgtggtcgtatcttagtccgagtaatgaatgatcttttgtttaattgagtaatactacattggtctgtggcaagaataattgtataatgctacatttgtggtcgtatcttcttttcgaaatccatagtcttttgaactatgcattggtctagctagtgacttcaaatgccgtgacttttttaatccc

SEQ ID NO: 45283 - DNA, 425 bp, Glycine max
  Clone ID: LIB3093-001-Q1-K1-G9
gaaaaggtatagacatctggctgcaatttaagtatgttgctgcactaaccatccactactctgacatcccaatagccccaaaagactgcttgtttatatatatatatatatatacatatatatatatatttatttatttgaatttcacaataacatacctcataccttgtagttgggctttgtgaagggttttggttttctgtttgggaggctggcagcacagctgcctttgtatggttatcatcagtacccctggtactgtagcttctcttattaataaatatatatattttctgccttccaaaaaaaataaaaaaatctaataataaaatattttattaaatactaaatttataaaggaaaaaaaaggaaaatttccacaaaataaataataattatggtaatggtgaaaggcaaaattaata

SEQ ID NO: 45284 - DNA, 315 bp, Glycine max
  Clone ID: LIB3093-001-Q1-K1-H1
cccacgcgtccgctcatttcttctcatcttctttttcttccctttaaaattattattccgttgaaacagaacaacaacttcatcaccaacacgaagaacaagattagcgttatgggtctcttcctttctaggaatttggcttgcaaattcatatacccttttcttttttccaataaggtttcaaaggatttgttccccaagcagttggagaacatgatgtctctggtctctcctcgtactggcaggcatttgcagcgctatgacaaaggctgtctccaagttgtgacatgcatttcttacagatacaagaacaat

SEQ ID NO: 45285 - DNA, 457 bp, Glycine max
  Clone ID: LIB3093-001-Q1-K1-H10
ggcctgttcagtgatggcatctgtggccctcaaacctgcccctttcactgttgagaagtcctcagttagaggccttccctccctctcaaggaactcctcttcattcagagttgtggccagtggtggcaagaagatcaagactgacaagccttatggaattaatggtggcatggctttgagggaaggagttgatgcatctggcaggaaaggaaagggaaagggcgtttaccagtttgtagacaaatacggtgctaatgtcgatggttacagtcctatctacgacaccaaggactggtctccaaccggtgatgtctacgctggcggtacgactggcttggctatctgggctgtgactctacttggtcttcttgctggtggtgcacttcttgtctacaacacaagtgctttggcgcaataaactttgcaaatcgatgttttaagctcaaacttagtccat

SEQ ID NO: 45286 - DNA, 433 bp, Glycine max
  Clone ID: LIB3093-001-Q1-K1-H11
caacagtgggagggagatccaaaaagagagagtggaaaagatggcgcggttgatcacagtggtgtggtgcgcggtggcggtgctattatgcgccgcggccggtgcgtcgtgggtggaggaggcggctaacccgatacgaatggtgtatggcgtggaggcggaggtggttcaggtgatcggcgagtgccggcgtgcgttgaagttcgctaggttcgtgagcaggttcgacaagagttaccaaagcgaggcagagatgaaggacaggtactagatcttctcgcagaatctcacgtctatccgatcccacaacatgaagcgtttgccctatactctatctggtatcattttgctgattggacttgggaggacttcaaaagactcagacttggagctgtccaaaattgctctgtcactcttaacggtaaccacaggc

SEQ ID NO: 45287 - DNA, 456 bp, Glycine max
  unsure (1)..(456): unsure at all n locations
  Clone ID: LIB3093-001-Q1-K1-H12
cccacgcgtccgcccacgcgtccgcttctctctttcaccaatcaacacaaactaagtgcttccgtctgttgaaagcgatagcaatggccacgaatccaatcgaagcggggaacggcgacgctgctcccaaccctaacgcgactaccaaatcctccgtgtacctgcaagactcggaggagctgaagcgagtcttcagccgcttcgacgccaacggcgacggcaagatctccgtctcggagttggacaacgtcctccgctccctcggatccggcgtcccgccggaggagctccagcgtgtcatggaagaccttgacaccgatcacgacggcttcattaacctctcggagttcgccgncttctggcggttcgacaacggggacggcggcgacaccgaagctcacgatgccttaaacctgtacgatcaggacaagaacggnctcatatccgncacggagc

SEQ ID NO: 45288 - DNA, 416 bp, Glycine max
  Clone ID: LIB3093-001-Q1-K1-H2
cccacgcgtccggcaattttcgggatcctgagagcaatgctgattttgaggttcaggagaaggtgtctctgctggagtggtttgcaaatgaatacaaacggtttggttgcactcttgagtttgttaccaataaatcacaagaaggttcacagttttgcagaggtttcggtgggataggtgggatcttgcgttaccagcttgatatgcgatcatttgatgatttttctgatgatggaggcgtgtatgatgattctgaatagcaatcactgaaaaacttcctaccactggtgcaggaaaggggagccaagatacctgcaccaatatgggaagtggaaggtggtgcacctgctgcagctcctccttcttcatgtctgtctctggtgttgcatacagtgtttgaatgtgaatcgagatgc

SEQ ID NO: 45289 - DNA, 363 bp, Glycine max
  Clone ID: LIB3093-001-Q1-K1-H3
cgagaggagaggagagaagagaggaagttttggggtttgaatctatagaatagaatcaaaccgaattgaaagaagatcgatcgatcgatcgatggctctggtcggagttgaagtgaagcatgcggcggagggcgcaccggaggagaattgctccgccaagcccaccaagcagggcgagggcctccgccactactattctcacaacatccacgagcatcagctccttctccgtcaaaagacgcataacctcaaccgtcttgaggctcagagaaacgagctcaattccagggtgaggatgctgcgcgaagaattacagcttttgcaggaaccaggctcttatgttggtgaagttgtcaaagtcat

SEQ ID NO: 45290 - DNA, 426 bp, Glycine max
  Clone ID: LIB3093-001-Q1-K1-H4
gcggccaaggttgtgatgcatcagtactattggatgatacatcgagtttcacaggtgagaagacggcatgtgccaacgctgattcgattagaggctttcatgtaatagacaccataaaatccaccacggaaacctcataccctgatgttgtttcttgtgctgatatccttgctgtaacaactagagactccgacgttgctcttggtgtaactacttcgactgtacaattgcctagaagagacttctccacttgcagttcaagttgctctcactcacactctccacaaccctcttgaatgcatagggactattaaagcttccattatattgtgtatgttacaaccgagggattttgtatggctactgaatcactgatagtttcgaagtactgcttggtaagtatgaatacacatagcaatgcatatt

SEQ ID NO: 45291 - DNA, 428 bp, Glycine max
  unsure (1)..(428): unsure at all n locations
  Clone ID: LIB3093-001-Q1-K1-H5
gaatctgattatgttcgttggaaccacgctaacccctgcattttacatttttaatataaatgggttttatttatttattaatttttctttaaaccttaagaaaaagtagattaagcgattagcatagcaaatttgaggcttgcttaatgctttcttcatcatcgggttagggtttttgcagttctttcatttcgaaaccctcgtcgattcaccttcactatctgcttctctcctaaatctcacgctatggggagcaaaggccgcatgccgcncgcccctcacctacggcgcccgcacccgccgggccccgccgcgatgccgcatccgctcgcggggccgttcgatctgctcccgccgccgcaggtgatggagcagaagctggcgtcgcagcacgcggagatgcagcgcttggccacggagaaccagcg

SEQ ID NO: 45292 - DNA, 419 bp, Glycine max
  Clone ID: LIB3093-001-Q1-K1-H6
gccagatctatgacgtgtccaatggcaggaatttttatggtcccggaggaccatatgcaatggttgcaggaaaggaatgtagcagagcccttgcactcctgtcttttaaacctgatgacattaatgggaacctcgaaggtttaggtgaggaagagcttacaattttagaggactgggaatttaaattcatagaaaagtatccgaaagttggccagctcattgcagaacaaagaactcggcaaaatgagttcaaagaacaaactcaagacaatttggacaaccctaatgaatgcaaggaggaagaaaaatagtaaccattatattgtataggttacaaccgagggattttgtaaggctactgaatcactgatagtttcgaagtactgcttggtaagtatgaatacacatagcaatgcata

SEQ ID NO: 45293 - DNA, 253 bp, Glycine max
  Clone ID: LIB3093-001-Q1-K1-H7
cccacgcgtccgcgtggctgagccaaagagggagcaggataattacatggaggtggcaaaccgtttgaggacaaagggaacccatgtaaagggaattgtgaatcccacccagcttttcaactggattaacaaggtattatgacctggatttttcttttgtgttgtgcctctaaacgcatgaatcaatgatcaattgtattatttgcacagcttagtttgaatttgatttaagtttggggattttgttgttacc

SEQ ID NO: 45294 - DNA, 422 bp, Glycine max
  unsure (1)..(422): unsure at all n locations
  Clone ID: LIB3093-001-Q1-K1-H8
cccttctctctctctctctctctcttccaaccttttctctgtttcttctaaaagtctcagcggagcataacataacccttcttcatcttcttcttatgtgattgacttgtgtccaccacggtgacccatttctgtatcttctggtgaaaagctaatttgttcactctaataagtgtacagtgctaaagggtaaactttgaaacctagcttcctagttgaatcatcagaagcttataagtcgaatccatatttttctggacgtttagactttctttgatttccctgggaaatgatgatgatgcttgaagatatgggattttgtggggatttggatatgttttctgctccccttggagaaggggatattnaccgccggcaaactgagccagaggtgatagttgaggatgattatagtgatgaag

SEQ ID NO: 45295 - DNA, 446 bp, Glycine max
  Clone ID: LIB3093-001-Q1-K1-H9
cccacgcgtccgcccacgcgtccgcgccagactgagaggaagagagagggagattctttgtttggtaccttctctcggaaaaatggttacgttcaggtttcaccagtaccaggtggttgggagggctcttcccacggaagcagatcagcaccccaagatctaccgaatgaagctctgggccaccaacgaggttcgcgccaagtccaagttctggtattttctgaggaaactgaaaaaggtgaagaagagcaatggccaagtgcttgccatcaacgagatttttgagaagaacccaaccaaaattaagaactatggtatatggttgcggtatcagagtaagactggttaccacaacatgtacaaggagtaccgtgacaccactctaaacggtgcagttgaggcaatgtacaatgaaatggcttctcgtcacagggtcaggagccctt

SEQ ID NO: 45296 - DNA, 401 bp, Glycine max
  Clone ID: LIB3093-002-Q1-K1-A1
aaacaagcccttatcacaactctatctaacaaattacataggacaggcccaaaaccaaaagaagcttctttgtctctcgtgccgattctccaccactattcccttcaccccaatcacactttccggtagttgttgctattagtgtagaagatgagtacgctggatgcaacaagggctgaacttggtcttcttgttttatatttgggcaaggctgaagcaagggacaaaatatgcagggcaatacaatatggttccaaatttttgagtaatggggaacctggtactgctcaaaatgtagaccaaacaaccagcttggcacgaaaaggcttccggctctttaagtttggcaatgacctacatgctttgataagtccaacaccacaggggacaccccttcccct

SEQ ID NO: 45297 - DNA, 447 bp, Glycine max
  Clone ID: LIB3093-002-Q1-K1-A10
gtgagtgtatacccaacacaaactaagatcaacatggactactacacccgcgtttcagaagttgagagggaacctatcatggagtattccacaccacgaccaatgatgggcaactaccaccaccctaatgctcaccgtgtcctcaacgagaagattgtttatgaggaggatgtgattggaggatcccgccacaaccacatgcatcaccaccaccctgagactcatgagagagtcaaggtggtggagtatgaacaagttcctgagaggcgcgttgtctatgaagagaaagttgcttatgacaacgatcgttactactctccaaagtattgaaattggacaaatggaagaacacctataacgtgttatcatgtggctttttattaggcaggctacctagtataccaaaagcaccactgtgcttgtactaaataaattcctgcttatata

SEQ ID NO: 45298 - DNA, 461 bp, Glycine max
  Clone ID: LIB3093-002-Q1-K1-A11
cagtttgggggatggaagtcgacttgcccttttctggttctccccaaaaaaatagattttcatgattttttgaccccatttttaaagaactaaaaaaaaaaacgaaacaatttcaatttttcacttttcgagttctaaaagttttaagtgaaaaattgaaattgtttctaactatcttaatagaaaaagcaaaaaggattagcaaaagtattatcgaaagtattcttaaaagtattctcaaaagtattctaagcctaacgaaaataaaacaatttttcaaattgctatttattaaatttaaattcaaaaagatagatgaattgagcgaaaataaaaaagattcaacaatttataagaataatccaatgatttctgaaacaaccatttcaattcaatcgataaattcagtaaaatggtcattgaaaaaaaaaaaattaaggatcttaatgctaaaagaaaag

SEQ ID NO: 45299 - DNA, 361 bp, Glycine max
  unsure (1)..(361): unsure at all n locations
  Clone ID: LIB3093-002-Q1-K1-A12
ctttcttcttttttagctatccctctcttgaaaaatctagatctcgttcttccttgatctacgttacgcttttagtgaccggatctgtatggatctgaaccagatctacacgccgatggtggttttggcctggtacgataaatcttccatcggagttttgctctgtataggttcgattcatcggtattagcgtcttgatattggtattttcatttggcatatnaggtcttcatagatctgatgcatggaggctcagatctactgtacagaggtgtgcgattcatgttcgtctctctttgggaatctgtttcgtagaaagtcgtttggtcttcatgtcgcatgcttcttgagaatttttttt

SEQ ID NO: 45300 - DNA, 408 bp, Glycine max
  Clone ID: LIB3093-002-Q1-K1-A3
acgggccaaaatcgtgacatcttcatgtacagagggaacacaccattttgtagcaaagagtgcggacaggagcaaatagagattgatgaggcaaaggagaaaagttggaagctttcttccaaaaggggtgtgagacaatcagagaccaatcaaaattccacacccaataaggctgtaagaacaggcacagttgcagtggcctaatcataatcaaacaaagaataatcatgacatgatgatgatgatgaatggggaaagggtccaatttttgaagtaaaaaaaagattgaatattggaaatggaaaaattccaaaggaagaaatgcaatcatgaataatccatgaagattctgataacccgggatgaatcttcaattcgctgcctttgtaaagaaaaaaaagtttggtt

SEQ ID NO: 45301 - DNA, 387 bp, Glycine max
  Clone ID: LIB3093-002-Q1-K1-A4
acgcccacgcgtacgctatctctgactacctagtgctctacgtctatgcctctctctcaaaaatggatgcggttcgattctacggttttgttttgctgctgcctacgttccccccttctcataaacaacgcgtcttctcttctgcttcgtatctattcttggctttggctttgggtggattaaaggcctcacagcattcggtgcggcattttaatccatttattccaacaaggcttaatgaacctatggagtctaaaggtgggaaaaagaaatctagtaatggtcgtactcaatcattggtctacgaaacttccctctgataccgcattgaagaccttagaccaaacggtggaatcaagaaattcagatctgctgcttacttcaact

SEQ ID NO: 45302 - DNA, 439 bp, Glycine max
  Clone ID: LIB3093-002-Q1-K1-A5
gcctgattattcttatcttacgagactatttcgggacctattcatccgagaaggggatcagtttgattatgtatttgattggactatgctgaagtatcctcaaattggatccagttctagagcccgaccaagtgggaaaccagtcataaaccccggacaatcaggagacagaatagaacggccttcagggggtttctcaggtgctgttgaggcatttgcaaggaggaatggctctggacttgttctgcaaagtgagcattctaggcataggtcttcagatgatgtgccatcttccaaagacgtgcaagctgattctgagaggcctcgcagctcttctcgtaatggcagttcttcaaaaaagcctgtcttgtcaagcagccggccaagctcttctggtgagccaagtgaaagccgtactagccgactggtcttaagcagt

SEQ ID NO: 45303 - DNA, 452 bp, Glycine max
  Clone ID: LIB3093-002-Q1-K1-A7
cggacgcgtgggtgtttctgtctctgtgtttgcggctgaggattccgaacgagcgacctgtgttcgtttctcgcaaagtttaagtcatcatgggtaaggaaaagactcacatcaacattgtcgccattggacatgtcgactctgggaagtcaactaccactggtcatttgatctacaagcttggaggtattgacaagcgtgtgattgagaggttcgagaaggaggctgctgacatgaacaagaggtcattcaagtatgcctgggtgcttgacaagctcaaggctgagcgctaaagaagaatcaccattgatattgctttgaggaagtttgaaaccaccaagtactactgcacagtcatcgatgcccccggacatcgtgactttatcaagaacatgattactggtacctaccaggctgattgtgctgtctttatcattgacttcaccactggt

SEQ ID NO: 45304 - DNA, 426 bp, Glycine max
  Clone ID: LIB3093-002-Q1-K1-A9
cccacgcgtccgggaagaccggaatagccaaccaaacccgtcgtcgtctagttatctatctccgccaccagcgaaaaccccaaaaccctagaattcaagaatcgaaagcaatggacttcgacgagtacgattacttggagaaaacagtggaggagcaagaggaccacgacagcagcagggagaagagggagaaggagaaagagaaggagaaggagagggaaagagaaagaagggagagggaacgggaacgggaagagagagagaggtctcggaggagtaggagtcgttccgagagagaaagagaaagagaacgggatttcgacaccagagatagcaggagatttagggacaaaaaagaggcagcggagcccgaggcagatccagaaagggatcagagaactgtttttgttaccagatgcccttaag

SEQ ID NO: 45305 - DNA, 353 bp, Glycine max
  Clone ID: LIB3093-002-Q1-K1-B1
acgcccacgcgttcgtccacgcgtccgtccacgcgtccgctatacactttcttcaacggttaaggcctgggtgtactcgttgtatgttattatttttcgcgcaccagacagcccgagcgcaattgatggactctattgtaagacacacgcattgccagcgaagaagagcttgatagtttacttaaccgactatgatgctgtgacattcatactgatggacgacgctactaccgtgctacatgtacttagagtaggggaaactatgtatcaagcgacaattggatggcttatgatctgggtaaaaagcgcaactgggatctcttactccagggaggatcaaatgctatggcgga

SEQ ID NO: 45306 - DNA, 244 bp, Glycine max
  Clone ID: LIB3093-002-Q1-K1-B10
actactcgtgctgcattggccaaacgtatcttattcgatgcgcatcctgccatactgagacaagtcatgcctcatgagctagcctgctctgactggcctatcctgacgacatagctcttgcgagatctgatataatgcgcatgaacctgcgtgattccacgtgcagagtccacgtgcaaggcatgcttctacaggatctaccgaagcatcacatcgcatactctatggctgtatatgtgatata

SEQ ID NO: 45307 - DNA, 452 bp, Glycine max
  Clone ID: LIB3093-002-Q1-K1-B11
gtggtgtacttggttgatgcttatgacaaggagagatttgctgagtcaaaaaaagagctggatgctctactctctgatgaatctttagccagtgtcccttttcttgtccttgggaacaagatagatattccatatgctgcctcagaagaagaattgcgctaccatttgggcctgactaacttcaccacaggcaagggtaaggtaaacttggccgactcaaatgtccgtcccatggaggtattcatgtgcagtattgtgaagaaaatgggttatggggatggtttcaaatgggtttcccagtacatcaaatagtcccttagcaagagatggcttggtaactcatttctagaagtttgtttctctagttgagatttggaggtgttgttgggacaaaattgctgttaaagaaattgcagtatatttcaacttttatttatataaaatgactggga

SEQ ID NO: 45308 - DNA, 257 bp, Glycine max
  Clone ID: LIB3093-002-Q1-K1-B2
cgaattccagttcgacccacgcgtacgcttagtttcacttcttggaggagtcaaatgctgaactgctttgtaaggtttgagtgtctagtgattggatcagtataggtggatctggttcatagagttcttcaaggattcaagtgaccattcaatgctattgggatctatctactcgatgaagctgtctatgtccctatctgcaccttatagcaatatggggcattcttgtgtatacactagctttgatgtagtcttct

SEQ ID NO: 45309 - DNA, 383 bp, Glycine max
  Clone ID: LIB3093-002-Q1-K1-B3
acgaaaaacaaaataaataaaaaaaaactataaaaaaaaaaataaagataaaaaaaaataaaaagcggaagggaagaacagaatcaacggattagaaaaaaatagaacaaaagaaaaccggagggcctctttaaagaaaccatgctgaactcgctgccgttcacgaccctagcattaccatagagtacctgacatacatgttaatgtacgacattttacatggacactatggaaaaccatgcataccaatttaatacattgtataaatcccgatttgccaagctgtattattagacacaaggcccctgccgatagcccttgccaaaaaattggaaccctcattggcgaatgggaccccccctttatcggcgcattaaacccgg

SEQ ID NO: 45310 - DNA, 319 bp, Glycine max
  Clone ID: LIB3093-002-Q1-K1-B4
ttcccgttcgaccacgcgtacgcgaaatcttaagcttgcagattttggactgacacgatcattttctaatgaccaaaatgcaggtctgagtaatcgtgtcattacgttatggtacacaccacctgagttgctgataggaacaacaaattttgtgccagctgaggatatgtaggtctgttgggtgcattttggctgagcttgttcaaggaaagcctattttaccgggaaaagacaagcagaaccaataaattaaactttttgactgattttaagagccgaaggaattgcatggccttgtgatctcaagaatccctattat

SEQ ID NO: 45311 - DNA, 283 bp, Glycine max
  Clone ID: LIB3093-002-Q1-K1-B6
accggactcggaattccgggtacgactacgcgtacggtgacgattaaagcaatgacagtgacgacatcgtttgatgtctatgacgattgatggcttgcgtactccttctagttcaccgaatgcatacaccacctgatcaactgatatgaccatcttattctatactaatagcaccattctattactgtgtctgtatctctgtctgactctttttatggttatccaactttgcagggatcatacgagcaggactacagatttaaacttactagatgcttacaag

SEQ ID NO: 45312 - DNA, 351 bp, Glycine max
  Clone ID: LIB3093-002-Q1-K1-B7
acgcaacttctgctacttcctactccaaccgcacttctgctccgcaattatcatggggaaggtgaagatcggaatcaacggatttggaagaattggccgtttggtagccagagtggctctgcagagagacgatgttgaactcgttgccgttaacgaccctttcatcaccaccgattacatgacatacatgtttaaatacgacagtgttcatggacactggaagcatcacgatgtcaccgttaaggacgagaagacccttctcttcggtgacaagccagtcactatttttggacacagaaaccctgaagagatcccatggtggtcaactggagctgacatcattgatgagtc

SEQ ID NO: 45313 - DNA, 396 bp, Glycine max
  Clone ID: LIB3093-002-Q1-K1-B8
acgggctagctaagcgaagctaaaaccaaactcttcagcagtatggtcttgcttacctggctcggctgcttttgctttcttcaccaccacaaccaccatgtattctgccactgcctccaacactttcttccttctctcttgtttccttctcttctgtctcctctcagctacttcctgtgtttccatgttctctggtattgagacaggagatttagaaaaaagagatgatttgtttccacagattctaacagacgaagcagttgcaaggctttatgagcttgggaaggtgagtgatgctagtggttatttggaaaggacattcttgaatcctgcatccatgaaggcaattgatcctattcgtaaacggatggaagattcttgtttgagaacttgggt

SEQ ID NO: 45314 - DNA, 470 bp, Glycine max
  Clone ID: LIB3093-002-Q1-K1-B9
ggcatccgttcggcgggaaacaagaacaacgatctcttctgctgggttttgctctgcttgctgccaaaatttttgggaactccatttgccttcatcaactttctcttgattcaggccattgacaggagtccatcggcggtgggagttttgggaaacttcggggtggttaacctatagtctttattagtttggtcatcatcagcagcagcatatttagatcccttattgttgagtggtgtgagaaatggtgtcctctcagttttctggtttgactatggctggctacaaacctgcacagactcagttactctttcctgcaaaccttcctgatactgtgaacacggagcatattgagctggatttctctgatgtctttggtcctgttacggtagatttgaataacattgattccactactggtgagcccctagaagaagtgaacgagctttgttatgatgacccgccagtga

SEQ ID NO: 45315 - DNA, 266 bp, Glycine max
  Clone ID: LIB3093-002-Q1-K1-C1
acgcccacgcgtccgctcctctgttccattacggtttccttttctccctcggagcttccaatgcgagaatgcaattcctcaatacctgcacactttctcgttcggaaagctcgcgaattcgaaagacatcgacggctccacgtgatacgtttgcttcctatctggttatcaatgtcggctactagtgcacttgcatctttgaccgtattaccaccagtgagaacaggtggccaccacattgcacagaatgttgtatcacattgagc

SEQ ID NO: 45316 - DNA, 439 bp, Glycine max
  Clone ID: LIB3093-002-Q1-K1-C10
ttgagggtttatttgatctacggaaaatagccagggctacatcaggattcgttggtgctgatgtggcggctctggttgacaaggctggtaatcttgctatgaagagaataattgatgaaaggaaacgtgaattatctcaagatctcacgagtgagcatgctgaagactggtggagggaaccttggtcggttgaagaaataaacaagcttgccatcaaaatgtccgatttcgaggaagcagctaataaggtgcaaccttcattaagaagagaaggttctctttcattcctaaatgtaaatgggacgacgtttgaaggcttgatcctttaagaaaagaagttgaacgttacattggtagacgtattaaatatcctgaagattatgaagagcttggggtggatctcgagacaggatttttgctttatggacctcctgggtgt

SEQ ID NO: 45317 - DNA, 51 bp, Glycine max
  Clone ID: LIB3093-002-Q1-K1-C11
tccacgcgtccgaaaaaaaaaataaaataaaaatataatacttaaagaata

SEQ ID NO: 45318 - DNA, 442 bp, Glycine max
  Clone ID: LIB3093-002-Q1-K1-C12
cccacgcgtccgaaaaaaactatgcaagcttctctcatccgaaccggctccgtgccggtccagagcacggttctccccggttcaccgcgagtctcactcacgcgccaagcctccttctccggcgacaagagccacgcgcattctcccaggttttcaatccattcttcccactccaacaaccgcagatcctcgtcggagcgcgacgacgagaatttcggcgttcgccgggatctgaaccgaaccggatcgccctcgttttcaccaaatcgtaccctcacgaaaaaagactttcctcttccacgcccgctccggccaacctcgaaatccgcccgaagatctaccattcggagaaggagaccgtggattccaccgcggtgcgcctattaccggcggaaacggcggcgagaggatgaaaatcggcgcgtactacgaggaaatgttg

SEQ ID NO: 45319 - DNA, 223 bp, Glycine max
  Clone ID: LIB3093-002-Q1-K1-C3
acgcatccattgaataatgaaaagccagaaaaaactggactcaaattcaaaatcacgagcttgagaggtgaaaggaccaattgattatgtccctgaaatgtttgatgagctgaaggatcaagtaacagtggagcagattttgcaggttgtttttcttgatccagagcgtaactgtcctgctttggaaaaactgaagcttcagctggttgaggctgatgctgct

SEQ ID NO: 45320 - DNA, 332 bp, Glycine max
  Clone ID: LIB3093-002-Q1-K1-C4
gtacgcgtgcgttctggcgtgcggtccctactgtacgtccgatccactactcacatcctaataacaggcatgtgcgtttcacaagcatacagcatggccgatggatctatcactagacattccgactacgaatagaccatgaggacactggcaattacggcaaaaagcactttcatatttaccaaaacggcttcattgttggaaaatcgactaatgtgacctacctaaaaccgccaagaagtggaccaatccgttttccactcaaaccctgggccaaatttatggggccggattaaacaacaaccattccaagttctataatgcatgtaatt

SEQ ID NO: 45321 - DNA, 462 bp, Glycine max
  Clone ID: LIB3093-002-Q1-K1-C5
cccacgcgtccgttcaccggtaccctttggctgtaaggccattctatacaatgcgttgctgcgacaatcctgcatacagcaactcgtttgatgtctttattcgaggtgaggagataatttcaggagctcagcgtgttcatgtgccagaatttttggaacaacgtgcagcagcttgtggcatcgatgtcaaaacaatatctacatacattgattctttcagatatggggcaccaccacatggtggctttggagtaaggttggagcgtgtagtgatgctcttctggggcctgaataacattcggaaaacatcactcttttctcgggacccacttaagattgcgccatgataaaatcatattccaacaggtaattgctcaaatatttagcctttacaatttttttatggtgaatcctgaaaacattatttaaattcctagccttggagcttatacccaccgtgat

SEQ ID NO: 45322 - DNA, 67 bp, Glycine max
  Clone ID: LIB3093-002-Q1-K1-C6
acctacacgtacgcgtgcgccgacgcgtgcggacacgactctcgttgagtacactacgcataaccca

SEQ ID NO: 45323 - DNA, 460 bp, Glycine max
  Clone ID: LIB3093-002-Q1-K1-C8
ccgggctacgacctcacgcgtccgtgcttgcttgagttgacaactttaagtctgtcaatttccgagctgcttggttgggtgcaatggcaagtgaacagttggctagagagtactaggtctgaatcacattggcagaggatgatggatacacgaaagatggaacagtcgattactgtggaaatacagctaatagaacggaaactggaacctggaaagcatgcccctatatcttaggaaacgaatggtgcgagagattggcttattatgggatgagcacaaacctggtgctttatttcaagaaccggctaaatcagcagtgctactgcttacaagaatgtctctaattggagtggaacttgctatatcacaccattgattggggcatattaggctgattcctaccttggcagatattggacaattgcttgtttttcaataatttatgctattggaatgacac

SEQ ID NO: 45324 - DNA, 454 bp, Glycine max
  unsure (1)..(454): unsure at all n locations
  Clone ID: LIB3093-002-Q1-K1-C9
agaagtgttggatgcatttctatttctaactaattattgtgcttattattattgttgagaaagagaagaatggcaaagttaataaaattctttgagttgaacacaggggccaagattccttctgttgggttaggcacttggcaagctgagcctggtgttgtagccaaagctgtcaccacagccattctggttggatacaggcatattgattgtgctcaagcgtataacaatcaagcagagattggttctgctcttaagaagctntttgatgatggtgtggtgaagcgtgaggacttatggatcaccttcaaactctggtgttcagatcatgcttcagaagatgtgcccaaagcattggataaaacattgcacgatttgcaacttgattaccttgacctctatctgatccactggccagtgcgcatgaaaagcggatcagttggattcaagaagg

SEQ ID NO: 45325 - DNA, 226 bp, Glycine max
  Clone ID: LIB3093-002-Q1-K1-D1
acgattacacaaagcacgggccttgtaaattttcttgatgaacaatgggacgtacattgttcaggatagccaaatatagagaattgtgaacccttttgggatactattggatcagataacacgctgcacaagtcaggcaatttcatgtgcactatccacgaagctcgtgtaattagctattacggcttctgaagttgcatcgtgctggttgaatgctccatattaa

SEQ ID NO: 45326 - DNA, 441 bp, Glycine max
  Clone ID: LIB3093-002-Q1-K1-D10
cggacgcgtgggagcgagtccacagcgtggaggagttcgagtcggcgctcgaatccgccaaagacaggcttgtggtggtggaatacgctgccagcgacagcgaggagagcagccagatataccctttcatggtggagctgagccgcagctgcaacgacgtggagttcatcctggtgatgggcgacgagtcggagaagacgaaggagctcctgaagcgggagaaggtggagaatgtgcctcacttcagcttctacaagagcaaggagaagatacacgaagaggaagggattggtcccgacatgctggtaggggatgggctatactacggggacaaccactctggtgtggtgcaactgcacaacgtggaggacgtgcagaagctcatagaggaccacaagctggatcacaagctcatcgtgctcgatgtgggtctcaaacatt

SEQ ID NO: 45327 - DNA, 453 bp, Glycine max
  Clone ID: LIB3093-002-Q1-K1-D11
tgtcatcatccgcagctgctgttattcgcaccgcaaacaaacagtgagccatggccgtcggagagaacaagcgcatctccaaagggaaaaagggtggcaagaagaaggcagctgatccctttgccaagaaggattggtatgacattaaggccccttctctttttcaagtgaaaaatgttggcaaaaccctcgtctctcgtacgcagggtaccaagattgcttctgaaggacttaaacatagagtgtttgaggtctccttggctgatcttcaaggggatgaggatcatgcattcaagaagattacgttgagagctgaagatgtgcaagggaaagaatgtcctgaacaatttctggggaatggatttcacaactgacaagcttgagtcattggtgcgaaaatggcaaactctaattgaagcccatgtggatgtgaagacaactgattactacaca

SEQ ID NO: 45328 - DNA, 425 bp, Glycine max
  unsure (1)..(425): unsure at all n locations
  Clone ID: LIB3093-002-Q1-K1-D12
gaaatcattcattgattaccatatttccttttctctcttcttccttccttccttccttccttcgacaaatgttgcactctcactctcaccatcaccaccttctcttctccagtctccctcttcgtctctcactcaccaccacccatcacaactcttctttaccatctcttcattttctccacagacccatcatcaccaccaccaccacaacaactactgtttcagccattcctnctactgctgcatggcttgcaaagctcacaacacangactttgcccactttgaactcccttcttcccatcttttcacagatgacccttctaccattcaagttgcttgcaagtgtcttctcactggtgccatcactggcttcttctttcgctctgtccagcgccgtgcaaagcgtgccaaagaattgaaattt

SEQ ID NO: 45329 - DNA, 171 bp, Glycine max
  unsure (1)..(171): unsure at all n locations
  Clone ID: LIB3093-002-Q1-K1-D2
acgcgtcgccgtacgacagcatacatgcggatgctccgtcggcgtggccacccaagttcgtgagtgccgggaccaacaaggagaaggaagaagatttactcgccattaanggctcaaagctgtctaacagacccaaaaatagacctaaattcattcaacgaaccttcaatc

SEQ ID NO: 45330 - DNA, 197 bp, Glycine max
  Clone ID: LIB3093-002-Q1-K1-D3
acgctttctccgacaacagggcagacaacgtgattcgctcttatcttcaaatcaacgacagaagcgacggacgataataggagtgagagaagatggcgttcgcgttcatgaagctgctcaacaggatgcttgcgaagaatgaaatgatgatcctgatggatggtctcgatgctgcaggtatgacaaccatctggtac

SEQ ID NO: 45331 - DNA, 341 bp, Glycine max
  Clone ID: LIB3093-002-Q1-K1-D4
acgcgatcagaaatgttatcagaaacattggccatccctgcactactccttgtaatactcattgtgatgctatcctctgtcttgttccatcttcaagatgaaagaacaaatccaccaggtcctaaacccctcccaattattggtaaccttcacatgctggggaaactcccacatcggtcccttaaagccctttaccaaacattatgtacccataatgctcataaaagttgggacatgtcccaaccgctgtagtttacatccctgaaactgcagagctattcctcaaaacccatgacactatcgttgctagcaggccaaaaactctagcttcagaatacatg

SEQ ID NO: 45332 - DNA, 326 bp, Glycine max
  Clone ID: LIB3093-002-Q1-K1-D6
tggaacaaacgatgctcccgcactacatgaggccgatattggtcttgcaatgggtgtccaaggtacagaagttgctaaagagagctctgatatcattattttggatgacaattttgcttcagttgtgaaggttgtcaaatgggggcggtctgtatatccaaatattagaaaattatccaagtttaacttaacattaattataaccacaattggtataaatggtagtggttcatttaacaacggtgaccttccactaaatacagtacaagttctttgggttaatcttattatggatactcttggagcattaaccttggcaactgaac

SEQ ID NO: 45333 - DNA, 386 bp, Glycine max
  unsure (1)..(386): unsure at all n locations
  Clone ID: LIB3093-002-Q1-K1-D7
tcgcggacgcctgggcggacgcgtgggtaaacagtgacgatgaaagcaatgacagcagcgacaacgtttgatgtctctgccgcttgcttccgtgcccctccttcttgttcaccgaatccatgccacaccagttgttcagctataaactgcctgaatccttacatgggacgacggataaccgttgctggtacacctaagtttcaagcttccgagggaagcatctctgcacgggaatctggaggctgttagagtcccaacttcagtgcctgtgcgtgtagcatacgaacttcttctagctggtcatcgatatttggatgtaaggactccagacgagttcaatgctggacacgctcctggcgcaattaacatnacctatatgttcagag

SEQ ID NO: 45334 - DNA, 265 bp, Glycine max
  Clone ID: LIB3093-002-Q1-K1-D8
tcggatactttgaatgatcacactggggagttaaataggctttcaggggtgaagcctgctaacgttgaagatatgtttggatcgctcgatccatcaatttcgtctaaataccatggaatctcacttgatgttgcatgacctcagttacaggctgcaaccggaatccaaatgcgccataatgggaaccagcagctaggatggtattcattcagccattccactttgaatgtgactggatcgcgggccttcatgcttgaacaatctg

SEQ ID NO: 45335 - DNA, 373 bp, Glycine max
  Clone ID: LIB3093-002-Q1-K1-D9
cccacgcgttcgcgcttacgctgcaaactctgataaaatctctctagactacgcgctgttcaaggaaaaccctgtcgtggatgattcgggtaatggtttaaaatacaccaacttgttcgacgctcaaatcgacgccgtttttgctgccatgtcagcagtcaaatacgacgacgttaagattgcagtttcggaaactggttggccttctgctgaggactctaatgagattggagccagccccgacaatgcggcgtcgtataacggaaacttggttaagcgcatcttgagtgggagtgggacacccttgaagctcaatgagtcactcgacgttctcctctatgcgcttttcaatgagaaccagaaaacgggtccc

SEQ ID NO: 45336 - DNA, 229 bp, Glycine max
  Clone ID: LIB3093-002-Q1-K1-E1
acgggcgaagaaaatcacgctgaagagttcggacggcgaggctttcgaggtggaggaggccgtggcgctggagtcgcatacgataaagcacatgatcgaggacgactgcgccgacagcggcatccctctgccgaacgtgacgagcaagatcctggctaacgttatcgagtactgcatgaacaccgtcgaggcccccaatcccgaagacatgccctacgaggacgatctc

SEQ ID NO: 45337 - DNA, 443 bp, Glycine max
  unsure (1)..(443): unsure at all n locations
  Clone ID: LIB3093-002-Q1-K1-E10
caattgtcgtgaatgtgattataatatagttattttatttgcaattcaaagatagtaaaatctgtttataatatataaactatatatttattaatagtgtaaaaaattatattaccttttaattataaatttattataattagtaagtttgttgaatttactattaatgatttttggaataatatttttgagtctttttgttttaaatattgatcgactttgttgactnattaattcttttgaaaaattaattagctatctttagtagtactaatatttttctttccgcaaatttgaatcccatttaatacatgtgggttaataacttttaatggagggtgaatgtaaatttttggtgctagttgtgcgtagaaattaaattaattaagtaattaatttattaataatttttttaattggggttcaggaaaaatagggtgaaa

SEQ ID NO: 45338 - DNA, 383 bp, Glycine max
  Clone ID: LIB3093-002-Q1-K1-E11
tgctctgctattaccctgtttcctgtggcacaaatttccatctagctctcctccgaattagggggtgttctggagaaatgtatgcagagactggtcttctcttcccatatttgaacaacatctctcacggccttcatcagctcgaggagtactgcataacccagaagtgcaatgctgcaatggatgaccttgttcagtcttctgtcatgtcacagtatgattgggcagcagatggagatctgttcaaagctcctgaacctattattgaagagccaatcatggatatggatcccatgacagccaccatcttcatgatatcttgtagggaagatgtctactgacagggactaaaatccactgatattgatattcttcaaaatgat

SEQ ID NO: 45339 - DNA, 303 bp, Glycine max
  Clone ID: LIB3093-002-Q1-K1-E12
tgaaaattcagcatacaccgattgggaacaagatcagattctcttatcgtggctccaatcgacgctttcaattttcatcctatctcgaattatcagatgtgttcattcatatcagctttaggagcaaatccatgagtactttcaaaagcaaacacgtgcgaaagctaggattctttgaacagaactcagaactacaatgcttgagtagaaaacaatgcgtgagtttcttctatgcattaaattcatagtcgatgtgcttggatcgtgtggaattcttgttctttcgcgtgaacaccttgacgc

SEQ ID NO: 45340 - DNA, 413 bp, Glycine max
  Clone ID: LIB3093-002-Q1-K1-E2
acgcggacgcgtgggtcagaattctctaaaagagatctttttctgctctttgaagaaagaaggggctttgcttgattttagagatgtctctgctctcagatctcatcaaccttaacctctccgataccaccgaaaaaggtatcccaaaagtccatatgatccgtggatcccgaattgaccctaagaaccaaacaaggacttttccaagaccaagtagccacccttcatagcttccccagtggaactattaagggtccaacacaagtcaagctcctggtgaatacagtgaagcgaatttatacccacaagccattttcaaggatccattcccaaggggtaacaatatcctggatatctgagaagcctacactcctgattgaaaacctattcccacttacaagaggcccgcttct

SEQ ID NO: 45341 - DNA, 353 bp, Glycine max
  Clone ID: LIB3093-002-Q1-K1-E3
acgctcctgctcgatcccaattccactagggattcaattccgatgcgattccgagcttgttagagccacgacaacgtttcgtttgccagattctttcgtaaaaaaaaataatcttcctttgcccaacaggtaagttggaaaaaaatggaccatgacaagactgggtgcccaacctcctcttaaaggtctatattgggcattaaccactgtggattttttggaagttcaaataccatgaatatgtggtctaaatgccaccaagacatgttgcttaaacaagaccatgccaagcttggagcatccttcattgggaatattattaatgggtcttcaagccgcacttaaaaggaacc

SEQ ID NO: 45342 - DNA, 412 bp, Glycine max
  Clone ID: LIB3093-002-Q1-K1-E4
acgcccacgcgtccgcttatagtcgtcctactagtgatagtttatgttgtattggcatttgttggccatgggcctgcgctaccatcttgtttttaagtgaaggattggcaagtgaattctatgtgtgctttcttgtcttcttcagcttgcagaggtcacttctttattatctgccattggtatgcagacttccatttcttcaacttaatttctgggttggccacttttgtgctaataaatttcttggaatagattcaagtggtttgggtcggatttttcattatgacacttgaagggcaaaaaaaaaattaaaaactattggatcatggtatttattggattctcctaccagcccaaagatttggattgaaccagaaaatggctgagattttgattgaaaaaaccttaaagt

SEQ ID NO: 45343 - DNA, 192 bp, Glycine max
  Clone ID: LIB3093-002-Q1-K1-E5
accggaccggagttccgggctacgacgtacgcgtctgctcactcgtactacaagtcaggagtcagtgacaatgctattcctcgcttagcatggccacggggaccattcacatgacagaggctaccgttcatgagggtggtctcactatggccgacgagcatattggtgagcaccgtgccatgacatgcactg

SEQ ID NO: 45344 - DNA, 427 bp, Glycine max
  Clone ID: LIB3093-002-Q1-K1-E6
acgcccacgcgtacgattccattatctctgagtatttccctacctctcccttcaagatgcacatcttcgtcaagaccctcaccggcaagaccataacccttgacgcgtaaagctttgacaccatcgacaacgtcaaggccaagatccaggacaaggaaggaatccccccggaccagcaacgtctcattatcgccggaaagcaacttgaggacgggcgcactcttgctgactacaacattcagaaggagagtactcttcacctcgtcctccgtctccatagtggcatgcagatcttcgataagacactcaccggcaagaccataaccctagaggttgaaagctccgacaccatcgataacgtcaaggcccagatccaggacaaggatggtattcccccggaccagcaacgtctcatcttcgccggaaa

SEQ ID NO: 45345 - DNA, 446 bp, Glycine max
  Clone ID: LIB3093-002-Q1-K1-E7
cgcgcgtgtatattagcgatgccggatgaagaagtagtggagctcaagttccgtctctacgatggatccgacatcggaccattgcgttacttcactgcctacactatcgtcatgctcaacgaccgcatgtttgcatgactggcccaaatactagaagattataccaacggcagcagatgatataaagctgataagtgctggcaaaatgctggagaaccacaagacagttggccagtgtagagtaccttttggcgagcttcccaaatgggttataaccatgcatgttgaggttcagccatctttgctcaaagcatagacagagaaaaaagttgatgaggtgcccagaaaacatatatgtgcatgtacgatattgtgagaatccgttgtcgtcatcatcatcatgaagagttaagctgctgatctcgccctaggtgtatgctgggata

SEQ ID NO: 45346 - DNA, 434 bp, Glycine max
  Clone ID: LIB3093-002-Q1-K1-E9
tcacgattcatccaaactgaaatggcggcagtagtatcagcatcttctcatctattgtttgttcttcgttcacaaccattatcatcatcaccctctttcatttctcttctcaaacctcttcttgtttcttccccctatgctgtatctacaccccttcggcatatccaagttccaccgcttcgaaaacctctcttctctacttcctcttccccctcccttaccgtttctcaagatagtgaagaattggaagaaaaagagattgcagacgatgatgatgaattggagactccaagaagagattttgaagatacccaattgggtcccacttgctcaccgttggagagaaagaggaaagaaagtgtgaagttggaagttccgagtttgaatgtgaaagaaaggaaggagcttgcgtcttatgctcacagtttggggga

SEQ ID NO: 45347 - DNA, 320 bp, Glycine max
  Clone ID: LIB3093-002-Q1-K1-F1
acgcgttaaagctcatagatacctggaggatgttttggcccacatacaggccatccctttccgaggcttgtgtggcggagttgggaggacagcctaggctaagagcagacactccaatggtcaaggactctggaccgtcaaatcaggtaagttcatcctagatttgctgacgaacgctgagagtaatgctgaagtaaaaggttcggatgtcgatgctatgtacatttgccatgtccaggttaatcaaccccatatgcaaaggcgtccaacctccaaagctcatggagaattcaaccctaacttgtattttcaataccaaa

SEQ ID NO: 45348 - DNA, 409 bp, Glycine max
  unsure (1)..(409): unsure at all n locations
  Clone ID: LIB3093-002-Q1-K1-F10
tgatgatgttgttatttgttggttaaggtggggatgtaaggccattgaaaagggaaattgatgtttggttcagaaaggaagcataattggttcacatggtgttttgtttgaggcaacaatggcatttgatttgtctaataaaggagatgttatgaggttcacttgtcaattgaagaaacatgcatttgttctggtcacgacaaaaattccgtgngagacatgaatatcatcggannaataagcccctagaagagagaataaagatgcttcatattgtacaaccttcatcattaaagttgtaagcattgtcaatggaaattcgtaacacattaaatctttatataccttagtaagttgtaaagagaggtttaaaccagagacttaatgctttaaaagatggaaaccaaga

SEQ ID NO: 45349 - DNA, 306 bp, Glycine max
  unsure (1)..(306): unsure at all n locations
  Clone ID: LIB3093-002-Q1-K1-F11
cggacgcgtgggcttgcgtggggttggattcccaaattcatttcggttcctaattctcaatccgtcttcgattctaattctgattggccacacacgcaaaagggttgaaaatagtgggacttgattcactggaggtgtaaaaggatgctatcaactccacttgctgccgctctagagcaactagtgatatgctcattggtccagactgggcaatcaacatagacttgtgtgatatcattaatatggaccctgngcaagccaaggatgcttttgagatactcaagaagcgtttgggcagtaaaaatc

SEQ ID NO: 45350 - DNA, 273 bp, Glycine max
  unsure (1)..(273): unsure at all n locations
  Clone ID: LIB3093-002-Q1-K1-F12
caaagttgggctacggtcaatttagaattatcactatcgtctcggacgatttgtcctccaaatctacttacttgaaaggggtaccttgaatgcgaaagatggaacagcgtgtttaggcatgcatggttccaagattgattattggactccatgtccatcaactgaactagaagtgactncaaaagggtttgtcaaaacctttttttgcagctgaccacacctcagccctgatgaaaaagctgttaccctaatggtttgcaagcccttaaccct

SEQ ID NO: 45351 - DNA, 433 bp, Glycine max
  unsure (1)..(433): unsure at all n locations
  Clone ID: LIB3093-002-Q1-K1-F2
acgcgcacgcgttcggtaaaataacaataacagaggaagacagacaattacacagttgcaatgggagtagcagctacactctagagaaatggctactctatcaagctgcatcgctacgccgaagaatcccaatacccactgactctcaggttcctcattgacgatggacagatgcttcttgaacatcagctccagagaacactntccaggttcctctttaaagactaaagcaacacgtaacccagcacttggtattccagcaagtggtgaaggttgaagaaccaggtagtgaagtggctttggtggtgggtttggactgggaagactaattgctggagcattgggatggccatatgcaccttaaattagcaagggactaactggagctgacaataaagacttaatgaggaaactttcaaaattcatgtatgat

SEQ ID NO: 45352 - DNA, 391 bp, Glycine max
  Clone ID: LIB3093-002-Q1-K1-F3
ggagaaactgcgaaaatggcatcggagtcaggtcaaagtcccaatccttcttggtttacgggcaaaaggcttcttatgatattttgtctcattaacatgctaaactatgtggatcgaggagctatagccagtaacggtgtcaatggaagtcttgcaacttgcactgactctggaatttgtacaggtggcagtggaattcatggggaatttaacttgaacaattttcaaaatggagtcctggcatctggctttaatggtggaacctctaatggcttcccaatatttggttattttggccaaaggtaccattcatttcggcttaatggtggtggaatggctggttggaccttaacgataactggatgtgggaggtcggtccaattttgggcta

SEQ ID NO: 45353 - DNA, 462 bp, Glycine max
  Clone ID: LIB3093-002-Q1-K1-F4
acggttggttctaaggttagttgtgcttgctgtggctgttgtgaacacagtgcaatggaatggagaaggcacgcgtgtagggttctattcgagcacatgtccacgtgccgagtccattgtcaggtccacagtggaatcccaccttaggtcagaccctactttagctggtccaatacttaggatgcacttccatgattgctttgtgcgaagttgtgacgcttctgttctcataaccggtgctggcactgagagaacagcggggccaaaccttagtttgagaggatttgatgtcattgacgatgctaaggctaagatcgaagctctgtgccctggtgttgtctcttgtgctgatatccttagccttgctgctcgtgattctgtagttctgagtggtggactaagttggcaagtgcccacaagacgcaaagatggaagggtttcaattggatcagaagccttaac

SEQ ID NO: 45354 - DNA, 182 bp, Glycine max
  Clone ID: LIB3093-002-Q1-K1-F5
ccccccttttcgccttgcagcagtgatcgagatgctgggaaagacgaggaaggtggcagcgcgtggcgaatccgtggcggcgaactacgccttcggtccctccgaagatgacgtaatcatcaagcacaggcttctcacgcgcaccaccaccaccaggggcgaccctcccttgaagaaccttc

SEQ ID NO: 45355 - DNA, 454 bp, Glycine max
  Clone ID: LIB3093-002-Q1-K1-F6
aaagcattgaattcaaaaacttaagttcattccttgtgttatgctttcttcctcaggacggagacatgtcgaacacatgcggcaactgcgactgcgctgacaagactagctgcaccaagggaaacagctatggtgttattggagagactgaaaagaagtacctcgagaactggtggcatggatgttccaacagctgagcatgaagggaagtgcaagggcggcactaactggacttgcacggactggaactggggccattaaagaatatgtatgaaaatgtaattgccatgtgtttggcaataccaatatcccaatgatgtaaacctcggatgagataaatgtgtgtgctgttattctactctaaggctgtgtagtcatgcagactgaatcatttcaaggtcctggcttagataatataacacccatggttgaggcattctatggatcattagac

SEQ ID NO: 45356 - DNA, 422 bp, Glycine max
  Clone ID: LIB3093-002-Q1-K1-F7
gatgggatgaaacatcaaacataccacgtcctgagagagtttcacaatggaagatagagcctgctcttgctcctcttgctctgaatcctctaccaatgcccaggcctaaaaggcctcgatctaatgtggttccatcatccccagattcctcggttcttactcgtgaaggtatggataggttgcttttaaatatttgatatttatttgagtctcatctttgcttaacatatgtaattatgtgaagcctgatctgatatcggagattcacagcttctaaaggtagcgtagatcctttgccaacaagtgggtttcaaagggtcttgcaaggtcaagaactttcgaccttgagaggtaatcttgcttgaagccacgaatcttatacggcagataagtactgtgtgtggccacctgccacggatgat

SEQ ID NO: 45357 - DNA, 83 bp, Glycine max
  unsure (1)..(83): unsure at all n locations
  Clone ID: LIB3093-002-Q1-K1-F8
gattatcctaagtctttgggaatagtgctgcaatggcttcaagtcatgaggatgtgaccgtactcntagctactgcaagccca

SEQ ID NO: 45358 - DNA, 437 bp, Glycine max
  unsure (1)..(437): unsure at all n locations
  Clone ID: LIB3093-002-Q1-K1-F9
cccacgcgtacgtttctctctctagaattctcagatttgcggggcgagatgatgcagcagccaggacccggcatggcacctcccaccatgggccagcagccgccgcaacagtaccagcagcctccgccgcagcagcagcaaccctacgtcatgatgccgncgcaggcccaggccccgcaggccatgtgggccccctccgcccagcctccgcctcagcagcagcccgccagcgccgacgaggtccgaaccctctggatcggngatctgcagtactggatggacgagaactatctctatacctgctntgctcacaccggcgaggttacatcggttaaaagaattcgaaacaagcaaactagtcaatctgaaggttatgggtttattgagtttaatagtcgtgctggagctgagagaattcttcaaacatataatggggc

SEQ ID NO: 45359 - DNA, 225 bp, Glycine max
  Clone ID: LIB3093-002-Q1-K1-G1
acggagagggaaaataagcctggaaacgatggaagatgatgacgcagcgattgaggtgaggagcgcatgtgtgtcccagagccagaggtggaggattccagctgctgttgcccaatttgcttgcgatcattccttcaactttactacctcgacaaatgttttcataagttctgcttcaattgcattttacgctggaccaaagtggttgctagcaagcaccgttct

SEQ ID NO: 45360 - DNA, 386 bp, Glycine max
  Clone ID: LIB3093-002-Q1-K1-G11
cccacgcgtccggttttacaaaagaataaaccgagtattcttcattgatgcaattcccaagtcgccgtcaggcaaaatcttgcgcaaggatctaagagcaaagatagcggcaagtgttccaaaatgaaattaaaccaaacccatcatgttatggtgttattatacgatgcccgcataagcaagcttcaacacaaaaggaagaggcgctgttgcttgatcccgctagcttttacgtattttctcttacgtaacaaccgtgtataagttaccagtgtgattttcttacagaactatcttctgtaaagatttcaatctgtcaaggactttcaccttctataatatcaaattatattctttttttataaaattatatttaattgcaaaaa

SEQ ID NO: 45361 - DNA, 419 bp, Glycine max
  Clone ID: LIB3093-002-Q1-K1-G2
aacatctttctctctccgaacagatcacactatggccacctcaagcgccaaatcagtccgtgatttgaccgttaaagatgccaagggaaatgatattaatcttggtgactacaaaggaaaggtccttatcattgtcaatgttgcctcacaatgtggcttgactaattcaaattacactgagctcaatcagttgtatgagaaatacaaacagaaaggtctggaaattctggcatttccatgcaatcagtttggggcacaagaacctggatctaatgaacagataccagaatttggttggactcgcttcaaggcttaatttcccggttttgacaaggttgatgtgaatggtgacaaagctgcttcactgtacaagtatctaaaatcaagcaaaagtggactctttggggatgggatcaaat

SEQ ID NO: 45362 - DNA, 183 bp, Glycine max
  Clone ID: LIB3093-002-Q1-K1-G3
acccacacgtacgcgcgattcacatggtccaccacttccattgcctttcacgacacacagcactttgattttagggtctgacaaacatcgagaagctcaatcgactgcagaaaatgagcttccatctatctatatgtcagactactatcattccctgaacctagagattatatgatcgcaatc

SEQ ID NO: 45363 - DNA, 257 bp, Glycine max
  Clone ID: LIB3093-002-Q1-K1-G5
cgaggctcatgataaaccaatctgcattgcgtcgctaacacatagtccttgcattcgttggtccgatacccattgatgacaactatccactgacgactatgatcatccaatctatctatacgtacacgactactacgtacactgtgcctagatcttatgctactcggattccaatttttctatgacatgcacttgattatgggaatgctcgacacaagcactgatgttggacccacctgtatcaaacgggttgctta

SEQ ID NO: 45364 - DNA, 416 bp, Glycine max
  Clone ID: LIB3093-002-Q1-K1-G6
tccacgcgtccgctctgccgcatccgcgggaagatgcacaagaaggtgtggatcggcgccggagacatcatcctggttggactcagggactaccaggacgacaaggctgacgtcatcctcaagtacatgcccgacgaggccaggctcctcaaggcctacggcgagctccccgataccactcgccttaacgagggcatcggcgccagcttggacgaggaggacgacgccaccgccaacgactacatcgagttcgaggatgaggatattgataaaatctaatccctctctcgccctcaattatcattcatataatatcatcatcatatctggctctagcaatatttcgttatctgcttgtctgcaactctgcgggttggatttcggtttataattgtgcactattatttcaataaccc

SEQ ID NO: 45365 - DNA, 453 bp, Glycine max
  Clone ID: LIB3093-002-Q1-K1-G7
ggatcttggccgacacttctatggcagttcacgttagcctgcatcaagatgggaaggcctgatttggcacaaaaagcagttgattcagcagagaaaaggctttcagcggatagatggcccgaatattatgatacccggaacggaaggtttattgggaagcaatcacggttgatgcagacatggaccattgctggtttcgtgacctcaaagatgcttctagagaatccagaaaaggcatccttgttgttttgggaagaggattttgaacttcttcagaactgtgtctgcaagctaagcaaaagtggtagaaggaagtgttcccgttttgctgcaaggtctcagtttattgtttaatagggaggaacagagagtcattgtttgaactcttgagtaatgtaggtgaactaatttattacaataataactgattgatgccacttttcagaattaatc

SEQ ID NO: 45366 - DNA, 456 bp, Glycine max
  unsure (1)..(456): unsure at all n locations
  Clone ID: LIB3093-002-Q1-K1-G8
caccgggtaaacatgcttaattctgaaggagaacttaaaataagttttggctatggatgcgatagagatagaggtattccttgtgaagttgtcagtggctgcaaaatccttcctggagtatgtagaacaagcagtttctcctgcttgtcaggtgcagccttaagtgcatatgctacattagcaaacacaaacatctgcaatggtaagataggagaagaaatccttccaagttgggactctcctacttcatttcgaaaggtaacctcttcgccaagtctttcaaagctggacatactatcatcctcccccccgaatagtttgccttaccttagctgcagtccttctactgtaagtgatatcctggaatatgactcttgcacattaaaatccatgagtgatccttccagaagtgaccgttntcttaatgctaaggaagttcatgtagcaagaggagct

SEQ ID NO: 45367 - DNA, 451 bp, Glycine max
  unsure (1)..(451): unsure at all n locations
  Clone ID: LIB3093-002-Q1-K1-G9
cccacgcgtccgcatacatatgttctagatactatagagcacctgagctcatatttggcgcagctgaatatacttcagccattgacatctggtctgttggatgtgttttagctgagctgctgcttggacagcctctgttccctggtgagagtggagttgatcaacttgttgagatcatcaaggttctgggcactccaacaagggaagagattaagtgcatgaaccctaattatacagaatttaaattcccacagattaaagcacatccatggcacaagatcttccataagcgcatgcctncaaaggcttgtgatttggtatcaagactactacaatacttccctaacttgcggtgcacaacttttgatgccttgacgcattctttcttcgacgagcttcgtgatccaaatactcgcttgccaaatggccgattcctttcaccactatttaa

SEQ ID NO: 45368 - DNA, 377 bp, Glycine max
  Clone ID: LIB3093-002-Q1-K1-H1
gcggcatctcgtccgacacatctctgacaggggtcttatacctgagtcgaaactggaaggcatgggtcactacaaaaggcacctgattctgcacagaataagtggtcagcaccttaagtgctcgcatgttatgatgacaccatcgaaaagtctattgagtagccattaccagtgatgcaaaccttgacccaaaatatattccctacccttgatatgcatgcttagaattccgaacaggcattcatgctgggataggcagatgcaattctacttctgcagaactgtgtctgccaactttgcaatacttctaaaaggtaatatgccccttgagctgatacgcgctatggtataatttcactgggagcaacagattatga

SEQ ID NO: 45369 - DNA, 459 bp, Glycine max
  unsure (1)..(459): unsure at all n locations
  Clone ID: LIB3093-002-Q1-K1-H10
gacggcacgcgtccggccacgcgtccgcgtgtattcatttggagttttgcttgttgaacttgtcacaggaagacgccggattgagccaaaatttgaactcagggagcgaatcacggcaagatgggctatgaagaggttcattgagggagatgctatctcagtcttggacccaagactggaccagattgctgcaaatactttagcactagaaaagatccttgagctagctttacagtgcttggctccacgtagacaaagtaggccaactatgaagagatgtgctgagatcctttggtccatccgcaaggatatcagagagcagctatccgcttcaaatttccgctcattttccacttcttcccaaagaagcacctcattgaaagagtgagaatngctaaagtgcaacactagcatcaaagaatgttaagttaggacaagccatggccttgggagagaaaa

SEQ ID NO: 45370 - DNA, 433 bp, Glycine max
  Clone ID: LIB3093-002-Q1-K1-H11
aatgaataatgttggtctatagtgcgcacacatgctgatgctgtagattgacgaagaagcagtgggccaaccgcgataatctctacatattaatataatctttctcgtcacctgagagaaatagaaaatgtggagtcgcgcaagaacccttttccttcgcgtcctggaacctcctaatcacaacaacgcttcgctttcccaaacatttacccctggattctccttccacacgctctcgcacttccaggaggccctggtagtggaaaaggtacacaatgtgcaaaaattgttgaaacctttggatttaagcatctgagtgctggagatcttttgagaaaggaagatggttctgatagtgaatatggctcaatgaatatgaataccattagaggaagaaaaattggtccatcaagaatgactggcaaattgattc

SEQ ID NO: 45371 - DNA, 421 bp, Glycine max
  unsure (1)..(421): unsure at all n locations
  Clone ID: LIB3093-002-Q1-K1-H12
cggcagaaaccctagtagtagttttgaaagggaaggaaagatgcagatattcgtgaaaaccctgaccgggaagacaatcacccttgaggtggagtcaagcgacaccattgacaatgtcaaagccaagattcaggacaaagaagggattcctccggatcagcagaggttgatcttcgccgggaaacagctggaggatggccgtaccctcgccgattacaacatccaaaaagagtcaacattgcatcttgttttgaggcttcgtggtggtattattgagccatctttgatggcactggcgaggaaatataaccaggataagatgatctgccgcaagtgctatgcccgtttacacccccgtgctgtgaactgcangaaaaagaagtgtggtcacagcaaccagttgaggccaaagaagaagatc

SEQ ID NO: 45372 - DNA, 220 bp, Glycine max
  Clone ID: LIB3093-002-Q1-K1-H3
acgcccacgcgtgcgaaaaggttcacatcactattgcggttattggccatgttgactctggcaagtgcagtaccactggccacctgatctacaagcttgcaggcattgacacgcgtgttattgagagatctgagaaggaagctgctgagatgaacaagatgactttcaagtatgcctggatgattgataagcttaaggcttaccgtgaaaaaggaatcac

SEQ ID NO: 45373 - DNA, 297 bp, Glycine max
  Clone ID: LIB3093-002-Q1-K1-H4
gtcacgcgtccggtcacgcgtccggagaacaacaagacattcctagccttcaacggactaggtctttttacaacttattcatctgaagtgctcatcttatcccactatttggggcacccatttctctatgggagaagcacccacattgcttgctgaatacgtacacgatagtgctcccaatggccttgaattgaaaaacgtaacttggaaaacaactgctacagttggcgataaggcctatgtcattggtggagctgataatggaactttgtgcattgaagttcaaatttttgaccg

SEQ ID NO: 45374 - DNA, 401 bp, Glycine max
  Clone ID: LIB3093-002-Q1-K1-H5
acgcccacgcgtccgggagattacaaagaggggtattatattggagttgaaaaaggtgaggatggtccacattcgaagaagcctttttatggaccgaataactggcccgcaccagatgttctgcccgggtggagggagaccatggaaaagttccatcaagagacattagaagtggggaaagcagttgcaaagatgatagcccttgcacttgatctggatgctaattattttgatcggccagaaattcttggagagccaattgcaattctgcgtttgctgcactatgaaggtcaagtttcagatccctcgaaaggattatatggagctggagcttataccgactttggtttaattacactgttagcaacagatgatgtcccaagtcttcaaatatgccaaga

SEQ ID NO: 45375 - DNA, 342 bp, Glycine max
  Clone ID: LIB3093-002-Q1-K1-H6
cttttctctccgtgggttgaacttgaagaacctctgaaaatcctttctttctttgatcgagcactctctctctctagatctgatcaaatctccgaacatattccctccaaatatcattttccttaaccaaaccaaaccctaaccctttctttctgtatgaaacctgattcccccccaaaagccttatatttgagaacatttgtaaattctttacgtagtctaaggtagaatttttctgtaacattttaagagcttgaaatcgtgagatgaatcacaacaaccacaatatagcgaggtacccttccagaatggggattggtctcggaggttttaatcccaacc

SEQ ID NO: 45376 - DNA, 184 bp, Glycine max
  Clone ID: LIB3093-002-Q1-K1-H7
acgaaagggatgccttgcgcggcactgctgcaatcaatctcactgataggcttcaccaggttctgtcgtgggcaaccggtgcagttgaaatcttctttacgcgcaacaatgctctttgagccagctgtacattgacatatctgcagaggattgcataccttgatgttggaatctatccatgcac

SEQ ID NO: 45377 - DNA, 182 bp, Glycine max
  Clone ID: LIB3093-002-Q1-K1-H8
cccacgcgtccgcccacgcgtccgtggatttttacgacattcctagctccgacgacctagggcttttgacaactcaccattctggaatgccttttcatcgatctataaggggcgcttatggctttataaaacggccaatcaaaccacaaaccccataagtctggcccaatcctaccttggtt

SEQ ID NO: 45378 - DNA, 447 bp, Glycine max
  unsure (1)..(447): unsure at all n locations
  Clone ID: LIB3093-002-Q1-K1-H9
cgcgttgcgatctattccaattccatgacgacaccaccgtcttcctcctcagcttcgcactcgcgattcgcctattcaaacccttcctcctcctcctacttccccgttccctttcaccttcagcaacccgcaaccactcactacgctgcgccctacgtcgccgccccctccgtgcaaatccccgctcctcccgtcgtcggccccattgctcccgcgccggttcccggcgtgtactccgccgtgccgcaatatcaggcacagcagttatttgagagggatgcgcagataataacgccggaggctcttgagaatgttaaggcagcgattgcgagcagcgacgtggaacacanaactgatgccaaaaagaaagcggttcctcgcaaagctgctggccaagcttgggaagatcctatccttgcggagtggccagaagatgattatcggctc

SEQ ID NO: 45379 - DNA, 362 bp, Glycine max
  Clone ID: LIB3093-003-Q1-K1-A10
gctttttcatttttggtgggtttttttctcgttcttatttgtagcatattttaaggtttggttgaaggggttttagcagctattaatatctgtgttgttccatttggaggaccaacagaacatacaaaggttgttctttttgttcttgttaaaaagatgccaactttgattacatctaggtttcttttgcttgttggagagtcactccacatgagaaggggtttggccacttctaggtctgttttattgcacactagtagtgtccagtgtatgagccaagtggaacctcatcatggttccgtcaccctctctagcataggtttgcaaactgaaactgaacctagaaacagaagccaaacaaa

SEQ ID NO: 45380 - DNA, 424 bp, Glycine max
  Clone ID: LIB3093-003-Q1-K1-A11
cccacgcgtccgcgctgctgccgaaacccttccggaaccctaaggtaagtgagtaatcagtggttgagaatggtggagaaggcgaagggtagaaaggaggaggtggttacacgtgagtacaccattaacctccacaagcgcctccatggctgcacatttaagaagaaagctcctaaagctattaaggagataaggaaatttgcccaaaaggccatggggaccaatgatgtgagggtggatgtgaagttgaacaagtttgtctggagccagggaatcaggagtgttccaaggaggattagagtaagaattgctcgcaagagaaatgatgatgaagatgccaaggaagagctgtactctcttgttaccgttgttgagatccctaaggacgagctcaaagggttaggcactaaggttatcgatgacg

SEQ ID NO: 45381 - DNA, 283 bp, Glycine max
  Clone ID: LIB3093-003-Q1-K1-A12
aaggtgcaacctttccagtctcttgattttgctccatggccaaccaaggatttgatctccctttctacgaaaaaatttggttcaagcgaacatttcaaagagtgatggacaccttcattttagttctcctcctattgcttcttagttaccgaattttctcatccaacaacttcactttcccatggttccttgctttcttatgtgaatcttggttcaccttcacttggattgtgattctcaacgccaagtggagtcctgcagtaaccataacccacccagatcg

SEQ ID NO: 45382 - DNA, 357 bp, Glycine max
  Clone ID: LIB3093-003-Q1-K1-A2
ctcacgcgtgcaggccagccaactttatttgttcactatccacctcttaggtggctcaaaaccaccccatgtcacgttgggccacatggcggacaaatatggtcccgtcttcaccttgcgtctgggtgctcacaaaacgttggttgtgagcaattgggaaatggccaaacagtgctttaccgtcaacgacaaagcgtttgctagccgtcctaaatcagtgtcctttgaattgttgggatacaactattccatgattgggttcatcccttacggttcttattggcgtcacgtgcgcaaaattatcacgctggagcttctctctactcactgcatagacatgctcaagcacgtgatggt

SEQ ID NO: 45383 - DNA, 407 bp, Glycine max
  Clone ID: LIB3093-001-Q1-K1-B3
cccacgcgtccgcccacgcgtccgcccacgcgtccgtcgcattgcacaagcactctctctttgccttggcctttttcaggtttcaacgctccaactatccatggcaaaccgctggctcagacccgaggtgtatccactgttcgctgcggttggtgctgctgttgggatctgtggattccaactggttcgtaatatctgcatcaaccctgaagtcagggtgaacaaggagggaaggaaggcaggagttttggagaactttgctgagggagagaagtatgccgagcacttcctgaggaagtatgtgcgcaacagaactccggagattatgccctgcatcaacagcttcttcgctgacacaagtcgcaactaagatgctttgaataaacaaaggttaatgtgagatatta

SEQ ID NO: 45384 - DNA, 227 bp, Glycine max
  Clone ID: LIB3093-001-Q1-K1-A1
tccctgaaaaaaaaattgaggaaggagagtgttagaaggagagataagaagaagaggagaatgatacctacccagcaagcaggatgtagagaaaaaaaaaaaagattaacaaactgttgatttgatttattttgatctgcttctgctgggtggttgtcaatgtctgcacctatgatcattgaccatatggcgatattgttaccataaactgaatcaacagcaattat

SEQ ID NO: 45385 - DNA, 80 bp, Glycine max
  Clone ID: LIB3093-001-Q1-K1-A10
aagtactaagttgagagtaaaaatagagaagtgaatgtgtcataaccagtatcattatactggggacgactactgattat

SEQ ID NO: 45386 - DNA, 167 bp, Glycine max
  unsure (1)..(167): unsure at all n locations
  Clone ID: LIB3093-001-Q1-K1-A11
aagtcaatagatagttagcaatgtatgatatatgaaatgtgaagttgagcacattgtatgcagagttganaccggcaaactcggcctaactcgtgtcgagcattttctttttccgcgtttgctccattctttcattggtcttctggctcttaattattttctatctc

SEQ ID NO: 45387 - DNA, 137 bp, Glycine max
  Clone ID: LIB3093-001-Q1-K1-A12
cataaatgctatgtataatttaaatctaaatgaaagctccatcaaacaagtatttaatgctcgtgaaaagggcagatagatgtaaagaattgagttaatgcagaacttgttatcgagtttgcgacattcattgattg

SEQ ID NO: 45388 - DNA, 236 bp, Glycine max
  Clone ID: LIB3093-001-Q1-K1-A2
aaaaaaaaaaaaaaataaaaaaaaaaaaaaaatataaataaaaaaaaaaaaaaaaatatataatgaaaaagtaaaattaaattgaggagtaatattaaataatatatttttatataaaattaaatttaaatatatttatataatttttattttacatgaatctatttttttaattattatttaaaaccttcatacattaaataaattaaaaatttgtttaaattatattagtatat

SEQ ID NO: 45389 - DNA, 419 bp, Glycine max
  unsure (1)..(419): unsure at all n locations
  Clone ID: LIB3093-001-Q1-K1-A3
caggtagctgcctcacgatccattcaaagcacccctttgtgccccacttctggatctgcacgtgacagagcccaaaacctgttaaagcctccatcttttgcttccaaggtgtttccttttgtagggaacaacaacaaacgctccaaactcagcctcagaggccttcagatcagtgcaaggaaatcagccccttctgaagtcatccccgtgtcacccgaagatgatccaaagattgaggagcatttgcaacatttacgtggggtgcagccatttggtgagaactctgttggtatgtggtctaagcccacgtttaggcgcaaaacgaagatagtgtgtactattggaccttctaccaatacgagggaaatgatttggaagctggctganngctgcatgaatgttgcctcgttgaatatgtc

SEQ ID NO: 45390 - DNA, 357 bp, Glycine max
  Clone ID: LIB3093-001-Q1-K1-A4
ggaacttaaaagcctagatgattatgttgaaaacatgggagaaaaccaaaaggctatctttgacctagcaactgacagcttgaagagtgcaaagactgctccatttttggagaaattggttcaaaaagatattgaggttctttatttggttgaacctattgatgaggttgccattcagaacctacagacctacaaagaaaagaaatttgttgatatcagcaaggaggatttggaattaggtgatgaggatgaggtcaaagagagggaaaacaagcaagaatacaacctactctgtgattggataaaacaacaacttggtgacaaggtggccaaagttcaaatctcaaatcgcttgag

SEQ ID NO: 45391 - DNA, 382 bp, Glycine max
  Clone ID: LIB3093-001-Q1-K1-A5
tcggtccggaattccgacgctacgccccacgcgtccgcttatggtagtgccgtagtggcactttgtttacttcgaagttggcaatgctacatagattatggttatcattgcaagctagtatgaatacatgtgaaaaaaatcggtggttttgtaattaatgcttatcatataatatggtcattgaggtattagtacgcttacattgcggtattagtccttgattttgtttgatgtaaaatgctagttttccataaaccaaagattgtggaactttcatcacatttacctggggtgcatccatgcttggagaactctaggatgatctcgactaagcccacgtgtaagctcttaatgaatagaagtttgacctattgtacctttt

SEQ ID NO: 45392 - DNA, 305 bp, Glycine max
  Clone ID: LIB3093-001-Q1-K1-A6
atcattttctctcttctctgcttcttcttggtcaaatcttaagagctgaggagaatcaatcgggagaaatatgtctggtatcgctcgtggacgccttgctgaggaacgaaagtcatggcgcaaaaaccatccacacgttcgtatcactacttccttctcttttttctctgcttttatttcatcaatttcatttccccctttcgttacaatcaatgcttggtgctctcaatttttttagggtttcgttgccaagcccgagactctacctgatggcaccgtaaatttgatggtcttgcattgcacta

SEQ ID NO: 45393 - DNA, 277 bp, Glycine max
  Clone ID: LIB3093-001-Q1-K1-A7
actgtggttccattgtatatcagcaaccttaatactgccttctaacaaacagaaaagacattgaacttcttagaaggcagtactgtggttccattgtatatcagcaaccttaatactcatgcttcgatttttgtactatatataagatgtaattatgttagggagatgcacaaaacaaccgaataggtttgtactaaatttctaacgaaatgcatgtaaaattttcagttccattggtttataaaaaaaaaaagagcaaaaaaaaaaaaggaagaac

SEQ ID NO: 45394 - DNA, 122 bp, Glycine max
  unsure (1)..(122): unsure at all n locations
  Clone ID: LIB3093-001-Q1-K1-A8
gcgaccattttcanctctccgtattcgcagaagtttcactttcaanaattaatcggaagnncaacgtgaaatgcatatcaataatcaagatgtgattaattaattagtaananntagcacaa

SEQ ID NO: 45395 - DNA, 297 bp, Glycine max
  Clone ID: LIB3093-001-Q1-K1-A9
caatggttattggtcatgagtgtgctgggatcatagaagaagttggtagtcaggtaaagagtttggtgcctggtgaccgtgtggcaattgagcctgggatcagttgttggcattgcaaccattgcaaacacggtcgatataacttatgcgatgatatgaagttttttgctactccaccagttcatggttccctggctaatcagatagtgcatcctgcagacctatgttttaagctgccagacaacgtgagcctagaggagggagcaatgtgtgaacccttaagtgttggtgttcatg

SEQ ID NO: 45396 - DNA, 441 bp, Glycine max
  unsure (1)..(441): unsure at all n locations
  Clone ID: LIB3093-001-Q1-K1-B1
cgcatgaaaagcggatcagttggattcaagaaggaatatctcgatcaaccggacattcccagcacatggaaagcaatggaggcactctatgactcaggcaaggcaagagccataggagttagcaatttctcttcaaaaaagcttcaagatctcatgaatatagcaagagtgcctcctgctgttaaccaagtggaattgcacccaggatggcagcagccaaagctgcatgcattctgtgaatctaaaggagttcatctgtctggatattctccactgggctcaccaggagttctcaaaagtgacattcttaagaatcctgttgtgatagagattgcagagaaattggggaagacaccggcacaagttgcccttaggtggngactgcanacaggtcatagtgtgctgcctaagagcactaatgagtccagaatcaagggaaac

SEQ ID NO: 45397 - DNA, 440 bp, Glycine max
  Clone ID: LIB3093-001-Q1-K1-B10
gtgatctgcaacaagcaagatctgcgagaaaaacaacaaacaaaacaatggcgagtcggttcgggttatcgtcttcgtcttcctctgcgtccagcatgagagttaccaacacgcccgcgagcgacctcgccctcaccaacctcgccttctgttccccctccgatctccgcaatttcgccgtccctggccacaataacctctacctcgccgacgtcgccgattccttcgtcttatctctctctgctcatgacaccataggcagcggtcagattgcgttgaatgccgttcaacgccggtgtgccaaagtttcttccggtgattccgtacaagtgagccgatttgtgccgcctgaagatttcaacctcgcactgctaactcttgaattggaatttgttaaaaaggggagttagagtgagcagattgatgctgttctactggct

SEQ ID NO: 45398 - DNA, 398 bp, Glycine max
  Clone ID: LIB3093-001-Q1-K1-B11
cccacgcgtccgcccacgcgtccgcccacgcgtccgaacaatattaggagcagagaagatgctgttgaattggtggatcctaccattgcaaagcatgtcaaagaggatgccatgaaggtgttgaaaatcgcaacactgtgcaccgggaaaattccagcttcaagaccctcaatgagaatgttggttcaaatgctggaagaggcagatccatttaccacaaccaaaatgattgtgaccattgatgcttaaataagttgctccaaagaaggacaatttttctctcaactgcagacttttgagttttccactttggtaattaagcagctcataaagtgaggctgagaaggggtgataaatactagtaaatatgaaaacatgccttgatcttgggttcaatt

SEQ ID NO: 45399 - DNA, 362 bp, Glycine max
  unsure (1)..(362): unsure at all n locations
  Clone ID: LIB3093-001-Q1-K1-B12
cccacgcgtccgggagccagttttggtgtcatattatcatacactattaaactcgttcctgtgccggaaacggttaccgttttccgcgttgagaagactcttgaaacgaatgtcactgccactgaccttgttgtgcagtggcagaaagtggcgccaaatactgatgataggcttttcatgaggctgttattgcagcctgtgagttccaaggttgtgaagggaacaataactgttagagcctcggttgtggctttgttcctcggaggggctaatgaggttgtgtcgattntggctaaacaattttcgcttttagggataaaaaaggagaattgcactgaagtgagttggattaattctgttct

SEQ ID NO: 45400 - DNA, 359 bp, Glycine max
  unsure (1)..(359): unsure at all n locations
  Clone ID: LIB3093-001-Q1-K1-B2
gttcgagatagaggaagatgaccttgaagcttcacagctatatcctgattataattacacatgcattgaccaacttcttgatatatttcttgttgatcctccaccccctgcatctgctgctttcgaataattaaagccctttcaagtttgttaaaatgaagtttgtgatcttccaaataccgctgactaaagcataattgtatttatctttgaggataagatttgttagtccaatctaggttttgctatgttctctaaataagattggtatagtatactcatgtaccatataaagaacaagcttgcataagaatttgattgtgtatcttgtgattaagaattacaccgatnaanaaaaa

SEQ ID NO: 45401 - DNA, 455 bp, Glycine max
  Clone ID: LIB3093-001-Q1-K1-B9
cttctgtgaatgagccagtcactgaggttggaggagacagtaacaagaacacaactgacaacggaaaagctgtggatgagttggtcactgaggttggaggagacagttacaaggacacaactgacaacaaaaaagctgcggatgagttggtcgctgaagttggaggagacagtaacaaggacacaactgacaacaaaaaagctgtggatgagttggtcgctgaggttggaggagacagtaacaaggacacaactgatgacaaaaaagctgtggatgagtcggtcaatgaggttggaggagacagtaacaaggacacaactgacaataaaaaagctgtggatgggtcagtcactgaggttggaggagacagtaacaaggacacaactgacaacaaaatgggagtcaaacatgaatagattatgtaaattcttgtgaactggcttgggtggctaatc

SEQ ID NO: 45402 - DNA, 337 bp, Glycine max
  Clone ID: LIB3093-002-Q1-K1-B5
acgcaattatttcacaaaaaatattccaaccagtttacaaatgttctctttatatttttgcttggtgctaaacggtgaacccagaaaagcttgtagggaggaggaaccgagagaaaatgatggatcaaacagaatggtcaggctttaacaccaaatgattccttactccctaacagagtgaactttgtacagtacatgttttttcttttcgtcgttaatactaacctatcacaagccgtttgtctttgtcaaactatgtattttgtaacatttttctttcttatgagctgtatagcagtcaaaatgctttcctcttctaaaaaaaaaaataaaagct

SEQ ID NO: 45403 - DNA, 349 bp, Glycine max
  Clone ID: LIB3093-002-Q1-K1-E8
acgcattcactagatggacctgtgtattgatggacgagctttcatatgtctgctgtgggtcagtgagtttattttaagattttgtttgagaaatatggtattggcttagattagagacaatggatttactggaatgaggctactattaggattgacttacgtgcacttgcttagaatatgatgagatatgatatcgctttacaagcgtttcttcaacttaatttctgggttgtccacttttgtgtagtaatttttggatagattcaagagggggggcgttttaggttccgagtcttgtagggctgcatgcaaagtcatagctattgtattgtgcaccttaatgcaattt

SEQ ID NO: 45404 - DNA, 88 bp, Glycine max
  Clone ID: LIB3093-002-Q1-K1-G12
cggacgcgtgggaaaaaaaaaaaaaaaaaaaattaaaaaattaaaaaaaaaaaaaaaaaaaaaagaaaaaaggaaaaaaataaaaggg

SEQ ID NO: 45405 - DNA, 222 bp, Glycine max
  Clone ID: LIB3093-002-Q1-K1-G4
ctacgacctacgcgtcacgtccacgcgtcagatctgtcgcatcctcagggtgctgcacaacgtgggtggaaagtagcggaaaaatatacgggttgctcgcaaaggctccccgctctacaggatccaagctgacgtacgcatgactcccaactagtaccgcttgcttagggcctactaaaatctatacgctaccactcgactcacaaacgtctgccttggaaa

SEQ ID NO: 45406 - DNA, 219 bp, Glycine max
  unsure (1)..(219): unsure at all n locations
  Clone ID: LIB3093-003-Q1-K1-C4
acgccacgcgtncggaaaggcaaataagtctaagtcaatattggcttggcaaaacaacaagaacttaatgtgggggccttgaaaacatttattaaaatggttttattattccaggccagaaccggccgttattccttttgggaggtattaaccaaaataagggcttgctttttgtggaagcaatcctttgggccgaaaaaagggtgaaaaagtggatgc

SEQ ID NO: 45407 - DNA, 393 bp, Glycine max
  Clone ID: LIB3093-003-Q1-K1-D8
acgtgaaaatatcggtgcttaatgtggggaccttgctccttcttcgggttggaatgagcgaaaactaaattgtgttagctataaatcaggatgcgtggaacttgaagctttgaaagcaaggagcagctacagtcatatttgaatgccagttttgaagttaaaatgttaaattataattcacgagttagataagtgattgtacttggcactagaattttttagtttttctaatcttatattcaatctgtctcggagttaattatgcctatgcttctttgtaccaaatatagcttttggcctttacacaggcttaataataattagaagaaacaacactttccattcaaaaaaaaaaaaataaaaaaaggcggccgttctagatgatccaagctt

SEQ ID NO: 45408 - DNA, 407 bp, Glycine max
  Clone ID: LIB3093-003-Q1-K1-F7
gaaataatgtccgggatcatccacaagattgaggagaccctccatgtgggagggcacaagaaagaggagcacaaaggagaacaccatggtgagcacaaaggtgaacacaaaggagaacaccatggtgagcacaaaggtgaacacaaaggagaacaacaccatggggagcacaaggagggacttgtggataagatcaaggacaagatccatggtgatggccatgacaagggtgagaaaaagaagaagaaggacaagaagaagaaggagcatggacatgaccatcatggtcatagcagcagcagtgacagtgattagatcttatatgttaagcaggtgtacggtacgatggtagtgaggagccagaatccctcttcctgctttatgatataatacaaataaaatagcga

SEQ ID NO: 45409 - DNA, 444 bp, Glycine max
  unsure (1)..(444): unsure at all n locations
  Clone ID: LIB3093-003-Q1-K1-G11
tacatgtgtgggttggtgtttgaggacttgttggagcaaggtggcttgtgggagggtgaggggaataatcagaagaaagctgacattctctacagtgcaattgatggcagcaaagggttctataaatgccctgttgagaagtctgtgagatctttgatgaatgtgcctttcactttggagaaatcagagctggagggtgagtttatcaaggaggctgctaaagagaagatggtgcaactcaagggacatatatcagtgggaggtatgagggcttctatttacaatgccatgcccttggctggggttgagaagttggtggctttcatgaaggattttcacgcaaggcatgcctaaaggagtaacctcaatctgaaacaaatacttgcattgcataaacctaatgcctaaaggattntatgctaataaaatgtttgtctggtattc

SEQ ID NO: 45410 - DNA, 248 bp, Glycine max
  Clone ID: LIB3093-003-Q1-K1-G9
gacccacgcgttcgaagaactgtcgtctgttggcatagtttgtttttacaaagtgcaaaacgagaattggggagggcttaatattatgagatgctgaaattaagagtaatgtaacaaaaactgtacatgacgaagataaacggttttaagaaggggataagaaaaatcaaaataaaagatatcatatctaaactgcttaatgctatatgttgataatatcgttgaatgtatgttcatggcatctgatg

SEQ ID NO: 45411 - DNA, 288 bp, Glycine max
  Clone ID: LIB3093-004-Q1-K1-C2
tagtgaatacgtgatatctcacaaggcctatgcgagggtgggattgctagggaacccgagcgatgtctactacggcaaaacgatagcgttaagcgtcgccaacttcttcgccaccgtcacgctgcgtcccttcgaccagttaatccttcaaccccactctctgcacgatctccttcatttctcatcgagtcctcaattggtcaacaggttgagctcccaaagttactatggaggcgtgcgattgcttatggctatttgcaatgtcttctacgcgtattgcagagagaa

SEQ ID NO: 45412 - DNA, 453 bp, Glycine max
  Clone ID: LIB3093-004-Q1-K1-C5
tacacgcgtccgcagtttcaagtcgcagaaatgaacggtggcgcctttgattttatcgaagaaaacggaaacgggagcgactcggactcgaattctgatgacgcgccggagtactaccagccgatctacgtcgtggaagacagtgggagttaggacgacgagcacgacggtgaattcggacacctcccgaacggttttgccgcgcacggcgtggtggagaacgggatctcgtctttggatctgaacgacattacagagaagagcagcagcgacgaggaggaagaagaggatgaagagaggatcagagagttgttcgagagatcgtcgagagaagacgagaaccggcggaatgcaccacttattgttgagaacgcgaccagagttatggaagcgatgcgcggagtggccttcgccggaatggttccccgatgggctggtccagatgctgatgat

SEQ ID NO: 45413 - DNA, 180 bp, Glycine max
  Clone ID: LIB3093-004-Q1-K1-F1
aaaaaaaaagaaaaaaaaagagaaaaaaaaaaaaaaaaaaaaggaaaagagaaaaaagggcgggcgaacaaaaaggaccaagcttacgtaggcaagcaagcgaagacagggcggccgcaatagaggcaccaagctacaatgcactggccggcgacgtacaagggcggcactggggaaacc

SEQ ID NO: 45414 - DNA, 96 bp, Glycine max
  Clone ID: LIB3093-005-Q1-K1-B6
tgcagatggttgtattcttagttttgttaatggctacctttgtcactactgctctttggtgatttaattctgatacacttcagactttttagataa

SEQ ID NO: 45415 - DNA, 194 bp, Glycine max
  unsure (1)..(194): unsure at all n locations
  Clone ID: LIB3093-005-Q1-K1-C11
acgtacgttgggtcctggatcggcggtaccatttcggtggtggttggttttggataagtacggtttttggtttggatggtaaaagtctgaaatttcaaaattcacaagcagccatagggttgtagtccatttcctttgctgctgangagggatgtctaaaattgcatttaatttataaggaagttttgcaaaaa

SEQ ID NO: 45416 - DNA, 439 bp, Glycine max
  Clone ID: LIB3093-005-Q1-K1-C3
gaccaacccttccgcgaccccttggttccggttcaaatttatggcctaaaaccccttaaccagaactggaagtggctttcaaagcacttgggaagctgatatttgacattggattgatgttggcatatcactgcgatcaatatgtatccaaagggatgaaaattcacaaggatgaaggtctggaatcaatacttcgttgctcccgctgtcataaaggacgtttgctatattattttccttcacaacagggagtcccagatggcaactctttgtcttcttggtgtggatggcatactgaccacggttcactgacaggtctgacttgtggtatgtttacgagagatggtgtagaaattgcttgccctgatagtgcttgctggcctctatattcgaacaagaaataatcaaaattatcaaagttgtctattggaaaagatga

SEQ ID NO: 45417 - DNA, 179 bp, Glycine max
  Clone ID: LIB3093-005-Q1-K1-D12
atgagtgacagcattacactgtactaaaaagcactgggtgatttttttgggttgttaacgttggaaagtagttatacatgggctttttctctctcacagattgcttttatgtgttggatattgagatgaataactataggccttctcgctctccagatatattattttttagtacttta

SEQ ID NO: 45418 - DNA, 431 bp, Glycine max
  Clone ID: LIB3093-005-Q1-K1-D5
taaaatcgtgtcttctactctgtactgagacatggccgaggaagaagaagaagaagaatgggagctcagcgataagcagaaagtggaaatcgcgaaatggttcctactcaattctcctcccggagaaatccaatacgttgccaaagatgtgaaatccattctcaacaacgacgatttgtacaaggaagccgcttccgaggcttttctcttttacaacaaatcgcacttgatttcccttccaatgtccaaccgaagcggagacgtactggttacttcttttggtgagcttgagggtaatgcatttcttgaacctaggactgcgcaagtagcaattgttgatcatgttaaacaagcatgtacagaggtgagacctgccacagacgaagaacttccatctccatatatcgaagaatttcgatgcaatctggatg

SEQ ID NO: 45419 - DNA, 338 bp, Glycine max
  Clone ID: LIB3093-005-Q1-K1-H11
taagagtagtgtgaataataatattgggaaagagaatgagagttccaatgttggggcttttgatgtaaataggcttcagaagcttaaaggaaaaaaagggaatgggaacgggaagaagaaagatgctcttgttgttgctgctgccaagggagagcccaaaaaggtggataagccaaacagggtttggggatcaaccggcgccgcaaaccaaactggactttactgatcacgtggatggagatggggatagaagcgctgactttttggctaaggagcaaggagagagtatgatggataaagaagagattcttagcagtgatagtgaagttgaaaatgat

SEQ ID NO: 45420 - DNA, 250 bp, Glycine max
  Clone ID: LIB3093-005-Q1-K1-H5
gacggacgagcagaagaccataactgtgacacggcacaagagagtgactgtctttctgggtgtcatcatgctttctatcgcagaggagttcatcatctttaacgacgaagtcaaataacaatgctaactaattgtcctacatatgatggccatttcaaatcatcagctacgtatcatcatattctgtggaatctctacttggctctcgcaaggagtcatcgagggacacccaccaccacaggctctttat

SEQ ID NO: 45421 - DNA, 438 bp, Glycine max
  Clone ID: LIB3093-006-Q1-K1-A2
tatgaagcccccttcgtcatttctgcaagccatggaagagtatgtcaaagatgctccccagggaccaatagttcgaaaggatcaggctattgagaacaaagaagttttggctattgaatacaaaaagacaacagaagtggaagaggaatgtccaccctcaccctcaccccctccacctccaccttctgaacctgtgaaagtggaagcaccaccagtacaaccacctcctgatctgttggtaattactctttttcttttgtgtttgctctagccctatttttggtataattcagattgttgactagttctactagtaatgatttatatataacaatgctgctttagctgcactaacaaatttctcttctgctggctatactaattagaatttggaggatcctgttccagctgctgcagaggtggaagagaagaatgcat

SEQ ID NO: 45422 - DNA, 434 bp, Glycine max
  unsure (1)..(434): unsure at all n locations
  Clone ID: LIB3093-006-Q1-K1-G4
gggtgatgatcgagagagagcttttgggccgggagattatgaatgggatagcatgtgaaggttctcagaggattgagaggcctgagacatacaaacagtggcaggttaggaatacgagggctggtttcaagaagctccctctgaatgaggaattaatggccaaattgaggactgcgttaaaggaatggtaccacagattttgtcttggatgaagataacaactggttgcttcaaggttggaagggccacattttgtatgcttccacttgttgggtgccagcataatgagatgctactggactgggttcagaactcatactatactgaaggttttggtatccttggtttggctacctctactagcttaaccttcaggtgctgtgatgaagatngcaacaagctttgcacgaagttacttggtaaaactatggcac

SEQ ID NO: 45423 - DNA, 395 bp, Glycine max
  Clone ID: LIB3093-008-Q1-K1-A11
gcgaaaaaagtgtagtgggaaatggcaggtgcggttgcaggaggagggtatggggacgcgaaccggatgagagactacgtgttcaaggtggtgctgataggggactcggcggtggggaagtcgcagatactagctcggtttgcgaggaacgagttcagcttggactccaagtccaccatcggtgttgaatttcagacgaggactttggttatcgatcacaagaccgttaaggctcagatctgggacactgccggccaagaacgtacaacaagcctcagttcaaaaccgttgcctatcttgagatttagagcacgcagacagaagtcagaacaagctgcgatggactaatccgtgaaatggctgcatgggcaatctatgcaaatggttcatacttg

SEQ ID NO: 45424 - DNA, 280 bp, Glycine max
  Clone ID: LIB3093-008-Q1-K1-B5
cacaggtacactctaaccggttattcaactcttcatccaattcaatgcaatgctgaggaaggaaactcaccactagcttcttcaaccaccatcaacaatgaggtattattcccaattcaaacacttatcccatttcctcaaaaccctaacctgactaccccaaaaccctaccttagattctgcacgtatctcacagaaccttccaccgtgttcattctacgcgcgtgactactgcagcaatatctgcgcaatgctgtctcaagaatccgaaaaagctacc

SEQ ID NO: 45425 - DNA, 328 bp, Glycine max
  Clone ID: LIB3093-008-Q1-K1-D7
ttcatctgaatttccattctcagataaccaattcatactcagaatggtgccatctccaatgtgcacatacactaaacactgacaaaactatgtgaatacttggtttaatcaaccatcccaaaagaccagaatacagttatctcaacagattaagactgtcaatattatccacaagcctactgctggatctctcacgcctattgctcatggccaaactctgaaatacaacatgaaagtcatagcccgtaaaggattttcactggaagaattgactgctacaaaaattcccaagaaacttgctccaactattgggatttctgatgatcac

SEQ ID NO: 45426 - DNA, 337 bp, Glycine max
  unsure (1)..(337): unsure at all n locations
  Clone ID: LIB3093-008-Q1-K1-F9
tattgcatctgcaccaccaaaaaaattaataaaacaggtaccgagttttttaaaactaagttaattaattttagtaatatctccataaaattaaaataacttaagtaataattgtatttaataacaattcataattcatactccggtccacttctaactaaattagacaacccaacagaagtagatttttttaaataaaaaaatattaatagtgtacccaatttatccttgaatgatgtaaagacattaaaatctaaaaccattatccatcactgtcaaaaaaaaaaaaanaaaanaaaaaaaaaaaaaaaaaaaaaaaaaaaaaaaaaaagggcgg

SEQ ID NO: 45427 - DNA, 91 bp, Glycine max
  Clone ID: LIB3093-008-Q1-K1-H10
gcgcgcagagcacatgtccgtgttattgtaaggatttaggatcgtctatggtcctcaaaaaaagggaaaaggtttaattaaaaagggagcc

SEQ ID NO: 45428 - DNA, 447 bp, Glycine max
  Clone ID: LIB3093-009-Q1-K1-C12
acggtggttttgacactcatgtcttataaagaggcagaaaattctcaaggagacagttataagagcaccaagtatccacaatgaattgggaaaatgtagaactgccccagttaaggctgaattgaatcctatactgttgatgttgagagacaccaagccctatacaactggtgtgcgagttggtaaaggttttcaagcagaagttcttgactggtcaggcccgataaaaagtgatgaagatgcccttcctgaaccattggaaattagtccttcagaattttataaattgctgggagaaaatacgagaaatcctactaaacttagttccattggtaattgggttaaatgtcaggagattatagatagagccaatggaactatatgtggaaagtggcgcagggctcctctttttgaagttcaaactgatgcctgggagtgcctttgtgc

SEQ ID NO: 45429 - DNA, 371 bp, Glycine max
  unsure (1)..(371): unsure at all n locations
  Clone ID: LIB3093-009-Q1-K1-E6
cccacgcttcctcccactcttccgaaaggattgattgaaggaagagcggtgggtgagtgacggaggatgcatgtctactacggctacgtcttcngcgtcgtgggaggaactgacgctgaaagtgaaatggatcggcaacgagtacaccgtcagagtctgcgccgacgacaccgtgggcgaactcaagcgccgaatctgcgagctaaccaacgtcttaccccttcggcataagctcttgtaccccaaactcggttccaaactcaacgacgactctctcttcctctcccaactccccctaaactcctntctcaagatgaccatgatcngtactacggaagaggacttgctcgtggatcccgtggagtcccctg

SEQ ID NO: 45430 - DNA, 341 bp, Glycine max
  Clone ID: LIB3093-010-Q1-K1-A2
aagaccaaaaactgatacgtttcgtacagtttttaatatcagttcactttaagaatacatctatctctgcttctgcaagagaaacaattggaagggttgcttctggtgctgttgctaagaaaatccttaaagaattttctggaactgagattctggcctatgtctctcaagttcataagattgttcttccagaggacctgattgatcatgacactctgactcttgatcagattgagagtaacattgttcgatgtccagacccggagtatgcagagaagatgatatctgcaattgatgctgtgcgagtgagaggtgattctggtggtggtgttgtgacatgc

SEQ ID NO: 45431 - DNA, 338 bp, Glycine max
  Clone ID: LIB3093-010-Q1-K1-H2
gttttattgaaaatactactatcttatctttcaagcaggattcccaaatagttcgaaccaacaccgatgcaaaatcctatggataaaaaatacacctattcaaggaccaaataacagaatttcaacatcaggccaggctttcccacaatgtgtctttgatcactgggacatgatgtcttcttacccatttgagactggatcacaatctgcacaacttgtaaccgacatccgcaatatgaatggcttgaaagaacagatgactcctctctacgagtttgaacacaagctttaaattgtttgaactatttaacttacttttgaacttaaccgaatttatt

SEQ ID NO: 45432 - DNA, 381 bp, Glycine max
  unsure (1)..(381): unsure at all n locations
  Clone ID: LIB3093-011-Q1-K1-B8
gcttacaataagaaattggaggggaagaattcagaggaagacgagtctgacaagtcaaagtgtgaagtcaatgacgatgaggaagatgaggaggaggaggatgatgatgacgacgagtgaagatggtgatacaagatgaagcgtaggaggatgtgggaaaagaaaattgttttgcatagtagttgttgggtttagaatttcataggatggttcccaacccacatccctttatgataattagtttctgaatttttattttgtcctcccttactagggttagattagcgcacaatcgtaattagggttcagtatcatgatcatgtacttaaaagtcaatgctatgatacgtttcaattctattctcgaagaanaaaannnaaa

SEQ ID NO: 45433 - DNA, 221 bp, Glycine max
  Clone ID: LIB3093-011-Q1-K1-E10
acgcggacgcgtgggcggacgcgtgttcggacgcgtgggttgtggcctactttattgcgaatgtgtactgaactgaggtatgtcgtgatgtaagctgcaataagttaattgtctgtagctttattgtatccccttcatggggttctgataattacatccttttagtagtgttgtggatttggcatagacttgttcaagtaaataatggcatggcttgcgaa

SEQ ID NO: 45434 - DNA, 350 bp, Glycine max
  Clone ID: LIB3093-011-Q1-K1-G2
acgcgtcgcccgtcattgttcgaatggggaacaacaacaacaatccttcttcttcttctacttcttcttgacaaccagtttgagttcaactcacccttgtgcttttcttcttctctctctgtttagtgttttagtctttacctttcgcacacaaaaacacatatacacacttgtctctctctagaaatcacgcaattatcatataccccgatttttctttcactttctttccatttatcacccaccaaactaccaacttaatgtttctttttgctaagagagaagcacaaacaaactgtgctcttgagagttgagacataagaaaagaccatttgggaaattcaacaatc

SEQ ID NO: 45435 - DNA, 155 bp, Glycine max
  Clone ID: LIB3093-012-Q1-K1-G2
ggtaaatggtgttggatagaagatatgcagcatgcacaaacacgcaaatattaatagagaaaggcttgttgtatgggaatttggcacaccattccggaaaccttatttgccaaaagaaaaaggttgtgattaatatatatattttaatccaaaaa

SEQ ID NO: 45436 - DNA, 137 bp, Glycine max
  unsure (1)..(137): unsure at all n locations
  Clone ID: LIB3093-013-Q1-K1-F6
ttttgttgttattcattctctatgaatggacaatgggtggaaatggatccttatttgtgcggtanagatggatgtgaatgatgtattgtatgactctcaaaaaaaaaaaaaaaaaaaaaaataattttgaatgataa

SEQ ID NO: 45437 - DNA, 318 bp, Glycine max
  Clone ID: LIB3093-013-Q1-K1-H10
gatacattgttcatgaacggacttatatactctataagaagtctttcaacgagcaggtcatacaaatgaggattataaacacacaagtagtgctcttgacacatgactcagaaaactcagctctgaagctgccattgaataaccaattaaaccaccacttaacgttgaacacacccacctcttaattgatggaaaaatcattcatgctactactggcaaaactataccaacgttgtaccccattacacgataagtgatttctcatgctgcttaaggtgaccattaatatgtcgatcgatcaatatcatcttctcgcaa

SEQ ID NO: 45438 - DNA, 488 bp, Glycine max
  unsure (1)..(488): unsure at all n locations
  Clone ID: LIB3093-013-Q1-K1-H2
gtcaggctgggcctggattccagttatttggttctgatgcggatgtgtctgatgcgttggtgcatctgcagcatgggcctatgaattgctcctcgtcactaaatggttatgcattggctcccaatactgctttgggatctggtagtatcttgcaagagtcctctgctggtcggtcagatgctgatttgaatggtggtttggtggacaatcctttggcctttggtggagatgatccctcacttcagatttttctccccacaagaccagcagattcatccatgcacaatgaattgagagatcaagcaagtgtggctaatggtgtctgcactgangaggattggatatccctcagtcttggaggtgggactggtgttaacaatggtgatgctttcactcaaaaagggttgaattctagacatcaaatcccaaccgagaaggtgccacgaatactttggatgatactgcttctttaactcctgggatgaatg

SEQ ID NO: 45439 - DNA, 358 bp, Glycine max
  Clone ID: LIB3093-013-Q1-K2-D10
taagaaaatgtggcttgtgcatttcttttccccatttctgaacggccatgggcatggctccagccttctgtgggaacccagttcggcggtgactcatacccactgggccccgccgagtttgctgcctcaaatcaatgcgatgaagacgatgcagggaaaagtggtgtgctccacgaacgacaagacggtggcagtggaggtggtgcggctggcccctcacccaaagtacaagaggcgcgtgaggaagaagaagaagtaccaggcccacgatcccgataaccaattcaatgtcggcgacatcgtccagcttcagaataccaggcccatcatcaagaccaatgcctttcttgcactcccc

SEQ ID NO: 45440 - DNA, 341 bp, Glycine max
  Clone ID: LIB3093-013-Q1-K2-E1
tacagggagacgtctcagtgcaatgattttccttggccctacatattaccaaagactgaagcatatggttgatgataagatccattctcgtggaaggggtccagtgcagatcctcacaaggcaacctgctgagggacgctcacgagatggaggtctccgatttggagagatggaacgagattgcatgatagctcatggagctgctcactttttaaaggaaaggttgtttgatcaaagtgatgcttacagggtccatgtatgtgagcgttgtgggttgatagctattgcaaatctcaaaaagaattcttttgagtgcagggggtgcaagaacaaaactgaca

SEQ ID NO: 45441 - DNA, 271 bp, Glycine max
  Clone ID: LIB3093-013-Q1-K2-H10
gtatacaatgtgcatgaaatgactgatggactgtataaaaggtagatgagcgagaactcatacaaatgaggattataaacacacaaaaagtgaacttgacacatgactaagaagactaagaactgatgctacaatggaagaaccaagcaaaccaccacttaaagttgaacacacacacctcttaattgacggaaaatttgttgatgctgctactggcaaaactttaccaacgttggaccccaagacaggagatgtgatttctcatgttgct

SEQ ID NO: 45442 - DNA, 413 bp, Glycine max
  unsure (1)..(413): unsure at all n locations
  Clone ID: LIB3093-014-Q1-K1-A4
gaaaggctagttaaggccagtttttttgttcacgagacctatggtgcctataggagcattgaagacttctgggatggtgaactctgagcaatatgcatctttgagacgttgaaaaatacattgctcctagagcaaatttattctgccttatacccactagttgtagtgattcaagtgagattttgagaagtgttactattgatggtaacaccgaataagtagccaagagttatttttcatttaatgattgtatcttttattcaatataataaagtgagttgagtgaanaaaaaaaaaaaaaaaaaaaaaaaaaaaaaaaaaaaaaaaaaaaaaaaaaaaaaaaaaaaaaaaaaaaaacaaataaaaaacaaaaaaaaaannnaggggcggccgttttaaaggatccaagttta

SEQ ID NO: 45443 - DNA, 376 bp, Glycine max
  Clone ID: LIB3093-014-Q1-K1-A9
ataagggttgaaataaaactgcattatcttaattcttaggtagtaataagctacattgaaacaacaaatctagttgacgacacaacagcagcaaataaaagaatacacatgtagatactaattatgacaaatcatgaatcataaaaaatgtccaacaagatgaagatccatgtcaatttttaagtgggttcattctctccctcagatagtagagtttggcccttctcactctcttcttgtcaagcacctttatctcctttatgttaggtgaatacagagggaataaagatttaattccaaccccagccacctgcctcctaattttgaatgtagtattgagtccaacattacgccttgcaataacaatgccttttat

SEQ ID NO: 45444 - DNA, 201 bp, Glycine max
  Clone ID: LIB3093-014-Q1-K1-C10
atggtaactaatggcagatccaagtgtggattggtaccataccattgctatcaaacaatgcttgagctaaatagttcattcaacttagaacagaatgatggaatcaacgattcccttaaataaaaaaaaaaaatttatgcgattcaaactctgataaatttgctgatgatactcaatctggaactccaaaaacaccttatt

SEQ ID NO: 45445 - DNA, 269 bp, Glycine max
  Clone ID: LIB3093-014-Q1-K1-C8
tttagcggggaaaaaaaagggacacaaaaaaaaaaaaaaaaaaaaaaaaaaataaaaaaaaaaaacggggcgggcgacttaaaaagaaaaactgtaagtaccctggcatggaagaaagaaaagatgaagtcgtgaacgcaaatgcaagagaatgagcggaagaatacaaaagaggaactggaaaaacagctgagagacagaactgaaagggaggaaaacataaagcgcgaactacagatggcgtaatagagaaaaggcccggaccaaga

SEQ ID NO: 45446 - DNA, 345 bp, Glycine max
  Clone ID: LIB3093-014-Q1-K1-C9
ctctctatgttctatcataccttttctttgtggatacaaatgttcgcgaagaccatcacagatatgatcatcataatttaggtaaaaagctctggcaccatacaataaaccatggcaaagacccatgacatgaaaagaattaccaagaatcagcaattgtgaatcttaacggctagcattttaaatacactcagaccctcgacaactacctcatacagaacgattaaacgcttgaacttatgattcgcgtactacatagcatgcagatcatggtaaacactgtcactgcgacaaacattactctatatttccaaagctcagagactatagacaacctcaaggaca

SEQ ID NO: 45447 - DNA, 432 bp, Glycine max
  Clone ID: LIB3093-014-Q1-K1-D8
taaaattctagggttccgaaatggacgctgacggaaagatcaagaagggcgccggcggaagaaagggcggcggcccaaagaagaagccggtttcaaggtccgtcaaagccggtctccaattccccgtcggaagaattggccgttatttgaagaaaggaaggtacgctcagcgtgtcggtaccggtgctcccgtatacttggctgcagttctcgaatacctagctgccgaggtgcttgagttggctgggaatgcaccacgtgacaacaagaagaacaggattattccaagacacgtgcttttggcagtgaggaacgatgaggagttggggaaattgcttgctggagtgacaattgcacatggtggcgtgcttccaaacattaaccctgttttgttgcctaagaagtctgagagggcttcaaggaacctaaatc

SEQ ID NO: 45448 - DNA, 311 bp, Glycine max
  unsure (1)..(311): unsure at all n locations
  Clone ID: LIB3093-014-Q1-K2-A9
aaaggggggaaataaaactgcattgtgttaattcttangtaataataagctacattgaaacaacaaatctagttgacgacacaacagcagcaaataaaagaatacacatgtagatactaattatgacaaatcatgaatcataaaaaatgtccaacaagatgaagatccatgtcaatttttaagtgggttcattctctccctcaaatagtaaagtttggcccttctcactctctttttgtcaagcacctttatctcctttatgttaggtgaatacagagggaataaaaatttaattccaaccccagccacct

SEQ ID NO: 45449 - DNA, 265 bp, Glycine max
  Clone ID: LIB3093-014-Q1-K2-D10
gggcgacccacgcgtccgcgttcttctacagcaatttttaaattttttgaagaaagagaaaaaacaggggattgcacatgtgaaagcgtggctgcgcactcaactgacgttgctgaaactcctacaattgcagcaacagctgcggaggctgcaagatgtacccagacttgatctacaccgagtcaaccaccaccgacaccttggtcatgggaatggtaccaattaacgctcaattcgagagtgctgaaatgggtgttcccgccta

SEQ ID NO: 45450 - DNA, 380 bp, Glycine max
  unsure (1)..(380): unsure at all n locations
  Clone ID: LIB3093-014-Q1-K2-D8
taaaattctagggttccgaaatggacgctgacggaaagatcaagaagggcgccggcggaagaaagggcggcggcccaaagaagaagccggtttcaaggtccgtcaaagccggtctccaattccccgtcggaagaattggccgttatttgaagaaaggaaggtacgctcagcgtgtcggtaccggtgctcccgtatacttggctgcagttctcgaatacctanctgccgaggtgcttgagttggctgggaatgcagcacgtgacaacaagaagaacaggattattccaagacacgtgcttttggcagtgaggaacgatgaggagttggggaaattgcttgctggagtgacaattgcacatggtggcgtgcttccaaacatt

SEQ ID NO: 45451 - DNA, 460 bp, Glycine max
  Clone ID: LIB3093-015-Q1-K1-E6
tattagtattattatcactagctacctgctatcaaagcatcacaaatggcttctacagacaagcctggcggcgaccctgaatacagaacatcttcaactccagctcctgctggtgttgattactttaaatttgatgtcatcctaaggtttctattgtttgcagcatcactggtagctgttgtggtgatcgtcactgctaatcaaacagaggttattcgtgttccacagcctgtgccatggccagccaagttcagatactcaccagcctttgtttattttgtagctgcattgtccgttactggcctctacagtatcattacaacacttgcatcactctttgccagtaacaagccagccctcaaaaccaagttgctcctctactttatcttatgggatgcggtaattaatccaataaatcattctttttcaccatgctattcatcttctcttctcaaactaa

SEQ ID NO: 45452 - DNA, 364 bp, Glycine max
  Clone ID: LIB3093-015-Q1-K1-F2
taaagaaagaaagttccgagttcataaaaaattaaaaaaaataaaaagaaaaaaaaataaaaagagaaaaaaagaaaaaataataaaaaaagtaaaaaaaataaaaaaaaaaaaggacataaaaaagcgccaagtggtcgtcataaggagaaagttcggtgaacttgctgagggctaggcctgaggtgtcttattgagggctacgctagaattatctaatgaccaggaccttggatatgaaaattatttaagagccaatgatggtccttgttgaggactttttgtctgcagggacaaattccacagcggaggccttctctaatatggctgaatcttattaattatgtgcacttcgatttgaatg

SEQ ID NO: 45453 - DNA, 393 bp, Glycine max
  unsure (1)..(393): unsure at all n locations
  Clone ID: LIB3093-015-Q1-K2-A4
gaaccaacacaaagannggaaggaagtggtttgttttcnncngcggnnngananaagagcggctttgttggcaggagagatgtgagcacacaaaataataagacaacatacataacgttttctcaaagaggttattttattttattttttttatcataagacggcagtttgcctgcactgatcagttcttagagcatgaattcagcatccccgcagtttgttttctcaagaaagatgaatgtgtacgatccgatccaccaaattagtatgtggggagaacgcttcaaaagtaatggaaatttaagtgcaaccatgcctttaattgatgagacagacatgaactttgataatcagtcataagatgcttttaatggtatactgggagaacctaat

SEQ ID NO: 45454 - DNA, 398 bp, Glycine max
  unsure (1)..(398): unsure at all n locations
  Clone ID: LIB3093-015-Q1-K2-E6
tattagtattattatcactagctacctgctatcaaagcatcacaaatggcttctacagacaagcctggcggcgaccctgaatacagaacatcttcaactccagctcctgctggtgttgattactttaaatttgatgtcatcctaaggtttctattgtttgcagcatcactggtagctgttgtggtgatcgtcactgctaatcaaacagaggttattcgtgttccacagcctgtgccatggccagccaagttcagatactcaccagcctttgtttattttgtagctgcattgtccgttactggcctctacagtatcattacaacacttgcatcactctttgccagtaacaagccagccctcaaaaccaagntgctcctctactttatcttatgggatgc

SEQ ID NO: 45455 - DNA, 337 bp, Glycine max
  Clone ID: LIB3093-015-Q1-K2-F2
taaagaaagaaagttccgagttcaaatatataataaaaaaaaaaaaaaaaaaaaaaaaaaaaaaaaaaaaaaaaaaaaagagggggaaaaaaaaaaaaaaaaaaaaaaaaaaaaaaaaaaaaaaaacaacaaattggagtgtcattaaaagggagaaaaatagaatttcctatgatatcaaataaaaaaaaaataaaaagaggggaacaaaaatttaattaaattgggggggccttataaaaaagaaaactttgaaaacccggcggataacaaaaaaaaacctccctaaccgatactcccattataaaaaacagccaaatggcaaaaaacccccccc

SEQ ID NO: 45456 - DNA, 351 bp, Glycine max
  unsure (1)..(351): unsure at all n locations
  Clone ID: LIB3093-015-Q1-K2-H5
cggcgcgacgccacgcgtccggcctacttattttgagaaatgcgccatgggtgttttcagcacgcaaanancaacggaggggacaatctgacggctaggggggcactcctcganataggaaagggtgtccgtagaactagtccaaccgggaagataattttcgtgagaaacccgatcaaaaattttattcagggaatcaagcttggtactaatgcgctccgtctgagctgagacaggaatatgggactcaagaagaaagatacatccctattcagggcccacaaatgtgaacctaaggcagagactcctaagacaagtactttcaaaagaaagacttcctttcaaaaacag

SEQ ID NO: 45457 - DNA, 317 bp, Glycine max
  Clone ID: LIB3093-016-Q1-K1-B10
tatacaattttccccttctttatacaatcccttaatcccttcttaatactgtcttttttaaaaatcttgagtcccttcacaactttccttaaactcttacccctactctctctaacttacctaaaccctataatactccttcccctcctcttcctacaccctactccctcttcataacctctcacttttctactaccaatccctcatatccactccatttccctctttactctactatcctctttctcttcacctacctattcttcatctctcaatccctcattcttcccattttccccaccatctttctccttact

SEQ ID NO: 45458 - DNA, 223 bp, Glycine max
  Clone ID: LIB3093-016-Q1-K1-D12
gctggttcctctgctgatatctgctggagctgttgccaaatcaactgcggaaaggatctcccatttctaggttatgcagttaaataaaaataaaaacccaagtagttgggtcggttatataattcaggtcccagaaactaatgtgtgtattcctgtgtgattctctttaaactacaactctgtcaaacaagtctattgctgaatgaagttatttttgtttaca

SEQ ID NO: 45459 - DNA, 335 bp, Glycine max
  Clone ID: LIB3093-016-Q1-K1-E5
cccacgcgtccgtaccaatatgaacagaatctcctctcgacacctttgctttgctgcagctcgcaactgcaacttcccacaaatataaatatatattacttcatggtcacacatagttaattttattaattactactaggtagctggtttttaataggtagtaggtaggtgtaatcgttgtcttcctgcagatatggaagaagcgggtttaggagattgttgttcctctaatacgactattacgaggataatgcagaagcgaaagcagcttcaccaacaacaagagaaggcatacagaaggaataaggataaggaattgggcaaggtggttgccg

SEQ ID NO: 45460 - DNA, 305 bp, Glycine max
  Clone ID: LIB3093-016-Q1-K2-D3
gatcctgaaacatctgaccatagggacgccttgatcgcttctgtcccgagctattaggagccttatattaaagtgctcgagggtcttaagcctggactaaaggtaaaattgcttagatgagctatttggtatagggaaaaatgtcttcaaactattattgtgtactttgaacgctgaatctcttggttctttgcgaccctgatcttaattttgcatctttaggagggacacaaagctaatgcagggcggccgatctaaacgatccacgcttacttacgtgtgcatggataaggatacctcttcta

SEQ ID NO: 45461 - DNA, 400 bp, Glycine max
  Clone ID: LIB3093-016-Q1-K2-E5
cccacgcgtccgtaccaatatgaacttaatctcctctcgacacctttgctttgctgcagctcgcaactgcaacttcccacaaatataaatatatattacttcatggtcacacatagttaattttattaattactactaggtagctggtttttaataggtagtaggtaggtgtaatcgttgtcttcctgcagatatggaagaagcgggtttaggagattgttgttcctctaatacgactattacgaggaaaagcgagaagcgaaagcagcagcaccaacaacaagagaagccatacagaggaataaggatgaggaagtggggcaagtgggtggcggagattagagaacccaacaagaggtcgaggatctggttgggttcttacgccacccccgttggcggc

SEQ ID NO: 45462 - DNA, 223 bp, Glycine max
  Clone ID: LIB3093-016-Q1-K2-E9
gctggttcctctgctgatatctgctggagctgttgccaaatcaactgcttaaaggatctcccatttctaggttatgcagttaaataaaaataaaaacccaagtagttgggtcggttatataattcaggtcccagaaactaatgtgtgtattcctgtgtgattctctttaaactacaactctgtcaaacaagtctattgctgaatgaagttatttttgtttaca

SEQ ID NO: 45463 - DNA, 427 bp, Glycine max
  Clone ID: LIB3093-017-Q1-K1-A2
tacctcttttgttgaggatgatttttccctgtttattctgataaagaatgaggtgatgataagtttatttaaagctcttgatgattattctgttgataatagaggtgatgtaggttcttgggttcgtgaggctgcattggatggcctagaaaaatgtacatacatgctctgtaagatagacaagtcagtttgtttgtctggaagatcagatggaaatgaaattgaacctattgcatatccttcgattgatagcatgcttaagaacaaccgagagctttttttattcaatgaaaatcttgctaccaatttagttggaggaatttgtaagcaagctgtggagaagatggataaactgagagaagcagcagcaaatgttctctgcagaattttgtacaaccagatgattcatattccatatatacctttc

SEQ ID NO: 45464 - DNA, 437 bp, Glycine max
  Clone ID: LIB3093-017-Q1-K1-E12
taaaaacaccaaattacatagaatttttaggcgtaaccaaagtacgtaccaaaccatggcattgacaagtcaattgagaaaccttcttgcagctctagaggctgaggaagcagcccaaaaatccaaaggtaaagtgaacacatacaccaaccatggcgatgggtttcagaacatcactggcactaagaccaacagtggtgcatattctggtgatggtaacactcatcacgccaccaacaactacggtggtggtcctgctataaataatagtggcaatttccagggacatggcaatggaggctttattggtggtaatttcgatgcctcaacgaggaactactgattaatttatgtatgatcaacttcatgtattaaatatcgtgttctgcgctacgtatactaattaataataaaattagagctgcatgctgcagctc

SEQ ID NO: 45465 - DNA, 379 bp, Glycine max
  Clone ID: LIB3093-017-Q1-K1-F1
ggatggatcaaaagtgggttatttcaaggttaagaaagaggaacgaagaacgaaacgggtttggatacgggttggggttgtggttacggttttggttggggttggggttattattattggggtcgggttttgcgtgacgagatggaaaaagaagagaggggtgaaggaagaggattggggttcgcccggcccgtataagaatctcgaatccgcaagttttagatccattgaaatgagcaatagtaacagtgccaacgaatgacgcatggggtgacgcatgtgctcttagttgacaattggtggggtccatctaatctaatgtttgttttcttgtggtgttgaggtccggagaaaaggtaccggattgtgttggttttct

SEQ ID NO: 45466 - DNA, 176 bp, Glycine max
  Clone ID: LIB3093-017-Q1-K2-F7
ggatggatcatttgtggtttatttcaaggttaagaaagaggagcgaagaacgaaacgggtttgggtacgggttggggttgtggttacggttttggttggggttggggttattattattggggtcgggttttgcgtgacgagatggaaaaagaatagaggtgtgaaggaagaggatt

SEQ ID NO: 45467 - DNA, 61 bp, Glycine max
  Clone ID: LIB3093-018-Q1-K1-A12
cccacgcgtccgtacaatcttcctataaaactaaaacacccgcacctaaacagctgagaac

SEQ ID NO: 45468 - DNA, 426 bp, Glycine max
  Clone ID: LIB3093-018-Q1-K1-A8
taattaattatccctcacaactaccaatggccgaagagaaacacgacaagcaccgtctcttccaccaccacaaggacgaggataataagccagtagaaaccgatactggttacgacaacacatcatattccaagccttctgatgactatgactctggtttcaacaagccatcgtatgagtcttctggcggtggctatgaaagtggttacaacaaaacatcttattctagtgatgagccagcttctggtggtggctatgaaggtgggtacaagaaaacaggttattctggtggcattgatgagacttctggtggctatggcgctggtggtggtggatactctgacgtcactgatggtggctacggcaaaccaagtggtggctatggcgccgctggtggtggtggtgtgtaccctgacactaccactg

SEQ ID NO: 45469 - DNA, 297 bp, Glycine max
  unsure (1)..(297): unsure at all n locations
  Clone ID: LIB3093-018-Q1-K1-B10
cccacgcgtccggatatatctagtttaatgaatggatttgtaagttgagtatgttataagttgctccgttaggtcaccttggaagccagactttttatgcaattggcggatggtattggaactttgtaggttctgcttggtttggtttttccttttattcgattttcatgttgtggccaagaattaggtgcctcgagttaggaggacgatagtctaagcatcttttctcacagggatttttgagtcagtttctgtttatatttattatatgcataattggttnttatgtttgcaaaa

SEQ ID NO: 45470 - DNA, 165 bp, Glycine max
  Clone ID: LIB3093-018-Q1-K1-E12
tataatcacctaattacatataatttttaggcgtaaccaatgtacgtaccaaaccgtggcgttgacatttcaattgtgaaaccttcttgcagctctataggctgatgatgcatcccatatttccaaaggtatatgtaacacttactcctaccatttctatggttt

SEQ ID NO: 45471 - DNA, 122 bp, Glycine max
  Clone ID: LIB3093-018-Q1-K1-E4
ggggggggggcataaatcaccgccttgttagtccgtgttgaaatggcaacttttttttttaatctgcccggggtggatttttttatttatatactatcaataccgtttggtggccgcccaac

SEQ ID NO: 45472 - DNA, 242 bp, Glycine max
  Clone ID: LIB3093-018-Q1-K1-H6
cccacgcgtccgaagctaataagcttacagccagttgacatgttcccacacacccctcatattgagtgtgtttgccttctggagcttcagtaatctgtgatcaattaaaacgttccatttcaaggggattacaagcttaatacaagatgcaactcaaggttgggtcttcaaggtgattgataggaaaactcatacttttatgctgcaaagtgtgcctaatgctttgcctacccaaaactact

SEQ ID NO: 45473 - DNA, 329 bp, Glycine max
  Clone ID: LIB3093-018-Q1-K2-A8
taattatttatcctttacaactaccaatggccgaagagaaacacggcaagcaccgcctggggcaccaccacaaggacgaggataataagccagtagaaaccgatactggttacgacaacacatcatattccaagccttctgatgactatgactctggtttcaacaagccatcgtatgagtcttctggcggtggctatgaaagtggttacaacaaaacatcttattctagtgatgagccagcttctggtggtggctatgaaagtgggtacaagaaaacaggttattctggtggcattgatgagacttctggtggctattgcgctggtggt

SEQ ID NO: 45474 - DNA, 268 bp, Glycine max
  unsure (1)..(268): unsure at all n locations
  Clone ID: LIB3093-018-Q1-K2-E11
aaaccacgnngccccccgcacgtttttcttttcgcgaaacaaacgaagnncaaggggnctggtacaaatggacccggaaccgcgccanaaacaanatatcatgcctaagcacgcgaagccccagctacaactaaactagttaacaggaaaaagcacacgaaatatgggagatcaattaccacacatccacattatacagtcccaaacaacatcagcggtaggagccccatctgagtgtacacaccctacacccgagagagatggacga

SEQ ID NO: 45475 - DNA, 157 bp, Glycine max
  unsure (1)..(157): unsure at all n locations
  Clone ID: LIB3093-018-Q1-K2-E4
ataanttaatttaaaaaaaaaaaaaaaggtatatgtttaggggggcatggaacacggccttttaaaactgtgttgaaaaggcaacttttttttttaaactgccaggggttgaattttttatttatatactatcaatacagttgggtagcagcccaac

SEQ ID NO: 45476 - DNA, 362 bp, Glycine max
  Clone ID: LIB3093-018-Q1-K2-H6
cccacgcgtccgaagctaataagcttacagtttgttgacatgttcccacacacccctcatattgagtgtgtttgccttctggagcttcagtaatctgtgatcaattaaaacgttccatttcaaggggattacaagcttaatacaagatgcaactcaaggttgggtcttcaaggtgattgataggaaaactcatacttttatgctgcaaagtgtgcctaatgctttgcctacccaaaactactgcatcagtgtacaaatacaaaatcattattaatggtggtaacattggcaagcatgcatggatcacattgttgcaaccttgtaaaaagtttctcatacatttccatttatgcagagcccaa

SEQ ID NO: 45477 - DNA, 317 bp, Glycine max
  Clone ID: LIB3093-018-Q1-K2-H9
ggattcttgagtcagacatttttacattagcatgaaacaagacacaatgagatgtgaattagtaaaagatgacagtgaaaaacaaagaaagaaataaaagaaaagaaaagaaaagaaaaggagtggctttgcagtatatcatctgtgacatgcaaggcaataacatttaggttccacccaataagagttttttctacataacctctgaattactggatgggggaccggagaatattcatgttaacaactacaatccatctcaccttgaaatttgggaacctagcattctgcatggtattatgtcggcatttaaatga

SEQ ID NO: 45478 - DNA, 131 bp, Glycine max
  Clone ID: LIB3093-019-Q1-K1-B3
tactgcactttatgggttgtgaagcatgcataaaacagccatggtacacatttctttctacggaaacgattgtaaaacgttcaataaccctcgtaatccttacaagaaggagcggatggactccaagttga

SEQ ID NO: 45479 - DNA, 224 bp, Glycine max
  unsure (1)..(224): unsure at all n locations
  Clone ID: LIB3093-019-Q1-K1-C12
aaaggctgcactctcttttatccctcaaaaaccaaaaccctaatggcagagcgcggaggtggcgaccgttgcagcgaccgttgcggtttcngacgcggctttggtgggcgagggcgcggaggttacaggggccgaggccggctccgtggtccctgtcgcgaggaataggagaaatgggttccagtgaccaaactgtgtctcctttttaaggatggaagaattct

SEQ ID NO: 45480 - DNA, 302 bp, Glycine max
  Clone ID: LIB3093-019-Q1-K1-G2
gcgatctttatataataatataaataagaataaaaaaataaaaaaaaaaaaagaatctatataaagataaagataatatatataaggtgcaaatagtaaatctaggtacccattttattataaactttccttccatttttgttcctctagtaagcctagtatttccggcaatttcaatggcttctttatttccttatgttcaaaaaaacaagattttttagatacagaaaacaaagtaaaattcttgggttttttattccccaattataatactaaattcaaaaaaaggatcaattaactta

SEQ ID NO: 45481 - DNA, 316 bp, Glycine max
  unsure (1)..(316): unsure at all n locations
  Clone ID: LIB3093-019-Q1-K2-A5
cggttgattctcttatggttgaaccccgccgttggccntttttttcccgaaaagccnncngagccgcctttcaaagggcaaaagtctttccatatccaccccccttttttcgtttcctccttgctccgccagaaaagctctcccgccgccttcctttcccatctctccaatcaccatggtgtgggtttcaccatcacccccggtggtttatcaaattcaaattcaaattcaaattgttctctcttgaagtctcaactcaacttcacccacgaatctctttccaacactgttaatgttgatccctccagcaccacct

SEQ ID NO: 45482 - DNA, 161 bp, Glycine max
  Clone ID: LIB3093-019-Q1-K2-D8
cttgttctactttttattatcacttttgcatttatttcagatatttagtatttgcgctacaggtttgttctttacgttaaacagatacaatactactctttatggcggctataaccaatttgaacttttcttccttgtgtaaaaaaaggttttgtgttcgt

SEQ ID NO: 45483 - DNA, 274 bp, Glycine max
  Clone ID: LIB3093-019-Q1-K2-F9
aagcttgccagagggaacttcctttaccccatgaatacagaaaccagaagctaaaattgtgagtccaagtataggagcggtggaggcctttaaacaccaactaagtaggtacagatagcactacccttcaaagacactacatcaacatgcaaagaacaacatcatatctcatagtcaagctaggaaattgtcctctgcatcctctgctgcggtttccaacaaggtcaagagaaccaaagaagagcatatggcgaaagtcatccaattcaattgc

SEQ ID NO: 45484 - DNA, 375 bp, Glycine max
  unsure (1)..(375): unsure at all n locations
  Clone ID: LIB3093-019-Q1-K2-H11
gtgaattccaattcaacgtttcaaaacgcagtcntttcttctcttcctctcggngnctccgctgacttcatgtcggcgataaggggcatccagggccaacctcttgaggttacggtggtttcgtgctccaagttgaaggacacagaatggatttcaaggcaagatccgtacgtttgtgttgagtatggcagcacaaagttccgaaccagaacctgcacagacggcggaaaaaatccggtattccaagagaagttcatcttccccctcattgaaggccttcgggagctcaaatgtcttgtttggaacaacaaaactctcaccttggacgatttttatggaagcgggaagattccatttgcaccaaggttttttttt

SEQ ID NO: 45485 - DNA, 336 bp, Glycine max
  Clone ID: LIB3093-022-Q1-K1-C10
gcaacattggtgtcaagaccggttctcagggtgaaattcgcaagatatgttctgctattaattaattaaggcaaatattaatcagtatccttataatattgattaaggaattaaaaaaatatttaaaattatattaatcatcacttaaggatactggttaataagactaattaattaattgcatacttttctgagaggtgccaagattaaacttctatacacctccttaattaaatctatgccagaaaaactttgctttataagtgaataaagcaataattaaaaatattgtggacaatgatataaaaagaaataaaaatcatttaagatctgtta

SEQ ID NO: 45486 - DNA, 452 bp, Glycine max
  unsure (1)..(452): unsure at all n locations
  Clone ID: LIB3093-022-Q1-K1-C8
taaactttaggtatattcgtcaaaattcaaccaatttttacaatcatcttggtcactaagtgacatctgatgcccataattgtacaatgcacacggggtttgttagggaatggtatgtagtggatctcggttgagttgaacctgcttttggttctttcttgacaaatcacactttatcttttttccctattgttcttgtaatttgtgccttcagaggtcagagaatgttcttatgaattattataactcatcagtcactcatgatgagtgccaagtagcagatgataatgaggggatgatgattattatgtgctactgatgattttcatgttttactgcagcactatgtcggttcaatctggtacgggggaacccactagataaatttatattcactatatctntttgcatggacccattgaatgggtttttattcataatagctcttcatg

SEQ ID NO: 45487 - DNA, 451 bp, Glycine max
  unsure (1)..(451): unsure at all n locations
  Clone ID: LIB3093-022-Q1-K1-D4
cgagtttcaacttgcgagactggttaaatgagtttaggaagaaagagctgaacctaaagcgtattacttatctaagtggatcttacactcacccttttgatgtgccccatggttatatatggagccctcacttagtccctaaaccaaaagactggggacctaagattgatgtggttggattttgtttccttgaccttgcttcaaattatgtaccaccaaaatcgctagtagattggcttgaagagggagaaaaacctatntatgttggatttggtagccttcctttacaacaaccagaggaaatgacgcanattataattcacgctctggaagaaacagggcagagaggtgtcatcaacaaaagctggggtggtcttgggtctttggcaaaacaaaaaaatctgtgtatttattggacaactgtccgcatgattggctgtttccccgatgc

SEQ ID NO: 45488 - DNA, 458 bp, Glycine max
  unsure (1)..(458): unsure at all n locations
  Clone ID: LIB3093-022-Q1-K1-H1
cccacgcgtccgaaacagttactcaaatgtcgcagtctctgcacgtaaagacttcatcaacatttatacgacttcacttttttttttttttgaaggattatacgacttaattcactgagtagctcgagtggtggggtagcaatatattggaccagaacataactcatgaatatacaagcaagttagccggctcaagttcaaaataagaatttttaccatgatactatgggtcaaaacataacaagagaggggagcatctcagctcaagatttcatggatgtaacttccgggaatgtgttgaccgcgtcggtgacgcaataccgcgtcacccacaataacggtgacgtacaattgcgtaactggcgttgacgttacagtccccactcttcccccttatttatattttcacctctatcctgcactaatcctctcctcccccacacacgtntttctctctc

SEQ ID NO: 45489 - DNA, 73 bp, Glycine max
  Clone ID: LIB3093-022-Q1-K1-H5
ttaaaggggccaagcttaacggcgcctgccttcgacgtcataacttttttataggggcacctaaattaaatta

SEQ ID NO: 45490 - DNA, 328 bp, Glycine max
  Clone ID: LIB3093-024-Q1-K1-B1
cggacgcgtgggtccgtccaaggctaaatactggcgagagaccgatagcgatacagtgtttgagagggataggagaagggaaaaggaaagagatagaagtagggacagaacaataggtggcaagagagatagagacccggagaatgaaagggatgataagaatcgggaaaggcgagatgatagatatgggcacaaagacaggagacaagaaaaggaaagagataggagctgggatacagtgtttgagagggataggagaagggaaaaggaaagagattgagtgggaacacaaaaggggaaaggaacgtgaaaggagccgtgagaggta

SEQ ID NO: 45491 - DNA, 171 bp, Glycine max
  Clone ID: LIB3093-024-Q1-K1-B10
cgtctgaatatagcaacttgaccaagtgttaatgtgccggaaaatcttacagaaaaaaataataataatcgagaaactatagagaaacccttatcacagaagggaagtatcatgagaggcaaaacattaataaaaaactttgtatctacatgattccgctaattccgtgcg

SEQ ID NO: 45492 - DNA, 349 bp, Glycine max
  Clone ID: LIB3093-024-Q1-K1-B8
cccacgcgtccgtacttgctatggaagtcagtcaaatggtgacacagggaatgtgggaacgcgactccatgctgcttcaacttcctcatttcacaaaggatctggctaagaaatgccaggagaacccagggaagagtatagaaactgtgtttgatttattagaaatggaggatgaggagaggcaaaaattgttgggcatgtcagatttgcagttgttggatattgcccgattttgtaaccgattccctaatattgatttgtcatatgaggtgctggacagtgacaatgtgcgggctgtggaggttgtcactgtgctggtcactcttgagcgggattttgagggaaagac

SEQ ID NO: 45493 - DNA, 57 bp, Glycine max
  Clone ID: LIB3093-024-Q1-K1-E5
cccacacaatcgaccacacttccaccaaatcttacattataacactatttaaaatat

SEQ ID NO: 45494 - DNA, 341 bp, Glycine max
  Clone ID: LIB3093-024-Q1-K1-G1
cccacgcgtccgcccacgcgtccggttgggaagcagacagatgaaaaatgtttgtcagggtaaagattggttggatgggtgttgaactaaaatcaaaaggagcattcagtttctgggatcacaattcaccagctcttgggaatgttacttggaacttctccaccatcaccccacaaagcaaagcacaaaaacgggaaaaatacatttattcagacccccttgtacataaattctccattttttttctttcaacaatttggttgtttattgtaatatagaaatggttgtttaaaacatgtccccgctagacatgttttgttaatgagactactagctttcaa

SEQ ID NO: 45495 - DNA, 339 bp, Glycine max
  Clone ID: LIB3093-024-Q1-K1-G2
cccacgcgtccgcaccactaggaatggaagtccagggcggatacctgatgatctaaactggggtcacatagattatggctgctggctatagacatagctgagcgtagtgaacttgatagcacacctagcggcgtctatgataggtacatataacagacccgagggaactctgcgctgcaaagcgcgttaacgggtacattgcatgtagtcacactatacatcacataggaagttcacttcactcgtacaccagtttggcacctacactgaatgctcaagtggcagatccaagcatgaacgacgtagaaatgttatgataaccagagctattacgtgtca

SEQ ID NO: 45496 - DNA, 299 bp, Glycine max
  Clone ID: LIB3093-025-Q1-K1-A9
cccacgcgtccgcccacgcgtccggagagatcagggaatgtggaattcggttgaaatgagctagtatttggattggatcttggtgtaaagagaacaaaaaaaaaaaaggagaaaaggagttaggtgttgcagtaagtaaaaagtaagccgaatgatggatgataggatattggagggttaatgagtaggtgtaaggaaaattcttgttccattgctattccagtatgattttttcatatattttgtaatataccaacttctgcttttcaattcaaaggaaacaattgattgacaaataa

SEQ ID NO: 45497 - DNA, 220 bp, Glycine max
  Clone ID: LIB3093-026-Q1-K1-H10
tttaacatacaggatatatataatagtttgcattcattttgttgagtttgttttcttttgggggtcatgcgttcaaatggtacatgcttctttggactaaaaccaaagattgtggcattgctttcaaatcgttttcttttgtgggtcgtgctttcaaatggtacatgttgttgagtgacggtattcattttcattttgcaagattgtggcattgctttta

SEQ ID NO: 45498 - DNA, 62 bp, Glycine max
  Clone ID: LIB3093-026-Q1-K1-H9
ccacccacccttttctttttgtaaattggttctttgaaaggaataatatatattgatttcca

SEQ ID NO: 45499 - DNA, 443 bp, Glycine max
  unsure (1)..(443): unsure at all n locations
  Clone ID: LIB3093-027-Q1-K1-A11
tatgaagtcaatgattttggaaacataatactacaataatatatagggatcaaccacgattgcataaagaagctcaaggtggagctaaaattaagagcaccggaaaaaaaggatcaattcatctgataaaaaaaatgaagttgcgaatggcgagaggggaagtttatctaagggtctcagcaatactggttttggtattaacagcatgtttggttgctttagatactcaaaccaaggttgtgttcttatctattgagaagaaggctacatgcagagacttgaacgctctcaagatcttggtgtatgttacatctgcgtctgctggttataatctgcttctattgtgcaaacactccatttggtctagaaaaaacttcaaagggtcttatctatgcatggcttggatttgnttcttgttggatcagatcgccgtgtacatgaca

SEQ ID NO: 45500 - DNA, 479 bp, Glycine max
  Clone ID: LIB3093-027-Q1-K1-A6
cccacgcgtccgcccacgcgtccgtacaaaagcaatatggaaacggagtcactattgcctaagccaacttatggtggcataaagaggtacttgagaaggaggcgctaccaacgcctcgacggcgatggcggtgccaccgctaccaccggtggaaagaaaacaaagatgattaggtcaagaagaagaagcccacgtaggcaatggaggatcaaggcaattccaaaattgacatggatggttaggtcacccttgaagatgatggcaaagctaaaaaatgcttacacaaacttcatgttgaattccatgagcacggacaacatatttggtaccaaaaggattccaaaggctgatcctcatcaagtgtctaagtattataccggtgatgcgtttgaggccaggctcatttttgagatttcaaaggccttggttgcgtctcatgaactatatcctgtacattaattattggttctacttctttt

SEQ ID NO: 45501 - DNA, 249 bp, Glycine max
  Clone ID: LIB3093-027-Q1-K1-B5
gacatctgtgaaatagtttgagaaaaagaatggtgtagcaaaataagcaaagttcctttcaaccaaagtacaagaagatgaggaacattataggtttggtttctagagctattatacctaagttttgggtggtgggtgtaaatagtggcttggggaagaagacagtgacaatgtactctttacaaataggtggattgtctatatatggaatggtgaaataataaatagtactaatagtttttcttaaaa

SEQ ID NO: 45502 - DNA, 457 bp, Glycine max
  unsure (1)..(457): unsure at all n locations
  Clone ID: LIB3093-027-Q1-K1-C8
aagaagttcagatctgctgcttactccaactgcatccgcaagccatcctgagattccctaggttgtgtgacgacatagcccccgtagtcttgcatctgctatattattctagtctcttcttttcccttttcttgttctcttccttgcccttttgttctctctacctatacagcaagactttgtttctttttgagtcaagatggctggctcagctattggtttcgaaggctacgaaaaaagacttgagatatcattttttgaaaatggtgtgtttgctgaccccggaagattaggcctncgagcattgtccaaagaccaatgggacgagattcttaaaccagcagagtgcactatnngtgcatcactttcaaatganttatgtgactnctatgttctgtcagagtcaagcctgttcgtctatccttataaaattatcatcaaaacttgtgggactacc

SEQ ID NO: 45503 - DNA, 416 bp, Glycine max
  unsure (1)..(416): unsure at all n locations
  Clone ID: LIB3093-027-Q1-K1-F3
tattctcgcaaaacctcaggttcatccgctcccacaacaagaaccgcttgccctacactctctctgttaatcattttgctgattggacttgggaggagttcaaaagacacagactaggcgctgcccaaaattgctctgccactcttaacggcaaccacaagctcactgatgctgttcttcctcccacgaaagactggaggaaagaaggaatagtgagtgatgttaaagatcaaggcagctgcggatcatgctggacattcagcacaactggggctttagaagcagcctatgcacaagcatttgggaagagtatctctctttctgagcagcagctagtggattgtgctggccgtttcaacaactntggctgtaatggtgggttgccatcacaagcctttgagtacatcaaatacaat

SEQ ID NO: 45504 - DNA, 286 bp, Glycine max
  Clone ID: LIB3093-028-Q1-K1-C10
tagtgcaccgtaagggttgtgaagcaggcagagaagagccatggtgcacgtttctttctaccgaaactatgggaaaacgttcaagaagcctcgtcgtccctacgagaaggagcgtttggacgccgagttgaagctggtcggtgagtacgggcttcgctgcaagagggagttatggagggtccagtacgccctgagccgcatccgtaacaacgccagatacctattgacccttgatgagaagaaccctcgccgtatcttcgagggtgaagcccttctccgaaaaatg

SEQ ID NO: 45505 - DNA, 277 bp, Glycine max
  Clone ID: LIB3093-028-Q1-K1-F12
acgcatatgctgaatatgtgtatagaacaagggattacttttcgtggctattgaccataatagggctatgtcacatcaaggcccttatgatatcagactcgcataagttataaggcctagagtggcgccaggttcttgaggattataggctatcacatccagatattacctgacttgatccttcagatgccatacaacatttactcagccggcagaacatgcttcacgctagacctgatatgaacctatctgagtcccatggcatcattggtgcacc

SEQ ID NO: 45506 - DNA, 268 bp, Glycine max
  Clone ID: LIB3093-029-Q1-K1-A8
tccatggattgttgaagagaatagaagcaacgtagcagcaacgggtttaattattctgctcttctttaatatttttctctctagaacactagtaaaatgtgtttactttattgatctagtgccaacgtgtactttctattgataaattgatgattcaagtttattagacatgacgacgaggcagacacagtcaaagggccggcgatctagagggcccaagcttacgtacacttgcatgcgaactgatagctcttctatagggtaacct

SEQ ID NO: 45507 - DNA, 449 bp, Glycine max
  Clone ID: LIB3093-029-Q1-K1-C1
aagcccttctccgaagaatgttccgttacggactcctcgacgagacacagaacaagctggattatgtgttggctctcaccgtcgagaactttctcgaacgccgcctccaaaccctcgtcttcaagtctggcatggccaagtccatccaccacgccagagtcctcatcaggcagaggcacatcagggttgggagacaggtggtgaacatcccatcgttcatggttagggttgattcgcagaagcacattgacttctcactgaccagtcctcttggtggtggtcgtccaggacgcgtgaagcgaaagaaccaaagggctgctgctaagaaggctgctggtggagacggagatgaggaggatgaagattaaattattaatggcttctgatatttatagaccttgtgctcgtttttttatctgtgtcggtagacattttagatttttgaaatg

SEQ ID NO: 45508 - DNA, 279 bp, Glycine max
  Clone ID: LIB3093-029-Q1-K1-C9
ctgcagcattgatcgccactgtcattctccgtcatcgtcgctttcgatgagtactgtgtctgtggtgtgaaagcgaagagttctcagatcattatgcgcatgctcaacactatcgtttatggccatctgctgagcttgttagctgtgacctctatcatgggcattgaatcgatatgggactacatctcttgcaagaaggccgatgttggcatacgctctagggcatccgagcttactgatgcatacatgcatcgtgtgatctctgctatagcgatacct

SEQ ID NO: 45509 - DNA, 193 bp, Glycine max
  unsure (1)..(193): unsure at all n locations
  Clone ID: LIB3093-030-Q1-K1-A9
taacaatttcacaagtgctattttcagtacattttcttacttgtgataatanaaaaatnaacgcccagtttgaacgtgttctcaagtatttcgatgaacatggggatggtaaacttccccactctttccttttgaaccgcctttccatgatgggtggtgagttattgttcaaagacgctcaaaagttgattga

SEQ ID NO: 45510 - DNA, 332 bp, Glycine max
  Clone ID: LIB3093-030-Q1-K1-B7
taaaccctacttctacttccctttgttctcaaaccttatcccttatcctcccaaaaccggacgatgtctacctccggggcttctctcgcactcccaaccctcactcttcgaactcgacaacctctctgttctccccaatgcttctcctcgtccctctccctcacccctaactccaaacccatttccatttccgacattttactcaaaacaacgctgtcagacacaactcccatgtcactgtcaactcacattctttcccatgtctctgtgttggagcaacaggacgacaccttctgcgacggagacagaccacagcttctcccgccacctta

SEQ ID NO: 45511 - DNA, 294 bp, Glycine max
  Clone ID: LIB3093-030-Q1-K1-C3
ggaacacttcagaatattatcgatcattacctaagactaagaaccgctgatagtcatggcaggacaccaagacgcgttggtcctacaaacaccaacagtgttagcgaatcttgagggaaagtggtgtaaacaactatttacgaacggatggtaattgaataaaaatatgggaattaccaacgatgatagacttaacttaacttctcagagcttaatcaattgtatgagaaatgggcgggcggtgtacaggatacaagcttatgtacgcgcgcatacgacggggttcatgttcta

SEQ ID NO: 45512 - DNA, 456 bp, Glycine max
  Clone ID: LIB3093-030-Q1-K1-D2
atcggctcccagaatatttggaatgttacaaactgatctgtgaaagaaaggtcaaacccttggatttggttgcccttttgaaatccctaggagaagaaaaatgcatagtttttacaagatctgtggaatcaacacatcatctctgcaaattgctaaattgttttggtgatctgaaaattggtatcaaggagttttctggtctaaaacatcaacgggtaagaagcaagacagtgggtgaatttcggagaggggagtttcaagtgcttgtatcttctgatgcaatgactcgtggaatggatgttgaaggggtaagaaatgtcattaattatgacatgcccaaatacacaaagacgtatgttcatcgagctggtagaactgcaagagctggccagactgggcgttgcttcacattgatgtcaaaagatgaggttggaggatttaagaagttgatgaaaa

SEQ ID NO: 45513 - DNA, 276 bp, Glycine max
  Clone ID: LIB3093-030-Q1-K1-F3
ccttccggaaaggaccatggatcatcctttctgcatatttatccatccatcttcattgatggtttttaaagttagggtgctcagtaattgttaaaagtgtgtagatgacttaatgtgttgcttcagttgtgttgactgttttttgtaaatcagtgttttcccctccaaagacctaatttgtactattttacaagacatttgtgccataaattgaaatttgtaattatatatgttcccacaaaaataatattgaataccatgttattgatgcattaa

SEQ ID NO: 45514 - DNA, 323 bp, Glycine max
  Clone ID: LIB3093-030-Q1-K1-F9
cgcattgcttcgcctcacaacagcagctgcagcagcaatggctcccaaacgaggtggagagggcgcctgctcttgccgctaagaagaagcctgtgaaggtcacgaatcctttgttcgagaagcgtccgaagcagttcagaatcagaggggcgttgccttctaagagagacttgactaggttcgtgaagtggccatagaatgttcaaattcataggaagaagaggattcttaatcataggttgaaggtttctccaactttgaaccagtttaccaaaactcttgacaaaaacctatcaacaattttgttcaaattactttttaag

SEQ ID NO: 45515 - DNA, 153 bp, Glycine max
  unsure (1)..(153): unsure at all n locations
  Clone ID: LIB3093-030-Q1-K1-H8
acatacacttattcattttctcccttacttntaattttaccactttatcatgctcatcnnaaacccgccgctttttaacaccaaaaatccacaccctttttccccaaaatattctatcacaaacttcataccacacacccatcttattaatta

SEQ ID NO: 45516 - DNA, 71 bp, Glycine max
  Clone ID: LIB3093-031-Q1-K1-A7
taaaggatccaaccttacctacccgtgcatccaacgtaatatctcttttatagggcaacctaaattcaatt

SEQ ID NO: 45517 - DNA, 293 bp, Glycine max
  Clone ID: LIB3093-031-Q1-K1-D7
taaaaacactcaaaagaggagaaaaaaagaagaaaagaatggtaacaatagctgggggtgtgggtctttcaagccctagcagggtatttgctaatgctaagggaatagactcagcacaaaaggcccaggccgtgaggtttccagctctgtcgaggcccattcaaaagtggcctggtttggtgaagacccggcccgttcgggcgacgccggagaagatatcggagaaggtagaggagagcataaagagcgcggaggaggcgtgctcgggaggcggcggtgacgcggaatgcgcg

SEQ ID NO: 45518 - DNA, 240 bp, Glycine max
  Clone ID: LIB3093-031-Q1-K1-F2
cccacgcgtccgggtagtgcagcatggaaccaagcagaggacactggctcgtaaagtctgggcttggcattccttagctgtgaagagaacatgtagttgttgaatgtgtttgtagctcatacttcatgtactgtaccattaggaacaatttttcagcatgagtttatttttatatagcttcaccaaagttttgtcacatacaaatacaatccaattcatgatgattttatattttgagta

SEQ ID NO: 45519 - DNA, 309 bp, Glycine max
  unsure (1)..(309): unsure at all n locations
  Clone ID: LIB3093-031-Q1-K1-F4
cccacgcatncaaccacncgtncgcccacacttccgaagagagtgagagttatagaaatgggggtcgggttttttggtttggggataatgcgcaacgctatggcaatcaatcttctacgccatggcttcaaagtcactgtttggaacagaaccctctccaagtgtgacgaactcgtgcaacatggtgcttcagttggagaaaccccaacaactgtagtcaagaaatgcaagtatacaattgcaatgttatctgatccttctgctgctttatccgttgtgtttgataatgatggtgttcaatgagcatat

SEQ ID NO: 45520 - DNA, 472 bp, Glycine max
  Clone ID: LIB3093-032-Q1-K1-A11
tccacgcgtccgcactttcactggaatcacaatcctgaaacagaaacatcttagcatttagcgatactactagacaacatgaccaccacattggaaagaggtttctcggaagagcaagaagctctggtggtgaagtcatggaatgtcatgaagaagaattctggagagttgggtctcaagtttttcttgaaaatatttgagattgctccatcagctcagaaattgttctcattcttgagagattcaacggttcctttggagcaaaatcccaagctcaagccccatgccgtgtctgtctttgtaatgacctgtgattcagcagttcagctgcggaaggccggaaagtcactgtcagagaatcaaacttgaaaaaattaggtgctacccattttagaaccggcgtagcaaacgagcatttcgaggtgacaaagtttgcacttttggagaccataaaagaagctgtaccagaaat

SEQ ID NO: 45521 - DNA, 267 bp, Glycine max
  Clone ID: LIB3093-032-Q1-K1-D9
tgaaaatgtaattgccatgtgtttggcaatacaaatatccaaataatgtaatcttcgtatgagtagatgtgtgtgctgttatcctacttcaggtctgtgtagtcatgcagtctgaatcatttcaagttcctgtcttagttaatataacagccatggttgtggcattctatggtttattagactaaaataagtgtaaatctccgttcaataatcccttttccacagctaaaaaaaaaaatctaaaaatactactcctaaaaaaaatag

SEQ ID NO: 45522 - DNA, 275 bp, Glycine max
  Clone ID: LIB3093-032-Q1-K1-E1
aaaaagaacagaaataatttatatcttcttaaagaacaaaatgtttgttatgcttaatatcgggaggttggtctgtatttgtattcactccgtccttgattcaagtagttttttctcggcgaaattgcccgaagcctacgctttcttgaatccaattgtggatattatgccagtaatacccttactcttttttcttttagctcttgtttggcaagctgctgtaagttttcgatgatatctgtaatttgagtaatgtcttagaacaaaaagagagt

SEQ ID NO: 45523 - DNA, 369 bp, Glycine max
  Clone ID: LIB3093-032-Q1-K1-H6
tacacttcatgggccattgggtactctgtggctaacctggcccggtcctttatcaggaacgagaggaagattcaccctgtgtctgttctggctaaaggcttttatgggatcgatggagaagtgttcctgagtttgcctgcaatgattggtagaggagggatactgggtgtgaccaatgtgcacttgaatgaagaggagacacagaggcttagagattcggccaagaccattctcgaagtacagactcagttgggtatttgaattttctgcgatgggtacttgctctttttttcctttaattttcttttgaacttcccaccaacatgatgtggtttcgcctaaattattagtagtacttgctactgttag

SEQ ID NO: 45524 - DNA, 224 bp, Glycine max
  Clone ID: LIB3093-033-Q1-K1-E11
acacctcagacatcctatcactcatccctctatatctctcgctcacttaatatacctataacggcggatttatttaccaaccggtacttgctctacatccatattcttctataacgtgtcgtattatatcttcgcttattaatatcaatacttaccatcctgtcttatattctatatccactcacaattccacacatcatactacaccgaatcataaagttcaa

SEQ ID NO: 45525 - DNA, 421 bp, Glycine max
  Clone ID: LIB3093-033-Q1-K1-G9
atgcgcgcgtacgtaacctcaggcttccgctcgggcatattaccatcgtatatttatcgagtattatatgcagcagcatgccaatgtcttatgaatctatggagttttcacttacttgctgatgagaggcacctacacatgtattcatgaacggccatagttttgagaccggtcttactgcgaccttgataaaaagaatttgacaagctacagaaatattgacaacatggatgatcttcgacctggtgccatatatcgtggtgtgagctgaaagcatgtacatggcgtggcccatgtatcagctaccatacaatgtctggagaactgtggtgatgactgttcacatctatgatgtatgcgcctcactaaccttgaattgtattccgtttaagatttgataatgccggttatagctttatat

SEQ ID NO: 45526 - DNA, 317 bp, Glycine max
  Clone ID: LIB3093-035-Q1-K1-B3
caagaagaggttagctactactggagcaaactttgcaagagcatacaccgcggaattcgggagttgcaagttccctgagaacttcactggttgccaagatcttgccaaacaaaagaaagtgccattccttagtgacgatttggagcttgaatgcgaaggaaaggacaaatacaagtgcggttctaatgttttctggaaatggtgaaaggaggcaaccttttatgcccaactgcgaattattcgctttgcgatgtacctaactgcttgaatatataccatatttttctgcattgctttcagttaaaaaataaagattt

SEQ ID NO: 45527 - DNA, 380 bp, Glycine max
  Clone ID: LIB3093-035-Q1-K1-E10
tagagctaaatgacttgaagatacgatacaggctcgatggaccacttatactccatggaggcacatgcacattcaaagcaggacacaagattggaattgttggaaggacaggcagtggaaagtccactcttatcagtgctttatttcgtctagtggagccggcaggtggaaaaattgtagtcgatggcgtagacatatcttctatcggccttcatgatttgaggtcacgttttggtgttatacctcaggatcctaccctttttaatgggactgttaggtataatttggaccctttagctcaacactctgatcacgagatatgggaagttcttgggaagtgtcagttgcgagaaaccgtccaagagaaacaagaaggcctg

SEQ ID NO: 45528 - DNA, 341 bp, Glycine max
  Clone ID: LIB3093-035-Q1-K1-G9
aattctgtaaatatatatgtatatgatattacggtcaataatgatgcactcacaaacttttctacacctttactatttaaggtaaaaaaatctctaataaaccttttattaccacattttactaaattaatatttcactttaaaaaaatcctataattttacataaaaacttatcaatttttaaattcaacttacttaacttctaaaattactatcaaacatactctctttattccaaattacaacttctactttaaaccattaattctcaccattaacacatacttttaaattaatcttcacactttactcatcacaatttctcatttacacttttttat

SEQ ID NO: 45529 - DNA, 301 bp, Glycine max
  unsure (1)..(301): unsure at all n locations
  Clone ID: LIB3093-035-Q1-K1-H12
tacagcttgcttacacaaaaagccacctctgacctctctttcttcctttcagtgcanaagctcccctgcatgaccgtacaatctagtatggttagtaatctacaatgcttcttgtcttaaagccaaagcattaagttaatgtcttttcattagaccaaatgggtaaggcttccaaatggtttcgcggccttctcggtctcaaaagaccagactcgccgtcttccaaagaaaaacgccgctggaccttcgtcaagtcctacagagaaaaggactccacccacatcgtagccggcatcccccg

SEQ ID NO: 45530 - DNA, 234 bp, Glycine max
  Clone ID: LIB3093-035-Q1-K1-H4
tagagtcatcactgatcctcacccttgaccacacacctactgccaaaccgcggatgatggagcacatgaccatgactgccactactgatcaatggatgcagttctatcaacaacctctaatggatagccatggccatgatcatgatcatgatcatgatcatcatgctttggcaccaaacaccacagacggcttctctagttctaccactcctaccatgccttcatcacagagca

SEQ ID NO: 45531 - DNA, 278 bp, Glycine max
  Clone ID: LIB3093-036-Q1-K1-D2
agaccatatgcaacttatatcattgtggatttgaaacccggaaaagtgcattaaaaaaacgagaaaagtaaaatccaaatccaaaacataatgacaagacaggttattatctaaacttcaaaagggtcttcgcaaaattaaaaacaacccattacaattgggcctgttaaatcaatttcctaaattttgggtccagaaccgtttccactgccagcaacaggaccatcctcatccatggctccacccgcatcaccaccaacttcttggtacatctttgc

SEQ ID NO: 45532 - DNA, 167 bp, Glycine max
  Clone ID: LIB3093-036-Q1-K1-D4
cccatttaatttttttttaatttaaaatattttccttattcttctaaataattaagtaaagcctcgttttacattgcacaacgtataatatctccaaatataacacccttattaactcacaaattaacacacaagagaacaccatatttagcacaaatatgaacaca

SEQ ID NO: 45533 - DNA, 207 bp, Glycine max
  Clone ID: LIB3093-036-Q1-K1-E1
taaaaacaaggatatcaggaaatttctggatggtatttatgttagtgagaagggagcaatgctggaatagtagatgttgaaaacaacgagtaccttgatggtttaatttggggaccttttttggtaactcgttcagattggattttacaattttgtgttggcaaactttttcttatgggaatattttttttgaaatcggtacttctt

SEQ ID NO: 45534 - DNA, 337 bp, Glycine max
  Clone ID: LIB3093-036-Q1-K1-F11
tatacacataaatccactgcgtttttgcattaccacactctgtacctcacataaggctacagtcaccataacatctatcaggaccgtcaatcataccactaactgctgataaagaacaaccttgactgctatcaacctaatacaaatcggtctcactctaaccgacgccgacgataaccttcccgatctgtccggaaaccttttcatttgggaatttaacactcgtgacttcgacgttacgcgtcacacctacgcacttgacttcatcgatgtactacctcataaaggaatctatactctgcattacgccatcgaacatgtaaattccacccacttc

SEQ ID NO: 45535 - DNA, 135 bp, Glycine max
  Clone ID: LIB3093-036-Q1-K1-H3
acgtaaaagtcctgacccctaacctactatgacctaacactctgcaacttctcagccatgggcatggcgatcgtttgtcgatgatcacctacatgagtcacattccatgaaccagctcatctcatcccgctatca

SEQ ID NO: 45536 - DNA, 395 bp, Glycine max
  Clone ID: LIB3093-037-Q1-K1-B6
caagcacgattctagtcacaatatatcttttatgatggacaggatacagattttgccacactggaggatgcggttcataagccttctgacaacggtgtgtgaagcaagaattatcaaccaaggttcctgcaagctatgtgacattttagattccaatgcacataaaatttatgtatataaagatggacactgaaatcaaatcaggcatttcatttagtcctttgtactgtatactagtagtatgttgctggccatcatttgttgaaaacttaaaatgttagaaatagtaaaagggtgacaaattgtaataatgtatttatcaaacatttaatcagctcgtttgaattcacgatttgatgtggtatgagatgaactaattaatttttttttctaaa

SEQ ID NO: 45537 - DNA, 413 bp, Glycine max
  Clone ID: LIB3093-037-Q1-K1-G6
ctttcatcatgcatcaataacaacagggcaccttctgcgccatcaattctccaaggcaaagggtttgtcactcaaagagctggggctaaaaacaagcgttggtgccaataaacttcaagttattaaagcagctgcacgcattgatacagaagtagtttctgaaaccacgaagggtggtggcctacgtggaaaattgaataaggtggtgctggcttatagtggtggcttagacacatcagtcattgttccatggctgagagagaattatggttgcgaagtttgttgcttcactgctgatgttggccaaagcataaaagaattggatggtttagaagcaaaagccatagccagtggggcttgtcaattagtggtaaaggactcgaacgaggaatttgttagagagtacatatttc

SEQ ID NO: 45538 - DNA, 333 bp, Glycine max
  Clone ID: LIB3093-037-Q1-K1-H12
attgaagttgaagtcttgcccttctctcttcaactccaaacacaagacatcatcatgcatggctgcctccgtctccactgtcggagctgtcaacagagctcttttgaacctgaatgggtctggacctggggtttcagctcccagttcatccttctttgggagcagcttgaagaaggttattggctcaagggtccccaacacaaagatttcctctggaagcttcaagattgttgctgtagaagagaagaaagagattgaagagacccagcataccgacaaggacagatggaagggtcttgcctatgatatctcagacgaccaacaggacatcac

SEQ ID NO: 45539 - DNA, 357 bp, Glycine max
  Clone ID: LIB3093-038-Q1-K1-F7
aagccccataacattctactagatgaaaacttcaccccaaaggtctctgactttggattggcaaaattatatccaatagataatagcattgtcccaaggacagcagcatgaggaacaattggatatatggctccagaattgttttataataatattgggggaatatcccataaggctgatgtttatagctatggaatgttgttgatggagatggcaagcaagaggaaaaatctaaatccccatgcagagcgttcaagtcaacttttctttcccttacggatttataatcatattggagatgaggaaagatatagaaatggaagatgtcacagatgatggaaaagaaaatgattatag

SEQ ID NO: 45540 - DNA, 233 bp, Glycine max
  Clone ID: LIB3093-038-Q1-K1-G7
agggcaatgagggcatatctctagccagactttaacttaaccccaaatcgtatcagcggagggcgttatggcaataatgctactggctggcaagaatgtctgactaaagattgtatatagccgcttaactgcgcaatctgttttaatatccgtaaggtgcttctgtaaatttgaaactttaataacgttacgacagaaatatactgaatttattttcattgtcaaaagctaac

SEQ ID NO: 45541 - DNA, 316 bp, Glycine max
  Clone ID: LIB3093-039-Q1-K1-B5
taacacacacaaacagagagctatgtacgatcaaattaattaagatgggggaagtgaggaacagacaagtggttctgagggactatggaagtggttttcctaaggaatccgacatgaacatagttgaaggaaccacaatattgaagcttccacaaggttccaatgatgtgcttctaaaaaatctctacctttcctgtgacccttacatgagaatgctcatgaccaaagtggaaggccttgacgtgtttggcacctatacacctggctcttcatttacagtgtatggagtgttcaaagttctagaatctggacaccc

SEQ ID NO: 45542 - DNA, 168 bp, Glycine max
  unsure (1)..(168): unsure at all n locations
  Clone ID: LIB3093-039-Q1-K1-E3
atatgtnttaattatattttttttgaataaattaaactattaataatcgtgaaataaataacaatgcttttacagtatatatatacctatatcaaaactttatatgtcaatcaacctaaattatactttcttccactttataaaactcttcataaatcaaaataaaaa

SEQ ID NO: 45543 - DNA, 289 bp, Glycine max
  Clone ID: LIB3093-039-Q1-K1-F9
aaagacagggccgggcgccgcgccgctctgaggccagcctcctactgagaacagtccctcccttgtgcgggtcgcacggctagccgcaggttcggccacgtcaaatccattctctaaaaaagcagggagcagagctctctcttcgccgacgacgcaaaaaggagctggggaggaaaaagctgctgccttttgcgctggagattcgtgatcaaggcttctcattttcccaggctgcttccccttccgcatgaggagcgtcctgagactaaggaaagagcctggaaaatgg

SEQ ID NO: 45544 - DNA, 451 bp, Glycine max
  Clone ID: LIB3093-040-Q1-K1-A2
ctcaagttcgccgaaggagggaatccatggcttcggacattgaacaatcacgttggaagacaggtgtgggagttcgatggtaagcttggatcgccgcaagatctcctcgagattgagaaagctcgccagaattttcacgataaccgctttacccacaaacacagcgctgatctacttatgcggatgcagttcgcaagagagaacccaacacgtgaagtcttgcccaaagtcggagttaaggatattgaggatgtgacccaagagattgtgacaaaaacattaagaagggccgtaagtttccattcaactctccagtgccatgacggacactggccgggagattatggaggtcccatgtttctgatgcctggcttggtaattactctgtctatcactggggcgttgaatacagtcttaactgaagaacatagaaaggaaatatgccgttacc

SEQ ID NO: 45545 - DNA, 251 bp, Glycine max
  Clone ID: LIB3093-040-Q1-K1-F3
aacaaagatgctcgactcacgaaaaccacaagccttcttaacgttgtctccgccaccaagaggccctcttactactatgccatctaatcatctacttgtacctaacgatctctaaatgacaactccgttaccctacaagcattcactaacatcgggagacaccattacctatataactttctcctcagactcaaagaccccaaatactaggattatatctacacctttgaacgactctactatcctaaaac

SEQ ID NO: 45546 - DNA, 337 bp, Glycine max
  Clone ID: LIB3093-041-Q1-K1-A3
aaattatttatttttttcatttgggggggtttctttgtacgggtatctatcatttttttttttttattttattttttttattaaaaataaattgttttttcctctataggatcctttcttcaaaaaaaaaaatgcttcctcacacttaaatttcccttaaaaaaaataccatttggggtaaaaaaaaaaaaaaataaatgcggggaaaaaaaaaaaatgtccaaccccccccccctttaaaaaaaaaaacccacccaattttttttttttaatgggacaccccaaaaaaaccccccccccccaaagtgtgaaaaaaaaaaatgccaaaacccccccc

SEQ ID NO: 45547 - DNA, 399 bp, Glycine max
  Clone ID: LIB3093-041-Q1-K1-A9
aagcttcgaaccaaatcttattgagaaaatgtctggtcgtggaaagggtggaaagggttggggaaagggaggtgccaagaggcacaggaaggttcttcgtgacaacatccagggcatcacgaaacctgcgattcgtaggttagcgagaagaggtggcgtgaagaggatcagtggtttgatctacgaggaaaccacaggagttctgaagatattcttggagaacgtgattcgcgatgctgtgacctacactgagcacgctaggaggaagaccgttactgctatggatgttgtttatgctcttaagaggcaaggaaggaccctctatggttttggagggctaaaaagtttaagggttattggattctattgcagcgaaaaaatacctgttcttttaatccg

SEQ ID NO: 45548 - DNA, 271 bp, Glycine max
  Clone ID: LIB3093-041-Q1-K1-B12
ttttaatataaggattgatagtttatagtatatgatgtgattcaaaaaaaaaaaggattgccttatgtagcaggcgaagacaaatggtagattatacaatgtgcatggaagggcttatatacttcatataacgtagataaatgagaccttattgaaatgatgattatcaacacacataaagaaacttataatatgagttctagttaccacattgtaatgtttatagaatgagatgagaattccattattatgatgatctattttgttactt

SEQ ID NO: 45549 - DNA, 395 bp, Glycine max
  Clone ID: LIB3093-041-Q1-K1-F8
aacgggtcaaattaagactggagctccatgcaggtcagagcgtcttgctaaatacaaaagcttcattgtctggactactttctcgattccctttgtccccaatttcagcaatggacgacattctccccgacgaagaatagttcggttgattcttcaaccttctcgaactagaaaattttgcatcttcgatactgttattaacagcccccaaagtccccatgcctctcacaccagcatacactgccaattaagctttcataacatcattatggcaacccatacataaacccattcacgccctaaacaaacatgaagcctaatagtaacccccaaaataattagtctttttttttttatctctaagttgacaacataattgtactaccctacagctc

SEQ ID NO: 45550 - DNA, 376 bp, Glycine max
  Clone ID: LIB3093-042-Q1-K1-E8
ggtttggtgcgcttgaaagcaaaaaatatttacactctccatcctattattgaaactagtttttagacgatgaaaaaagtctactgttgcaatttgctttataagagtcggtatttttacaaactattatgtgcaccataatccagttaaaagaggaagtataagaaaattcgactgccaaaatcggagttactgggcaccacttagcgcagaaagaatctataaaatgccgaccaactcagaaatatcaaacactcagctggtaaccaacatggcaacatccattgttcatctcaatactgtcatataagtgcagccagcattgctccaaggtctgtcaatgattcaagagtgctggctatttgagccattggag

SEQ ID NO: 45551 - DNA, 383 bp, Glycine max
  Clone ID: LIB3093-042-Q1-K1-F8
tttggttttgggtttttttcttgctgtcatataacgttagttattttgtttattagtcattctgttttccccccttttttatatctttgtttcttctgcttttacctcaaaataaatacggtatatggtatatagtaattatattcctgttttattttttcaaggaaggtatatctctttcaatttttcccttttagtcctagatgttttcatttgttatttcattaaagtaattttctttatttctcttcgaagatacggtgaaaggtcttcctacatggattcatgttttaaggtttttagctaagttcttcattattatttggtgcagataaaaaaatattgttggtaatatgtcttcttttttttacttgatttgcgtt

SEQ ID NO: 45552 - DNA, 270 bp, Glycine max
  Clone ID: LIB3093-042-Q1-K1-H4
ccaaaattcacgatctgctttacagtgttccttccaaagcagacagtcagggtaatgagcgccacccttttcggacaaatccctgagagtccattgtgtttgtaatgccaattatgttagctgttgtagctaagtcacctttgaacaatttaggatgagccacttttatggcaatgtaatcaccatcttcatcaattttatctgcgttttgatattggaaaaagcttcaatatatgtttggaactctaaccattattaaaaaaaaaatat

SEQ ID NO: 45553 - DNA, 259 bp, Glycine max
  Clone ID: LIB3093-043-Q1-K1-A11
tcactaccttattcttaaaaggtatcaacatccgcatatttttaatagagggaaaggggccttcctaaatattttttaatcttatttttttcatgtttaacatatgaagcaactgcttcaacagcccctgtaaacactgcagaaaaaaaaacaaattaatgcacattcaccctgcaactaccacagtaataataacccccaaagtaactgctaacccaatcccgtaccctccttccatcactccctattacaactaccc

SEQ ID NO: 45554 - DNA, 360 bp, Glycine max
  Clone ID: LIB3093-044-Q1-K1-G3
tccactcgtccgatcagagcctacagacacgttaaccctttcaatcccttgcacaaagggacggtaactgggcccttgcatacgggtacttcagtggaaaactttcagagaggaacttcaatcataaaatctcacggagggaatatcctaacaagtgtatctggattatagccaacatgaaaattcttacaaccaacaattgtcgatatttctgccgatgctcctgtagataaccaataattgtttactccagttctgaatgttatgaaattacagactctatactaagcatatgcctttaacaattctgtacctcatggattacataagtcacatctttacccaaatacctggaactat

SEQ ID NO: 45555 - DNA, 109 bp, Glycine max
  Clone ID: LIB3093-045-Q1-K1-A1
ataggtttttattttatactatatattttatttaataaaatattttttaatttttttaatcttatttctaatatatatttcatattatattatattttattagattatt

SEQ ID NO: 45556 - DNA, 339 bp, Glycine max
  Clone ID: LIB3093-045-Q1-K1-C5
tcggccaaaacatcgcgtgggaccagaagagcatgaagtccgggtttgcctccgcccgtgatctgggagggaatgatctcaagttaacttgagataggcacttaaaaaaatttgttagggattccggtatggttcgtatgtcattggttttctaactttgtaccatacagtgttatttgcaatagaattgtgtctcttatgtttgtctctagcaaaaaacaatacactggccgtaattttacaacaaaaggactggcgatttacaggatccaagcttacttacccgttcatgcgacattatagttttgctatagggccacctaacttcaatgccctggc

SEQ ID NO: 45557 - DNA, 201 bp, Glycine max
  Clone ID: LIB3093-045-Q1-K1-E10
cccacgcgtacgtaactgactatagcgacgttcttaaactgctgctaactgaggaagacgaggataccatttagcgtgaacctgacaacagcccatgtgcagcagaatatatcgggatccaaaagatcttaagatgcagttccatgatggccctttaataacgatcaattcgctcaatcttggaaaggaatcctagggaaa

SEQ ID NO: 45558 - DNA, 323 bp, Glycine max
  Clone ID: LIB3093-045-Q1-K1-E5
acatatgaagggtcatgtgaagacacgggtgcataaacgctaactagaccaacaaacaaatgcatggccagtcatgtcaagaacatgatcagtagcatcaaccgctcatttctcaataatggtgaaattaactgtgccaacataataactgccaccacaagaatcaatacttggatataattgacatggaacagaaattaatttcaatgtctgctctgtatataggattgatagtctctcggaatatgtgcatcataagtccttggagagtcaacaatcactgaaacagaacaatggatctagaaaaagatgtggacttattt

SEQ ID NO: 45559 - DNA, 251 bp, Glycine max
  Clone ID: LIB3093-045-Q1-K1-H9
ggaaaaaatgagatcataggtacctaaaaataagaaaaatgatctcaactgggtgaagaatgaagatccattagctatgttaggaattgtgtcgacatgtaaggactaaggacccctagtagaaaattcttgtttcattgctattgtagtaggatttttttgtatgtctgtgaaatattatattatattatattatatatatatatatatatatttttttttaattttcaaaaaaaaaagaaaaaataaaa

SEQ ID NO: 45560 - DNA, 357 bp, Glycine max
  Clone ID: LIB3093-046-Q1-K1-H8
aatccctaatctaaatagtaacccgtcaaagtttctaaatttttctccattaccacttttagttatcaagtaaaaatgttaactaattacataatagcagtaaattgtcatctcataaaaaaatttgacaaaaaattcatgtgtaatttttttagataaattaaatttttaatctcttgtcttgaagaacaatttatgacatcatactagtaaatgagagattaaaaacataatttaacaaaaaattatatgtatttatcctattaaaattcttgatgacatgataagctatggacgataaatagtattggtatgttattagttagtattggtattttacaacatcaactaaaagtc

SEQ ID NO: 45561 - DNA, 124 bp, Glycine max
  Clone ID: LIB3093-047-Q1-K1-A9
tggacatttaagagggactcttgggtataaatttgttactccactccaatactttttgtgtatgacatttgtaatttgttagagttagatttataacatgacacacataaacttgcacgtgatt

SEQ ID NO: 45562 - DNA, 72 bp, Glycine max
  Clone ID: LIB3093-047-Q1-K1-D11
aaaaaaaaaaaaaactaaaaaaaaaaaaaatttataaacaaaaaaaaaaaaaaaaaaaaaagtgaaaataag

SEQ ID NO: 45563 - DNA, 446 bp, Glycine max
  Clone ID: LIB3093-048-Q1-K1-A3
tatgctttcaagtagtaccaattgggcactttgtttagtgtcttcattttttttttcatcctcatcaaattaaccccctaaacatcatttagctagctagccaaattaattattaattaggcaaataatgggaaacccagaatccaatttgccacccggttttaggttccacccaaccgatgaggagctcattcttcactaccttagtaaaaaggtagcatccatacccttgcccgtttccatcattgcagaggttgatatctacaagttagatccatgggacttaccagctaaggcaacctttggggagaaagaatggtatttttttagtcctagagaccgaaagtaccctaatggtgcaaggccaaacagggcagctgcttcaggttattggaaggccactggcactgataagaccataatgacatcattgcaaggaggagcac

SEQ ID NO: 45564 - DNA, 332 bp, Glycine max
  Clone ID: LIB3093-048-Q1-K1-D4
gacaaatccacctaagataaacgatgagtgcatctatgatataatctgatggttatttttgtcgtgattctgctacaggtttgtaaaattaattgtattgaagaaggggacaattatgatcagtagtatgtgtggtcaagtgtatgtatgatatatatactatgatggttggtttacttccactctgatacatgtttgctacataagttgtatggaagaagtgagtgcaccatcttcaggataatgcgtgatcaatgataaaggaaacgagggactgccatgactatagaagatcctgaaaaagggcggtcgttctagaggatccaagctta

SEQ ID NO: 45565 - DNA, 407 bp, Glycine max
  unsure (1)..(407): unsure at all n locations
  Clone ID: LIB3093-048-Q1-K1-F3
tatcttacccttctctcctccaacagatctctcaaaccctgatttcttcagtctcttccacttcggttgacctcgtatgcggtgtcccttacactgccttacccattgctacatgtgtctctcttgctcagaacattcccatggtcatgcgccgcatagaaatcaaagattatggcactgctaaagctattgaaggcgatttcaagcctggccaaagttgcttaatcattgaggatttggttaccagtggcacgtcagttttggaaactgcggcgccattgcgtgctgtgggattaaagatcagtgatgctgntgtgttgatcgatagagagcaaggtggcagagaaaacttggaggagaatggcatcaagctgcatgcaattattaaattgactgaaatggtgaaa

SEQ ID NO: 45566 - DNA, 343 bp, Glycine max
  Clone ID: LIB3093-049-Q1-K1-H8
ccggacctgccgtcccggaacgaccgcacgcgtccgaagcattcggaatttaataaagacccatgagaagaagcctcgcgagtccatacttcgtcaggagtttgctaatgccatagatttcattaataaagatttatccgaggagaacaggcttaggttgcttcattgggatctgcacaaacattttcagagctgcgctcgctaacgtcgttgagctcacttggcaaagtggctgcatatgcattgacattaacacggtgtatctattgtcaaacgaccccaaccttgataccatatgaaagcttgaagtggcgaagtacagatgttgatgatggtacctttt

SEQ ID NO: 45567 - DNA, 294 bp, Glycine max
  Clone ID: LIB3093-051-Q1-K1-D4
tgaaccaggatcagacggctcgtaagcgaggacacttaaattgatcaaaatgcaacgcgcccaatcgcaacagctggcgcagttagtgtgccgtactgaatccgacttgtaattatcttacttgacattggatgatgattgaaatgaaaatccttttggtgggattaaattaaatttgctgaacaactactattacattagtaatgctcttccttagttattgaacaatacaatacaccaagtgcaactgtgcaaattgtgctttgcattcaataaaaaatattataaattatt

SEQ ID NO: 45568 - DNA, 420 bp, Glycine max
  Clone ID: LIB3093-051-Q1-K1-G4
aacttggtcaagaagtgccttgagctcttctttgaaattgcagagaacaaggaggattacgagcaagttctatgaggctttctctaagaacttaaagcttggtatccatgaggattcccagaacaagggaaagattgctgaattgctcaggtaccactccaccaagagtggtgatgagctgacaagcctcaaggattatgtgaccaggatgaaggaaggtcagagtgacatctactacatcaccggtgaaagcaagaaggctgttgagaactccccattcttggagaagttgaagaagaaagggtatgaggttcttttcatggttgatgccattgatgaatatgctgttggccagctcaaggaaatttgagggcaagaaagcttgtcttttccaccaatgagggtctcaaaacttgacag

SEQ ID NO: 45569 - DNA, 453 bp, Glycine max
  Clone ID: LIB3093-051-Q1-K1-H10
tctgacttgggtataggggctaaagactaatcgaaccgtctagtatctgtttccttccgaggcttccctcacgataggtggagcccgtaggcgagttctatcgggtacagccaatgattataggcatcgcgtggcgcaacgcccatcacctattcgcaaactttaagtaagcaggacggcgtgcatgctatgatgagccgagccacgaaatcgagagctccaagtggaccatctttggtcagcggaactgccgatgctggatgcaccgaaagtcgggctacagagcctaactgtgcgctatcctagatcccacacagggtgttgtgcgattagagacagcacgacactggtcatggaagtcgaactccggtaagcagagggtaacagctaacctgccgaatcacctagccacgaaactggatggccctgatgcgcgctacctatacccggcct

SEQ ID NO: 45570 - DNA, 439 bp, Glycine max
  Clone ID: LIB3093-052-Q1-K1-D4
tgaagagctgcgagaactaggttctggtacctttgggactgtgtatcatggaaagtggagaggaacagatgttgctattaaaagaataaagaagagctgcttcactggtcgatcatctgagcaagagagactgactgtagagttctggcgggaagctgacattctttccaagcttcatcatccaaatgtggttgcattttatggtgtggtacagcatgggccaggaggaacaatggccactgtggcagaatatatggtggatggttctcttaggcatgtattacttcgcaaggataggtatcttgatcgtcgcaagaggctgataattgcaatggatgcagcttttggaatggaatatttgcactcaaaaaacattgtgcattttgacttataatgtgacaatttgctagtaaaactgaaagatcctttacgttcaata

SEQ ID NO: 45571 - DNA, 351 bp, Glycine max
  unsure (1)..(351): unsure at all n locations
  Clone ID: LIB3093-053-Q1-K1-B9
tttcttattaactacaggttttattgcaagattaagccctttgttcaactcaacttctggacattcaatagcttcagatagttcaagtttaaaatttgaatccattgtactaccctcattcaagctaaatgtatcagaatcagttgtgataatttcagaactgttgtcatcaatgctaccattcgagacaaaagtggatgactcaaaattatcacagccagaaagatcaggtgatttcctgacatttctattcctttgtgcacatacactctgagctgcantggttgatgggttaccagcactctttccactatcattacaagggcacacacagttttgagcccgtgatga

SEQ ID NO: 45572 - DNA, 407 bp, Glycine max
  unsure (1)..(407): unsure at all n locations
  Clone ID: LIB3093-053-Q1-K1-C12
tacacatcacattttctcaaagtaatttattaattaataaataaatggcggcggcggcggcagtgacggtgctactcccacctaggattccgaccgccaccaacgttacccgctgctctgctttgccttctctgcctcctcgcggcaccaacactaaaaccactttgctcttatcttccctcaaccacttctcagtgtcccgaaaatcttctctgcttcagaccagagcttcttcagaggaatcatcctcagtagatgccaatgaggtgttcacagatttgaaggaaaagtgggatgctcttgaaaacaagtccacagtacttttttatggtggtggngctttagttgctgtttggctatcgtcgattcttgtgaagcgcatcaactctgttccctgctttccaaag

SEQ ID NO: 45573 - DNA, 378 bp, Glycine max
  Clone ID: LIB3093-053-Q1-K1-C6
cgcctcttttcctctccgtctccgacctccgatcctccctcgccgagacatcctccgacggtggcagaatcgtaattttccgcggcaccgtcgacacacctcgaaaaccttgagacccggtgtcttggtttctcgcaagtccagcgataacagcgtcgttcttcaaagaactcaaacgagtttttatctgatctctggagaaatatggctgccaatttctggacatcatctcattacaagcatcttctggatcaggaagatgtggatgtggtgaatacactcgacaaggaaaagggtattacactgggagggatttaagcttattaaagatgcacatggctaattatattttgaaattggctcaacaagtaaaagtga

SEQ ID NO: 45574 - DNA, 401 bp, Glycine max
  Clone ID: LIB3093-053-Q1-K1-F8
atcccacgcgtacgcccacgcgttcgcccacgcgtccgtatgactctagcagtctatacacatgcgaccgaggaccgggacacttgaactgtcgactacaactctgcgttctcagtgtttcctgcagaagcatgcgaaactgtaggaggggaagcctgcatggcggagatgtaccctgaaacgaagctacagccagaggctaagactccacgagtcgttacagaaaacgtttagagagaatatcttgaatacgatgatcctaaaaccgtatttcgaggaaaggcttgtgatgatcttggaagaactttctgggagaccgaatatcaaaaaggtgtctactaaagaaatgggaaaaccctttttaatgccatgactactgcggtttcaatggcaaccaataa

SEQ ID NO: 45575 - DNA, 341 bp, Glycine max
  Clone ID: LIB3093-056-Q1-K1-A11
gatggatatctgcagaattcggcttaagcagtgttaacaacgcattttacgcggttgctcacgcccctaccaactgcactcttggcatcactttcaacccagacaatcctatgaaaagcgttctactgctataatcttatctaacttttcaacttacacttgatttactttaaccaacactttcacttgacattattctctccaccttcgccgatgaccatactttccttgacctcactctgatcactggacatacactctctatcaacatcaccattgaacacaccattgttgatatcaccacagatagctatctgactaccaacaatacccgtcttaac

SEQ ID NO: 45576 - DNA, 459 bp, Glycine max
  Clone ID: LIB3093-056-Q1-K1-A12
tggatatctgcagaattcggcttaagcagtggtaacaacgcattttacgcggtgacgttattccgttgcctgcggccatcccggattcgtttcagtgatcaagatttgtcttactgatcatatcatgggaaacttactttgtttagctcaagtggatcaatcaactgttgctattaaggagacttttggtaagtttgatgatgttctggagccaggttgtcattgtgtgccttggatatttggaagtcagattgctggacatcttactcttagggttcaacagttagatgtcaagtgtgagaccaaaactaaggacaatgtctttgtcaatgttgtagcatcgatacaatatcgtgctctatctgaaaaggctagtgatgcatattacaaactcagcaatacaagggcccaaatccaggcctatgtttttgatgttattagagccagtgtcccaaagct

SEQ ID NO: 45577 - DNA, 399 bp, Glycine max
  Clone ID: LIB3093-056-Q1-K1-B11
atggatatctgcagaattcggcttaagcagtggtaacaacgcatagtactttttttttttttttttttttttttgtgcaatttggaaagatttcagaaaagattctctattcagcagttaaatacaaagttaagcaaactgcacacgtgtttagttttatcttgtctaatacccaatgatcagcaactcagtcattacgaattcacagtacattaaaacgaacatagcttgatgttttccttcctttcttccattaacttccaactttactaatgaccatacttctggaactcccactcactgttgtcaagagggcacacttgacgagtcttcagccagcgactgatgcagtgaaagtgaaaagcatggtttcagacaccccaagcaacagttcacttc

SEQ ID NO: 45578 - DNA, 242 bp, Glycine max
  Clone ID: LIB3093-056-Q1-K1-C10
atggatatctgcagaattcggcttaagcagtggtaacaacgcattttacgcggggatataacaaagtaacaacctgtctacatctctgcaacaaaagcttaccagcttaccttctagaaccttccataacaccgattaaaccgttcgttaatcaccgcaatggctgccgttaagcgtatctcctcattcatcgctgatcaagttatagtgattgcagtcagacgtggatttgcgagtgctgc

SEQ ID NO: 45579 - DNA, 195 bp, Glycine max
  Clone ID: LIB3093-056-Q1-K1-C11
gatggatatcttcagaattcggcttaagcagtggtaacaacgcagagtactttttttttttttttttttttttttggttgataatgataccatttataaatatatatatatataactaactcaacacattacccccatttatagtggcaatgattcaaacattaaccaaacccgaaccccatccttaaccccaaa

SEQ ID NO: 45580 - DNA, 221 bp, Glycine max
  Clone ID: LIB3093-056-Q1-K1-C12
gatggatatctgcagaattcggcttaagcagtggtaacaactcatattactctgcgaccaacaaccttaactagaaagcatcctaggaaagctatcgtttcccacaactttaatcactacagttctaaaatggcaaggaccgtaatgatggttttatgtgcggcgttcgcttgcattgtgaatgtttcaccctattcaaaagctatcactttgtgtcaaat

SEQ ID NO: 45581 - DNA, 304 bp, Glycine max
  Clone ID: LIB3093-056-Q1-K1-C9
atggatatctgcagaattcggcttaagcagtgttaacaactcatattacttgttttttttttttttttttttttgttgaaatttaacatatgtataaatatttaaccatacattcacacaatttaaaattctcacacatttaaaaacacaaatatttttttcaaccattttattaataatttatttacaactattcttacaactattattttaattattactacaacacttttctattgattaagtactccaataattattttaaaaattttttttttaaaatttttaaaacactatttttttt

SEQ ID NO: 45582 - DNA, 335 bp, Glycine max
  Clone ID: LIB3093-056-Q1-K1-D11
atggatatctgcagaattcggcttaagcagtgataacaacgcattgtacgcggggatcaccaaaagcaccaccatgtcttcttcgcaaagcaaatcctacgactaggtgtcacgcgcccgaaacaacatcaaacccctcattaaaaagccccaactccattcgcacggcctgtttcttcgcttctccctcccttaaccaattcctccaatatgcaatcctcgccaacggcttcattattaacctaatccaaaacctctgtgccaagttcctgcctaaagaacccttttttttaacaaacacaccgttcaacatcttgttggcccttaacccttac

SEQ ID NO: 45583 - DNA, 393 bp, Glycine max
  Clone ID: LIB3093-056-Q1-K1-D2
aagcgtcttaataaacgctcttctctgaaaaacctgatttcttctgttcttctcgggtctttcgtttcgatcttcgatctctgaaaatgagagagtgcatttcaatccacatcggtcaggccggtattcaggtcggaaacgcctgctgggagctctactgcctcgaacacggcattcagcctgatgggcagatgccaagtgataagactgttggtggaggtgatgatgctttcaacaccttcttcagtgaaactggggctggaaagcacgtgcctcgtgcgatttttgtagatctcgagcctactgtgattgatgaagttaggactgggacataccgtcaactatttcatcctgagcagctcattagcggaaaggaggatgctgcaaacaact

SEQ ID NO: 45584 - DNA, 395 bp, Glycine max
  Clone ID: LIB3093-056-Q1-K1-D9
gatggatatctgcagaattcggcttaagcagtggtaacaacgcattttacgcggggaccttcataccggaaataaggattcttcggcagtcactaactatgttctatatttctttacctggatctcaattacattgttggacgtatgatgttttaagcatcgatggtgtacccactaagtctctaatgcctcagtggtaccctaactattatagaataatgtaatccccacccccattctctgaatctttcctcgctttttgctcgactcatattgcgttaagaacatgaactactttatgttttgatatcagttccatattccactgtaattacatgacacgacttatttctcccatcaaagcaaccccttcttattcattaacatactttacc

SEQ ID NO: 45585 - DNA, 317 bp, Glycine max
  Clone ID: LIB3093-056-Q1-K1-E1
gcgaaaaagctaacaagaaattcaaggccctcacggcgaataacgcggaccaaaaccaggacctactgagagacataaacatcgggaacaacaatccaaccaacactgatccaccacaccagaacataatcaaaaccacggaatacccaaaataacacgtgaacataaaagacacacacaacatcactaacgtacacctactcaacaagatggacacacacgccgtcatttcactacaccagaacactctatacaatcacacgtattccaaccacatcttaaaaaacgccggattcaccgagtactagaacaacccc

SEQ ID NO: 45586 - DNA, 360 bp, Glycine max
  Clone ID: LIB3093-056-Q1-K1-E11
gatggatagctgcagaatgcggcttaagcagtggtaacaacgcattttacgcggtgacaccgacaaagatgtcttgggtaaccgcgacagcagcactagacacgcatactgcgtttcacactaaggacacggtcgaatcagcggagttgtcctcatccgacgataatgcctccttgtcagctggatcggatgatgaatcggaacgattgagtggaacggaggacacaggaaagaagcagactcgtcagggccgtgattggcgaccaaagagcacactgcacctcaagatcgcgcgtggcgaaaaattatctgcggtcgagcgactggcttcgcgtaccttgttaccagaggagtactaca

SEQ ID NO: 45587 - DNA, 453 bp, Glycine max
  Clone ID: LIB3093-056-Q1-K1-F11
atatctacagaattgggcttaagcagtggtaacaactcattttacgcggttattgacattaaacatttttagctaatctgaaattccaccatgaaacctaacacgttcatcatcttcatcatcttcttcttcacaatcaccacttgttcatcatcaactgattcagttgagatcattccttttaaagaagcgtataaagttcaagtaacagtttactatgaatcactctgtccatactgttaaaacttcatcgtcaattacctgatcgatgtgttcaatgaatgtatccattcaatcgcttatgtaaaactgtttccttatggcaactctaaagtcaactccaactgcaacatcacttgccagcatttttaacaaaattgtttgcttaacactttttaagcttgttcaatcaatacttgccctgatgttcatgatcactttcctttcatcttt

SEQ ID NO: 45588 - DNA, 301 bp, Glycine max
  Clone ID: LIB3093-056-Q1-K1-F12
tggatatctgcagaattcggcttaagcagtggtaacaacgcattttacttggttttttttttttttttttttttgttcaaccggtgaattataagatgttcttcaatcacaacttcatcaatcaatcaatcaatcaataaatcaatctcaaacaagatgatttatgatttatggtctaattcaacaattttttgatgataatccctaatctcaaattttttcaatcatcacaaacatcaaattaatcattatccaattcaaatccttacaatttttcccgctttaaccaccggatttttcc

SEQ ID NO: 45589 - DNA, 278 bp, Glycine max
  Clone ID: LIB3093-056-Q1-K1-G10
atggatatctgcagaattcggcttaagcagcggtaacaactcattttactatttttatttttttcttaaattatgtttaactggacattcatgatgttagtcatattatatacttttcaaatccttcttacttatacaattcaacaccaattaaaaatccaattatacccttcacttgttatttttaaaacaaccaaaaaaattaatgttaccaataaaaatataatttaccaagtcaattggagcttttacaaagaacaaacattaaaatgaattac

SEQ ID NO: 45590 - DNA, 436 bp, Glycine max
  Clone ID: LIB3093-056-Q1-K1-H12
agtgcgagggatatctgcagaattgggcttaagcagtggtaacaacgcattttacgcggggattattcaaactaataaatgcacacaattgtcttttcaacaaaggagtgattttgatcttgattacaagccctaataacacaagttggttgaatcaattcatttgtgttgtttagttagttgtgtttgctgtaccgtaaagcagcgtcgtgcatgcaactctttctttcattcattctctctttaatcttattcaatctttatctttaagcatgcactttatcccttcatcttaaatcaatcttcaacttcaaacaccaaacatcaattcagcgttttcgtaacgcgaattggcagcaaacatcactcggattaagtagtagtatacggcttatgaacgacaagcattctgtgaattgttccacctagaggacac

SEQ ID NO: 45591 - DNA, 241 bp, Glycine max
  Clone ID: LIB3093-056-Q1-K1-H9
atatctgcagaattcggcttaagcagtggtaacaacgcagtttacgctgtggtgaatgatctacattcactgacagctcagatcaaacttcatctcttgatttcgatatgggtttcatccaatttccaaattccattaacttctaacaccaatcgttcccaacttatcaagattttacacttcttcctatcttcgctattttcttcctcactgttcgttttttcctctacaggttcatttt

SEQ ID NO: 45592 - DNA, 431 bp, Glycine max
  Clone ID: LIB3093-057-Q1-K1-A10
tgtgatggatatctgcagaatcctgcttacgcactggcaacaacgcagagtactcctagatttcacattgaactacagattaatgggtactatgggactactatctgctatgcatacgttggagataccagtatggtcaacggatgaatgtgacttgggaagtacagctgacatcatgaactatacctatatcaacgcgtactttgactactacataaggactatatgactggaatgtaagcgattgacacatgagctatcctaagtgtaccagaacatggcgcagctgctatacaaacagctaacgtactagcagagcccattactaatggacgtgctgtatatactcgcacatcatctgctattcatagatcttggcctgactttatacaatgagatacaaaaggatccatctttgaaacatcaattaa

SEQ ID NO: 45593 - DNA, 350 bp, Glycine max
  Clone ID: LIB3093-057-Q1-K1-A8
aagcaatggtggcgctcctagtggcaactacatccgaccctgcttccatcaacccggccaacgcgctgttgggcatgcgcgggtggaaacccggtccccatttccaggatgatatgaagagctatgtgaatgaaggggtgagggtgttggtacatgggaagagcatagttgcggaagatgagttggacacgaggtgggaagaagttactgtggaggttattgatgaagtgatcttcttcagcaagcacactgctgtctccaacaagcctgccctgactgttcaccctattggagttcctcatatgcgccaaggcgatgttcccccccaaggcggcagacctggatgggca

SEQ ID NO: 45594 - DNA, 163 bp, Glycine max
  Clone ID: LIB3093-057-Q1-K1-D3
taagatcatccggatttacgacactggttgactctagtacgacgagcaccagcatatggttcacgaagcggtgtattaccaagccgaagctgaggagcacatgtcgacggtcgacctgaagaacgctttggagaaccatatgtacaacattatgaacaccatt

SEQ ID NO: 45595 - DNA, 329 bp, Glycine max
  Clone ID: LIB3093-057-Q1-K1-E9
gcgtaagcagtgctaacaacgcagagtactttgcatctgtttatgatttattttactgggctgtgaatcaaacatgcttgatgccatacttgttaagattctattagtatccaggatacaagtcgacttctacaagctgacttataagatgagagagcagagctctgtctaatcgaaggaaatgaggttatcgcagatacataacattaaattgactagattacccaattttccatgaggtagaagcggtggttagaactgcacttgtaaagatgtaatctacagaagagtggactaatccaaccattcatgcaggtacaatgaaaagt

SEQ ID NO: 45596 - DNA, 411 bp, Glycine max
  unsure (1)..(411): unsure at all n locations
  Clone ID: LIB3093-057-Q1-K1-G3
taacttccagccaaatatggagggaaaccgcaactgctatgctgatgagcattacctgccaaccttggttactatgcttgatcctggtggaatcgcaaattggtcggtaacatatgttgattggtctgaaggaaaatggcatccaagatcattcagagctcgggatattacttatcaagtcatgaaaaacatagcatatattgacgaaagtccacattttacaagtgatgcatagagaacagtggtgattacaccttgcatgttgaacggctcgaaacgatcatgttatctatttgccaggaagtttttgccagaaactcangatagattgatccaactctactctaattctacaatattctaaagtattaatgattctcatcattctttggtgatccaacaccatgtgat

SEQ ID NO: 45597 - DNA, 367 bp, Glycine max
  Clone ID: LIB3093-057-Q1-K1-H9
cgtcacgtgtgatggatatctgcagaatcctgcttaagcagtggtaacaacgcatagtacgaagatcacacacaacattcatgcactcacaggccactcgggaaaaactacatcacatatcaacgaaattaatcaattcttaactctttaaaacaacgctcgagccgacctgcctgtgccaccactactatgggacgcaggactgtcaaagtacgctgacatgtatgcacgacaaaggcgacaggatcgcttgttaaagcattcaaacgggccgtatggggaaaatatcttctggcgtagaggtgatcggtggacgccagcacaagccgtaatggcgtgggtgacggagcaacgatggtataactat

SEQ ID NO: 45598 - DNA, 447 bp, Glycine max
  Clone ID: LIB3093-058-Q1-K1-A4
aagcgtacgatgaagacattgctcgagatctgcctctagtgcatggaccggggtctagccagggtataacatagaggaaaccactctttagagcccagatgtaggagaagagtagaaatccttacgatgggtaatgcctatgttcctgaattgactttctgagagaacgcttgttcaacattctcaacggatgcaaagattgagaagaaaagaaagattgtgcagtatatggagaggctcgataggactcttgcctcgcctgatcttgcaaatgatgagatgctcaaaaagcttgtccgaagtcaactcccaccttctttagaacctgaaggttaaggatttagagcataattattagaaaccaagactgcggaggtgtctcactttcttggtatgttgaaggagtgcttcttcagatgatagccgaagatcttatacattacacac

SEQ ID NO: 45599 - DNA, 250 bp, Glycine max
  Clone ID: LIB3093-058-Q1-K1-C1
cgacccactcgtccgagcccgtcaagcatggctattggtgcatgagaaaaccacgaggggtctcgagtacgaactcagggacactgttcaggccgactttcaacggtctcgagatctatctggccgacgttgagactccctggctaaacgtctgtctgaccgagctcttaccgttccagagcttcaagggggcccgcatcacctgctgcctccacatgaccatatataccgggcgtctcattgagaccct

SEQ ID NO: 45600 - DNA, 456 bp, Glycine max
  Clone ID: LIB3093-058-Q1-K1-D6
cccacgcgtccgacacccccaattcccgaaaccctaaccctacctcctcgcagccatggctgagaaacgaaagcttcgatcctctgaccccgaacccaccaaacccatcgagccacagcaacaggaccaagagccagttgaactcgaccaacagcaacaacaacccaaccccaaacaaaccctagaagatcctaacacgatggccgtcgacgaatcaaaacaggaagaagaagaagaagaagaagacgaagaaccccaaaacgccgaaagcgaagaagaggaagaggaagctgaggaacaacaagaggagcggccaccagaaaccctagaagagcaacaggatccagaaaccctggcggctgcaaaccacgccgaagtgaacggcggcaatgaaggaaacaacgaagaagaggaagaggaggatctcactctctcgtcacgcaagccgtggatatg

SEQ ID NO: 45601 - DNA, 264 bp, Glycine max
  Clone ID: LIB3093-058-Q1-K1-H12
ttagtaaaaatctacaaattccttattcctatgtccattttacacacatcattcgcttcaacaattttttgtgttgcccaaaattggtccaaaacatataattgtaaatgcaaaacaattaatctggtatcatcctatcttccggacataagattcacaagattttgattttcgtagaaagaaccaacatcccaatcgtcggtagttgaagaaagtgtcataagagcaaccacaatagatctcatacttggacggagttgggga

SEQ ID NO: 45602 - DNA, 222 bp, Glycine max
  Clone ID: LIB3093-058-Q1-K1-H4
tgactctgttaccaagagcaagtttgacaacttgtacgggtgccgtcactctctccctgatggtctgatgagggctactgatgtgatgattgctggaaaggtggctgttgtggctggatatggtgatgttggcaagggttgtgctgctgcattgaagcaggctggtgctcgggtcatcgagactgagattgaccccatttgtgcccttcatgctctcatgga

SEQ ID NO: 45603 - DNA, 637 bp, Glycine max
  unsure (1)..(637): unsure at all n locations
  Clone ID: LIB3093-019-Q1-K1-A6.R2
gggggggggggggggggggnngggggggggggggngggggggggggggggggggggggggggggggggggnggggagngcgngngggggngggggggggggggggggcggggggggggggcgggggggggggggggggccccgccncgccgcgcgngggcnccggcccggacggggcccgggggggggggggggggggcggggggggggggggcggggggggggggggggggggggggggggggggggggggggggggggggcgcgggggcggcgcgggaggggggggggggggggcggcgggggggggggggcgggcgcggggggcggccggccgccggggggggccggccgccccgggggggggggggggggggggggggcggcgggcggggggcgggggggggggggggggggcggggggcggggggggggggcgggggggggggggggggcgggcgggcggggggggggggngcgggcggagggggggggcgcgggaggggggcgggggggggggggggggggggggggggggggggggggggggggggggggggggcccggcgccggcggcgcggggcgggcgcggggggggggggncgcgcgcgggggcgggggggggcccgcgggggggg

SEQ ID NO: 45604 - DNA, 358 bp, Glycine max
  unsure (1)..(358): unsure at all n locations
  Clone ID: LIB3093-034-Q1-K1-A2.R2
gggggggggggggggggggggggggggggggggggggggggggggggggggggggggggggggggggggggggggagagggggggggggggggggggaggggggggggggggggggggagggagggggggggggggggggggggggggggggngggggaggggagggggagaggggcggggggggnggggggggggggggcgggggagggggggggggggggaggggcgcgcggccgcgaggcggcccacgagagaaacaaggggcgcgggggggggggggaagcggcccggggggggggggggggcgggggggggggaggcggcgaggcccaggggggggagggagggggggggggg

SEQ ID NO: 45605 - DNA, 590 bp, Glycine max
  unsure (1)..(590): unsure at all n locations
  Clone ID: LIB3093-002-Q1-K1-F7.R1
nngatgggatgaaacatcaaacataccacgtcctgagagagtttcacaatggaagatagagcctgctcttgctcctcttgctctgaatcctctaccaatgcccaggcctaaaagcctcgatctaatgtggttccatcatccccagattcctcggttcttactcgtgaaggtatggataggttgcttttaaatatttgatatttatttgagtttcatctttgcttaacatatgtaattatgtgaagcctgatctgttatcggtgattaacagcttctaaagtaagcgtagatcctttgccaacaagtgggtttcaaagggtcttgcaaggtcaagaactttcgaccttgagaggtaattttgctgaacagcgaatctgatacggcagagaagtctggtgtgtggccacctgccaggatgatgaaaagattgatgtttctacctcaagaaggtatgggtcagacagctggatgtcaatgggaaggcatgaaccaacatatccagatctactttcaggctttggggccacggagatcattcatcccatccatcatttgttgatcaaaatggtcctgtagctaaccttagtaga

SEQ ID NO: 45606 - DNA, 416 bp, Glycine max
  Clone ID: LIB3093-004-Q1-K1-E9.F2
gggaaaaagggggaatttttaaggaaacccctttttaaaaaggaatgggtatttgggaagggggccaattacattattggcaaaaggttttttttttctggaaaaatgttccaaaataggggcccctgaaaaaaaaatgaaaaaggggggccaaagcacccctccagggggaaaaattttggaaatttgaaaaaaacatttgcccaacccccaagggggtttaaagggggcaaaaaaacttttggaactaaaaggggtcccaggaggttttgggtgggaaccagttttaataaggcaaacccttaataagacccggggaaaaaaaaaaaacatccttggaaaaaaaaaaaggggccccaacccgtttaattggccggggattaacaggtttaattttaacaaacccgacccgtggg

SEQ ID NO: 45607 - DNA, 412 bp, Glycine max
  unsure (1)..(412): unsure at all n locations
  Clone ID: LIB3093-004-Q1-K1-E9.R1
cccacggtccggtttgctagaattgatgctgttgatgccagtacaattaaacgtgttgcgaaccgatttatctatgacaaggatgttgttattgctgccacgggtcctattcagcgtttgcctgattacaactggttccgacgcagaacctactggaaccgctattagttcattatagtttttttgcctcatttaaacttcattggaggtctggcaaatgttttattcaaatttacaagatttatgcctctggatggctgctttggcatntnnttcatttatttgtcatggacctctattttgtaacatttttgcagtaataagtatgctgttgtcagtgatgtaattggcatccttcgcaattactcattcctgttgaaaatggtgtttacttaaaaattgcccttgtttc

SEQ ID NO: 45608 - DNA, 415 bp, Glycine max
  Clone ID: LIB3093-004-Q1-K1-E9.R2
cccagcgtccggtttgctagaattgatgctgttgatgccagtacaattaaacgtgttgcgaaccgatttatctatgacaaggatgttgttattgctgccacgggtcctattcagcgtttgcctgattacaactggttccgacgcagaacctactggaaccgctattagttcattatagtttttttgcctcatttaaacttcattggaggtctggcaaatgttttattcaaatttacaagatttatgcctctggatggctgctttggcagccatttttcatttatttgtcatggacctctattttgtaacatttttgcagtaataagtatgctgttgtcagtgatgtaattggcatccttcgcaattactcattcctgttgaaaatggtgtttacttaaaaattgcccttgtttca

SEQ ID NO: 45609 - DNA, 581 bp, Glycine max
  Clone ID: LIB3093-006-Q1-K1-E10.F1
aacgaataaacaaatttcaatgttgcttcaagtacagtacatttcttgaccaaatgaaacataactaagggaagaagataagcatgagagcttttttttttttaacaaacaaaaaaatcttgcttcatactatcctatatttacattatacaaacccatatatcttcacttgcaaattaatctattagtagattaattagtactaccattttgatttacgcaaattaccaacctaaatcagagaggacaatccccagcatcatctctccttaatttggttacctcaaaccatcattgaaatagcgaaagtccacaatctcaaacaaccattagtggagatagtggtgacaaaggaggcacactaaagatagttcccataacatcagtgtcccaaaagcctttccaacatgatggagtcaaagggcaaacagctttgggagaacactcttctttcttcacatgcttattactattattattgttgttaactcacttttctcatagttgttgcttttactctcttcctctctttccctcttcacaccaaccttgatgcagcttgagactgattcctctgactc

SEQ ID NO: 45610 - DNA, 557 bp, Glycine max
  Clone ID: LIB3093-006-Q1-K1-E10.F2
aacgaataaacaaatttcaatgttgcttcaagtacagtacatttcttgaccaaatgaaacataactaagggaagaagataagcatgagagcttttttttttttaacaaacaaaaaaatcttgcttcatactatcctatatttacattatacaaacccatatatcttcacttgcaaattaatctattagtagattaattagtactaccattttgatttacgcaaattaccaacctaaatcagagaggacaatccccagcatcatctctccttaatttggttacctcaaaccatcattgaaatagcgaaagtccacaatctcaaacaaccattagtggagatagtggtgacaaaggaggcacactaaagatagttcccataacatcagtgtcccaaaagcctttccaacatgatggagtcaaagggcaaacagctttgggagaacactcttctttcttcacatgcttattactattattattgttgttaaactcacttttctcatagttgttgcttttactctcttcctctctttccctcttcacaccaaccttgatgc

SEQ ID NO: 45611 - DNA, 585 bp, Glycine max
  Clone ID: LIB3093-006-Q1-K1-E10.R1
cccacggctccgaaattgtcaacttctctaactttagcaaccatcgaagaagttgatcagcttcttgcctctccttgaattataaaaccattcacagtcttgaacccaatttgactctttgcacctcaaacacctcataagccccactttccacaacgaaaaatcgcaagttcaacctcagcatctgagattcgcatcaccgctcaccccctacccccagccgccccaccccaccttcacctcccagccacgccccccccccgcatcacagtgccccatacccccctcccgccgccccccgcccccgtccccccccccgcctccccggtcctcatcccctctccgcccccgcccccgctctccgcgccccatccccccccccccccccccccctcggccccaccacacccccgcccccccccccccccccccccccccccccgccccccccccgccccccccccctccccgccccttcctccccccccccccccccccccctccccccgcccccgccccccccccccgcctccccccgcgccccggcccccccccccccgccgcccccccccctccctccccccc

SEQ ID NO: 45612 - DNA, 605 bp, Glycine max
  Clone ID: LIB3093-006-Q1-K1-E10.R2
cccagcgtccgaaattctcaactttcctaactttagcaaccatccaagaagttgatcagttccttgtctctccttgaattataaaaccattcacagtcttgaacccaatttcactctttgcacctcaaacaccttataagcctcaatttcacaaccaaaaatgcaaagttcaatctcacaatctgagatttgcatcactgattaccttctaccccaagaagttccatctcaatttcaatttccagatatgagcaacaataacataccaatgaaccataccaaccttcaaatgcctcaaatcacatctttctccaagcctccaaggtcctcatcaaatctaagcaaccgcaaaccgtccttgagaaacatcacaatcccttccataacctcaggtcttacaacaactatgtcacaaacaacaacaacaacaacaatagctacaaccatgtataacaacaatcaagttacttcttcttcagatgaaaccaacaacatcaaagagaacaagcactatagaggggttagaagaaggccatggggcaagtatgctgcaaaaatccgtgaccctaatagaaaaggctcaagggtgtggcttggaacctttg

SEQ ID NO: 45613 - DNA, 112 bp, Glycine max
  unsure (1)..(112): unsure at all n locations
  Clone ID: LIB3093-006-Q1-K1-H9.R1
gggcagancggtgtgacnntnttggcagatcgttgcacagattctccacctagttagtgcagaagagtaagtatgtctgcggatggtagcagaacggaatggaatggataac

SEQ ID NO: 45614 - DNA, 523 bp, Glycine max
  Clone ID: LIB3093-015-Q1-K1-A9.F1
cctaaaagtagtacaccgttgttgttgttttttttatttattaaaaaagtactacaccgttattccatacttgaatggaaatttgtttttacagcatggtttgctttacgattgaataattattaatattaccccctgccgcacggtcgagagtagtaataatcaaccttccatctccgaccccacgccatgcagccattgatctctgttctctctttttcttttgcacagtatttcattttctaccttcaaacaaaaatttctaaaagcggtttaatttccatgtttcttttctcagctccactgttctggacagtaccattgaagggtcggtgcttgttcatccgagaagaaattgcaggcctcatccgcgctgaggaaattgtgctcctccatcttcacgtactgcgcgtggtgatgatacggtttctggaactgaaaacagttcatcatcgaagacgatgacggcgaggttgatatggagcaattgttgaatttcaagggagagtacatgttgtcttcg

SEQ ID NO: 45615 - DNA, 584 bp, Glycine max
  Clone ID: LIB3093-015-Q1-K1-A9.R1
atttgtattggtttagaggaacatagtccgaggaacagccaacacatgtatggtagggagttccaatcgatgttggacggactcgacgaggaagggtgtgttgaagaaccggggtatcaatctgagaagaagcgtcgtctaagtgtggatcaagtgaaggctttggagaagaactttgaggttgaaaacaagcttgaacctgagaggaaggtgaagcttgcccaagaacttgggttgcaacctagacaggtagccgtatggttccaaaaccgtcgagccagatggaaaaccaaacaattggagagagattatggtgtactcaaagccaattatgatgctcttaagcttaactttgacaccctcgatcaggacaacgaagccttacgaaagcaggtagaataatactccttccaaaatataaacaaatttcgattatttatctgtcttattaatgatattttctccaaattatattttatttaataagataaaaaaaaaactatgtttaatatgattagaaaaaactatttatattttaattaacaataatataatttattgaaattaattaattgttttaataa

SEQ ID NO: 45616 - DNA, 593 bp, Glycine max
  Clone ID: LIB3093-015-Q1-K1-A9.R2
atttgtattggtttagaggaacatagtccgaggaacagccaacacatgtatggtagggagttccaatcgatgttggacggactcgacgaggaagggtgtgttgaagaaccggggtatcaatctgagaagaagcgtcgtctaagtgtggatcaagtgaaggctttggagaagaactttgaggttgaaaacaagcttgaacctgagaggaaggtgaagcttgcccaagaacttgggttgcaacctagacaggtagccgtatggttccaaaaccgtcgagccagatggaaaaccaaacaattggagagagattatggtgtactcaaagccaattatgatgctcttaagcttaactttgacaccctcgatcaggacaacgaagccttacgaaagcaggtagaataatactccttccaaaatataaacaaatttcgattatttatctgtcttattaatgatattttctccaaattatattttatttaataagataaaaaaaaaactatgtttaatataattaaaaaaaactatttatattttaattaaaaataatataatttattgaaattaattaatttttttaataagtatgaaat

SEQ ID NO: 45617 - DNA, 585 bp, Glycine max
  Clone ID: LIB3093-015-Q1-K2-B5.F1
cggcgcctttttttttttttttaagatgcaataagaattttcctcattatctaatgaactaaggtgagtggtgactatcacacattctactttgagagccttgtataaaaaagtagaagtaggtttctttatgagctgtttcattcttgggtttaattcaatttcacccttaaccataactcaaggatttaaataacagatctcatcatgctcaactgtagtgtaatataaaaccttgctttaacttgtgtaattggcaaaaaatgccaaaagaaaaacatggttctcccacactgaattatttctcatgacataacatgccttgaacttgtggcagctgttgtgtactctcttctccttttcctgccactgctgttgggctctggatgagacattccagcctctagagggaaattcaacacggctttatgacccctcattctgaaggcagcacaatcataagccttagcagcatcaatctcagtgtcaaatgtgccaagccacaccctgctccctttctttttggggtcggaatctctgccgcaaacttcccccatggccttctcctcactcctctgtaatgcc

SEQ ID NO: 45618 - DNA, 567 bp, Glycine max
  Clone ID: LIB3093-015-Q1-K2-B5.F2
aagatgcaataagaattttcctcattatctaatgaactaaggtgagtggtgactatcacacattctactttgagagccttgtataaaaaagtagaagtaggtttctttatgagctgtttcattcttgggtttaattcaatttcacccttaaccataactcaaggatttaaataacagatctcatcatgctcaactgtagtgtaactataaaaccttgctttaacttgtgtaactggcaaaaaatgccaaaagaaaaacatggttctcccacactgaattatttctcatgacataacatgccttgaacttgtggcagctgttgtgtactctcttctccttttcctgccactgctgttgggctctggatgagacattccagcctctagagggaaattcaacacggctttatgacccctcattctgaaggcagcacaatcataagccttagcagcatcaatctcagtgtcaaatgtgccaagccacaccctgctccctttctttttggggtcgcgaatctctgccgcaaacttcccccatggccttctcctcactcctctgtaatgcctt

SEQ ID NO: 45619 - DNA, 584 bp, Glycine max
  Clone ID: LIB3093-015-Q1-K2-B5.R1
aaaaattcttaaggatggccacagcagaagaaatttcaactttgaaactgttgcgccaatatctcttgggggatatttcagacccttttctcaccaatctcattccagtaaaacttgaagacccctcatcaggacttgatatgggttcaaacttctcagaacaaagcagcttctgaagtttctggagtgctttgattttgaagcagaagtggtaggtctcacttctcatcataaggtccaaagctccattgcaacaagtccaccccagaatttcaattttccagaagaaccaatggtgtcaatgaaaaaggaagcaacatgttatgcaacaaggcattacagaggagtgaggagaaggccatgggggaagtttgcggcagagattcgcgaccccaaaaagaaagggagcagggtgtggcttggcacatttgacactgagattgatgctgctaaggcttatgattgtgctgccttcagaatgaggggtcataaagccgtgttgaatttccctctagaggctggaatgtctcatccagagcccaacagcagtggcaggaaaaggagaagagagtacacaacagctg

SEQ ID NO: 45620 - DNA, 592 bp, Glycine max
  Clone ID: LIB3093-015-Q1-K2-B5.R2
aaaaatcttaagggatggccacagcagaagaaatttcaactttgaaactgttgcgccaatatctcttgggggatatttcagacccttttctcaccaatctcattccagtaaaacttgaagacccctcatcaggacttgatatgggttcaaacttctcagaacaaagcagcttctgcaagtttctggagtgctttgattttgaagcagaagtggtaggtctcacttctcatcataaggtccaaagctccattgcaacaagtccaccccagaatttcaattttccagaagaaccaatggtgtcaatgaaaaaggaagcaacatgttatgcaacaaggcattacagaggagtgaggagaaggccatgggggaagtttgcggcagagattcgcgaccccaaaaagaaagggagcagggtgtggcttggcacatttgacactgagattgatgctgctaaggcttatgattgtgctgccttcagaatgaggggtcataaagccgtgttgaatttccctctagaggctggaatgtctcatccagagcccaacagcagtggcaggaaaaggagaagagagtacacaacagctgccacaag

SEQ ID NO: 45621 - DNA, 547 bp, Glycine max
  unsure (1)..(547): unsure at all n locations
  Clone ID: LIB3093-016-Q1-K1-E5.F1
atgacaaatataaaagttttttcttttcaaattaacataggtgaagagggcaagttgaagccctatatataagtcacatcagaacccatgattggtggatcaatattaatcttgaaggttgaaggaaattactaatcttcaggtttgggatactcgttcaagtctggtttctcatagctgacgtggctggaactaatggagtgtgtcgacgaggattgctgaagcgcggtttggagcgcgncgactctggcgccgacttgggtcgcttttttgcgaattgaatcggcggacatcttgccctgttgttgggtcgaaacgtcgtcgtcctgggacagcaattcggggaagttaaggcgagcggaagggcctcggaggtggaagacggcggtgtcgtaggcgcgtgcggcggcgacagggggtggcgtaagaacccaaccagatcctcgacctcttgttgggttctctaatctccgccacccacttgccccacttcctcatccttattcctctgtatggcttctcttgttgttggtgctgctgctttcgc

SEQ ID NO: 45622 - DNA, 554 bp, Glycine max
  unsure (1)..(554): unsure at all n locations
  Clone ID: LIB3093-016-Q1-K1-E5.F2
atgacaaatataaaagttttttcttttcaaattaacataggtgaagagggcaagttgaagccctatatataagtcacatcagaacccatgattggtggatcaatattaatcttgaaggttgaaggaaattactaatcttcaggtttgggatactcgttcaagtctggtttctcatagctgacgtggctggaactaatggagtgtgtcgacgaggattgctgaagcgcggtttggagcgcgtcgactctggcgccgacttgggtcgcttttttgcgaattgaatcggcggacatcttgccctgttgttgggtcgaaacgtcgtcgtcctgggacagcaattcggggaagttaaggcgagcggaagggcctcggaggtggaagacggcggtgtcntaggcgcgtgcggcggcgacggggngtggcgtaagaacccaaccagatcctcgacctcttgttgggttctctaatctccgccacccacttgccccacttcctcatccttattcctctgtatggcttctcttgttggtggtgctgctgctttcgcttctcgc

SEQ ID NO: 45623 - DNA, 578 bp, Glycine max
  unsure (1)..(578): unsure at all n locations
  Clone ID: LIB3093-016-Q1-K1-E5.R1
cccacggtccgtaccaatatgaacagaatctcctctcgacacctttgctttgctgcagctcgcaactgcaacttcccacaaatataaatatatattacttcatggtcacacatagttaattttattaattactactaggtagctggtttttaataggtagtaggtaggtgtaatcgttgtcttcctgcagatatggaagaagcgggtttaggagattgttgttcctctaatacgactattacgaggaaaagcgagaagcgnaagcagcagcaccaacaacaagagaagccatacagaggaataaggatgaggaagtggggcaagtgggtggcggagattagagaacccaacaagaggtcgaggatctggttgggttcttacgccacccccgtcgccgccgcacgcgcctacgacaccgccgtcttccacctccgaggcccttccgctcgccttaacttccccgaattgctgtcccaggacgacgacgtttcgacccaacaacagggcaagatgtccgccgattcaattcgcaaaaaagcgacccaagtcggcgccagagtcgacgcgctccaaaccgc

SEQ ID NO: 45624 - DNA, 536 bp, Glycine max
  unsure (1)..(536): unsure at all n locations
  Clone ID: LIB3093-016-Q1-K1-E5.R2
cccacgcgtccgtaccaatatgaacagaatctcctctcgacacctttgctttgctgcagctcgcaactgcaacttcccacaaatataaatatatattacttcatggtcacacatagttaattttattaattactactaggtagctggtttttaataggtagtaggtaggtgtaatcgttgtcttcctgcagatatggaagaagcgggtttaggagattgttgttcctctaatacgactattacgaggaaaagcgagaagcgaaagcagcagcaccaacaacaagagaagccatacagaggaataaggatgaggaagtggggcaagtgggtggcggagattagagaacccaacaagaggtcgaggatctggttgggttcttacgccacccccgtcgccgccgcacgcgcctacgacaccgncgtcttccacctccgaggcccttccgctcgccttaacttccccgaattgctgtcccaggacgacgacgtttcgacccaacaacagggcaagatgtccgccgattcaattcgcaaaa

SEQ ID NO: 45625 - DNA, 560 bp, Glycine max
  unsure (1)..(560): unsure at all n locations
  Clone ID: LIB3093-016-Q1-K1-F6.F2
gacaaatataaaaaggtttttttcttcttcttcaaattagcataggtgaagagggcaagttgaagccctatatatatgtcacatcaggacgcgtgattggtggatcaatattaatcttgaaggtggaagaaaatactaatcttcaggtttgggatactcgttcaagtctggtttgtcagagctgctgacgtggctggaattagcggagtgtgaggacgaggattgctgaagcgcggtttggagcgcgtcgactctggcgccgacttgggtggcttttttgcgaattgaatcggcggacatgttgccctgttgttgggtcgaaacgtcgtcgtcctgggacagcaattcggggaagttgaggcgagcggaagggcctcggaggtggaagacggcggtgtcataggcgcgtgcggcggcgacgggggtggcgtaagaacccagccagatcctcgaacgcttattgggttctctaatctccgccacccacttgccccacttcctcatccttattcctctgtatggcttctcttgttgntggtgttgctgctttcgcttatcgc

SEQ ID NO: 45626 - DNA, 584 bp, Glycine max
  unsure (1)..(584): unsure at all n locations
  Clone ID: LIB3093-016-Q1-K1-F6.R1
aatacaacagcaacatgatggtttcagtttcttgagggtactaatatgaacagaatctcctctcaacacctttgccttgctgcagttcgcaactgaactgcactcaaatataaatatatatacatatatatatatatatatatatatgtattacttcatggtcacacatagttaagtttattaattactaggtagctggttttgaatagggtagttggtagttatagttgttgtcccagatatggaagaagcaggtttaggagattgttgttcctcgaattcgacgattacgaggaagagcgataaagnanagcagcaacaccaacaacaagagaagccatacagaggaataaggatgaggaagtggggcaagtgggtggcggagattagagaacccaataagcgttcgaggatctggctgggttcttacgccacccccgtcgccgccgcacgcgcctaatgacaccgccgtcttccacctccgaggcccttccgctcgcctcaacttccccgaattgctgtcccaggacgacgacgtttcgacccaacaacagggcaacatgtccgccgattcaattcgcaaa

SEQ ID NO: 45627 - DNA, 565 bp, Glycine max
  unsure (1)..(565): unsure at all n locations
  Clone ID: LIB3093-016-Q1-K1-F6.R2
ngatacaacagcaacatgatggtttcagtttcttgagggtactaatatgaacagaatctcctctcaacacctttgccttgctgcagttcgcaactgcaactgcactcaaatataaatatatatacatatatatatatatatatatatatgtattacttcatggtcacacatagttaagtttattaattactaggtagctggttttgaatagggtagttggtagttatagttgttgtcccagatatggaagaagcaggtttaggagattgttgttcctcgaattcgacgattacgaggaagagcgataagcgaaagcagcaacaccaacaacaagagaagccatacagaggaataaggatgaggaagtggggcaagtgggtggcggagattagagaacccaataagcgttcgaggatctggctgggttcttacgccacccccgtcgccgccgcacgcgcctatgacaccgccgtcttccacctccgaggcccttccgctcgcctcaacttccccgaattgctgtcccaggacgacgacgtttcgacccaacaacagggcaacatgt

SEQ ID NO: 45628 - DNA, 658 bp, Glycine max
  Clone ID: LIB3093-006-Q1-K1-E10.F3
taatatggctttgctccctctcatcttgaaagcagctttgtcataagccttggcagcttctatggctgtgtcaaaggttccaagccacacccttgagccttttctattagggtcacggatttctgcagcatacttgccccatggccttcttctaacccctctatagtgcttgttctctttgatgttgttggtttcatctgaagaagaagtaacttgattgttgttatacatggttgtagctattgttgttgttgttgttgtttgtgacatagttgttgtaagacctgaggttatggaagggattgtgatgtttctcaaggacggtttgcggttgcttagatttgatgaggaccttggaggcttggagaaagatgtgatttgaggcatttgaaggttggtatggttcattggtatgttattgttgctcatatctggaaattgaaattgagatggaacttcttggggtagaaggtaatcagtgatgcaaatctcagattgtgagattgaactttgcatttttggttgtgaaattgaggcttataaggtgtttgaggtgcaaagagtgaaattgggttcaagactgtgaatggttttataattcaaggagagacaaggaactgatcaacttcttggatggttgctaaagttaggaaagttg

SEQ ID NO: 45629 - DNA, 490 bp, Glycine max
  Clone ID: LIB3093-006-Q1-K1-E10.F4
tgttggtttcatctgaagaagagtaacttgattgttgttatacatggttgtagctattgttgttgttgttgttgtttgtgacatagttgttgtaagacctgaggttatggaagggattgtgatgtttctcaaggacggtttgcggttgcttagatttgatgaggaccttggaggcttggagaaagagtgatttgaggcatttgaaggttggtatggttcattggtatgttattgttgctcatatctggaaattgaaattgagatggaacttcttggggtagaaggtaatcagtgatgcaaatctcagattgtgagattgaactttgcatttttggttgtgaaattgaggcttataaggtgtttgaggtgcaaagagtgaaattgggttcaagactgtgaatggttttataattcaaggagagacaaggaactgatcaacttcttggatggttgctaaagttaggaaagttgagaatttcggacgcgtggg

SEQ ID NO: 45630 - DNA, 505 bp, Glycine max
  unsure (1)..(505): unsure at all n locations
  Clone ID: LIB3093-006-Q1-K1-E10.R3
aactatgagcaaagtgagtttaacaacaataataatagtaataagcatgtgaagaaagagngtgttctcccaaagctgtttgccctttgactcctcatgttggaaaggcttttgggacactgatgttatgggaactatctttagtgtgcctcctttgtcaccactatctccactaatggttgtttgagattgtggactttcgctatttcaatgatggtttgaggtaaccaaattaaggagagatgatgctggggattgtcctctctgatttaggttggtaatttgcgtaaatcaaaatggtagtactaattaatctactaatagattaatttgcaagtgaagatatatgggtttgtataatgtaaatataggatagtatgaagcaagatttttttgtttgttaaaaaaaaaaaagctctcatgcttatcttcttcccttagttatgtttcatttggtcaagaaatgtactgtacttgaagcaacattgaaatttgtttattcgtt

SEQ ID NO: 45631 - DNA, 600 bp, Glycine max
  Clone ID: LIB3093-006-Q1-K1-E10.R4
cgtgccaccttatagtaaaggctcagggtgtggcttggaacctttgacacagccatagaagctgccaaggcttatgacaaagctgctttcaagatgagagggagcaaagccatattgaatttccctttggagattggagagtcagaggaatcagtctcaagctgcatcaaggttggtgtgaagagggaaagagaggaagagagtaaaagcaacaactatgagaaaagtgagtttaacaacaataataatagtaataagcatgtgaagaaagaagagtgttctcccaaagctgtttgccctttgactccatcatgttggaaaggcttttgggacactgatgttatgggaactatctttagtgtgcctcctttgtcaccactatctccactaatggttgtttgagattgtggactttcgctatttcaatgatggtttgaggtaaccaaattaaggagagatgatgctggggattgtcctctctgatttaggttggtaatttgcgtaaatcaaaatggtagtactaattaatctactaatagattaatttgcaagtgaagatatatgggttcgtataacgtaaatataggatagtatgaagca

SEQ ID NO: 45632 - DNA, 394 bp, Glycine max
  Clone ID: LIB3093-010-Q1-K1-H4.F3
tttttctctctttctctgtttgcatccatcaatgcctgctctaataaagctttggcttcaggattaagctcactgatgaacttcaatggagacggccagacaagaggttctgcagatgtaggatttagcaatgatgcacaggctccatgtttgtgtttcagagcaaccatatatggtatccgcccagatgcatcgcgttgaagacgatcagcaccccatgccaacaattcacgaatgcaatctatagatccccctctagctgctagatgtagaggagtgctcccaggacagccatatccaccagttgaagcacaaacaagagcaccactgtctaatagaatatgtacacattcagaccgtctctgacgagctgccaagtgcaatggcgttgcac

SEQ ID NO: 45633 - DNA, 479 bp, Glycine max
  Clone ID: LIB3093-010-Q1-K1-H4.R3
acagtggtagcagcagcttcaagggactatctagtgttagttcattcgggaagttgggtagccgcagctctggaaggattgctgctgagtggcttgataaacagtgatggcaaattacttgtggtaatcaatgattccatattggcaagatacggtaactacagaggtgcttaaccggcaaggcaaaaatcaaagttgaaaacaggtgaaggaatattatgtaattttgggaaataagcaaaagtgagttgaagtgaagtgaagttcgcggtaggtaccaagtgttgttgggaaaaagagaaggggatgtcatgttgttgtagtattattgttacttgagaatgaagaagcatcacctgcgtcgatcgatgattttgggcatcgtcaataattttattttatcatacgtatcccagtaaagtgggaataatttctctcaaaagtataaatcaataatattaagggaaagtgtattgctt

SEQ ID NO: 45634 - DNA, 614 bp, Glycine max
  unsure (1)..(614): unsure at all n locations
  Clone ID: LIB3093-016-Q1-K1-F6.R3
ggtttgtcagnactgctgacgtggctggaattagcggagtgtgaggacgaggattgctgaagcgcggtttggagcgcgtcgactctggcgccgacttgggtggcttttttgcgaattgaatcggcggacatgttgccctgttgttgggtcgaaacgtcgtcgtcctgggacagcaattcggggaagttgaggcgagcggaagggcctcggaggtggaagacggcggtgtcataggcgcgtgcggcggcgacgggggtggcgtaagaacccagccagatcctcgaacgcttattgggttctctaatctccgccacccacttgccccacttcctcatccttattcctctgtatggcttctcttgttgttggtgttgctgctttcgcttatcgctcttcctcgtaatcgtcgaattcgaggaacaacaatctcctaaacctgcttcttccatatctgggacaacaactataactaccaactaccctattcaaaaccagctacctagtaattaataaacttaactatgtgtgaccatgaagtaatacatatatatatatatatatatatatgtatatatatttataatttgagtgcagntgcagttgcgaactgcagc

SEQ ID NO: 45635 - DNA, 433 bp, Glycine max
  Clone ID: LIB3093-050-Q1-K1-G7.R3
caactcaagcacgctcaccacgaatccttcttgccagctgaatatccttgggcataatggttacacgcttggcgtgaatggcacacaggttagtgtcctcaaagagcccaacaaggtatgcctcagcagcttcttgcaatgcaagcacggcgtggctctggaaacgcagatcagtcttgaagtcctgagcaatttcacgaaccagcctctggaaggggagcttccggatcaaaagctcggtactcttctggtatttcctaatctcacgaagagcaacggtaccaggacgataacggtggggcttcttcacaccaccagtagttggtgcagacttacgtgcagccttggttgcaagctgcttcctaggagcctttcctcctgtggacttacgagcggtttgcttcgtacgagccatctgtgtcggacgcgtggg

SEQ ID NO: 45636 - DNA, 138 bp, Glycine max
  Clone ID: LIB3093-017-Q1-K1-G1-f3
aagttctagcatacttgccttgccgccaatttagactgttgctcactcttagctccagtgcagaccatcttgccagatgcaaaaatgagtgcagtagtttttggttccctgatcctcataataacagcagcaaaacgc

SEQ ID NO: 45637 - DNA, 610 bp, Glycine max
  Clone ID: LIB3093-017-Q1-K1-G1-r3
ttgttggctcttgtgatgtcaagcttccccattcgacttgagggtcttgcctattcccatagtgctttctcaagttatgaaccagagctgtttcccggactaatctatcgcatgaagcaacccaagatagtcttgcttatatttgtctccggaaaaattgttctgacaggagccaaggttagagatgagacttacacagcttttgagaacatatatccagtgcttactgagttcaggaaaaaccaacaatgattactactgtcaagagagcaggagcaagacttgattgaactgtaaatatgaagaccagagatagaaatatctgtaatcaggattgagttttaataagacacctgtgtttgttctgtctttttctctcttttaagaaaagggatcctgctttagtaaagtggaagaaaaaaaaaaccgtgtattgaatttgactgtagaaaaagagatatataagaggcagaatgaaaagaaaaagtggaagcttgtgcaaatcatgaatatctttcactgaagtggaaactatttttggttcatttcaactatgagcaactttgttttttagttaatcaagttctaaagcttaaggatagtgtcttca

SEQ ID NO: 45638 - DNA, 526 bp, Glycine max
  Clone ID: LIB3093-015-Q1-K1-A9.TA
ctctaaaaaaaaaaccccggggggggggttttttttttttttaaaaaaaaccccccccccgtttctctctttggagggggaaatatttttttttaaaaggggggggtttcccaaggaggaatatttaaaattacccccccccgcccggggggagagggggaaaaaaaaaacttccttttttcgccccccccccgggaggcatggagttttttttttttttttttttttgggaaaaaattattttttttcctcccaaaaaaaaatttttaaaagggggggattacccgggggttttttttaaaaaccccgggtggggaggaaaaaataaaggggggggggtggtttttccctaaaaaaaaaaggggcgccttcccccggggggaaaaggggggccccatttttaggaaatggggggggggggaaaaaaggtttttgaagcgaaaaaaattttttttttaaaaaaaaaaagggggggggggttttggggaatctttggattttatggggggggacaggtgggtttttt

SEQ ID NO: 45639 - DNA, 664 bp, Glycine max
  unsure (1)..(664): unsure at all n locations
  Clone ID: LIB3093-010-Q1-K1-H4.F5
tcagcactgtcttgtcagtttcatcgtggcattctgtcttcacaacaacgagtcttgttatcgtgctccgacaaaatggacaaactggtggagtaagacaggcagtggcagggttgggcttgttgtggcaacacagggctagtgtgcattgtgcacacatctggtggccacagttctgaacttcaattgtgcacacctgctcaaagcagatgcaacataattcggactcactaacctcagacatattatcagctaccccatcagaatgtgatggagatggcagagagtaagaactccctttcaatatgtttttctctctttctctgtttgcatccatcaatgcctgctctaataaagctttggcttcaggattaagctcactgatgaacttcaatggagacggccagacaagaggttctgcagatgtaggatttagcaatgatgcacaggctccatgnntttgtgtttcagagcaaccatatatggtatccgcccagatgcatcgcgttgaagacgatcagcaccccatgccaacaattcacgaatgcaatctatagatcccnctctagctgctagatgtagnaggagtgctcccaggacagccatatccaccagtttgagcacnaaacagagcaccactgtctaatagaatatgtacacattc

SEQ ID NO: 45640 - DNA, 557 bp, Glycine max
  unsure (1)..(557): unsure at all n locations
  Clone ID: LIB3093-010-Q1-K1-H4.R5
gggtnagctgataatatgtctgggttagtgagtccgaattatgttgcatctgctttgagcaggtgtgcacaattgaagttcagaactgtggccaccagatgtgtgcacaatgcacactagccctgtgttgccacaacaagcccaaccctgccactgcctgtcttactccaccagtttgtccattttgtcggagcacgataacaagactcgttgttgtgaagacagaatgccacgatgaaactgatcaagacagtgctgatatcaactgttccaagctgagcaagtcatcaaggaaactcagacacttgaatgacagtggtagcagcagcttcaagggactatctagtgttagttcattcgggaagttgggtagccgcagctctggaaggattgctgctgagtggcttgataaacagtgatggcaaattactttgtggtaatcaatgattccatattggcaagatacggtaactccangaggtgcttaaccggcaaggcaaanatcaaagttgaaaacaggtgaaggaatattatgtaattttgngaaataagcaaag

SEQ ID NO: 45641 - DNA, 394 bp, Glycine max
  Clone ID: LIB3093-005-Q1-K1-B3-F2B
aaaaaaaaaaccccgggcttccccttttttaacaacccccctttaaaaaaaaacgggggggaaaaccccaggggacaaccccccccccaaattaagggcccccccccccttatttaaaaaaaaggaaccccccccccttttttttcaggggggggggggggcaaaattcatttttaaacaaaaacccgtttttaacccgccttttgttcggaaaaggagccaaaaaacaaaccccccgcccctttgggaaaatctaaaacccccttttacaaaattcccggccccccaaaataaaaaccaaccccccgccccccaaatttttatccccaactgggggggctcccaacttccacccggggcaatttggggaaattaacccccccccgcccccccc

SEQ ID NO: 45642 - DNA, 575 bp, Glycine max
  unsure (1)..(575): unsure at all n locations
  Clone ID: LIB3093-005-Q1-K1-B3-R2B
gtacgtgcgaggtgaaatattagggtggaatccatgacttgccggggttaccagctggagtgaagtttgacccaaatgaccaagaaatattagaacatttggaggcaaaagtggcgtctgatgcatgcaagcttcatccccttattgacgagttcataccaacgcttgaaggcgaaaatgggatctgttatacacacccagaaaagctaccaggtgcttcatgttttacttaatttattttattttaattattttttgtctaattaattagtatagtttcgtgttttagaatacttattgcatatacacatcattgaattctcatttattgggagacacgtcttgatgtgcacgataccgcatgcatgaaattaattgttttagcaatgaaatgattttttttttctttgaaaaggatctctaatcataaggcggttcaaatttgaaaatgacagcagaacattttatgcactctatanaatgagatctcaaaaattaacttatgagaaaatgtttttggtttaaaattaaattttcttcatatttttagagatactanagatttaatatgagct

SEQ ID NO: 45643 - DNA, 510 bp, Glycine max
  Clone ID: LIB3093-006-Q1-K1-G6-F2B
aatggataataattatccaagtctcaacatcatgttattttaatataaattaaataaaaaactataatttataaataaaaaacattatcttttataatctttgagccacttaaacatccttcttttggacctctttgggtccatcctaacaaaatgcctaatacatgttggttaaaaaaaataactcaatatactggtactcgggcaaacatgctataatggccttcctactctaataggccctacttatcaatatcattacagaaattgcattacattcacaagtctcaattctacccgaaaacttgtgccatagttttaccaagtaacttcgtgcaaagcttgttgcaatcttcatcacagcacctgaaggttaagcaagtagaggtagccaaaccaaggataccaaaaccttcagtatagtatgagttctgaacccagtccagtagcatctcattatgctggcacccaacaagtggaagcatacaaaatgtggcccttccaaccttg

SEQ ID NO: 45644 - DNA, 559 bp, Glycine max
  Clone ID: LIB3093-006-Q1-K1-G6-R2B
gtgaaaacgaatggaggttgatgatcgagagagagcttttgggccgggagattatgaatgttatagcatgtgaaggttctcagaggattgagaggcctgagacatacaaacagtggcaggttaggaatacgagggctggtttcaagaagctccctctgaatgaggaattaatggccaaattgaggactgcgttaaaggaatggtaccacagattttgtcttggatgaagataacaactggttgcttcaagggtggaagggccacattttgtatgcttccacttgttgggtgccagcataatgagatgctactggactgggttcagaactcatactatactgaaggttttggtatccttggtttggctacctctacttgcttaaccttcaggtgctgtgatgaagattgcaacaagctttgcacgaagttacttggtaaaactatggcacaagttttcgggtagaattgagacttgtgaatgtaatgcaatttctgtgatgatattgataagtagggcctattagagtaggaaggccattatagcatgtttgcccgagta

SEQ ID NO: 45645 - DNA, 540 bp, Glycine max
  Clone ID: LIB3093-009-Q1-K1-E5-F2B
gagttacattccatcacttataatacttgatcaatgtataatataatttctgaaatgaaattctaaaactaggactagatatagagttggcttgccagagagagtagtgagagaagaaaagggagaaattaaattgccgtagagatgcactttatgaaagatctttccgagaatgtgtgctacaacctactatgaaatttaatttgaggtatcctagatatattagccaaaaaagacttgctaaatctttaccatcatgatgaggcagagggtggtgcaaagcttgattttctgttgtttaatcagctcaacatgtcatccttagtggaactttatttccactttaaaggatcaaatatgtcccagccttccatgttgtatttacatagagagaccccttgctctaaagaatgatctctattttatggaatacttaaacaattgacactaaattagcaacacttcaccaaaattccatttaattattgtgcaacaatcttcctgagatggcagcaacaagtgctgctctaaaattaggat

SEQ ID NO: 45646 - DNA, 555 bp, Glycine max
  Clone ID: LIB3093-009-Q1-K1-E5-R2B
caattgcaacatactaagtgggttggctggtttagatctgagcaacagcttttaattttctacttgcttgaattttattggaagccatggattgttcatcatggattaacacttccttggatctcaacattaatccccgcagagttcatgaagaagttcccaaggaggtagaaagcgagcttttctctttgggaatgaccaagtttaacgtggaagaagagtctactagtgacttggaggaggaactgaagcgggtgactgcagaaaacaagaagttggccgaaatgctctcagtggtgtgtgagaactacaacactttgagaaaccatttgatggaatgcatgaggaaaaatggtgaaaaggaggtcagcccaacatcaaagaaaagaaagtctgaaagcagcaacaacaatagtaatttgatgggaactaacaatggaaactcagagagcagttctactgatgaagaatcttgcgagagaccaagggaagagatcatcaaagcaaaaatttcaagagtttatgtcaggactgaagcatctgatactagcctta

SEQ ID NO: 45647 - DNA, 537 bp, Glycine max
  Clone ID: LIB3093-013-Q1-K1-D11-F2B
aaataaataatgatgcacgaagatccctataagactgtaaaattacaatgatataatacatcaggtatattatatatcacgatctacagtaagggcaaataaaaaaaacggttttagaaagcatatacagattaagtgcttctggtatttaaggattcaggaaaacaaaattttgaagcaactatatactctaaggaattcatgctctcctctccagggagtcaaaaatctgaatgatcatattctttgccatctttttctgcaacaagaggatcaggatgcacttgacgaacaaattgtcctttaactctgggacgctgctctgctagtttttttctgctctcgtatcgaaccttcttctcatagcatctctctttccttttcaagcgaaatttgtttaaagctgcttctctttggatagatcgatgagagtttgcattatttgtgaggtcttcatgctttccctctgaagctgcccaaacagtgttaacttgatcaacattgctgctacttccacagttgcttccataaccaatg

SEQ ID NO: 45648 - DNA, 565 bp, Glycine max
  Clone ID: LIB3093-013-Q1-K1-D11-R2B
gttttggttccgcagaagattctgaattctgatgctctagtgcgattccatgggagaggtggtcatcatgagtggagagaagaagtcagttagagtggagggggtggagaaggaagatagtggtggaagtgggagcaaggctggtgaatttaaggggttgatgaggtgggagaagttcttgcccaagatggttttgagggtgctgttggttgaagcagatgattccacaagacaaattattgccgcgcttctcagaaaatgcagctacaaaggttatgtgatggggatctgggttcaatgaaagtctaaggatctaatggctcctttccacttgctttaagagtcttggcagtctggaaactacaggcttacatgatagtgatacaattattttcttacatgatatgattattttcagttgtctatttgccataaagaatttctattattgacctttgttcttgtatgaaacttttaatgtgagaaaatgaagtacttgaaactaatttacacaatattagaacttcaaaataactttgctcatctgctttgagcagtggttgct

SEQ ID NO: 45649 - DNA, 51 bp, Glycine max
  Clone ID: LIB3093-014-Q1-K2-G4-R2B
aaaaaaaaaagagagaaaaaaacagagaaaaagaaaaaaaaagaaaaaaag

SEQ ID NO: 45650 - DNA, 362 bp, Glycine max
  Clone ID: LIB3093-017-Q1-K1-G1-F1A
agttatcaaatgtagtgttttatttatcataacgtcttcaaattccaatatgaaattataatacctagatgttgctagcttcataaaacatagtgtattaaacacgtcgttgctgttttgaacagtatacgaagtcactatccttaagctttagaacttgattaactaaaaaacaaagttgctcatagttgaaatgaaccataaatagtttccacttcagtggaagattttcatgatttgcacaagcttccacatgtttcttttcattcgggctcttatatagcgctgtttctacagtcaaattcaatacacggtttttattttcttccactttactatagcagggtccctttttcttaaaa

SEQ ID NO: 45651 - DNA, 494 bp, Glycine max
  unsure (1)..(494): unsure at all n locations
  Clone ID: LIB3093-019-Q1-K1-C2.F4
acctagtgagtatagcgttgttggacatataggctgcattggcactgttgttggtgttggaattggtagtgacactgttgttgttgttgcaattggtagtgacaccgatgatgctactactcttgatggtgctgattgtgggggttttggtgaagggttgggagataggggtgttgnanannnnnncncanngnctnnnnnnnnnncnnnnanncnnnnnnnnnnnccntcnnnnnncccactncnnccnncnnnnnnnctctnnnnnnactnnnacacnnncncnaatttctctttncacttcttnnatcttctntaatacccaanctctnccatcttcctnnatacttcttcccacaannaacccttnacacttncatctcnaaacnccacatccatatcnnatcatatccttaacaataccaaaatctcttatcnnttccaccctttaccncctaanctacattcaccttcttcnattctacccctctcat

SEQ ID NO: 45652 - DNA, 452 bp, Glycine max
  Clone ID: LIB3093-019-Q1-K1-C2.R3
gagtgcaggggttgtcggaggtggccattgtggtggagaaattaagaatttgaatattcacgtacggtgaagttacacatggcaatggttatggtatcgacctgtggtggaaggaggatgatgaggtttggttggtactttgttgtagcatataatcagtaagattagatttttttttttcttttctgttttataacagtttgtttattttttgggagaataaataaagtccgatgagagagggaatttaagatacagaccaataaagaagagagggaccttaattaaggttgtattttttcttttcttttatcttcatcttatttttttttaatgttcgttcttggtgctgtaaatgggaggagagattaattcgggttttgtccttttcttatctctttaagttttgacatcttgttactcttcaaatgactgacattgacttctctttc

SEQ ID NO: 45653 - DNA, 690 bp, Glycine max
  unsure (1)..(690): unsure at all n locations
  Clone ID: LIB3093-019-Q1-K1-C2.R4
tccccatcaataaacctacaatcccttcttaccctccaacaaaccctaccaatttcccaccaccaccaaaccctaccctaccatcctctttccccaccgacaccttctccaattccagctcctcctccacctcctccgaggaaacattggaagggagacgcaagaggaagcgcaagtggaaagatttcttcgagagactaatgaaagaagtgatcgagaagcaagaggagctacaaaagaagttcctggaagccatagagaaacgcgaggacgacagaatagcaagagaagaagcatggagagtacaagagatgaaaagaatcaatagggaaagagaaatcttagcacaagaaagatccatagccgcagccaaagacgcagccgttatgtcattccttcaaaaaatagccgaacaacaaaacctcggtcaagtatcgaccaacatcaacctcgtacaacaaccacaacctcaattacaaccgcagccaccactacaacaacaagtgacacaacctagtattgcagcagcacaacctcccgtacaacagccaccgcccgntggttgttacacnagcccgtggtgcctgccagtggtgtcacaagtgacgaatatggagatagtgaaagccgataataatagtaacaacaataataacgggcgaaaatttcttggcaccaagttctttctcg

SEQ ID NO: 45654 - DNA, 676 bp, Glycine max
  unsure (1)..(676): unsure at all n locations
  Clone ID: LIB3093-034-Q1-K1-B10.F3
actcttgtaatacgcctctctaatcccaccaagctggttactttatacctgaagagaagccttgtcttgaaggaaaaccccaggttgtgtcctataaggtttctcactagcaaagcgtttgtccgacggcccagcacctaggatcccgagtgagttaggatcagcaatccggactccattactaacggtcctttgaggtggtggctgaccctggaagtgattgtcactttcagttcttcttcttcgtttccatgcctcggatttcccagtattatcaactggttctggcatttgataggtagccatattttttaatcctctttgcctctccatatggaaacggaatggatttccatttctgctaaatgaaacagataccgatccatttgtgtgagaggggccaacctctgcctcatcttgctcctgtctaagtttggaatatatttgatgaagcctctcccctgaaagatgggaaaaagtggagacatatttccacagtcgcacggtcattctatcttgcttatagggttcctgttcatgttctaacacaatttgatctatccttctcccaagaagttgtaaatagttgcgtattttcgaaagcaccttttcctttggaagattggcactagtttgctgcaacctgtggaagacgtttcanagttttcatttcttc

SEQ ID NO: 45655 - DNA, 515 bp, Glycine max
  Clone ID: LIB3093-034-Q1-K1-B10.F4
catcagataattccatttgatcttggagagaacagccttatccttcaaaactacttcatatgtagtcaacagtgcattgaattttattggcttcccaggttttttctcattataaaattcatattgttgacaaacctctcgacttgcacgagtacctacatatatgataatattcatatcaggaagccacttcctgaattctttggcccaatttgataaagtggacaatggaacaactacaagaaaaggaccatggatttgctgggcattctgtagaaaaccaagcatcgatactgactgaacagtttttccaaggcccatttcatcagctaaaatgacatttgtatcatttctccaactgttaacaagaaaattcagaccctcaagttgataatcacggagctctccacccttcaaccattcaggttgtttctcaagcttccgcaaacttgctttgctcttcttacgctgagaatctaccatctttccttgaactgccatagcagcctcacgag

SEQ ID NO: 45656 - DNA, 460 bp, Glycine max
  Clone ID: LIB3093-034-Q1-K1-B10.R3
tttttcttccaccctgcgaataagaccttgtgggatcccttttgggtgtgttttggcggatatgaggaatatccctacactgggattcgcatccttgaagatggctgaagccaaaaagatctaatgcaagatgaaaaattagtcttgccaattgtttctttttcctttttgatttctactccttcgaagatgaccaagcaaagtgacatggcgaacatcttgaaaagtgaagagttttacccaattctatagagacatacttaggaaactgtacattgtcaattctgcaatttattggattttactactcacttcataaagtattatgttagctgatgtagacaaaaatgtatttgatttttgtggtaattatagctttaatttccgagattttgtagctccttcaagtgagtttccttggtgaatagtgaatgaaaagtgatttctcggcttctggcct

SEQ ID NO: 45657 - DNA, 671 bp, Glycine max
  Clone ID: LIB3093-034-Q1-K1-B10.R4
ttgcttatcactggcactcctctcagaaagtgtggaagaactatgggctttgcttcatttccttgatccggacaagttcaggagcaaggatgaatttgttcagaactataagaatctgagttcttttaatgagaatgagcttgcaaatctgcatatggaattgagacctcacatacttcgaagagttatcaaagatgtggagaaatcattaccccccaaaattgaacgtatccttagggttgaaatgtctcctcttcagaaacagtattataagtggattttggaacgtaattttcacaatttgaacaaaggagttcgtgggaatcaggtttctcttttaaatattgtggtggaattaaagaagtgctgcaaccatcccttcttgtttgaaagtgctgaccatggctatggtggggactcagaagtagtgacaacagtaaactagagagaattgtttttagcagtggcaagcttgtcatacttgataagctgcttgttaaattgcatgaaaccaagcatcgtgttctgattttctctcagaggcgtaatgcagatggttaggatgttagatatactgggagagtatatgtcacttcgagggtttcaatttcagaggcttgatggcagtacaaaagctgagcttcgacaacaagcaatggatcatttcaatg

SEQ ID NO: 45658 - DNA, 615 bp, Glycine max
  Clone ID: LIB3093-050-Q1-F3A-B10
gcacagaggtgttaggtctgttgactaagccactcataaagcttttactgccccatactccacatcataatgttatcaagcatcacgataatcacagatccatctactccaagtccaaaatcagtcactatcccacttcttgggagtgcccaagaatctgaagttgatatcgatggccatgatattcatcgtccaagcagtattcgtgccttgcttacgactccaacacacactgttcatcgtttgtggcgtaagtttgatgatgcattcatgcgtcctgtttttggtggcaggggttttgttcctgtagaacctggctcaccaactgaacgtaatggccatcaatggcgttgagagaaaaaaagccaagaaatttgtaatttggattagaaactgcataagttttgtggagatcaagcaatgcgtgtataagaatccggtcctgagattttgcttaactctttgggtagtgagaagtgagaaggctgtgcaatgcaccataagcatctaaactcatgtctgcgttttccgtaaaatgtaatatttgattatttagatttccttggactaaaaagctggaataactaaagctaaaatttttttttccaagttgga

SEQ ID NO: 45659 - DNA, 395 bp, Glycine max
  Clone ID: LIB3093-050-Q1-R2-B10
gagaatttcagcttcagacagccagtgatcatttcgtgggctggccttatgagaggtgctgtttcaatcgcacttgcgtataatgatttcaccatgtatatgcacacttaactgtgaatcaatgcaattatgatcacaagcaccatcactgttgtgcttttcagcacagtgatgtttgttctgttgactaatccactcataaggcttttactgacccatactccacatcataaagaatcaagcatcacaatgatcacagatccatctactccaagtacaaaatcagtcactatcccactttttgggagtgcacaagaatctgaaattgatatcgatggccatgatattaatcgtccaaacacgattttgtgccttgctttacgaatccaacacac

SEQ ID NO: 45660 - DNA, 415 bp, Glycine max
  Clone ID: LIB3107-052-Q1-K1-A11
gagaggaagcggtgaactgcctcacccaatgcgcttggaacaacaagcttaacgccatcttggatcgccttgctaccctcactccagcacccatatcgactccgcttcccatggctgcttcccacctctctgccaacagcaagccccatgccccctccttcgatctccatcgcagtggcaaccactcagaccattatgccaactccacctcccatagctgcttcccatctcccttcatcgatcacaatcctatttttttctctctttgtctctctcgctctcgctcctgtgacgaccagaggagcgttcgagatcacggcctctctctccatctctgtcgtgatccttcttggaccctccgttctcgtcgtcgcccctcgacctcttgctctgtctgtcatcggcatcaacgttc

SEQ ID NO: 45661 - DNA, 408 bp, Glycine max
  Clone ID: LIB3107-052-Q1-K1-C11
attggagatcctcctattgtcgttcttgatgagccatccacaggtatggatcccattgccaaaaggttcatgtgggatgtaatatctaggatctcaacaaggcgaggaaagactgcagtaattcttactactcacagcatgaatgaagctcaagccttatgtaccagaatagggataatggttggtggacgattacgatgcattggaagtccacagcacctaaaaacaagatttgggaatcatctggaactaggggtcaaacctactgaagtgagttctgcagacttgcaaaacctctgccaagctattcaagaaagacttcttgatgtcccttctcatcctagaagcttacttaatgaccttgaaatttgcattgggggcactgactccgtcacatcaggaaataca

SEQ ID NO: 45662 - DNA, 425 bp, Glycine max
  Clone ID: LIB3107-052-Q1-K1-C9
ctttaagacgatcaagggggaacggaaaacgcgtggcgcgcatccttgagcttctcttctcttctcttctctgtcgtgagtcaccatggtgagggttagtgtgctgaacgatgctctgaagagcatgtacaatgctgagaaaaggggaaagcgccaagtcatgattaggccatcctccaaagtcattatcaaattccttttggtgatgcaaaagcacggatacatcggagagtttgagtatgttgatgaccacagggctggtaaaatcgtggttgaattgaacggtagactgaacaagtgtggggttattagtccccgttttgatgtgggcgtcaaagagattgaaggttggactgctaggcttctcccctcaagacaatttgggtatattgtattgactacctctgctggcatcatggatcatg

SEQ ID NO: 45663 - DNA, 446 bp, Glycine max
  Clone ID: LIB3107-052-Q1-K1-D11
gacgacagaagggataattaaatacataaatgtagctaaactgtaatttttcaacgtaatatttgtaattaaatatttttattttcacaattgaaaaacaattcataagctaaaaattatatttgtataaaacacaatacgtaaattgaacacaaaatatgccaaattcaaaggttcatatacagatctttacataccaaagaagtacagtgtttttttttacataagtagaaatacagtgctatgtgcccctgttaaatcccaagagccaaaactaattaaatacctgagattataggacttgtaacattactctaattaataaacattacgattaacaatgtggaatgattaccactatggcaatggcccaccgcccaagatattaggagaaatatgcatctggtatgaaggatttaagtgtcggcaaaatggttttttatact

SEQ ID NO: 45664 - DNA, 160 bp, Glycine max
  Clone ID: LIB3107-052-Q1-K1-D9
ttaagggactctcttaacatgcaatcaacacgtacaattagaaaatttttaacggccattaaaccattcctctctctaatactattgcttcctaccttattgcctctcttttccttctccaaaattcaaatccctatcaatcgtctcacatacaaacgca

SEQ ID NO: 45665 - DNA, 421 bp, Glycine max
  Clone ID: LIB3107-052-Q1-K1-E11
attgttatttagattttatttattggtgcttagggtttattgtttgttatactgtcattttgtcaaattttgttatctgaagtaagaaatattatcttattcttatcatctaaaacttctaagttctcaatggcttatgttgttcgtgtaaaaactttagtattctcaaccaataaaaaataaccataaacataatttttaagataattattataaatatcaacaaatttatgttatacgatgatttgtgattaggtcatttaaactattttacattgagaatatataacctattctcaatttcttaatccaaatgcaatcctttgttctgactaaaatttaactctatgttttggtccgagaattgtgagttattcatgaatgttctaggcttctagagaaactgttgaatgtaaaatac

SEQ ID NO: 45666 - DNA, 395 bp, Glycine max
  Clone ID: LIB3107-052-Q1-K1-F11
ggtatcacaggggtttattttgaaaccctaaagtttgcccccttacacgtttttttgtcttcttttttctcccatctttgtttcgagaagcatttgacgaagagaagagacagtgaatcgcggtttcaattcaacccacttcatctcaggtgtttgaagttgagataaaaatgagcggaacagagaaagcaggatcaggaaccaccaaaacccccgccgatttcctcaaatccattcgtgggaggccggttgtcgtcaagctcaattctggtgttgattacagaggtatacttgcttgtctagatggctatatgaatattgcaatggagcagacagaggagtacgtcaatggacaactgaagaacatgtatggtgacgctttcatccgagggaat

SEQ ID NO: 45667 - DNA, 421 bp, Glycine max
  Clone ID: LIB3107-052-Q1-K1-G11
ggttctagtgtgtgattgtttgttgttgtaactggttcttcttcttttgttgttctgtgtttgtgtttgttttttctctcacctgaaaatgtcttgctgcggtggtaactgtggttgctgaagctcctgcaagtgcggcaactgctgctgaggctgcaagatgtacccatacttgagctacactgagtcaaccaccaccgagaccttggtcatgggagtggcacctgttaaggctcaatttgagggtgctgaaatgggtgtgcccgctgagaacgatggctgcaaatgtggaccaaactgctcctgcaacccctgcacttgcaagtgaagtgttgggagagcaagcttcaagcagagatagcccttaattaggaataatgataaactattaatgtgtagctaaaaacttatgtattatgtc

SEQ ID NO: 45668 - DNA, 388 bp, Glycine max
  Clone ID: LIB3107-052-Q1-K1-G9
ttttaagggggagcaagagtgaagggcgaagggaatggctcccaagggtttaatccttttggctgtgttatgcttctcagcactgttactgagtctttgtcttgctgaggataatggactcgttatgaacttctacaaggaatcatgccctctggctgaagacatcatcaaagaacaagtcaagcttctttacaagcgccacaagaacactgctttctcctggctcataaacatcttccatgactgtgctgttcagagttgtgatgcttcactgttgctggactccacaagaaggagcttgtctgagaaggaaacagatagaatcttttggttgaaaaatttcatgtacatttataccatcaaagaagcttttgaaagggaatgccca

SEQ ID NO: 45669 - DNA, 386 bp, Glycine max
  Clone ID: LIB3107-052-Q1-K1-H11
gaagattgggtggtggaaatggaatcggcagctgaaaaccctaattacccggcggtggactacaagcgaccttccatcttgtcatttcctcggaggcccgccctcagagttacatccgagttcgatagtgaaagcgcagtcttcttccataagatttcctgcaagttgttggacagccttgccaagttcaagttttcgttcaaccacagcggtaagggcggcgacatctccgaacctcaattcagctttgtctccaagcaccttatcctccactacgacctcgaagaccataatgctctcgttaagacctccatcgatcttgctcccagtttgcaactcactgcttctcatgatctcaaggctcaacaaggagaggttaccgtgct

SEQ ID NO: 45670 - DNA, 436 bp, Glycine max
  Clone ID: LIB3107-053-Q1-K1-A10
cggataaggacgttttgggagaaggtgataacaccaagcttgatattcagattaagttggacaaggaaaagaaaattctctcaattcgagacagaggtattggtatgacgaaggaggatttgataaagaatttggggacaatagcaaaatctggaacttctgcatttgttgagaagatgcaaacaagtggagatctcaatctgattgggcagtttggagtcggcttctactctgtttatctcgtggctgactatgtcgaagtcattagcaagaataatgatgataaacagtatgtatgggaatcaaaagctgatggagcatttgcaatttcagaagatacatggaatgaacctttaaggcgtggaactgagattagattacaccttaagggaaaggctggggaagtcttgcaggaatctaaactgaatgaattggt

SEQ ID NO: 45671 - DNA, 336 bp, Glycine max
  Clone ID: LIB3107-053-Q1-K1-A11
gaggggcctaagagggaaagtgcgtgtttggaggcgttggatttagagagctttttattaggtaactgaagatgaagagtgccacgtggtggagtgttgaaggagacgggccggatctgcggcctggtccctctaatcgaacggctataatggaaaaggacttttcctgaacacgtggaaggaaaccgtccattccatgtttccaacaaagtctaatagtaattcatgtgaatatgaggtgctgcttctggttccgcatcctaccagaagctgcaaatgcctcttatctaagggatattgaataaactcgtccttaattacttttctttctgaaaa

SEQ ID NO: 45672 - DNA, 308 bp, Glycine max
  Clone ID: LIB3107-053-Q1-K1-A12
aaacggccaaaaggagtgccatctgggtctgacaaaaggcacatcacattgaaaattatctgacctatagtacaccatagactctggctcagcctgcattgtacaatgagggactgtcctttgtttatctagtgggcgttgcttatgacttctttgcatcactgaaacaaaacaaagcagcgaagatggggtcgcattaacacaaacccaggacccatgatacacagacataagacacattggcacaaaacctcttgcacactcaaggttctaaaaacactccacgaccatgatttgggccgcaatat

SEQ ID NO: 45673 - DNA, 431 bp, Glycine max
  Clone ID: LIB3107-053-Q1-K1-A5
gtgggttctttgtttgaggacactcccgaggcttgaagaatagagcacaccgaacagttccgtttcttggagaaagcagccattgtggcagaagatgattttgagacaaatttatgtggttctggaccaaacccatggaaattatgctcactaacaagggtagaggaggtgaaaatgatggtgagacttctgccagtgtgggccacaaccatcatattttggaccatttacgcacagttgatcaccttttcagttgagcaagcctccaccatggaaaggaatattgggagtttccaaatccctgcaagctctgtcacagtcttttttgtggctgcaatactaatcactctggctgtctatgaccgactcatcatgcccctttggaaaaagtggaacggcaaaccaggtttcactgacctacaaaggatagc

SEQ ID NO: 45674 - DNA, 439 bp, Glycine max
  Clone ID: LIB3107-053-Q1-K1-A6
gactcgttctagtgtgtgattgtttgttgttgtaactcgttcttcttctttggttgttctgtgtttgtgtttgttttttctctcacctgaaaatgtcttgctgcggtggtaactgtggttgcggaagctcctgcaagtgcggcaacggctgcggaggctgcaagatgtacccagacttgagctacactgagtcaaccaccaccgagaccttggtcatgggagtggcacctgttaaggctcaatttgagggtgctgaaatgggtgtgcccgctgagaacgatggctgcaaatgtggaccaaactgctcctgcaacccctgcacttgcaagtgaggtgttgggagagcaagcttcaagcagagatagcccttaattaggaataatgataaactattaatgtgtagctaaaaacttatgtattatgtctgtgatggttttcg

SEQ ID NO: 45675 - DNA, 518 bp, Glycine max
  unsure (1)..(518): unsure at all n locations
  Clone ID: LIB3107-053-Q1-K1-A7
tagaacggaccttgtaggaatacatcttnggatcntgtcgatgtgtggttatggcccaaagtcctacctcatcggtcancttgnngtggaattaggagaaagctgtagcgtattattcgcgggcccaatccaattggagaaaccgggcaccctcaactaacattannagaacttttcatacctggcggagtncttcaactggaggtacctgcagaacaaggtgcgagcanccttatnnaatggaaaaatnntcaattcaatgaagaatttggttcattcctacancgtacccacgtcatgggcatttcctgcttttctaaatgttatatagaaatttgtatgttacctaaattgaaaagtggtgaatattataccatannatgtgactattcnncaccaaaaagttttcttattttagttcaaaaccaatcaatatgtaaaaatccagaacaaagtaaattgcccgagaaattcgcgccaggaacccatacacttttaanttnntaaaagaaaaagtt

SEQ ID NO: 45676 - DNA, 430 bp, Glycine max
  unsure (1)..(430): unsure at all n locations
  Clone ID: LIB3107-053-Q1-K1-A8
ggggcttgctgagatgattggtcctgttgattttaacaagagtgttgagtattggcagcaagacaagtggaatggttgctttcctcttaagtggcacattgttaaggatgttcctaacaatttgttgaggcacattaccttggacaacaatgagaacaaacctgtcactaacagtagggatacacaagaggttatgttggagcctgngctgaaattaattaaaattttcaaggaatataccagcaagacatgcattttggatgattttggcttctatgaggctcgtcagaaaactattttggagaagaaagcaaagcaacaattcccaaagcaggtatgggaagggaaacctgctgatgagaagattgagataaatggggaagttaatactcaaaaatctgaagttagctcggaattgctcaaggagtct

SEQ ID NO: 45677 - DNA, 404 bp, Glycine max
  Clone ID: LIB3107-053-Q1-K1-A9
gacccacaaactccacaagtgtcacaagtcataagtcgttagagagagtttgtgtgtgtttttgtgtgtcaccttggtgcatacaacacaagatggaggaccaaaatggtagtggtaagttgagccaagggcttcgcaaggtgaagccttaccttgctatattgtcccttcagtttggctactcagggatgtatatcatcactatggtttctttcaagcatggcatgagtcattggatactctcagtgtaccgtcatgtagttgctgctattataatagtcccttttgcacttgtccttgaaagaaaaataagaccaaagatgactcttcccatcttcctgaggatagtggcacttggtttccttgagccagtgctagatcagaacttgtacaacatggggatg

SEQ ID NO: 45678 - DNA, 430 bp, Glycine max
  Clone ID: LIB3107-053-Q1-K1-B12
gagtgtgtgagttcattaacatatacaaatgctgtgtgttgtgttgtgtacttgtgttaattgtgttgttgttgtaggaaatttaagtgaagagagaatgatgatgaagtctgctatgtgtgcattggtgcttgtggcactggttgtggttgaagtggggcccatggctgaggctgcggtgacttgcaacccaacacagttgactccttgtcttccggcaattaattcaggttctgcaccttcgagtgcttgttgccagaagctgaaggagcaaaagccatgcttctgtggctacctcaaaaaccctagcttgaagcagtatgttaactctcctaatgccaaaaaaaccgttagttcttgtggtattgcctatccaacttgttaagcacctcttatatatatatataaaatgtgtgaacaatatatatat

SEQ ID NO: 45679 - DNA, 419 bp, Glycine max
  Clone ID: LIB3107-053-Q1-K1-B2
gacacaccggaaatcaaatggaaccttcgttgcttaggtaattgaggttccgtaccattccgtaagtcaaaaaggggatgattttgtaatccgcagggttccgtaacattacggaaagaaaacaagtatcgttacgaaattcgtaagtttccgtaactttacgaaaaaagaatcaccaaaaaacagcagaggggggtgtacttagtaaaaatgggggtgcaaatagcacccacgcccacttgggccctccggaatattcctccagaaggcggttgcttctggaggaagcaaccctgctcgcctgggcgagctgggcggcaaccacctcccctattttgctataaataggggaggaagtgaagaaagaaggggttcagccccttaggcacttctctctctttcgaatttgcttggaaaaa

SEQ ID NO: 45680 - DNA, 415 bp, Glycine max
  Clone ID: LIB3107-053-Q1-K1-B4
gacattacaccgaaatttgaatgctcataaatctcctcactccttgcgactagaacagaaatcaaacaaacgaaggagagaaagcttaaactcgtgagttcgtgcactgcttcttcttcttcttctttgcgagcgtcttcgaagaaacaacacgaaaatgtcggtgctgatcgtgacaagcttaggggaccttgtcgttgatttgcacaccaacaaatgccccttgacctgcaaaaatttcttgaagctttgcaagattaagtactataacgggtgtctatttcacactgttcaaaaggattttactgcccaaactggcgatccaactggcacgggaactggtggtgattctgtttacaagtttctttatggtgatcaagctcggtttttcagtgatgaaattcatattgatctg

SEQ ID NO: 45681 - DNA, 404 bp, Glycine max
  Clone ID: LIB3107-053-Q1-K1-B5
ggtctgtgtcgtggaagtgggttggttcataattccggcgctctctgagatcgtggagaatctcgtaatttgaagctaccaccatttgccaaagttgagatttttacgcacttaagagtaaatgcaagaactttaagaaagattaggtactgggtatcttgtattccaactcaataagatagtggggaggaaagagatatggccgtcgctagcaaaaccagaaatatgcttgaaggtctggtaaaagaaggatcattgaaatggttgcttggcaagaagagttactttggtgaagaatttgaagagatggaaaattctccttctgctgggaagaactttatacgagagctctctcctgttgcaaacctagttgttcgtagatgctcaaagtcgatgaagacata

SEQ ID NO: 45682 - DNA, 424 bp, Glycine max
  Clone ID: LIB3107-053-Q1-K1-B6
ggttcactctgcatctgactcctatagtttcctcggctaattccatatccccgttttccttcactcttgaaccccgattcatttccaccagcacaagaagcatggctgcaatatcaataccttctcacatgaaagcttggacatactctgagcatggaaaatccaaggaagttctcaagtttaatcagagtgtggctttgcctgaggtgaaggaagaccaggtcctcatcaaggtcgctgctgcttcccttaaccccattgatcataagagaatggaaggctatttcaagaacagcgactcccctttacctactgctccgggttatgatgttgctggagtggtggttaaagtgggaagtgaagtgaagaaatttaaggttggggatgaaagttatggtgatatcaatgtgaaagctttggaata

SEQ ID NO: 45683 - DNA, 379 bp, Glycine max
  Clone ID: LIB3107-053-Q1-K1-B7
ttactccaagaagaaagaaaaaaaaaaatcgaccgccgcttctttatcgtgatacgtgggtctgtgtccctctaatttcaagatccaccacattctcagttcttccctggtcgaaggaagcaaaatttaagctggtacagtttctttctataaagcagcatgtccctgagtacttccaaagtagtttttcaggttctgtccagggctgtgcctcaaactgagtataatgattctcttgtgaactcttcagaattagcattacattcccgttttagagtaaaatgtatgaataaaagatcctcaacgcataaggatttcattgaatgttctaacatgcttcaaaatacgttaagaactcaacaatttcagtggatgggtg

SEQ ID NO: 45684 - DNA, 427 bp, Glycine max
  Clone ID: LIB3107-053-Q1-K1-B8
gatggaggcgtgtatgatgattctgaatagcagcactgaaaaacttcctaccactggtgcaggaaaggggagccaagatacctgcaccaatatgggaggtggaggtggttgcacctgctgcagctcctcctcctccatgtctgtctctggtgttgcagagagtgtttgattgtgaatcgagatgctctgcccccaaggtgctcctttctgatacgagttaccttgtccttctaacatgcacactctggcaccacatattcctgcaaagcttctggcagcacctgctcccctgctctctactacttacacccagaaaagcaagaacaaaaacatgtttattagagaaacactatgcagaaacagtgatgggtaatccagatgatttgtcacatgcaatgttttctaggatgctccagcatataccctg

SEQ ID NO: 45685 - DNA, 414 bp, Glycine max
  Clone ID: LIB3107-053-Q1-K1-B9
accacgtcctttccagcattgagtaattcatctcacatgcggtaaacttcttgcttagatagtagatggcttgctcctttttcctagaatcatcgtgctgacccaacacacaccccatagactcgtccaacacggtcatgtacagaaaaagaggtcttcctgttacaggtggcatgagcaccggggggtttgcgagactctgtttgatcttctcgaaggcctcttggcagtcactgttccacaggaccgcctggttcttacgtaatagcttgaaaatgggctcacaggtaggggtgagttgcgagataaatctcgcgatataattcaacttgcccaagaatccccgaacctgcttctccgtgcgtggttccggcattttaaggatggccttcactttctcgagatctatctcta

SEQ ID NO: 45686 - DNA, 437 bp, Glycine max
  unsure (1)..(437): unsure at all n locations
  Clone ID: LIB3107-053-Q1-K1-C10
gaaaaacattgaggcgtagctggagaaactgaagaagtatgctactgtggttcgtgttttggctcacactcagatcaggaaaatgaaagggttgaagcagaagaaagcccatatcatggaaattcaggttaatggtggtagtattgcacaaaaggtggactttgcatacagtttctttgagaaacaggttcctattgatgcagtgttccagaaggatgagatgattgacatcattggtgtgaccaagggtaaaggttatgagggtgttgtcactcgttggggtgttacccgccttccccgtaagactcacagaggtttgaggaaggttgcttgtattggtgcctggcatcctgcaagagtttcattcactgctgccagggctggtcagaatggataccaccaccgaactgagttgaacaagaaggtntacaagcttg

SEQ ID NO: 45687 - DNA, 436 bp, Glycine max
  unsure (1)..(436): unsure at all n locations
  Clone ID: LIB3107-053-Q1-K1-C11
gaggaaacaaggcatnggnnaatatctctagcaagggcgagngaatnagaaacaacatcaagatgtcgtctctgatagcagaagatgtgaagagcagatcagaggtgtaccacggggacgaaatgtgccaagtgaagtccaaggagcttctcaaggaaatcgccctccccaacggccttcttcccctcaaggacatggaggagtgcggctacgacagacaaaccggcttcgtctggctcaaacaaaagaagagttacacccacaagttcgacaagatcggaaagcttgtctcctacgcgcccgaggtaactgctcatgtccaacaaggtaaaattaccaaactcaccggggttaagaccaaagaactcttgctctggaatggaggcaactgctgactgtgaactctcttctcttcactaccttgaagggannagac

SEQ ID NO: 45688 - DNA, 270 bp, Glycine max
  unsure (1)..(270): unsure at all n locations
  Clone ID: LIB3107-053-Q1-K1-C2
ttacgaggcgcgggtgcacgcgtcgcaaaacaagcggttgccggtgcaaattgtgctgcacgcgctttactacgaccagttgcggctgaggagcggggcggaggagcgtgacgtggagccggagaagaatcagcttcagatggacgtgtccttggtgagggagaacgaagagttaagaactgaactaatgaagatgaagatgtacatttcggatttgcagaataagaacactaataatgacgcgaaccctcangtacatggaacgacgtc

SEQ ID NO: 45689 - DNA, 370 bp, Glycine max
  unsure (1)..(370): unsure at all n locations
  Clone ID: LIB3107-053-Q1-K1-C4
gatagcagcatcatacaaagcatggaatncaaaaacttaagttcattccttgtgttttgctttcttcctcaaaaccaaacatgtcgaacacatgcggcaactgcgactgcgctgacaagactagctgcaccaagggaaacagctatggtgttattgtagagactgagaagagttacatcgagactgttgtcatggatgttccagcagctgagcatgatgggaagtgcaagtgtggcactaactgcacttgcacggactgcacctgtggccattaaagaatatgtatgaaaatgtaattgccatgtgtttggcaatacaaatatccaaataatgtaatcttcgtatgaataaatgtgtgtgctgttatccc

SEQ ID NO: 45690 - DNA, 446 bp, Glycine max
  Clone ID: LIB3107-053-Q1-K1-C6
gatctcacgtaatacattttctcatatatatctcacatggctattctttacacattaaattccatatggcaaacctaaagacacaccttgtccttaatatgaaggatgttgtgatagttaaaccctccaagcccacaccatctgaacttctttctttgtccaccattgacagtgatccagttctcaacattctgtgtcaaaccatttacgtctacaaagcaaatcttgattccccaaatgatcaactagaccctgtaaatgtgataaaagaagctctctcaaaggccttggtttactattatccacttgctgggaagatagtaacatttgatgatggaaaacttggaatcaactgcaatgctgatggagttccattcttggaggcaactgctgactgtgaactctcttctcttcactaccttgaagggattgatgttccaactgca

SEQ ID NO: 45691 - DNA, 331 bp, Glycine max
  Clone ID: LIB3107-053-Q1-K1-C7
ggtagcacttctctctctctctctctctctctctctctctctctatattcttatctcttcccccactttctctcttttttctgtttcttcttctcagggtgccctctctcactttgtgactgtagcaggcagctcaggtgttccttgttaagatctgtggtttggttttcgggaggaaacaaaaagaggaaaaatggatagctacagctactatgggtaccaagagaagaacaccttgacaaactgtgaggagacgaacatggaatcagtgatttgccccaaacctcgccgattgggtctcataaaccactcttccatcaacacgcaaatc

SEQ ID NO: 45692 - DNA, 84 bp, Glycine max
  Clone ID: LIB3107-053-Q1-K1-C8
taaaggttttttacttatctctctctctctctctccccgggcctttttctaaatacttatcgccccccccactttctctcttat

SEQ ID NO: 45693 - DNA, 420 bp, Glycine max
  Clone ID: LIB3107-053-Q1-K1-C9
ggagacacagagcgagagagaatcgtaacaaaagcggtaaccggaataagttgtctctacgatttgagccatggcaacaacaacaccctcaaaccgatcatcagaggcgtttgctctcatggcaatcctcagcactctgctttgcacggcggtggcggcgaaggagagcgtgtacgagatactccccaagtacggcctcccgagcggtctgttaccggacaccgtcaccgactacacgctcgacgaggacgggcaattcgtcgtcgttttggcgaagccctgctacatacagttcgattacttagtttactacgagaccaagatctccggcaagctcagctatggctccatcaccaacctcaaaggcattcaggtccagcgcctcttcatctggttcaacgtcgatgagatcaaagtcga

SEQ ID NO: 45694 - DNA, 418 bp, Glycine max
  Clone ID: LIB3107-053-Q1-K1-D10
ctctagttaaatttgggttctaaattaagacatgaagaaacaaaacttttacaaaccatctggttttgtttactaaatgcttctgtgattgctcgttaagggcttgagtagttagcagctcaaaagtccataaaatgttgacaacaaaatttgatttacgctttcttaatttctaatgagttttagagcagctggatgcatgagtgactccaaaaaggttctttctttcaaataaccggggagttatttgtcagtggagtagaagttatattttttccagagataagcccctcttcttttgtatttggttcttattaataatttgaagttaaatttatatttgaagtagaaaattcgagtaaattgaactacacagcatgctaattttgtatgtcaacactattattgcatgcgtagt

SEQ ID NO: 45695 - DNA, 388 bp, Glycine max
  Clone ID: LIB3107-053-Q1-K1-D11
gattcctgatgatgctcccgcctttctttttggtttattattattatggtttcactacaatatctcttttatgtttatatacactattagttttatgtatgagtagttggtttgctcatcttgaagcatatggaatagtttgacttgactttgatgatattgcagtgaaacactcttatctttttgtgaaaattggtgtatgacttggttttgaattgaatgcatgattgtgatgagcttatgttttctttcatgagtttagcaagtgtgtatgttagacaaagaaagaacaagaatgtgaacttgcaattagaaatgttagtcagtagacaaattgattgagaaagaaaaacttgaaccataacccggtaagagtgtgatcttaaac

SEQ ID NO: 45696 - DNA, 421 bp, Glycine max
  Clone ID: LIB3107-053-Q1-K1-D2
tgtgtgatctgattggatcaagctcaacctaactggggggtgcatttactatctgcgatttaaatatgtcaacatctgataagccaaaagtggtggaaaggggtagcagggatgaaaaacacaaggaagatgatcaagaggaggggaagggtggattcattgagaaggtgaaggatttcattcatgacattggtgagaagattgaggaagctattgggtttgggaagccaactgctgacgttactgcgattcacattccatcgattaatcttcacaaggcagatcttgttgttgatgtgctcatcaagaacccgaatccggtgccaatccctctgattgacatagattactttgttgacagtgatgaaaggaagctagtttctggattgataccagatgcgggtaccattcgtgcacatgg

SEQ ID NO: 45697 - DNA, 424 bp, Glycine max
  Clone ID: LIB3107-053-Q1-K1-D4
ggtctctttttgcgaagaagagtgaaagagaaaatgcgggactctgattttgagagtcgagtgagtgaatgctgcttcctctgaatcaaatcattcatcactctctctggttctgagtttctgacaccaaaatggtgaatcctcgaattccacgttcaaggatcccaactttcacacctttcacttctgctatctccatcgccctctgcattttctttgttctctctcttctcttcacttcccattctgattcatcccatcaataccaccacacaggttctgatggtggtgttgcacatggatttgagtcaataaggagatccattctagctctgaaaacagatcctctcaagcctcggttggaccagattcgtaagcaagccgatgatcatcgctctttggctcttggttattcttcctatgc

SEQ ID NO: 45698 - DNA, 430 bp, Glycine max
  Clone ID: LIB3107-053-Q1-K1-D5
ggtggcagttgtgtgacacagaagtgaagctagagcttcatagtttcttcttcttttctcaccttccttctctcccttcagacaaagggacaaaaaatcagtgtgtgagagagagagagagaaattccaaaaccatgtcccacagtcatctaagtttcgcctttgggattctaggtaacattgcctccttcgtgtgctttctggcaccactaccaacattttatagagtttgtaagaagaaatcaaccgaagggttccaatcaattccatatgtggctgcactcttcagtgcaatgctttggatcttttatgcctatgtgaagaccggagaaacgcttcttatcaccatcaatgcattcggttgcgtgattgagacaatttaccttgccgtatttatcacttactgcccgaagaaagctaggatgtcgac

SEQ ID NO: 45699 - DNA, 196 bp, Glycine max
  Clone ID: LIB3107-053-Q1-K1-D7
ggagaagaaaacataagatatggcaatgttcacgtacgacgttgaaacggttcaatcatggttggcactgagcagacttcacatactgatccacttagtggcagtgttgtcgctgtgttactaccgcataactcacttgttactggagacctcaacagcgccatggcttctgatgaccgtaacgaacttttttttt

SEQ ID NO: 45700 - DNA, 422 bp, Glycine max
  unsure (1)..(422): unsure at all n locations
  Clone ID: LIB3107-053-Q1-K1-D8
tctatgcattttattgtgtaacatattcaggtctacccatctatgcatatagatgaatatgaccttgtgtagtatgtttgaaataatatgcataggttttatttgcttatgttctttgttcaatattaggaacaaaaattctcagaaagccaataactttgttttccttcattagcatgcttaaaattttcgaatgtcagctttggagactccaactagctcttggtgaacaaactgaaattaccactactagaaaaattgcatactacatcagttaattaggccaatctacaccggtttacgaccgtcgttgtaagcggtgtcgtaaaaagggtaggttattttacatncgttctaggaaaacccgtgtagaatgtcatagctattctatatcaaattcttgaaagaccttcgtagaatgg

SEQ ID NO: 45701 - DNA, 342 bp, Glycine max
  Clone ID: LIB3107-053-Q1-K1-D9
agagtgagtgagtgagtccttaagcttctgcaacgagggagactcttttgttctgcagtgcatgcacaaggaattaaatataaaagggttttagaaaaagctgtgctattaaatgttactctatattttccgttcacggtgctgtttgaaatattaggaggcatgatattataataatattaggaggcatgttattataacatcatgatccacggtgctgtttgaaaaccttgaagtagctgctcttcattacgtatagtctttattgcattattacaagatatgaaaactgtacaaaattcttccaataatttacttcataattttaccattaaaagtgga

SEQ ID NO: 45702 - DNA, 417 bp, Glycine max
  Clone ID: LIB3107-053-Q1-K1-E10
atattagggagttgggcatctttatatttagttcatgactcttatgctttgatcaggttgtacattcatgcttaattatatgataattgggatatggtttgttcactaccatagtaataaggtgtagttatgtatattaattgatagttgttcaaatttatgttataccaagctaatgcattgagtaacactgcactgagtctagtgttgaaactcaggtagacaaatccactatgcctgcaaatacaaaggatgcattatatcaaagcttgcctcctaatataaaattagctctacgttccaaattaccatccctccgtgctgtagaagagataagtgtagcctatatcacatatgagatgcataaaaaattacattggttggttcccatggccattaacacatccaaagcacata

SEQ ID NO: 45703 - DNA, 441 bp, Glycine max
  Clone ID: LIB3107-053-Q1-K1-E11
gactcacattccttcccaatttctcccacgagagcgtatcacaagctcccaatatagcaagcagcaaacatgatttcttccgtgtcctttccagcgtctcttcccgccgttaacttctccggcaacgccatggcttcgccgtcgtgccgcgtcaaatcccggccaatagtcgccttcgccaccgccactgccaccgctgaagctcgctcttcctggacggagcaaccgagaccttcctatctgaactcctcttgctcttcgctttacgatatcctcggcatccccgctggcgcctctaaccaagaaatcaaggccgcgtaccggcgactagccagagtctgccaccccgacgtggcggccatcgaccggaaaaattcgtccgctgacgaattcatgaagatccacgccgcgtactctactctttctgatcccgacaagcgc

SEQ ID NO: 45704 - DNA, 393 bp, Glycine max
  Clone ID: LIB3107-053-Q1-K1-E12
gacagggggagaacaagcacgagcatggtcttgaacgtgggcctggcagaccaaaacaaggagacactaaaacacatgctagcgtgacctatatagttaaagaggatacgggaccatagcaactgaggctgagccttaataagagtgtctgtctctggctactgaactatctcagtgtttcctatgtggctatgtggtgatctattaatgcatgggagaaacatctatgccaaatgggacacctatagagatagatagagagagagctagagagggtggttagattgaaaagacacaacgctagatgacttgtgaaagatgagagcctatcctgcttggaagagagcctttcagttccgacccattagaacttgtatcatgtagaggaagatg

SEQ ID NO: 45705 - DNA, 299 bp, Glycine max
  unsure (1)..(299): unsure at all n locations
  Clone ID: LIB3107-053-Q1-K1-E2
ggttctagtgtgtgattgttcgtcgatgtaactcggtcgtcttctttggacgttctgcgtttgtgtttgttatatctctcacctgaaaatgtctagctgcggtggtaactgcggatgctgcagctcctgcacatgcggtaacgtgtgctgatgctgcaacatgtacccagacttgacctacactgagtcaaccactaccgagaccttggtcatgggagtggcacctcgtaatgctcaatntgagggtgctgaaatgggtgtgctcgctgataacgatggctgcaaatgtggaccaaact

SEQ ID NO: 45706 - DNA, 391 bp, Glycine max
  Clone ID: LIB3107-053-Q1-K1-E7
tcaagagaaaggagtgcctgcattttggcttactgctatgaaaaacaatgaagtgttggctgaggagatttcagagcgtgacgaaggtgctcttaagtatctcaaagatatcaagtggagcaggatagaaaaccctaaaggattcaagcttgactttttctttgataccaacccttattttaccaattctgtcttgacaaaaacatatcatatgattgatgaggatgaaccaatattggagaaagcaattgggactgaaattcaatggcacccaggaaaatgtctgacacagaagattcttaagaaaaaacctaagaagggttcgaagaatgctaaaccaattaccaaaactgaaaaattgtgaaagcttctttcatttctttcacccccc

SEQ ID NO: 45707 - DNA, 441 bp, Glycine max
  Clone ID: LIB3107-053-Q1-K1-E8
ggatgcatctcgtttctctctcttagttcaaatttcgaagggggaagcagcaaaactaaagcccaaaaacccataccaagatgctcctccgaagccactgttgctacctcggcataatcgccgggctagcagtgttcctcgcaacgacgtcgttcgccgacgcgcaatcctgcaacggcatcctcgtctcatacgcctacaccggcggcctgcggttgccgcccaacgtctccgactcggctaagcagccgtaccggttcgagtcgacggtgacggttctcaacaacggcctcgacgagctcaagtcgtggaaagtcttcgttgggttcgaccacgacgaggttgtggtctccgcctccaatgctgtgctcgccgacggcaccacccttcccgccgtcgtcggaaacggcaccgtcttcgccggtttccccatgactgatc

SEQ ID NO: 45708 - DNA, 225 bp, Glycine max
  unsure (1)..(225): unsure at all n locations
  Clone ID: LIB3107-053-Q1-K1-E9
ggagtctggagactgaaagacgcatcagaatttaagaaactatcgagccattaaagaaattagaggcttatgtttatcctcccacttagtatatagcatcacaagtaaagatatatatcactttttccccccttataatatcctaatacgaccatttttaaggcgaaaaccaattattttactaattatgtacgaatnttaagaattatccctccccctacatac

SEQ ID NO: 45709 - DNA, 368 bp, Glycine max
  Clone ID: LIB3107-053-Q1-K1-F1
gataccaaactatggcttcttcttctccttcgtccctctgagtggacactgccaaagacctttcccactcgtttagtgaggttcatgtcatcatcggtcccatgttcgctggcaagacaactgcccttcttcgtcgcatcaaatccgaactcaacgctgccaataatgtggcgttgttaaaatcgagcaaggatacaagatatgcaattgactcggttgtgacgcacgatgggattaaatttccttgttgggcgttaccggatctgttgtcgttcagagaaaaatacggagaggatgcttatcaaaagttggatgtgattggcatagacgaagctcagttttttgtagatctatacgagttttgctgc

SEQ ID NO: 45710 - DNA, 411 bp, Glycine max
  Clone ID: LIB3107-053-Q1-K1-F10
ggtttccatatggctattaccgggtgggatgaaactgtgtcaagagaaatggagctcatggtcaaggagaaaggcatcaactcttttaagtttttcatggcatacaaaggagctcttatgatcaatgatgagcttcttctggaaggatttaaaaagtgcaagtctcttggtgccttagctatggtccatgcagaaaatggagatgctgtgtacgaaggtcaggaaaaaatgatagaacttggaataactggtcctgagggacatgctctttcacggcctgcagtgttggaaggagagacaactgcccgtgctattcgtttagctgattttgtgaacactcctttatatgtggttcatgtaatgagcattgatgcaatggaagaaattgctaaggcccggaaatcacgacaa

SEQ ID NO: 45711 - DNA, 245 bp, Glycine max
  Clone ID: LIB3107-053-Q1-K1-F11
ggaggagactgagaaaacagaagaaaacaaaggggaagacacagtttctgcgttgaggtctttgatggtttctcactctccgccgctggatgccttagtggtgccctctgaagattatcacctgagcgaatatgtgtctgcacgagacaagcgccgcgaattcgtttccggcttcactggagtgcccgcttggcacttattacaaaaaaagaaacacttgtttggaccgattgaccgtatttttt

SEQ ID NO: 45712 - DNA, 366 bp, Glycine max
  Clone ID: LIB3107-053-Q1-K1-F12
gacccttcccagtgatcaattcaacgatgttagggcagttgctgatattcacgcgcggagggctcatcctctggacctgcaaccacctcagcaacgccctgaggggatctccgatcgacacgttgatccgatcctgcctcctggaggagcgatccggtgcggcctccttcaactacgacgcacctggagccgcatactctctcaaatggaccttccacaacgacctaggtctcgtctttgtcgccgtctatcaacgcgtcctccacctcttgtacgtcgacgatttgctcgccgccgtcaagcgcgagttctcgcgcctctaccacccccaaaaaaccgcctaccgagattttgacgagatctttc

SEQ ID NO: 45713 - DNA, 433 bp, Glycine max
  unsure (1)..(433): unsure at all n locations
  Clone ID: LIB3107-053-Q1-K1-F2
gagacacaatgatgtgttgagcgccacgagtaagttgagccagataatactactactagtaagtcgcaccggtttctgcttcctacattgccatggaagccaagctctgggaggctcgtctnttctctccaacactccctcttcttcctcctactcctcgtcttccttctctcaatcttcactttccctcatcatcaacttcaacgctccacctagctcgcaattctgtctcagataccgntcccattcaaaatgaggaaaaggaacaaactctgtcttctgtcaaacctacttactcccccactcttcccaatcgagacctacgaacccctcatagcgggtaccatttcgatgggactactcgcaaattcttcgagggttggtacttcaaagtctccattcccgaacggaggcagagcttttgcttcatgta

SEQ ID NO: 45714 - DNA, 384 bp, Glycine max
  Clone ID: LIB3107-053-Q1-K1-F3
ggaaattgaatccaaccagcaacccaaagattaaaaatctatattagatcttttttttttttttgtacataaaattcatttcacaaccaattgcaatcacattcatgttttgcatctttgcgaatctaatgaataagtctcacataattaggatcttcgagtcgaacacttgattcataaaatctacttacttcttctgtcttggctcgagatctaaaccaaacacagaagaatccaattctgattatcattctgcaaaaactgaattggcttgcttttgactttcgtataaatggctaagactatcgaggcactttgttctattatatactgatttgcaggttcaaaaagaatcacttctattttattaaaacaattactcaa

SEQ ID NO: 45715 - DNA, 437 bp, Glycine max
  Clone ID: LIB3107-053-Q1-K1-F5
ggcacaaaattacaatccaaaacaaaacagagcaaagagagagtgtgtgaaaagtgaaacaaaaaacagaacaacaatggcgacacttaaggttcctcagcctcttccccccgttgcagatgattgtgagcagctccgaaaagccttctcaggttggggaactaacgaggagctgattgtatcgatcttggctcataggaatgctgctcagaggaagcttatcagagaaacttatgcccagacctatggagaagatctcctcaaggccttggacaaagaactcacgagtgattttgagaggctggttcatctttggacacttgattctgctgaacgtgatgcatttttggcaaacgaagcgactaaaaaatggacttcaagcaatcaagttctggtggaaatagcctgcactaggtcctctgaacaattgtttgctg

SEQ ID NO: 45716 - DNA, 401 bp, Glycine max
  Clone ID: LIB3107-053-Q1-K1-F7
ggcgaagacgacagaagggggagtgatactgctttgcattgattagggtttaggaagcggttctttgagtgaaacacgaaggaggaatggcgtctctgagaagtggagcttcttcgttgttgactcggctatccaaatcgcttcttcttcattccaaaaaccctaatcctcattctcagttattactcccttctctctcacggctccccggtgcgatttctccccaaaacgacgccgaattcccccacaaacaaggctttctctacccctgtggcctcccctctctccgcttcttcttacctcaaggggacgctccttcatcagatgatcctatgcttttattccccaaaagaacgtatcaaccaagcgttattcgacggaagaggaaccatggatttttt

SEQ ID NO: 45717 - DNA, 276 bp, Glycine max
  Clone ID: LIB3107-053-Q1-K1-F8
gagagtgatccttctacactaactaaagccgacgagcgtgagagagaaaccctagcaaaaatgccggctggtcacggtttgagatcccgcaccagagattccttctctcgtcccttcaggaagaagggtaccatcgccctcaccacatacctcagaacctaccacgtcggcgattatgtcgacgtcaaggttaacggcgccgtccacaagggaatgcctcacatgttctaccgtggccgtaccggtcgcgtttggaatgtcaccaaacgtgctgtt

SEQ ID NO: 45718 - DNA, 408 bp, Glycine max
  unsure (1)..(408): unsure at all n locations
  Clone ID: LIB3107-053-Q1-K1-F9
attccctagtggatggtgcctcccctctcctgggctcctttgccttccgctgcatctccatggtgaaaaatcaccattgaaggacctcattggagctcaaagatccagcctccatagaatcttcacaagcaagcttccatcactggccctgatgcaggctctacagcatagataaggaatgctctatgctctaagcggaaaaacctgtaagaactagagctgctgatgctggagaagtagatggggcagatacagagggagctgaggtagaagcttgagcaggggcaagagcagaagatggtggggccttggatcaaactagcctnggatntctgggttccctgaaaagtgaccggaagggtcatcgaggttccaacaatttcttttaatataaagccaaaaaataaa

SEQ ID NO: 45719 - DNA, 441 bp, Glycine max
  Clone ID: LIB3107-053-Q1-K1-G10
atatgatggaagcagaaaaaaattgtgttgggggagaatttgctttgctatattcatttattgcattggaaaaacattaggtatgccctatttctcttttcaaaggaacatggggaggtggtgggcatatatccttttcactttgcaccccaccgttgcattgatctctttgtgcacatgatggaacttaggctgcacaacagtgtacatgtcaaatacaagatattcctttccgctatggaatatttgccattttcttctatggatgattccaagggaaattttgaagacattattcagagaattttgttgagatcccgagagatcaaggttggcaaatacgataacctgtcagatgttgcagaacaacacagactgcagagtcttcaaaaagctaaagtcatccagtggctttgctttacaccaccatcaacaattact

SEQ ID NO: 45720 - DNA, 127 bp, Glycine max
  Clone ID: LIB3107-053-Q1-K1-G12
gacaccaacaccaaaacacgcccactattatggcttcctttgtatccttcctagtgctgcttcttgcagcccttatcctcatgcctcaagggcctgctacttactacaaaccaattaaaaaaccacc

SEQ ID NO: 45721 - DNA, 446 bp, Glycine max
  unsure (1)..(446): unsure at all n locations
  Clone ID: LIB3107-053-Q1-K1-G3
ggttctaaggtgtgtgattggtttgttggttgtaacctcgtgtcgtgtcttcttttgttggntcttgtggtttggtgtttgtttntttcttctcaacctgannaaatgtcttnngctgcggtggtaacctggtggttgcggaaagctcctgcaaagtgcggcaaccggctgcggaggctgcaagatgtacccagacttgagctacactgagtcaaccaccaccgagaccttggtcatgggagtggcacctgttaaggctcaatttgagggtgctgaaatgggtgtgcccgctgagaacgatggctgcaaatgtggaccaaactgctcctgcagcccctgcacttgcaagtgaggtgttgggagagcaagcttcaagcagagatagcccttaattaggaataatgataaactattaatgtgtagctaaaaacttatgtattatgtct

SEQ ID NO: 45722 - DNA, 446 bp, Glycine max
  unsure (1)..(446): unsure at all n locations
  Clone ID: LIB3107-053-Q1-K1-G4
gacacaacactgnctctctctcttctctttctctgcgtggctctgaaaaaccagaacaagctctggagaaaccgccacataaaaaagaaaagaaaacgcatacctaaccgcanacggtaaccccattatgccatgcttcacaccacacccctctcttctcttccttcttctcacccttctctctatttccttcttctctccttccaccgctgcaagaacctcttctntccattccttacgtatttcagatggagtcgaggatggtggtgagggagagtactaccacgaggtactaccatggaaaacgaggagatccatggctgaagaagaggccacgagcaacacgtctctgatattggctcagagaagaaccacaaggaaggaccctttggataactacaaccattacaccggtggctggaacatcagcaatcgccactacattg

SEQ ID NO: 45723 - DNA, 434 bp, Glycine max
  Clone ID: LIB3107-053-Q1-K1-G7
ggttctagtgtgtgattgtttgttgttgtagctcgttcttcttcttttgttgttctgtgtttgtgtttgttttttctctcacctgaaaatgtcttgctgcggtggtaactgtggttgcggaagctcctgcaagtgcggcaacggctgcggaggctgcaagatgtacccagacttgagctacactgagtcaaccaccaccgagaccttggtcatgggagtggcacctgttaaggctcaatttgagggtgctgaaatgggtgtgcccgctgagaacgatggctgcaaatgtggaccaaactgctcctgcaacccctgcacttgcaagtgaggtgttgggagagcaagcttcaagcagagatagcccttaattaggaataatgataaactattaatgtgtagctaaaaacttatgtattatgtctgtgatggttttc

SEQ ID NO: 45724 - DNA, 440 bp, Glycine max
  Clone ID: LIB3107-053-Q1-K1-G8
agggttttgcatttcgggtcagacagactcagaggtgggaggaggcaatgcccagaagtcaaagatggctcgcgagaagaacctcgagaagcagagggctgccgctaagggaagccagttggattcaaacaagaaagccatgtctattcagtgcaaggtgtgcatgcaaacatttatatgcaccacatcagaagtgaagtgcaaggagcatgctgaagccaaacaccccaaatctgatctccatgtttgttttcctcatcttaaaaagtgaaagagtgcatgttgagacatgatatatcaatatatggcctgttatatagtctctatccacagagatcttcaatttcttttataacaaatatgtctgtgtgtttgtgtcttggggggtaaggagagacgagaggggataattaagtaagttttccattgattaagcgtga

SEQ ID NO: 45725 - DNA, 437 bp, Glycine max
  Clone ID: LIB3107-053-Q1-K1-G9
gaaggtgcaagagtttgttgtgagctataagctgggttatcgtgaggagaatatgaagttgtttgttttctttgttgctgcagtagttttggtagcatggccatgccatggcgcaggctaccaaaggttccctctccgaatgaaaactggctatggtgagcgttcttcggaggtaaaatgcgcaagttttaggcttgctgtggaagcacacaacatccgagcctttaaaaccattcctgaagagtgcgttgaaccaacaaaggactacattaatggcgaacaatttagatcagactctaaaacagttaaccaacaagctttcttttatgctagtgaacgcgaagtccatcacaacgacatatttatattcggcatagataacaccgtactctctaatatcccatactatgaaaaacatggatatggggtggaggaat

SEQ ID NO: 45726 - DNA, 303 bp, Glycine max
  Clone ID: LIB3107-053-Q1-K1-H10
ataccgttactgtataacgagagttcattgtgaaaaaatctacttactaaactaaatattggatgggtagagccaaagagtgtgaactgtacaagttaacaataacattaattaaattaataaaaaatgaaaagaaagaaaggctccggtgtatagaaaggacctgcccgtttctaaaaaaaatcatagaaacgatggaacccacccattttttatatatgtcctaatttatttactattacttactatgttttttgatatctagtatcaatacaatttattattttgaggttgaatatttag

SEQ ID NO: 45727 - DNA, 283 bp, Glycine max
  unsure (1)..(283): unsure at all n locations
  Clone ID: LIB3107-053-Q1-K1-H11
gacaccaacacatccattcattgtcttagggtgagcaatgtcttcctctttctccatccatttcttcctcctcctctcaatagcccttttctcagtttgttgcttagcagcatctcaagctcccaccaccaaatcacacccctatatccttcccattaagaaagaccccgcaacanatttgtactacacttcagttggcattggaactcctaggcacaactttgatttagtcattgatctttctggtgaaaacttatggtacgattgtgacactcattacaac

SEQ ID NO: 45728 - DNA, 323 bp, Glycine max
  Clone ID: LIB3107-053-Q1-K1-H7
gattcaggacaaagagggtatcccaccagaccaggagaggctcatctttgctggaaagcagctagaagatggccgaaccttggctgattacaacatccaaaaagaatctaccctccacttggttctccgccttcgtggtgggatgcaaatctttgtcaagactctcactggaaagaccatcacccttgaggtggagagctctgacactattgacaatgtcaaagccaagattcaggacaaagaaggtatcccaccagaccaacagaggctcatttttgctggcaaacagcttgaagatggccgaaccttggctgattacaaca

SEQ ID NO: 45729 - DNA, 214 bp, Glycine max
  Clone ID: LIB3107-053-Q1-K1-H9
ttttactagtgtaagattatttattcattcaaccgcaattttttaatatttcgttacaacctctaaaacaaatatattattaatttgaaaacaaaatccataaataatatttccttaaaatatctcttttacttctttacatctttcactttttttatatttactctttctataatcaccattaccttttatttttccatttcttacttttttt

SEQ ID NO: 45730 - DNA, 328 bp, Glycine max
  Clone ID: LIB3107-054-Q1-K1-G4
tatcatcatcaagacatcaaaacatctttctgggacataggagtcatttgactgaatccatcaactgaaagatccttcaattatttctcgtccttggaaaattcttttttgcaagaatcaactgcttctttcattctcccttgctacaaggttgtgaaaacaagacgacgatggttacctcatagccctacactggggcaatgaggggcatcgtgcatgagcctcaagtgaacctaggggcagattagaagttctcactcaataggttcccaactacaaagtcatgacgaaagacaacgattggtaccttcaaaccttacactgtggc

SEQ ID NO: 45731 - DNA, 390 bp, Glycine max
  Clone ID: LIB3107-055-Q1-K1-A1
gaaccgtcccaatttttttctaaattcttgaattcccattcaattctgggaggtgtttaaatggaggttcctattcttttttggtgccccctgcattattgaccattggattcgacatcgagattaatctaacaatcaataatacttccacccagtctgaagttgctacaacaataatagacttccacaaaattctccttaatgatactgtaatatatatagagcataacttgcatgcatagttgttgggttttatatggatctctacagtgagtttgtatagatctagaagtaaatctaatggtgtgaaatgtgaataggtttgagattttgtttctcttgatttgtgtaacataatccatactgttctggtaaatgcttaatatttct

SEQ ID NO: 45732 - DNA, 427 bp, Glycine max
  unsure (1)..(427): unsure at all n locations
  Clone ID: LIB3107-055-Q1-K1-A10
aaatctgaaacgttaggtgttttgagacattatgggtgttccacaacgttctgcaataatccacatattantaatactagcttcccgattgattctgtttgttgcagcgaatggttagaggaggcatcaccaaagcaagcttgttgcttctcgggtcatgcaggggagctaagagagcaaaaagtggactcagcaaattctcaggcactgctcaacctgcagaaagctctggaggagtttcaaagagtggtgggaagatagaggattcagctttctggatcccacacccacgcacaggaatttactttccaaaaaggcatgagtgggtgatggatgatgttccagaggatgcagctcgtttaaaccagacttattggttcaaaaatgttgatggtgttgaccaccccatacactaaccataatatat

SEQ ID NO: 45733 - DNA, 341 bp, Glycine max
  Clone ID: LIB3107-055-Q1-K1-A11
gttgcgtggactccaacaaggaccttatcaatgggtgacagtggactatctactgggaaacttgctaaagcattattcacaaactgttgcccttgttgatcttggaggtggatctgttcaaatggcttatgcattctcaaatacagatgctgcgaaagctccacgagcaccgaacggagtgtaatcatacataacggcgatgttccttaagggaaagaaatattacctctatgttcacagctactttcgatactgtatgctatcatctcgtgcatatgctttaaaagatcgtgaatatgaaaatccttgtattatggctcgctctgatgggtattacgtat

SEQ ID NO: 45734 - DNA, 407 bp, Glycine max
  Clone ID: LIB3107-055-Q1-K1-A2
ggcctccattcgggactgtaactagccgcagcacgaggagcggcctcaggaggagaaggatgtctcacaggaagttcgagcacccaaggcacggttcactggggtttcttcccaggaagcgtgctgctcgtcacaggggaaaagtgaaggcattccccaaggatgacccatccaaggcacccaagctcactgcattcttgggttacaaggccggtatgactcacattgttagagaggtcgagaagccaggatcaaagcttcacaagaaggaaacttgtgagcctgttacaattattgagacccctccaatggttattgttggtgttgtgggttatgtgaaaactccacgtggtctccgaacattgaacactgtctgggctcagcatttgagtgaggaattgaaacgt

SEQ ID NO: 45735 - DNA, 344 bp, Glycine max
  Clone ID: LIB3107-055-Q1-K1-A3
tattcacaagatgcgtgccactgatggcaagagggaggcgtggacgtataagagaaagtatgagcttggtcaacagcctgctaacactaagctgtcaagcaacaagacagtcaggaggatccgggttataggtggaaatgtgaagtggagggcactgatattggatactggaaattactcctggggaagtgaagctgtaactctcaagactcgtatactatatgtggtttacaatgcctcaaacaacgagcttgtgcgtactcagactcttgtaaaaagtgctattgttcaagttgatgctgctccattcaaacagtggtaccttcagcactatggtgttgaga

SEQ ID NO: 45736 - DNA, 423 bp, Glycine max
  Clone ID: LIB3107-055-Q1-K1-A4
gcattacatgtttgattagaatgatccttatcaggcttatgggtatgttaacaatctttcggatgagttaaaatatgaaatcagatttatcctttcataaagaacaactcgagtgataagctaagcttccataacatacttaatggaaaaatcacagaactttgacgagaattaagtttttagtttcaaatgtatttcaaagcattttaatacttaccttttcacatatttttatatgtgtggaatctttcctcaatttaaggataagcaggaataattgatgacataagttctgataggtaatagcactgtagattaagacattaagttattggcttgtattttagatgtcattagattatgtttttgagagaattctaaccgctccatggaataataatacatgtcaacttaatttttttt

SEQ ID NO: 45737 - DNA, 391 bp, Glycine max
  Clone ID: LIB3107-055-Q1-K1-A6
tggatacgattgtttttggtacagaagttcctataaaaatgggaaatgccctacctttgagtgcggtttgaactattgatttacgtaattggaagtaaccaactaggtttacggcgaaacctagaaatcgatcactgatccaattggagtacctctacaggatagacctcaacagaaaactgaagagtaacggcagcaagtgattgagttcagtagttcctcatataaaattattgactctcgagatatagtaatatggagaagacaaaattgtttcaagcaccgacagaaccggaagcaccctttgtttcaaagtttcaaagaggggaggacgggttattcacatttcatttgatggtcagaggcgaattgaaagctaagctgtggtaat

SEQ ID NO: 45738 - DNA, 364 bp, Glycine max
  Clone ID: LIB3107-055-Q1-K1-A7
cgattttcttaacaatcaatcaacacgggcaattgcaatattcacatactcaattaagccataaatttctctaagcttatccttgctttccttcttgcctcgcttcttctccttaatcttgatgatgctgatcaatcagcacatgtacaaactcaagggtctcttatgaagaagataaattgtaatggaacatctgctactaagtgcctgttatcatctcgaacacgtctgtgcaaaaaagcctgtggaacttgatgtaaacgctgcaactgcttaccaactgtcactgctggaaaccaaaaaaagactccctcctatgcttatttgactactcatggaggcaaacacaaaagcccttaaactt

SEQ ID NO: 45739 - DNA, 425 bp, Glycine max
  Clone ID: LIB3107-055-Q1-K1-A8
caaaatggataattaagggattaataaaaaatgaatggatgtgtagaattaccaaaatacacaaaggattaataacgtatatttttaaaaatatccaaaagaacatttatatttatgtataatagaaaaagaatactaattggggctttccgttggtagaaaaaataaggcagtactccccagaattccgatccagagtatacttccatccaccgattaaataaataactatcagaaacgaaataatcctttaatttttggaagtccccttttattttacttacacaaaaaagactaggataagaacgaaaaaaaaagtgatcccccttttcttgtttgtcttatatccatatttatggagatagaattcatgtcataatttaaaaaatgaacatgtataattctttttcgtaatcgaaaatgat

SEQ ID NO: 45740 - DNA, 405 bp, Glycine max
  unsure (1)..(405): unsure at all n locations
  Clone ID: LIB3107-055-Q1-K1-A9
catttcgttatacttctatttcatctaaaaggganaggcggatttatctatcagcactatgcaggaagaaaagattggcgaacgaattgttgctcttcagcagcttgtttcaccatatgggaagacagatacatcttctgttctaaaggaggcgatggaatacataggattccttcataaacaagttaagctgcttagtgctccataccttgaaagttcaccagcagccaagatgcatggtgtggagccatgcagcctgaggagtagaggcttatgtcttgttcctgtgtcagatactattggagttgctgagagcaatggtgcatatatctgggcccccattaagactactacttctcctaaatttgagaaggatgtctcccaatttcattgacaaaattttct

SEQ ID NO: 45741 - DNA, 408 bp, Glycine max
  Clone ID: LIB3107-055-Q1-K1-B1
taatgagtgtcatcatcaaaaagggggagaatgtgaatcatgcaggttttgatgatgtcgaaaaaaattcacttgataatgattgtcatcatcaaaaaaggggagaatgtgaatgcatgaatacatgattttgatgatgccaaagaagaatcaaacacggttgcttcaaaggataagcattgcttcaaaattaatgcaaggttgcttcaacaaacaaagccttgcttcaagattaactcaagatcaagccttgcctcaaaataaagtgtttccaagacatccaaggctctggtaattgattaccaggcagtgtaatcgattaccagaagacaattttgaaaaatagttgttaaaaatgggggttttgaatttgaattttgaacctgtaatcggttaccagatgtttgt

SEQ ID NO: 45742 - DNA, 415 bp, Glycine max
  Clone ID: LIB3107-055-Q1-K1-B11
ggatcaccaactagccaatgacaagaggaccaggccttattgtaagaatatggccaagagccaagactatttcttcaaggagttctctagagccattaccttgctctcagagaacaaccctctcactggcacaaagggtgaggtcagaaagcagtgcaatgttgccaacaagcaccatgatcaggacccttgaattttcctccccttgtctatgatcgaggaagaaaatctgtaatatattatgcaaaaaataattaaggtcttttcctttaaatgggctggttcaatgaaccgagaccactgcatgttcatggggatgggaggattaagaggctatgttttttaatcttccgatgttactgttgttttttttttaatttcaataaggatattatatatgtagtactatgcaagt

SEQ ID NO: 45743 - DNA, 424 bp, Glycine max
  Clone ID: LIB3107-055-Q1-K1-B2
gaggtaccctgtcaacgttctcatccaccagcatgaatacggacacacaccttgctttcctttctatagagacacacagagagagcaataaacacccttcaatggctaccactaccactaaagtttacattgtttactattctatgtacggacatgttgagaagctagctgaagagattaaaaaaggagctgcttctgttgaaggagtagaagcaaagctatggcaggtacctgaaacactgactcaagaggtacttgggaaaatgggagcacctccaaagagtgatgtaccaattattacacccaatgagctacctgaggctgatggcttattgcttggattccccacaagatttggactgatggctgctcaattcaaagctttactggatgcaactggaagtctatggcgcacacaggcact

SEQ ID NO: 45744 - DNA, 338 bp, Glycine max
  Clone ID: LIB3107-055-Q1-K1-B3
agtcatggaaacgttcccaacgggggggtactccaccgtaaagagcctcaagttagggcgcgccacgctagaatgcgccgagtgccttaacgagttcgaggaggtcgaaacgctgtgtatcattccaaattgcagccacgtgttccactccaagtgcatcgacgcgtggatcgccaatcactccacttgtaccgtgtgtcgcgccaatctttttcccaaacctgatgaccacgattttgatcctatccaaattccggatccagaacaacccgttatatcatcaccgactcgagccgaaactgggggctctaattctcggtctacgaatttgattgatc

SEQ ID NO: 45745 - DNA, 426 bp, Glycine max
  Clone ID: LIB3107-055-Q1-K1-B4
agggctatagctcagttaggtagagcacctcgtttacacgagcgccaatgtttttttcagaggagtttcatcttgtaatcaaaagagtttatcttatagtaagaaatcgatgtcttactccattttaaggaacaaaacaagagaacaatagcctgacaaagggtttagccataaaatcgaatccatcattgatttgagatattgataaggtgaatactcatttctcgtcaatgctaggcataatgcgggtatagggacctaaaaaagattatcttttcttcctatcttatgaactttaaagtgtatgaagtgtcatttcctatcttagattttaattttagtaggtagataaagagtccatttaacttaagttgatctaagccagaagcagacctacgtcaagataatccttctttgaagcacttt

SEQ ID NO: 45746 - DNA, 404 bp, Glycine max
  Clone ID: LIB3107-055-Q1-K1-B5
gaggccaaaaaaaacgcaacacaaatcgaaggggggcatgctgttgtgtgcgacactgctggatgtgttgagttgagacctttaaactcaactcaacattttcatctctttctctctgctaatttctagggttttgcctttccccaattcccacaaaatgggggtctctttcaaggtgtccaaaaccggcactaggtttcgccccaagtcgattccccaacttcaagatggctcatccgacaattccaagtcccagagtgatcttgttgaggctggtgaaaacattgctcagattccccagtcatctgtttcatctgaaactttttcattagcagatagggaagcttctttcacattgaacctgtttccagatggttattctattggaaaaccctccgagaatg

SEQ ID NO: 45747 - DNA, 407 bp, Glycine max
  Clone ID: LIB3107-055-Q1-K1-B6
gattactgacctggcctctgtggactacacccaaagagtcaaaacaccaacccaccaattaatccttccttcaagcattatctcacaatgtcttcaaacctcaccattgaacaaaggctcgaacagctgcaaaaggcaaaggaaagagcacaaccccaaccacccaaaggggccaaaatccaacgggtagcacatcatctccgagaccgaaagcatttcaccaagcattacgagccgaaactgatgtcattgggtcccatccatcacggtgctgaaaaactgcagctgggagagcagtgtaagcaaaggtgggcagcaacgtacatcgaaagcactggaaaaaccccacaaactctacacaaaaaggttgtggacgattttgaaaaccagaagaagttgtttgacga

SEQ ID NO: 45748 - DNA, 397 bp, Glycine max
  Clone ID: LIB3107-055-Q1-K1-B7
gtctggtcaagacaaccattagaagagttatgacttttagaaaaacttaaaaaccaatttgaaaaagtcaaaaactatttgaaaagttacatcttttgattttattcagaaacaatcattggtaatcgattaccaaatcagtgtaatcgattacacaaggcttttatgtggaaggatgtgactcttcacatttgaatttgaatttcaacattcaaaggtactggtaatcgattaccaaaacattgtaatcgattatagtttttgaaatcaattggaacgttgtaaattcatttgaaaactttttcgaatctattttgctactggtaatcgattacaacaatctggtaatcgattaccagagagtaaaaactctttggtaaacatgttttgagaaaaa

SEQ ID NO: 45749 - DNA, 395 bp, Glycine max
  Clone ID: LIB3107-055-Q1-K1-B8
ggttctagtgtgtgattgtttgttggtgtaactcgttcttcttcttttgttgttctgtgtttgtgtttgttttttctctcacctgaaaatgtcttgctgcggaggtaactgtggttgcggaagctcctgcaagtgctgcaacggctgctgaggctgcaagatgtacccagacttgagctacactgagtcaaccaccaccgagacctttgtcattggagtggcacctgttaacgctcaatttgatggtgctgaaatgggtgtgcccgctgagaacgatggctgcaaatgtggaccaaactgctcctgcaacccctgcacttgcaagtgaggtcgtgggagagcaagcttcaaacagagatagcccttaattaggaataatgataaactattaatgt

SEQ ID NO: 45750 - DNA, 165 bp, Glycine max
  Clone ID: LIB3107-055-Q1-K1-C1
gagacctcaggtctggctgttataccctgtaaggggtattgggtaaaatgaagttgctaaatgaaacgaagcgatcgttttaaaggatccaatcttacatacaccagcgtgcgacgccatagtctctcttatcgtgccacctaaattctattgactggccggaac

SEQ ID NO: 45751 - DNA, 386 bp, Glycine max
  Clone ID: LIB3107-055-Q1-K1-C11
atattaagccaccatacaagaaaccaccttatgggaagtaccgtccattttaagacaacacccatgcctaaagcaagcaatgaggtctattatctacttaataaataagaggaactgctttgtgttttctagcattgtgatttacaacttcgtagcaatgcatattcttgactcttgcatgcacttcaatccttcgtagcattaatgatgtggccaagtcatcatgagcatcatacttatttctttgtgaatgtaaatcaaaattataagagagaaaatggtgcttttgtactacagattactataaataaaaaacttttatggctttcaaaaaaaaaaatttttaattaaaatattatgcggccgctttataagatccaagctta

SEQ ID NO: 45752 - DNA, 392 bp, Glycine max
  Clone ID: LIB3107-055-Q1-K1-C2
gactttcaatctctactgtttctacccccaactgcggatttggcctaatgaagagacccatgtctaacaagaacttctttcacccaacgcacctttcattgaggattctacccagcaatcgttcttctattcacacaccaaaattcaatgcacttcccaaagatgtcccatccaatgtacccaaactcactgcatttttctattgcaatgcacgttatgacttatattgttctagaaagccataatccaggatcaaagctccacaagaaagaaacttttgagcctgttacaatcattgatacccctccaaagcctcctgtcgctttgagatttatgtgttaactccacctggactcccaccattgaacactgtcattgcacaacattttaat

SEQ ID NO: 45753 - DNA, 357 bp, Glycine max
  Clone ID: LIB3107-055-Q1-K1-C3
cgaaaggaatcagaatcgcttggtggtgatttaataacaaaatctgtgtaactatcatccatacgtcaaataacagaacacatgtataattcaaggtgaaaatgaacataaattgacatgtaatgacataacttgtgttcttacttgatactcgcaaataattctacaatctgacacacgcttatgtctacgatctctaacaactgtacacctactataaccagaaactctgagcccaacgattgggattactatataaaggtaattaacacttatatgctcaatattaacaacgagcattatgagtgcatggcgactctcttgttcgacattacctacactgactgctatacactt

SEQ ID NO: 45754 - DNA, 410 bp, Glycine max
  unsure (1)..(410): unsure at all n locations
  Clone ID: LIB3107-055-Q1-K1-C6
ggttctagtgtgtgattgtttgttgtcgtaactggttcttcttcttttgttgttctgtgtttgtgtttgttttttctctcacctgaaaatgtcttgctgcggtggtaactgtggttgcggaagctcctgcaagtgcggcaacggctgcggaggctgcaagatgtacccagacttgagctacactgagtcaaccaccaccgagaccttggtcatgggagtggcacctgttaaggctcaatttgagggtgctgaaatgggtgtgcccgctgagaacgatggctgcaaatgtggaccaaactgctcctgcaacccctgcacttgcaagtgaggtgttgggaaagcaagcttcaagcaaagatagcccttaattaggaataatgatanactattaatgtgtagctaaaaactta

SEQ ID NO: 45755 - DNA, 331 bp, Glycine max
  Clone ID: LIB3107-055-Q1-K1-C7
gttatgatcctctaattggccaaattgccgtttgtggaatataataccacttttggaacttcatgccattcacactgaattatcttttgttattaaatgggaaccggtttgagcgcttcagcttgaacacaaatatgcatttatgctcacttgtcgctgccaattcaaatatccaaagttcaaatcccccaatgctatcaataaaagcattattcctcttcataaatactgctattataaactaggtttgcaccccacattcctcagtaaaatttaacgcccttgtcaaaagccatcaaaaaatgttgtcaaaaaagaacttatttttgcc

SEQ ID NO: 45756 - DNA, 396 bp, Glycine max
  Clone ID: LIB3107-055-Q1-K1-C8
gacaacagatggggagaacatatcgtgggaaaacaacaccggcttcggggactcacccgagagaactttgtattggaaatctcaaatcgcactgcttcaggaaattttagagcgataccatttaagtggatcaaaattgacacgagaggttggtcgaattataaaagaggtgaaagcttcggatttttgcagctgtttgaaggctaactcttgggattgcaccacctgtttgagaagacgagtggttgatgggctctgccgaacaggattcagtaccaacctttgcatttcataatgggaaaccacaaaaaaatttccaggaggctgtcacgagtatattgaggtgattgcaaacacatcaacaatgaagaagattcattttcttgtggaattgga

SEQ ID NO: 45757 - DNA, 425 bp, Glycine max
  unsure (1)..(425): unsure at all n locations
  Clone ID: LIB3107-055-Q1-K1-D11
gatcacttattaattgtgttaagaaatttaagtgaggagctagggaatgatgatgaagtctgctatgtgtgcagtggtggttgtagcacttcttcttctggtggaggtggggcccatggctgaggctgtgacatgcaccccaacagagttgagtccgtgtcttccagcaatcacttccggtgctaaaccttccaatgcttgttgcacgaagctgaagcagcaaaaaccatgcttatgcggctacctcaaaaacgctagcttgaagcagtatgttaactctcctaatgcccgaaaaaccgttgcttcttgtgggattccctttccaacttgttaattaattaagccttcttataattaaagtgtgggatatatatatatatatagataaacagnttaatttatacacactttgatcctacaaagca

SEQ ID NO: 45758 - DNA, 423 bp, Glycine max
  Clone ID: LIB3107-055-Q1-K1-D2
gaaccctgggaacagcatctccacactcatttcgaaattatgaagcactaatgaaattaacacaaccaaaaaaatttagaaacagaagaaacatatcaataacttaagtcacatacattctgacaccaaaaaaaggaaaggaacttgagccacattctgtccctggtggactcaagaagagtctttcataggacagttaaaattatagcttgcaaaaagggttcactagcaaacattgcaatggcctcaacctcttctgctctcactatatcctcttcttccacccttcttgatggcaaggctccaagacagtcaccagctgcttcccctcaatgtgtgagcctcccccctccccctttgcactctcagaaccgttcatggaagaccactgcttattgtcgcaaggttgctcgaaaaggtatg

SEQ ID NO: 45759 - DNA, 439 bp, Glycine max
  Clone ID: LIB3107-055-Q1-K1-D3
aacagacgacagaacgggtcttacaagacgttatgaaaatcgtgtggaactcatttttcgggattttgtgaaattcaattacacgggtttccatacaccattttaatgtcttcccattcgtacaaaggcacctgcttctacacgcgatgccctcccttatcgttccacattggggcttatcactcgacccgttgcatcctccgatgaaatccaattgcacatctatccctgtatcaacttccacgactaaatcaccagacttcgtggtcaaattaaaaaattgaaaaatgttgcttaacagatacgctcataaatcatgtttcaaacaaattatcttgaacacgcgcaaatggttatgatacaagctcaagctctggtcaagaataacttaagaagattgaacactagcatctttaaaaatgcttccaacaatattgtt

SEQ ID NO: 45760 - DNA, 326 bp, Glycine max
  Clone ID: LIB3107-055-Q1-K1-D4
cgacagagaccgattttttccttattgatgatccatctgacattgcatcatttgaaacctcttgtgctactccacttggataaattcctaacgcatagtattcaaaaatccttgttcttcatgaacttattgactatcaatcctacgatagtaggcaattcaccaacactatagatatatcttacgataagagaatccttagcagcaactcaaatacaaaatgtgaagcctttcttcttgatattagtccatctccaccaatggaagagaatatgaagtgtgaacaagttcgccttatttgtgagtcaatgatgaatatagatctc

SEQ ID NO: 45761 - DNA, 395 bp, Glycine max
  Clone ID: LIB3107-055-Q1-K1-D6
agaagatttgaatgttgaacatgggaagtatgaatcaaagctaaaagatatttctgctaatctacaagcgaaagaagatcaaaatttgaaaaaaggtggtggtcaaaaaatcagccgtggacagaagggaaagcttaagaagataaaggagaagtatgctgaccaggacgaggaagaaaggagcatccgaatggcattgttagcttcttctggaaaatcaatcaagaaggaagagacatcatctgaaaatgatacattggaccaagggaaaaaacctggcagtggtccttctgacgctccaaaagtaccttctgatgctccaaaaatatgttacaagtgtaagaaagcaagtcactttatctcggattgaaggagcaaccaaatggtcttttgca

SEQ ID NO: 45762 - DNA, 150 bp, Glycine max
  Clone ID: LIB3107-055-Q1-K1-D7
gacgatgagtcgatttgataactaaggtattggggttcgtgatattgatccaatttgatatcatcgaaatccaatttataccattgttgaattaattatcgatgaaagatttatcatctctatgggattaaatcccgaattttttattgg

SEQ ID NO: 45763 - DNA, 419 bp, Glycine max
  Clone ID: LIB3107-055-Q1-K1-D8
acacacacacatcccagccatgagcctgttcggtgtaggcagaaaccagagaacattccgcccgaaaaaaagtactccttctggaagtaagggagctcaacttcgaaaacatattgatgccacgttaggtagtggaaatctgagggaagcagtaaagctacctcctggggaggatttaaatgagtggctagctgtcaacactgttgatttcttcaatcaggtgaatctgctttatggtacccttacagagttctgtactcctgagaattgtcggacaatgtctgcaggacccaagtatgaatatagatgggcagatggtgtacaaattaagaaacctattgaggtttctgctccaaaatatgtagaatatctaatggactggattgaagcacagcttgatgatgaatccatattcccac

SEQ ID NO: 45764 - DNA, 422 bp, Glycine max
  Clone ID: LIB3107-055-Q1-K1-E1
gacagagaggcaaatataaagaagaagagaaatgggaaaatagagtactttggtgaagaacaggagatttcctcattcttagtttgtctcacaacaaagcagcttcaaaacgagggaagtattcataaaggagaatacagagaggcaaatataaagaagaaaagaaatgggaaaatagagtacttgctgaagaacaggagctttcctcattcttagtttgtctcacaacaaagagatgtaattgtacctagtacaagaaaatcaaggtcaaagcatggacgctgtgtcatccgcactactagagccagtaactaattctgtgttggatctgattaaaaagcaagtggattacatccgttataggcaaaactttgatgaactacgcgagtgtgtaaagcagcttaaacttgtaaaggagaaag

SEQ ID NO: 45765 - DNA, 430 bp, Glycine max
  Clone ID: LIB3107-055-Q1-K1-E11
ggtggtagttgtgtgacacagaaattaagctagagctacataggttttttcttttctcaccttccttctctcccttcagacaagggacgaaaaatcagagagagagagagagagagagagagaaattccaaaaccatgtcgtcccacagtcatctaagtttcgcctttggggttctaggtaacatcgcctccttcgtgtgctttctggcaccactaccgacattttatagagtttgtaagaagaaatcaaccgaagggttccaatcaattccatatgtggctgcactcttcagtgcaatgctttggatcttttatgcctatgtgaagaccggagaaatgcttcttatcaccatcaatgcattcggttgcgtgattgagaccatttaccttgccgtatttatcacttactgccccaagaaagctaggatgt

SEQ ID NO: 45766 - DNA, 421 bp, Glycine max
  Clone ID: LIB3107-055-Q1-K1-E2
gatattctaggatgaaatctcacatctctggtgaaagctctctgggcaatgagttgaggagatccgtcagcgagaagcttcatcacgttgatgaggccgatgctgccaagcaaggtagggttctaaagtatatacaaactgagaagcgacggaggaggagccaccgtgcagaagaccccataagaaccttgatgttcttaggctctatgaatcacacgtgacatatgatattattaatgaggtatttgggcctatagccttggtgttgaaattaattaaccccctttgactaattgggggtgaaaaatcaaaaccgaaattcatttcaattgtcacatatatgttaatacagcagtgatgtaaatatgtcatggaccttcatatctatagctagaagtatcccttacttcagatgattata

SEQ ID NO: 45767 - DNA, 384 bp, Glycine max
  Clone ID: LIB3107-055-Q1-K1-E3
aggcgtacgaaccgatgcaaagacgacttatggggccaacaccaaaacttaatgtatgggcactgtggactatgccttggggcaagactcacacactcactctctgtcacttccgatacactcctgcgctgccaaaccacgatatgtagtggaggattaccaaccagaaaagcgtccgccgaagggccaacgtgcatactactctgtctgaaccttgatgcttttaatctacatatatgacacgtgtcccatgaaactatcaacgtagtatctgctcatcaacaacatgtgttggaatttaatgaccaataccgtcatattgatgattgataatgactatcgagcatcattttcaaacacacatatacgtgaattctatgaaga

SEQ ID NO: 45768 - DNA, 408 bp, Glycine max
  Clone ID: LIB3107-055-Q1-K1-E4
acaaaacgtttaaaaggcatctcttaggatcaaatctaacatttattgtgggggcactgtggacaatgagttgaggagaacccacacacataatcttcatcacgttgataacgccgatgctgccaaacaaggttgggttctaaagtatatacaaactgagaagcgaccgacgaagagccaccgtgcataataccccataagaaccttgatgttcttaagctctatgaatcacacgtgacatatgatattattaatgaagtatttgggcctatagccttggtgttgaaattaattaaccccctctgactaattggaggtgaaaaatcacaaccgaaattcattttcattgtcacatatatgttaatacagcactgatgtaaatatataatggaccttcatatatatagc

SEQ ID NO: 45769 - DNA, 404 bp, Glycine max
  unsure (1)..(404): unsure at all n locations
  Clone ID: LIB3107-055-Q1-K1-E5
gacagagagagggggttgggggtggagggattgacgctgcgtctcttcctcttctctttcgatccatccctcattcctaatcctccaatccaaccacctcagcctcacactcacatatacacatatctgaacgcgtatcgtccctcctatggcttcaaagcgcatcctcaaggagctcaaggacttgcagaaagacccaccaacttcttgcagcgctggtccagtagctgaggacatgttccattggcaagcaacaataatgggtcctgctgatagtccttatgctggaggtgtattcctagtcactattcacttccctccggattatcctttcaagcctcctaaggttgcctttaggactaangtgtttcacccgaacatcaatagcaatggtagcatttgtc

SEQ ID NO: 45770 - DNA, 416 bp, Glycine max
  Clone ID: LIB3107-055-Q1-K1-E7
tccatccctccatttcttacgttaggtaattgagtatgcttgtttagaatgttgatgctatattatctcaaatttcttttaaactaggctcggccgtgttttgctaggtactaaaattatttattttgatgtgtttgtgggtttcaattctcctatattaatccttttattttgtcaaaacaatctatgcccagtaacttttctctcaagtgtgcatccaatacgataatcatgttgaattgatgcttgattcattcatgtgcaaatgatacttagagaacacgatgatgctatttttactgaaaactatgatttttttaatttaacattttatcaaagcctgaatcttttaatacaggatcagatttatacaattttaattaatgtttctccatgatgaaattacactaataaaa

SEQ ID NO: 45771 - DNA, 387 bp, Glycine max
  Clone ID: LIB3107-055-Q1-K1-E8
attaaagtgtgggatatatatatatatatagatggacagtttaatttatacacactttgatcctacaaagcatcttgacacaagcattcaataggatttcaccactttatcgcaacattttaacatgatgcggtaataaagtaaattcttgttgaatatttggataacgatgttatatactcatagtttgtgtgtataaattaaacttatatttattatttactctatatatgtcactctacgtttgtgtgatatattatacagttaagtatttagctatctttgaatatgttaaagatgatcatatcagataaagctctctaaagttgaatatgaccaagatacatgttgtatccaagggaatatatgtggttagaagctattaat

SEQ ID NO: 45772 - DNA, 427 bp, Glycine max
  Clone ID: LIB3107-055-Q1-K1-E9
gacgcacttagcaatcaatcaaaacattcccaatagcaataatgtacacatcttcaattaagctccttctcctatagccatggctctttctaagcttataattgcttcccttcttgcgtcgcttctccttcttcatttcgttgatgctgatcaatcggcacatgcacaaacgcaggggtctcttcttcagcagatagattgtaacggagcatgtgctgcgaggtgccgtttatcatctcgtccacgcctctgccaaagagcttgtggaacttgttgtagacgctgtaactgcgtgccacctggcactgctggaaaccaaaaagtgtgtccctgctatgcaagtttgactactcatggtggcaaacgcaagtgcccttagacttaattggaccactatcctatgcatgcctttgatttatattataaa

SEQ ID NO: 45773 - DNA, 381 bp, Glycine max
  Clone ID: LIB3107-055-Q1-K1-F1
ggttgtagtgtgtgattgtttgttgttgtaactcgttcttcttcttttgttgttctgtgtttgtgtttgttttttctctcacctgaaaatgtcttgctgcggtggtaactgtggttgcggaagctcctgcaagtgcggcaacggctgcggaggctgcaagatgtacccagacttgagctacactgagtcaaccaccaccgagaccttggtcatgggagtggcacctgttaaggctcaatttgagggtgctgaaatgggtgtgcccgctgagaacgatggctgcaaatgtggaccaaactgctcctgcaacccctgcacttgcaagtgaggtgttgggagagcaagcttcaagcagagatagcccttaattaagaataatga

SEQ ID NO: 45774 - DNA, 431 bp, Glycine max
  Clone ID: LIB3107-055-Q1-K1-F11
attataaacataccaattattaaactccagcttgtactggaaaattgtattaaaacttatttcaaggagaattcgtttttgtgtaaaaatgctctttacataagtaatttataattactgtacttaatttatacttctggtgtgatgcaggtgattgatagagtctggactgtcaacttagttaggatctcttaccttaaaatgatgttattgcatgcttattacttagaaaaatgattattagaaaattgatgtgatattacgtatagtggtgatatttttgtacagagtaaacaattgcgtataagttgttttttaaattggttatacaagaaatcaatctaaaaatatttttaaataacttttttttaacaaaatgatgatacaaaatgttgacattttttttaatgttgaaatccttgactagattt

SEQ ID NO: 45775 - DNA, 428 bp, Glycine max
  Clone ID: LIB3107-055-Q1-K1-F3
cccacgcgtccgggacaccacacaccacacacatagtagctattatactctctagagtaagggcgggggctgctataattttctaataatggcgaaagacgttgagcaggtcacagagcaaggtgaatactccgcgaaggactaccatgaccctcctccggcaccgttgatcgacccagatgagctcacaaagtggtccttgtacagagccgccatagctgagttcatagcaacactcctttttctttacatcaccgtgttgaccattattggctacaagagacagagtggcaccaaaatccccggtaacaccgaatgtgacggcgttggcattttgggcatcgcttgggccttcggtggcatgatcttcatacttgtttactgcactgccggaatctctgggggacacatcaaccctgcggtgacat

SEQ ID NO: 45776 - DNA, 403 bp, Glycine max
  Clone ID: LIB3107-055-Q1-K1-F4
catttatattttattttatttttaatttttataggttgaagttataggaattaaaaatataagaatgaaaaaattatatagactaaaaatattatttttaaaattataagaattaaaagaaattaaaatgtaaatgataaagattaaaaagattatttttaaattaaaaaaaaaaataaaaatcatgaatcaaataatcaaatgagtaatttaatcttttataattaatttgtcaagagaatccattagcatttgtcttttttatttaatgaacaatataaaatataaccaagcatataagggattgtatatactatgttttgtgcttaatttggtttaatttgagtgataattactgatatttaattatgggtttggaattggcagaaggtactacaagtgc

SEQ ID NO: 45777 - DNA, 375 bp, Glycine max
  Clone ID: LIB3107-055-Q1-K1-F5
gagttttgagtttcgggatctgtggagatagagaaagcgccatggattcttcttcacacatggcttcgcttccggaagatatcatcaccgacgagcatttacaacagcaaactcaacccgcctcagcctctgctttcgcttccgttcctcagcgcccgccaactaagagctcttcagaaaaatatgcacctttagattggtccgtgtattttgacaaagaagacgatgttgcaattcccgaatcgaacgatgtttttcatgtttacacggcaagaactgagggtcccgttgtattctgtttacacggtggtggttattctgggctttcttttgctgtctcagcaagtaaattaaagagaaagctatggtagttgc

SEQ ID NO: 45778 - DNA, 352 bp, Glycine max
  unsure (1)..(352): unsure at all n locations
  Clone ID: LIB3107-055-Q1-K1-F6
gagagtgagatataggatcactggagagcttacttcaatggcggtttcttctctctctgttactcctctttcgctctcaaattcttccccctctctatcttccaagccaaagttaccatctttgtgttttctctctggcaacaacaccacattgagggtaacatgcccaaaacctctgcactcatccactgttgttcatgttgctaccgaagcgttggattcatcccctgatcccttggacccacctccagaaacccttgatgatgactctgacgccaccacctttgaggttggtgacttgcggactcctagcacttcaacaattagcattggtggcgatgcanatacaatg

SEQ ID NO: 45779 - DNA, 271 bp, Glycine max
  Clone ID: LIB3107-055-Q1-K1-F7
cgaatgtgcaaaacttcgtaatgagctgtaaactgggttattgtaaagcgaatatgacgtcctacgaacactatgacgctgcatcacatgcggtaccatggccatgccatcgcgcacgctaccaactgttccctttccgaatgaaaactacctctggttagcattcttgcctggtaaaatgcgcaaggtctatgcttgctagacaagcacacatcatcactgccctttacaaccattcctgacgagtgcgttgaaccaacacaagactaca

SEQ ID NO: 45780 - DNA, 416 bp, Glycine max
  Clone ID: LIB3107-055-Q1-K1-F8
gactcgagtgcgcgtctatgccaaagagagtgagtgagtatggtttcaaattccaatcggaagaaatcggaatcggaaaaaatgggaggtggcggcggcgatcacggccatggacacggacacggtgatttcaggaacaaggtctggagtatgagcggtggcccttactgtcgcccaaagcactggaagcgcaacaccgccattgccatgttcggcgttgtcctcatctgcatccccatcgctatgaaatccgctgaactcgagcaacgaccacatcaccctgttcgccccatcccttctcaactctggtgcaagaactttggaactaaagactataatgataatgatccatgattcatcaattgcatcactggtgttcacatcatgtcaagcaacatttatttgttaaatgctga

SEQ ID NO: 45781 - DNA, 230 bp, Glycine max
  Clone ID: LIB3107-055-Q1-K1-F9
gggtcaaaatctcggatttatcgcttctagctcgctgtgtggcaatttctgtcgctttgctctgattctgattttatgtgttccaatgtctctctggcttgcatacgccattcttattttcagatcagcatagcctagccggttagatatggcagtcactatggcactaatgaccacgcagcattctgctcacctacatctacctttttatttaacattttaacttttca

SEQ ID NO: 45782 - DNA, 217 bp, Glycine max
  Clone ID: LIB3107-055-Q1-K1-G1
ccttgacaggctcatgctcaatatgtaacacggggcgcttgggggatgtgaatatcaaccccggcattgcctcactatttgattcttgatgcgaagaagaaatggggctaacgcgctaatatcgcactgtgcgtacattacgatagcaaaacagacgctggtgacactctggcatatcacaagacggacgatatgtcttattatcattaacaatatg

SEQ ID NO: 45783 - DNA, 390 bp, Glycine max
  unsure (1)..(390): unsure at all n locations
  Clone ID: LIB3107-055-Q1-K1-G11
gcctttcctgatttcttggatgatttgtcctataggataatttgtgaaacaaccaagcccgcttatcttgtttcataagatgatgttacacgngcncgnaancagnngaaatttttactttttcttctcttattttgaacatgcccagnggctgtttatattgtncgtcagctttttttttaccgncgaagaattctaaccgcngaatttttttctataattgatgctttttattccacnacaatttttctttttgcgaaccgatttatctttgacaaggatgtttttattgcttccacgttttctattcattgnnngcctttttacaactttttcctactctttacccactggaaccgctattaatttattatatttttttttgcctca

SEQ ID NO: 45784 - DNA, 421 bp, Glycine max
  Clone ID: LIB3107-055-Q1-K1-G3
ggttctagtgtgtgattgtttgttgttgtaactggttcttgttcttttgttgttctgtgtttgtgtttgttttttctctcacctgaaaatgtcttgctgcggtggtaactgtggttgcggaagctcctgcaagtgcggcaacggctgcggaggctgcaagatgtacccagacttgagctacactgagtcaaccaccaccgagaccttggtcatgggagtggcacctgttaaggctcaatttgagggtgctgaaatgggtgtgcccgctgagaacgatggctgcaaatgtggaccaaactgctcctgcaacccctgcacttgcaagtgaggtgttgggagagcaagcttcaagcagagatagcccttaattaggaataatgataaactattaatgtgtagctaaaaacttatgtattatgtc

SEQ ID NO: 45785 - DNA, 417 bp, Glycine max
  unsure (1)..(417): unsure at all n locations
  Clone ID: LIB3107-055-Q1-K1-G5
gatttcctcatgcatgaacctcttgatgtaatcggcatgattctacctcaatacattatttcatttcctaatttccctccttaaataaggacaatatcattcaaattttcctaattaaataaggatcatatcttcccaaattttccaaaatcagaagcaaaaaatatatagaaaattcctaaaataaaacaaaaaatatttttaaaattaccgtaaaagataagattgtcatttttgacaccctaatttattaaatgaagtgatgatgttatggcatttgtaccttgttttaagtaggggctgatatcagtagtttggttatcagcaaaaaaaggtgtctccgagtatctcataaagcacacnaggggattgactcccctaccgtctgtatttggaagacaatcttgtatgccgctc

SEQ ID NO: 45786 - DNA, 417 bp, Glycine max
  unsure (1)..(417): unsure at all n locations
  Clone ID: LIB3107-055-Q1-K1-G6
attggtctgaaatatctattaattttgttattggtaattaatttttgttaaaaaatttaattgattatttttgttgaaatatttcttattaattatatttttttatttacagaacttaaatctcttgtttaaaaagaagattaagatccaacaccttgtttaaagagattaaaaaatttgatatcactaccaattgactttttggtaaatatgtaggatgtataataatgataattagagtttttatgaaaaatcttttaggggcaaaaattatttttaagaaatatatatacgacttttctagaatacgtggaggcacagctaacaagaagctggagtaaggtccaccatgtcttgngctaatacaacataaaccccttcactttctttaaattgcaataatcacatgcatcgcat

SEQ ID NO: 45787 - DNA, 325 bp, Glycine max
  Clone ID: LIB3107-055-Q1-K1-H1
taaagcacggtcttctacattttccaattcacaatacaattgctacaatttcaactccataagatgatttggccgtgtcctataaaattattgtacttagaacgttatcccattctatttccaatatagctacgtttgttctaaaacatcaacggggtttctgtagaaatcctatcgtactcttgtgcattgtattagaatatatgcagttcatttgcctcaataatcttctcagcattgccgttgtaaattgatttgtatgtattattccaagaatagaactaattctctatttttggtttaaataatatttgtatttcctttc

SEQ ID NO: 45788 - DNA, 272 bp, Glycine max
  Clone ID: LIB3107-055-Q1-K1-H11
ggcacctgttaaggcttaatttgagggtgctgaaatgggtgtgccggctgattacgatggctgcaaatgtggaccaaactgctcctgcaacccctgcacttgcaagtgaggtgttgggagagcaagctttaagcagagatagcccttaattaggaataatgataaactattaatgtgtagctaaaaacttatgtattatgtctgtgatggtttttcgtgcactctggtgttttgtgttaaacaaacattcttaaaataaaagaggtcatgtt

SEQ ID NO: 45789 - DNA, 414 bp, Glycine max
  Clone ID: LIB3107-055-Q1-K1-H2
gatgtttctttactaaccattgaggagggtatgggtgaggtgaaagccacagctggtgacacccatcttgggggtgaggattttgataacagaatggtgaaccactttgttcaagagtttaagagaaagaacaagaaggacataagtgggaaccccagagcacttaaaaggctgaggactgcttgtgagagggccaagagaacattgtcatccactgcccagaccaccattgaaattgattctctctatgagggaattgatttctactccactgttactcgtgccagattcgaagaactgaacatggatctctttatgaagtgtatggagccggtggaaaaatgtttgaaggatgctaaaatggacaaaagaagtgatgatgatgttgtccttgttggtggttctaccagaatt

SEQ ID NO: 45790 - DNA, 351 bp, Glycine max
  Clone ID: LIB3107-055-Q1-K1-H3
acgaacgacagagaagactggctccaggctaacgctattcgttatcttttgggagactggggggcgtacatacgaggagtactgcatatactaacttattatattaactcaagggatggctggactcgcacctgttgtatcacaaggcgatgctcgagcatatgaatatagaacgagagacttacttttatatgatggacatgactggcacacatgctatgactagggtaatgatagctattacactatctgtctgcacgataatcttagcaagtgaatggacacatatgattgttagaagccatttttcattcagtaaacggggatacttccctcttgcaagggacttga

SEQ ID NO: 45791 - DNA, 411 bp, Glycine max
  Clone ID: LIB3107-055-Q1-K1-H4
ggtttaaatgttttcgctaatcgagataacttgggacagtgggaagaaaataaaggtccttgtcttcttctacgctacaattttggtaacatgacaatgccatgcgtacgatatgtttcctctacaaatgaacactggctattatgcccgtactccgaaggtctaatgcgcatgttgtaggcttgctgtggaaacacacaacatctttggctttgagaccattcctgattagtgcgttgaagcaactaaggactacatccatgacgaacaatatagatcagactccaaaacaattaaccaacaagcttacttttatgccagagacctgaaagtccatactaaagacacatttgtgttcaacatagatgacacacgactctttaatattccatactacaaaacacatctata

SEQ ID NO: 45792 - DNA, 338 bp, Glycine max
  Clone ID: LIB3107-055-Q1-K1-H6
aaaaaaacaacatatgggtttttcatatagaatacaacatagggttacagtggaaatattacaaccgctcgggacttctaaaatctaaatatcatcaaagtacacaaattagaacggattgcatgattgcattctataatgatatcatcatctatacagtaatctctacaacacgcaagtcactaaacttaaactactatgcaaaaacatgccctaatgtctactatattgtggccaaggcatgaaaagatgccactgataggaacaaaacttttccagtagcaattctgcgaatgcacttccattaatgattacaaacctggtgctatacctctctg

SEQ ID NO: 45793 - DNA, 363 bp, Glycine max
  Clone ID: LIB3107-058-Q1-K1-A1
ggtggtttgacatagggacttgagggaaatcgtggaggctattaaggagaatttcgatgacgcggcttccgctggggatcaggtttctgagatgcttgagatcagtagggcgcagcttgatcggagcttcaagcaattgaggaaaactgtgtatcactcgagtagcatattgagcaacttaagctcgagttggacctcgaaaccgccgctggcggttaagtaccggctcgacaccggttcgctggatgaaccgggcggtccaaagagtctctgctccactttggaacgcctcttggcgtgggagaagaagctctacgaggaggttaaagctagaaaacgtgtgaagattgaacattaaaagaa

SEQ ID NO: 45794 - DNA, 426 bp, Glycine max
  Clone ID: LIB3107-058-Q1-K1-A10
ttttaagggtctcgtatgacattactgatctggtcaacttcatagatggtcttgcagacatgagtgccctagtgtatgatagttcaattcacgcttacatgccgcacgatcgacagtggattaagcaacgaactttccaacatctgaagaaattagcacactgattaatcccttaacttttggcaatttaatgtaaagaaaatcgagaatggccgagagcctgtctgttatgtgggctatatactccgttggctatgtaatacgaatattgcaaatgctggcaggtaattataatatcaacagctggtactgctttagtttcataaacaaatgattgtcgttggcatggttgtgtatcttctatgtctgcaagacttgtcttttttaaaaatcttaatcttgtagttgtaatattaaatagtgagt

SEQ ID NO: 45795 - DNA, 337 bp, Glycine max
  Clone ID: LIB3107-058-Q1-K1-A2
ggatcttgtaatgaatagtgatggcacttgccaaggagtgattgccttgaatatggaggatggaacactacatcgtttcaaagctgcttcaacaattttggccacagggggttatggtagagcatacttctctgcaacctcagcacatacttgcactggagatggcaatgccatggttgcacgtgctgggatccctcttgaggatttggagtttgtacaatttcacccaacaggtatatatggagcaggttgccttatcacagaaggatctcgtggtgaaggtggaattcttaggaatagtgagggtgagcgatttatggaacgatatgcccctact

SEQ ID NO: 45796 - DNA, 401 bp, Glycine max
  unsure (1)..(401): unsure at all n locations
  Clone ID: LIB3107-058-Q1-K1-A3
gatgagccagatgtgtcttgggttaactcacttgtgaaggatgctccaccggaatccggtgaatctggtgaatacagtgtggaagatcagcgaaagctactgcaatgccacaatggaacagatgcgattccagcatggttggagcaattgtacttggaccaggagcaaatggtggcatgattgcaatttcgtggcttgcggtagcaactccttttgcaactcaacagtttatttatttgatgaattttttgaattttatagaatttagttagatgacaattcgcaaaagggatcttaaaatagcctaccaaggctataggatgtagaagttgggcangaagcaagttttctgcttcagtaactcaatgattccatttttttntnctganctattttctttc

SEQ ID NO: 45797 - DNA, 293 bp, Glycine max
  Clone ID: LIB3107-058-Q1-K1-A5
agaagtggatatacatagatgctcgaaggaaatcttgggtgctcttactgagaatttcgatgacgccgcttccgctggagatcaggtaactcagagtctaggatcagctatggcgcagcttgatcgaagcttcaagcgattcaagaaaaccgtgtatcactcgagtggcctattgcccagctcaaacggtagcatgaccgcaattccgtcgcttgcggtagcaactccttttgcaactcaacagcttattgatctgatgaattttttgaatttatagaaattagttagatgac

SEQ ID NO: 45798 - DNA, 180 bp, Glycine max
  Clone ID: LIB3107-058-Q1-K1-A6
tgtcttgcaaatcgttcgtctgactcgggtgtgggggctgaaagactaatctaacgcgtctagtatctggttacctccgaagcttccctcaagatatctggagcccgtgggcgaattgtatagcatactgcctatgatcactaggcatatacggcccctcgacatggacctattatgaaa

SEQ ID NO: 45799 - DNA, 388 bp, Glycine max
  Clone ID: LIB3107-058-Q1-K1-A7
ttttgttggaatacatcttggatctgtcgagggggttatgtccaaagtcctactcatggtcactcggtggaattaggagaagctgtaggtgttattgcgggccagtccattggagaaccgggcactcaacttacattaagaacttttcatactggtggagtcttcactggaggtactgcagaacaggtgctagcaccttataatggaaaaattcaattcattgaagatttgattcatcctacacttacacgtaatgggcatactgcgtttctatggtatatagatctgtatgctactattgacagaggtgatattatacataatgtgactattccaccaaagagttttctattagttcaaaacactcaatatgtaaaatcacaacaag

SEQ ID NO: 45800 - DNA, 373 bp, Glycine max
  unsure (1)..(373): unsure at all n locations
  Clone ID: LIB3107-058-Q1-K1-A9
gatcgtatttcatttcatttccctccccccactcgcaccgtttacgccaaacaaaccctaaatctctctcgtcttcttcttcttcttcctccttcaaccatgagagagatcctgcacgttcagggaggccaatgcggtaaccaaatcggttccaagttctgggaggtgatatgcgacgagcacggcatcgatcctaccggaaagtacaacgacgaaggcaacagcggcatccaactcgagaggatcaatgtctattacaatgaggcctctggcggaaggtacgttccgagagccgtacttatggatctcgaacctggaaccatggacagcatcagatctggcccctacngcaagatcttccgccctgacaact

SEQ ID NO: 45801 - DNA, 356 bp, Glycine max
  Clone ID: LIB3107-058-Q1-K1-B1
ctagtagggccgccaggcccatcagtcaacgcggactatacatattgacattccattttcaaagcagcttaatgattaattattgaggcacatattgatggaatcagtattattttctcacttgcttaaactatatagatactatttctatttatataaatcatattttatttattatctataatattatataatattattatggaaatatatcattaataactttttaaatattatcgattatatttaatcatgtttaatgttttttaaaacagaattaaatctttattaaatattatttatactttttattttatttcgaaaattttaatctcttcttttcttgtaaatttttt

SEQ ID NO: 45802 - DNA, 397 bp, Glycine max
  Clone ID: LIB3107-058-Q1-K1-B10
tcagtatggagatgcagtaatggaggctttcgtcgaagcctttagtggttctgttcttgggaaaggctacatactgaaaacgtatttctttcctggtcagagaacttctagccacatacaaatacatggtgcaccacacgtttacaaggttgatgaattccctgtgtatagcatggcaactccaaccatctctggtgcgaaggagatactatcctatttgggtgctaagcctaaagcaaatgtctcatctgctcaaaaagtgatattgactgatctgagagaggaagcagttgtctatatcaaaggcactccctttgtcctaagggagttgaacaaacctgttgatacactcaagcatgttggaatcacttgtcctgcagtggaacacatggaagca

SEQ ID NO: 45803 - DNA, 430 bp, Glycine max
  Clone ID: LIB3107-058-Q1-K1-B12
ccattcttgaatgttactatatatgttagttttagtttgtctatatgattcctgttggatttcctgatgagatgttcacagataaaaatatgatttataaaatataataacacttaatattttgcgctgctaacacgtctctatacacctataaattttttccttcttttcttttgtctgtatacagcaagtttgaaaagaagaagtcaaaattttcagcagcaaccacatgatgatcaaatctgcacaaattcattgaccatattatgcattccaacatcgttttagaaattttacagctaggagaatattatattaaaaaaattaatttaatataactcaacaattgttattttatttttttcatatcaataataaaattatttatcagaaatttataatcgaatatttttaacattttcttcttaat

SEQ ID NO: 45804 - DNA, 351 bp, Glycine max
  Clone ID: LIB3107-058-Q1-K1-B2
gaccattcaccacacacatagtagctattatactctgtagagtaattgcggaatctgctagaattttctaataatggcgaaagacgttgagcaggtcacagagcaaggtgaatactccgcgaaggactaccatgaccctcctccggcaccgttgatcgacccagatgagctcacaaagtggtccttgtacagagccgccatagctgagttcatagcaacactcctttttctttacatcaccgtgttgaccattattggctacaagagacagagtgacaccaaaatccccggtaacaccgaatgtgacggcgttggcattttgggcatcgcttgggccttcggtggcatgat

SEQ ID NO: 45805 - DNA, 247 bp, Glycine max
  Clone ID: LIB3107-058-Q1-K1-B4
ggcttcgcttgagcagacttaacaacagcacagagcgggttactgtctgttcaagctaccatctctctctctctttcttagtgcctccttgccagaagttaaaatggcccaagaaactttcctattcacatctgaatcagtgaacgaggggcaccctgacaagctctgtgaccagatctccgatgctgtgctcgatgcatgcttggagcaagaccctgacagcaaggttgcctgtgaaacctgcacc

SEQ ID NO: 45806 - DNA, 244 bp, Glycine max
  Clone ID: LIB3107-058-Q1-K1-B6
gactgagtgtagtaatcaatcatcttttgtttgttcttcagtactttagtgtgtgatttaattccaagattttgagaatgtctagctgtgggtgtggaagtagctgcaactgtggcagcaactgcggttgcaacaagcactcttttgacttgagctatgttgagaagacaaccacagagactcttgttttgggtgttgggtctgtgaaagcccaattggagggtgctgaaatgggtgttgcaac

SEQ ID NO: 45807 - DNA, 340 bp, Glycine max
  Clone ID: LIB3107-058-Q1-K1-B8
gacataatcataatccttccagagttccaaagtcctcagacatgaaagggtctttatatgttgctgatgcccacatgttagccacttcttctctttctatgagtaataaagccaacaacccttttgttcttccttgtcaaacccttgtctctcatagtagtgtgagagatttgagcttcaaggtcagcatttcttggccttaccatgcttcttgtattgtgcaacgacaaaagaatagtaataacagtggttttgttgtggtagggtgtgcaaaatggggtttggaagctgagatgaaaccacaagaagatgatgaggaaaagggtaggagtagaatggc

SEQ ID NO: 45808 - DNA, 266 bp, Glycine max
  Clone ID: LIB3107-058-Q1-K1-C1
catttgcttgcgtctaaatcgcgatgaaggaagcggccgaactgagatgcaaacctttgttgtaaaactcttcagggcgaacatctaaacagcaagctttccactaacaaaccacttacactatggcattgatattacaagcatcgatgcataaagcgagaatatggaatcatatgctgtgctatattaaaacattgctgaaataccttaagactcaactgtgaccacaagcctacgatcgtgtgcattgctctcgaagctgataa

SEQ ID NO: 45809 - DNA, 431 bp, Glycine max
  unsure (1)..(431): unsure at all n locations
  Clone ID: LIB3107-058-Q1-K1-C10
gatttctccatttccattctcaactgcgcggtgaggaagtgttatacagaaagtgcgagagccaccgtcttctcttctcagagcttggctttgcttatcgattctctctcctctcatctttctcattcaaggtttgtaaaagatggccgatgctgaggatattcaaccccttgtttgtgacaatggaactggaatggtcaaggctggatttgctggtgatgatgctcccagggctgtctttcccagtattgttggccgacctcgacacactggtgttatggttgggatgggtcaaaaggatgcctatgttggtgatgaagcccaatcaaaaagaggtattcttactctcaagtatcccattgagcatggtatagtcagcaactgggatgacatggaaaagatcntgcatcacacattttataatgaacttt

SEQ ID NO: 45810 - DNA, 105 bp, Glycine max
  unsure (1)..(105): unsure at all n locations
  Clone ID: LIB3107-058-Q1-K1-C11
cgtattaagcgaccaaatgcttcngggagttgagggaaatttatatccggggatgcccgatataagtcaacctttcgaactgctgctgaatccacgggcaggctt

SEQ ID NO: 45811 - DNA, 237 bp, Glycine max
  Clone ID: LIB3107-058-Q1-K1-C2
cggacgcgtggggctgctagagacacagtgggaggatccctgagttgtgaattcaacgatggttgttgttggaagggagcccaaggtggaagggcttactcggcttgtcttgatgactatagaaaaggttgtacatgttcacctgggttcagaggtgatggagtccagtcatgttaagatatctatgagtgcaactagaaaacattctgtcaattcccatgttgcaaatgcaaaaac

SEQ ID NO: 45812 - DNA, 409 bp, Glycine max
  Clone ID: LIB3107-058-Q1-K1-C3
gaagacgacagaaggggaatattgtattttgtgctaatgtgaaaatccctctcaatggacagacttcatgtcctccgcttcctgaaagatcaccacttcggaaggaaagatcagacaacagaagcgagttgttgagagctacgttggtggaacatcaccgaatcgaatcgaataatcaaacatgacttgtccttccatttcgatttaaaccccgagacgatctatcgaagccacttcaaagattattcttagatcgcttcgatggtcgatcactacaacaagctggttaaactagcggcgagggctttctacgatgatctgacgagtaaaggagagaatcaacccaaatctggaaggagtgataacagaggaatcgctgtggtgattctcgatgccctcacgaggcgac

SEQ ID NO: 45813 - DNA, 375 bp, Glycine max
  Clone ID: LIB3107-058-Q1-K1-C4
atttatatttctatcaagttactatctatgggaattaaattcctcgtggaatattgaagaagccatgtctacagctgggcaggtcatcaagtgcagagctgcggtggcatgggaagcagggaagccactgtcaatagaaaccatagaagtggcaccaccccagaaaggtgaagtgcgtttgaggatcctcttcaactccctttgccgtagtgatgtttattggtgggatgctaaggaccagactcctctagttcctcgtatcttacgccacgaagcttcatggattgtggagagcgtgggcgagggtgtgacacatctgaaaccaggtgaccatgcacttccaatattcactggggagtgtggtgaatgcactta

SEQ ID NO: 45814 - DNA, 307 bp, Glycine max
  Clone ID: LIB3107-058-Q1-K1-C8
cttcttcatgtggatgatgctgatcaatcggcacatgcacaaacgcaggggtctcttcttcagcagatagattgcaacggagcatgtgctgcgaggtgccgtttatcatctcgtccacgcctctgccaaagagcttgtggaacttgttgtagacgctgtaactgcgtgccacctggcactgctggaaaccaagaagtgtgtccctgctatgcaagtttgactactcatggtggcaaacgcaagtgcccttagacttaattggaccactattctaatgcatgccttgatttatattataaaataaaaa

SEQ ID NO: 45815 - DNA, 435 bp, Glycine max
  Clone ID: LIB3107-058-Q1-K1-C9
gggtttctgaatgtctctgcagaggataagactggtggtgttaagaacaagatcacgatcacaaacgacaagggtaggttgagcaaggaggagattgagaagatggtgaaggatgcagagaggtacgaggcagaggatgaagaggtgaagaaaaaagtggaggctaaaaattcgcttgagaattacgcgtataacatgaggaacacgataaaggatgagaagataggagggaagctgagcccggatgagaagcagaagattgagaaggctgtggaggatgcgatacagtggttggagggaaaccagatggcggaagtggacgagtttgaggacaagcagaaggagttggaagggatctgcaaccccatcattgctaagatgtaccagggtgctgctggacctggtggagatgttcctatgggtgctgacatgcct

SEQ ID NO: 45816 - DNA, 171 bp, Glycine max
  Clone ID: LIB3107-058-Q1-K1-D1
gagtgcacaagtgagtttgttgatcgagataactagaaacagtgtgatgaaaatgaaggtccttgttttcttcgttgctacaattttggtagcatggcaatgccatgcgtacgatatgttctctctccgaatgaacactgcctattgtgcccgtactccggaggtgaaatg

SEQ ID NO: 45817 - DNA, 395 bp, Glycine max
  Clone ID: LIB3107-058-Q1-K1-D10
ttctataaggggacttttcgctagatccagccccatcatggcttcgtagaatctagaagctcttgccgccactccctctgatgctgatgctcctaccatatttgacaagatcatcaataaggagattccttctactgtggtttatgaggatgacaaggtgcttgccttcagggacataactcctcaagctcctacacatattcttatcattcctaaattcaaagacgggttaagtggtctatccaaggctgaggagaggcactttgagattcttggccgccttctgtacactgccaagctggttgcgaagcaagaaggactcgacgacggcttcaggattgtaattaacgatgggccgaaaggatgccaatcagtttaccacattcatgtgcacc

SEQ ID NO: 45818 - DNA, 399 bp, Glycine max
  Clone ID: LIB3107-058-Q1-K1-D3
agatgacaacacaacggagggcgaaatataactgggcctaaataatggtcccacataacgtcaaatgggcaagtctggatgtgaagatcctcgcaggcctgaaaaagaggactagtatgttgcttctcaaagcaagaggctagatcttccactgaggactttctgtgctcatgagcgagatagattgcaatgcagctagcaaatcatttcaacagaaagcccgcttctgggagatgagtgaaaggcactgttctatccgaggccactgatatatgcatgtgtagatcaggatcaaggatcattgcactctgagtcactccacaagactcgggtcaaggcaagacatcattcaaggtcaactagacccttctctttaaccaaagatagcaagagatcatc

SEQ ID NO: 45819 - DNA, 359 bp, Glycine max
  Clone ID: LIB3107-058-Q1-K1-D4
gatgatcagcagggagaattaggtttttagggtttacaccgagcagccacacctcccgcagcagccatggttctcaaaactgaactatgccgattcagtggtgccaagatctacccaggaaagggcatcagatttgttcgtggtgattctcaggttttcctgtttgcaaactcaaaatgtaagaggtatttccacaatcgcctgaagccttcaaagctcacctggactgcaatgtacagaaagcaacacaaaaaggacattgctcaagaagctgtgaggaagaggagacgtgctgccaaaaagccttactctaggtccattgttggtgcgaccttggaagtaacccaaaaaaagagagc

SEQ ID NO: 45820 - DNA, 306 bp, Glycine max
  Clone ID: LIB3107-058-Q1-K1-D5
cttctgttcactggtcacaggaagcaccctggagagccagcatctaaaacgtgtcatcctatacatctctcttcttcacccttctgtttgattaacacttcaataagaggagaacgaacactccgtttaattaccaatggaattgaagaagcattttctttcatgccaactaggaattggatgctcataaggcgtattgattgaacagatatttactgtagtagacttacaaacgatagccaagcaagctattgtgttctctgtcaatgattcactagaatggaaggactctcccaaaaggctcat

SEQ ID NO: 45821 - DNA, 231 bp, Glycine max
  Clone ID: LIB3107-058-Q1-K1-D6
gtttatacaaactctcatgctgttttccacgtgcaaactttaaatacactctgacagtctctgcacctaattaaaaaaaacttaactgacatataaacatagccatcgttatgtctacacaaccaatgctagttcggtttcctagtattaaagacttactgtatgacacatttaattgtcacaggtactaacacaatcctctgaattccacaaatctcacctagactgcaa

SEQ ID NO: 45822 - DNA, 88 bp, Glycine max
  Clone ID: LIB3107-058-Q1-K1-D7
atgacaacacgacgggaggggaaagtaactgggcctaaatcagggcgacgtggagggggtaattataaaatgcaggtgtgcatatgga

SEQ ID NO: 45823 - DNA, 144 bp, Glycine max
  Clone ID: LIB3107-058-Q1-K1-D8
gtttcttacttggactgagagcaagaaaatcgggttggttacgccgcatccaccagcatctgataaaaggtcactgatgacatgtgactgctggccatcatggtgttgctgttgctgaggtggttcacggacgctcacgtcaaa

SEQ ID NO: 45824 - DNA, 404 bp, Glycine max
  unsure (1)..(404): unsure at all n locations
  Clone ID: LIB3107-058-Q1-K1-D9
gatttttaagaagagaaagtggcatcncttaggtgcagatttttatacagacacaggctgtaaaaaattccgaccccagcccttcactcttctctctgcagcggacgagcacttttgatctagtacctgctatccctatgtataagcatggcaagtatttttaaacgttgtgacatccattcttgttaggagttgttataaagctattcatccctgctcaatattctacaccccaagacagagaaggacaatagagatcaactaactatcccaacttgccaatataaactgtgaagagtttctataaatgcacgacttctagcatactgttgtttgattaaccaagttcttccatattggttgaggaagcctcgagtcaatatttagtttttgctaccatctgt

SEQ ID NO: 45825 - DNA, 364 bp, Glycine max
  Clone ID: LIB3107-058-Q1-K1-E1
agagaacaccacagaggggctggcactttgtcactgcaaagggaccccgaggtcggggaggaatggatggccacaaggaacctatgttactgactatgccaggtgcgaacacgactgaacgtgcaccaaccacaccatcacgaagaatctgtacatgatatgccacaaggacatcaagctagctctgaaccccctgaatgcagctaggctcagcaacatactaatcatctacggctaaagcacaaagtctgatctgcccaaaagagcgctaccaaatataatcaaactctagctcctgcctatgacctgaaaggaccaagtgtacatgtacttcagagatactactggggatatacttaatccc

SEQ ID NO: 45826 - DNA, 430 bp, Glycine max
  Clone ID: LIB3107-058-Q1-K1-E10
gaatgcaaggaagagaaagaaatttgtttctctctggagagtctccgctgaactttttggtttcttgaagatgtcgttactctccgatcttatcaaccttaacctctccgacatcaccgataaggtgatcgccgagtacatatgggttggtggatctggcatggatatgaggagcaaagcaaggactctctcgggactggttaatgacccttccaagcttcccaagtggaactatgatggttccagcactggtcaagctcctggacaagatagtgaagtgatcttatatccacaagcaatttttcgggatccattcaggaggggtaacaatatcctggttatgtgtgatgcttacactcctgctggggaacccattcctaccaacaagagaaataaagctgcaaagatattcagtaatccggatgttgct

SEQ ID NO: 45827 - DNA, 381 bp, Glycine max
  unsure (1)..(381): unsure at all n locations
  Clone ID: LIB3107-058-Q1-K1-E11
ggactacaaatcagttttctacttgaatcttcgtggtccttcttttattctccttgagctcgaatattcactatggcagatgaggtggttctgctagatttctggccaagtccatttgggatgagggtcaggattgcacttgctgaaaagggtatcaaatatgagtccaaagaagaggacttgcagaacaagagccctttgctcctcaaaatgaacccggttcacaagaaaatcccggttctcatccacaatggcaaacccatttgtgaatctctcgttgctgttcagtacattgaggaggtctggaatgacagaaatccctngttgccttctgacccttaccagagagctcangctagattctgggctgacntttgtgac

SEQ ID NO: 45828 - DNA, 421 bp, Glycine max
  Clone ID: LIB3107-058-Q1-K1-E12
gattcagcgcctcctcgtcttcaatcctttcgttgttctcttattcatccttctctgctgaataatccagatctctttctgcccttttctccgtcacgcttttcgtgaccggatctgtatggatttgatccagatctacacgccgatggtggttttggccgggtctttcatagatctggtgcgtagaggctcagatctacggtaccgaggtacaacagagaatcgatgacaggaacgcagatccgacggtagatccagccgattccgcttgttcgatcgctacagacccctgtatcggatcattaagcagcgtgtctcgcgcgttctacacgtgttgccgatctcggatgttgtaaaattagtttatgatgtgaagctatggagtggaaaatatgtggatgtaggagatttcgggatgaat

SEQ ID NO: 45829 - DNA, 361 bp, Glycine max
  Clone ID: LIB3107-058-Q1-K1-E2
gattttgaaatggaaggagagaaagaaaatccgggtggttacgccgctttggtgaactccttctgcgaaatcacttcctcttccaaggaagaagctcttttctttttggagagccacaatttcgacctagacgctgccgtttcgactttcctcgacaacgccaacaaccccctcatccctctcaacgacgaccttgccattcccaaccccaacgccgtttcccctccctcagattctcactctccggacttcaacccttctcgctcgccgtctccgtctactttgcccacccgcaccccctacgagctccgatcccgtaggtctctcggcaagaaacccttcaccagtcgccaaggcaaaa

SEQ ID NO: 45830 - DNA, 327 bp, Glycine max
  Clone ID: LIB3107-058-Q1-K1-E3
atggcactgagatgggccctttaccatttaattcaatcttggactttgtgagcgaaatttatcaggtcagtttgaccaaattttttttttttgatcagcaaagataaaatatattaataaaagtaccagaggtactaaggttacaaggaaacataagccaacagtcaactggttcccaaatcagactatagtcagtctctataggaaccagaaactggatacaatacagaatgtaatttctactagtgaatctatctgtactaccccctctactaaatgaaggctgatggtaggtttgacgaccaatgattgaaggggatcgtgaaa

SEQ ID NO: 45831 - DNA, 255 bp, Glycine max
  Clone ID: LIB3107-058-Q1-K1-E4
ggggggtttttacagcttactgaacatatcaaacagcggaccatttaggatgaacttgcgccgatataattaagatagcaaagcgaaactagaggggcatgctgaaacataacaaatccaggggccgtgagccacaatgagattctcgagatgtacacggattacatagatccaagctacaagtgtactaactacaatcttgaagagcaagccaaggcaataattgctccacgcatcaacaatgagatggattca

SEQ ID NO: 45832 - DNA, 412 bp, Glycine max
  Clone ID: LIB3107-058-Q1-K1-E5
tttctgacggcgaaagagcgtattagaggctgagttgccaacactcctcaattctcggtaatcatatgacaactaagacccattttattttgcataaatcatatttctgcatttcaaaatttagtcatataaacaatgaaatgataaaatccaaagaataagccatctgcggacgcttgggcaaaaaagcttaagagctcttcttttttggatcaacattctaatacctcttttgattgatcatcctgattgaccactgcgatgccaatcttgttgatcacgtcggattatcagttttcaggatactcctgcaagttacaaggcctaaaacagtaatgttggggaacatacctgcgacaaccacatattgaaatattcatcattatcatgaagctacaagaatacctggttt

SEQ ID NO: 45833 - DNA, 169 bp, Glycine max
  Clone ID: LIB3107-058-Q1-K1-E6
ccttaagatggggttactacaacctgatcaacgccgcagcaaggcggcagctcttctaaaacgtcgaggagtaaatgttaaaggcttgttgaaagctgctccagagcgggaagaaccccaaccccacatagattgcacaggacatctgcaggtttggcatgtgaatgga

SEQ ID NO: 45834 - DNA, 310 bp, Glycine max
  Clone ID: LIB3107-058-Q1-K1-E7
gggacctcttaggggttcagcaaacaccacatagaggggggtcttacactaacacacagcccatgacacaagttatgctcaacaactcatgagagctgaccactgcacgccggtcagacaaaaacttttctccatcgtcatcctaaatgaaatcacaggaatacattaaccgcatttgctaaaccaacaagaggacatggctcatcacaccactgaaccggaaatgaccaatctcaccatattggtactctcaacaacaatcgatcgtaaaagcacttccactaccactattgaatctatatactctacc

SEQ ID NO: 45835 - DNA, 411 bp, Glycine max
  Clone ID: LIB3107-058-Q1-K1-E8
tgttgtttgatcgcggaatttctttgtttctgggtttccggaatatgagtagtgcggcttgttttaatggatcctattgaaagtacagaacataaaatggatctgtcatcttgatagagatggttttatcccgtcagatatttattctagtatctggagcacggaatatagaaaatggattctaaaaatattagaactatgattcatactaaatatttagacctcgcaaccggacttaaaaaacttttcaaagagttttaaaaataaattgaataattttcattcttttaagtttccggagcttatctttattttgatcaaaggacaaacgtttcctttaatttttttcattatatctattcattgaataagggatgatccaacagttcttactcagggaaatttttggac

SEQ ID NO: 45836 - DNA, 326 bp, Glycine max
  Clone ID: LIB3107-058-Q1-K1-F1
gagttccacctagtagcaacaatgtcgaagcgaggtcgcggaggatcggcagggaacaagttccgcatgtcactgggtctgccggtggcggcgacggtgaactgcgccgacaacaccggcgcgaagaatctctacatcatatcagtgaaggggatcaagggaaggctgaaccggttgccgtcagcttgcgtgggtgacatggttatggccaccgtcaagaagggaaagcctgatctccgtaaaaaggtgctccccgccatcatcgtccgtcagcgcaagccgtggcgccgaaaggacggtgtttacatgtacttcgaagataatgc

SEQ ID NO: 45837 - DNA, 439 bp, Glycine max
  Clone ID: LIB3107-058-Q1-K1-F10
tgtaagaagaaacttctctcaaaatccctttcttgtgtcgattagggtactttcacaccagagtcgttcgagtacttcaccttctttctctctaagcgcaaaacctcgtactgtttttggcggttaaggatgtcggggaaaggagcgaaggggttgatcacaggcaaaacctccgccgccaacaaagacaaggacaagaagaaacccatctcgcgttcttctcgtgccggccttcagttcccagttggtcgtatccaccggcttttgaagtcaaggacaaccgctaatggtagagttggggccacagctgctgtctactctgctgctatcttggagtatctcactgctgaagtattggagctggcagggaatgctagcaaggatctcaaggtcaaacgtattactccccggcatttacaactagcaatccgcggggatg

SEQ ID NO: 45838 - DNA, 381 bp, Glycine max
  Clone ID: LIB3107-058-Q1-K1-F11
gagagagaagagggtcagagtgagaaagagagagagagagagagaaactgagagaaattcgcaaaccctaatttcggaaagatcggcgatggctgcctccaaggatcgcgagaacttcgtctacatcgccaagctcgccgaacaggccgagcgatacgaagagatggtggaatcaatgaaggacgttgcgaatctcgacgttgaactgactgtggaggagcggaatttactttctgttgggtacaagaatgtgattggtgctcggagagcatcgtggagggtcctgtcttccattgagcaaaaggaagaaacataaggggacgagttgaatgcgaaagcgattaaggagtacaggcagaaggttgaattggagctttcaaa

SEQ ID NO: 45839 - DNA, 417 bp, Glycine max
  Clone ID: LIB3107-058-Q1-K1-F2
gagagttcattccatacacagaaagaagaacaacgctaagaaagcagaatagggaaaaatacatcgatagaggaaaattaattgaagggtgctactactacgaccttctatatcattaatgattgaaattcgtgttggaattgtcttgtaggtgtagtagtgataataagagaggatcatatatatattagtagtgctagaaattaattgaagtgtgtaatagaatagagtgtgatagagagagatatggggagaggaagggtgcagttgaagaggatcgagaacaagatcaataggcaagtgacgttttcaaagagaaggtctggtttgctcaagaaagcacatgagatctttgtgctttgtgatgctgaaatggcccttatagtctttttcaccaaaggcaaactttttgagtac

SEQ ID NO: 45840 - DNA, 119 bp, Glycine max
  Clone ID: LIB3107-058-Q1-K1-F3
gatttaaatgagaatactagaaaatgtcgaatggactgcagaatttgcagatatactggttaagtccaaagaggccattgatattcctagtgaggagcagcaaagttctgaacaagctt

SEQ ID NO: 45841 - DNA, 395 bp, Glycine max
  Clone ID: LIB3107-058-Q1-K1-F6
ggttctggagaataacggaggagttacgatcggacggtcctccttcgcttactgcgtcgcgatctgcgatcgtgattttccggaggatgattccgactccagctccgactcctccatcggaaggaacagcatctcgtcggaagattcctccgaccgggaagacgccgtcgaagttgaggttcagagttccttcaaaggccctttggataccatcaatgatctagaggaagatttacccgtcaagaaaggcatatctaagttctatagcggcaaatccaagtccttcacaagcttagcagatgctgcagctgcaagttctatggaagagatagtgaagccagaggatccttatgctaagaaacgcaagaacttaatagctcgtaactcctcaattg

SEQ ID NO: 45842 - DNA, 382 bp, Glycine max
  Clone ID: LIB3107-058-Q1-K1-F8
tatgggtccactaataaagtttttcctgaaatgggaacacctcaaaacatccgtgttaaactcaatgttgttaatttgatgcagcaatcaaaatagttgacagtggtcttcccgtaatattagctcaaagatttcgattcacagccctaaatttaaaaatttagaagcaagggcttacaacattgatcatttggtatgaatggattttaaggaataacttcactcatgactaaggcctatcaaaaaagttcagcacaagttcaaaattaacagcacaaaagtagaattgtagttacgatataccccttaaagtattatctactcctttctcctatttgaagcaatattttcattgaaactaatggccccttgacaaatcttt

SEQ ID NO: 45843 - DNA, 406 bp, Glycine max
  Clone ID: LIB3107-058-Q1-K1-G1
atgatttcaaaagctgccaaatggttatggtcgtggcagatcgaggaatagcagctatttctaacagtgattgtatacctataattgttaatatttaataaattatgataattaaaaccaaggcaatataataaaataaaattagaagtacacataaagttgaaccaattgagtttaaattctaaccattagccactagctcatggataagttgttgtaatagttaattccttcttgatttatacctccacttagctttccttcggtaaatatatagtttattaaaaaaaatagttaatgggaaattaacatccaactaggcaaaatttagttcaaattagacattgctttgtttgcaattaacttacttgggagaatccttgaccaataaatggaaaatctatat

SEQ ID NO: 45844 - DNA, 333 bp, Glycine max
  unsure (1)..(333): unsure at all n locations
  Clone ID: LIB3107-058-Q1-K1-G3
gaagcatagcagcatcatacaaagcattgaattcaaaaacttaagttcattccttgtgttttgctttcttcctcaaaaccaaacatgtcgaacacatgcggcaactgcgactgcgctgacaagactagctgcaccaagggaaacagctatggtgttattgtagagactgagaagagttacatcgagactgttgtcatggatgttccagcagctgagcatgatgggaagtgcaagtgtggcactaactgcacttgcacggactgcacctgtggccattaaggaatatgtatgaaaatgtaattgccatgntgttggcaatacaaatattcaaat

SEQ ID NO: 45845 - DNA, 358 bp, Glycine max
  Clone ID: LIB3107-058-Q1-K1-G4
gatatcagggagggagtgtgtgtgtacgcccagcgcttttaaacacaacaccctaccctctgcttcgttcccatgtcgtagtcgccgtgcaagtgaaaatgttgcactgcctttgggtggtggacttctgaataggccggggttgtttccctgtctatgtattgtcacgagattgagagatctgctgtgattaggttttgatttcaactcactgatggagtgcaacaaggatgaggctataagggcttggcagattgctgaaaataagatgcaagctggtgactttgaaagggggctgaaatttgctacgaaagcccaaaggctgtttcctgagaatcagaacattcttcaaatcctt

SEQ ID NO: 45846 - DNA, 341 bp, Glycine max
  Clone ID: LIB3107-058-Q1-K1-G6
gcgtgtctaactcacttgcctcagcttgatagagtatggtcacaagagtgaagtgcaatgggaaaaaaggtacactgtgctggcttcgcaacttgcttgttgtttagtgcccatgaccaactcctcaaacgggcacatggtactatgcaaaatccatggattacaccatgtgacaacctacaaaaatggcctatctatagggatgggatggacataaaatggcccatctattggcagctttcttgagtccaagtaatgtgctgaaacttaggagtttggatggcttgtgactcatgttttataattctatctttaggaaaagtgaatgttttattgatttg

SEQ ID NO: 45847 - DNA, 299 bp, Glycine max
  Clone ID: LIB3107-058-Q1-K1-G7
gaagcagggcaccatcatacaaagcatggaatccaaaaacttacgtccacgtcaactgaacagactcattccgaaaccaaacatgggaacacacgcagaacagcgactgcgcgacagactgctgaccaaggaacagcatgggtattgaagacgagagagtacatcaaaccggtgcatggagttccagcgctgacatgagggaagtgcaagtgtggcactaactgcacttgcacggactgcacctgtggccattaaggaatatgtatgaaaatgtaaatgccatgtgtttggcaatacaa

SEQ ID NO: 45848 - DNA, 325 bp, Glycine max
  Clone ID: LIB3107-058-Q1-K1-G8
gtctacagggagggagtgtgtgtgtacgcccgagcctttcaaacacaacaccctaccctctgcttcgttcccatgtcgtagtcgccgtgcaagtgaaaatgttgcactgcctttgggtggtggacttctgaataggcaggagttgtttccctgtctatgtattgtcacgagattgagagatctgctgtgattaggttttgatttcaactcactgatggagtgcaacaaggatgaggctataagggctaggcagattgctgaaaataagatgcaagctggtgactttgaaggggggctgaaatttgctacgaaagcccaaaggctg

SEQ ID NO: 45849 - DNA, 304 bp, Glycine max
  unsure (1)..(304): unsure at all n locations
  Clone ID: LIB3107-058-Q1-K1-G9
ttaaaaaaaccacaggcccccaaaancctgaaaccaatccaccgccgccggaaccttcaatcccatccgcaccggccgccgtggaagaaacggcagctcctgttacggcaacaacgtctcaaccaagcgctgaaatcgtcgtccctcttgcgttagctccgaagcgacagcgccgtccaagcgttcgtctaggggagatcggcgaccaacgtgccttcgcacacggccactaattgcacatgcgacgcccgagcatgcctccatggagctggcttactcctaaagaatcttcaaaaacctcaaa

SEQ ID NO: 45850 - DNA, 324 bp, Glycine max
  Clone ID: LIB3107-058-Q1-K1-H1
cgataagacgacacaagggggtggaatttctggttcttctccttccaccatcgcgatgggggctttcggattttcattttatcctcagttcttgcaccctcgtcacctgcaatagattctttcttgcaatcgatcattgaagaacacaacatttcaattcctctctcgatttgttttgcaagttcgataatcgaaagtgcctggtgattacatgttgtgtttacatatgagttgtttgtgaaaatgagaacgcatgggcactatggggatacatctgacaacacttgtgttgggggtagccagatgcatcatatggctggtcaa

SEQ ID NO: 45851 - DNA, 55 bp, Glycine max
  unsure (1)..(55): unsure at all n locations
  Clone ID: LIB3107-058-Q1-K1-H11
taccgctagtnagaattcatacagaagggtgggcgccccaaaanacnacanaang

SEQ ID NO: 45852 - DNA, 454 bp, Glycine max
  Clone ID: LIB3107-058-Q1-K1-H2
accactcctccagaatattacagaagggattgttacaagaagcatggttatcctcttgagcataaataccataagtctcaaagctcaaacatcaataaaatgaatatgttgaaagactgaaatgaagttgactccttaacaatataaggctctaatggccctactacagcaacaaggctcaagtcacaacaattcacatgtgaatcaaattagtacaataactggttccaacaatgcacacaaaggtaatgccttatccattacttgtattgtaagcaagacaggttctgatgaatggatcattgactcatgagccactgatcatgttataacttttccctaatttgttttcttcttgttagaaagaataaattccataatattgtaaaacttttccaattggtccacacaattcacttataactttattcctttctcaattcaatttttcttt

SEQ ID NO: 45853 - DNA, 413 bp, Glycine max
  Clone ID: LIB3107-058-Q1-K1-H4
ggtgttagttcatcctctctcactcctttttttctccttttctaatcctttcacttcactcatcttttttcccccttttccctattttcatcttcttttgcatttttctccgactccgtttcatgcattttcccgctgcttaaggaccatcctccaataccacgccgcttcttcttcctagggtttctctgaaccaattcctatggccatcagaggcgtcgatttcaagtggtacgatggctttttcttgttcatgctcgccaccagtgtgtatcctttctcaattcagcttctgaattttcctaattttgctgccattctacattttcacttgcctcatcattccttccttctctagccactttctaatttaatcttaatctggtctgtgagaaacattgaaaaaataaata

SEQ ID NO: 45854 - DNA, 303 bp, Glycine max
  Clone ID: LIB3107-058-Q1-K1-H7
ggttttacactaaagatggatctcattcagagggggaaggttagaaccgctgtggtgtccgctctacaacatgcttgcaccgatgatatctcaacaaacgtcgccaccggctataggctagcttgagctgcacatacacaagcagctaacatcactctcaatcacgaactctttgaatgacattacttctatccctctcgaagatatgatgtttattcaatatcatccaccaagtatgtactatgcacattgcctaagatgcaaaaactttcaaaagaagtacgtgtagccattccaaatagc

SEQ ID NO: 45855 - DNA, 283 bp, Glycine max
  Clone ID: LIB3107-058-Q1-K1-H8
ggtgttagttcatcctctctcactcctttttttctccttttctaatcctttcacttcactcatcttttttcccccttttccctattttcatcttcttttgcatttttctccgactccgtttcatgcattttcccgctgcttaaggaccatcctccaataccacgccgcttcttcttcctagggtttctctgaaccaattcctatggccatcagaggcgtcgatttcaagtggtacgatggctttttcttgttcatgctcgccaccagtgtgtattctttctca

SEQ ID NO: 45856 - DNA, 427 bp, Glycine max
  Clone ID: LIB3107-058-Q1-K1-H9
tctataagggagtgaagaaaaagcgcatactaggtttgttataaatgcgatttgagtgtcataaaaaggaaaagaggagaggcggggcggagcagaaacgaatggcagatcagagcgagcattcgaaaacggcgttgcctccggaggaccaggaccgtcccgttcgggtatacgcggatggcatctacgatctcttccactttggccacgcccgctcccttgagcaagccaagaaatcgtttccgaatacatacttgcttgttgggtgttgcaacgatcaagtcacccacaaatacaaaggcaaaactgttatgacagaggccgaacgatacgaatccctgcgccactgcaaatgggtggatgaagttattcctgatgccccctgtgttatcaatcaagagtttcttgacaagcacaacattgacta

SEQ ID NO: 45857 - DNA, 395 bp, Glycine max
  Clone ID: LIB3107-061-Q1-K1-A10
ggacacatattccctttggcctgggttgcacttcccaaattagataatctaaagcaaacactgaaatcattccgtatgatatagcttctctctaaatctgagttcttaacttcctcagatttgatcccatcccagtcattctttgaatcccctatcagtgtcaatttctacaaactttataaggaagctggatcatgctatctagtttgaaatttggaggttgctagttaaagtgttcttttggatggtaaatttggtgcttcatgtctggtgaaacaggatctgagttgtgatcagttttagtccataagtaggttttcaccaaaaaagaaaagtccataagtaggcagtgaaaggtatattttggatttgcattattttaaactgataaatga

SEQ ID NO: 45858 - DNA, 308 bp, Glycine max
  Clone ID: LIB3107-061-Q1-K1-A11
tctctctttcgagggttctttcgtggggaacgctcgagattttaccacccgggtcttattcatccgtgcccatgtccaatgttctcggcttttccggagttgacgatttttgccctatgggatcaatatacgccaaccccaaggaagcaagtttcttcttgtcccttggccctcaagttgatgtatactttcctcctccgaagagatcgcgtgttaatgctccattcgtttttgatggagaatggttctagcaaaagcagataacctctattgaagccttgtcagatgagtgtctttttgacatcttt

SEQ ID NO: 45859 - DNA, 304 bp, Glycine max
  Clone ID: LIB3107-061-Q1-K1-A12
gagtggtggatatgatttatgtttccactaccacccgacttgtgatgttcaaatgggatgatgtttgcggattgatgatagagagactgatctcgcttatgctataaaatgagataatgaaggatcactggagaaatcgggggagggtgagtgctatctgactgaaccagatatggggtgataagccattgaataggaactgccggccatcagagaacagctatgtggacagatgcagtggatacagctttagtgacctatacaccacgagcaatcaacactatggtgatctccattgacaatt

SEQ ID NO: 45860 - DNA, 292 bp, Glycine max
  Clone ID: LIB3107-061-Q1-K1-A2
tttttgtgtggtcgggctattatatatatatctatctatattctatatatagatatatcggttaggttatcaagtattaatctgaaataaataagaatggctgcttctaatacttataataattactacaaattctaataattactacaaaagggatatatgttagataaaatagattaattaatctatttcacaaaaaaataatgtatccatagcacagtttcgtcttataatacctcgggtgctaatgaaactattttagtgaaatttaactgtctcaattccccggcga

SEQ ID NO: 45861 - DNA, 92 bp, Glycine max
  Clone ID: LIB3107-061-Q1-K1-A3
ctggtggcccaattccatacatggtagactcaagaggaactcctgttgtgcctcaggttgagggatcttcctcaactgtcctgtcatcttat

SEQ ID NO: 45862 - DNA, 356 bp, Glycine max
  Clone ID: LIB3107-061-Q1-K1-A4
gaacagaagaataatcaaatttctcagatctatccgacgtcgtcgcagatccaccaaccgttatggctgccttcagcggtgatgaaacggctccgtttttcggcttccttggagccgcagctgccctcgtcttctcctgtatgggagctgcctatggcacagcaaagagtggtgtgggcgtggcttccatgggtgtgatgagacctgagctggtgatgaagtctattgtccctgttgtcatggctggagttttgggtatttatggccttattattgctgttattatcagtaccggtattaatccaaaggccaaatcttattacctctttgatggttatgcacatctctcctctggt

SEQ ID NO: 45863 - DNA, 425 bp, Glycine max
  unsure (1)..(425): unsure at all n locations
  Clone ID: LIB3107-061-Q1-K1-A5
gacatttgcaactgaaaaggggacagatgattatatgcaatgatattaccaatgggattacattaagttatagtttttggcaagtaaatatagaagttaaatcagttaatatggtccatattccttaaaacaacaaaaaagaacatatattttgacgtactggttggatgagtttgcaatggtttggcttaaaatatggtttgtctatctgaggtgtctttattaataatggagggtaggtcactgttaaagatgtaaaccattggttgcatgtgtctgtatatgcaagtatgtctatatatttactatatttttgtacagattatactaacaaattagttgtctgaacatccaacattttcttttcatgcagctatgggacttggataatattctacaaggctcangaaacacacaaagtaatg

SEQ ID NO: 45864 - DNA, 366 bp, Glycine max
  Clone ID: LIB3107-061-Q1-K1-A8
gaagcagccatccacatttatactaagatttcatatcatggcttggggatcaagttcctcttcctcttcctcttcctccaattacgatgtgttcctcagcttcagaggtgaagacacacgtcatgcttttactggccatctctacaaagctcttcatgacaagggaatccacactttcattgatgatgagaagcttcaaagaggggagcaaataacacgagcacttatggaggcaattcaagattccagagttgccatcactgtgctttctcaaaactatgcttcttcctcgttttgtttagatgaacttgcaaccatccttcactgtcaccagaggaaacggttgctggttataccggtctttta

SEQ ID NO: 45865 - DNA, 335 bp, Glycine max
  Clone ID: LIB3107-061-Q1-K1-A9
gttcttgaatgcggggagggactaatccaaagggctgaactctctcgtggtaacacactaacaccatgggcacaacagaccagagcccgtcggatactgcagatgcttgcactaactggagctggcatgtgatacgctgggtgcttacgcttctgtgcaccctcaggtgacgacactgctggaattataacgctagatccgagattgtactactacatgcatcgggggtgaataacattcatttgcgaaggaagtgtaggtgattaattatgggtcatgagtaggctaaaaaactgtgattggaaaactctattatgctgtaagcgcatggtctg

SEQ ID NO: 45866 - DNA, 347 bp, Glycine max
  Clone ID: LIB3107-061-Q1-K1-B1
gatcctaaatttttttaattggtttttcattggccactggttcgttctttttttttccgccacacctaactgcagggcacctggatttgacttttcccccccttttattttctgttgctaattctcagctcttctccacacggttcatgctttccttccttcgcctttcgtgacgtgcaatccatgttgttcacctttcttctaggttcttcattatgagagtgaagaagggagtgacgtcgtgctgatgtgtatagcttgaaacttattcaataaagcagttgataaaaatgacttttgggccattggattggtatagtcgcccaattgcaaatggagtatggaca

SEQ ID NO: 45867 - DNA, 390 bp, Glycine max
  Clone ID: LIB3107-061-Q1-K1-B10
ggacttagtttcatacactccctcctgtttgattgcgaaaatgtggaagagaaggggatttgaagaagaagcagttcaattgataaactcagatttcagagacctaagtctagctggcataggctttggagcctctttcttcggattctttgctgccattgctgctatttatctgttgattttggatcgtacaaactggaagacaaatattctcacagcactactcattccatacattttcttcagcttgccttcattaattttcgacgtcttcaggggagagcttggaaaatggattgctgcagttgctgttgtattacgacttttcattcctagacacttccctgattggctggaattgccaagtgctttgattcttcttatcgtcgt

SEQ ID NO: 45868 - DNA, 412 bp, Glycine max
  Clone ID: LIB3107-061-Q1-K1-B11
tcttgttggttacgattttggtctgatggtgggtgggaattgggcccattttttgctataatagatttttatgccaaaaacacattttttgaatttttaaaggatttagcttacttttaaaaaaaagaagtaaattggtcattttttaattatactggactaggtcaaaatagacttttacactaaaaacacattttttttaatgtctttaaggattttgcttacttttttttttaaaaaaaaaatgaccacaaaagaagacaatggccattttctaattgtcgtggcccaaaggctaaaattttatgtataataataacaataatcataatacttatcaattttaacataaatattatattgaaggaacaaacattaaaacttaatgagaaatacatttattaagagacta

SEQ ID NO: 45869 - DNA, 380 bp, Glycine max
  Clone ID: LIB3107-061-Q1-K1-B12
gatattgatccttacactgggtaccaaatattgcaaagcaattcatgccatgataatagcagcagccagggaaccactatttcttttgaaaccagcaaggagcaatactttacccttgaatcatccccagcaatcaatgatctcataggttgtgattctccttcctatgctagtgtatcatccaataggagtcctttttctccacaagcttctcattcagaccagcatcagtcatcagacaacacctatggatcaccaacaagtgcacactctagatatgatgatgacggctacgaattgaagaacaagcttagagaactcgaaatttcgttgttggggcctgattcaaacattgttgatagttggcactgctcctacaa

SEQ ID NO: 45870 - DNA, 355 bp, Glycine max
  Clone ID: LIB3107-061-Q1-K1-B2
gacctcacccagttgcagaaagaaaagaccatcaaagtttcacttcagccttatccggtttagggtttcggtttttgacccaacctttgacgtatcgaaaccttaagtttcggatcaggtctgagcaatctggttggtagaacctttggtcttagagagtcaagttttatgtctgaattagacgatcaaattcctactgccttcgatccttttgctgatgcaaatgctgatgactcgggtgctgggtcaaaggagtatgtgcatattcgcgtacagcagcgaaatggaaggaaaagcctgacaaccgttcagggattgaaaaaagaattcagctataacaagatacttaaagatg

SEQ ID NO: 45871 - DNA, 311 bp, Glycine max
  Clone ID: LIB3107-061-Q1-K1-B3
gacgacagaaggggtcgagaagaaagaccccaccgtagccaaggtcaccaaggtcgctgtcaagaagaagtgattgcatttgggcaattgtgcttgcacatgtgatcatgatcgggggtactcctttatagtagttgtatccttgcagagtcttaagtgttttggttaagttatatttttaagtatctgccgattttatgtagccgggactttgaaaactagggtcttgatcggcggcggtcaattatcattgctgtttgtttttgatgaatactgttttttgttctgatcgtacgaacagtctgacatat

SEQ ID NO: 45872 - DNA, 402 bp, Glycine max
  Clone ID: LIB3107-061-Q1-K1-B7
caaaagccacaggtggataatacctctacccaggctgatggcaaagacgaacctgttaggagcaatggagggcatggccaactgcatgtatacccttcactactgccaactgccattcctgagaaattgaatgaggatccttctgataaattaaggaaaggccatgggattgtgggaaattccgaaaatagaaataatggctcgatcaggacatctgatgggcagagtaatagtgggcatagttatcagaagcaatcagatagtgaagagaattcagggaaatcttctggacagacctggagacaccctaatgtaaatagttcttccgattgcttggttaccatgtcagctcatgtttctggtacaaaaacatcaccgcataagcttggatttgatttgcat

SEQ ID NO: 45873 - DNA, 364 bp, Glycine max
  Clone ID: LIB3107-061-Q1-K1-C11
tatatctagaataaaaagtaacagatttcaatttttttagaaataaaaaaattattcaaaatttttatatttgtaaaaatgaaaaacatattttaacaaaaaaaaacagtaacaattaggttattttttatactaaaatcacattttttttaatcttaaacaaaatagtccttatactagcatatttaattatactcagttcaaatgtaatcattttttactttaataaatggctttgttttatattattaaatatgtgtcacaacatatatattagaaaaattgtatgatatgcctttttttttactttgttaataaatgcctttgttttgagtattctttgtcaatttttaggctcttaacc

SEQ ID NO: 45874 - DNA, 419 bp, Glycine max
  Clone ID: LIB3107-061-Q1-K1-C2
ggttctagtgtgtgattgtttgttgttgtaactcgttcttcttcttttgttgttctgtgtttgtgtttgttttttctctcacctgaaaatgtcttgctgcggtggtaactgtggttgcggaagctcctgcaagtgcggcaacggctgcggaggctgcaagatgtacccagacttgagctacactgagtcaaccaccaccgagaccttggtcatgggagtggcacctgttaaggctcaatttgagggtgctgaaatgggtgtgcccgctgagaacgatggctgcaaatgtggaccaaactgctcctgcaacccctgcacttgcaagtgaggtgttgggagagcaagcttcaagcagagatagcccttaattaggaataatgataaactattaatgtgtagctaaaaacttatgtattatg

SEQ ID NO: 45875 - DNA, 396 bp, Glycine max
  unsure (1)..(396): unsure at all n locations
  Clone ID: LIB3107-061-Q1-K1-C3
gacaaccaaaatcattgacatcctaaagcattcgtagttcaaaaattccatcttcaatttacaagtctttttggacactctgtccctaatttcaacacatacaacaatgggttttcgtttgcctggtatcagaaaggcatcattttctgcaaaccaagcatcttcgaaagccgtggatgtggaaaagggctaccttgcagtctatgtcggagagaaaatgaggcggtttgtgatccccgtatcttacttgaacaaaccctcattccaggacttgttaagtcaggctgaggaagagtttggatatcatcatcccaacggtggcctcacaattccttgcagtgaagatgtcttncaacataataacttctttcttgaattaatanatggcaatttttt

SEQ ID NO: 45876 - DNA, 381 bp, Glycine max
  unsure (1)..(381): unsure at all n locations
  Clone ID: LIB3107-061-Q1-K1-C4
gggcccctaacaatcctatcggtaatttccttggctgcctcaaatgtcattggactagatttttctgtgtgggtcatcttccacttcacatgtcgtctaatggaagatggacgatcaataattgtgtcagtgctcttggattgngttgtttcctctaattgtttctttttcttgtcatccataaacttttattctagaaaagcataacctccacgagacaacacgtgagggacaatgttttgtttcttaatggcctgcgccatctttcaaacatcttgtaatagttacagattaagataacttaatatgtttgacaataatgcgtaaatatgaagtttataaacaatcaaaatcaactaaccctcccatgaaggatctcta

SEQ ID NO: 45877 - DNA, 360 bp, Glycine max
  Clone ID: LIB3107-061-Q1-K1-C5
tggtgagagagcgagcgagcgagcagtttcaaagagaggatttgggattgggaaggcgagggattgcgctgcgtctcttcctcttctctttcgattcatccctcattcataatcttccaatccaacaacctcagcctcacactcacacatacacacatctgaacgcgtatcgtccctcccatggcttcaaagcgcatcctcaaggagctcaaggacttgcagaaagacccaccaacttcttgcagcgctggtccagtagctgaggacatgttccattggcaagcaacgattatgggtcctgctgatagtccttatgctggaggtgtattcctagtcacttattcactttcctccggatta

SEQ ID NO: 45878 - DNA, 393 bp, Glycine max
  unsure (1)..(393): unsure at all n locations
  Clone ID: LIB3107-061-Q1-K1-C6
gtttaaggttgaaaaccaagaaggggtggcaaatttggaggaaatccttgcaaattcagatgcatttatggtggcacgtggtgaccttggaatggaaattccaatagagaagatatttctcgcacagaaagtgatgatttacaagtgcaacatccaaggaaaaccagttgtcactgcaacccagatgttggagtcaatgatcaaatctcccaggccaaccagggccgaagctactgatgttgccaatgcagttctggatggcacagactgtgtgatgcttagtggtgaaaccgctgctggagcctatccagaccttgctgttcaaacaatggctaanatatgcattgaagcagagagcactcttgactatggtgatgtgttcaaaaagattat

SEQ ID NO: 45879 - DNA, 426 bp, Glycine max
  Clone ID: LIB3107-061-Q1-K1-C8
ttgtttccttttcaattggtgtatgaaaaaggatggcatttaccagttgaaatggaacacaaggcatattgggctctgaaatttctgaactttgatgagaaggcatccagggagcatagaaagatccaattgttggagctaaaagaaatgcgattaacagcttatgaatcctcacgactttaaaaagagaaagtcaagacatatcatgataagaaattgttgaagaaagaattcaaactgggacaagaggtactactttttaattcaagattgaaattatttcctggtaagctgaagtccaaatggtctggaccctttgttatcaagaaagttcgatcttatggtgcaatagagctatatgacccataaatctaaacttcaaatagaacatgggttgtaaatggccagaggttaaaactgtaccat

SEQ ID NO: 45880 - DNA, 271 bp, Glycine max
  Clone ID: LIB3107-061-Q1-K1-D1
ggtgggtggaactggaagaacctttgataatcctttggttggttcatcgaccactctgtctgtatagatctgtgcaaatctccgaacatttccgctccaattatcatttcactgaacagaaccaaaccctaaccctgtctttctgtatgacgcctgattcccccccagaggcgttgctgttgagtcgatttgtaaatgctttcggaagcttaggttagaattttttgagacgatctcatggttttgaatcggtgagatgaatcaccacgac

SEQ ID NO: 45881 - DNA, 356 bp, Glycine max
  Clone ID: LIB3107-061-Q1-K1-D11
ggcacttagcaatcaatcaacacttccaattacaatatacacatcttcaattaagccatgactctctctaagcttatagttgcttcccttcttgcctcgcttctccttcttcatcttgttgatgctgatcaatcggcacatgtacaaacgcaggggtctcttctgcagaagatagattgtaatggagcatgtgctgcgaggtgtcgtttatcatctcggccacgtctctgcaaaagagcctgtggaacttgttgtagacgctgcaactgcctgccacctggcactgctggaaaccaagaagtgtgtccctgctatgctagtttgactactcatggtggcaaacgcaagtgccctta

SEQ ID NO: 45882 - DNA, 411 bp, Glycine max
  unsure (1)..(411): unsure at all n locations
  Clone ID: LIB3107-061-Q1-K1-D2
gacacaaagacaaggagacaaaacaaactaaacgtgaatcccattggtttctctcttctcagcctcgcttctctagcacttgtctcgattgtcatagcccaagaaagagcccctcacgggcttgtttacgagaacccagaagccttttcaccatcagcatataacttctttcaccccaatgaacgaaagcccgagacaaaagacccttgtgctgcatcaaaacgctcaccaatgcctttagcagcacaagtggaagctactgaaattcatgaaagcaaggcctcaacccctcaaggaagtaagaaacaattgngagctggtagcgtagctggcattatctntggtgttgcttttgttgtgcttttagcattnggggtctaccatgtgagggtcactcgccgagccaacatg

SEQ ID NO: 45883 - DNA, 456 bp, Glycine max
  Clone ID: LIB3107-061-Q1-K1-D4
acgacagaaggggaatctccaactaaatactattcttcaatttgaagcgtgtctgtagttggttgaagcactgtggtattgttctggttttggtctccgaggtttgtatcggaatccgatgtattatgcaaaagaagctgcgcatgtcgaccccattttcgtagcacatggctgccgctgataacaccaacccaaaggattattacaaagtgctggaggttgaatatgatgcaaccgatgaaaatatcaaattaaattaccgaagactcgcgttgaaatggcatcctgacaagcacggaggtgatagtgctgttactgcaaaatttcaagagattattgaagcttacaatgtattaagtgatcctgccaagcgtttggactatgatttaactgggatatgtgagattgaaaaatatagcttgcaggaatatcttgccagatttaaaagcatgattc

SEQ ID NO: 45884 - DNA, 53 bp, Glycine max
  unsure (1)..(53): unsure at all n locations
  Clone ID: LIB3107-061-Q1-K1-D5
gagacctcaggtcaggcggggctacccgctgagtttaagcatatcaatnngcg

SEQ ID NO: 45885 - DNA, 360 bp, Glycine max
  Clone ID: LIB3107-061-Q1-K1-D8
ttatctgaattgacgaatccttacatgacttagtgatgattaccggtgaccaagctttgacagcttgccatgttgctagccaagttcatattatatcaaaaccaacattaatccttggcccgacacgaaatggtgagggatataattgggtgtcccctgatgagactgaaaacattcactacagtgagaaagaggtcgagtctttatcagaaactcatgatctctgtattgggggtgattgcattgagatgttgcaacagacatcagctcatcttcgagtcattccttatgttaaggtttttgctagagttgctcctgagcaaaaagaacttatcatgaccactttcaaaacggtgggac

SEQ ID NO: 45886 - DNA, 405 bp, Glycine max
  Clone ID: LIB3107-061-Q1-K1-E1
gttccggcaggctgccacgagataccagagggagacgtgggtgaaggtgttgtattatttgagggacgaggggttgcatgccagtggggggttttcatccggggtgtccaagagtgctctcagggataggtttaagactttcaattccatgtttgaggaggttcacaggacgcaggcggtttggttgataccggattcacagctcagggaggagctgaggatatctatatcggagaagctcattcccgcgtataggtcgtttcttgggaggttcaggagctacattgagagtgggaggcatccggagaattacatcaagtactctgtggaggacctggagtattgctgtttggacttcttcgaagggattcttgtttccagcacttgaaaaagagatctgaatga

SEQ ID NO: 45887 - DNA, 428 bp, Glycine max
  Clone ID: LIB3107-061-Q1-K1-E10
cactctcccactcttatggaaaccatttgctcctaaccgcaacgttcctgtgacctaaagaaaataaaataaaacaagattaatggctgtagaaatgaaccaatttgatcttttgatcaaattttatccaaatattaataaataccttatttgttatattttactaaaatatctattcttttttactaaaaatttgattaatcacactgagaatttttttatattcacaaaatttaaatccaatatttgcttaagagattcactcaaatattttttttaccctctcaatttgagacattttgtttttagtctcttaatcaaattcacaaaattttaattttggtccctcaacttcattttataagactatgcttttttttttttaagtttctgaaattcactcaagggaactaaaaacgacattatgt

SEQ ID NO: 45888 - DNA, 429 bp, Glycine max
  Clone ID: LIB3107-061-Q1-K1-E11
tgtttctgcctatgatgagttagccttgacgaggcgcgttttatatcagcccgtgagcgtttctattgaaggagggggcagggaatttcaattatatgtatctggtgtattcacggggagatgtggcacagcactagatcatggtgtcgtggctgttgggtatggaacagctaaaggtcatgattattggatcgtaaggaattcatggggttctagctggtgagaggatggctacatcagattagaaagaaatcttgctaacagcagatcatgcaagtgtggaattgcaattgaaccatcttatccccttaagaatggtccaaatcccccctaatcctggaccatcacccccttcacctgtgaaacccccaaatgtctgtgacaacctactacagctgtgctgataatgctacttgttgcttgtatttt

SEQ ID NO: 45889 - DNA, 448 bp, Glycine max
  unsure (1)..(448): unsure at all n locations
  Clone ID: LIB3107-061-Q1-K1-E3
ggtgtattgtttgttgttgtaacctcgttncttcttcttttgttgttctcgtgtttgtgtttcggttttttctctcacctcgaaaatgtctntgctgcggtggtaacctcgtggttgcggaagcctcctgcaagntgcggcaaccggctgcggaggctgcaagaatgtaccccagaccttgagctacanctgagtcnaaccaccaccgagaaccttggtcatgnggaagtggcacctgttaagcgcttcaatttgagggtgcctgaaatgggtgtgcccgctgagaacgatggctgcaaatgtggaccaaactgctcctgcaacccctgcacttgcaagtgaggtgttgggagagcaagcttcaagcagagatagcccttaattaagaataatgataaactattaatgtgtagcttaaaacttatgtattatgtctgggatgggtttc

SEQ ID NO: 45890 - DNA, 439 bp, Glycine max
  Clone ID: LIB3107-061-Q1-K1-E4
agaaggggagggtgaccagtgaacacaatacagggcagcatcgccatgggattgagtattctgagaagcacttccatttccactcctatctcttcctccaaatccaaacccattttctcaactcttgttcgttcatctttcgcctccatttcccccacaaagtgtgttactcccaccactcttttcgtttctgccacccccttcttcaccgcctcacccaagcgcggctttcgtggtgggattgtggccatggccgccgctggctcgctccgcaaatcagaggaagagtggcgcgcagttctctcccctgaacagtttcgtattctcaggcaaaagggcaccgagttccctggaacaggagagtatgacaagttctttgatgagggagtttacaactgtgctggttgtgggacacctctctacacgtccttaacaaaat

SEQ ID NO: 45891 - DNA, 432 bp, Glycine max
  Clone ID: LIB3107-061-Q1-K1-E5
ggactcgtcgcgctttacaaattgtcaggctgcgactctgtgggaatcattaataaacatgggaaaagactcgaagccaaaggagtcaggagggaagggaaaggggaaacaggctgcaagtggaagtgatgagaatgcttctaagggaaaaggaaagggtgggaaaggtggagatgggcttggtacttgcacctatgtcaaagcaaggcatatcttatgtgagaaacaaggtaagatcaatgaagcctacaagaagctgcaggatggttggctttgcaacggagataaggtcccaccagctgagtttgcaaagatagctcaagagtattcagaatgtccttcaggaaagaagggtggagaccttggatggtttccccgaggaaagatggctgggcccatttcacggtgttgccttcaacacaccctgtggag

SEQ ID NO: 45892 - DNA, 190 bp, Glycine max
  Clone ID: LIB3107-061-Q1-K1-E7
ggagtggatttattgctgatgtgcatgacacccgtggagaggtgtttgcacaatgccaacctggttcaaacttccgaacatgatgttggactagagcggggatctactaggattgccaaggactaacacgtggcgccggacttattcaacagaaaggaacttatgctgaatatgaacccaaacgaaactg

SEQ ID NO: 45893 - DNA, 412 bp, Glycine max
  Clone ID: LIB3107-061-Q1-K1-E9
ggacagcgggaataacgtattaacatcaacaggcctcgctttgagaaatcagacggcggagagaatgggtttatcactcttacggtgggttctgccgctgactctgttgctcacccgcgccctaggtttccaatcggacgagcttctcctcgacgacgaagagttcggcatcgaaggaggacgaacctcctttgattccgattcgcatgcaccttccaccgcctccacctcgaggaagaggctttccgactcctcctccgattccaagatccagttccctctccaacacgctttcggcgactccgatttctccgacgccggcaacttctccgctcgcctcaagacttggagccacggcgcccagacgctgacgaagctgcggtttaagcgtgatcttttgactgacgttgag

SEQ ID NO: 45894 - DNA, 53 bp, Glycine max; identical to SEQ ID NO: 13458
  Clone ID: LIB3107-061-Q1-K1-F1

SEQ ID NO: 45895 - DNA, 407 bp, Glycine max
  Clone ID: LIB3107-061-Q1-K1-F10
ctcaaccctgtcttttggtaattgattacgctttctggtgatcgattaccagagtcttgcgtgtcttgaaagcacattgttttaaggcagggcttggtctttagtgaatcttgaaacaaggctttgtttgttgaagcaatcttgaattattcttgaagcaaatgcttatcatttgaagcagccttgttagattcttctttgaccttcatcaatatcatgtatacatacattcacatctcctacctgaaagcacatttgtagagattgagagatgtttgacactttgaaaaccaatagagaattcggtcatttcatgttacggaatggtggtaaaatgaaggttgaaggcatatggagtgtgaggatgaagctttacgatggtgtcatgcgaactttctcatatgtga

SEQ ID NO: 45896 - DNA, 440 bp, Glycine max
  Clone ID: LIB3107-061-Q1-K1-F11
agggtatgggctcgtcagcctgtataccacaggtttgatgcacttgtgctgaccgcatgtatgctggaatactgctaaacactcgccttgcttgcccttcgtcttccatactttcaagtccttttagtgaaatcagcagcgcagttttgtgctgcttctgttgttattgccttggaagacttgcacaagaatggtgttctctacagaggtgtgtcacctgatgttttgatgttggaacaaactggacatatacagctggtggacttcagatttggaaaacagctttctggtgagagaacattcacaatttgtgggatggcagattcactggctccagagattgttttgggaaaaggccatggtttccctgctgactggtgggcgttgggagttttaatatattatatgttacgtggtgagatgcccattggatcatggag

SEQ ID NO: 45897 - DNA, 443 bp, Glycine max
  Clone ID: LIB3107-061-Q1-K1-F12
ggcattgtgaaattaatagagagacataaaaaataaacatatattgagaatggagggttgtgtgaagaagttgctatgccttgttgggtttgtggtgcttgtgagtactattggtggggtggagagtgctggtgaatgtgggaaatctacaacccctgataatgaggcttataagcttgcaccatgtgcctcagcagcacaagatgagaatgctagtgtttctcagagttgctgtgctcaggtgaagaaaattgggcagaaccctagttgcctctgtgcagttcttctctctaacacagccaaaatggctggcgtcaaccctcaagttgctgtcaccatccccaagcgttgtaacctggttaatcgccctgttggttacaagtgtggaccttacactctgccttgaaagagttaaggttgttgctgaaaacaaagatgacagg

SEQ ID NO: 45898 - DNA, 363 bp, Glycine max
  Clone ID: LIB3107-061-Q1-K1-F2
gggacatcccaagctgactgtgctgttcttatcattgattcgaccactggtggttttgaagctggtatttccaaggatggacagactcgtgaacatgctctgctttcattcacccttggtgtgaaacagatgatttgctgctgtaacaaaatggatgctactacacccaagtattccaaggccaggtatgatgaaattgtgaaggaagtctcttcctacttgaagaaagtaggatacaaccctgacaagattccttttgttcctatctctggttttgagggagacaacatgattgagaggtccacaaaccttgactggtacaagggtccaactctgcttgatgcacttgaccagattagtgag

SEQ ID NO: 45899 - DNA, 268 bp, Glycine max
  unsure (1)..(268): unsure at all n locations
  Clone ID: LIB3107-061-Q1-K1-F3
atatacctcaggtatttaagaagtcaaagatagtggaatacagtatcaaagaaaatatggtttcaccaggaaaaggagaggttagtaaatctggtatcacttaatgtagtatgtagcacttcagttttttgttctgctaaaaagttcaagtgcttgcttgcttgatctcttactggaaggtccaaattgacgaatgttgcatacagatattaattgacaataagcaatactacanattcttgggggaaggatataaatatggtatcac

SEQ ID NO: 45900 - DNA, 419 bp, Glycine max
  Clone ID: LIB3107-061-Q1-K1-F4
ggttgagagcaaaacactgcaaaccccttcggcgggttgtccttacgttgttattaagaagcgtaacgcattcaccacgatggtgaccaaagcgatggaggtggtgaaggatctggacgtgaagcggtacatgggtcggtggtacgagattgcgtgcttcccgtcgaggtttcaacccagtgacggcaccaacaccagagccacctacactctccgagatgacggcaccatcaacgttcttaacgagacttggagtggcggcaaaagaaggtttcattgagggcactgcttataaggctgatcccaacagcgacgaggccaagttgaaggtcaagttctgggtgcctccctttttacccatcattcccgttactggggattactggcttttgtacattgaccaggattatcactatgct

SEQ ID NO: 45901 - DNA, 447 bp, Glycine max
  Clone ID: LIB3107-061-Q1-K1-F5
ggattcacaacagctactccagctcttttgcatcgctcggagcagaagctgctgctgcagcttattaaagaaagaaagcctccaagacaagatggttgagaaggatggcgttggcagcaagtatcttcaacaaacacttaacgtctccatcgacatgcatcaacacggaatctctaagtgtttcgacgacgatggtccgcccgaaaagaaccgggacggtgtggacttcaagtgcacacataataactgcagtgattgggtctggggtgctatctctggcttgggctatagctcagcttggatggattgctggtcctattgtcatggttatcttttctgccatcacttactacactttcacttttctcgctgattgttaccgcaccggtgatcctgtaactggtaagagaaactacacttacatggacgctattcagtctaactttg

SEQ ID NO: 45902 - DNA, 267 bp, Glycine max
  Clone ID: LIB3107-061-Q1-K1-F6
caaacaaagggagggttgcctttgaaaagccgcatgaaactaagcgggagggttaacatggctcaggtagctgatataaaagaggtgtaaggatgctaacagtcaccatgctcaagaggctctgcgcagggccaaatataagttcacccggccgacatatgaacattcgttagcatataatggagatttacaaatttcaatctaagtgagcacacaaagttgaaacatgataacagaagtgtgccggatgggatcagtgccaaagat

SEQ ID NO: 45903 - DNA, 448 bp, Glycine max
  unsure (1)..(448): unsure at all n locations
  Clone ID: LIB3107-061-Q1-K1-F7
ggnctattagtatggaccaatcttactaagcgtgtcttggagataaatataaaatcgggaacctgattcggggcatcctagcttttttttactggtacccatttagcagtttttttaaaataccggaaaatattccttatgggtatntttcagttataaaccagtagaattagttttttcatttcagcagtacctttttttcccgtaaaaccgcactcctttagtataatttgttttcattagcatccttttatgaacgcttgttatcgtcgatggtatacgtacgttgtttacaaatatacaatgaagttcggtggctcttgattgctggagaaaaagaggtgtgtatttttttaaaaacatatgatccgtatgaccatacgaattatcaatccgtgtgttttgaatgtttttaaaaaattataattaattttaaattttttataca

SEQ ID NO: 45904 - DNA, 404 bp, Glycine max
  Clone ID: LIB3107-061-Q1-K1-F8
cggatagacgagatgaaaacgttggaaatgagtctattagcaggtgcttacgttcaaccccgcttcccttgtaactacaacccaacgctttccgcatcttgcagaacccaaaagacagcaacttcactaaccgtaacaactcccaagaaaacagaaaaggcgttattcactgagtcattcgatcaaacacgtgacgcgcaacctctccccgaaaagaagaagagggtgttcttcttagacgttaacccgctctgttacgaaggaagcaaacccagcttgcactctctcgggcggtggctctctctgtttctcgagcaagtcagccataccgaccctgtcattgctgtaatgtcccaactctactcatttttcaaaagatgacatttagatgcaaatgcttactt

SEQ ID NO: 45905 - DNA, 435 bp, Glycine max
  Clone ID: LIB3107-061-Q1-K1-F9
ctcaaattagcatggctgtcacggttgcattcttgaatttgatcatcatgttttcagtagtctctacaagcaagtcactgagcttaaactactattcaaaaacatgccctgatgtggaatgcatttgttgccaaggcagtgaaggatgccactgctagggacaaaactgttccagctgcacttctgcgaatgcacttccatgactgtttcgttcgggggtgtgatgcctctgtgctgctaaattcaaaaggaagcaacaaagcagaaaaagatgggccaccaaatgtttctttgcatgcattctatgtcattgatgcagcgaagaaagcactagaagcttcatgccccagtgtggtctcttgtgctgacatccttgctctagcagcaagggatgcagtttttctgtcaggaggacctacatgggatgttcctaaa

SEQ ID NO: 45906 - DNA, 371 bp, Glycine max
  unsure (1)..(371): unsure at all n locations
  Clone ID: LIB3107-061-Q1-K1-G2
aaggtgaaccgatcaatggatcaattacagaagatggatgagagttgagtgaaaggaatcatattgaggatgcaacaacaaagcaactgtacattttgctttgttctgagaaagctttatatgtctattcattggtgcatgcgattcatggggttaaaaaggtgctatacaagaaaaagtttcattcctctacgtgttgctgggcatcaacattttgcagtccttctgatgttggccttatactcattttcactagtggaaaagtagaattaaggtctttgccagagttatacctgattgtggagacttcaattagaggttntaattattctcctacaaaatgaagtcattttctgacagccagatatgct

SEQ ID NO: 45907 - DNA, 405 bp, Glycine max
  unsure (1)..(405): unsure at all n locations
  Clone ID: LIB3107-061-Q1-K1-G3
gacgcacgcatcgaaagaaagagagagaagaaggggaagaagaaaagaggggtcttcgaagaaaccatgagtatcctctctctctaaactctctcagattcgatcctctcttctcttctttcaattccgcttccctcgcactaaatgacagggtttcctggccctcgccgcgatcacgcttcttcttcctcctcctcgcacaattccaacagcagtggtagcaacgtatttaatttgcttgcaaggagggagatctcaccccgaacaagatatgtggcanaatggcattggggagaacccggtgaagcttcaaaatcaaaggctattccttattctcgtcctaaaaaagaagttgtgagagatgcaagacgtggtctcctcttatgggttgaggctgagtcattg

SEQ ID NO: 45908 - DNA, 376 bp, Glycine max
  unsure (1)..(376): unsure at all n locations
  Clone ID: LIB3107-061-Q1-K1-G4
gcttgatgagatggacagagctctgcatgatgcattgtcaattgtcaagagaactcttgaatcaaaatacggtggtagctggtggaggtgctgttgaggcagcattatcagtttatttagagtaccttgctacaactttaggatctcgggagcagttggctatagcagaatttgctgagtctctgttaattattccaaaggtgctttctgttaatgctgctaaggatgccactgagctggtcgcaaaattacgggcctaccaccattcagcacanactaaagccgataagaaacatttatcaagtatgggtttggacctttctgaagggaaatcagaaacacttgnaggctggagtcattgagcctgccatgagca

SEQ ID NO: 45909 - DNA, 295 bp, Glycine max
  Clone ID: LIB3107-061-Q1-K1-G5
gcatctagtctcagcgactgtcccaactgctgcgggccagtaaaatcaacggacatggcagactaattcttcattgacaaatctcaacagaataacactatctgtggtaggaactatgcatacgaaaacgctatgaaggacaatgtactgaatttgatgcttattcaagcacccacacactatctaccacaagcgcaccatctccaatacatttgccataggaaaggctccaattgaaaatcatttttgtaccattgagatgggtgccaaacttgacaaccatagcctgatatga

SEQ ID NO: 45910 - DNA, 110 bp, Glycine max
  unsure (1)..(110): unsure at all n locations
  Clone ID: LIB3107-061-Q1-K1-G6
cccacacntcctaattcaaacggccactttttttttttttttaaacttatttttttacaccgccccggttttatctttactcccacttttcaattaacacctatcccttc

SEQ ID NO: 45911 - DNA, 426 bp, Glycine max
  unsure (1)..(426): unsure at all n locations
  Clone ID: LIB3107-061-Q1-K1-G9
gacagacagacagacagacagagtgagtttgtgacgaatcctctgtcgtcatctcaacctctctgcatttgtgcgttgcattgcacatatctctcaaaactttgttctggttctgtgactcttactattttcgtgtgtcttgcatttggatcattatctgtcacctgagaaacccacctcagagattcacctaacaccccttcttttgattttgaaccccttccatttcaatcaaaacctctctcatcgtcttctattctacatacaattctacccttttcttcactctgcttttctgacaaaagtgttggttgaacttgattctttcttcatccatttaattgggaaccagcgaaagcacgatgggagatgtggcanaggacctaacagctgggactgttggaggggcagcacaactgatagttg

SEQ ID NO: 45912 - DNA, 380 bp, Glycine max
  unsure (1)..(380): unsure at all n locations
  Clone ID: LIB3107-061-Q1-K1-H1
ggattcgtcagttcattgacttgcccacagtgagaatgaggatgttgcgaacgacaatactgcaattcgctgcgttgcaggttttgtttattctgttgggtgttggtgccgattacataccgccttcgagatttgatggcttcgtctacgggaaggggaacttgaatttgttggatacggttttgatagaagcgttttatgacccagtgtgcccagatagcanggattcccggcctccactcaaacaagctcttcatcactacgcttctcgggtttcgctccttcttcacctccttcctctaccttaccatgacaaatgcttttgntacgtctcgtgctctgcacatngtgaacaatttgaacgcatctgcaacgttccc

SEQ ID NO: 45913 - DNA, 321 bp, Glycine max
  Clone ID: LIB3107-061-Q1-K1-H11
ggaccggctatttctattctagctggtactgacgtaaggttatatgtgtagggtatggatgcatgttttaagatgcctgtaatagcacaattctttgtcttttgacagtgcttactgtgaactgtacttgcatgtatatatgtaaaataaagctaatgctaaaaataatggaacatgttgaaattgataaatttaatatagatacttttagtattcaaacaaaacacagagtggaagacattaatgtatttgtttgtttgggtctttgtggatggagattaattcaagctaagctttatgaataaactgacttttgaagga

SEQ ID NO: 45914 - DNA, 362 bp, Glycine max
  Clone ID: LIB3107-061-Q1-K1-H2
gatttcaattcattcagtcttattattattagggtttggcgattcagagagaaggagaaatgggagaacgaaaaggaatcccaattgctctggggctcttggcgatgctcctcttcttcattgcttcttcctcttcctctcacctcgttcgtgcttccgatgacgccgacgacgcgatcttctacgagtcattcgacgaggattttgacggacggtggattgtgtccgacaaggaggattacaacggtgtctggaagcatgctaagagtgatgggcatgatgattatggacttcttgttagtgaacaagcccggaaatatgctatagtcaaaaaacctgacgagcctgtcagtcttaaagat

SEQ ID NO: 45915 - DNA, 368 bp, Glycine max
  Clone ID: LIB3107-061-Q1-K1-H3
gacctcacccagttgcagaaagaaaagaccatcaaagtttcacttcagccttatccggtttagggtttcggtttttgacccaacctttgacgtatcgaaaccttaagtttcggatcaggtctgagcaatctggttggtagaacctttggtcttagagagtcaagttttatgtctgaattagacgatcaaattcctactgccttcgatccttttgctgatgcaaatgctgatgactcgggtgctgggtcaaaggagtatgtgcatattcgcgtacagcagcgaaatggaaggaaaagcctgacaaccgttcagggattgaaaaaagaattcagctataacaagatacttaaagatgttaagaaaagagt

SEQ ID NO: 45916 - DNA, 64 bp, Glycine max
  unsure (1)..(64): unsure at all n locations
  Clone ID: LIB3107-061-Q1-K1-H4
gacacacatttactcactcactgtgagagcggcaaanaaaaaaaaaaaaaaaaaaaaaaagaag

SEQ ID NO: 45917 - DNA, 367 bp, Glycine max
  Clone ID: LIB3107-061-Q1-K1-H5
gccaccaccaccatcaactcaatatgagagtcctcgttcaagagaactgttgtccaaaccaatatcaggaaaaccttgtgaggtttcaaaactgaaagacagtgactgtaagctatttggcatctcacttcttagtagccgccccattgcatcagagccttctctatcacaaagaaatgttacaagtgagtcagttggtcacatgcatacagcatcacaccatcaacgtgcaattgaaaacgatcagaagtctgagcattctaggggttcaaaaccagctgatggtctgctgattgatgaccacgaaaaggtgttacaaacttctcagccacatcttgaagatgtacaagcaaaatctcatagtggt

SEQ ID NO: 45918 - DNA, 417 bp, Glycine max
  unsure (1)..(417): unsure at all n locations
  Clone ID: LIB3107-061-Q1-K1-H6
gacgcacttagcaatcaatcaaaacattcccaataacaataatatacacatcnttcaattaagctccttcttcctatagccatggctctttctaagcttataattgcttcccttcttgcgtcgcttctccttcttcatttcgttgatgctgatcaatcggcacatgcacgaacgcaggggtctcttcttcagcagatagattgtaacggagcatgtgctgcgaggtgccgtttatcatctcgtccacgcctctgccaaagaagcttgtggaacttggtgtagacgcttgaactgcgtgccacctggcactgctggaaaccaaaaagtgtgtccctgctatgcaaagttgactactcatggtggcaaacgcaagtgcccttaaacttaattggaccactattctatgcatgcctttgg

SEQ ID NO: 45919 - DNA, 428 bp, Glycine max
  Clone ID: LIB3107-062-Q1-K1-A1
atattactatggttcgagagaaaataagagtatctactcggacactacaatggaaatgtgttgaatcaagaatagacagtaaacgtctttattatggacgctttattctgtctccacttatgaaaggtcaagccgatacaataggcattgcaatgcgaagagttttactcggagaaatagagggaacatgtatcacacgtgtaaaattagaaaaaataccacatgaatattctaccataataggtattgaagaatcagtacatgaaattttaatgaatttgaaagaaattgtattgagaagtaatctgtatggaactcgggacgcgtctatttgtttcaaaggtcctggatatgtaaccgctcaagacatcattttaccaccctctgtggaaatcgttgataatacacaacatatagccaacgtaaca

SEQ ID NO: 45920 - DNA, 404 bp, Glycine max
  Clone ID: LIB3107-062-Q1-K1-A2
ggcaccgcttgagcagacttaacaacagcacaaagcgggttactgtctgttcaagctaccatctctctctctctttcttagtgcctccttgccagaagttaaaatggcccaagaaactttcctattcacatctgaatcagtgaacgaggggcaccctgacaagctctgtgaccagatctccgatgctgtgctcgatgcatgcttggagcaagaccctgacagcaaggttgcctgtgaaacctgcaccaagaccaacatggtgatggttttcggagagatcacaaccaaggccaacgtggactatgagaagattgtgcgtgacacatgcaagaacattggttttgtctctgatgatgttggtcttgatgctgacaactgcaaggtcctcgtcaacattgagcaac

SEQ ID NO: 45921 - DNA, 431 bp, Glycine max
  Clone ID: LIB3107-062-Q1-K1-A3
gaacacttctctagctatcattgctcttcagctgtcttctttccaatacctcgttcaatagctccaaggttctgagttgcaagctaacatgggtgagatagctttaccaaatggcattagcaatggcaatattaatggagtcaatggacaaagccattctcttaatggttacaggaagagttgttggtatgaagaagagattgaagaggacttaagatggtgctttgctctcaatagtatattgcatacaggagctagccagtaccaaggcattgcattgttggacacaaagccctttggaaaggctttggtaattgatggaaagcttcagagtgcagagacagatgaatttatctaccacgagtgtctagttcatccggctctgcttcacaatcctagcccaaagaatgtttttattatgggaggaggag

SEQ ID NO: 45922 - DNA, 87 bp, Glycine max
  Clone ID: LIB3107-062-Q1-K1-A4
actacaaaccggacattgaaacatcaacaacatgcggtctcacgggagggaacacaacaagatacaaacataactttgtacaaccaa

SEQ ID NO: 45923 - DNA, 427 bp, Glycine max
  Clone ID: LIB3107-062-Q1-K1-A6
gagagtgactcagcaaaaccctaggtgttctcacactctcgttccgtctttctccaacaatggaagttccttcggaagcgccgtcgtctaccggcaccggtgaaaccataagcaaaaatgcgctgaagcgggaactcaagaacaaacagagagaagaagatcgcaagcgcaaggaggaggagaaggccaaaaaggcagctgaaaagcttgaaatgcagaaggataaggataacaaatctgcacctgctgatgaagatgatatggaccctactcaataccttgagaataggctaaagtatcttgcagttcaaaaggcagaagggaataacccttatcctcacaaattttccgtcactatgtctcttgatcaatacatcaaggaatatggaggtttaagcaacgggcagcacctcgaggatgtctctgt

SEQ ID NO: 45924 - DNA, 308 bp, Glycine max
  Clone ID: LIB3107-062-Q1-K1-A7
ggggagaaggactatacattactgtgttcttgggctgtcctcattccctacattcaccactcatttatcttatagctatattctgatacatacactgctttgaatccatctccactagcggtttctgttgagagctttaacaaagacttcaagctcatggggtttgagaggattgctgctattcaaacatttgtgattgtgacaaatctgtatgagtacgcaaagcaaaattatgggccttagagatcctctagatgaacggcttagaactctgttaccaccatactttgtcctgtgtgcagcaaatt

SEQ ID NO: 45925 - DNA, 222 bp, Glycine max
  Clone ID: LIB3107-062-Q1-K1-A8
tacattaagctgttgtctcgagcctggacaattgggttcatgaaaagaagatatcttgacaaaatggctcgctacaaaagccaacctaaacaatgctggcttacacacatgggatctggttattctaatggatccacatattatcacttcaaatgcacttaaatactaatcagcattcatagagaatctgatgaggcggggatacaaaattggtggaatctt

SEQ ID NO: 45926 - DNA, 423 bp, Glycine max
  Clone ID: LIB3107-062-Q1-K1-B1
gagtttttggtgttccatttttcttcctccatctttatcttaaacataacttgaactctccattccttaaattttagctacgagctagttccgacacagacaaagcaatggcaaagaccgagttagaggtgactgttgagagcaagaacaaagacctcaagcacctggggtttgtgaggattgctgctattcaaacatttgtgattgtgtcaaatctgtatgagtacgcaaagcagaattctgggcctttgagatccgtcgtaggaacggttgagaacactgtaaccaccattctcggtcctgtctgcaacaaattcaaggacgtccctgatgatgtccttgtttttgttgacaaaaaggtggatgaagcttcccacaagttcgatgagcacgctcctccttttgctaaacacattgcggatc

SEQ ID NO: 45927 - DNA, 351 bp, Glycine max
  Clone ID: LIB3107-062-Q1-K1-B2
gcctctcattgaaaaacaaaattaatcatcttacttatttattgtccgaaaatggttgatttacattggaaatcaaagatgccaagttccgacatgccttccaaaactctaaaactctctctctccgacaacaagtccttaccctctttgcaactacccttccgcaccacagatatctctcacgccgcaccttctgtttgcgccacttacgactactatctccgtcttcctcaactcagaaagctttggaactcctcagattttcctaattggaacaacgaaccaatcttaaaacctatcttgcaagctctcgaaatcaccttccgctttctctacatggttctctccgat

SEQ ID NO: 45928 - DNA, 407 bp, Glycine max
  Clone ID: LIB3107-062-Q1-K1-B3
tgtggaatttgtgagagctcctgacatatatcagtgtgatttgcttgacttgcctgctgttgggcaactggagaaggatgccaaatatgctctgttatatcagcttcttaagatttttcttacccagaggctagatgcatacttagaatatcaagctgcaaattccaccttgttgaaaaactatggccttgtgcctgaagaatgcatttccaaaatgaggctgatgtcattgatggatcttacctctgatggttctggccaaattccgtatgaacttattagggacacacttcagatcaatgatgatgaagtggaactatgggtggttagagcaataactgccaagttaattgactgtaagatggaccaaatgcatcaatcagtagttggtagtcatcctactgatc

SEQ ID NO: 45929 - DNA, 391 bp, Glycine max
  Clone ID: LIB3107-062-Q1-K1-B4
gaagcttatgtcatagttactctgatagggtcgggactgaagggcaagcagttggtggtgtacccctgccaaacactttggagggccctcagttttgcccacaaccacaacccttgcattttgcggtgggaagagcccctcctgctatggatgaaaagggaaagttggatcagatagaggaaagactaagggccgttgaaagaggcaaagattatgccctcgctgacgtggaagatttgtgcctagtacccgacgtggtcattcctccaaagttcaaggtatcggacttcgataaatacaaagggactacctaccccaagaatcacctaaaggtgtagtgcaagaaaatgggaacatatgcgaaagatgacaaattgttgatgcatttctt

SEQ ID NO: 45930 - DNA, 365 bp, Glycine max
  Clone ID: LIB3107-062-Q1-K1-B5
ggttctagtgtatgtgattgttgtgactcgttcttgggcgacgttatcttcttcttttgttgattgtgtgtttgttttttctctcacctgaaaatgtcttgctgcggtggtaactgtggatgcggaagcgcctgcacagtgccgcaacacctgcgcacgctgcaagatgtacccatacttgatctacaccgtgtcaaccaccaccaaaaccttgttcatgcgcgtggcaccattttaggcttattacatccgtgctaaaatcggtggaccccattagaaccaccattgctaatgctgagctaactacacttgcagaccctgctcttgcaagtcttgtgtttgataactaaaacgtgaatcaaaat

SEQ ID NO: 45931 - DNA, 435 bp, Glycine max
  Clone ID: LIB3107-062-Q1-K1-C1
gtaatgtagtatagtctgaattatatcatatgtgtttcagtaaacttaatagtatgacaacgcattcatttcctatgcattgattcgatttctgatactatcggagtgaaaaaagtagatctaaagaaaaacgcgggttggattatattagtaacaagtaaattctttgtacgtaaaaagttccaagattttgttggacagaataacaattgcaaagtttgagatcacccagaaagcattatcaattttaaaagcctactcgggtattgagcgtttatcaaagtttacttaataagaacttaattttttttttttttttcaataaagaatagtttgtaacttcggaaaaagagaatctagtttattttcttacatagaatcctcatatatgtgtgaataacacatacattttttctatagatacattcgaaatct

SEQ ID NO: 45932 - DNA, 353 bp, Glycine max
  unsure (1)..(353): unsure at all n locations
  Clone ID: LIB3107-062-Q1-K1-C2
gatgcatagcaattcccaattcctaatggtttaaaccggattctcatttcttcatcgatcgattcttctcctcctaaagatgcagatcttcgtgaaaactttgaccggtgagaccatcacccttgaggtggagtcctccgacaccatcgataacgtgaaagctaagattcaagacaaggaagggatcccacctgaccagcagagacttatctttgcgggtaaacagcttgaggatggtcgaacccttgccgactacaacatccaaaaggaatccactctccacctcgtgcttcgcctcangggtggcatgcaaatctttgtcaagactttgactggcaagaccatcaccctcg

SEQ ID NO: 45933 - DNA, 390 bp, Glycine max
  Clone ID: LIB3107-062-Q1-K1-C4
ggattttcacatcttcaagatactaagaaggaaggaaggcggggaagtgagaagtgtaatggcttctgagagggaatgttttgacctctctggacccttacatttaacttatgttgactgggataatgcatatcatcgaaagtcggttgctgctagtttggtccaaggtgtttatgttctagagaaggacaggcaagaacggcgtgaaggtcctgatgctcttacactgccttggtgggcgttcttccactttaagttgttttgttcgcttgtcgatgatgttgattcttccatctttggtgctatttatgagttcaagcctccatcatctatgtgcaatgacaccttacatagaagtccacgttatgtaattgcctttcgagggactat

SEQ ID NO: 45934 - DNA, 314 bp, Glycine max
  Clone ID: LIB3107-062-Q1-K1-C5
atatatctacagcaacactacactggcccatcggcggaaaaaaactatggccatggttatgtcgctacttcacttgttaatcactagcgtttacgctaagtgggggggcgcagccttcactgggagagatgctactatctgtggggagctgagagaattgaactaaccaaccgaacaaaacatgaggcctgtgagaatgaataaaaatatgatttggcattagaatatacacatgacgagttacaacgttggtggatttgatagacgataaacacaatgtaaaataatggatatgagtcactagcactaaaaac

SEQ ID NO: 45935 - DNA, 296 bp, Glycine max
  Clone ID: LIB3107-062-Q1-K1-C7
taatgcacaatttgataataaagacttggtggttgaatatgctgatataaagcactctataatatatatatatatgcaaaaaacttgacatgaaatatcaagcaatgccaacactataactatggacaaatgcacaaatattctatttctatttaaatatggaataacagcacgttagatttacaacagatatggggttgaggtcaaattccccactgcagttcctactatttcagctgacaacattaatagctgccatctatttatgagtcttgactccttctaaccatccataa

SEQ ID NO: 45936 - DNA, 403 bp, Glycine max
  Clone ID: LIB3107-062-Q1-K1-D1
gtggcaaaaagggtcttgctgccaatcctcaccgttctgttgatccagttttggctgcttcagctgcagttatcagcttacagggtattgtctcccgcgaagcaaatccattggattctcaggttgtctctgtgacttcgtttaatggacgcaacaatcttgacatgatacctgactcggtggtcctattggggactttcagagcgttctctaacaccagcttttaccagctacttgaaagaatagagcaggtgattgtggaacacgttagtgtctacagatgcttggcagaagttgacttctttgaaaaggagtacacaatttaccctcccacggttaatgataaccgaatgtatgagcatgtgaaaaaggtgtccattgatttgctgggtcataagaattt

SEQ ID NO: 45937 - DNA, 380 bp, Glycine max
  Clone ID: LIB3107-062-Q1-K1-D3
ggacgcggaaacacgctcgtcttcacgatccagcgggtccgctctccgacgagtctgcgtaaggtgaagaatcacgaggccagccgccggtgaagaatcgcgcgattcgtctggaaatcgcgattcaagctcgattcatctccgttatagagattcaaccacgattcaggaacaaaaacaagacaacttccgattcgcttcagtagcagctagaatcgtatcgaatcgtgcgacacgtatcgtgaaccattgaagatgataaaacaatcataccacggaattcattggttgaagttaaccagtcgggtcttcttatggaaactataatcgacattactcctcgtgatcctattccaacaccttccggtggacctcttgac

SEQ ID NO: 45938 - DNA, 259 bp, Glycine max
  unsure (1)..(259): unsure at all n locations
  Clone ID: LIB3107-062-Q1-K1-D4
agtaagctatgatgacatatctggtcttcggattggattggttttccaaagtgctgcactctttgattctttgactgttcgtgaaaatgttggttttctcttgtatgaacactcaagcatgtctgaggatcagatatcagagcttgtcacggaaaccttggctgcagttggattgaagggagttgaggatcggttgccttctgagttatcaagtgggatgaaaaaacgagatgctntagctcgatctattatttgtgac

SEQ ID NO: 45939 - DNA, 255 bp, Glycine max
  unsure (1)..(255): unsure at all n locations
  Clone ID: LIB3107-062-Q1-K1-D8
gatcgacagtgccgntttgcccccattggccaattcggccactcttctctgaaaaagcctccagcctccttcttcatccatcttccctctccaccaaaatcctccgcggttcgttccgttattcatcgaaccgttctctcaagtctcgtacttggcttagttcacaactcgaaacttcaccgaacgcattccattcaccaattcgtccaagtctcgtatcaatcactcaatccgtctcgtggaggttggagagat

SEQ ID NO: 45940 - DNA, 445 bp, Glycine max
  unsure (1)..(445): unsure at all n locations
  Clone ID: LIB3107-062-Q1-K1-E2
aggggacgcaccgattcatgcttcaaggcgggatcggaagcttgccgtgaaaaattgcgaagggagagactcaatgaaaggttctgtgacttgagctctgttttggagccagggagacctgtgagaacagataaaccagctatacttgatgatgctatcagagtcttgagccaacttaaaaccgaagcccaggagctcaaaaaaacaaatgaaaaattactagaggaaataaaatgtttaaaggcagagaaaaacgaactacgcgaagagaaacttgttctgaaagcagataaggaaaggattgagaagcagttgaaggccttgcccgttgcaccagcaaggtttatggctccacctgtaactgctgctgctgcagcatatcaagcaggggtgaacaagatggccgtatattcaaactatggctacatnccaatgtggcaatatt

SEQ ID NO: 45941 - DNA, 429 bp, Glycine max
  Clone ID: LIB3107-062-Q1-K1-E3
tttgaaggggatcacaaaccaaacaacttctggcacatacaggactctctctctctctcttattgcatggccgccaattccagtagccgagggatcaccgccttagggaagcgagtcgccaaccggatctggacttccaacgcacctcctctcacttcaaggaggggagcatacagtagcggctcagtgtacgacaagaaccctgatgatgagatccagtctgggcaggtcccagacgatgtgatccaagcggcaacacaatccggcaaatactgggccccacatacacagactggggtatttgggccccccggaggaggtgaccaaactgcttctgccattcactctgatgcgctggaggagaaagccttgtttcgccccaccagtcttgaagaattcgagaaacctcacaccctttcttaacaacca

SEQ ID NO: 45942 - DNA, 430 bp, Glycine max
  Clone ID: LIB3107-062-Q1-K1-E4
gatgatgatgatgatggaaacaacacaattggtcgggtatgtgaaacactctgcccatttcgctctggagatggaggctgcagatggccaaatggtggctgtgctcaactaggtagccagtatgttggtctgaaggcaaattttgatgcatttgaccaactatcaattaatgatagttatttcaagtctgagtgaacagggaatttacttcctaaaagactccgatagtgaacagtcgcataatcaattttggtttctttaagctatgaggatagttgttaattctttttaacactcctcgtgatgaaaaaatggggagaagtagtggaccctgtcattttgattgggtttcgggaattgtacaggctataagagttggctggagatcatcttggtgcatatgggaatgcattgggttgatacgcatcat

SEQ ID NO: 45943 - DNA, 375 bp, Glycine max
  Clone ID: LIB3107-062-Q1-K1-E6
gacacgcaactgggtctgactgcggtttgctctacgcctctccctctctctcaaaaatcgttctcttcgattttagggttttgttttgctgctgcctccgttccccccttctcataaacaacgcgttttctcttctgcttcgaatctattctttgcttttggttttggttgattcaaggccttcacagcattcgttgcggcattttaatcgatttatccaagcaggactgaatgaactaatggagtctaaaggtgggaaaaagaagtctagtagtagtagtagtaaattattgttctacgaagctcccctcggatacagcattgacgacgttagaccaaacggtgtaatcaaaaaattcacatctgctgcttact

SEQ ID NO: 45944 - DNA, 430 bp, Glycine max
  unsure (1)..(430): unsure at all n locations
  Clone ID: LIB3107-062-Q1-K1-E7
aggctttgcaacggcaacagactaaggggtttctcgctctanccctanggtttcgttctctactaccgttctttcatcagatcgctgccgtttctggcgtcattccgataattcggcggcatgaagctaacagtgaagactttgaaagggagccatttcgaaatcagggttcaaccctccgatactgttatggctgtcaagaagaatattgaagatgtacaaggaaaagataattacccatgtggacagcaattgttgattcacaatggtaaggttttgaaagatgaaactacattagtagagaataaagtctctgaagatggctttcttgttgttatgcttagtaagagtaaaacatcangttctgctgcagcttcatctgttcagcctgccagtaatcctcctacgactgtatcaacgtcaaattcca

SEQ ID NO: 45945 - DNA, 159 bp, Glycine max
  Clone ID: LIB3107-062-Q1-K1-E8
cagcttagacatgttcaactggacaatagccatgcccaggagcagacacagactcagtcacagtgccacaatggcaaagctactgcctactgattagcactctgataccatgtatgctcaatgtttgtgatatgaatctgaataggatattgcatgacc

SEQ ID NO: 45946 - DNA, 328 bp, Glycine max
  Clone ID: LIB3107-062-Q1-K1-F1
gctactaccaaattttctttcaaacaaacgcagtttctctctctctctctcgtagttcaattcaattcaattcaatatgatgcagagactctcttctgccactactactactactactcgctctgccttgctgcgctacggtggcggcgcacttcgccgggacgtgcttgctcccatttactcttctcacttagcagctaagtcacaggcgggtgaaaatgacaccaaagcagctagatggttttctattatgagctctgatagatccacatttgattactcaaacttgaaaagggatttgttctttggcaaacgatatgaatcaact

SEQ ID NO: 45947 - DNA, 349 bp, Glycine max
  Clone ID: LIB3107-062-Q1-K1-F2
gatcacaaaccaaacaacttctaacacatacactgctctctcggtctctcttattgcatggccgccaattccagtagccgagggatcaccgccttagggaagcgagtcgccaaccggatctggacttccaacgcacctactctcacttcaaggaggggagcatacagtagcggctcagtgtacgacaagaaccctgatgatgagatccagtctgggcaggttccaggcgatgtgatccaggcggcaacacaatccggcaaatactgggccccacatccacagactggggtatttgggcccccctgaggaggagaccaaactgcttctgccattcactctgatgcgctgg

SEQ ID NO: 45948 - DNA, 399 bp, Glycine max
  Clone ID: LIB3107-062-Q1-K1-F3
gggcaaataggcagtctgctgcgaggtcaaaagagagaaagatgcgatacattgctgagcttgaaaggaaggtgcaaacattgcaaacagaagcaacatctttgtctgcacaattaactctcttgcagagagatacaaatggcttaaattctgagaacagagaactgaagctgcggttgcaaaccatggagcaacaagttcacttgcaagatgcattaaacgatgcattaaaagaggaaattcagcatttgaaaatattgactgggcaagttatggcacctaatggaggacctatgatgaagcttgcttcttttggaggggggcagcaattctatcccaataatcatgtcatgcacactcttttagctgcacaacagtttcaacagctacaaattcacc

SEQ ID NO: 45949 - DNA, 307 bp, Glycine max
  unsure (1)..(307): unsure at all n locations
  Clone ID: LIB3107-062-Q1-K1-F4
gaatggtcttttgtagattctgncttcagcttgggagtatgcggagcttccaatacgacctggagaggaagaggttgttcgtaagttaattaatcaccagaggttttcctttgaaaaccccaaggttacagatccgcatgttaaagctaatgctttgcttcaggcccatttctctaggcaatttgttggtgggaaccttgcattgcaccagaacgagatgcttctttctgcaaatagactgcttcaggctatggtagatgtgatatcgagcaacatgtggctgagcctggccttacttgctatggaa

SEQ ID NO: 45950 - DNA, 441 bp, Glycine max
  Clone ID: LIB3107-062-Q1-K1-F6
ggaaatcgagaagaagaagaagaagaagatggagaagtatgagatctggagcaggagaatagcgttggcagcgtttgcgtttgctctgctgttccaatcggcctcagcagacgacgtcgttgtgctctctgaagataacttcgagaaggaagttggtcaggacagaggagctctcgttgagttctatgctccttggtgtggacactgcaaaaagcttgctccagaatatgaaaagcttggtagcagcttcaagaaagccaaatctgttttaattggcaaggttgactgtgatgagcataagagtttgtgcagcaagtatggagtctctgggtacccaacaattcagtggtttccaaaaggatctcttgaagccaaaaagtatgaagggccacgcactgctgaatcactttgtgagtttgtaaatacggaaggaggaacgaa

SEQ ID NO: 45951 - DNA, 428 bp, Glycine max
  Clone ID: LIB3107-062-Q1-K1-G1
gacacaccaacacatccattcattgtcttaatgttagcaatgtcttcctctttctccatccatttcttcctcctcctctcaatagcccttttctcagtttgttgcttagcagcatctcaagctcccaccaccaaatcacacccctatatccttcccattaagaaagaccccgcaacaaatttgtactacacttcagttggcattggaactcctaggcacaactttgatttagtcattgatctttctggtgaaaacttatggtacgattgtgacactcattacaactcatcatcctacagacctatagcttgtggctcaaagcaatgccccgaaattggatgtgttggttgcaatggccccttcaaaccaggttgcacaaacaatacatgccctgctaatgtaatcaaccaattagccaaattcattta

SEQ ID NO: 45952 - DNA, 375 bp, Glycine max
  Clone ID: LIB3107-062-Q1-K1-G2
ggaatacaaaccataagcaacaacaacgcaccattcgataacggcttctggttctttaacgaagaaacctttctctttgcgcgtgtcccgttctcttctgcaatcctcctccatccccactgtgtgatctgatcctaaaccttatagccatgactaccatggagattaagctatggaatgacaagcgcgaaagagaaatgtatgacaactatggggagctttatgccattatcaaagccactgataggcttgagaaggcctatgttagagatataatttcaccgcatgaatatgagttggagtgccagaagctcatagctcatttcataaccttagcttccactcttaaagacactgcgcctagcattgagcgat

SEQ ID NO: 45953 - DNA, 408 bp, Glycine max
  Clone ID: LIB3107-062-Q1-K1-G4
ggttctagtgtatgtgattgttgtgactcgttctgcttcatcgggatcttcttcttttgttgtttgtgtgtttgttttttctctcacctgaaaatgtcttgctgcggtggtaactgtggttgcggaagcgcctgcaagtgcggcaacggctgcggaggctgcaagatgtacccagacttgagctacaccgagtcaaccaccaccgagaccttggtcatgggagtggcaccagttaaggctcaattcgagagtgctgaaatgggtgttcccgctgagaacgatggctgcaaatgtggagctaactgcacctgcaacccctgcacttgcaagtgaggtgttggagagctaaagctttcaacagaaatggcccttagaaataatgataaaaactatatgtagtttcaaaac

SEQ ID NO: 45954 - DNA, 394 bp, Glycine max
  Clone ID: LIB3107-062-Q1-K1-G5
agaagacgacagaaggggggaattccatggcgacgagtgggtcaggggcaaagcatgggatggtgattggaatcgacgacagtgatttcagcacgtacgctctccaatggactctggatcacttgctatcccctgcaaatgttcctaagttcaagatttttcttgtttatgccaagccttatgttgcctctgctgtcggctttgttggccctggagccgctgaggtgttacctgttgttgaggtcgatttgagaaaaacagctgccaaaatcactgaacgtgctacagaactatgcaagaagaaatccgtaaatgacgtagccagggaagtgctagaaggtgatcctagaaatgttctttgcgaagcagtggataagcaccaagcttcaatgtt

SEQ ID NO: 45955 - DNA, 427 bp, Glycine max
  unsure (1)..(427): unsure at all n locations
  Clone ID: LIB3107-062-Q1-K1-H1
agaagggggcctaacatttggaggttacctccaatcaaagatggaatgcatgaaatgtggagggaaatctgagtgtcaagaaaggatgatggatctgacagttgagatagaaggggagataacaaccctggaggaggcccttcaacagtttacaagtgctgagactctggatggagaaaacaagtaccactgtgtcaggtgtaaatcttacgagaaggccaagaagaaaatgacagtttcggaggcacctaatgttcttactattgcattaaagagatttcaagcgggaaagtttgggaagctcaataaacctattcggtttccaaaaatactggacttggcacctttcatgaatgggactagtgatttgcctatatacaggctatatggngtagttgttcacctggatatcatgaatgctgctttt

SEQ ID NO: 45956 - DNA, 425 bp, Glycine max
  Clone ID: LIB3107-062-Q1-K1-H2
tgtgttttaatctacatggatgaaaacaatttagttaacgatggaatttatgttcaattctgattatatacaaaaattctttaagccaataattgaacccattttatgataaactttccttccatttttgttcctctagtaggcctaatatttccggcaattgcaatgacttctttatttcttcatgttcaaaaaaacaagattttttagatacagaaaacaaagtaaaattctggggttttttattccccaattataatactaaattcaaataataatcatatatcgtaaataaaattagtcttcgaccactaaaaaaaaatagcaaaagctttatctaaataaacatgcatcacacgtcattagctcctatgttttgcttaatgtaactctagtctttgtgatgcctgtgagtgtaactacct

SEQ ID NO: 45957 - DNA, 225 bp, Glycine max
  Clone ID: LIB3107-062-Q1-K1-H5
ggacattgtgttgattcgagacagaaaaaggggttagggtttgttcttgtgatcgaagcttagcgatgcaaaatgggtggatcagtgagggacgtgaagtacaatggcgaggtctattaggttgtggcaaagtgcttttcgtttattcctcacttttgggcgtcttggtgcgaattttccaagctcatggaccaactttttttttaactttccacttattttccc

SEQ ID NO: 45958 - DNA, 106 bp, Glycine max
  Clone ID: LIB3107-064-Q1-K1-A3
ggacgtcgtttcttttgctgctcaatgcggtagcggacaatctttagaaattgttaagaacttttccattttagcatttattttttaaaattatttgttggtttta

SEQ ID NO: 45959 - DNA, 403 bp, Glycine max
  Clone ID: LIB3107-064-Q1-K1-A4
ggggggtaggtcctgggggggaagttatagacacctttccatactttgtgtctggagtacttcacttaatttcctctgcagtattgggctttggcggtatttatcatgcacttttgggacctgagactcttgaagaatcttttccattcttcggttatgtatggaaagatagaaataaaatgactacaattttgggtattcacttaatcttgttaggtataggtgcgtttcttctagtattcaaggctctttattttggaagtatatatgatacgtgggctccggggggcggagatgtaagaaaaataaccaatttgacccttagtccaagtattatatttggatatttattaaaatcaccttttgggggagaagggtggattgttagtgtgggcgatttgga

SEQ ID NO: 45960 - DNA, 401 bp, Glycine max
  unsure (1)..(401): unsure at all n locations
  Clone ID: LIB3107-064-Q1-K1-A6
ggcgaacaaagaaagaaccttttgcttttctttttttccctctctctccctccgaaaagaactgattctctctctctctgtgccttttatcttttttctttctttcttttttaacagatcgttcttcttcttcccactcactctcactctctgtgttggtgagatgggtatgtcatggctgtgctgctgagaatggctcagcctcacaatggcaacaccaacaacacttcaaaccagcaattggtactccatgactttctgggtatgaggcccgccgccgattcccccaaaaccgccgatgtcaggttaccggagccttcggccttcggctcttncaccggaggacgcggtcccttcttcgccaccttcgacatcgcttccgaaaaacaggtaggaaatca

SEQ ID NO: 45961 - DNA, 428 bp, Glycine max
  Clone ID: LIB3107-064-Q1-K1-B2
cccacgcgtccgagacgacagaagggccggatcctgtagcgaactccctccattgcattttgccctggaaaaccagtctctcaatgcggttgtgatgagtacaactttcaatgatcaaatgtcctataagattgtgttagtcttcggtgaactccctaaccttttgtttaaagtctacaactctggttctagctgttgggaagatgaggctgcgctgaggaggaatgttgatgacaattccatggattgtgattcaaccgatgatgacaatgttgtgtacttccttagcaagggctgaactgtggtggtgagtaacatgcaaagaaacccgtctaagcagtattcgtcggttattactaacaaagacggtcaggaaatagtgtattttctcagttcttcggggacggtagtagcttgcaatttgacat

SEQ ID NO: 45962 - DNA, 416 bp, Glycine max
  Clone ID: LIB3107-064-Q1-K1-B4
atgtgaaatctggtttgctttttcatggatccttgatcagtttcccaaatggtatcccattgatcgagaaacataccttgatcgtctttcaatcaggtatgagcgtgaaggtgaacccaacatgcttgctccagtggatgtctttgttagtactgtggatcccatgaaggaacctcctttggttacagccaacactgttctttcaatcttggccatggattacccagttgctaagatatcgggttacatttctgatgatggagcttcaatgtgtacatttgaagccctgtcagaaactgcggagtttgctaggaagtgggtaccattctgcaagaaaatttctatagaacctagagcaccagagatgtactttagtgagaaaattgattacctcaaggacaaggtgcagcccacct

SEQ ID NO: 45963 - DNA, 341 bp, Glycine max
  Clone ID: LIB3107-064-Q1-K1-B7
cgggacatcacagcaatggagtgattcggagttaggagcgactgaactaatcattaatttgcactcgctgtttgagcttcatcacccttcttttgcatcatttatatctcttgagaaatggcgcaagaaacctttctattcacatctgaatctgtaaacgaaggtcaccccgacaagctgtgcgaccagatctctgatacagtacttgatgcctgccttgaacaggaccctgacagcaagggtgcctgtgagacatgcaccaagaccaacatggtcatggtcctccgagagatcacaaccaaggccaacgtagactatgaaaagattgtccgccacacatg

SEQ ID NO: 45964 - DNA, 404 bp, Glycine max
  Clone ID: LIB3107-064-Q1-K1-B8
atgatggcgaaaccgaattcaatttctaaacaaacaaaaaatcaatcaaaacaatttagtttttgaagaaagaaaaaacttacaaaataatagtttcttttttttaggaaatacaaaataactgtttctaaagattacaaatattgaacactttagtctttccaatcatttgagtaaacatttttaggcaccaatttagatcactaatgattttgtcatgaactaaatacacaattcactttttttaatttactcacatagcgtttgaaccagtagttaatgaatagtattgatgagatgtatagaattatcaatgattcaatgtattattattctattttgtatttaccgctaagaaaattttagattcgtgagaaatatttgctataggctcttaacgtagg

SEQ ID NO: 45965 - DNA, 420 bp, Glycine max
  Clone ID: LIB3107-064-Q1-K1-C2
ggtgtagttccaccgagtagcaacaatgtcgaagcgaggtcgcggaggatcggcgggaaacaagttccgcatgtcgctgggtctgccggtggcggcgacggtgaactgcgccgacaacaccggcgcgaagaacctctacatcatatcagtgaaggggatcaagggtaggctgaaccggttgccgtcagcttgcgtcggagacatggatatggccaccgtcaagaagggaaagcccgatctccgtaagaaggtgctgcccgccgtcatcgtccgccagcgcaagccttggcgccgaaaggacgagtgttacatgtacttcgaagataatgctggtgttatcgtgaatcccaagggtgaaatgaaaggttctgctatcactggtccaattggggaggagtgtgctgatctgtggcccaggat

SEQ ID NO: 45966 - DNA, 220 bp, Glycine max
  Clone ID: LIB3107-064-Q1-K1-C3
gcttgttggattgcaaaatcttcttgttcaggggtctccggactgggagtagagcctatgtgaggttctacgcacttccagatgttcaggcgatggacgatgatatagccagttaacctgtgccgccttgtggacaaatatattattggccaggatgaatcacactgacttgtgaaacagtcctattggcagcgggataaggtatgactgtttattatca

SEQ ID NO: 45967 - DNA, 416 bp, Glycine max
  Clone ID: LIB3107-064-Q1-K1-C4
gacctcgccttcagcttccacaatcctatcgcacatctttctcagttctacgatggagttttggggtgccgaggttaaggttggagagtctgttaaggtagacccagccgaatttgaggcatgcatacacctttctcaggctgctcttggtgaggcaaagaaagataagcctgaaccggtggttctctacatgaaagttggtgaacagaaatttgtcttgggaaccctttccagggagaaaatccctcaaatatctctggaattggttttggaaaaggagtttgagctttcccacagttcaaagagtgccagtgttcatttctgtggatacaaggcatattacgatgccgataatagtgacgaggatgaatttactgatagcgatgaggatgatgaggatgttccattgataacac

SEQ ID NO: 45968 - DNA, 418 bp, Glycine max
  Clone ID: LIB3107-064-Q1-K1-C5
ggtagtttgatcgtggaatttctttgtttctgtatttccggaatatgagtaaagtctatgattggttcgaagaacgtcttgaaattcaggcgattgccgatgatataaccagtaaatatgttccgcctcatgtgaatatattttattgtttaggaggaattacacttacttgttttttagtccaagtagcaacgggatttgctatgactttttattatcgtccgaccgttactgaagcttttgcttctgttcaatatataatgactgaagctaactttggttggttaatccgatccgttcattgatggtcggcaagtacgatggtcttaatgatgatcctacacgtatttcgtgtgtatctcacaggcggatataaaaaacctcgcgaattaacttgggttacgggtgtagttttggc

SEQ ID NO: 45969 - DNA, 414 bp, Glycine max
  Clone ID: LIB3107-064-Q1-K1-C7
agaaggggaaggtgcaagagtttgttgtgagctataagctagtttatcgtgaggagaatatgaagttgtttgttttctttgttgctgcagtagttttggtagcatggccatgccatggcgcaggctaccaaaggttccctctccgaatgaaaactggctatggtgagcgttcttcggaggtaaaatgcgcaagttttaggcttgctgtggaagcacacaacatccgagcctttaaaaccattcctgaagagtgcgttgaaccaacaaaggactacattaatggcgaacaatttagatcagactctaaaacagttaaccaacaagctttcttttatgctagtgaacgcgaagtccatcacaacgacatatttatattcggcatagataacaccgtactctctaatatcccatact

SEQ ID NO: 45970 - DNA, 229 bp, Glycine max
  Clone ID: LIB3107-064-Q1-K1-C8
ggtggcagttgtgtgacacagaaattaagctagagcttcatagtttcttcttcttttctcaccttccttctctcccttcagacaaagggacagaaaatcagtgtgtgagagagagagagagaaattgcaaaaccatgtcccacagtcatctaagattcgcctttgggattctaggtaacattgcctccttcgtgtgctttctggcaccactaccaacaatttatagagt

SEQ ID NO: 45971 - DNA, 161 bp, Glycine max
  Clone ID: LIB3107-064-Q1-K1-D1
acgtgtccgcacacgcgtgcacacgtttgagagaagacaacgagaaggtgctactagtgtgtgagtgctatatgctagaacatcgtcatgtgattatgaaggtgtgcgtttgctttgtggctgcactctcaccggaaacatggttcctccattgttaactg

SEQ ID NO: 45972 - DNA, 431 bp, Glycine max
  unsure (1)..(431): unsure at all n locations
  Clone ID: LIB3107-064-Q1-K1-D2
agaagacgacagaagggcaataaaatatctcatatatttttcaaaaaatgatactattttagtgattaaaatcatttaagagtacatcttcaatgttgttatgtaccaaatacaaaaaaaaagtacattttaaatcagattaattatctttatctaaatatctaagaaatatttttatccttttgcatatttaactattggtgatatttaaaatcgtatttttttgtagccaaaattagttttttatagtaattctacttgattaatnttaaaaatataatatccacagtgccattcacatttcacaatttaaataatgtaataaatttttatttcataatattctatttcattttattttctctcatttcattccaataatctagatattacaagttctgattcacgcctatactgcataataggacatt

SEQ ID NO: 45973 - DNA, 381 bp, Glycine max
  Clone ID: LIB3107-064-Q1-K1-D4
gaaaggcagtagtagtgttactttccaatttgaattgttccattttcatttctttcgcaaaagttgcaactacttcctcagaaaaaaagtttctaagttaaggaaatccagagagacaaaaatggccggtgacggtgcagctacatgcatagacatcctccttgccatcattctccctcctcttggagtctttctcaaatatggctgccaggtggagttctggatttgtttggtgctgaccctttttggttatatacctggaaatatctatgctgtctatgctatcaccaagtgatcaccctttaactttgtgtggacaataaacaaatgtcatgggcgtttctgtctttcaactcaaatattaggggttctttaatatat

SEQ ID NO: 45974 - DNA, 204 bp, Glycine max
  Clone ID: LIB3107-064-Q1-K1-D5
tgtgagagcgtgacatggaccactgtcggtataaacattggcgacacgtgttaatctgataaggcacgataacattgggcgattggattgaatagaacctcaaaaaaactgcggtgggtctataagattcaagcttaccatcgcgtgcatgcaacgtcatagctcttttatagtgtcaactaaattcagactactggtgcggtg

SEQ ID NO: 45975 - DNA, 358 bp, Glycine max
  Clone ID: LIB3107-064-Q1-K1-D6
gatcttccttctgttgtggagaagtacatgaatggggaattggaactggagaaattcatcactcacacagttccattctcagagattaacaaggcttttgattacatgctgaaaggggagtccatcagatgcatcattcgaatgggggagtaaatctatatcagaccaataatgacatgacatggtccctgttgggggactgagttctctttctggttgtgaaaagaagaaaataaatttcatatatgatatatatccctttaggattattgaatttgtgaaaacttgtgagtttgagtgtagagaatgatagggcctttgctgctgttattgtctaatgcatgataaataaaatgtc

SEQ ID NO: 45976 - DNA, 229 bp, Glycine max
  Clone ID: LIB3107-064-Q1-K1-D7
ttatatactacagatgggggcataaaagagaggtgaggtgaactcccgtggtttgtggtaatgttgcatcgacacgtatcaactacaataatcgcatcgaagaagcagttttcggagcatatcatcgtctacgaaaatgaacgtatcatatgtctcgaagcatattcaacacatggtgcggatcatccgtcaggaagctgctgaaaaagccaacgagatctctgtctcc

SEQ ID NO: 45977 - DNA, 420 bp, Glycine max
  Clone ID: LIB3107-064-Q1-K1-E1
gagtgcacaagtgagtttgttgatccagataactagaaacagggtgatgaaaatgaaggtccttgttttcttccttgctacaattttggtagcatggcaatgccatgcgtacgatatgttccctctccgaatgaacactggctatggtgcccgtactccggaggtgaaatgcgcaagttggaagcttgctgtggaaacacacaacatctttggctttgagaccattcctgaagagtgcgttgaaccaacaaaggactacattaatggccaacaatttagatcggactctaaaacaattaaccagcaagctttcttttatgctaatgaacgcgaagtccatcacaacgacatatttatattctggatagataacaccgtactctttaatatcccatactatgaaaaacatggatatggggt

SEQ ID NO: 45978 - DNA, 222 bp, Glycine max
  Clone ID: LIB3107-064-Q1-K1-E2
gaatcgtgttacaaatataaaagtctatttgcgctgatcgggtggtttttgaatggtaatcactcacctctttcatacacgtgtgtaggctggttgagaagccatggccgaggatgtggagtgcctacgcgctggcaacatggatatgcctgaggaggaagaggatgagagtccaatcctgaaggttgtcgtggaaaaagagattcgcaaaatggcgttgag

SEQ ID NO: 45979 - DNA, 420 bp, Glycine max
  Clone ID: LIB3107-064-Q1-K1-E4
gactgttctcttctcttctcatcatttttattttttccaatcaaaccaaacaaaacataagcaccgctcttttctctccgaaatccccatctcccttcacttctgagctctggacgagatcccagatctcaccatctttcacgcactcttccatcagattcaccctttcgtttaacgcaaactcataacttgaaggttaatggctgctccaccagcaagggctcgtgccgattacgattatctcataaagcttctcttgatcggtgacagcggtgttgggaaaagttgcctccttctgtgtttctccgatggttctttcaccactagtttcatcacaactataggcattgattttaagataagaaccattgagcttgatggcaaacggatcaagctccaaatttgggatactgcagggca

SEQ ID NO: 45980 - DNA, 416 bp, Glycine max
  Clone ID: LIB3107-064-Q1-K1-E5
agcagatagattgtaacggagcatgtgctgcgaggtgccgcttatcatctcggccacgcctctgccaaagagcttgtggaacttgttgtagacgctgtaactgcgtgccacctggcactgctggaaaccaagaagtgtgtccctgctatgcaagtttgactactcatggtggcaaacgcaagtgcccttagacttaattggaccactatcctatgcatgcctttgatttatattataaaataaaaataatactatatataacatgttaattgcttaatatgtgctttaagagtaaagaataacatcgtgaaatcaaattacccctttttcaatacgtgttgaatcatcgatcttggtttggaattaggttgtatattcacaaaattaataagtatattgtgatgtgattaattccc

SEQ ID NO: 45981 - DNA, 306 bp, Glycine max
  Clone ID: LIB3107-064-Q1-K1-E6
ggtggcttcgtgtcacagtgctgaataataatggtgatggcttcgtagttgtaagttgtgataataataacagaaaacgaaaccctcaaacgaagggaacaatgcgaatataagtgagagaagaatatatcaatatcgtctccaaatacgacgtcgttcaggttggagttttagcacaagatgtctctgagaataaaagcagtagtagataagtttgtccaagagttgcaggaagcgttagatgctgatattcatgataggatcatgaaggacagaaagatgcaaagttacatttaaggacgtgaa

SEQ ID NO: 45982 - DNA, 391 bp, Glycine max
  Clone ID: LIB3107-064-Q1-K1-E7
gcgggtgcgggaggacgacggcgggggacacaaagaatcgaagtcatagttagaagatttagacgtttatccgtgattcggatagttctaatattacacttgcgctaaaagatgtgtttgattccgagagtctttggtggcagaaggagcaatgttttggatcctttgtctctccatgtgagggaccctactaaggatttatctttaaccactattctttctgctgagaaatcagcgttcgagagcacacgagtggattgtaaggagacaccagaagcacacgtgtacaaagctgatattccagggctgaacaacgaggaagtgatgctgtagatttaatatgacagaattcttcagataattctagagaggaacgttgagaaggaagaca

SEQ ID NO: 45983 - DNA, 414 bp, Glycine max
  Clone ID: LIB3107-064-Q1-K1-E8
attgttagttactcgttgggttttttcaggccatttaccgtttagtgatttatatgaatcattaatatttctttcatggactttttccattttttatatggttccttgcttcaaaaaatctaaaaactactatttaaatacaataataacaccaagtgttatttttacccaaggctttgctacttcagggcttttaacgaaaatgcatgaatcgttaatattagtacctgctttacagtcccattggttaatgatgcacgtaagtatgatgatatagggttatgcaactcttttatgcggatcattattatcagtggctattttagtcattacatttcaagaactcatacaaattattggtaaaagcaagaatttctattttttaaatgaatcattttcttttgctgaaatcaa

SEQ ID NO: 45984 - DNA, 403 bp, Glycine max
  Clone ID: LIB3107-064-Q1-K1-F1
gaaataaaattcaagtatcgaagaagaagatggctttaggtgttcctgctcttccgttgacatacgtggctcacgttctggcagttgttgccagcgtcttggtcgtggtctgggtcgtcaatttcaggggtggcttggcttgggattctgataacaagtccctcatcttcaacattcatccagttcttattgttattggcttactagttcatgggggtgaagctattataagttacaaagcttttcccctaaagaaggaagtgaagaaattgatacaccttgttttccatgccatcgcattaatattgggaatagttggaatttatactgccttcaagtttcacaatgaaagtgggattgccaatctctacagcttgcattcatggcttggaattggggttat

SEQ ID NO: 45985 - DNA, 422 bp, Glycine max
  Clone ID: LIB3107-064-Q1-K1-F2
caagttgttatactggtcccaacccgagaattggcattgcagacttctcaagtgtgcaaagagcttggaaagcacttgaaaattcaagttatggttacaacaggtggtaccagcctgaaagatgatataatgcgcttatatcaaccagttcatttactagttggaactccaggaagaatattagatcttgccaagaaaggtgtttgtattctgaaagattgtgctatgcttgttatggatgaggccgataagcttctgtccccagagtttcaaccttctatagagcagctgattcattttcttcctacaactcgtcaaatcttgatgttttcagcaacatttcctgttactgtaaaggatttcaaggataggtatcttcgaaaaccttatgtcatcaaccttatggatgagctaactctgaa

SEQ ID NO: 45986 - DNA, 421 bp, Glycine max
  Clone ID: LIB3107-064-Q1-K1-F3
gaaagaaggcgattcgtattcggtgagctggtccgtttcctagacgaaatggggtaagaattgaaagcatgatgattgattgatgggagcagcgaaccatataatttaatttaatttgtgtccacatgagaacgtcgtgacctgcattttctatctcgcaacaccgcgataatggacatcagtggaaatgatgtgagtctgaatgattacagcgggaaggttctactgattgtgaatgtcgcctctcaatgtggtttgacacagacaaattacacagaattgaatgtattgtacgagaagtacaacaatcaaggatttgaaatcttggcatttccgtgcaaccagtttgctggacaggaaccaggaaacaatgaagaaattcacgaagtagtttgcacaaggttcaaggctgaatttccta

SEQ ID NO: 45987 - DNA, 420 bp, Glycine max
  unsure (1)..(420): unsure at all n locations
  Clone ID: LIB3107-064-Q1-K1-F4
gacacttactagtagtaagcatggagtcctcaaagatctatgcttacctcttcctctgcatgatctttctctcttccgccactcccattctcggttgtggctactgtggcaaaccccccaaaaagcacaagcctggtaaaacaccaaagacacccaaaacacccgttgttaagccaccagtcaccatccctcccattaatgttcctcccgttgttcttccaccaatagtgaagcccccaggtattctccctccaattccaattattaacccaccaaccacaccagggaagggagggaacactccatgcccaccaccaaagtctcctgcgcaggctacgtgccccattgacacgctcaaacttggtgcctgtgtggatcttcttggagggttggttcacattggttagngtgaccctgttg

SEQ ID NO: 45988 - DNA, 410 bp, Glycine max
  Clone ID: LIB3107-064-Q1-K1-F5
gagtgcatcatcgtcaacaaatggggaaaataaggggtctgtgaaactgttcaatcgcctctacatacgcgtgctcaagtgcggcaaacgtatggtttggtttgacccgagtgaagataacgaaatctccatggccaattttctttgtaacatcaccaagatggttaacattgggtatattgatacgaatcttactgatattcactcactatcacatgctcgtgggattattgacgcatacaggaatgttcccctctccaattatggtaaacgtaagggtacacgggaggcacagcttaccaccatgatactctggatgagaaggatgcgtgcgctcatacggttgcatcgaaagaacagggaatgaaaaaatatacgacatgcacatgtaccatgataagtgcatgaat

SEQ ID NO: 45989 - DNA, 411 bp, Glycine max
  Clone ID: LIB3107-064-Q1-K1-F6
ggggctcaagctttatttcacgtagcttacttgaccgtctgctcaattggaatagttttttgctatgttcgcatgcaagtgtgacgatccattaatgcccttatctgcttagaaagaaccggcgtcatccaaacatggtgaagaggtggcaactggatcaataatagctgaaacttatacttcacagtaatgggcttgcccatctgctcaagcttgtaatgtattctagaagatgcttaactccacttactgctattaaacgatcgatttcatgaaaggagggagggaatacttcatgcgcaccaccaaattctagtgcgcaggatacattctttattgacacgctcaaacttggtgcctgtgtgtatcttcttgaagggtttggttacattgtttttgggtgaccctttt

SEQ ID NO: 45990 - DNA, 276 bp, Glycine max
  Clone ID: LIB3107-064-Q1-K1-F7
agggggacagagagatagagatagggagagtgctggatcatagacgcgaaaacttcaatcacaacatcaacacttgaatcctgatattcagagtagggtctctctattcttaaatgatccaagggaaggtagtatgataacatgacttaacaccgagctcccatatcttgcctcatactcatctatagctatctcaacctatttgtctttgccagcgactctgtttgatgctaatccccaatgactgaaccttgcaaggtcattcacgatctaaat

SEQ ID NO: 45991 - DNA, 350 bp, Glycine max
  Clone ID: LIB3107-064-Q1-K1-F8
ggcaaaacttggaagacccaccgtggcatacatgatggaagtgacagtgactctgaatgagttgatttgcattcttggacaagaactgtctgtcctttgatgagatctacttcagcaaatattttcgttgattctctacaaaacttaaaggttgttacagatcctaattaaggcttatagagttacattatccataatgattcataggttcatatgatcaggctcacatcactattataggaactctgatagcacagaatctgagccatgggatactggctacagagctgtcaatgtgtccagcgtacttgagacccaatgtgttctactgcaacctgaaacgttccata

SEQ ID NO: 45992 - DNA, 411 bp, Glycine max
  Clone ID: LIB3107-064-Q1-K1-G1
gacagatggataagttttggtagcggtgtgatgagagaccaaaaaagcgcgagcaaatcttcacacttggaaccttaaattcaattaaggttctctctcttgtaaaatgctccaagggaagggagttttataacatgacctagtaacgattcaccacatcatgcgtgccactcctctttaactctctcatcctttttctctttccgtgtcaccctctttcaggttaatttgcaatgactgaaccttccaaggtcattcacgttcgaaatgtggggcacgaaatatctgaaaatgatttacttcagctgtttcagccttttggagtcataacaaagcttgtcatgctgcgtgcaaaaaatcaggctcttatcaaatgcaagatgttccttctgcagttaatgccttacaatt

SEQ ID NO: 45993 - DNA, 406 bp, Glycine max
  Clone ID: LIB3107-064-Q1-K1-G2
ctgccactctagaaccagggtttttttttaatcaattccaatgtatagttgtcatggagaaacttaatctcttcactcatggaacttagccatttttctttctccttactagctaagacaactttaagagtttttggatcttcctctaaaacttcactggcagctaccaaagcaaatgctattagatgagcatatccatacctttcaggttgttcgattgcccttctggttctatctcgagctagtatattgccagcttcttcttgatgtttttctatagatttctcttcatcaagaggccaattaacaacttgcgttatagcatgctagacctcagtctccaccttaaaatttaatttttcagagccagtttccttactctgatcagtgctagactgaaccatgc

SEQ ID NO: 45994 - DNA, 313 bp, Glycine max
  Clone ID: LIB3107-064-Q1-K1-G3
gactgggggatgaggcgatggcccgaggaacgggtgccaatattcgcattgccaacaaatttttgaatggagaagttgcacctaaaactatatatattccttctggggagaagttgtcagtctttgacgtggcagagaaatacaagagtgaacggcatgatatgattatcttggctggtgctgagtatgggagagtaagctctcgtgattgggctgcaaaggggcctatactactggacgtgaaagttgccataccaaacagttttgaaaggattcaccgaagtaatttggagagaatgggtataattccttt

SEQ ID NO: 45995 - DNA, 53 bp, Glycine max; identical to SEQ ID NO: 13458
  Clone ID: LIB3107-064-Q1-K1-G4

SEQ ID NO: 45996 - DNA, 219 bp, Glycine max
  Clone ID: LIB3107-064-Q1-K1-G5
gtactcgaataaccgaagtaagggtagagctagtacgtgcaacaaaccccgacttctggaagggatgcatttataacataaaaggacaacacaggctctgtctggtgctatgctgacacatgaagactctttagatcatgaggtctttgcgacgcagcacattatgcgagacagttgtcctaaaaactttcaatggtaggatagcggcctaccatgctg

SEQ ID NO: 45997 - DNA, 345 bp, Glycine max
  Clone ID: LIB3107-064-Q1-K1-G6
ggggctaaaagctaaaaatcatggaagtactgaaattagcatggctgttacggttgcattcttgaatttgatcattatgtttatagaactcactacttgcaagtcactgtgcttaaactactattcaaaaacacgccctgatagtgtaatgcattgctgccaatgcagtgaaggatgccactgctagggacataactgttccaattgctcttctgcggatgcacttccatgactgttttatttggagctgtgatgccgccgggctgttcaagtcgaaaggaagtagcatagtataaatagataggccaacaaacgattctttgcatgcattgcatgtcactgatg

SEQ ID NO: 45998 - DNA, 335 bp, Glycine max
  Clone ID: LIB3107-064-Q1-K1-G8
gggaagagtggagtaaggacgtgtgttagctggttaatgaggagtcctgatattcttcttcgtcttcatcggaaccctaaccccttcggaatcggaagaagaatcattaatggaaggagtgctgtccgcgaacgagcaacagagcatggtctcttccttcctcgaggtcgctcagggccagaccgtcgagactgcgcgccagttccttcaggccacaagttggaagcttgaggaggctcttcagctgtttctgataagaagtgaaagtggggcagtgccgattccggtgccgcctccgccggtgttgcacactccgcctttggaaaatgtcgatt

SEQ ID NO: 45999 - DNA, 346 bp, Glycine max
  Clone ID: LIB3107-064-Q1-K1-H1
gatcccaatcagaaaaagttagggtttgtaactgtgtcttttgcttgcgaatctgaatcgaataataatcaatcaatcatcatgtcgtcggcgaagaagatcacactgaagagttcggacggcgaggctttcgaggtggatgaggcggtggcgctggagtctcagacgataaagcacatgatcgaggacgactgcgccgacagcggcatccctctgccgaacgtgacgagcaagatcctggcgaaggtgatcgagtactgcaagaagcacgtcgaggccgcgaatcccgaagacaaaccctccgaggacgatctcaaagcctgggacgccgatttcgtcaaggtcg

SEQ ID NO: 46000 - DNA, 224 bp, Glycine max
  Clone ID: LIB3107-064-Q1-K1-H3
cacacgcgttcggagagaagacgacagatggggagatagagagtatcggtcgtcaccatgacttttaagcgcaggattggaggtcgcaacaaacacggtcgtggtcacgttaagtttattcgatgctccaactgcggcaaatgctgaactaaggacaaggctatcaagaggtctcaggtgaggaacattgttgaacaggctgcagtcatagatggctatgaggc

SEQ ID NO: 46001 - DNA, 397 bp, Glycine max
  Clone ID: LIB3107-064-Q1-K1-H4
ggcattatatttgagttcaaacaaatcaaagccatggccacctccaacttctctattgttctctccgtctccctagccttctttttggtgctacttaccaaggcacactcgaccgataccgtttctttcaccttcaacaagttcaacccagtccaaccaaacattatgctccaaaaagatgctagtatttcatcctctggggtgttacaactcaccaaagttggcagcaacggcgtgcccacctcgggatctctcggtcgtgccctttacgctgccccaatccagatttgggacagcgaaaccggcaaggtagccagctgggctacatcctttaaattcaacattttcgcacccaacaaatcaaactcagctgacgggcttgccttcttcttgcacc

SEQ ID NO: 46002 - DNA, 382 bp, Glycine max
  Clone ID: LIB3107-064-Q1-K1-H5
ggcagcgcttgatttgaggccaggcaagccccactcaaccaccacacctctcctcgttcacgctacccctttctgctcttcttctacctttcaagttttaaaagtataaagatggcagagacattcctatttacctcagagtcggtgaacgagggacaccctgacaagctctgcgaccaaatctccgatgctgtcctcgacgcttgcctcgagcaggacccagacagcaaagttgcctgcgaaacatgcaccaaaaccaacttggtcatggtcttcggagaaatcacgaccaaggccaacgttgactacgagaagatagtgcgtgacacctgcaggaacatcggctttgtcttaaatgatgtgggactggatgccgacaact

SEQ ID NO: 46003 - DNA, 406 bp, Glycine max
  Clone ID: LIB3107-064-Q1-K1-H6
gccttgtgcattcatgacttttggaggctacgctgaattcttaatgattccttcaaaacatgctcttccggtgcctagaccagatcctgaagttgttgccatgcttacatcgggattgactgcctcaattgctctagaaaaggcaggacagatggaatctggaaaagtggtccttgttactgctgcggcaggaggaacggggcaatttgctgttcagctagcaaaattagcaggaaatacagtggttgcaacttgtggaggtggggcaaaagccaagcttctgaaagatttgggagttaacagagtcataaactatcatagtgaagatgtaaaaactgttctaagggaagagttccccaaaggtattgacatcatctatgagtctgttggcggtgacatgttaaac

SEQ ID NO: 46004 - DNA, 411 bp, Glycine max
  Clone ID: LIB3107-065-Q1-K1-A1
ttagtggagtggagaatcaagaccatcttgagaagaaagtgaatggaggggttgatgcctctgtgaagggaaagatggcatcttcctgaaagagggtcttttttcaagctgttgtatggttctcttggcatagagtgtctgaaacaatggggatgctctctccttgaacttgagaacagtgaagaagagaagtctgtaacatatgagaatcacaaatagagctgctaagtcccaccacttggaatggtttaattcaatgcctaacatgtgtgtgatgacgtattctgcactcaattttgggtcaccaggtaacagaggatcaaactcaagcccaagcaagtcattcttgtaggaaccctgcaatgcattaattatatatatttcaaatcataaaatcaatataatgcatca

SEQ ID NO: 46005 - DNA, 440 bp, Glycine max
  unsure (1)..(440): unsure at all n locations
  Clone ID: LIB3107-065-Q1-K1-A10
ggtgatagataaatcaaaatggcttgagggggcttcgttatccatcttgctaaactttagtaccagagtttgcagactgagtggctcggtgagttagtgagcgaaaacgatagatagcattaccatgttggttggataactgaagtgagtgatgatttcaacttcaagcatggctttgctttctttactacccaaaacggcaccgcatgccctttccctcacaaacccttcctcttccactcccctcatcttacctttcagtttccaatgtttgcctcaccctcttccttctcctctctcttccctcaaagctacttttttccaacgggggcaacatttgggccggaaagcccctgtttcctcaggccnttgaagaagaagatgacgacgacgacaacaaatgggttgactgggaggacctgattttggaggacaccgtt

SEQ ID NO: 46006 - DNA, 441 bp, Glycine max
  Clone ID: LIB3107-065-Q1-K1-A11
tttaattctgaaaagtaaaggcgaaagactttaggtggggtattgggaattagggttgttcgcgtcacgaagatgatcgaggtggtgttgaacgatcgattggggaagaaggtgcgcgtgaagtgcaacgacgatgacaccatcggcgacctgaagaagctggtggcggctcatacgggcacaagagccgacaagatccgcatccagaagtggtacaccatatacaaggatcacatcactctcaaggattacgagatccacgacggcatgggtcttgaactctactacaactaaacacaaggtgtgttttatgcatgatatattactatgatctgggaatgggatgaggcgccaaatgtaattttgacttgcgaaagtccctatgattcgaataatgtacattcccgaatgatattgggtattacataccgatgacaccct

SEQ ID NO: 46007 - DNA, 429 bp, Glycine max
  unsure (1)..(429): unsure at all n locations
  Clone ID: LIB3107-065-Q1-K1-A12
gcacatgtgagtttgttgatcgagataactagggacggtgtgatgaaaatgaaggtccttgttttcttcgttgctacaattttggtagcatggcaatgccatgcgtacgatatgttccctctccgaatgaacactggctatggtgcccgtactccggaggtgaaatgcgcaagttggaggcttgctgtggaagcacacaacatctttggctttgagaccattcctgaagagtgcgttgaagcaacaaaggaatacatccatggcgaacaatatagatcagactccaaaacagttaaccaacaagcttacttttatgccagagacctcgaagtccatcccaaggacacatttgtgttcagtatagatggcaccgtactctctaatattccatactacnnanaaaaaaaaatatataaatttaattatgcg

SEQ ID NO: 46008 - DNA, 369 bp, Glycine max
  Clone ID: LIB3107-065-Q1-K1-A2
gatctctttttaagtttgttgtctctagtcgaacccatgccagtctcagctagtccagcgccactgttaggggatcgactgtgtgaaaatggatttgagtgtgttaaaattctccctgccaccaatgatgcacatggaggagtcattgtggacttaaaggagcctttgcactccgaagtttttgctactttgcttagatcttcacttttacattggaagcaacagggaaaagatggtgtttggatcaagtttcctattgagcttgttaatcttgttgaaactgcagttaaggagggtttttggtaccaccatgcagagccaaactatctaatgctagtttactggattcccaaaactgactgcacaata

SEQ ID NO: 46009 - DNA, 185 bp, Glycine max
  Clone ID: LIB3107-065-Q1-K1-A4
gaccgctgttacacgacgactgattgattcgggcccatgtcgacatcagatggttacacccgactgatgacgacatcaagtgtctgaaactggatgacgacatgaagagatacttcatgtcagcgcagactcactgctgagagtcagcatgtgcttaaaggagcctttgcactaccaaattcttg

SEQ ID NO: 46010 - DNA, 418 bp, Glycine max
  Clone ID: LIB3107-065-Q1-K1-A5
gctgacgtttattatctctcatctagctgaatgtcattggtttgacaggctttaaaggttgattcaacaaggatgctcattgctgaaggtggagtcaacaatcttgcttctttgcacaataattatgccaatggacccaatacctcatctgaaaaaggcatactagttaactatactccgactgcaaatcattctaactcagatctagagaagctccaaattctttcagattcaaaaaagatattatctcaaactgccctagctgctttgatacgaaagatgaatgaattggtaaaacttttcattgctttcttctaattacaagaatgattatactttatatctattctcagtagctatgcatgggcacactgaggacatacacttgatatactagaagaacatatatacatgttcc

SEQ ID NO: 46011 - DNA, 405 bp, Glycine max
  Clone ID: LIB3107-065-Q1-K1-A6
gatttattcggcgagtgtcatttccttcccttccctcacgatctgaggaagacaccaatcttctctccacgcccttcttgggtaaccgtctgaagtgcagcaatggcagatggattgcattcgcagcatccatcggtagttcagaagttatctggacagtcttatcttgtgtccaggcttgctcctaatcactccagaaactgttctaccactggtagctacttcaatggaggtttgcagtcttcaggtttggttccagtcacggcacacgcgccggctgagaaaggggtgtctggattttcgttggatttcctgatgggcggagtgtcagcggctgtgtccaagacagatgcggctgcaatcgaacgagttaagctgctcatccacaaccaggatgaaatgatc

SEQ ID NO: 46012 - DNA, 421 bp, Glycine max
  unsure (1)..(421): unsure at all n locations
  Clone ID: LIB3107-065-Q1-K1-A7
ggaggacttatggactatgcatttgagttcataatcaacaatggcggcattgattctgatgaggattacccataccgtggtgttgatggtagatgcgacacatataggaaaaatgctaaagtcgtttctattgatgactacgaagatgttcctgcctatgatgagttagccttgaaaaaggccgttgcaaatcagcccgtgagcgttgctattgaaggagggggcagggaatttcaattatatgtatctggtgtattcacggggagatgtggcacagcactagatcatggtgtcgtggctgttgggtatggaacagctaaaggtcatgattattggatcgtaaggaattcatggngttctagctggggagaggatggctacatcagattagaaagaaatcttgctaacggcagatcaggca

SEQ ID NO: 46013 - DNA, 292 bp, Glycine max
  Clone ID: LIB3107-065-Q1-K1-A8
gacggacttatggtctatgtgttagagtacatcataaagattcgggtgattgattatgatgaagagtacccgttccgagagactaatgatggatgctactcatatttgatagatgctaatgtatgctctatcgatgactaatataatgtcggtgcatttgattagataatcttgataaaggatgtagcatatctgacagtgatcgttgttatttttggaaggagaagggaattttaataatatatatctatcgcgttcacgactagatgtggatcattactatatcatgttg

SEQ ID NO: 46014 - DNA, 469 bp, Glycine max
  Clone ID: LIB3107-065-Q1-K1-A9
ggccgcttttttttttttttttttttttttttttttttattatttaatttttgcaattggatgaataaaattgggggttggggctgaaacctatgccttttcagctgcaccaatttatttcatttttagggtttggtgaactatatatattttcgtcaaaatgaatgaaagggacttttgacattcttttcaaatacgtgagaaagcttatctcagggttcctgttgaaccaaattctgacttatcaaggttgattccttgtggcgtcaccgtgacttatcttccatctctggaagtggcgtctctctccgtcaacatttctgtatcaaacgttctgccccgtaaggttcacgtcagaaggggatacagaaggggtgtggggagcaggagttatttagatgaaacttgagagagggaacaggtctgtgtattctgttaaatagagatattaaaagtaaggaggggtcat

SEQ ID NO: 46015 - DNA, 415 bp, Glycine max
  Clone ID: LIB3107-065-Q1-K1-B1
ggactctgcagcagcaactttaaacgccgaagaaagttcatccaatctccgaagcccttcaccgcattgcaaccatgtcgagaagaaaggttagagagccaaaggaagaaaacgtgactctgggcccagctgttagagatggcgaacatgtctttggcgtcgctcgcatctttgcctccttcaatgataccttcattcatgtcactgatctgtccgggagggaaacacttgtccgcatcacaggtggaatgaaggttaaggctgacagagatgaatcgtctccctatgctgctatgcttgctgcacaggacgttgctgccagatgcaaggaactgggcataactgctcttcacatcaagctccgtgcgacgggtggaaacaagacaaaaacacctggtcctggtgctcaatcagc

SEQ ID NO: 46016 - DNA, 373 bp, Glycine max
  Clone ID: LIB3107-065-Q1-K1-B10
gggtgcaacttatatatctggggggcaacttcacttaatgtcaattagttttaagctgaaatctaacatggtattagagcccatagcccatcttggttctcgcctattatagtaggcttgcatgttctgacagacatctgtggaggggggtgttaggaagtttcacattgtctgcctcaattctcagggtgcaacttatatatctattgtgtaactttacttaataccaattgattttaagttgaaatctaacagaaggaaggggtaggggggcaattaaagaagcaatgccaaggcatgcttgtgccttttgctggaagataagaaaaagaaattacagtgttagataatttaagaatcaaatgtaaaattt

SEQ ID NO: 46017 - DNA, 433 bp, Glycine max
  Clone ID: LIB3107-065-Q1-K1-B11
gacactaaaaaaaaaaagaaaaaaaagtcttaatttgtttcttgttttctctgtcgtttcgttcccttaatctttgatctctgagttacaagttataacaaaagaaataaacaacacatataaatatttgtaagaaaatatatatatgatcatgggttttcttcacaaactatgggacgaaacgttggcgggtccagcaccggaaacgggtctggggaagctccgaaagtacaactcgttctccggcggaagctccgtccggtcaacggtggcggagcatgttccgataagtcgcagcatcaccattgttcgcttccaatctggtttcggaaccaccaccaccacctctgctccttctgcgcctaccacccctcgcacccccttgactccggaggcaccaggcggtgatttcaagaagctcacgaggagaaaa

SEQ ID NO: 46018 - DNA, 315 bp, Glycine max
  Clone ID: LIB3107-065-Q1-K1-B12
ggcgattgttgagttgacgagtgaagaatgaatgagagagagtgtgtgtgtgtgtgattcacattctgatcttgaatcgaatgcatctacaacttcatggctgcggcgatgaggatcgatttatgtcttctcacttttgtcaccgtcagaatgattataggcgctctctctcaattggacataatacaaagatgggaaaactctaacggcaccgattctttgccatttaaaaaattgcttgaactcgaaactgatcgtcactttaaattgccaaaaggtgttcctttttggattattgacacggaagcagaattc

SEQ ID NO: 46019 - DNA, 426 bp, Glycine max
  Clone ID: LIB3107-065-Q1-K1-B2
ggactctgcagcagcaactttaaacgccgaagaaagttcatccaatctccgaagcccttcaccgcattgcaaccatgtcgagaagaaaggttagagagccaaaggaagaaaacgtgactctgggcccagctgttagagatggcgaacatgtctttggcgtcgctcgcatctttgcctccttcaatgataccttcattcatgtcactgatctgtccgggagggaaacacttgtccgcatcacaggtggaatgaaggttaaggctgacagagatgaatcgtctccctatgctgctatgcttgctgcacaggacgttgctgccagatgcaaggaactgggcataactgctcttgacatcaagctccgtgcgacgggtggaaacaagacaaaaacacctggtcctggtgctcaatcagctcttcgtgccc

SEQ ID NO: 46020 - DNA, 315 bp, Glycine max
  Clone ID: LIB3107-065-Q1-K1-B4
gaagtacaattcaagtatcgctgaagaagatggctttaggtgttcctgctctttcgttgacatacgtggctcacgttctggccgttgctgccaccgtcttggtcgtggactgggtcgccaatttcacgggtgtgcttgcttgggattctgatcacacagtgcctcatcttcagcattcatccacgtcttattgatattggcttactaggtcatggcggcgaagctattataaattacagagctttttccctacctaacgaagcgaagagattgacacaccttgtttgccatgccatcccattaatacttgggata

SEQ ID NO: 46021 - DNA, 345 bp, Glycine max
  unsure (1)..(345): unsure at all n locations
  Clone ID: LIB3107-065-Q1-K1-B5
gatcatctcatatttctcatcaagttactatctataattaattaaattcctcgtggaatattgaagaagccatgtctacagctgggcaggtcatcaagtgcagagctgcggtggcatgggaagcagggaagccactgtcaatagaaaccatagaagtggcaccaccccagaaaggtgaagtgcgtttgaggatcctcttcaactccctttgccgtagtgatgtttattggtgggatgctaaggaccagactcctctgtttcctcgtatcttaggccacgaagcttcagggattgtggagagcgtgngcgagggtgtgacacatctgataccaggtgaccatgcac

SEQ ID NO: 46022 - DNA, 337 bp, Glycine max
  Clone ID: LIB3107-065-Q1-K1-B6
cgccgaaggagaagacccttctgcttcccgatcccgccaagcctcctgccaaggcgcaagtggtgggatggccacccgtgaggtctttccggaagaacatgttcgcagcccaaaagagcagcggcggagaggaaagcgaaaagagcagccctaatgcaagctttgtcaaagttagcatggatggagcaccttacctccgcaaagttgacttgaagatgtacaagagttacccagagctctctgatgccttgggcaaaatgtttagctccttcaccattggaaattgtgaatcccaaggcttcaaggatttcatgaatgagagcaagttgatggatct

SEQ ID NO: 46023 - DNA, 236 bp, Glycine max
  Clone ID: LIB3107-065-Q1-K1-B7
acagaaggagaccaccaggttatgtcataaatcgtaacctcggacttagaaggggaagggcccagccttgatgtctatcgaaaacggtaggtctgtataccgaccaagctgaccgtgaagatcatacattcactctacaaacgtgcttgcttatgtctatcacaacactgatcgctgctgacattcctatggtgacatccatgggtggatgcggttctccgggcgtggactgctcc

SEQ ID NO: 46024 - DNA, 330 bp, Glycine max
  Clone ID: LIB3107-065-Q1-K1-B8
gacactcactctttgactcttcgtcgtctcaaatctcttcgttccttcgattcgttccatttcttccaaaatggccaaagacccagttcgcgttctcgtcactggagctgcagggcaaattgagtatgctcttgtccctatgattgctaggggagtgatgttggatcctgaccagcccgtgatcctccacatgcttgacattcctgcggcagcagagtcattgaatggggataaaacggacttggtggatgctgcattccctcttcttaaaggtgttgttgccacaactgatgtggtcgaggcatgcactgatgtcaatattgccgtgat

SEQ ID NO: 46025 - DNA, 439 bp, Glycine max
  Clone ID: LIB3107-065-Q1-K1-B9
atcaaagacacatgtcaaaaatggaacttcatgtaaaataaactatggaactggatcaatatctggtttcttcagtcaagataatgataaagttggcagtgctgttgtcaagcatcaggatttcattgaggctacccactaaggaagtcttacctttctgtcagcaaaggtcgatggaatactgggacttggatttcaggagatctcagcagaaaatgctgagcccgtatggttcaaaatggtggatcaaaaacttatcaatgagaaggtgctctctttttgactcaatggggatccgaatgccaaaaaacgtggtgaattagcatctggtggtgttgacccagagcacttcaaaggagaccacacttatgatccaattactgaaaaacgttactgacagattgaactgtgagattttctcactggatgcgattcaaca

SEQ ID NO: 46026 - DNA, 422 bp, Glycine max
  Clone ID: LIB3107-065-Q1-K1-C1
ggcagacagcaataatcaattcaattacattacatagctgcctgcaagcaccaacctccttctactctcttctcctctttttctctctcgcgcccaattcaccttcaccgattcactctctctctccccacctcctccctaatttccgtcaaatccttgatcggaacagacgatcggaagcgaacgccactccgtgccggagtcttctagaaggtggattggacttccataatttcaatgaatatttgttagcttcttcgaaaataacttgatggaagacaaggaagaaccaaaagagataaagatatctggtaatgaattagatactgatgaaataatacagagtggtgtaaaacaatttgttgagagtcctcatcacgaaaatgtaaattctagcagcagttttggggttgaacttatag

SEQ ID NO: 46027 - DNA, 446 bp, Glycine max
  Clone ID: LIB3107-065-Q1-K1-C10
taatcataatttataattgtcatttttatttggaggcgtggttttctggaaaaaaaattggtcacagagttggcagaactagaaaggaagctcaaaataaggctgctgaggattctatcaaacatttggcaggtaagatattctaaattttttcattgtgacttgctatagtattatctagtctacatttttttgccttttgtaatttttgtcccctccaaaaaatacatatggtagtttatatttttaaaaaaattcaaaacatcaaaagcatagcctgccttgttaaatcaacctattggcttgatattgaggtttagttaatgatgttttaagctcatgcatggtcctgccatcaataaaaactcagtgtataccttgttagagatctaaaaccatttttgggcattcttcttatagctttagctttctaagggagttgatct

SEQ ID NO: 46028 - DNA, 426 bp, Glycine max
  Clone ID: LIB3107-065-Q1-K1-C11
tattattcattattaaaaactaatgtaaatgttcaagtttgttcattattatttattaaagaaatcttcacctaagtttaagggattgtcggggcatggcgaatcggccccaaccttaaaaagatttatttacaatttttttaatgttgttaaaataaattatttagcttctactaggactggaaataagtcgagtcaagtcaagctttattaggcttgaattcggcttgagttgaatacgcaaggcttgagcttgactcattacctgacatagactttttttaaaggctcgactcggattacataaaagtctggcttggcctacgagcctatttaaaagtctacctaaagacgtctttaaccaattaattgttttaaaacctagtgaaatactaactaaaaaacgaaacttataaaatttcatat

SEQ ID NO: 46029 - DNA, 318 bp, Glycine max
  Clone ID: LIB3107-065-Q1-K1-C2
ggactgtcaagctgactgactcggctctggagtgtggctgcgtcactgattcaacttatcagaacattctattttctcaatcagctgaaagggactgcctctgcgaacacaccaacgtctgctacgccttctcctgttctaagccggcgaagtctatcaaagagattatcaaagtccaggagaactctgtccatgtgtagcttgccctaaacgcgcttctaattagctctatatctcaccgtatattagacatgcacacacactcctaaaagctcaggtgcgatatgatagatatcttagcatagcgatgctcattac

SEQ ID NO: 46030 - DNA, 411 bp, Glycine max
  unsure (1)..(411): unsure at all n locations
  Clone ID: LIB3107-065-Q1-K1-C3
gaaggatgcttcttcaattccctttccttttttcttagctttgaagaccaactcatttcaacttaacccatcanaaccatcgctctctattttcgtcctttctacctttctccgatcccaatccctaatctttctctcttcaaactctaattttttcatctggggagatcggctgacgaatcgagaggatctcatcgctcgcaagggattagggtttcaatcgatcgcatcacatatcacaatcatgtttagccggatgttcggtaaacctaaacaggaaaccaatgctgttgccactttggacaagctaaacgagacacttgaaatgctggagaaaaaggagaaagtgctccttataaaggtggcagcagaagttgaaaaggccaaagaattcacaaggtggaagaacaa

SEQ ID NO: 46031 - DNA, 419 bp, Glycine max
  Clone ID: LIB3107-065-Q1-K1-C5
gaagaaaagacacgttagcgagtctaaggaatgagaatggcgctatcttcatcttcatcaccaccgcttcttcccttcgatctccaacggcaccgtttagttagcctcaaaccctatactcgttctcgttcttctcagtctcagcacaccgtcaccgtcaccgtcaccgccgctaaagctaaagcttcttctgctactccgttagtttactccaccagacaagggtttgacaccgtcaacattgccgaagatgtcacccagttgattggaaatacgccaatggtgtacctcaataaagttacggaaggttgtgtggctaacattgctgcaaaacttgagtctatggaaccttgccgaagtgtcaaggacaggtaggttatacttttattcatcagaagaagattaatgctaacaatacc

SEQ ID NO: 46032 - DNA, 379 bp, Glycine max
  unsure (1)..(379): unsure at all n locations
  Clone ID: LIB3107-065-Q1-K1-C6
gggcacctttttggattccacgggggacactgtaaagaaaaaggaggaagaaacaccattgtatcacttaccgcatggacattgttccaaagacactcttttgtctatcacagaaatctacaccatttataccacacctcgctcgatgtgattatagtgattattacacgatatatactcttatcatgcgctatacgcagtacatatgagctgtgttttttgcccttgtgtgtgaataatatagctgtggaacactctgacttacacactgaggtgagacactatgttgtgctctgatatgtgagctctccactgagactgtgttatatgtaaatgagctctattattttgcgtctnccnaataaaaangacacaaaaa

SEQ ID NO: 46033 - DNA, 395 bp, Glycine max
  Clone ID: LIB3107-065-Q1-K1-C7
gcatggagaacatgaagatgaacaacgatgaaaggtttgcacaaaagggtgtcccagttcatagccaggttatgaagatcaagcaagagtcagagaaaattgttgattggtctcctggcaagccagagataagatctgttcttcgcgaaataagccggcaaatttcccgatcgccgttggggatctccggccaaccgatttcagttggtgagtcataggttcagtatatggttaagggtttttggattagtgtgttgatgtacacaggtggaagagggaggttctgtttgcttcccctgctcctgttctgttttcctctgttttttggtcagagaatatttaggcatttagctatattctccactttttttcttttttctttttgttggatataa

SEQ ID NO: 46034 - DNA, 266 bp, Glycine max
  Clone ID: LIB3107-065-Q1-K1-C8
cgaaggcctaagctaccaggagctcgctatctacagagtatccctctctttctctctctgtctgtgcaaaagctacgactctgtggtagactcctttagattaggcagtaagcttttatggggagtgtaaatggatgcttcgccgaggattagatcaacttgatcttacttgaaataatttagaaattttgacggactccgaaactaattctagagctctcccagaacaccatcagaatacgtgtgagattcagacccttgatgca

SEQ ID NO: 46035 - DNA, 413 bp, Glycine max
  unsure (1)..(413): unsure at all n locations
  Clone ID: LIB3107-065-Q1-K1-D1
ggtgttaagaaatttaagtgaggagctagagaatgatgatgaagtctgctatgtgtgcagtggtggttgtagcacttcttcttctggcggaggtggggcccatggctgaggctgtgacatgcaccccaacagagttgagtccgtgtcttccagcaatcacttccggtgctaaaccttccaatgcttgttgcacgaagctgaagcagcaaaaaccatgcttatgtggctacctcaaaaacgctagcttgaagcagtatgttaactctcctaatgcccgaaaaaccgttgcttcttgtgggattccctttccaacttgttaattaattaagccttcttataattaaagtgtgggatatatatatatatatatagataaacagtttaatttatacacactntgatcctacaaagca

SEQ ID NO: 46036 - DNA, 245 bp, Glycine max
  unsure (1)..(245): unsure at all n locations
  Clone ID: LIB3107-065-Q1-K1-D10
ggcaccgcttcatcactatcaccatcccaaaaacggcgtgtgcttctgttcgttntccaaatctcctctatgtttctgaatcttcccttcgctgttgcagagatggcttcgcggtgctggccttctgatgctgagctaaatgaattgagagagagagtttcgaaaatagtggatctgaataaagaagaagttcgagttgtggtatcttcctatcgaatatgtcccttgggggcacacattgatca

SEQ ID NO: 46037 - DNA, 347 bp, Glycine max
  Clone ID: LIB3107-065-Q1-K1-D11
atagaaacaaggattgaagcttgccttctcagggaaagaggaagtgaagaaacataagcaggactagtgaggcacacaaggaagaagaacatgcaaaagggtacaaaactgaaagaagaaagggtagccatttgtgagaaaaatggtttagaggagtagcatatgaaaggaaactaatacactatgagagtgaaatagcaatgacaacatttcatagaccttaaaaagttaaactgattatacactaacaggattgataaggtgatttctctaatgaagagtatagaaagctagcataacactaacagcatccaatgttctctttctttctcttcccttaacacttt

SEQ ID NO: 46038 - DNA, 373 bp, Glycine max
  Clone ID: LIB3107-065-Q1-K1-D12
gactcatggcaacaaaacctcgtttggcttatctggctggcatttttgttcttcttctagttgtcttcacttctgtgacggcacaatccccagggccagaatcttcatcactccacgacaccttccttcaatgcctcaccaaatacacaaaaaactcctcatctcaactctccaacatagtcttcgctaacaccaaccccaagttccccactgtcctccaaaactacatccgaaacgcgcgtttcaacacctcctccaccccaaagccttcactcatcgtcactccccagaaagaatcacacgtccaagccactgtaatctgcgccaaaagcgttaacattcaactcaaaatcagaagcggaggtcatgacta

SEQ ID NO: 46039 - DNA, 451 bp, Glycine max
  Clone ID: LIB3107-065-Q1-K1-D2
aagacgacagaagggtaagtactgatggctaggtagccagctaaaaatattggataatttatgtgagaaatcttagaattctgatgagtgtttctctagacacgctaattaacttggcggaagacttagctagcagcaccaagaaaagaaaaggagagggtttatgttgttttcacatatatatacatgcacatgcatatgcagtcactaattatgaaatgtaccgtgattttggtatactgaaattcctggaatgggaggggttgctagctccctgtaaagattggatagtagtataggattatacttgcagagatttaagttagcttaattaattataggattcataaaagttggggagggggtatatatataatgtatattggatattgtgtagccagttatgtagatggatttgaatgatttcttttgatttgatgctatatatatt

SEQ ID NO: 46040 - DNA, 418 bp, Glycine max
  Clone ID: LIB3107-065-Q1-K1-D3
ccaccggagggggagtagtaaaaaaaaaaccatttggaaggaagtcaagggttttttttgctttttttcgttggcttaccttttaacatgggtgaaaagagcaccgttggcggcgacacgattaacacgacactgcttcacgggaagtacgagctgggccggctgttaggccacggaaccttcgcgaaggtgtaccacgcgcgccacctgaagacgggaaagagcgtggcgatgaaggtggtgggcaaagagaaggtggtgaaggtaggcatgatggatcagatcaagagagagatctcagtcatgaacatggtgaagcacccaaacatcgtgcagcttcacgaggtcatggcgagcaagtcccagatctacatcgccatggagctcgtccgcggcggcgagctcttttcacagatcg

SEQ ID NO: 46041 - DNA, 155 bp, Glycine max
  Clone ID: LIB3107-065-Q1-K1-D4
accacgcctcacgacagatgagagaagcgacggaaggcgtgtttatgtatgaaatactggtagctgggaaacagcgaatggctctgtttgtttctcttagctcgcttgatggcttgtctacaaaaataaccgtggccactatacagataacacga

SEQ ID NO: 46042 - DNA, 389 bp, Glycine max
  Clone ID: LIB3107-065-Q1-K1-D5
gataacatacaagaaaactatcataagtgaccaaaaaagacaacctttggggaatcataaaattcttcagaatggctcgcacaattacaattgcagcaatgtgtcttcttctctcattagtgtccctctgtgtcaccaccaacgcattaatgccatacacacgtagcaccctctgggacatgatgctccaatccgaggacccatttggaatcttggaacagaacccattcaacaacatacccaacatcagaggaggagccgagactctcgccctggcacgtgcggattggaaggaaacccccagcgcgcacgtgatagtgctggacctacccgggatgaaaaagaaggacgtgaagatcgaggtggaggagagtcgcgtgttacgtatc

SEQ ID NO: 46043 - DNA, 416 bp, Glycine max
  Clone ID: LIB3107-065-Q1-K1-D6
attgatattgctgttaaagcagcacgtcaggcatttgactcgggtccatggcctcgcttgccaggctctgaaagggcaaaaattatgatgaaatgggcatacctagttgatgaaaatatagaagaactagcagcattagataccattgatgctggaaagctatactatattaataaggtagcggaaattccttcagctacaaatgcgttacggtactatgcaggtgctgctgataaaattcacggtgacgtattaaaaatgaacggggatttccatgcttatacacttttggaaccaattggtgttgtgggacacataattccatggaatgcccccagcctctcatttttcatcaaggttagcccttccttagctgcaggctgtactatggtcctcaaacctgctgaacaaacacc

SEQ ID NO: 46044 - DNA, 420 bp, Glycine max
  Clone ID: LIB3107-065-Q1-K1-D9
gggggtggtggaaagaaaggcgctaaaagcagggggcggagaattggtgagtaagatagccgctacagaagagaaacaagaagcaaatggcttctttccatctcagaagattagtaagcagcgttcttaactcgcgggtgcaaacaaatccccttttgaccttcaggtgcttctgttctcctcctgttacacctttcacttcccatgctagttacgaccctaactccatccacttgtccaaccaagaaagcaaaagacgcttgttcaacaggctattatacagaagcaagcagcgagggttcctcgaactcgatttggttctcggaaaatggggtaaaggacattattaactccttggatgaatatcgcgttcgagctctcattcttctcctcgacttggagaatccagatttatggaag

SEQ ID NO: 46045 - DNA, 411 bp, Glycine max
  Clone ID: LIB3107-065-Q1-K1-E1
gatacccataattcgcacgcacgcacgcacgcacttgttctgactcagtgcttgtgttggacgcagaagaaccagaaaagaaaaacaagcacgaggagatgattaacttcgaagaaaccgagttgcgactcggcctccctggcgggtctgcgagtgatcacaacgagtcaacaacggtcaagggcagtggtggaaagagaggcttctctgaaactgcttctgttgatttgaagcttaatctttcttccagtgatgactctgcctcagattcaccttcatctgcgtctacagagaagactaccactgctgcacctcctcctccttctcgagccaacgaccctgcaaaaccacctgcaaaggcacaagtggtgggttggccaccagttaggtcatttagaaagaacatagttc

SEQ ID NO: 46046 - DNA, 436 bp, Glycine max
  Clone ID: LIB3107-065-Q1-K1-E10
gaatactatattacttatagttaatagaaaagatgatgattttaaattgcagtaaaaatattgagtctcattttctatgtataagaattaagtgaaaaaaatgaattaaattataggtagaagttgttgtttttcccaaggttggttgattagtcatcctgtcttgaagcgggcgtaaaagaccaaccctttttaaattaaattttcaatatcatttgtatgaattagcatatatatattaacataaataacataaataagggattaataaaaaatgaatggatgattagaaacaccaaaatacacaaaggattagtaacgtatatttttaaaaatatccaaaagaacatttatatttatgtataatagaaaaagaatactaattggggctttcccgtggtagaaaaaataaggcagtactccccagaattccgat

SEQ ID NO: 46047 - DNA, 431 bp, Glycine max
  Clone ID: LIB3107-065-Q1-K1-E11
ctatgtgtccaaataattttcctggacagttgcgacgtagtggtattatgggaccaaacataccaatgcgaccttttggtcctcacagtggtgttgaatctgttatttctggccctgagtttaatgagattaatgcgctccacaaatttcaggatggtagctccaagagtagcatgggtccaaactggaaaaggccatctcctcctgcaccagggatgctttcttctcctgcaccgggtgctaggcttcctacaagatcaacctcgggtgcatgggatgtgcttgacataaaccatattccaagagattctaaacgttcaaggatagatggacccttgcctgttgatgaaggcccatttcctttgaggaatatagatgatcggtggttagctctagagcagacatatgggattgacccagctattgatgga

SEQ ID NO: 46048 - DNA, 432 bp, Glycine max
  Clone ID: LIB3107-065-Q1-K1-E12
gacaacacaacttgctttcacggatgtgggcgtgctctctcaatgtctaatatttgcttcttctctctccctctttcaaattctcacaaaaacatggtggctttggtttctcaagaaaacgttgttgcattggcttctcgtacgggtacggagttgcaacgctatagaaagggtcgccgccaagtcgtgggatgcataccatacagatataaaattggtgatcaaactcccttggacgcacaagaagaatcagaagtgctggttatcacttctcacaaaggcacagggatgctatttcctaagggacggtgtgaattgcacgaatccaaaaaggaggcagctatgcgagaaaccatagaggaagcaggggtgcgaggcactgttgatggtaaatagagcaagtggagtttcaagagcaagacacatgataca

SEQ ID NO: 46049 - DNA, 387 bp, Glycine max
  Clone ID: LIB3107-065-Q1-K1-E2
atagaaattctagtgattatagactatctttatataataatataaataagaataaaaaaataaaaaaaaaaaaagaatctatataaatataaaaataatatatataaggtacaaatagtaaatcgaggtacccattttatgataaactttccttccatttttgttcctctagtaggcctagtatttccggtaattgcaatggcttctttatttcttcatgttcaaaaaaacaagattttttagatacagaaaacaaagtaaaattctggggttttttattccccaattataatactaaattcaaaaaaaggagagtaatgagtataatctttcgctcagacgatgtactgatatattctatggcggagggtcgaagaacaaagcaat

SEQ ID NO: 46050 - DNA, 412 bp, Glycine max
  Clone ID: LIB3107-065-Q1-K1-E3
agtacctgctcgatgattaattatgtatatgatgcacatgttagaggggcagaatgatgttatagagcatacagatgcatgataagtaattaaagtttgttgtgatgattaattggtagttgtaattagttattcctggtagcactctttggtagtgttggatgtttgtataaatgccatacatagatttgttgcactgaatcaataattgatttcattcggtctttctgttctctcagttttcttttatagtattagagctctcaattcagagctcagccagggtttgttttccatggtgagaaaccacaattcttcttcctgtcatttgcataaccaaaatcagaatggttcaaaatggatctgttcttaatcctttgcaaaaagaagttcctttggaaagtggcatcaa

SEQ ID NO: 46051 - DNA, 341 bp, Glycine max
  Clone ID: LIB3107-065-Q1-K1-E4
ggactcgttgtgaatcaacataaatattccgttttgcgtttctctgcctaaaaggattgaaagatgggtcacgcactaggttgctatcaagttgatcagtcaaatgtggctaccaaggagcattttggaaaatttgatgatgtcctataacctggatgtcattgcctgccttggtgtcttgcgtaccagattgctggtagattgacactgcgtgtgcttcaacttgatggtcgatgtgagacgaatacctaggacaatgtctctgtcactgtagctgcatctgtgcaataccgagctgtgtctgagaaagcatctgatgcattctatatgcttaccaacac

SEQ ID NO: 46052 - DNA, 376 bp, Glycine max
  Clone ID: LIB3107-065-Q1-K1-E5
atgattactgggacatcccaagctgactgtgctgttcttatcattgattcgaccactggtggttttgaagctggtatttccaaggatggacagactcgtgaacatgctctgctttcattcacccttggtgtgaaacagatgatttgctgctgtaacaaaatggatgctactacacccaagtattccaaggccaggtatgatgaaattgtgaaggaagtctcttcctactcgaagaaagtaggatacaaccctgacaagattccttttgttcctatctctggatatgagggagacaacatgattgagaggtccacaaaccttgactggtacaagggtacaactctgcttgatgcacttgaccagattagtgagccca

SEQ ID NO: 46053 - DNA, 402 bp, Glycine max
  Clone ID: LIB3107-065-Q1-K1-E6
ggtaccaaagctgaatagccgttcgtattgtcgcagagaaagaaaaccctagctcaccgtttcaagatgcaaatcttcgttaagaccctcactggtaagaccatcactctcgaagtcgagagttcagataccatagacaatgtaaaggccaaaattcaagacaaggaagggatcccaccagatcagcaacggctcatttttgctggcaagcagcttgaggatggacgtacccttgctgattataacatccaaaaggagtccactctccacttggttcttcgtctccgtggtgggatgcaaatctttgttaagaccttgacgggaaagacaatcacccttgaggtcgagagctccgacaccattgacaacgttaaggctaagattcaggacaaagagggtatc

SEQ ID NO: 46054 - DNA, 324 bp, Glycine max
  Clone ID: LIB3107-065-Q1-K1-E8
gttactagggtttgattgatgggtgacgcagggggttcttacaggaccaatgggagcgccctcctctagaggtaactacccatgaccacccaaagcctaataccattccccaactctctttattttctgaaaggctgacgacctgatcttattacttgccttgcctccttccatgccaaacttataatcccataacgagaagtggactttgaatgcccagatgattttttcattgttaacaaggctaaagaataaggcattgaactttcctactcgtgcaaggatggttctttcgattcatgtgctgggaaaatttataaacgt

SEQ ID NO: 46055 - DNA, 445 bp, Glycine max
  unsure (1)..(445): unsure at all n locations
  Clone ID: LIB3107-065-Q1-K1-E9
ggattcatcaatattttcttctcatcgcttaatttggaagtgttttccttcattaatttctcatccaaatatatattcacttcattctcttcttggctaccttggcagtttaacttcacgtggctttgcatgatgcagattccaccaagaatggccacttcattttctgccaactctcccaatattgcagcaaacaaggtactactatatcaattaattaataagagaataatattcataaataatttctaccatcatgcacgttacctgtcttactcttgcaaagagtaatatacctttcaaacattttagaaaggtaaattgaacagcgttcttttaatatttaacacatctaaatttacaaggngtctaacgtgtcaaataattaatcataactactatacttatcctccatctttttccttcaaaatttgaataaacatgg

SEQ ID NO: 46056 - DNA, 414 bp, Glycine max
  unsure (1)..(414): unsure at all n locations
  Clone ID: LIB3107-065-Q1-K1-F1
gacactaaaaaaaaaaagaaaaaaaagtcttaatttgtttcttgttttctctgtcgtttcgttcccttaatctttgatctctgagttacaagttataacaaaagaaataaacaacacatataaatatttgtaagaaaatatatatatgatcatgggttttcttcacaaactatgggacgaaacgttggcgggtccagcaccggaaacgggtctggggaagctccgaaagtacaactcgttctccggcggaagctccgtccggtcaacggtggcggagcatgttccgataagtcgcagcatcaccattgttcgctcccaatctggtttcggaaccaccaccaccacctctgctccttctgcgcctaccacccctcgcacccncttgactccggaggcaccaggcggtgatttcaa

SEQ ID NO: 46057 - DNA, 403 bp, Glycine max
  unsure (1)..(403): unsure at all n locations
  Clone ID: LIB3107-065-Q1-K1-F10
cattatcattttactcatatttttgtttgaaaacatattatttggcttgaaagatttgtaaattcaaggaaccaataacgtatatatttatatatggatttcatatgcatatttgtgaaatgttttattaaattaatctatagaccaatatatgaaatgtggtacttttgatagtgaccaaaattcaaattactatgagcttcatgtgtgtgtgtgcgtgtgtgtgttgtcatctttatatttataagtacattcagtgagttatcagttctttttgtttatcatggacatacctaattatatattaaaaggactatgaaattgctttaaagttatctattgtccatgattgatttcatatagctaaatataatagctcntacatgtatcaaggtcacaatac

SEQ ID NO: 46058 - DNA, 219 bp, Glycine max
  Clone ID: LIB3107-065-Q1-K1-F12
gccacaagaccacacaaggtgctccttttcattccaagacatagcaaacgaaccaatgtgtttgttcatttacatcatcaaaatgagtcctaacaacgatggtagcggcacctgtagctctaggtttttgaaagtgactagtgcagcttcctctacagccgccttttccgacggtttatatgccattctttcatcctcaacctctgctagctctgacat

SEQ ID NO: 46059 - DNA, 425 bp, Glycine max
  Clone ID: LIB3107-065-Q1-K1-F2
gatagcgtttttcattgtgcattattcaatggccaccacagcagctctatccggaaccatggtgagcacctccttcatgaggaagcaacctatgacgaccaagagcctaaagacattccccaacgctctttttggtctgaaaggtggacgaggtggtcgtgtaacttgcatggcctcgtacaaggtgaagctcataaccccagaaggagaagtggagtttgaatgcccagatgatgttttcattgttgacaaggctgaggaagaaggcattgaacttccctactcgtgcagggctggttcttgcgtttcatgtgttgggaaaattgtgaaaggtgacgtggaccagtcagatggtagcttccttgatgatgaacaaatagaaagtggatgggttctcacctgtgttgctctacctaggtcagacg

SEQ ID NO: 46060 - DNA, 411 bp, Glycine max
  Clone ID: LIB3107-065-Q1-K1-F3
ggcacaggtgcaagttgagattttgattgttgttgggctcccaaattcccaaaacagtgatgatcttaagtaaaagaaatgtttttggcaccaagggaaaaatgggtatagatttcatgattttggtgttaacattgtcatggttttgtctgactactatatgcgtctcagctacaaaacaagcatacccaccaacaccacaaccgaaccagaacctaaggtttgaccaaaatggagaattcaagatattgcaggtggcagatatgcactatgcacatggcaagaccacgcattgcttgaatgtgctcccttcccagaatttttcttgctctgacctcaacaccactatctttcttaacagaatgatcaaagcggagaaacccaatcttattgtcttcactggagataata

SEQ ID NO: 46061 - DNA, 333 bp, Glycine max
  Clone ID: LIB3107-065-Q1-K1-F4
attgatattgctgttagagcatcacttcaggccttagactcgagtccatggcctagcttgccaggctctgaaagggcagaaaatatgatgaaatgggcatacctagttaaggaaaatatagaagaactggcagcgtttgataccattgatgctggaaagctatactctattaatgcggtagcggaaataccttaatctacaaatgcgttacggttctatgcaagtgctgcttttaaaattcaccgtgacgtattaaaaatgaacggggatttccatgcttatacactcttggaaccaataggtgttgtgggacacataagttcatggaaagcc

SEQ ID NO: 46062 - DNA, 387 bp, Glycine max
  Clone ID: LIB3107-065-Q1-K1-F6
gatattgaagcttatgtataacattttgatttgattctctgtagtctttccaattcacgaaatgctaatatgttatgtatcagtgagatgacagaatgagcttgagtgcccgagaatattcgattcaattcaaataaaatttgttcacccacagcaaatggttaactaacatattttgtggtaatttttctcttctaataaaggtattttttcgaaaatgaacaaaacaatatataatctaaagattaatttttcatttaaaatctactaatgcttaatatttttttcttctattttctttgaatattagcaatgtttttaaaaatagaagtatactaagaagacaaacatgttcaactatacttaagagacaaacaaattataaaa

SEQ ID NO: 46063 - DNA, 312 bp, Glycine max
  Clone ID: LIB3107-065-Q1-K1-F7
ggttctagcgtctgtgattgctgagactcgttcttcttcgtcgatatcttcttcttttgctgctggtgagatagttttttctctcacctgaaaatgtcttgctgcagtggtaactgtggttgcagaagcgcctgcaagtgcggcaacggctgaggaggctgcaagatgtccccagacttgagctacaccgagtcaaccaccaccgagaccttggtcatgggacaggcaccagttaaagctcaattcgagagtgctaacaagggtgtacccagtgagaacgatggctgcaaatgtggagctaactgcacctgc

SEQ ID NO: 46064 - DNA, 402 bp, Glycine max
  unsure (1)..(402): unsure at all n locations
  Clone ID: LIB3107-065-Q1-K1-F8
gtttgcatatatatatatatccagcataagatgtttgaaattgttttatctatgaatactattggtaggcccattaatgcataaaaattaacgatggagagaaaattcgtttcaaacctaaatatatgcataaagacccaaaattaataataaaagaatataatgaaaaatcattatcttttcgttaatcattcaacacttatctttcttgagtgagcaatgagtaagatgcatgttttctgtctctagtgaagggatcttgtagggacattcaactcttatcttttttttagttgcatcgatcatgatcttctcatanatactcatcttagggacattcaacttcgtgaaaaatagctaaagcgaagagaacaccatgtgattaaattcttgcattttgtt

SEQ ID NO: 46065 - DNA, 396 bp, Glycine max
  unsure (1)..(396): unsure at all n locations
  Clone ID: LIB3107-065-Q1-K1-F9
gatagagatgtgtggggctatatatctttgggttactttaagcagaccactaaggctggggagattgggtcatcaactatgcctcacaaagtgaatcctattgattttgagaacagcgaaggtaatctaggtgtagctaatggaggtctgtctcatctaagcatgaagttgccgatttcacgttggcagagggacttgactgattcaactgtcttaaggaacatgggtataggtataggtcattctcttcttgcctacaaaagcacacttcaaggaatagggaagcttcaggttaatgaagctcgcttgagtgaagacttgaaccagtgctgngaggtgctngctgaaccaattcagactggtatgcgaagaaatggtgttcctgagccttatgag

SEQ ID NO: 46066 - DNA, 422 bp, Glycine max
  Clone ID: LIB3107-065-Q1-K1-G1
gtgtgtcaaacgaaaagttatttggttgtttaagattacctggtgtctatgttcttgactaatcttttacatacatgttcaaaatttaccattaacgaaaaaaaattaatactatgttgtgcagaaattaatcttgatcataatagtactgaatcatataataatttctcgtgtgttttttatatttctctttattacaataccaatttttttttgcatgcagtgacaagcaaataaattggaaaaaaaacaaacgaatgaattaagaaactagctatgatggacatagaaaagcagaaagggtaaaggtgttggaaatggaattgcaagactgtgtgacatgaaggggaaaagagttgaacttttactgcagtaatgggaaattcatactgaaacaggtatgcttctagaatgaagaaatg

SEQ ID NO: 46067 - DNA, 402 bp, Glycine max
  Clone ID: LIB3107-065-Q1-K1-G10
gatagaaagtgcttttgctctcatggtggccttcctcataaacatctgcgttatttctgtaagtggcactgtttgcaattcttcaaatttgaatgctgaagatcaactgagctgtcaggatttggatctgaacaaagcctccttcctactcagaaatgtcttggggaaatggagctcaaaactatttggaattgctttgcttgcatcgggtcaaagttctactattacaggaacctacgcaggacagtatgtcatgcagggatttctggatttacgactggagccatggattcggaatatgttaactcgttgcttagccatagttcctagtttgattgttgcagtcattggtggctctgctggggctgggaagctcataataattgcatctatgatcttatc

SEQ ID NO: 46068 - DNA, 446 bp, Glycine max
  unsure (1)..(446): unsure at all n locations
  Clone ID: LIB3107-065-Q1-K1-G11
gacccttttgctttctttatccaataataataaccccgtttttccctctccatacccttttgcttttctttatccaataataagaacttcccacgagtggctttaactggtctggtctggtctggtcggacacacaaaaatattagtatggagaaggtgagttttgtgaagaatggagagcttagattgcctccggggtttcgtttccacccgactgatgaggagccggttttgcagtacttgaagcgcaaggtcttctcctgccctctgccagcctctatcattcctgaggttgatgtttgcaagtctgatccttgngatttgccaggtgatttggagcaagagagatacttctttagcaccaaagaggccaaatatcccaacggaaatcgctctaacagagccacanattcgggttattggaaggcaactggcttggacaaaca

SEQ ID NO: 46069 - DNA, 381 bp, Glycine max
  Clone ID: LIB3107-065-Q1-K1-G12
gattgttcgagatcttgacttgttttcctattgcgagtcctgcttgcttccattcccggtcaagtgtcatgtgggttatgtcccctctggtgaaagagttgttggttaagcaagctctctcgtgttgctgatgtatttgcaaagcgacttcaagagcctcagcgtctggcagatgaggtgtgttctgctttacatcagggaataaggccagcaggtgttgctatcatacttcaatgttcacatatccactttccagacatagaatcagtctttcttgactcaaattatcaagggtgggtgaagatacttgtttcttcaggttctggggtttttgagaacaaaaatgcagatgtatgggctgatttctttggtcttcttaaa

SEQ ID NO: 46070 - DNA, 147 bp, Glycine max
  Clone ID: LIB3107-065-Q1-K1-G5
cacataattgcaagaatacaaggttacttcttttgtatctaatgttgaaaaccattttttgctggaaggctctttaatttgtagcacttttggagtccaaagttccgaacacacggctgtctgaataacgattttgaattttttgcc

SEQ ID NO: 46071 - DNA, 421 bp, Glycine max
  Clone ID: LIB3107-065-Q1-K1-G6
tactgattcaggatctcaggaaatgcaacccaatgtgatgaacaccaatatatgttccaatcatgaagaatgtgaaggacgttcttcacagataaagctgactaagggtttcacagcaaaggagtccgtgaaggggcacatggtgaatgttgtaaaaggattaaagttgtatgaggatgttttctctgaatcagaaatctgcaagctgactgattttgtgaatgagattcatgctgctggccagaacggggagctctcaggtgaaacttttatactattcaacaaacagatgaagggaaacaagagagagctgattcagttgggtgttccgatatttggacagataaaggacgataccaaaaacaacatagagccgattccagcacttcttcatgatgtcattgatcaccttattcaatgg

SEQ ID NO: 46072 - DNA, 404 bp, Glycine max
  Clone ID: LIB3107-065-Q1-K1-G7
ggaaaagaagtacttcttcaagcattcaactgggagtccaacaaatacaactggtggaataatttagaaggcaaagtttctgacatagctaaagcaggatttacttcagtctggttgccaccaccaacccactccttctcacctgaaggttatactccgcagaacctttactctcttaatagtaaatatggttctgagcgtcagttaaaagctttacttcaaaagatgaagcaatacaaagtaagagcaatggctgacatagttattaatcatcgtactggcaccacccaaggacgcggagggatgtataatcgttttgatggaattccattaagttgggatgaacgtgctgtgacatcagattctggaggactgggtaatcgaagcacaggagccatttttca

SEQ ID NO: 46073 - DNA, 369 bp, Glycine max
  Clone ID: LIB3107-065-Q1-K1-G9
ggcaccgcttgagcagacgtaacaacagcacaaagcgggttactgtctgttcaagctaccatctctctctctctttcttagtgcctccttgccagaagttaaaatggcccaagaaactttcctattcacatctgaatcagtgaacgaggggcaccctgacaagctctgtgaccagatctccgatgctgtgctcgatgcatgcttggagcaggaccctgacagcaaggttgcctgtgaaacctgcaccaagaccaacatggtgatggttttcggagagatcacaaccaaggccaacgtggactatgagaagatgtgcgtgacacatgcaagaaccattggtttgtctctgatgatgttgtcttgatgctg

SEQ ID NO: 46074 - DNA, 376 bp, Glycine max
  Clone ID: LIB3107-065-Q1-K1-H1
ggattccaataatagaaggagcatgtccatcaccaccttccctctcctcctcctcctctcgccggcgatcaccgccaccccgacggcgtacgagatgctggagagctttcactttccggcgggtattctccccaagggagtgaccggttacgagctggatccgtccagcggcaaattcagcgccgatctgaacggttcgtgcagtttctccctcgaaggttcgtaccagttgagctaccagaaaaccatcaccggctacgtatccgaaggcaggctcaccgaactccgcgggattagcgtgaagatcctcttcttctggctcaacattctcgacgtcgttcgcgtcggcgaagacctcgatttctcccgtcgcgtc

SEQ ID NO: 46075 - DNA, 309 bp, Glycine max
  unsure (1)..(309): unsure at all n locations
  Clone ID: LIB3107-065-Q1-K1-H12
atcaaagaagaagtggtgcagaaggtattgaaaaccaacgtgtctgccctggtggagcttaacatgctcaaaaaccttgctggttctgctgtcgccggtgctcttggtggatttaatgcccatgctagtaacattgtttctgccatctttatagccactggccaagatccagctcaaaatgttgagagttcccattgcttaaccatgatggaagccgtcaatgacgggagggaccttcacatctcagtgaccatgccttccattgaggtgggtactgttggnggtgggactcaacttgcatcccaatct

SEQ ID NO: 46076 - DNA, 399 bp, Glycine max
  Clone ID: LIB3107-065-Q1-K1-H2
gggtgcaactcatatatctggggggcagcttcacttaatgtcgattaggtgtaagctgacatctaacatggaattagagcccatagcccatcttggttctcgcctattatagtaggctagcatgttctgacagacatctgaggaggggggtggtaggaagtttcacattgactgcctcaattctcagggtgcaacttatatatctattgtgtaactgtacttaataccaactgattctaagttgaaatctaacagaaggaaggggtaggggggcaattaaagaagcaatgccaaagcatgcttgtgccttttgctggacgattagaaagagaaatatacgctgttagataatatatgaatcaaatgcacaaatatagaatatacttagcatattacata

SEQ ID NO: 46077 - DNA, 380 bp, Glycine max
  Clone ID: LIB3107-065-Q1-K1-H3
ggtggcagagagcgaacccaaaactagagctaccttcccttcaaaccttccactcttctctccttttccaatcaagggaataatatttcttagagatattccgaaaccatggctcacgccaatcctatgatttttgttgttggaattctaggtaaccttgtctccttctgttgctttctagcaccagtaccaacattctatcgagtttgtaagaagaaaaccacggaaggtttccaatcacttccttacgtggctgcactcttcacttcaatgctttggatattttatgcttacataaagacgggcgaaatacttctcatcaccattaacgcattcggttgtttcatagagacaagttaccttgtcatctatatcactta

SEQ ID NO: 46078 - DNA, 428 bp, Glycine max
  Clone ID: LIB3107-065-Q1-K1-H4
gaccaaaatactcctcttggcatcttgtgttgtgtccctcttttaagctatttccttctcttaacacaattggttgtgccaattgccatagtcaccaaccaattaacaaaggtatatatatcatcatatcatcaccaaatgaaaaatattgggttgctttttcttgtggggggggctacttttgtggtggcagccacagctggtagcttttaccaagactttgaaataacgtggggtggtgagcgtgccaaaatctatgagaatggaaaccttctcacactctcccttgacagagcctctggctctggctttcgttccaaaaaagagtacttgttcggaaaaattgacatgcagctcaagcttgtgccttgtaactctgcttgaacagtaactgcctattatttatcttctatggggcctactcatga

SEQ ID NO: 46079 - DNA, 405 bp, Glycine max
  Clone ID: LIB3107-065-Q1-K1-H5
gatagcagcatcatacaaagcatagaattcaaaaactaagctcatttcttgtgcttcgctttattcctcaaaaccaaacatgtcgaacacatgccgcacctgtgactgcgctgacaagactaactgcaccaagggaaacagctatggtggtatagtagagactgagaatagctacatctagactgttgacatggatgttccaacagctgagcatgatgggaagtgcaagtgtggtactaactgcacttgcacagactgcacttgtggtcattaaagaatatgtatgaaaatgtctttgccatgtgtttggcaatacaaatctccaaataatgtaatctctctatgaataaatgtgtgctgatatcctacttcagggtctgtgtagtcatgcagtctgaatcatgt

SEQ ID NO: 46080 - DNA, 292 bp, Glycine max
  Clone ID: LIB3107-065-Q1-K1-H6
tcgcggacgcgtgggctgggataagacaacagaacggagggcaccgcactggaataatgagaatggatgctaggcttatgcaatatttgttgcaaatttgcccatgaatgcaacataggcacagctggaacgtgcttacaagaaatttgggcccattaaacaagatggtattcaagttagaagttatatgcaacagcactcttgttttggctctgtgcaatgagaatcttcttcttcaatgcagagcgcaattgaggcctcacctgccgttaccttaaatggacggatactt

SEQ ID NO: 46081 - DNA, 128 bp, Glycine max
  Clone ID: LIB3107-065-Q1-K1-H7
tggcactcaggaccttgactgcgtgaggactagctggcatgaggagattcacggcctctcttcagagaacggctagtctcaagcgcgaatcggatacctacaggaggtctctgaccacaatgttgggc

SEQ ID NO: 46082 - DNA, 70 bp, Glycine max
  Clone ID: LIB3107-065-Q1-K1-H9
gattgcagctagcgagcaagaaaacggatgcgcgaacgcggctttctttcgccttgcttgttgctttact

SEQ ID NO: 46083 - DNA, 78 bp, Glycine max
  Clone ID: LIB3107-066-Q1-K1-A11
ggcagcgcttgatttgaggccagtcaagcctgggggaatttctacacctgtgttgggtcaccctacccttttctgctc

SEQ ID NO: 46084 - DNA, 342 bp, Glycine max
  unsure (1)..(342): unsure at all n locations
  Clone ID: LIB3107-066-Q1-K1-B10
gatgatgaggaggaggaggaagaggaggaacatccgggtgaggtgtccattggaaagaagatcttcagattttttacaacgtgatggaagtagttatatcacaaatagatatacatatgtcatcattccttatttaggagattaggcatgtaatattacttcggagtaacttccatgtttgttttggcatttattactggcagatgagaagcattgttctgctgcctgtgttctcaataactgttctcttgcgaaaagatttgctgcttaagaaaggatggtgcttgcttcttcccaaaattgnnnnnnnnnnnnnnnnnnnnnnnnnnnnnnnnnnnnnnc

SEQ ID NO: 46085 - DNA, 327 bp, Glycine max
  Clone ID: LIB3107-066-Q1-K1-B12
gatgttgcatcgtctcacctaccgcaaacgccggggctattctaccaaatccaaccagcacatattcttcaagactcccggtggcaagcttgtttatcataccacgaagaagagggccagcggacccaattgccctgtcactggaaagaggattcaagggattccacatttaatgccagcagagtataatatatcaaggttacacagaaaccgaaggactgtgaaccgtgcatatggtggtgtgttgtctggcaattgctgttagagaaaagaacatttcgagcttttcttggttgaagagctaaataattgtgaaaaaaatgtctt

SEQ ID NO: 46086 - DNA, 126 bp, Glycine max
  Clone ID: LIB3107-066-Q1-K1-C10
gattattgccgtcgaaaaacccctttttttggagggacctatttaccatataatttttataggttaaataaaaatttttaccgggtaggtttcttaaaaaatggatatttaaaatttatttattta

SEQ ID NO: 46087 - DNA, 405 bp, Glycine max
  unsure (1)..(405): unsure at all n locations
  Clone ID: LIB3107-066-Q1-K1-C11
gagggtttggttattaaggttttcgctcaccggtgggccatccaaccccccaaaaaaaaaccaaaattcccgcccaccagacatttcaaatcaaaaaaaaatttgccaaaaaaattaagccaaacaagcctattcccttcttggatccgcatgaggaccgacaacaccatcaggtacaacgcgaagcgccgtcactggcgtcgcaccaagcttggattctgaggtgcttgctgtgcctcggttctgtttatccaattaattagtgtttttattttcttgagccaaaaacaatgctttggagattttaatattttgcattttgttccaagactatattgngtaaggaacttattgtagttcagactaatggtggggttggtcacctttttttaaaagtattttgga

SEQ ID NO: 46088 - DNA, 253 bp, Glycine max
  Clone ID: LIB3107-066-Q1-K1-C12
cggctttatttcatatgaggagctcctcgtgccacgggaaacatacttgctgaaaaactaatccatttctgagaaggcattgcctatagtttgtcaacctcaagctattttccggattcgtcctgtgaatcgctgtacggtaactattactggtcatgctgaaactgtactaagtgttaccttcatttcttgatggtcgacaactggcaagtgattctgttaatactgctgtactatttttggactcgaccac

SEQ ID NO: 46089 - DNA, 403 bp, Glycine max
  Clone ID: LIB3107-066-Q1-K1-C9
tcttgagcacccgacgttggatgaaatttcggggttgctagctgaaagccttccatgcaatgctacttttttcttgacctacgtggcccttaaatttttcattggctatggtcttgaactgtcccgaatagttccccttattatctaccatttgaagagaaaatatctttgcaagactgaagctgagttgaaagaagcttggcgtccaggagatcttggttatggaactagagtttctggtgacatgctgattgtcacaattgtctactgttactctgctattgctcctgtgataataccatttggtgctctatattttggcctaagaatgcttgttctgcgaaatcatgcactcaaagtctatgtaccaacatttgaaaattatggaagaatgttgccacac

SEQ ID NO: 46090 - DNA, 258 bp, Glycine max
  Clone ID: LIB3107-066-Q1-K1-D10
gggcacagcaacagggagggaggaataacatgagatattcatggttggcatgtataaagcaggatataatgttgccgttgcccttgtagtactataagtatgaccaagtaaaaaggggagctagcaagagaaaggatcagatagcacttgtatttgattgatgagttaatggaagaatatctcaatccattagctgttacacatctttttcaacaaacactcaaaagcttatgcatccatcaaaattctcaatgggtc

SEQ ID NO: 46091 - DNA, 393 bp, Glycine max
  Clone ID: LIB3107-066-Q1-K1-D11
gattgaatgcatgcacattaggcaactgcggtgccactttcagccctgctttttcattctttcaaggttgcacgcatatcatgctggcatctactctaaaagtaacaagaaagtctcctgatgtttggcaaagcgagcttagtgtttcattatgagttgctagggcccccttcgtttggatatatagcattttgtggtaaaggttactttgttttacatgttgagggagggaggaatgatgataagcaattctagtttctgcttttgaattcataataatattggtggtctacgtctctttttgatgatgctattatttaactgtcaagtgtgtgtgaatgaaaaaataaatggagtgcgaatggttattggaaaaaaataatatatttcttc

SEQ ID NO: 46092 - DNA, 408 bp, Glycine max
  Clone ID: LIB3107-066-Q1-K1-D9
gagtttcttgaatggctagcagatgtaggccttttgtggtgaacagaggcctgatgaagctttagcggcggctgaagttcctcagcttccaatgactagcagtgttggctcacacaaagcccccaaatccttgttgtcttacaaaaagcctaggattgaagtcctagatgaagatgatgatgagcacttcaccgtaccagatctcggataaagcacatggtcatgtaaacaattgcctgaatcattaggcagtaggttgactagttgtatatgcatactaggtgcagatgttaatgaactcttcaatgtgcctggtctagctgaagctcaggaccatgaggactattgcatgaatcttgttattgatgagctgtatatgcatactttttttatgacagttagtaatga

SEQ ID NO: 46093 - DNA, 314 bp, Glycine max
  Clone ID: LIB3107-066-Q1-K1-E10
gcgctagctaggcaatccctttacttaatctgagaattgatctcttgctaccagatctgcccttacggatctgttgaagggaggattgaaaaaaaaaaaacaaggcatatttcatatatggtggtagggaggggatggcctctcatcagcggtaggaagatccaagttaggagtttgtacaggggagaatcggtcttgaagcttagttgaaggttacggaaaagggaaaggaagtgtttggctagggggtctccaccttttttggataggggataggaaacgagccaaccggcgaacagttagttaccgaacac

SEQ ID NO: 46094 - DNA, 225 bp, Glycine max
  Clone ID: LIB3107-066-Q1-K1-E11
ggaaaagcaccatatcattagagcacggtgtttttctactaaagacctcttttctctacctagggtaatatcattaatcaatggctggcactatctttggataccctttcagacacttcatctggggtcacccaccaattttcaaagaatggtccggttcaacagccctcttaaatggctcgaaatcacccactgcccacatcttaaaaattaacgttccaggat

SEQ ID NO: 46095 - DNA, 98 bp, Glycine max
  Clone ID: LIB3107-066-Q1-K1-E9
gacacacactggacctttatcgatgtctggagggtaagcctcatctttgctgagatccttcttagaaagccaatcttgcctgagactgagactctcaa

SEQ ID NO: 46096 - DNA, 419 bp, Glycine max
  unsure (1)..(419): unsure at all n locations
  Clone ID: LIB3107-066-Q1-K1-F10
gatatatggagtgtgggttgtgtactggttgaattatgcactggtgaagctttgtttcagactcatgaaaatttagagcatctggccatgatggagagggtgcttggtcctataccacagcagatgttaaagagagttgaccgacatgcagagaagtatgtccgaaggggtagattggactggccagagggtgcagcctcacgagagagtattaaagctgtaatgaagcttccccgactacagaacattataatgcagcatgttgatcattcagctggagatcttatacatcttttgcaggggctacttagatatgacccctttgaaagacttacagctagggatgctttgaggcattccttctttactagagatcaacttangagatgattttcatgtatttgtaaacgattggtctg

SEQ ID NO: 46097 - DNA, 408 bp, Glycine max
  Clone ID: LIB3107-066-Q1-K1-F11
tttgcatatattccaccaattgttttacaaaaaaaagaggtgttacctttcaaatatacttaaatgactttttatggtaatttttttttctaaatgctcattcatgactacttttatgttttgtgataattaaaaaaatttacagatcctctggaagagctatgcttcataagagagccaaagtagaatttcacccccttggtgttatcggtgccattgtgtcgtgaaactatcctttccacaatatttttaaccctatgttggcagcagttttttctggaaatggcgttgtgattaaggtataaaatgacttaatatctgctatctacctatctaaaatggttcattccttgatgcattacatttttttaagaataaacattgttgactgatattgcttcacggtga

SEQ ID NO: 46098 - DNA, 243 bp, Glycine max
  Clone ID: LIB3107-066-Q1-K1-G10
ggcatttcaaaaaaacaaagaaggatatgaaagcgcggcttcttcttcttcagctgctgctgctgctgctgcttcaacttcccaacaaatatttcaacacactctctcatttcttcaatttccgttacgtaaagccactttctcaaacctcaatttcctgttgttgcggctgaagctggcgagagactaatcttggggaattttggatctgtttgccgtgaaaccctaatttcttccttgtga

SEQ ID NO: 46099 - DNA, 93 bp, Glycine max
  Clone ID: LIB3107-066-Q1-K1-G11
ggctgcaggaaaattaatgcccctttcattttgtgtgcatctgtagtatctatcaccaatcaattccactcttcttcccatcaaacaacacat

SEQ ID NO: 46100 - DNA, 386 bp, Glycine max
  Clone ID: LIB3107-066-Q1-K1-G9
gtcttgtttaatggccatttagatgtaactcggggaataagtaggaaaattttgtacaatattaagtcttgctattttatttgaatgattgccctcaacatttgcagatatgtccaaattggcaatggttaccagcttatcagagacccaaagagacgaactcgaaaattggcaaatgaaaaagttagatggagcctgcacactgccagacagcgattgtcgcgaaagcagaagtattgtcagttttttactagatttgggaaatgtaacaaggatggatggaagtgtccttatattcatgatcccttaaaaatcgctgtctgtactaagttcctgaatggcttatgttctacttccaactgcaaattgacacataaagttttcta

SEQ ID NO: 46101 - DNA, 223 bp, Glycine max
  Clone ID: LIB3107-066-Q1-K1-H11
ggtaatgtgaagatgttggttaaaattcacacaaatgtgtttgtcccatttgcgttcccagtccgactggcacacaagattgagggttgttttgagttgagtaagtacgtgttatttacgcgttcttccatatctttattatttttagtggataacgattaatcccattttattttttttaataaaaaaataaagctgtcgctctttaggatccaagcttact

SEQ ID NO: 46102 - DNA, 136 bp, Glycine max
  Clone ID: LIB3107-067-Q1-K1-A1
ttacttttgtgataagactacagatggtttcggttgcgaagacgacagaagggtactgctgctataatacgacagaatggtacttctgttataagacgacagatgggtactgttgttatatgacgacagaagggta

SEQ ID NO: 46103 - DNA, 235 bp, Glycine max
  Clone ID: LIB3107-067-Q1-K1-A2
ttaaaggaactgatatgctaagacaactatggggtactgggtgcatattacaagatacactcacctattcgacaaaacgatagaaacggatcagatccttagctaatcattagaccatacgtaatatatgtcatatgattaccagccgatagagtgtgggaagagatcgccacaacaaatacgttcgtgactctggcgacctctacatagattttctgatcgtactaacagaacc

SEQ ID NO: 46104 - DNA, 420 bp, Glycine max
  Clone ID: LIB3107-067-Q1-K1-A3
gacttggttactctatgttttactgcatttcatggttttaactcaactttttgtggccttctgtttcttgtatcgaccatttaaatgaaataacaaaaggaggagatagaggaaatcaactggtggctccatttgtgcttggtgctggttttatcctgtaactggatctgcttaatttctatcctagctttcttattttgaaatagttgaagtctgttcctgtatggtggaaagttgcccagtgctaactgcgttgttcttaaatttaatctctgcgtaacttacatccagaccattgatttattgaccacccatgtgatgtgtttttgaatttgaatgttgatgcagactccatatggtcctcctttcgcacttattcaaggaacattggaatcctatgggtctatgttcaaggatatt

SEQ ID NO: 46105 - DNA, 87 bp, Glycine max
  Clone ID: LIB3107-067-Q1-K1-A4
ttacgggtacttctgctataagacgacccatgggtaccggtgtgagatcactagagattggtccgcctattatacgacatcaaacgg

SEQ ID NO: 46106 - DNA, 209 bp, Glycine max
  Clone ID: LIB3107-067-Q1-K1-A6
cttcactacatggtgcattcaagggaagctacgagatggatcagtgtgtgtgaaaaggctgtggacgtagcatgcattctaagaggaagcatactgacgccggttctgattgaaacacttgctgcagtgcttcaaatggatgaaatactatatgagctgaaagagcatctgctgggtataaactgcggacgttgagattactatttcag

SEQ ID NO: 46107 - DNA, 395 bp, Glycine max
  Clone ID: LIB3107-067-Q1-K1-A7
aacagggacttggttactctatgtgctactgcatttcatggttctaactcaactttttgtggccttctgtttctcgtatcgaccatttaaatgaaacttcaaatggaggagatggaggaaaccaactggtggctccattccttcttccttcttggtttatcctgaagctcgatctgctcaatttctatcctaccttccttatttctaaatactagacaactgttcctgtataggggaaagctgcccatcgctaactgcattgaacttaaatataatctatgtgttacttacatccacaccattgttttatttaccacccatgtcatgtgtttctgaatctatatgttgatgcgaactccatatggtcctcctttcgcacttattcaaggaacatt

SEQ ID NO: 46108 - DNA, 255 bp, Glycine max
  Clone ID: LIB3107-067-Q1-K1-A8
gatcgacgatggcgaataccctacaacgcgccctacgcgccaccatggcccggcggttctccaccgacgcattggccgaaattaaacgaggcgagatcggaatggtttctggaattcctcaagagcaccttcgtaggagggttgcaatttactctcctgctagaactgcatctcaacagggatctgggaaggttggaaaatggaagatcaacttcttatctacccaaaagtggaaaaatcactgatgggctgaca

SEQ ID NO: 46109 - DNA, 383 bp, Glycine max
  Clone ID: LIB3107-067-Q1-K1-B1
gacaccgagtcgcagaaaaagaaaaaagcgatcatagtttcacttcggccttatccagtttagggtttcggttctctaccctatctttcacgtatcgaaaccttaaatttacgatcaggtctgagcaatctggttggtagaacctttggtcttagtgagtcaagttttatgtctgaattagacgatcaaattcctactgccttcgatccttttgctgatgcaaatgctgatgactcgggtgctgggtcaaaggagtatgtgcatattcgtgtacagcagcgaaatggtaggaaaagcctgacaaccgttcaaggattgaaaaaagaattcagctataacaagatacttaaagacgtcaagaaagagttcttgtgcaatggaac

SEQ ID NO: 46110 - DNA, 363 bp, Glycine max
  Clone ID: LIB3107-067-Q1-K1-B12
taatgtgagcaaggaaataagctttggggactctggacttgatgagggtagcaatggtcaacaacaaccaatgccaagaaggtgcacacattgcttggctcagaggaccccacagtggagggcaggaccattaggtccaaagacactatgcaatgcatgtggagtgaggtacaagtctggtaggttgctaccagagtataggccagccaagagtcctacttttgtgagctacttgcactccaaattccacaagatagtcatggagatgaagatgtctgtttactccatttctaatgaacaataataatgggggttttttagaggtatatttttaatgtaaaaaaaaaattgcaaattttaagg

SEQ ID NO: 46111 - DNA, 380 bp, Glycine max
  Clone ID: LIB3107-067-Q1-K1-B3
cgaagaacaagtcaagtatcgctgaggaggatggctttaggtgttcctgctcttccgctgacatacgtggctcacgttctggcagtggctgccaccgtcttggtcgtggattgggtcgccaatttcacgtgtggctctgcttgagattctgataacaagtgccttatcttcagcattcatccacttcttattgatattggcttactaggtcatggcggcgaagctattataaatgacaaagattttttcctacataacgaagcgtagaaattgacacaccttgttttccatgccatcccattattacttggaatagatggaatgtatgctgtcttcaaggttgacaatgaaagtgggactggcgatctctacagcttgca

SEQ ID NO: 46112 - DNA, 225 bp, Glycine max
  Clone ID: LIB3107-067-Q1-K1-B4
ggaatttcactgatggagacagacaaaggtgaagctcaagctcaggattggagaggcagaccctccaaccctgccaaacacggtggaatgattcccgctgcttttgttcttgggttgcaagcttttgagataatggcaatagccgcagtggggaacaatctgataacctacgtgacgagtgagatgcacttccctttgtccaaggctgccaacctagtcactaac

SEQ ID NO: 46113 - DNA, 389 bp, Glycine max
  Clone ID: LIB3107-067-Q1-K1-B5
gacaccgagtcgcataaaaagaaaaaagcgatcatagtttcactggggccttatccagtttagggtgttcggttctctaccctatctttcacgtatcgaaaccttaaatttacgatcaggtctgagcaatctggttggtagaacctttggtcttagtgagtcaagttttatgtctgaattagacgatcaaattcctactgccttcgatccttttgctgatgcaaatgctgatgactcgggtgctgggtcaaaggagtatgtgcatattcgtgtacagcagcgaaatggtaggaaaagcctgacaaccgttcagggattgaaaaaggaattcagctataacaagatacttaaagacgtcaagaaagagttctgttgcaatggaacagttg

SEQ ID NO: 46114 - DNA, 238 bp, Glycine max
  Clone ID: LIB3107-067-Q1-K1-B6
gggttcggagttagcacagcgaattggcattaatgaagttgctgagagcattatggctttcaacaccaattacaaggacacgggtctttttggtgtttatgctgttgccaagcctgatagcttggatgattcgtcttatgctataatgtatgagacaaccaagttggcttatcgcgtttcataagatgatgttacacgtgctcgtaatcagttgaaatcttcactgctactacacata

SEQ ID NO: 46115 - DNA, 214 bp, Glycine max
  Clone ID: LIB3107-067-Q1-K1-B8
cacctggagtatgcgccacctggcaaattgaagcggggcacccttaataccttgtactaacatgtgtcttgatctaccgcgaattggtgcccaataaagtagcttttgatttcactggcactggccgcgggggcgaaactcactgtcacccctcatgacacgtggaatgcattgaacttgacaaatgagtgtacgagagaacaggatttgatgg

SEQ ID NO: 46116 - DNA, 407 bp, Glycine max
  Clone ID: LIB3107-067-Q1-K1-C1
cagaatgtagagagagctgctggaatgtatgctcctctgccttatgccttagcacaggtcttttgcgaaataccatatgtgtttctccaaactgtttattactcactcatagtgtatgcaatggtgagctttgaatgctacgtggagaagtccttttggttcttctttgtcagctccttctctttcttgtacttcacatattatggaatgatgactgtgtccatcacaccaaaccaccaagtggcatcaatctttgcagcagcattctatggactctataatctcttctctggtttctttatcccaagaccgaaaatttctaaatggcgggcgtggtattactggatttggccagcggcatggacagtgtatggattaattgactctcaatatacagatatagacga

SEQ ID NO: 46117 - DNA, 148 bp, Glycine max
  Clone ID: LIB3107-067-Q1-K1-C10
aagatacaatttgcatcattcatttagattgtgaatcaaagcatcaaatttcctaacacattgacgtaaaacaaaggatttccaaacacattgacataaagcatcggattccctaacaccctgacgcaaaacaaaagatttcctgaca

SEQ ID NO: 46118 - DNA, 402 bp, Glycine max
  Clone ID: LIB3107-067-Q1-K1-C11
gagaacttgaatggctagcagatgtaggcctttgttggtgaacagtttcctcatgaagctttagcggcggctgaagttcctcagcttccaatgactagcagtgttggctcacacaaagcccccaaatccttgttgtcttacaaaaagcctaggattgaagtcctagatgaagatgatgatgagcacttcaccgtaccagatctcggataaagcacatggtcatgtaaacaattgcctgaatcagtaggcagtaggttgacgagttgtatatgcatactaggtgcagatgttaatgaactcttcaatgtgcctggtctagctgaagctcaggaccatgaggactattgcatgaatctgtagattgatgagctgtatatgcatacttctcttaggacagtaagt

SEQ ID NO: 46119 - DNA, 223 bp, Glycine max
  Clone ID: LIB3107-067-Q1-K1-C12
cgtgcgtgctaattgccaataattggaattacaaacagaataatgaaattttttaaaaagaaaaaagaaaatcaaaatttcatcattgctattctatttacaagttctaacaggtaaaattaaattaagagctccgtaaagtcccctacacttcgaaaatgtggctacccgattcaactgaacaattccacaaccttgcaatttgcattgagcacggaaaatg

SEQ ID NO: 46120 - DNA, 169 bp, Glycine max
  Clone ID: LIB3107-067-Q1-K1-C2
agggactactcccgaatatagagcatatcaagagcatgttctcagctgcagctttaaatttgcacaggctctgagtgagagaagctatgagcttgtctcttgtggaaccgacaatcacctggttttggtgaatctgaataataaagttctttatggctccagagttgag

SEQ ID NO: 46121 - DNA, 371 bp, Glycine max
  Clone ID: LIB3107-067-Q1-K1-C4
gaaggcatctgaaagggtaaacgtggaaacctttattaattgtttttggtcccttttttcctattagcctttcgaatataacattccctcttcctctctattcgcctccctttaactccacggtgcagatccgaggagttaccccttagctttttctctttccttattctatttcaaacttccaccagtgatggcaggtttggctccagaaggaacacaatttgatggtcgccaatatgatgctaagatgagtgaattgctttccactgatgggcaagaattcttcacctcatatgacgaagtctatgacagctttgatgccatgggattgcaagagaatcttctgcgaggcatatatgcttatgggtttg

SEQ ID NO: 46122 - DNA, 254 bp, Glycine max
  Clone ID: LIB3107-067-Q1-K1-C6
ttgttcatgcatcctccaccagctaatcttattcggagtcccatgaattaatcgtcgttcatgcatcctccaccattgtgtctggatccccacgaatggattgcctagcgctgttcgtacatccttcatcatcaaatcttattcggagccccatgaatagattgacgttcatgtatccttcaccatcgtgtccgaagcaacacgaattgattccctagcgctgttcgaggaacctccatcatcatatcttattc

SEQ ID NO: 46123 - DNA, 184 bp, Glycine max
  Clone ID: LIB3107-067-Q1-K1-C7
gactcgaagggactactcccgaatatagagcatatcaagagccagtgctcagcggcagctttaaatttgcacaggctctgagtgagagaagctatgagcttgtctgtggtggaaccgacaatcacctgcttgtagttaatctccataataaagtttttgattgctcctgagatgataaggtgtt

SEQ ID NO: 46124 - DNA, 181 bp, Glycine max
  Clone ID: LIB3107-067-Q1-K1-C8
gactccaccccttttggttcacgttctaaccaaagtgcaacggctattgttctttggctcctatgatccactacaatatcacatttcctcttactctatattcatgtccatttaactccacgatgcagatccgcacaaccaaccccttcactattactgtttccttatcctatttcaaact

SEQ ID NO: 46125 - DNA, 275 bp, Glycine max
  Clone ID: LIB3107-067-Q1-K1-C9
aatgctggtgatctggaacttattgctaagagtgttgaatcttcagaccttaacttttcaagatacggtgacaccttttttgaggttgctttcactgggggtcgtacacaacctgtaactaccaagcctgatgaggtggaccgccacccatactttataatagagtgtgagcctaagcgtgaagtcattttaccatctgtaatctacatacaaatgattttgcggctaatgccatttctcatcaagaacctataaaatgttatgcggaaattcct

SEQ ID NO: 46126 - DNA, 267 bp, Glycine max
  Clone ID: LIB3107-067-Q1-K1-D1
ggcgaagagtgaagagaatggctcccaagggtttaacctttctggctgtgttaatatgcgtttcagcactgtcactgagtccttctgttgcgggggaagggcaaaataatggccttgttatgaacttctacaaggaatcatgccctcaggctgaagacatcatcacagaacaagtcaagcttctctacaagcgccacaagaacactgctttctcctggctcaagaacatcttccatgactgtgctgttcagagatgtgatgctttac

SEQ ID NO: 46127 - DNA, 356 bp, Glycine max
  Clone ID: LIB3107-067-Q1-K1-D10
actagttagctttacccctgcctttgcatcactttcttctcttgcaatgatccatttttggtgcctctgtgtgaagccatggtttgaagtccctcttcaaccttgaggacaaggttgattttccagcggtaggtaatgatagcaacaccagttgtaacatgtcccataatagacccaagaggactactaagaagtccatccatttacgtgattacgtgtcccataacagttggagaatatcccatcacatatcattttgttactactacatatcattctattattgccttttatccatcatccatttccgttgtaaccgtttcagtgtaagtttgttagtcatgtagtggtagctg

SEQ ID NO: 46128 - DNA, 398 bp, Glycine max
  Clone ID: LIB3107-067-Q1-K1-D11
aacacttcagcgcttcactgctgctacacttgagcatggaatgcaccctcctgtggcaccaaaaccagagtggcgtgccctcatggatgagatggctgtcattgctacagaggagtatcgctccattgttttccaggaaccccgtttcgttgagtacttccgatgtgctacacctgagctggagtatggaagaatgaacattggcagtcgtccgtcaaaacgaaagccaagtggaggaattgaatcacttcgtgcaatcccttggatctttgcttggactcagactaggtttcatctacctgtatggcttggctttggggcagcatttagccatgttattaagaaagatccaaagaatctccaaatgcttcaagatatgtataatcaatggcctttct

SEQ ID NO: 46129 - DNA, 187 bp, Glycine max
  Clone ID: LIB3107-067-Q1-K1-D2
cactctacccctcgtgcttcttctcctattaaaagagcctccgcttttggtctaggcctctacgaattcacgactgggaccattttgtttcgactacagaaacatgcctatctagagtagcaaggtggatagtcctaacgtggactgcacacagtctgagtaacattccttgtactactatgaaacc

SEQ ID NO: 46130 - DNA, 235 bp, Glycine max
  Clone ID: LIB3107-067-Q1-K1-D3
ggcgcccatggtgtaagcgagaacactatgggggcggaaataaaaaaccatagaatagatagagttattactccctataacatgtggcaatgatttggagatggcagacttaccaaggtatcttcatgcctgttcgaacacagggaagcttgtcttcttggcaatataggtgtctggaggaatcgtcttgcagattttggcatgtgccttgtataataacttggggccgatgctg

SEQ ID NO: 46131 - DNA, 412 bp, Glycine max
  Clone ID: LIB3107-067-Q1-K1-D4
ggcacaagtgagtttgttgatcgagataactagaaacagtgcgatgaaaatgaaggtccttgttttcttcgttgctacaattttggtagcatggcaatgccatgcgtacgatatgttccctctccgaatgaacactggctatggtgcccgtactccggaggtgaaatgcgcaagttggaggcttgctgtggaagcacacaacatctttggctttgagaccattcctgaagagtgcgttgaagcaacaaaggaatacatccatggcgaacaatatagatcagactccaaaacagttaaccaacaagcttacttttatgccagagacctcgaagtccatcccaaggacatatttgtgttcagtatagatggcaccgtactctctaatattccatactacaaaaaacatggatat

SEQ ID NO: 46132 - DNA, 174 bp, Glycine max
  Clone ID: LIB3107-067-Q1-K1-D5
gaatggaaaagtgagaagtgaagagaatgcgggttgtttgttgctccaattcaggcgtgagtgccactcttccatctttcccttgtcccagattccctccactcattgcaatttcttcgatccgctttctaaattccacacccctccgtttcactgcttcgccgcgacaagtta

SEQ ID NO: 46133 - DNA, 226 bp, Glycine max
  Clone ID: LIB3107-067-Q1-K1-D7
ggggatgtgaagctacttcaccactccaaacccaccacaccagcattattcatatcttattctctaacctttcactctgccttactcactctctactttgctcatcatcgtagatgaaccaacacttctagtctctcttactttataaccatgtaaaaatgagtcacctaatgaaaaattagtagcttcttgttgtgctttttattttgtttgtgtcgagataaat

SEQ ID NO: 46134 - DNA, 396 bp, Glycine max
  Clone ID: LIB3107-067-Q1-K1-D9
gttgtataatgaaaaataattgcataattgtctattgtaatgggaaatagaaaatggggaagaaaagacccggagaacacataatctccaatgtctataaattagtactcacaatgttgagcaaaaacaagatttactggggttgtccatttcattgtgaactaaataacgctttgctaattatgcctgtggcttcaatatatcgatctacgcacctagagatgcaactgctttcactcccaccgaggcttgaacctggttttgtaacacacttctcaaaacactttcttcccactgtctgcaaaataaaagtgagcggaattgtagcaaatgagacactgaacaaaatcagtactcaataattatccacatttttcaagaattacaagtagctgg

SEQ ID NO: 46135 - DNA, 216 bp, Glycine max
  Clone ID: LIB3107-067-Q1-K1-E1
cactagagacaacgggagctccaactcactttatgataccgcagcataggatgcctttgttagtgatctccaccttgtctactacggatgtgaggtcactatctctggcaaagtggccgaatgaggaagatacactgattgtattgaccctgaactctgtcagcagaatgctcaatacagacaaccctgttgggcttaagaaaagcacctaatctt

SEQ ID NO: 46136 - DNA, 413 bp, Glycine max
  Clone ID: LIB3107-067-Q1-K1-E11
gaagtccataactgggaggttatgggttaattcggaattaattagtttaaaaatcatcattttgcgtgcgacttgaaagacatgattagattagctgtggattcttacatccgccattttttctagtatatagaaatgaacatgctcttgactcgacatcgtttgttctgttccactagaacttattgttttggggacgggaaagcagttgatgatgtaagttgatgatgtaaatagtacatgatggagctcgagtttattcatttatcaggggcaagtatctaaggttagtaaaaattaataagttagaaaaacttcgtaagtttatttttgatagaaaaatagaaaggatccaatttgagcaatgttcaaaaaaatggttggaattagtaaaactgttttgatcaaaagtg

SEQ ID NO: 46137 - DNA, 301 bp, Glycine max
  Clone ID: LIB3107-067-Q1-K1-E12
gacttcatcaagcacaagtaaacaaaaccactgtaatttttcgaccaccattgcaaatggccgcactgaacctttgccgcatggcacttcgatcctcgaaacttctctatcgcccttataatcttctctccgttcagttgcagatgcagatgcaaccctctttttctcccctcactcgaaagatgagcacggatgcgcagagtattgctttccaacttaatagttctggattgttgaagactcagggccttattgcatggaaatggagtgaagcttatgatgggtaaaccataaaagttta

SEQ ID NO: 46138 - DNA, 267 bp, Glycine max
  Clone ID: LIB3107-067-Q1-K1-E2
tggtgtataggaccactttctttacatgacaagttattcttggaaagggctgggagagatggtaatgagacatcactggatgaatctgaatgtctaaattttctttcttccaacaagccttgttctgtgatctatgtctgttttggaagcttgtgtcgcattaatgcttcacaactaaaggagattgctttgggcttggaagcatcaagccaccccttcatttgggtgattggaaagagtgattgttctcaagagatagagaaatgg

SEQ ID NO: 46139 - DNA, 225 bp, Glycine max
  Clone ID: LIB3107-067-Q1-K1-E3
ggtctcggttcgaatcaacataatgattacgatgcgcgtgtctctgcctaaaaggattgatagatggcatacgcactcatgatctatcatgtagatcagtcgaatgtatctaccaaggagcatatttaaatattcgttgatgcactatatcctggatgtcattgcctgcctaggtgccttgcataccatattgctggtagatcgatactggatgtgcttcaactt

SEQ ID NO: 46140 - DNA, 260 bp, Glycine max
  Clone ID: LIB3107-067-Q1-K1-E4
aactcgaaagtacggcttcgagaatttcccaatttgtacatctttgggacctttgagatgccttcacatgtgattttaatctctgtcacactataatgagaggtcctacataatgacaacgaatctttacactgaaggttgtctaattcagacaacactagttcttagatctatggatgattcatacactcagaacagacttgagcgtctggcttaaaaaagaaatcattttggggcacaagcatcttcatctattttag

SEQ ID NO: 46141 - DNA, 383 bp, Glycine max
  Clone ID: LIB3107-067-Q1-K1-E5
gacactatggccacctcaagcgccaaatcagtccatgatttcaccgttaaagatgccaagggaaatgatattaatcttggtgactacaaaggaaaggtccttatcattgtcaatgttgcctcacaatgtggcttgactaattcaaattacactgagctcagtcagttgtatgagaaatacaaacagaaaggtctggaaattctggcatttccatgcaatcagtttggggcacaggagcctggatctaatgaacagatacaagagtttgtttgtactcgcttcaaagctgagtttcccgtttttgacaaggttgatgtgaatggtgacaaaactgctccactgtacaagtatctaaaatcaagcaaaagtggactctttgggga

SEQ ID NO: 46142 - DNA, 413 bp, Glycine max
  Clone ID: LIB3107-067-Q1-K1-E6
gaccgcgctcggattcgttatcgttctggtttagagatctttgcgaaggaggattacagcgctcaaccaaagatgctcaacgaggaaggacagatcactgagctttacattactaggaagtgctccgccacaaacagattgattaccgctaaggaccatgcttgggttcatatcaacattgggcatgtggatgagaatggcgtctacaatggccatctctccacttttgccctctgcggattcatccgtactcaaggtgatgctgacagtgctctataccgcttgtggcagaagaagagagttggaagtaagcaacagtggacacccatgatagttagctacttcggtatgtattaatttctactcttgctagagatattggagcactatgattgtcgttttgagcacaaata

SEQ ID NO: 46143 - DNA, 176 bp, Glycine max
  Clone ID: LIB3107-067-Q1-K1-E9
aaccattcacttgttaaccaagttatgcctcctaaggaccaactgtttgcctatttcaaggctcgggctcaaagcctcgctgctaaaagaaagaattaacaaagactcagaattcccaaggagattttaatattgtagaaagtgaaagctacttactatctatgtttagttttcgt

SEQ ID NO: 46144 - DNA, 248 bp, Glycine max
  Clone ID: LIB3107-067-Q1-K1-F1
gacatttacggaacctctattgatgtctgctcagtgcggttcatttccgctgagaatcttgatataaagccaatcttccctgggactgaatgtatcaaccagctgaaactaattataaagcgttcttggaagccagcatgaatctcatcttgagtttattgataatgcaaaagcaaggaggtttatcaaatcactgccctatactagggtcagacacttctctcagctatacccacaagcagatccat

SEQ ID NO: 46145 - DNA, 253 bp, Glycine max
  Clone ID: LIB3107-067-Q1-K1-F10
ggaggagactgagaaaacaggagaaatcaaaatggaagacacagtttctgcgtttaggtctttgatggtttctcactctccgccgctggatgccttaatggtgccctctgaagattatcacctgaacgaatatgtgtctgcacgagacaagcgccgcgaattcgtttccggcttcactggaagagccggctttccacttattacaaataaaagaacactgttgttgactgattgacggtatttttttcaagct

SEQ ID NO: 46146 - DNA, 276 bp, Glycine max
  Clone ID: LIB3107-067-Q1-K1-F11
atgatattaaacataagctggatggaagagttatggcatggatatagcttgatatgcaataggagatggtacagagtgaattggattctgagaatgttgagttcacagtgattgatgatgtgggtagtgaaagcctaggtcctggcattcgtagagaactttcattttcacgttggtgtgatgatgatggaaggatccatttggatcagcaattaggtaatgaagatgctggtgtataaaatgactccgattttgagttaccgttttcctgaaaag

SEQ ID NO: 46147 - DNA, 317 bp, Glycine max
  Clone ID: LIB3107-067-Q1-K1-F12
agagtgcatctttccatttctgatttctgtggcatttaggaacctaagagagaataccaaatatctattagtttttccttcctgtgaaaattgtaatatataatttaatttctctaagtttattgccaacaggtgaacaagatttgggagtcattagaaaagtatacaaagaagcttgcccgtgctgaagcagtatatgcagggtcgaaaacaactgccaaaccagaaggaacaagacctacaaacaagactggcttccttggatttgttgtaaaaaggtggataccatagaatattgcaacgagaagattatgaac

SEQ ID NO: 46148 - DNA, 311 bp, Glycine max
  Clone ID: LIB3107-067-Q1-K1-F3
ggaattgaggagtaccccacaaagtttgttgtttgatacaattcaaacagtttttggtgcaccaattaatcagaaagcatttcgcaactggaaagaatcatttcaagcagcaacacgggagcttcaacgcatttatggaaaggaagaacttaacctataagtcccaaccctttgtgaaaacgtaacttgggatagattctagtgtgcatagtaagatatgtctatttttaccattttcctgtgtcttttatatggctccgcaaccttcagtaatgtgctcctttggatgccttgcttaaaatattcgaagc

SEQ ID NO: 46149 - DNA, 92 bp, Glycine max
  Clone ID: LIB3107-067-Q1-K1-F4
ataagggcacctttacgatctttccatgaaccatatccttgcggaacacgtggaagctttcaagtgtaaacttacaatcaataagactgtaa

SEQ ID NO: 46150 - DNA, 283 bp, Glycine max
  Clone ID: LIB3107-067-Q1-K1-F5
gggggcgaggtagccagagagtgatacaatacagagtgcgttgttgctccttcgccacaactccctgccaacatgggtatctccagagattctatgcacaagaggcgtgccactggtggcaagaagaaggcatggaggaagaagagaaagtatgagcttggtcgccagcctgctaacactaagctgtcaagcaacaagacagtcaggaggatccgggttagaggtggaaatgtgaagtggagggcactgagattggatactggaaattactcctggggaaagt

SEQ ID NO: 46151 - DNA, 242 bp, Glycine max
  Clone ID: LIB3107-067-Q1-K1-F6
gatacctcaggtcatgcagggctacccgatgaggttaagcgtatcattcagctaaaaaaaaaataaaaacaccaattaatcaagcggcctctctaaacgatccaagcttaattacacgtgcatgcaacgtagttgctcttctataatggcaacgaaaatcaattcacttgacgccgaattacatcgtagaaactggctaaacattgacgttacccaacataatcggcttgcagcatatatac

SEQ ID NO: 46152 - DNA, 172 bp, Glycine max
  Clone ID: LIB3107-067-Q1-K1-F7
cagtatgaggttttttcattgttctctgtttgtgtttaaccttaacaagcgatcgattatattcttacaatttattgttcggtagtctgatgctggatttcttttaactttttgaaggtgatgcacaggatgcattctaataagacaagaggctagagattgatcattggaa

SEQ ID NO: 46153 - DNA, 316 bp, Glycine max
  Clone ID: LIB3107-067-Q1-K1-F8
gacaaggtgcctttgataagtgacatattaaaatccatacttgttccaagaagtgacgaaagactgcgagacagggagaggtctttgtcgaggtcgcaatctagcatcaaatgctcttgttactctagatccctttattccacacccccaaatctatatgataaattgtctcctcaacctttttgcattgtatacatccatctctgtattcctccaatttgttttagttttttatagatatgccattccttttttaagctctttgaagataggtttttttctctatagttctagttgatcaccttatttctttttc

SEQ ID NO: 46154 - DNA, 339 bp, Glycine max
  Clone ID: LIB3107-067-Q1-K1-F9
ttcttattgggatatatggagtgtgcgttgtgtactggtttaattatgcactggtgaatctttgtttcatactcatgaaaatttatagcatctggccattatggagagggtgcttggtcctataccacagcagatgttaaagagagttgaccgacatgcatatatttatgtccgaatgggtttattgtactggccatagggtgcatcctcactagagagtattaaaactgtaattattctttccctacttcacaacatttttatgcagtatgtttatcatttagcttgagatctttattcttcttttgcaggagctacttattattttacctctttgaa

SEQ ID NO: 46155 - DNA, 366 bp, Glycine max
  Clone ID: LIB3107-067-Q1-K1-G1
ggaactcataatattcatcactagaagtgttgggtgcatttctatttctaactaattattgtgcttattattattgttgagaaagaaaagaatggcaaagttaataaaattctttgagttgaacacaggggccaagattccttctgttgggttaggcacttggcaagctgagcctggtgttgtagccaaagctgtcaccacagccattctggttggatacaggcatattgattgtgctcaagcgtataacaatcaagcagagattggttctgctcttaagaagctttttgatgatggtgcggtgaagcgtgaggacttatggatcacctccaaactctggcgttcagatcatgctttaaaagatgt

SEQ ID NO: 46156 - DNA, 410 bp, Glycine max
  Clone ID: LIB3107-067-Q1-K1-G2
cttctttgggatcagcttgaagaaggttattggctcaagggtccccaacaccaagatcccctatgagtacattatcactggacttcgccagtaagtaatcactaatcacatatttacatatttatgatcagtttgtataaacttaaaataagtcattttaaaaaataaagactgcttctgccactatacccaactataagtgatgaaagaaccaatgttgaatgtctaaaataatcgatgttaaaagtattttttctaatagtgatgaaagaagaagcaggaacaaaaataaaattgaaagaaagataaagacaaaaatgaagagtttattaaacataacactatataataaccaacatgatgacttgatctctacaaaattgtgcattagtatattgtgtgatggaagc

SEQ ID NO: 46157 - DNA, 384 bp, Glycine max
  Clone ID: LIB3107-067-Q1-K1-G6
acagaagggctagtgacattgatgttacttttgatgatattggagctgttgaaaaggtcaaggatacatggaaggagttggtgatgcttcctttacagaggcctgagcttttttgcaagggacaattaaccaagccctgcaaaggtatcctattatttggtccccctggaactggtaaaacaatgcttgcaaaggcaattgctactgaagctggtgctaacttcatcaacatttttatgtcaagtatcacatctaagtggtttggtgagggtgagaaatatgtgagagctgttttctctctggcgagtataaattcacctaccgttatatttgttgatgaagttgacaacatgttgggtcggagggaaaacccaggagagcatg

SEQ ID NO: 46158 - DNA, 413 bp, Glycine max
  Clone ID: LIB3107-067-Q1-K1-G8
attcccgttaatgatgtgataacagctggaccgggacccagttcctttgttcaacacgttacaataatggcccatttttctctctcccctctctcctgtgcaccttctcctctaccaccacgccgccgaatctttctctctcctcctcgagccgccgcatcttccgccaccgacgtcgtttccacttccacttccacttcatcttctgcttcgaatttcgcgcccaaagtcgttgtcaccagagagcgcggcaagaacgccaagcttatcgctgctctggtacgcgcttctgttcactcacttcacatttcgcacctacgatttgttttcctacaactgcattgcaatgtgcttaaccttagtcactcgaactccaaccagctagttgtgtccgttttttttttccgagtctc

SEQ ID NO: 46159 - DNA, 418 bp, Glycine max
  unsure (1)..(418): unsure at all n locations
  Clone ID: LIB3107-067-Q1-K1-G9
gaaggtgcaagagtttgttgtgagctataagctagtttatcgtgaggagaatatgaagttgtttgttttctttgttgctgcagtagttttggtagcatggccatgccatggcgcaggctaccaaaggttccctctccgaatgaaaactggctatggtgagcgttcttcggaggtaaaatgcgcaagttttaggcttgctgtggaagcacacaacatccgagcctttaaaaccattcctgaagagtgcgttgaaccaacaaaggactacattaatggcgaacaatttagatcagactctaaaacagttaaccaacaagctttcttttatgctagtgaacgcgaagtccatcacaacgacatatttatattcggcatagataacaccgtactctctaatatcccatactatgaanaacat

SEQ ID NO: 46160 - DNA, 394 bp, Glycine max
  Clone ID: LIB3107-067-Q1-K1-H1
gaccacttcctactacacaagaactagctataggcctcaattagttattatattaatttggtctaagtagttgttattacttgtgtagtagttcttctccaatggctgatttaggttcagcctcttccaagagaatgtggtgttccgttccagaaagaatgcagcttcacttggccatgttggccttgcagtttggctatgctggattccatgttgtctcaagagctgcacttaacatgggcgttagcaagcttgttttcccagtctatcggaacatcattgccttgcttctgctccttccctttgcctacttcttggaaaagaaggataggccagccatgactttaaacttcgtctgccagttctttcttctggcacttgtcgggattacagc

SEQ ID NO: 46161 - DNA, 404 bp, Glycine max
  Clone ID: LIB3107-067-Q1-K1-H2
aagacgacagaagggatttattttattgtaagttttctgctaatgacgtgtacattctccctgtttcttacccagatgtagcacttgtcacatctttgagggatggaatgaatcttgtaagttacgaatttgtggcctgtcaagataaaaagaaaggggttctcattctcagtgaagtaattactgaaactttatagtgtatttgtctacttttaatttctcaaatcaggctatgttaatgttgaataattaagaaagaaaagattcaaaagctagtagttggaactttcctcctacagtctgttttcctgtggtcatcgcacctgtgataaattgagtaaccgaccaaaagttcatgaattcggtgcccgaaacaaccctcccttcttataaacatatgccct

SEQ ID NO: 46162 - DNA, 280 bp, Glycine max
  Clone ID: LIB3107-067-Q1-K1-H3
gaccaaaatactcctattggcatcttgtgttgcgtccctcttttaagctatatccttctcttaacacaattggttgtgccaattgccatagtcaccaaccaattaacaaaggcttatatatcatcatatcatcaccaaatgaaaaatattgggttgctttttcttgtggtgggggctacttttgcggtggcagccacagctggtagctgttaccaagactttgaaataacgtggggtggtgagcgtgccaaaatctatgagaatggataccttctcacac

SEQ ID NO: 46163 - DNA, 339 bp, Glycine max
  Clone ID: LIB3107-067-Q1-K1-H4
gagtgtgtgagttcattaacatatacaaattctctgtgttgtgttgtgtacttgtgttaattgtgttgttgttgtaggaaatttaagtgaagagagaatgatgatgaagtctgctatgtgtgcattggtgcttgtggcactggttgtggttgaagtggggcccatggctgatgctgcggtgacttgcaacccaacacagttgactccttgtcttccggcaattaattcaggttctgcaccttcgagtgcttgttgccagaagctgaaggagcaaaagccatgcttctgtggctacctcaaaaaccctagctagaagcagtatgttaactctcctaatgc

SEQ ID NO: 46164 - DNA, 191 bp, Glycine max
  Clone ID: LIB3107-067-Q1-K1-H5
aggcgtgcgaacaggtgagagacgactgaagggggaccgtaatcattgcatcttcacgctccacactggagcgctaaggacgttgaactgctgttactcacacacgccatgggtgaatgaatggtttttgagcaacagcagttaaaagagaaaaggggttcaccgtatatgacatccaatgttacgtaccc

SEQ ID NO: 46165 - DNA, 307 bp, Glycine max
  Clone ID: LIB3107-067-Q1-K1-H7
tcactctcatggtgtagcacgagcatgaataacttggtcctatctgttgttccgaaattcgtaaaactgcaaactctaatcctgcgtcaagacaagcctcaactagaggataatgctgacgagactattgcaaaatgctgtcatgaactgcagattctggatctcagcagaagtttcaagctgactgatcattcactctatgaacttgcccttggttgtcgagatcttacaaaactcaacatcagtggttgttcagcatttagtgacaatgctctgccttaccttgccagtttctgcagaaaactga

SEQ ID NO: 46166 - DNA, 329 bp, Glycine max
  Clone ID: LIB3107-067-Q1-K1-H8
gagtgtgtgagttcattaacatatacacaaactctgggtccaggggccaaccaaggctattctactatccatcattggcagccacatcttcccttagtactagaaatgaggctgcaacaactgaacttgttctttctgctgctttgtgttgccaaagcaaacggatctctgatgccattcatggatcctcccatcactctcttggctgatctctggtccgatcgctttccagacccgcttcgcgtgctggaacatattccgatcggggttgacaaagatgaagcatccatggccatgtcacctgctcgagtggactgcaaggagacccc

SEQ ID NO: 46167 - DNA, 306 bp, Glycine max
  Clone ID: LIB3107-067-Q1-K1-H9
ccacgcgaacaccaacgcgtgcgacgaggtatagaccactgatgggtgtcttattgtgtgacagaatcaaaccatacagacctttcctgacttaatcttactccttttaaatgcattgagccagactctaacattgagttaatgaaataaaccactctacattatatgtactgaagagcgaaatttttatcctcgatcttaaaaatgggcaactgttctcaagatgtgaaataactgctgaagactgtgataatactaacactacccaatgtacttaccccctcagcaagagaacaactaagtgac

SEQ ID NO: 46168 - DNA, 338 bp, Glycine max
  Clone ID: LIB3107-069-Q1-K1-A1
gaaagttgattgggataaatgggttgatgaagatgaggagcaagataataaacctgcagcatctgatatggactttggtgacattgatttttctaagatgagcatgggagggggtgagggattggattttgatgctgcaggcaatgatgatgatgatgagagtgacacagaagaggagtttgcaacagaagcatctgctagtaaagaacaagattcgaaagatgctgtaagcagctatccaattccaaaggatgcacctgatactaaagcataaacaattcgagaatggtgaaccataacatagctttgactatgtaagggctagacaagcttttctg

SEQ ID NO: 46169 - DNA, 248 bp, Glycine max
  Clone ID: LIB3107-069-Q1-K1-A2
acgtgtgcgtacaggtgcgagaggaccacatacgggagtatttgattttggagcagatgaggccataggtcgtatggtggcagctggacctatacaacagacgggtatacctcaagcccagcggtgctatttgttgggttttagcgaatccccttcttccccgttgcgcttatggttgtgggagtaaccgatatatcctcacaacccaaccctattgaattgatatgtttgaagtagagcatcctaag

SEQ ID NO: 46170 - DNA, 131 bp, Glycine max
  Clone ID: LIB3107-069-Q1-K1-A3
atttcagaaccatttgaaccatcaccctttatgcctggaggcactagaggttttgtagatgacttcaattcaattagcagaaagcaggagagaggagaagcagattctgatgcatcacttttcttaccttc

SEQ ID NO: 46171 - DNA, 298 bp, Glycine max
  Clone ID: LIB3107-069-Q1-K1-A4
gacaccactgacggtccaattgttggtacaggacccatatgatggccgtattgagtttcctttcctccggttcgggctttttcagcccgtaaccggaagcactcagtgttggcttggcgtcctgccatgggaacaaacacaacacaaggctccttgtgaattgtgatgacgtgaccagtgaccaccattcatccatccatccatcctcaacacaacgatccaccatcactcctttctttttcccatcccaagaaacaaagaaaccagtcccactttaattatttttattaacccattc

SEQ ID NO: 46172 - DNA, 408 bp, Glycine max
  Clone ID: LIB3107-069-Q1-K1-A5
attactcatgttggttcctaaggtatggttctgtcatgttgggggtttgaaaacaaaaggtaaaataaactatggttgaaactagacaaaataaacactaaaagaggtgtgaaagataaggtaaaaactaattggtaaaaggcaagctatctaggcggtttgacaatggagggtaaaggaaataagctatgaaaataagcaagaaattaaagtgcaagaaatgcaaactaggcggattcttagaatggtttgattaacctatttaagggttccaacaaaacaactactattctaaggggaaaatggctaaaattattacacacaaatggaaatagggtgacctaatggaagcttccaaattactttcaattaaagggcttttttgtttcaaattttgaaagccaagca

SEQ ID NO: 46173 - DNA, 396 bp, Glycine max
  Clone ID: LIB3107-069-Q1-K1-A8
gatcttaagcttgttctctctctctctctcttgttacacattctacattctctctctattatttttcaccctttttctctcttttgcaaagaaaacaatttaattaagtcaatttgtaccaaaatggcttctcaagtttgtgaaactttggctttcatcaacggtgatgatgggttgaaaatcaacggtgctcttctaatgtccctgatggaagagccatcaccaagtgatgagagtgatgatgatcgattggatagcttgattaggtcctttgaagctgaaattagtggaagcaagatgggggatcatcatgattcatcatccatagggtcagaaatattgatgagcaataatattatagaagagtgtgcatctcaatcatggaataataacatg

SEQ ID NO: 46174 - DNA, 243 bp, Glycine max
  Clone ID: LIB3107-069-Q1-K1-B2
acaggtgtgcgaacaggtgcgagaggacagcagatggttgttgtatattttggctgaagatgctttatactcatggtttctgtgtgtggacgatgtttatgtatcttgacactatatattggcactctacgtttgagtgatattaattgtacagtcaagtatttattatgtatgtttgaatacggcgtatacactggtatacatgtggcgttcaccgaattatgggtcttgagctatatacat

SEQ ID NO: 46175 - DNA, 286 bp, Glycine max
  Clone ID: LIB3107-069-Q1-K1-B4
ggtgtgggatgagaagatgatgaggaaacattggtagaagaaattggagagagagagagagagagagggttggattggttttcttcttcctcttcctaaagagaatctaatctcaatcctcattacacacatatctacagatttcttcattcctctctcaatcttttctgttttcttttcccctctttgacatcctcgttttcgccgaaacaaaaacaactaagattttgttttttgttgtatttttcttcctgttgttatttgactcggttgtctgaatcagttg

SEQ ID NO: 46176 - DNA, 172 bp, Glycine max
  unsure (1)..(172): unsure at all n locations
  Clone ID: LIB3107-069-Q1-K1-B5
ggggccacaggcacaacacacgacacacacagagcggnagcggcgacaccaagaccggagaaagaanggcgaaaacgacgccgangcagcacgcaacacggcnccacgacggaacccnagcgcncaaccaggcgaagaaancgaaggaggaaaagaaggaggngacccacaa

SEQ ID NO: 46177 - DNA, 376 bp, Glycine max
  unsure (1)..(376): unsure at all n locations
  Clone ID: LIB3107-069-Q1-K1-B7
gaaccccccattactcacttttcatccttcgatcatacacttagttgcttccaattaagatggttctgctagagaagctctgggatgatgttgtggctggccctcaacctgagcgtggccttggcaagctcagaaaactcaccaccctcaaaactattgatgaaggagaaagtagcaagctgcagaagacgttgtcgatgccgtcgacaccaacaaccccgatgactccgacgactccaacgacaccgggatcggcccgtaaagctgacaacgtttggaggagcgtcttccatcctgngagcaactccgccacaaagaccatcggtgctcagatgtttgacaaaccacttnccaacactcccactgtctatgactg

SEQ ID NO: 46178 - DNA, 161 bp, Glycine max
  Clone ID: LIB3107-069-Q1-K1-B8
ggtttatgggttggtttacaatgggcttctctaggtgagattgtggagaatctcgcaatttcttatttaccagattttccaaatttgagatatttacgcacttagagtaaatgcaagaactttaataaagaatgggtattgggaatcttgttttccaactc

SEQ ID NO: 46179 - DNA, 323 bp, Glycine max
  unsure (1)..(323): unsure at all n locations
  Clone ID: LIB3107-069-Q1-K1-C2
ggaaatgggttggtttacaatgccttcgctatctgagattgtggagaatctcgcaatttctagttaccagattttccaaatttgagatttttacgcacttagagtaaatgcaagaactttaagaaagattgggtattgggtatcttgttttccaactcaataagatagtggggaggaaagagatatggctgtaggtagcaaaaccagaaatatgcttgaaggtctggttaaagaaggatcatttaaatggttgcttggcaagaagagttacttttatgaagaatntgaagagatggaaaattcttcttctgctgggaagaatt

SEQ ID NO: 46180 - DNA, 429 bp, Glycine max
  Clone ID: LIB3107-069-Q1-K1-C3
acctttgaatcacctttgattcaccatgaagctttgcttctacatgatcccattcgtaacatccctaattatcgacttctcggtggctctcacactacgacatttcactcaacatcattgttgataaaaaatctccataggtatccttttctacgacctcgatcactagctttgacatcactcaactgctcttaagatcattgactatcctcacaaaccaacaccaaacattttagcatgctttgtcctaacctaaacactttctaaggaaccttctaagaaggcaaccattccaatacttcctccagtcgaaccttcttaaatgtaaatttcttaaattattaggtatttgaaagtaaatgcctcctggtggtattaggaggacccaataatttctttaagtcaccctccactggataatctcatgcc

SEQ ID NO: 46181 - DNA, 249 bp, Glycine max
  Clone ID: LIB3107-069-Q1-K1-C4
atcacgttcaataaagaacgataatcggcatcaggatgcaaatcagtactatatatgcagcgtacatatttacaacgctatggtggttaaggatagggatatattgttgatcaacaaatcaacgtgagttgtgaagtatattaattattaggaattattcgatttagaacttttactgttaggttgattaatgttttatgagtagctttaatgttattgacacatgtttattatctttttgaggcctgt

SEQ ID NO: 46182 - DNA, 397 bp, Glycine max
  Clone ID: LIB3107-069-Q1-K1-C8
agggaatatgtccactgcattacagcaaattccagggcggactcctttaaccactgacatcaaaggagaagttaatttaggtgccactccaaagagtttgcctatggatacatcagtttatcgacaagcaattttacaaacaaaatctgggctaggcagtccaggaataaatcaaggagttacaagtcttccattgaagggttggcctctagcatctggaattgatcaactaaaacctaatttcggtgtacaagcttctaagcccaatttgacaacccagaaccaatttgttttggcatcacaacggcaacaagccttggcacaagctcaggcacaaaataaccttgggaattctaattatggtgacatggatcctcgtagactttctggtctttct

SEQ ID NO: 46183 - DNA, 414 bp, Glycine max
  unsure (1)..(414): unsure at all n locations
  Clone ID: LIB3107-069-Q1-K1-D1
gggtgaaggtgtatggtccaacctatggatcccccaagagggtcctggtgtgtctgattgagaaggaaattgagtttgaaacagtgcatgttgatctcttcaagggagagaataaggaacctgagttccttaagctgcagccatttggatcccttcctgttattcaagacggtgattatactctctatgaatctcgtgcaataatcagatacttagctgagaagtataaagaccaagggactgacttattgngaaagacaatagaaaaaaaaggtctagtggaacaatggcttggaatggaagcctataactttcaaccaccactctacaacttgggtattaatggtctggttgcgccattaacgggggcttcttcggaccaaaaagtgattgaagaaagtgattaaaagattg

SEQ ID NO: 46184 - DNA, 260 bp, Glycine max
  Clone ID: LIB3107-069-Q1-K1-D2
gatccccaatcagagagaaaagttagggttcacaacttttccttttccttttgcttgcgaatctgaatcaaataatcaatcatccattcattattcatcatgtcgtcggcgaagaaaatcacgctgaagagttcggacggcgaggctttcgaggtggaggaggcggtggcgctggagtcgcagacgataaagcacatgatcgaagacgactgcgccgacagcggcattcctctgccgaacgtgacgagcaagatcctggc

SEQ ID NO: 46185 - DNA, 258 bp, Glycine max
  Clone ID: LIB3107-069-Q1-K1-D3
aggtggaaagctctgacaccatcgacaacgtcaaggccaagatccaggacaaggaaggaatccccccggaccagcaacgtctcattttcgccggaaagcaacttgaggacggccgtacccttgctgactacaacattcagaaggagagtactcttcacctcgtcctccgtctccgtggtggcatgcagatcttcgttaagacactcaccggcaagaccataaccctagaggttgaaagctccgacaccatcgataacg

SEQ ID NO: 46186 - DNA, 217 bp, Glycine max
  unsure (1)..(217): unsure at all n locations
  Clone ID: LIB3107-069-Q1-K1-D4
gtaatgataacctganntaacatagagaaganngtgggagaaggaagcccttagtgagtgtgaagaattanngaaaagaagaaacatgaataanannttggtaatgnnaatttccttgggtcaccgaagggccttatgttgaagctgcttgagaaaaatttcgaaattggaagtctggaaccttgaaccaagaccataagaatcttnnngcaacaat

SEQ ID NO: 46187 - DNA, 344 bp, Glycine max
  Clone ID: LIB3107-069-Q1-K1-D5
gatcagaggaagaatgtttctaccttcctagtccaggctggtatcgtgaagaaggatcatatcaagattcatggtttctgagcggttggagtcttaagtgtcaaattttacctgcctgactatgtgttaggcataatatataatctgagtcgtgtggatgtgattgtggtatttctaatgtgttcttatgttttaccatgtgatgtgggattatggatttcagaacattgtgggttatttgctttgaagacttatttgaaaacggtttaatcaagggaaaaaattaaaaaaaaaaaaaaaaatgccggccgttttaaagaatccaacttacctacccctgcctt

SEQ ID NO: 46188 - DNA, 384 bp, Glycine max
  unsure (1)..(384): unsure at all n locations
  Clone ID: LIB3107-069-Q1-K1-D6
cggacgcgtgggaaaaccaatgtcatgggaagagagngacctacagctacaagccaaggggcaagccaggatgcagtacctgtctaacttggtggctagaagatccattgtcccaattgcctcagggagacaaatcacacagagccctacatacatagtgagggccaagtttggtaccccagcacagaccctcctcttggccatggacactaacaatgatgctgcctgggtcccttgcactgcctgtgttggttgctcaacaaccacaccctttgctccttccaagtccaccactgtcaagaaagttggatgtggtgcttctcagtgcaaacaggtacggggcctcacttactacggaagcgcgtgtgcattcaactggaccta

SEQ ID NO: 46189 - DNA, 196 bp, Glycine max
  Clone ID: LIB3107-069-Q1-K1-E2
ggcagttcaattccaatatattccattctctctgtgtatttccctacctctcccttcaagatgcagatcttcgtcaagaccctcaccggcaagaccatcacccttgaggtggaaagctctgacaccatcgacaacgtcaaggccaagatccaggacaaggaaggaatccccccggaccagcaacgtctcattttcg

SEQ ID NO: 46190 - DNA, 216 bp, Glycine max
  unsure (1)..(216): unsure at all n locations
  Clone ID: LIB3107-069-Q1-K1-E4
atttgnggnatggntgagactagactngctatgggttttgctggccaacttgctgctggccttggctgttttaagttcattgacttagacacaccacttctgttgtcagatgatccagttcttgaaggctatgaagtttctggtgccacttataagttcacaaacgctaggggacatggtggattccttcactgggacaaccttgcttaatgtaaa

SEQ ID NO: 46191 - DNA, 194 bp, Glycine max
  unsure (1)..(194): unsure at all n locations
  Clone ID: LIB3107-069-Q1-K1-E5
cttcaaacnnnnccnncncagagacacnacncggggannnncaaccgnnggcaagncacaaagacagcancncagngaacaagaagcangcagcaaggaaccaggancancancaaagngcaaaacannngagaccggagaccangancagcaaccgaggannccnccaaagcgccccccngagaagagacaac

SEQ ID NO: 46192 - DNA, 111 bp, Glycine max
  unsure (1)..(111): unsure at all n locations
  Clone ID: LIB3107-069-Q1-K1-E7
gnagngaccggggganggcaggggaaaaagaaaaagggccgaaaccaannaaggaccaagacaaaggggggcacaagaangggaaagagaagaaagacaaggcaaggaaag

SEQ ID NO: 46193 - DNA, 378 bp, Glycine max
  Clone ID: LIB3107-069-Q1-K1-E8
tcataatgacggtgttcaatttgatttggttgagggtgctatgtctgctaataatccagcgttggttgctgtgagcgaagtgatacaacacaatgagcataaagaaatcctgttgctgtcattaggaacaggaacaataaaagctgaggagaagttatctggcatctttgatggcttgtgtcaacttgagtggctagttagcagcactaacgtttttagtgaggctctatatagtacaaacatgatccactactatcttgccacagtgtttccaggtgttttgcctgcggataactatcttcgaattgaggagtataacctggatccatccatggaagaaatggataatgctgacaagaaaaacatggattatcttgt

SEQ ID NO: 46194 - DNA, 423 bp, Glycine max
  Clone ID: LIB3107-069-Q1-K1-F1
ggttctagtgtgtgattgtttgttgttgtaactcgttcttcttcttttgttctgtgtttgtgtttgttttttctctcacctgaaaatgtcttgctgcggtggtaactgtggttgcggaagctcctgcaagtgcggcaacggctgcggaggctgcaagatgtacccagacttgagctacactgagtcaaccaccaccgagaccttggtcatgggagtggcacctgttaaggctcaatttgagggtgctgaaatgggtgtccccgctgaaaacaatggctgcaaatgtgaaccaaactgttcttgcaccccttgcccttccaattaaggggttggaaaaccaaccttaaaccaaaattacccttaatttaggattatggttaactatttatgtgttgcttaaaacttatgtattatgtctgggat

SEQ ID NO: 46195 - DNA, 295 bp, Glycine max
  Clone ID: LIB3107-069-Q1-K1-F2
atcattggaagctacagtgatgggaatcttgttgcatctttattggcttataaaatgggagttacacagtgcacaatcgcgcatgcacttgagaagacaaaatatccagattcagatttatattggaagaaatttgaggataaataccacttttcatgccaatttactgctgacctaatagccatgaataatgctgattttatcatcaccagtacataccaggagattgcaggaacgaaaaatactgttggccagtatgagagccacgctggttttactcttcctgggctctata

SEQ ID NO: 46196 - DNA, 389 bp, Glycine max
  Clone ID: LIB3107-069-Q1-K1-F3
ggttcttaatccatttacttttagatgcggttttgaatatagcttttgttagaaaggaatttattgtgctgtgttattaccacacacaatacctttatttataataagaattgatacatcataagggaaacctaataatgaagattaaataaggaaatccctaattttagctatacaattaaagcatatcaatcatatcctaattgtatatttcacactaccctcaagctagagcattgtcacataataatttggtatggtgaaacgtttccaattttatcttttggagaaagtgccttaatgatgggaacttaaattcaactgctggcatgacacaatacttaacttcggaactagatttaacaaccgatttttgcttcttgaacttt

SEQ ID NO: 46197 - DNA, 185 bp, Glycine max
  Clone ID: LIB3107-069-Q1-K1-F4
cggacgcgtgggaaaaccaatgtcatgggaagagagtgtcctacagctacaagccaaggaccaagccagggtgcagtacctttctaacttggtggctataagatccattgtcccaattgcctcagggagacaaatcacacagagccctacatacatagtgagggccaagtttggtaccccagcac

SEQ ID NO: 46198 - DNA, 256 bp, Glycine max
  Clone ID: LIB3107-069-Q1-K1-F5
atgtattttttagctattattggatttaaaattgaaggtcaacttcaattattaaaataaattttaaaccaaaaataatataaaatagcatttatgatagtgtccttaattaaggttgttccattttttgtgtaaaaatatatatcagacatgacaaaacagcaagcacattttggaggagctgaagcataccatgtgtggttaataaaacttattgaaaaagcagctaaaaaacatgtgccctgccttataatat

SEQ ID NO: 46199 - DNA, 249 bp, Glycine max
  Clone ID: LIB3107-069-Q1-K1-F8
gaaaaccaacaagacaacaacaactacaacaactacaactcttccctctctccttaacactgtttcatgcaaaaccatttctagggttttcggttttctcgccattcttcaattctcgcgctccggcatcgcttcgccatggcatttccgaccaaaaagctcatcgacgcccccaatgatgttgtgactgatttaattgaaggtttggtgaaaacatatcctgaactacagaatttaaatggttttctt

SEQ ID NO: 46200 - DNA, 327 bp, Glycine max
  Clone ID: LIB3107-069-Q1-K1-G1
gaataatttttgattcttttcccctagattcaggcgcagtttcggaggagaagaaaatagtcgttcgagatggcccgtacgaagcaaactgctcgtaagtccacaggaggaaaggctcctaggaagcagcttgcaaccaaggctgcacgtaagtctgcaccaactactggtggtgtgaagaagccacatcgttaccgtcctggtaccgttgctcttcgtgagattaggaaataccagaagagtaccgagcttttgatcaggaagctccctttccaggggctggttcgggaaattgttaaggacttaaaaatggttctgcgtttcaaa

SEQ ID NO: 46201 - DNA, 284 bp, Glycine max
  Clone ID: LIB3107-069-Q1-K1-G2
gacgaaaatgtggaagagaacgggttttgaagaagaagcagttcaattgatcaactcagatttcagggacctaagtctagctgctaatagactcgcccatcatgccatcaaacttggtggcattggctttggagccttttttttcggatggttggctgccattgttgttattaatttgtggattttgaatcgaccaacctgaaaaccaatttttttaacagaattattatttcattccttttttttaacttggctttatttaattttaaactttttaaggggaa

SEQ ID NO: 46202 - DNA, 355 bp, Glycine max
  Clone ID: LIB3107-069-Q1-K1-G3
gaatcacagtggtgtcttatcgctgtggttttgatcgtcttccgtctcttatatttctttttttttttttgtcttcgccgcacgccgaaacaatggccggaaaaggagagggtcctgctatcggaatcgatctcggaaccacctactcttgtgtcggtgtgtggcaacatgaccgagttgaaatcatcgccaacgaccaagggaacagaacgacgccgtcttacgtcggcttcactgataccgagcgtctcatcggtgatgcggctaaaaaccaagtcgccatgaaccccatcaacaccgttttcaatgccaaaaggttgattgtccgtaaattcagtgactcctttgttcaaag

SEQ ID NO: 46203 - DNA, 191 bp, Glycine max
  Clone ID: LIB3107-069-Q1-K1-G4
gacccacaaactctacaagtgtcacaagtcataactcgttagagagagtttgtgtgtgtttttgtgtgtcaccttggtgcatacaacacaagatggaggaccaaaatggtagtggtaagttgagccaagggcttcgcaaggtgaagccctaccttgctataattgcccttcaatttggcttcttaaggatg

SEQ ID NO: 46204 - DNA, 346 bp, Glycine max
  Clone ID: LIB3107-069-Q1-K1-H1
attatcgacaagcgcatcaccccgcgctttatccgctatgttcgctgggacctctgcctgggcatctttcgggtggtgctcggcgcggttgcgatgatgagctttgccgcggcggtctttgccggacagcccgaattcggcaactacaccgacgcactcggcaccgtcgtcgggctggaaaaatacgccggccggcttcccgcgatcctgttcgctcttgcgttgctcgaggccagtattatctggtgccgtggtcgtatcgttcgggactgcctttgctatcggcgacgtgttttcgttcaagccctctttgctttgcaggccgaaggatgcaaaggggtttatt

SEQ ID NO: 46205 - DNA, 358 bp, Glycine max
  Clone ID: LIB3107-069-Q1-K1-H2
aaacaccaaagggggctttgtgaaatatctgatacacatttcactggtatggagacgcacgcattttaatgacaatgactaactggttgtacttattgggtgaagttgttaagccacgttgggatcgtggagattgcaccacttacaccagggtcgagaggccttcccataatagggaatcttcatcaactagatagtccttctcttcatgagcagctatgggatctctcagagaaagatgggcctttattttcccttcaatacggattaaggccatccatagtagtttgctctccacaattggccaatgatgcaaggaaagacaatgaccttgggtgctgaggacgaccttaattac

SEQ ID NO: 46206 - DNA, 151 bp, Glycine max
  unsure (1)..(151): unsure at all n locations
  Clone ID: LIB3107-069-Q1-K1-H4
ggaancaaaangnaagccaacagnaaanccagcggnaccnancaaacgcaaggaaacaccagngaanaangcnaaagaaaccaacaaaaagaccaaggcnggnggnnggaagaagaagaaanagnnggcnnngngncnngacaaggnnaga

SEQ ID NO: 46207 - DNA, 305 bp, Glycine max
  Clone ID: LIB3107-069-Q1-K1-H8
gacctcaccgagtcgcagaaaaagaaaaaagcgagcatagtttcacttcggccttatccattttagggtttcggttctctaccctatctttcacgtatcgaaaccttaaatttacgatcatgtctgagcaatctggttggtagaacctttggtcttagtgagtcaatgtttatgtctgaattagacgatcaaattcctactgccttcgatccttttgctgatgcaaatgctgatgactcgggtgctgggtcaaaggagtatgtgcatattcgtgttcagcaacgaaatggtttgaaaagcctgac

SEQ ID NO: 46208 - DNA, 367 bp, Glycine max
  Clone ID: LIB3107-071-Q1-K1-A1
acgacagaagggcaattttccaatttctgcaggaaatatctcatgcctgtgggttggccagaaatgctgataaaggtggtagtcccacaaatgatttgctcaatatcagtcaaggtcccgagattaaagacaagattgtacttgatggagatgcatcatgcctcctactggatgagtatttactgcaaacacaagtcactgctggtacagttcagggggctatcttggatgatgtgaccaccccaagctctcctgatggaatttcatgctataacgatgctttgctatcctggatattttcatgttcacctatttggggatcagttgacatcatggctgcggaccagagaagataacctaaataagg

SEQ ID NO: 46209 - DNA, 318 bp, Glycine max
  unsure (1)..(318): unsure at all n locations
  Clone ID: LIB3107-071-Q1-K1-A2
ggaccatcaataacattggccagtgtatcagaggttttagcatttgcagttgggagttttatttccatgcctgcaattcgtgtgttctccatgtttgctgcattggctgttcttttggacttcctcctgcaagttaccgcttttgtagctctgatagttcttgactccttacgggcagaggataagagagttgattgttttccatgcataaaagtacatgcggaccctgatataggaactggacgaagaaaacctggtntattggctcgatacatgaaggaggttcatgctcccattctgagtatttgggggagaaaa

SEQ ID NO: 46210 - DNA, 396 bp, Glycine max
  Clone ID: LIB3107-071-Q1-K1-A3
ttactgtttactattgtgctgtgctggctttctggtagcttaatgacttttggatattgattttatctaagtaaccaatatatactttatggaaattatggaaggttactctgtttatgctttccttgacctagcgttaagtaatcaatattttatcttggatttaagttgtttcaagctaattgtggtgaagttctgtcaaatattactccatattcttcatttcttttctctgtcatataaacctgtgttgttgataacagatcatataaatttggacttaaactttgaattgatgatgtgccagtgtgataatttctgatttttgggattgagttctttggtattagtttggaaattattctttctcttcagatttagttcacattgttgtct

SEQ ID NO: 46211 - DNA, 374 bp, Glycine max
  unsure (1)..(374): unsure at all n locations
  Clone ID: LIB3107-071-Q1-K1-A5
acgcgtncccgacagtatgacaatacttcaaataggacactaaatactttcggcctgtggaggatacaggggggctcagttagcgagaaatcacacaaatgatcagctgacaaataactacatgaaggggaaaaaaaaacaagccgtacttgatggagacgcatcatctctcctactgaaatagatattactgcagacactcataactgttaccctctgcacaaggagcgtatattgacagatgtcaccaccccaagctctgctgatggaattccatgctataactaggctatgctatccagaatattgtcatgttcacctacagcagatcagcattcatcatgggtgcagaccaccaccgatgaactaaataa

SEQ ID NO: 46212 - DNA, 314 bp, Glycine max
  Clone ID: LIB3107-071-Q1-K1-A6
ataaatgaacgaaattgaccatgatcgtataatgaatatgaacgaaattgatcatgatcgtataatgaatatgaatgcataataataatcgaaatcaaaagaatgtaataaataatgatcaggttctaaatcatataaaagttggctctgataccaaatgttgggaaaactatgccaataatatatattttataaaaatttagaacgccgataaaatacttgttgaagtcatcatcaaaaagatgagaatggtctatgcatactacaacctgtagaaacccaaaagccaagccttcgcttgcgtgatcacactc

SEQ ID NO: 46213 - DNA, 337 bp, Glycine max
  unsure (1)..(337): unsure at all n locations
  Clone ID: LIB3107-071-Q1-K1-A7
aattatgttatcactaaagacctcaatccaattatgcctcactagtttctacattttgacttaaaataaaaatattttaaggaacgattggataatgaatcaactaaataattatccataagtaattgatccaaatgaaattaaggaaccattgtaacaattattttatgataaatatagtgatacacttaaatttgttataagtaggataagagaatgtagctaagattagtcttttgtttataaataaaatacgaattcaccgngtttattattagtattcttatctcttaacaaggttgaaatcttgttttggactatgttaagaatatcatat

SEQ ID NO: 46214 - DNA, 304 bp, Glycine max
  Clone ID: LIB3107-071-Q1-K1-A8
tgaactaataaagtgatatgttgagtgtgggcgattatatcatgtttatatgttgttcttgttacaagggaacataatgtctattagttgttagactacaattgagaatgagttagtacaataagaggaataatattacatgagttaaggtaaatgtctagagtgtcctagagcattaatgatgttagattgatcttgttaaatacttttaagtgtttgatagagaagagtatgttaggtcctgacgaccagtcttctcatctattttggatttgatgaataacaataagtataaattactgat

SEQ ID NO: 46215 - DNA, 410 bp, Glycine max
  unsure (1)..(410): unsure at all n locations
  Clone ID: LIB3107-071-Q1-K1-B1
cccacgcgttcgcccacgcgtccgcccacacgttcgtccacacgttcgtaccggtgtgagaggacacacacaaagggaatatgtgtttactctaaacacctccacccaatagcgccacaagtagtctacactttgactcataataaaaatattttaaggagcgactgggtaatgaatcaactaaataattatccataagtaattgatccaaatgaaattaaggaaccattgtaacaattattttatgataaatatagtgatacacttaaatttgttataagtaggataagagaatgtagctaagattagtcttttgtttataaataaaatacgaattcaccgngtttattattagtattcttatctcttacaagggtgaaatcttgttttggactatgtttagaatatca

SEQ ID NO: 46216 - DNA, 380 bp, Glycine max
  Clone ID: LIB3107-071-Q1-K1-B2
gatagcagcatcatacaaagcattgaattcaaaaaggaagttcatttcttgtgctttgctttattcctcaaaaccaaacatgtcgaacacatgcggcaactgtgactgcgctgacaagactaactgcaccaagggaaacagctatggtgttatagtagagactgagaagagctacatcgagactgttgacatggatgttccagcagctgagcatgatgggaagtgcaagtgtggcactaactgcacttgcacggactgcacttgtggccattaaggaatatgtatgaaaatgtaattgccatgtgtttggcaatacaaatctccaaataatgtaatcttcgaatgaataaatgtgtgctgttatcctacttcagggtctg

SEQ ID NO: 46217 - DNA, 345 bp, Glycine max
  Clone ID: LIB3107-071-Q1-K1-B3
gaacaacaaacatcgaccacgggtgcttgtcgggggttctcaaatccaaaacctcgattcactcgattgggcgtgtgccttgtcgtcgccttcgtcatggcgacgctgctaagaaaactgtgcaaatcgtcgacgatgaagcgatccggctctcactctcaccctcaccctctgccgttctcggaacaagcacgcccatacttccctcttggcgccttcgaccctctacctgccgacatactcatgcaaatcgaccgtctcttaggccccaaacacgctgccagactctgcctcgtttccaagtcttgacggtcactcgtcttcgacaacaccctgtgggcccac

SEQ ID NO: 46218 - DNA, 358 bp, Glycine max
  Clone ID: LIB3107-071-Q1-K1-B4
ggatgttggacttgctgccaatgttgctatcattgatttaatttagactgcttatgatcttgggaaacctttcctttaatgtgctattcagctctacattccttcgatacgaatttcaaacatgaggatccgcatatggaaacactgatattggactaaggtttcgatgtttctattaacgacttcatcatcggaccagcgaacgaggcgaggaacgcctgcgccatgatacggggtggaatcgagtatatatagttaagaaatgtggtatttatattactgcctaaccttagctgtagatcattaacttgatccaatagttactggcttattggggcactgtggtgttgttcaatac

SEQ ID NO: 46219 - DNA, 330 bp, Glycine max
  Clone ID: LIB3107-071-Q1-K1-B5
aattatgttatcactaaagacctcaatccaattatgcctcactagtttctacattttgacttaaaataaaaatattttaaggagcgcttggagaatgagtcaactacataattatccatatgtaattgtgccccatgagattaatgagccatctgtgcacctattttatgatgaatatagtgatacacttaaatttgttataagtaggataagagaatgtagctcagattagtcttttgtttataaataaaatacgaattcaccgcgcttattattagtattcttatctcttacaagggtgaaatcttgttttggactatgttaagaata

SEQ ID NO: 46220 - DNA, 390 bp, Glycine max
  Clone ID: LIB3107-071-Q1-K1-B6
gatagcagcatcatacaaagcattgaattcaaaaactaagttcatttcttgtgctttgctttattcctcaaaaccaaacatgtcgaacacatgcggcaactgtgactgcgctgacaagactaactgcaccaagggaaacagctatggtgttatagtagagactgagaagagctacatcgagactgttgacatggatgttccagcagctgagcatgatgggaagtgcaagtgtggcactaactgcacttgcacggactgcacttgtggccattaaggaatatgtatgaaaatgtaattgccatgtgtttggcaatacaaatctccaaataatgtaatcttcgtatgaataaatgtgtgctgttatcctacttcagggtctgtgtagtcatg

SEQ ID NO: 46221 - DNA, 406 bp, Glycine max
  Clone ID: LIB3107-071-Q1-K1-B7
ggacaccacaatgtaggggttccacctagaaaacgtcaattgttaagtcttacctacaacaaatactttgtaatataattagtcgatcaaagtgtgatcatacctagatagaggggtgtgttgaaagtcccacataacagatagtcatgagaaaaatgagacatattaaagtctcacatcgaataaagatagtgtcgaaataaattatatagatgaggagtaattctcaccttacaagttgattttgtgaaaattgcaagtgtgagatatgtgtgataatgtgacgtgagaaggttaattgaagaacaaattcagtagtttgctcttgcttcattttcgagttatactgaaccaatctcagacaagctccttccagatttgctttctcaggagcaacatgtttcta

SEQ ID NO: 46222 - DNA, 344 bp, Glycine max
  unsure (1)..(344): unsure at all n locations
  Clone ID: LIB3107-071-Q1-K1-B8
ttaagagggaatctctctctttatttctttgactctctcagagccaaaattttccaaactcctcaactctcatcagatatcaaccatctctctctctccaaactcaaatacctttctgttctgctcttcaatttattcatctctgacaccctcttaattctgcttccagttcctctgagtgatgggtatgatctctcctcactcccacaattcccacattatagtaatcctcatcacctgcttctttcgtcataaattctagatcaaactccactccctgatcctnccttttacttcttatgtagcatgtatgaactcaaatcatcaaatgaatatgacccttt

SEQ ID NO: 46223 - DNA, 419 bp, Glycine max
  Clone ID: LIB3107-071-Q1-K1-C1
gatcacttcatagtaagcactatggaaaaaacgacgggcattcatctatggctaccctcattgctcccagcaaccactctacccaagaagacgctgaggctctcagaaaggctattgaaggatggtgcactgatgagaaaactgtcatagaagtattgcgtcatagaactgtttatcagaggcagcacatcagaagagtctatgaggaaattttacaggaggatcttgtgaaacgcctagagtctgagatcaaaggagactttgagaaagccgtgtaccgagggatactagaacctgcagatcgtgatgctgttgaggccaatgttgccatcaagaatggcaaaaactacaatgtcattgtggaaatcgtcactatcctctccccggcagagctcttggccatgagacgcgcttatatc

SEQ ID NO: 46224 - DNA, 427 bp, Glycine max
  Clone ID: LIB3107-071-Q1-K1-C2
gatggcagcaaagaaggtgtgtgtaacacgtgctggaggattcgtagcgtcttggcttgttaagcttcttctttccaaaggctacattgtccatggaactgtgagagaccctgaacctgctactcagaaatatgaacacttgctcaaactccacggagcttctgaaaacctcactctcttcaaggcagatctcttgaactacgaatctcttcgctcagcaatttctggatgcactgcagttttccatcttgcttgccctgtaccctcaatcagtgttcccaaccctcaggttgaaatgattgagcctgctgtgaaaggaacaactaatgtacttgaagctagccttgaagctaaagtgcaacgacttgtctttgtatcatctttagctgctatttccaatagccccaatttgcctaaagataaagtg

SEQ ID NO: 46225 - DNA, 414 bp, Glycine max
  Clone ID: LIB3107-071-Q1-K1-C5
ggttctagtgtatgtgattgttgtgactcgttcttcttcgtcgttatcttcttcttttgttgtttgtgtgtttgttttttctctcacctgaaaatgtcttgctgcggtggtaactgtggttgcggaagcgcctgcaagtgcggcaacggctgcggaggctgcaagatgtacccagacttgagctacaccgagtcaaccaccaccgagaccttggtcatgggagtggcaccagttaaggctcaattcgagagtgctgaaatgggtgttcccgctgagaacgatggctgcaaatgtggagctaactgcacctgcaacccctgcacttgcaagtgaggtgttggagagctaaagcttcaagcagaaatggcccttagaaataatgataaaaactatatgtagtttcaaaacttcaaa

SEQ ID NO: 46226 - DNA, 321 bp, Glycine max
  Clone ID: LIB3107-071-Q1-K1-C6
ttatggcctggtgtctcagatttgacaggatcttttagactttataggaaatcagtgcttgaagatatcattagttgctgtgttagtaaaggatatgtctttcaaatggaaatgatagtacgggcatccagaaaagggtaccatattgaagaggtcccaatcacatttgttgatagagtatttggaagttcaaagcttggtggatcagagattgttgaatacctaaagggcctagcttatctcttggtgacaacataaaaggataaatcataacaactcgatataccttacattttgggggaaaaaaaagggatataaatt

SEQ ID NO: 46227 - DNA, 271 bp, Glycine max
  Clone ID: LIB3107-071-Q1-K1-C8
agactacggattgggggatacaatacgtgttcctacccaaaacaaaaattaaatgtgtggaacagttggaggagatcaataatttatataggtccatcgaccatagaagatacgataaacccaaggcaatgattatgcgggatcggacctatgggatactagcgtcgataggtctgatgcacatagaggcctagatctgatgctagggccttgatatacgctggcaaaactaccatgcttcacatgctcgatgatgagagattagtacagc

SEQ ID NO: 46228 - DNA, 430 bp, Glycine max
  Clone ID: LIB3107-071-Q1-K1-D4
tctgaggggatcgcacttcaattgcaatcaaggtaattcattggctttgcgcagatccctacctctcctttcaagatgcagatcttcgtcaagaccctcaccggaaagaccatcacccttgaggtggaaagctctgacaccatcgacaacgtcaaggccaagatccaggacaaggaaggaattcccccggatcagcaacgtctcatcttcgccggaaagcagctcgaggacggccgtaccctcgccgactacaacatccagaaggagtcaacccttcaccttgtccttcgtctccgtggtggcatgcagatcttcgtcaagactctcactggcaaaaccataaccctagaggtcgaaagctctgacaccattgacaacgtcaaggccaagatccaagacaaggagggaatccccccagaccagcaacgtc

SEQ ID NO: 46229 - DNA, 309 bp, Glycine max
  unsure (1)..(309): unsure at all n locations
  Clone ID: LIB3107-071-Q1-K1-D5
agccggcacagtgggaatgttgcaattggggtccacaactggtggtttcagaggagcttctgggttaatgcctctgggcttgaatttggaacaagctgccttcctaagacaccaagttaacgttgacgacgacgttgttcatgttaatgttgatgatgccaccatccaccaacatcacctcactctccataacaacaacacctcctcatcaccctcttccactgcaccaatcaccgatagggattctatgcatatgaggggcttattttccgcgtntggacaactgcatactcctatccgccccacgct

SEQ ID NO: 46230 - DNA, 245 bp, Glycine max
  Clone ID: LIB3107-071-Q1-K1-D6
ggatatttgttgcgaaattttaaaattggagggaacaagcaaagtcgaagcggcgcatggcggatccggcagatccaatcattgaagtagaagaagtagaggaggatggtaccacgcaccaccctgctgctacttgacacgagttttttgatttatcaacgacagctgatccgagttacataatctccttgataagaaagcatttgccgttggattctgcttctcggagaagcttgagagaagtt

SEQ ID NO: 46231 - DNA, 427 bp, Glycine max
  Clone ID: LIB3107-071-Q1-K1-D7
cgagacatagtctcttcacgatcttaattcactcatgtacactatctaacttacataaatagttcgtcctagttagatcagttcagttttttttccaataaaaaaatgtctctttaaaagactcatgtatggtattttcctcactgcatacaagaaaaaatacaagaatctaaaggtggttaataaaatacaaaagaaatatcagaaaataattaaagcaaaacaacacacaaatactaaaattgttaagcgtagcataatttttagcaataaaagtgatttaattgaattgaatataaacatgagtaatgaaatgaaccactcacggcaattgagatataagcatgtttactgttcacaggcccgactgtgaagccagtatatgcagccatagctccatgaacagcaccatgtgcaagaagagtgc

SEQ ID NO: 46232 - DNA, 401 bp, Glycine max
  Clone ID: LIB3107-071-Q1-K1-D8
acgacagaagggggtgtgagagagcgagcgagcgagcagtttcaaagagaggatttgggattgggaaggcgagggattgcgctgcgtctcttcctcttctctttcgattcatccctcattcataatcttccaatccaacaacctcagcctcacactcacacatacacacatctgaacgcgtatcgtccctcccatggcttcaaagcgcatcctcaaggagctcaaggacttgcagaaagacccaccaacttcttgcagcgctggtccagtagctgaggacatgttccattggcaagcaacgattatgggtcctgctgatagtccttatgctggaggtgtattcctagtcactatccactttcctccggataatccttccaaacctcccaaggttgccttta

SEQ ID NO: 46233 - DNA, 265 bp, Glycine max
  Clone ID: LIB3107-071-Q1-K1-E1
ggtctaaaaagggggcgtaatgtgaattctattgtgtgcaacgtagtgttttcccacgaggcaacaaggaaacaataatctcatattcccaaaacttgagctttattacgttgtttctgtagatggacaagggtagaaccgaggtggtgtctgctttgcagtttgcatgcaccgatgatgtctcaactaatatagccaccgacgagaggctaattagagctgcacataaacagggtgcgaacatcattctgattcaggagctttt

SEQ ID NO: 46234 - DNA, 435 bp, Glycine max
  Clone ID: LIB3107-071-Q1-K1-E3
gaagacgacagaaggggattccttcatgccaatccttcaccactaggatggtcccaagttccgtcttgagctgaatgtgcccgaggcgttgtctcttctggatatttttgcagaacaagacaccttcaatgacactttcgaggctttgccggcataaaaggagattaatagcaaataatgcaacaagaatatcactcacagagacaatagataattagaggtttcggttggtttgaaagttatattaagtatggacttaagaagagagtccgaaagacaaaacataatgaatatatagcggagggcgcttggatattcaacaacctatatataatgtattactggtactattgtatagaggatggtccattataagtattatacacatatatactaagagaatagaatcagaatgaactattttgcatatgggtt

SEQ ID NO: 46235 - DNA, 253 bp, Glycine max
  Clone ID: LIB3107-071-Q1-K1-E5
gacgagaacaaagtgagcaacttcccttctttcagagtcattcaaaatgaacgaacttaaaaaacaatgcagtttcaaggtgtttaagcatggtagtcccgagggttcacccattgtctaaataaaggtgcacacgatctaaacaagtcctacttgttaccaagtaacacacattaaggtcgcttgtatgatgatcacactctactcattaatattataccatcttagaactaggagatcacatgtccaagga

SEQ ID NO: 46236 - DNA, 293 bp, Glycine max
  unsure (1)..(293): unsure at all n locations
  Clone ID: LIB3107-071-Q1-K1-E6
atcattgaagacgttcgaccacacggtggaatcaagaagttcagatctgctgcttactccaactgcatccgcaagccatcctgagattccctaggtcgtgtgaggacgtagcccccttagtcctgcatctgctatatttttctagtctcttctcttctcctttntcttgttttcttccttgcccttttgttctctctacctacacagcaagaacttggttctttttgaagtaagaagggtggcttaacttatggtttcgaaagctatgaaaaaagacctgggatatcattttt

SEQ ID NO: 46237 - DNA, 273 bp, Glycine max
  Clone ID: LIB3107-071-Q1-K1-E7
tgagggggttctagtgtgtgattgtttgttgttgtaactcgttcttcttcttttgttgttctgtgtttgtgtttgttttttctctcacctgaaaatgtcttgctgcggtggtaactgtggttgcggaagcttctgccagtgcggcaactgctgcggacgctgcatgatgtacccatacttgtgctacactgagtcatccaccaccgacaccttggtcatggtagtggcacctgttaatgctcattttgtgggtgctgagactggttttccccc

SEQ ID NO: 46238 - DNA, 308 bp, Glycine max
  Clone ID: LIB3107-071-Q1-K1-E8
gatcctacgaacgctcctcacttgcagaattcaaagaaggcgtcttcataaacgcctttattctccgtttccgtttccttcccggaattcgatttttcatctctgaaaatgagagagtgcatctcgatccacattggtcaggccggtatccaggtcggaaatgcttgctgggagctctactgtcttgagcacggcatcgggcccgatgggcaaatgccaagtgacaaaacagttggcggaggtgatgatgctttcaacactttcttcagtgagactggtgctggaaagcacgtgccacgtgccgtctt

SEQ ID NO: 46239 - DNA, 329 bp, Glycine max
  Clone ID: LIB3107-071-Q1-K1-F1
ctgcgatacgaccacagaatggatatttattaaaatagctctaaagatgggggcttaatatcaattacatctgtaaaaggcatccccaatggttaggagaaaaaaatgcttataaactaccattaatatcaattactacgcactaatggcttaaagagtttgagctcttgatttacaaatattgtgatctcaagtccttcaagtccgctgcattgttagatttacttcatctgaatgtattattcgatttaataaagaatctttatcatttatctatggcgtccattactaactaatatgagactttttagtgcaactggacatctttg

SEQ ID NO: 46240 - DNA, 343 bp, Glycine max
  Clone ID: LIB3107-071-Q1-K1-F2
taccagtaaagagaacgtacttgggtgtggttctttttgaaacgtatcaataatctagacccatgcttcgagttgtttcatgccataaataaactctaacacttaagaaatctgtcggacaggcggattcacacctcttacaaccaacacagtcctctgttcttggggcagaagctatttgtttagctttacatccgtcccaaggtatcatttctaatacatccgttgtgcaggctcggacacattgagtacatcctatacatgtatcataaatttttactgaatgtgacattggatcgtaatccttgaacatcaaaaattcaacattttaaatttagtaaac

SEQ ID NO: 46241 - DNA, 369 bp, Glycine max
  Clone ID: LIB3107-071-Q1-K1-F3
gaaaccttcatgttgtagtgcgggggggcttctcatttctatgccgttccatggatcgcgaaggaggatccaacggcggatcttgctactactacgttctcgggattcgtagggacgccttcttctatgatattcgcactgtctaccgaaaactagctatgaggtgtcgcccgaacataaggtctcagaatcctgcaaccggtggcgaatccaatcttaactttcagcatatccaagaagcctactcagttctctccgatcagtgtagatggtcaatgcacgacgcagtgctatacgatccttaggaggaagaacaccaagaactttgtgtctacatgcaggataagatctcaatgatgaacaatgcaa

SEQ ID NO: 46242 - DNA, 269 bp, Glycine max
  Clone ID: LIB3107-071-Q1-K1-F4
agaagatctggtgctggatactgcaatcagagactgggtgttgatccctctctctgtggttatggttctcattggtgtgctccgttactttgtttctaagcttatgcactcttcacaaacccttgtggccaaaatggttaaagaaggccaggtgatggttaaacctcggaatttacgtgctggggcaaatttaattctatccaaggcatttcgcgctcgcaaaatttatttctgtaacgaggaaaatggtctgttgtttgtccaaaggg

SEQ ID NO: 46243 - DNA, 212 bp, Glycine max
  Clone ID: LIB3107-071-Q1-K1-F5
gattccactgagtgtagtaatcaatcatcttttgtttgttcttcagtactttagtgtgtgatttaattccaagattttgagaatgtctagctgtgggtgtggaagtagctgcaactgtggcagcaactgcggttgcaacaagtactcttttgacttgagctatgttgagaagacaaccacagagactctttgttttgggtgttgggtctgtg

SEQ ID NO: 46244 - DNA, 159 bp, Glycine max
  Clone ID: LIB3107-071-Q1-K1-F6
aggcgctgtgtgttatgctcaagtgaagacgagactattaaacacatttttttggactgcatagtcgcaaaaaaaatatggcagcaggtttgtctttggctggatgttccgattgtggaaggggaagttattcatgtctacatttattgatttttggat

SEQ ID NO: 46245 - DNA, 282 bp, Glycine max
  unsure (1)..(282): unsure at all n locations
  Clone ID: LIB3107-071-Q1-K1-F8
cccacgcgtccgaattcgagcggcccttnntttttttttttttttttttttttttggccaattctatttattctttctaataataaaaaatattctaataactaataataaaaaggaaaataaagattcatttgaatattataaaataaccaattattgaacaaaacaagattctttagttatatatgtaaaaaaaaaatggtttatttataagaatacatattccattctatatcaaaacaaaatataaaaatttggaatagattctttgaaatctcaaaa

SEQ ID NO: 46246 - DNA, 417 bp, Glycine max
  Clone ID: LIB3107-071-Q1-K1-G1
ggttctagtgtgtgattgtttgtggatgtaactcgttcttcttcttttgttgttctgtgtttgcgtttgttttttctctcacctgaaaatgtcttgctgcggtggtaactgtggttgctgaagctcctgcaagtgcggcaacggctgctgaggctgcaagatgtacccagacttgagctacactgagtcaaccaccaccgagaccttggtcatgggagtggcacctgttaaggctcaatttgagggtgctgaaatgggtgtgcccgctgagaacgatggctgcaaatgtggaccaaactgctcctgcaacccctgcacttgcaagtgatgtgttgggagagcaagcttcaagcaaagatagcccttaattatgaataatgataaactattaatgtgtatctaaaaacttatgtatta

SEQ ID NO: 46247 - DNA, 339 bp, Glycine max
  Clone ID: LIB3107-071-Q1-K1-G6
ctatgcattgattcgatttctgatactatcggagtgaaaaaagtagatctaaagaaaaacgcgggttggattatattagtaacaagtaaattctttgtacgtaaaaagttccaagattttgttggacagaataacaattgcaaagtttgagatcacccagaaagcattatcaattttaaaagcctactcgggtattgagcgtttatcaaagtttacttaataagaacttaatttttttttttttcaataaagaatagtttgtaacttcggaaaaagaagatctagtttatttttcttacataagaatctcatatatgggggaataacacatacattttt

SEQ ID NO: 46248 - DNA, 365 bp, Glycine max
  Clone ID: LIB3107-071-Q1-K1-G7
gaaaacaccatcatctacaacgcctcgaatccacacagttctactctacgctctaaaccctctctctctctctctctcgatctatcatggctttgcccaatcagcaaaccgtggattaccctagtttcaaactcgtcatcgtcggtgacggcggtacaggaaagacaacgttcgtgaaaaggcatcttaccggtgaattcgagaaaaaatacgaaccgaccattggagtggaggttcacccattggatttcttcacaaactgcggaaagattcgcttctaccggtgggaatccggtggaccaaaaaaagttggggggcctaaaaaaggatattatattcatgggccatgggccaatattatggtt

SEQ ID NO: 46249 - DNA, 331 bp, Glycine max
  Clone ID: LIB3107-071-Q1-K1-H1
tcttaaggggaatacaccatcatctacaacgggtcgaatccacgcagttctactctacgctctaaaccctctctctctctctctctcgatctatcatggctttgcccaatcagcaaaccgtggattaccctagtttcaaactcgtcatcgacggtgacggcggtacaggaaagacaacgttcgtgaaaaggcatcttaaccgtgaattcgagaaaaaatactaaccgaccattggagtggaggttcacccattggattttcttcacaaactgccgaaaagattctgcttcttactgttagggatactgcttgtacaaagaaaaaatttggt

SEQ ID NO: 46250 - DNA, 397 bp, Glycine max
  Clone ID: LIB3107-071-Q1-K1-H3
ggttctagtgtgtgattgtttgttgttgtaactcgttcttcttcttttgttgttctgtgtttgtgtttgttttttctctcacctgaaaatgtcttgctgcggtggtaactgtggttgcggaagctcctgcaagtgcagcaacagctgcgcaggctgcctgatgtacccagacttgagctacactgagtcaaccaccaccgagaccttggtcatgggagtggcacctgttaaggctcaatttgagggtgctgaaatgggtgtgcccgctgagaacgatggctgcaaatgtggaccaaactgctcctgcaacccctgcacttgcaagtgaggtgttgggagagcaagcttcaagcagagatagcccttaattaggaataatgataaactattaatgtgt

SEQ ID NO: 46251 - DNA, 312 bp, Glycine max
  Clone ID: LIB3107-071-Q1-K1-H4
cactgtcattattgatgaaaaacagacccggtttactccagggcaaatatcttactcaatcatcttcaacaatcccacactttcactccttctaatagaacaccccccctcaaatcaaccctcttactaccctccccattcattcatacaaaactctctcctctaccacactcctttaaaccacaaacagtccaataaaacccaaatcaccaaaccattcgacctatttacagcctccaccaattaaaagacccaatcccacatccttcatttccaactgactttacagagtaacccaaacgctcttatacc

SEQ ID NO: 46252 - DNA, 323 bp, Glycine max
  Clone ID: LIB3107-071-Q1-K1-H5
gaggataaaatatcacgggatcgaattgaattaagatatttgaaaagcaaagctaagaagaaatgagaaaataaaaaggatagcatatcatatgatatcagaagtgagtgtctcataatggaagcataacagcgaagtgatccaaagaagaagaaggatgcaggagaactactcataccaatcgtatccagattccggcgagtcctcaccacgatccagagagatagacttcgacaaccctcctccatgggacgaccaaaactacaaagccaagttcatgtgcaactacggcggcaagatcctacctcgctcccacgacaacc

SEQ ID NO: 46253 - DNA, 278 bp, Glycine max
  Clone ID: LIB3107-071-Q1-K1-H6
ggttaaaatcagaacttgtttactgcattttatttattttcttcaatcattctttaacttccacaaggtttgggtaatcaatgagtatatacaaacttaaatcaaaatacttaatagcatggcgatacatttatacaaaacttctaccccaagcacacgcaatggagccgtagacagtcaagtaaaatccaatccacgaaatcatttgatctattgacagcatcgttgtggtaaaagccgtaatgccagaggaatcattaccgcagggcatagagggg

SEQ ID NO: 46254 - DNA, 178 bp, Glycine max
  Clone ID: LIB3107-071-Q1-K1-H7
tctatgggaatgtttaaatatcttttatcgaattgaattaaggtatttaataggcaaagttcataagaaatgataaaataaaatcgatagcatatcatatgatatcataagtgagtgtctcattatcgaagcatctcctagttacctactcaagtagctataataattcttgactcct

SEQ ID NO: 46255 - DNA, 281 bp, Glycine max
  Clone ID: LIB3107-071-Q1-K1-H8
ggttgtgcactgtcatgaaagaggatgaagagacgctgcagaatcaacggcaaatcactgactcgtccctctccaccgagtcacgcacttccactccttctgatggagcgccacccaacttgggaacccttagttctccgttcctcgtttttgcatgaccttgccactcatatgcagggaagctctaccgcacgtaagggtggaaaagctgagagtaaggtgtctgctcagcctcctgatgaggaaactgttgtaaaagatgcagttgaggcccctaaaaa

SEQ ID NO: 46256 - DNA, 385 bp, Glycine max
  Clone ID: LIB3107-072-Q1-K1-A1
ggttctagtgtgtgattgtttgttgttgtaactcgttcttcttcttttgttgttctgtgtttgtgtttgttttttctctcacctgaaaatgtcttgctgcggtggtaactgtggttgcggaagctcctgcaagtgcggcaacggctgcggaggctgcaagatgtacccagacttgagctacactgagtcaaccaccaccgagaccttggtcatgggagtggcacctgttaaagctcaatttgagggtgctgaaatgggtgtgcccccttagaacgattgctgcaaatgtggaccaaacttgctctgcaaccccttcacttgcaagtgaagtgttgggagaaccaacttcaaaccaaaatagcccttaattaagaattatgattaa

SEQ ID NO: 46257 - DNA, 219 bp, Glycine max
  Clone ID: LIB3107-072-Q1-K1-A12
gatgagattatctaacaaagcattgaattagaaaactgaagttcattccttgtgttttgctttcttcctcaaaaccaaacatgtcgaacacatgcggcaactgcgactgtgctgacaagactagctgtatcaagggaaacagctatggagtgtattgtatatactgacaagagttacattgatactgttgtcatgtgatgtccagcagctgagcatgat

SEQ ID NO: 46258 - DNA, 372 bp, Glycine max
  Clone ID: LIB3107-072-Q1-K1-A2
ggcagcgcttgatttgaggccaggcaagccccactcaaccaccacacctctcctcgttcacgctacccctttctgctcttcttctacctttcaagttttaaaagtataaagatggcagagacattcctatttacctcagagtcggtgaacgagggacaccctgacaagctctgcgaccaaatctccgatgctgtcctcgacgcttgcctcgagcaggacccagacagcaaagttgcctgcgaaacatgcaccaaaaccaacttggtcatggtcttcggagaaatcacgaccaaggccaacgttgactacgagaagatagtgcgtgacacctgcaggaacatcggcttcgtctcaaatgatgtgggactggat

SEQ ID NO: 46259 - DNA, 332 bp, Glycine max
  Clone ID: LIB3107-072-Q1-K1-A3
tatggtgagtgttgctatttaatttgatgaatttggggtttggttcaaattattattgtgaagctttgttagcagcagtagcagacacaagaattaatttcgatcacgcatctctcataaccctatttattattattgaaattattttttattcgacagtgacagatagaccctcatggcgggtcactgcttcttctgtctctctctctctcttctcaattatggagggattggattggatgcattgcctgatgcaaccactgccagaaaaaaaaaaaaaaatttgtcgaaatttcattggaatcaaaatcaaattttcgagccttactttg

SEQ ID NO: 46260 - DNA, 323 bp, Glycine max
  Clone ID: LIB3107-072-Q1-K1-A4
cttgggattgtgaaatcaacagagaagcatttgactaatagagagacataagcataatattgagaaataatggagggttgtacttattgtgtgaagttgctatgccttgttgggtttgtggtgcttgtgagtactattgcaggggtggagagtgctggtgaatgtgggaaatctaccaccccagataatgaggcttataagcttgcaccatgtgcctcaacagcacaagatgagaatgctagtgtttctcagagttgctgtgctcaggtgaagaaaattgggcagaacccatgctgcctctttgcaagtttgctcttcaacac

SEQ ID NO: 46261 - DNA, 290 bp, Glycine max
  Clone ID: LIB3107-072-Q1-K1-A5
cccacgcgtccgaagacgacaacagggggtggttcgagtttctaattgattggagtaatggggggtggggctcaaattattgttctgaaactgtgtttgcaccatctcccacacacaaaatgtattgctgcggaggcaactgttattacccaagctcctacaatgtgaattattttttattccagctgcaacatatacacactcatggcgggtcacttgcttattctgtctctctttctttttttttaatttattggacggaattggaattgggattcatttggctggat

SEQ ID NO: 46262 - DNA, 255 bp, Glycine max
  Clone ID: LIB3107-072-Q1-K1-A6
gacaccaaaccaaagttagagtgagcaacttccaacaccatagtgaaatggcttccaaggctgcacttctcttgagtgtcaaagatctcttcttcaccgtggttagctccacatatgtgccatgcaacccaccccccaaaactccaaaacacccacctgtaccaaatccacctttcccaaagcaagcaagttgccccaaagacactattaatattggtgtgtgtgctgatgtgttaggtctgatcaacgtgcaac

SEQ ID NO: 46263 - DNA, 317 bp, Glycine max
  Clone ID: LIB3107-072-Q1-K1-A7
ggttctctgatggcaaggcaagcgcttgtcctgtgtgtgttctgactatgcttcttggcaagagttagatcggacgaggattgcgtgtacacggtgtacgttcggacgggttcgatcatcaagggaggcaccgattcagtaattggtctgaagctatacaacaagtccggctacggcatatacatcaccaacctcgaggcatggggcgggttaatggatccgggtcacatctactacgagcggggcaaccttgacatattcagaggtagaagcccttgcttggaagcacccgtttgagaagccaacctaacttctga

SEQ ID NO: 46264 - DNA, 309 bp, Glycine max
  Clone ID: LIB3107-072-Q1-K1-B1
gtggcaaaaagggtcttgctgccaatcctcaccgttctgttgatccagttttggctgcttcagctgcagttatcagcttacagggtattgtctcccgcgaagcaaatccattggattctcaggttgtctctgtgacttcgtttaatggaggcaacaatcttgacatgatacctgactcggtggtcctattggggactttcagagcgttctctaacaccagcttttaccagctacttgaaagaataaagcaagtgattgtggaacaaggtaatgtctacagatgcttggcaaaaattgacttctttgaaa

SEQ ID NO: 46265 - DNA, 312 bp, Glycine max
  Clone ID: LIB3107-072-Q1-K1-B12
gtatgaggtatatgtatgaaccccgtatatccatcctcatggggatggtgaaaggagggccccaattggtagaaaaaaacccgcaactcctgggggttttcctgcacatggaagaagaagtagaaatagggaagaaatatagtgataattagattcttttgcgtctgtctaaatagtatagaatatagaaactgtatcttcgtctttacaagaaaaaggaattattatttttatcacgtttatttaaaataatccttttttagcgaatcatttattagaaaaataaaataacttaacacaaaagccggaaaa

SEQ ID NO: 46266 - DNA, 287 bp, Glycine max
  Clone ID: LIB3107-072-Q1-K1-B2
atacacataaccatgtcttctcagactgttgtcctcaaagttggtatgtcatgtcaagggtgtgctggagcagtgaacagggttttgggaaaaatggaaggtgttgagtcatttgacattgatctgaaggagcagaaggtgacagtgaaaggaaatgtggagccagatgaagttctgcaagccgtttccaaatctgggaagaagactgcattctgggtggatgaagcaccacaatctaaaaacaagcctttagaaagtgcacctgttgcctcagaaaacaagccttc

SEQ ID NO: 46267 - DNA, 362 bp, Glycine max
  Clone ID: LIB3107-072-Q1-K1-B3
agaagggtcattctgagtaaggccatggcatttgttatgtaacatttcatgcataggcctcattgtgtgctagtccaaaaccgaaatttgtcatgtacagtcaacaacaatgcactttggtcaatcgtaaacactattttaactatttttgttttgagaaacaagatatttgactaaaaactttttgcccatgtaagttataaatttctggtactaaaaaagtaactctagcatggtatttaggggggaattatgttacttaacatttgcctaaaaatcaacaaacaatatttgctaaaaaaaatcacacaatttttcaaacttcgaaaaagaatcagataaccaaattaggttggtgggat

SEQ ID NO: 46268 - DNA, 379 bp, Glycine max
  Clone ID: LIB3107-072-Q1-K1-B4
gattccactgagtgtagtaatcaatcatcttttgtttgttcttcagtactttagtgtgtgatttaattccaagattttgagaatgtctagctgtgggtgtggaagtagctgcaactgtggcagcaactgcggttgcaacaagtactcttttgacttgagctatgttgagaagacaaccacagagactcttgttttgggtgttgggtctgtgaaggcccaattggagggtgctgaaatgggtgttgcagctgagaacggtggctgcaactgtggatcaagctgcacctgcgacccatgcaactgcaagtgaggtcaagatttataaccttgaagcagagataactgtaatatatgtatcaacaaataataagaattacgt

SEQ ID NO: 46269 - DNA, 227 bp, Glycine max
  Clone ID: LIB3107-072-Q1-K1-B8
cccacgcgtccgcacaggtgcattacgacgtctgaagggggcggccgtcagcgggccgatgactagagctaccttgccttcaaacattccactcttctttactttgccaatcctgggaataatatatattctagatattccgaaaccacggctcacgccaatcctatgatttttgctgtaggaattctaagtaacacatgacttcttactgttgctttctagcacca

SEQ ID NO: 46270 - DNA, 265 bp, Glycine max
  unsure (1)..(265): unsure at all n locations
  Clone ID: LIB3107-072-Q1-K1-B9
tacggctgctataagactattgaagggattccaatccattttgcatatgataatattatttagtaatttagggtgttacaaatgaattttttatcangagagttagataaaggtgataaaggtaatcattataaaatggatgtggtagggtgtaaatggtaaatatattcccaacacaatcaaatgacgaatccatatctacgttagagacttttctttctagagttttttttcgaatgctttttctttaataaataaactatgc

SEQ ID NO: 46271 - DNA, 381 bp, Glycine max
  Clone ID: LIB3107-072-Q1-K1-C1
atacgaattgagagaattttttttaccaatgtagtattaacttatttaatgatgaataatttttaatcatgaacaagcatgtaaatctttgatacttttaccttgcttgtttttgtcacacgtcacttctagcttgatcccacatatttttagtctttctacatgttcaattttttctatttttgcttcgcattttactggcatagcaaagagtggtcaatatgataatcaaaataattagccaagcaaaagtgaaaaccatattgaaatttggaattctgtgggaaaaaaatgtcaaggcaatatgtgaaggttcttaattttatggtcttcaagaacatatggggggttttaagtaagccctggtttaaggattaaaaa

SEQ ID NO: 46272 - DNA, 309 bp, Glycine max
  Clone ID: LIB3107-072-Q1-K1-C2
actgagggtgaaggggagcaacaagccatagcaagttgaaagactttgagaatgcattcttccgtcactggaatgctatcatctctgctgttcctgagaagaatggcaggatggtataaatcagcaattctgtgtccaaggactgcatttctcatgaaatttggcaaatagaaatcctcgtcaggagttggatgctcgttgataggttcctttcctgaaagcaattccagcaaaatcacaccgaggctataaatatcactctcttcacttgcatccttcattttgatgaactcaggtgccttggaaccc

SEQ ID NO: 46273 - DNA, 245 bp, Glycine max
  Clone ID: LIB3107-072-Q1-K1-C3
ggttctagtgtatgtgattgttgtgactcgttcttcttcgtcgttatcttcttcttttgttgtttgtgtgtttgatttttctctcacctgaaaatgtcttgctgcggtggtaactgtggttgcggaagcgcctgcaagtgcggcaaccgctgccgaggctgcaagatgtacccatacttgagctacaccgaatcaaccaccaccgataccttggtcatgggagtggcaccagtttatgctcaatt

SEQ ID NO: 46274 - DNA, 303 bp, Glycine max
  Clone ID: LIB3107-072-Q1-K1-C4
atgtgagaatttacattggcaagaatctactgctcaagtagatgagttgcagcatttgccaattgaatcactagattgtcaatcgtcattaagtgctgatgttgaaagaggggacaacactgagcaaaatcttgatgtgatgccaactgaagataatgctaatgaaattacccaacaaagcttgcgaattgaagattcagagcattgtaataatgaagaattcagtgaggtgcataatgagcaatctgagttaggtgatataaataatagtgaaaactattcttcaaattacaatattcatat

SEQ ID NO: 46275 - DNA, 136 bp, Glycine max
  Clone ID: LIB3107-072-Q1-K1-C5
tgtgagggggcttcagaacgtacgacggcgcgtctggtgtatgttcttatgttatcggcgtcatttctccatttatataaacttatgaaaaagctttaatagatgacacctttgtcagcgttcacatcactgctaa

SEQ ID NO: 46276 - DNA, 281 bp, Glycine max
  Clone ID: LIB3107-072-Q1-K1-C6
acatgcgaatagaaggactagagcaccaaatgaattcaaatactggaagaccttatggtggcaacaaaagggtcaatgatggatcgaaccgaatagaggggcaagacagaattgagggagtaaaactcaatgtatcatcttttaaagtcaagagtgacccagacgcctaccttacctgggagatgaagattcagcatgcattctcctacaatgattatccggaagagcagaaggtgaagttagcaatagctacattctcatattatgcccttgtttggtga

SEQ ID NO: 46277 - DNA, 330 bp, Glycine max
  Clone ID: LIB3107-072-Q1-K1-C8
ggttgaaagaggaaggaagaagaaatcgttttatgtgagtaacagaacaacacatcatagacagacacaacattagtatctttcaactgttgctctgcttctgcacacagagaatggtgtgggtggggaaacagagatgatctatctgtgttcacagcaccactgtttccctgcctcacccttatgtacaagaacaagaataagcacacacacccgccacaacgctatagtcaccacttctaagaactcacaattttttttctcggatatggggagtcttgctcttgaaaccgaggatgtaaatctagatttatacctttcgctggggct

SEQ ID NO: 46278 - DNA, 419 bp, Glycine max
  Clone ID: LIB3107-072-Q1-K1-C9
tataccatgtataaaacatccttttaagtgttccaggtacacgacatttaattgcttaattcttaaacacatcttatatcctttaattgaaaaagttaactaattgttttccgcagtaattctgcaattcaagaaggaacaagttttcattcgaaatttaatgacatttaaacgatacagatatccgataatgtacatggttactactttctattagatggcataaaaggccataaaatatggatgtttgtgacaaaatatatgcttgctagtttcataacatactaacgtctacaaataacttcattacgcttcacaatacccaaattacacacagaagattcttgatgaagaatgttatctataggtggctctacgaagcccatgttagccctaatcatgaagagatcaccttcatg

SEQ ID NO: 46279 - DNA, 296 bp, Glycine max
  unsure (1)..(296): unsure at all n locations
  Clone ID: LIB3107-072-Q1-K1-D1
acagaagggatttaagcgacaactgcgctgaatgataaagatcccctacccccgttgcggggctccccttgccctttcttggttggtaaaccaaccagcgatttacaacaaacaagtctttcctctccctatggtcgagatactagtaacctcatttgtcttttttaaggggagcagagctatttttcaaagtagcctatgttgaataacaattaacttttactctttggaaatccaacgtccagtgatgtccaatttatgctatcagatactaggaatatngtctttgatagtct

SEQ ID NO: 46280 - DNA, 392 bp, Glycine max
  Clone ID: LIB3107-072-Q1-K1-D2
ggttctagtgtatgcgattgttgtgactcgttcttcttcgtcgttatcttcttcttttgttgtttgtgtgtttgttttttctctcacctgaaaatgtcttgctgcggtggtaactgtggttgcggaagcgcctgcaagtgcggcaacggctgcggaggctgcaagatgtacccagacttgagctacaccgagtcaaccaccaccgagaccttggtcatgggagtggcaccagttaaggctcaattcgagagtgctgaaatgggtgttcccgctgagaacgatggctgcaaatgtggagctaactgcacctgcaacccctgcacttgcaagtgaggtgttggagagctaaagcttcaagcagaaatggcccttagaaataatgattaaaacta

SEQ ID NO: 46281 - DNA, 189 bp, Glycine max
  Clone ID: LIB3107-072-Q1-K1-D3
gggccgagatttaggctctcttacttcccatacgctctgatgctactgtgctgcggcggcttgacgactgcttggttttccgctcttgtccaccattgactctgcagcatttccataggagccgcctgcttcgactttatgaggataatacaatctattgaacttcatctataggatcatgaacttgac

SEQ ID NO: 46282 - DNA, 161 bp, Glycine max
  Clone ID: LIB3107-072-Q1-K1-E1
gacggcagatcgagacgcggatcattattggcgaggtctgacaacaggtgtctgttgctctcaagaacctccccgagcattcttgtgcttgtataacggctgggaacccttgaacgaagagccaccgagctctgcgttggttgctaaatacaacatcaatt

SEQ ID NO: 46283 - DNA, 426 bp, Glycine max
  Clone ID: LIB3107-072-Q1-K1-E10
atgtattctaagctacaagggctatagctcatttgggtagagcacctcgtttacacgagcgccaatgtttttttcagaggagtttcatcttgtaatcaaaagagtttatattatagtaagaaatcgaagtcttactccattttaaggatcaaaactagatatcaatatcctgacaaatggtttagtcataaaatctgatccatcattgatttgagatattgataaggtgaatactgatttttcgttaatgtgttgtataatgcgggtatagggacctaaaaaagattatcttttcttcctatcttatgaactttaaggtgtatgaagtgtcatttcctatcttagattttaattttagtaggtagataaagagtccatttactttaagttgatctaggccagaagcagacctacgtcaagataatc

SEQ ID NO: 46284 - DNA, 289 bp, Glycine max
  Clone ID: LIB3107-072-Q1-K1-E12
gtgctgcatctttgcgattctcaactttctttcgctggaaaacccatcagagcatgaggagagagaaacttccctgcccttccatttccctcttgagttcttcgcctttgctttcgatcctttgctataagagaacctagttcctctcagtgttgtccttttcaagttccctttcttttctttcatattcactctctcttcctaaccgcccgatgcactttggtttttgaaactaatgtggttggtaattgctccgattgtgaactggttctgttggaatatccaaaat

SEQ ID NO: 46285 - DNA, 86 bp, Glycine max
  Clone ID: LIB3107-072-Q1-K1-E2
gactccaaatttactccctaaacatacaatgcggggtccgacaacaagtttatattgctctcaatacccctcccaagcattcttct

SEQ ID NO: 46286 - DNA, 212 bp, Glycine max
  Clone ID: LIB3107-072-Q1-K1-E3
aggaggacatgatggttatgccattataactcgctcgttcacacggtaatgtttttgagatgcctgaaacactgcaagtgaatcgtactatgatgaaagatggacactacagaattgcagttggggatccaagcctgggccacctgattgctcgaggaccaagttccaaccaaatgcgtaagctagaataataaactatcacagttatacat

SEQ ID NO: 46287 - DNA, 358 bp, Glycine max
  Clone ID: LIB3107-072-Q1-K1-E4
atatgggacccgatattacaatgaatttgcaggtccattgtgaatcgggaataagcgatgttactacaatttttgaatggtattatgatccaagagcaatcttgatcggaccaataacaatttcatgttatttatcatctattatcttttcttatgttaaaatactttcatctctgatgtttttagtaactttcacttttgtctttttcttttaaaaataccttgatcctttatattgacacttacgtcagtttgatgcttacatagttagtgtttaaacattaaaacagtttattttaatatattgccaattttatcaaaaataaattacttttaggctcaattcataatttggcct

SEQ ID NO: 46288 - DNA, 357 bp, Glycine max
  Clone ID: LIB3107-072-Q1-K1-F1
gtgccaaagagaaagagatagagaaaaaatgatgagtgttaatgtggtgtttgtataattgggatatccaaatataactattatgatattaaatagcatagttgattgtaatgaacaatgttttacatctacaattaatgaaccaaatcaatcctatacaattgtttagagtttaacaaattcttaagaagtaccccacacctccccaacaaatttaaaacattacggtgaaaggttggaataaataaaggaaccttgttccctcagtaacgggcaaagaaagaagttgtacatgtaggttaatgatgtatcatatgtactaaacactggcatataaaatgttcatgggatggagag

SEQ ID NO: 46289 - DNA, 218 bp, Glycine max
  Clone ID: LIB3107-072-Q1-K1-F10
gtgacctttttcttgctccgatggctaaattctgactcttgttcttcggtctcctcctattctccgctgccgtagccaccgtcgaacgaatcgacgatgaagacaaccttctgatccgtcaagtggtgtcggacgcggaggaccaccacttgctcaacgcggagcgccacttttacgtctttaggacaaaagttcgtcaagacctacgccacgcagga

SEQ ID NO: 46290 - DNA, 238 bp, Glycine max
  Clone ID: LIB3107-072-Q1-K1-F11
cccacacgttcgtacgcgagaagactgatgttttggggtgcttgctttgactagattctctggcttcttccacacatactcacatttctttttacccttttataatgggttttttgataatgctgtaatcttgtgtctttcacaattgtcaaaagagtggtagtagcaatctgtctccgtcccatctgttataaaacttggtttctcaatgtaagtgtcattttcattcactatatcc

SEQ ID NO: 46291 - DNA, 214 bp, Glycine max
  Clone ID: LIB3107-072-Q1-K1-F2
gaaacatcataatgaaaaaaaaagaaaattacgacgtgggtctacaatctttgtgtctgttacttagtatcagtaagataggctttgtttcctccacatgagaagagaaagtgagaaactaccaatggttcttatttaaagcaaataaatattgaaagacaagaggtaacagataaatagagtgtgtgaataataataagtagttgtagctggg

SEQ ID NO: 46292 - DNA, 337 bp, Glycine max
  Clone ID: LIB3107-072-Q1-K1-F3
tggcaatcatagagaagctattagatggcacaagtttggataattctgctttggggtgcttagcagattgcttggaactgtactctgatgcagcatggacaatactgaattccgtaggtgttttcttgtctgggaattatgatgtaactaggatttggatgagttcagctatggaagcagcatcaacatgccaacaaggttttactgagagaggtgaagcttctcctttgacacaggagaattataatctctttcagttgtgtggtattgcactttgcattattcatttggctacaacctgagtaccttattctcaattattccacaaaataatttg

SEQ ID NO: 46293 - DNA, 184 bp, Glycine max
  Clone ID: LIB3107-072-Q1-K1-F4
caacacaacagaagggggtttgtgaacgctgtgactcggtcttgttcaccgttatcttcttgtttagtcgcctgtgggtatgacaaactctgacctgagaaacgcctcgctgcgctcgtaactgtcggtgccgaagctcctacaagtacatcaaccactcggtagcctgcatgatgtacccata

SEQ ID NO: 46294 - DNA, 345 bp, Glycine max
  Clone ID: LIB3107-072-Q1-K1-F6
gagtctcgatcagtttcattcattggaagatatgggaacattagaacaaattgatgcccctcaaaccaggtcatcatcatcttcatcttcttccattgatagcaacaaccacccttctaggactaggactccaccaccctcttccccttcatcaagtgcctgcagaaacagaactgatttgagcactgacctcagacttggtcttagcatctctccttcttctcaatctgaattacccttcaattcaacaccaaaggaggaaagttttgactggccaccaattaagtctatattgaggagcaccctttgggggaaacaaaaccattttaaccaaagaccctcctt

SEQ ID NO: 46295 - DNA, 158 bp, Glycine max
  Clone ID: LIB3107-072-Q1-K1-F7
aggcggcaatcatataacatctattatatggggcaagagtggataattctgctttggggcgcttatcagatttctcgtaacagtactctgatgcaccatggacaatactgaattccgtaggtgtgttcttgtttgggaattattatgtaactaggatt

SEQ ID NO: 46296 - DNA, 161 bp, Glycine max
  Clone ID: LIB3107-072-Q1-K1-F8
tgttaataataataattggattccaaaatcgtagcgtatcgttggtgcgattgaacgattcgatgggaagaggattattctagagcttgcccactggccgccgtctgtttttcaccccggaagattttcttgctggaacctctatccgttcttgaactttt

SEQ ID NO: 46297 - DNA, 305 bp, Glycine max
  Clone ID: LIB3107-072-Q1-K1-G1
ggtctcagcgctagtgtgagtgtgagtccgtgacacacttatccacctactttcatttgagccactcttctcagtccaaaacagtttctcgttttctcatctgaaaaatgaggagcatctttgtccttctccttgttctgggtttgtttaagtatgcatttgctgaagaagggttttgctctgctccttcggaatcgaaatcaaagcctctctattggaaagtggataaccccactctctcacctatccacctttaagatttgcctggatccacacgcaatggttataaaaaggaatcatgcttt

SEQ ID NO: 46298 - DNA, 271 bp, Glycine max
  Clone ID: LIB3107-072-Q1-K1-G2
cctttagcaaaatattttcttttatattgcttctaacaagtggtgtttctgttcttggcttaataggatctgtttattataggtgcaagtaatagaccagatttgatagacccagcacttctgcgccctggtcgatttgacaaactgctatatgtcggagttaactccgatgcatcttacagggagcgggtcctgaaagctcttacccgaaagttcaaattgcatgaagatgtctcactttactccatagcaaaaaaatgtccaccaaact

SEQ ID NO: 46299 - DNA, 232 bp, Glycine max
  Clone ID: LIB3107-072-Q1-K1-G3
gacccagagaggaggaagctttgagagagagagagggaggagggagagtgtggacgctccatcaagatgggtatttctagggattccatgcacaagaggcgtgccactggtggcaagaagaaggcatggagaaagaagagaaagtatgagcttgggcgtcaggccgcatacaccaagttatcaagcaacaaaactatccggaggattcgtgttctacgtggcaatgttaaat

SEQ ID NO: 46300 - DNA, 292 bp, Glycine max
  unsure (1)..(292): unsure at all n locations
  Clone ID: LIB3107-072-Q1-K1-G4
gaatgcacaccacatagcaaaacctcaagtaccttctccttcacattccctcagcactttctgtattcaaaacttttggcattgtttccaatatcctaacttgagactatatatatagcagcatatatatatatataatggatagggtgacacagatggcatcagagaggccagtggtgatattcagcagaagttcatgctgcatgtgccacaccatcaaaaccctcttcagtgactntggagtgcatccaaatgttcatgaacttggtgaaataccaagaaggaaggacat

SEQ ID NO: 46301 - DNA, 221 bp, Glycine max
  Clone ID: LIB3107-072-Q1-K1-G6
gaggcaatgagagagagagaaaagcgtgaatcatgtcggacgaagagcatcacttcgattctcaggcggatgcgtgagcgatcaatacgtatcctcagcaggctggtaccattcgcatgaatgtctacatcgtcatcaaatccaagccttgcaaggttgtagaggtctctacgtcaaagacaggcttgcatggacatgcaaagtgtctcttttgtgcattt

SEQ ID NO: 46302 - DNA, 305 bp, Glycine max
  Clone ID: LIB3107-072-Q1-K1-H1
ataaaaaaaagagggcattacggtgattacccacccaactatccaatccatcaaccatgtaacgtaggctttaagtgatagaaattaaaaacagcaccatcttcacggcatgtcttctcttctcttctctccctccatcttcaaacttgccttttattacctctcaatgccactccctttttctcttcactctcactctctccaacattctccataccttcttattccactttgttttttccgcaactggttttaaccaaaatgccggtttatttaaattaagccctttttttttctttttgaat

SEQ ID NO: 46303 - DNA, 246 bp, Glycine max
  Clone ID: LIB3107-072-Q1-K1-H4
ctgcgatgacaacagacgggggatctagtgtgtgattgtttgttgttgtaactcgttcttcttcttttgtcgttctgtgtatgtgatcgatttttactctcacctgaaaatgtcttgctgcggtggtaactgtggcagcggaagctcctgcaagtgcggcaactgttgcggaggctgctagatatacccagactttagctacactgagtcaaccaccaccgatacctctttcttgggagtggcacc

SEQ ID NO: 46304 - DNA, 432 bp, Glycine max
  unsure (1)..(432): unsure at all n locations
  Clone ID: LIB3107-074-Q1-K1-A1
gcggcaacggctgcggaggctgcaagatgtacccagacttgagctacactgagtcaaccaccaccgagaccttggtcatgggagtggcacctgttaaggctcaatttgagggtgctgaaatgggtgtgcccgctgagaacgatggctgcaaatgtggaccaaactgctcctgcaacccctgcacttgcaagtgaggtgttgggagagcgagcttcaagcagagatagcccttaattaggaataatgataaactattaatgtgtagctaaaaacttatgtattatgtctgtgatggttttcgtgcactctggtgttttgtgttaaacaaacatccttagaataaagtggtcatgtcttgcctttcagcaagttcaagtgttttggacttgtgatgggtgtgttaaagctcatggntgcttctttttttttttt

SEQ ID NO: 46305 - DNA, 236 bp, Glycine max
  Clone ID: LIB3107-074-Q1-K1-A10
ttcaacagggtcatcattgtcgatgtcttaggaccttggtcatgcccatggcgtctttattcagatcaaggggatatgcatctactgtcacataaatggggagaagggccggataatgccaccgcgaagcgctttcatactccagagattaattcgaggagcttatctatgtccagaatatgcatggtggaatgagacaggacacttgccatgcttaccctgaggcagggagcttt

SEQ ID NO: 46306 - DNA, 377 bp, Glycine max
  unsure (1)..(377): unsure at all n locations
  Clone ID: LIB3107-074-Q1-K1-A2
ccatttaccaagtatgcgttgactatatccccagtggcaatgagtctggaggagttgataccatcaaaccatgccaagtcttatctatattccatcttcatcagaacagggttggtactttctaccctggttattggtctctcagttcccttttttggtctggtgatgtcattgattggatcattacccacaatgcttgttactttgatactaccctgtgcttgtttcctaagaatcttgcggngcaaagtgacacgaacacaggcagcactttgcattacaattatcacagtaggtgttgtatgttctgcttttggatcatactccgccctttgccgagattgtgaagagtttgaggggatgaagttttgagactc

SEQ ID NO: 46307 - DNA, 374 bp, Glycine max
  Clone ID: LIB3107-074-Q1-K1-A3
gtattatatttgtatcacatataactatttagtttcaaggtttatgaatgataaaatatcaatattttttagtccaaattaatattttaatttgaaaacttaaagtagaattaaaaaatataaaatatgagttgcataattttttgtttatcatttgaacaaatttatgcattgtttaggagaaaaattatagatgagttgtttaagtatgatgtgatattggggggactactaaaattattttaatataacataagataaaatacctaaatgggaatataaaagctcttataattctaacaagaatatatttaataaaattatatgttatatattctaggaaaatcaccaacacacgttcattattctgacat

SEQ ID NO: 46308 - DNA, 429 bp, Glycine max
  Clone ID: LIB3107-074-Q1-K1-A4
ggggtctctcaagcaaagcttgaggcaactagaaactctaggagctcaaagggctggtcttgaagatatgcttaaagagatgaaaagaaaggatgatatattaccaaagttgatgacatccaccggttcttatgatgatctcttcaagaaggagatagcaaaatatgaccatatttgtgaagaaatagctcaaaatatcgaggcgcaagagcaattgttgctgcagatccaggctcaaaatgatgagttctctgttatcttcaatcttgaagattacaaagcttcacgtgaaaaagcctacaagcagattgaagctgccatagcaaaatttagagaaataaaggacaacatcaatgaagggttaaaattctatgttacgctgcaggatgcaatcacaaatgtaaagcagcagagcaacgactttgtgat

SEQ ID NO: 46309 - DNA, 418 bp, Glycine max
  Clone ID: LIB3107-074-Q1-K1-A5
catactgaaggcgacttcgatgtaatgaataggggtcaacatgaatctaatacacatattgtaaatgaatttgacagacacaatcacacttttattataacagagactcactccccacttgaaacacctataccacctggaaggattagagtaaatgttacaatcccaaaagtgtgattgtggtgaatatcaggctaaacaccttaacccgttctcacgtcatggctgcctgtcaatctatcaatgttgatcctatgacctatgtgccgatgatattcactctacaacacatcttgcacatctatgacaactactttggtctattgccacacgaatcaatgtggccagaatatgaaggagatcagtgcagtcctaatgcaaggagaaacaggactgtaaagggtcatcccgtttcaac

SEQ ID NO: 46310 - DNA, 422 bp, Glycine max
  Clone ID: LIB3107-074-Q1-K1-A6
gagtcttgtgtgagtactcatttgtatttttttttaatgttgaacactcaaatttctagtctatcaatacattattattatggagtaaaatccatttatattgataccattaaataatttcagtttcattttctttttttgttaattttacataaattccacctaacaataaataattttttggactatttctcgatttgtacgtgtcatccttgtgcagtggccatactaataataaataataatgtatattggttaaattattttataatttccattatttttacttttcttcaaacaaagcgtgagttcctcttagaaaacaacaaccgctttataaatagcttctcgcacttaggaagggttgagtatgttagaaatagattcatgaatttgaaatgagtattaaacaattaaagtat

SEQ ID NO: 46311 - DNA, 188 bp, Glycine max
  Clone ID: LIB3107-074-Q1-K1-A7
caaaaaacaacgaaaggggattcgagtacgaatgccaatctaaagtgtatgggttattactacagggattatgcatttaaaactatacggtagaatcagacgctttacaggattctgactgacacactctagcgagctacataacaaatatattcttgtgtctactaaaaataatttacagcacatga

SEQ ID NO: 46312 - DNA, 295 bp, Glycine max
  Clone ID: LIB3107-074-Q1-K1-A8
gattctagtgtgttaaggacacaaagagggtctggtacctataactcgggagctcatggataatctaaacattactatacgactgaagatgaacaactacggaggaacccgtgcacgagtcggcatttaatcagcggaaacgagacactgaaaacccccgacatctctgtaaaaaagatactctctgataatgaccagcaaaaacattataaggtgtgctccacctgcaacagtgtaggttctgacgtgtctaaagagaagaacataactgatcgtgttctttatgtttgtaccc

SEQ ID NO: 46313 - DNA, 420 bp, Glycine max
  unsure (1)..(420): unsure at all n locations
  Clone ID: LIB3107-074-Q1-K1-A9
cccacgcgttcgcaagtagaaaaattgtgtgaatggattgatgtattantctaaaacttggttcactcttaaaggaaacatcttaattttatcttctcacgagtgaattgaatgttactaatatttactctatcaggatatatgaatttgactgatttttggctttgctgttctgatttgagttgtgttggggactgaaaactagacaacatttggatggttgtctttatatatgcagctcttagatcttcatatgcaattaccgttatgcacttgataatatcaatttcttgtgtcaagtggttgagtatgtgaatgtgcacaggtgtggcagatgagaactggaccacgtctcttatctatccagtgtgctaaaggctgcagattgtacagcccacatacagggttggatcattatca

SEQ ID NO: 46314 - DNA, 54 bp, Glycine max; identical to SEQ ID NO: 15991
  Clone ID: LIB3107-074-Q1-K1-B1

SEQ ID NO: 46315 - DNA, 312 bp, Glycine max
  unsure (1)..(312): unsure at all n locations
  Clone ID: LIB3107-074-Q1-K1-B10
gctaaattatctatgcgctccctaaatcttgattcgccctctcttccatcaaggagcatgagatgcggagaagagaattctaacacaaaggagacatctgcaagcacgaggagcttataagtggagcttacagtccctgttgctgttaaaaaaatggaagctgtttcaacctctcataccacttcatgttcggaggacatagcattatcttttaagtctttgggatgacggtttccaccattaaactatgaattgnagctgtaaaaaaaatggatgctgtttcaacctactgaagaggatgctactcattaa

SEQ ID NO: 46316 - DNA, 415 bp, Glycine max
  Clone ID: LIB3107-074-Q1-K1-B11
ttctgacgggggagctacaaataaattaaaggcacatcatttacagaatatggagtcccacacttccgcacgagagaaggagtctctcaatctcagggaagtcccagatgcatataaaaccttgggctcgtacatgttcaacggcagcgcattctgcaagatgggtgaaggttggacatgcatcattactaattctgacgggcctgatactcccaaagatttctctaaatgtgtttaaaattgcacctgtgccattgagggcgaaacagtgttccacgaattgaatttgccacctgatgttgagagcatcagtggcagtggagcattctgcatgtgaggtgaagggtggagttgtttttatatcatgactgaaggccctgatgcacgctctggccagggctattgctaatgctct

SEQ ID NO: 46317 - DNA, 255 bp, Glycine max
  Clone ID: LIB3107-074-Q1-K1-B2
aggtatacctgcgagagtgaaatgagaaggtaaatttgtaagactcaaatacaagaaagcagttatgggaaaggtaggaattattgaaggattgattgataagggtgattggatgacttgtctcatcatggactatatatgtaagcactatattctaattgaaatcacaaaccatttttattagtaagaaggactattggaattaccatcaaacaccataaaatgagttttacatgcgcagatgtatggtgtgca

SEQ ID NO: 46318 - DNA, 355 bp, Glycine max
  Clone ID: LIB3107-074-Q1-K1-B3
gatagtgattgcagttccagacagtgtcgaagaagaagaagaagaagatggcattgggtgttcctgctcttcccctgacatacgtggctcacgttctggcacttgttgccagcatcttggtcgtgctctgggtcctcaattttaggggtggcttggcttgggattctgataacaaggccctcatcttcaatgcagctattataagctacaaagcattacccctgaagaaggaagtgaagaaattgatacaccttgttttccatgccatcgcattaatacttggaatagttggaatttatactgccttcaagtatcacaatgaaagtgggattgccatctctacagcttgcatcat

SEQ ID NO: 46319 - DNA, 426 bp, Glycine max
  unsure (1)..(426): unsure at all n locations
  Clone ID: LIB3107-074-Q1-K1-B4
gctactcctcatatatattgagaaattattagatgattttaaattattatatgtccatgatttcgaccaatctaattttcgtatgacactaatcaaatttttgtaatgtactgactagaaagaattattaattgtcatgtatacattagtanctactagtagctagagatcatgatagtaccaaactacttaataacttaaggataaaataaaatttagatgtagttcttttggagttttaactcggtaagtctttatcatacggataattaagctgaaatttcaattctaataaaaaaaataccaaaaagttatataagaaagtagatttgtcctatttttttattttttttgagaggagttatgtcctaattcttgtcgctcacttttaatcctgatagtttttcaatagctaaaatgatttct

SEQ ID NO: 46320 - DNA, 434 bp, Glycine max
  Clone ID: LIB3107-074-Q1-K1-B5
gttccaatttcctctcttctgacaggaattcctggaagtggatatcttagtcatgcaatcaatctgtatctacgctataagccttctcctggagatttacagtactttctggagtttcaaattccaaggcaatgggcacccatgttttgcgagctgcctctcaggcatcagaatagaaagactgcttctccttccctgcaatttagtttcatgggtccaaagcttcatataatctctacacaggtggtaagtgaacaaaaacctgtggttggcatgcgcatgtacttggagggcaggaaatgtgacagacttgctttacatataaatcatctttcaagcctcccaaataaaatgatcctctcttcaggaacctcaaccttgagtacaccatcgatgtggcgaggatctgatgataatgaatccagtgatcaatt

SEQ ID NO: 46321 - DNA, 422 bp, Glycine max
  unsure (1)..(422): unsure at all n locations
  Clone ID: LIB3107-074-Q1-K1-B7
gatattgattttagttccagacagactcnaagaggaggaggaataatatggcgttgggtgttcctgctcttcccctgacatacgtggctcacgttctggcacttgttgccagcatcttggtcgtgctctgggtcctcaattttaggggtggcttggcttgggattctgataacaaggccctcatcttcaatgcagctattataagctacaaagcattacccctgtataatgaagtgaagaaattgatacaccttgttttccatgccatcgcattaatacttggaatagttggaatttatactgccttcaagtattacaatgaaaatgggattgccaatctctacaacttgcattcatggcttgtaattaggggtattgtcctttattgcattcaatggatatatggggttgtgatctttttt

SEQ ID NO: 46322 - DNA, 192 bp, Glycine max
  Clone ID: LIB3107-074-Q1-K1-B9
atttttcaggataaaattggctttatagcaccaacaataaaaaaaaaaaaaaggaaaatgtgaataaggagaaagataaaaaacaatcttaaaacaaaaaaaaactgggcggcccctctaaaggatccaaacttacatacccgcgcatgcgaagtaataatttttttattgggtcacctaaattaaattaaa

SEQ ID NO: 46323 - DNA, 446 bp, Glycine max
  unsure (1)..(446): unsure at all n locations
  Clone ID: LIB3107-074-Q1-K1-C1
cgacagaaggggaggagctagagaatgatgatgaagtctgctatgtgtgcagtggtggttgtagcacttcttcttctggcggaggtggggcccatggctgaggctgtgacatgcaccccaacagagttgagtccgtgtcttccagcaatcacttccggtgctaaaccttccaatgcttgttgcacgaagctgaagcagcaaaaaccatgcttatgtggctaccctcaaaaacgctagcttgaagcagtatgttaactctcctaatgcccgaaaaaccgttgcttcttgtgggattccctttccaacttgttaattaattaagccttcttataattaaagtgtgggatatatatatatatataaattaaacttatatttattatttactctatatatgtcactctacgtttgtgtgatatattatacagntaagtatttagctatct

SEQ ID NO: 46324 - DNA, 361 bp, Glycine max
  Clone ID: LIB3107-074-Q1-K1-C11
gtatccattttacaatagcactaaaatattggccacaccggttgtgaagtctcgtccttcatgacggagtcgggttgaagtgattcttacatttgttatccctattgatgctgccatggtgcttttcacttttggtatatgtcatgtcatgataaagcaagcaaagagtctgaaacaattatggaggaaaacgaattactctgaaggcggagatgatactgattctataaacttacggggataagagatagttatcggtcggataatgggacaataatgcaaggcttggttgaaaacgttagattgctaagctgtgtagtgatgaagactctgatgcattcatctacctttttgggcttcg

SEQ ID NO: 46325 - DNA, 382 bp, Glycine max
  Clone ID: LIB3107-074-Q1-K1-C2
ccaacgcatgcgaacagctacaaaatgacgacaaagtgtgatgtgattgcagaaacagttggggcactgattgttgtgactgagaaagatcccacaaatgacactgcgacatacaccacgacaaagatgcatacaggtctctcaacagacaaattgcagggcttacactccacatacttgttacacgctgctgaaacaacaaaaaccatgcttatatggctacctcaaaaacgctagcttgaaccaggatgctaactatactaatgcccgaaaaaccgctgcttcttgtaagatggcgtctccaactagttaaataattaagccttcatataattaaagtgtgggatatatgtatatgtctaaagtacactcatctttatta

SEQ ID NO: 46326 - DNA, 338 bp, Glycine max
  unsure (1)..(338): unsure at all n locations
  Clone ID: LIB3107-074-Q1-K1-C3
agggattcctgttggggtatcatccactttgacaaattttctttcaactccacccctcccaattcggtcttttcttccccttttttcaatgtatgcggggagcaagagtaggatggttgtttaaagaagcctgatagatatatcaagataatttatgaagtgacgttaggaatatctttattgcagtttctaaacagtcaacttattgagttattattaggagtagtagtagctatgctagtcttgtgcgtccatttaaacactattaaaagataccacaggatgattaaagaaggtgaaaattnttgtcgntntaaaanaaaacttatatatattat

SEQ ID NO: 46327 - DNA, 389 bp, Glycine max
  Clone ID: LIB3107-074-Q1-K1-C5
tgagggcagttgcttaaggactgcataagaggggttgcatgcagaccttaggcttaatctttcagatagggagttgtcataagaagacgaccgtccaaaacattcaattctctatacaagcccataattttattcgtcataccaaattgcatcacaggtaaacacgggctggttgacgctgaccaagatagagatacaagaggaaggatcagaggatccatccgtgagatctattaacaatgaagctagagtgctaacactcatctacagaggatgacaaacatatgcatggtggctctggaagcagatatataagtgctgaactgggaggagaacattgagagaaatctcaatgagattctcattggtggacaggatctgtacacaga

SEQ ID NO: 46328 - DNA, 425 bp, Glycine max
  Clone ID: LIB3107-074-Q1-K1-C6
gaacacttaagcggtaaaaagaagagggaagataagtttgctttagtttggcgtgtgtaattggtagagcgagaaacagagaaatggacgattacacttagggaaatgatggacctgaagacactggtcactccactctcgagaagaaaggcgtcctatgcaggatccgtgtacatacacaccttagggccgaactcagggcgagtgtgttcgaagccatcgaataagaagatcgtgtgattgagaaggaacaatgtctacctcctgcattgctaggtagttgcaacgatcgagctaagcagcttcacgcttcttcttcagggagacttcttacggcaatgatatgtgaataccttgactgggcgcagctcagttatacgctaaaagtttatcttccggaatgtaatttggagaaagatttttgg

SEQ ID NO: 46329 - DNA, 296 bp, Glycine max
  Clone ID: LIB3107-074-Q1-K1-C7
attttcttatgagctggataagaaggggggcatggggatcttatgtttagactctaaaaaaggtttattttttaagaggacaaccgtctacttcatttttttatctatggacgcgaatatattgatttgtcattttaatatgcataacatgtaacatgatgtgatttatgacgttcacgataatgatacaaaagcagggttcaaggggtcgatgcatgagatatatagagctgatgtgagagagcgatcactgtcttacttctaggacaaaactttggtgcaacgatccatatgct

SEQ ID NO: 46330 - DNA, 308 bp, Glycine max
  Clone ID: LIB3107-074-Q1-K1-D1
ggtgtctcttagattcaacatagtttattaaatatgctaacaacttaatgctagctgatcatcaatttagacaaaagcttacaactatgacttaacaaacaattaactatttttacatataatcatataactatacaatattaattgtaagaacgttaaatatattttccttgattttcactataaaagaaaatttataataatctaagtttgggtttcagctaattagctgcccagaaaccatgaaaacctagaggaaaatttaagtggcttggaatttctattctcgcaacaagggcattatctgc

SEQ ID NO: 46331 - DNA, 392 bp, Glycine max
  Clone ID: LIB3107-074-Q1-K1-D2
gaagagcatagagatcatgacaatacttctgtggttgaggagcctgaaagcatacaggagaagattattcaacagacaggcaccactcctagtgcagctgaaccaaaggaagcaagtaataaggatgatcaatctcagatttttgatgaagagcatagagatcatgacaatacttctgtggttgaggagcctgaaagcatacaggagaagattattcaacagacaggaaccactcctagtgcagctgaaccaaaggaagcaagtaataaggatgatcaatctcagatttttgatgaagagcatagagatcatgacaatacttctgttgttgaggagcctgaaagcatacaggagaagactattcaacagacaggaaccactcctagtgcagc

SEQ ID NO: 46332 - DNA, 432 bp, Glycine max
  Clone ID: LIB3107-074-Q1-K1-D4
gatccacatcacaaaaattacaacaccaatctcacccatttcaaaaaaaggccgttagtgttactattcgtaaaatggccactcttgttctttaccaattctttctcaaactcttgctcctaatttcagtctttcagctttcctttgctgctaggagactcaaccagctggttcaggaccagtcacagttactccattaccacaacggtcctcttctatacggcaaaatcgccgtgaacctaatctggtatggtcacttcaaaccatcccaaaaggccatcatcaccgatttcgttacctcactgtcatacccatcgtctcagagcagccagccatctgttgccacgtggtggaaaaccacggagaagtactaccacctgagtcccaagaacaagaaggctgcttcttctctttctctatcactgggcgatc

SEQ ID NO: 46333 - DNA, 229 bp, Glycine max
  Clone ID: LIB3107-074-Q1-K1-D5
gacgggagggggttctagtgtgtgttacaggtgcgactcgtcctggttattcgggatcgtcttcttttgatgcctaggatatatcatttttatatcacccgaaaacgtcttgctgctttggtaactgaggtgtgccgtatcgccttcgtgtgccgcaacggatgcagaagctggagggttgccccatgcttgaccttcaccgtaataccaaccaacagagagcttggtc

SEQ ID NO: 46334 - DNA, 422 bp, Glycine max
  Clone ID: LIB3107-074-Q1-K1-D6
gaataaacaaggtacaccaataaacaattgcaatctctttaaacaaaaaaataaaaataatcttggtatgcattttgcaactcatctagactatggtatagctgtgtgtgtcattttgtgctagacccttcaccatggaagagaagtcaaacgtggttgaatattttgcaatagcctatataagatggtaagggtaaaggaccaaatgttcaagatttgtgcatgccctttaacatgtgcctagtttggcttatgttacaaggcaattcatgatgggtgcaagaccttggctatctgagaaggagacagagaaatagaggcagcaggaaattacttccctctttcaaactgcaatttcttccactataagttgccagagaggaccagttgaagtgtgtggtacacattacacaatgtgaaat

SEQ ID NO: 46335 - DNA, 423 bp, Glycine max
  Clone ID: LIB3107-074-Q1-K1-D8
gtatcttgctaacacccctatcatcaatgcaaggggaggatgtcaacctttttcataccttgcccatggtggtgctagaggtggcattatcatcagtcatgatttattgtttttaacttgcaatggacaatagccccaagactagagaaggtagtgttttgtttttcggatcaagcaataaaacaaacaaagggctttaatgaaaaagtgtgcaaagggtattttaatgatcttgacagggaaaaatgagaagttagggatgaagaagggttgaaagagaaggtggttttgaagatgaagagggattgagagaaaaacatcaacgattttgttaggattcttatttttatctgtagttttggatactttatatttaacatcaagtatttcatgaaggcaaatattgtctaaaacatataatct

SEQ ID NO: 46336 - DNA, 438 bp, Glycine max
  unsure (1)..(438): unsure at all n locations
  Clone ID: LIB3107-074-Q1-K1-E1
gaagagaaggaagcatcgttttatgcagctacagaaacaggctttgatgaccttgtgtcaaagtggatcccacagccaagcaagcatataataaaaactgatatccctcaggaggctcttatggtaacagagtttgctcgtttggtggcagatatcaaattcaacaactcaaaacctgagaagaagtggccaacaattagtaggaaaactcaactggtattggatgctgtgaaggcttcaattgagaggggttttgagcctgttcagattcaggaatgagatgtatgtattgtttctgtggcttgttgaactgaggtctttgttccattagtgcatctcanaagtcatttctattttatttgtatttttaagcagtcattgctgacctgtgcatagaggaggaatgcanggtctgaagactcttacacaatgcacatt

SEQ ID NO: 46337 - DNA, 425 bp, Glycine max
  unsure (1)..(425): unsure at all n locations
  Clone ID: LIB3107-074-Q1-K1-E10
gtggaagctacaatgtgaacttctttagggtagtgtggaggactgcatatgtgattatcactgccgatgtagctatgttactcccattcttcaatgactctttggcccttattggtgcactctctctctggccattgacggtttacttacctatagagatgtacattaagaagtcaaatatgcacagattttccttcacctggacttggctcaagatattgagttgggattgcttgatcatttctattatctcacttgtggattccatccaaggcctttcggttagtatcaagaaatacaagcccttccaagcagaacaatagaactttcatacttagtattccggcttgtgccaagagtttctattgagggcgacaaaattcgnattactatgttttgaaataggtgccatatattcaattctc

SEQ ID NO: 46338 - DNA, 350 bp, Glycine max
  Clone ID: LIB3107-074-Q1-K1-E12
tgccacgcgtccggctgaaacttgggcggtatttatttttgatagattattgatatatgagatgcaattggcaaatttcgcaatgtgcatgtttggatcttttttggttctaggcttcaaacattatctagatttgatgaattaatcctcagagactgaagcatttgttgaagtccattgttaattgtgtatttcttattgtttttcttttttggcatttttatttttttaaattatcattcaattcgagagtgtcttgaatactcgacttgtatgaatatacatcatatttcagaagtttttttgtttttgaaaaaaaaatccaaaaagaagaagaaaacaaaaaatat

SEQ ID NO: 46339 - DNA, 428 bp, Glycine max
  unsure (1)..(428): unsure at all n locations
  Clone ID: LIB3107-074-Q1-K1-E2
gaagagaaggaagcatttttttatgcagctacagaaacaggctttggtgaccttgtgtcagagtggatcccacatccaatcaagcatataataaaaactgatatccctcaggaggctcttatggtaacagagtttgctcgtttggtgtcagatatcaaatacaacaactcaaaacctgagaagaagtggccaacaattagtaggaaaactcaactggtattggatgctgngaaggcttcaattgagaggggttttgagcctgttcatattcaagaatgagatgtatgtattgattctgtggcttgttgaactgaggtctttgttccattagtgcatctcaaaagtcatttctattttatttgtatttttaagcagtcattgctgacctgtgcatagaggaggaatgcatggtctgaacactcttacac

SEQ ID NO: 46340 - DNA, 328 bp, Glycine max
  Clone ID: LIB3107-074-Q1-K1-E3
agacttgaatcacagtggagccttatacctgagcgaggccatggtgaccttgctctgtcgtagatctctaccttctctacgccgaacgccgaaaccatggccggaaaaggacagggatctgctctcagaatggatctctgaaccacctactcttgcgcagcagcgtggaaacatgaccgaattgaactatcttcaacgaccaacggaacagaaccacgccgccttcatgctattcactgacaccgagcgtatcatctgtgaagcggccaataatcaagtcgtcatgaaccccatgaacaccgaactcgatgccaagaggctgaatggc

SEQ ID NO: 46341 - DNA, 449 bp, Glycine max
  Clone ID: LIB3107-074-Q1-K1-E4
cgagaagaccacagaaggggatagcagtccctcattctcgtcatgtcacgtttctctcgggacctggaactcaacacactcgtcgaaactctggatctgttcttcttctgcttctgagagagaacatcctattatcttctcaatctcattctctaccagagagtaaaccctaagaacaaagaaatatggtttacaccatctcgggaattcgatttccggtttttccttcgctgcacaacttgagcttccgtggcgatcgcagaactgcgtctcttcccgtttttctccgaaacaactccttctctcggaaaacccttgctgtaaaatcttcccatgattctgattccttgtcttctgcgattgccgaatctgataaagtacttattcctcaagatcaagataactctgcattcttgacagatcaacttgaaactcctgatataacctca

SEQ ID NO: 46342 - DNA, 228 bp, Glycine max
  Clone ID: LIB3107-074-Q1-K1-E5
ggaaaaccatagcacaatacctcacgtgcctctggataacttgcatcttgggcaaatcacaattttaacaacggtaacgggacccgtcaacggcctacgacgaccggaaagctacctatttttctctttttgtaaacacacgcgcgctggcttttggggtgaattttacgatttggtggtccctgtggtgggatccctttcttgttttggccgaaccgacaaggtttt

SEQ ID NO: 46343 - DNA, 394 bp, Glycine max
  Clone ID: LIB3107-074-Q1-K1-E6
ttggggaatataccataacacaatatcctcacgtggctctggcataacttccatctgtggccgaatcacaactttcaccaccgtcaccggcaccgatcaccgccctacgacaaccggtaatctctctctctctctctctctctaacacacgcgcgcttgctttttgtgtgaatcttacgattttgctgttcctgttgttggatccctttctttctttcgccgaaacgacgatgcttttctagatccaactcgtcaatagtcttttcccttaattgttcggatcaatttattcgccttctattttggagcttcgtgtgtgaatcgctaaactgtggcgtgtggttgcttgtttgaaggcaagacacttggacatctgaatcattggtataaaaat

SEQ ID NO: 46344 - DNA, 419 bp, Glycine max
  Clone ID: LIB3107-074-Q1-K1-F10
gttgtataatgaaaaataattgcataattgtctattgtaatgggaaatagaaaatggggaagaaaagacccggagaacacataatctccaatgtctataaattagtactcacaatgttgagcaaaaacaagatttactggggttgtccatttcattgtgaactaaataacgctttgctaattatgcctgtggcttcaatatatcgatctacgcacctagagatgcaactgctttcactcccaccgaggcttgaacctggttttgtaacacacttctcaaaacactttcttcccactgtctgcaaaataaaggtgagcggaattgtagcagatgagacactgaacaaaatcagtactcaataattatccacatttttcaagaatgtacaagtagctggagcaaatcaattgcacctcgag

SEQ ID NO: 46345 - DNA, 426 bp, Glycine max
  Clone ID: LIB3107-074-Q1-K1-F11
gttgtataatgaaaaataattgcataattgtctgttgtaatgggaaatagaaaatggggaagaaaagacccggagaacacataatctccaatgtctataaattagtactcacaatgttgagcaaaaacaagatttactggggttgtccatttcattgtgaactaaataacgctttgctaattatgcctgtggctttaatatatcgatctacgcacctatagatgcaactgctttcactcccaccgaggctttgaacctggttttgtaacacacttctcaaaacactttcttcccactggctgcaaaataaaagtgagcggaattgtagcagatgatacactgaacaaaatcagtactcaataattatccacatttttcaagaattacaagtagctggagcaattcaattgcacctcgagacttttt

SEQ ID NO: 46346 - DNA, 258 bp, Glycine max
  Clone ID: LIB3107-074-Q1-K1-F12
gaactctacagagggggttttcaccacgcccaccaacaaacaattgtattctcttggaacagagctatcaacttaacctacatatgcgttcacgcaactcacctcaactccagtgtagcatgactgtgtcaattcgagcaataccctacaccatggaagagaccccctaagagggtgcgtatttcgccttcgccgatataacatggcccgggttaaggaccaactgctcatgatctgagcatgccctttaacatgccc

SEQ ID NO: 46347 - DNA, 381 bp, Glycine max
  Clone ID: LIB3107-074-Q1-K1-F3
gacaccaaacgagccatttgggagttaggttctgcacgctctgcttccagcgagtgttctttcttcgtttcaacaccttaatttgcacacgctgcttcttcagcttgagaaatggcacaagaaacctttctattcacatcttgaatctgtaaacgagggtcaccccgacaagctgtgcgaccagatctctgatgcagtgctcgatgcgtgccttgaacaggaccctgacagcaaggttgcctgtgagacatgcaccaagaccaacatggtcatggtctttggagagatcacaaccaaggccaacgtagactatgagaagattgtccgtgacacatgccgcgaaattggattcatctctgatgatgttgtcttgatgctgac

SEQ ID NO: 46348 - DNA, 415 bp, Glycine max
  Clone ID: LIB3107-074-Q1-K1-F4
cagggttgataccgtcttaaaagaaattgaagctgtgcccgagcaaaagcccctttatatgggcaatctcaatctcttgcatcggcctctaagaaacggaaaatgggcagttacttttgaggagtggcctgaatcagtatatcctccttacgcaaatggccctgcatacataatttccagagacattgttactttcatcatatctcaacacaaggagaggagactgcggctctttaaaatggaggatgtaagcatgtgaatgtgggttgagagatttaacaacacggtggccgccgttcagtactctcacaactggaagttttgtcagtatggatgcatggagggctacttcactgcacattatcaatcaccaaggcaaatggtctgtctatgggacaagttgacaagaggtcgt

SEQ ID NO: 46349 - DNA, 304 bp, Glycine max
  unsure (1)..(304): unsure at all n locations
  Clone ID: LIB3107-074-Q1-K1-F5
gaagaagaagcattgtgcgactgaaaaaaggtcttagatcgtaaaaactaatcactactaaaacaagagatatcgtatatggctcctcccaaagctaatgggatcgtgtcgtccaataccgtcttcannganatataaatctattgacctttgtgcgtagatttgaacaagctactagatgacctatgtgctaattactaggcgctcttaatagactcttaatattatggaaaggagtttgaaataccattaggtgagaggactgatcgtctaacctagcataatatgcttatcggcagaaacc

SEQ ID NO: 46350 - DNA, 106 bp, Glycine max
  Clone ID: LIB3107-074-Q1-K1-F6
gaaaaaaaagaatttggtgacggagctaccgttctagagggtccaaacttacttacgcgtacatccgacatcataaatattctatagtaccaacctaaattcaatt

SEQ ID NO: 46351 - DNA, 301 bp, Glycine max
  Clone ID: LIB3107-074-Q1-K1-F7
caacggataatgtcgccatgccaacgcctggctaggaagagggttgagactaatagcgctcagccgaaaaatactattaatggagaagattttgtatggcaacctgctttataaggagagcaaaaagaggcatgaaatacttctattgccatatggacctgtgaagaagggtatcaccggcggaattatcgacaaaaacatgtaaacggtggtgagtatgccacattctataataaactcacacagactatgtgtgtgggacatacaccagtagcacgatggtgttagggtctggtgacag

SEQ ID NO: 46352 - DNA, 365 bp, Glycine max
  Clone ID: LIB3107-074-Q1-K1-F8
gggattgcagtgaacctggtaacatacatgatctcaatcatgcatctgccaagctcaactgcagccaatactgtgactgactttatgggcacatcatttctcctgtgtttgctgggaggttttctagcagattccttccttggcagatacaagacaattggaatctttgcttcaatacaaacgctgggtactgctacattagcagtctcaacaaaattgccagggctacgtccaccaccttgccatgctaacagtgacagttgcaaacaagccaacggattccaaatgggaatctagtacttgtcactgtaccttattgcactaagaactggtggcctgaagtccaatggttcatgatttggttc

SEQ ID NO: 46353 - DNA, 404 bp, Glycine max
  Clone ID: LIB3107-074-Q1-K1-F9
gttgtataatgaaaaataattgcataattgtctattgtaatgggaaatagaaaatggggaagaaaagacccggagaacacataatctccaatgtctataaattagtactcacaatgttgagcaaaaacaagatttactggggttgtccatttcattgtgaactaaataacgctttgctaattatgcctgtggcttcaatatatcgatctacgcacctagagatgcaactgctttcactcccaccgaggcttgaacctggttttgtaacacacttctcaaaacactttcttcccactgtctgcaaaataaaggtgagcggaattgtagcagatgagacactgaacaaaatcagtactcaataattatccacatttttcaagaatttacaagtagctggagcaaat

SEQ ID NO: 46354 - DNA, 378 bp, Glycine max
  Clone ID: LIB3107-074-Q1-K1-G10
cccacgcgtgggaacagattgagagcctacagcgtcctattacaatggaagcgggctcgattgttctaatggatttattatggtctgatccaacagaaaatgatagtgtggaagggttgcgaccgaatgctcgaggtcctgggttggttactttcgggcctgatcgtgtcatggagttctgcaataacaatgatcttcagttgatcgttcgagctcatgagtgtgttatggatggctttgagcgctttgctcagggacatttaatcacccttttctcagcaactaattattgtggtaccgctaataatgctggtgcaatcttaattttgggtagagatctagtggtagttccgaaactcattcatcctttaccccctg

SEQ ID NO: 46355 - DNA, 444 bp, Glycine max
  Clone ID: LIB3107-074-Q1-K1-G12
cggacgcgtgggaacagattgagagcctacagcgtcctattacaatggaagcaggctcgattgttctaatggatttattatggtctgatccaacagaaaatgatagtgtggaagggttgcgaccgaatgctcgaggtcctgggttggttactttcgggcctgatcgtgtcatggagttctgcaataacaatgatcttcagttgatcgttcgagctcatgagtgtgttatggatggctttgagcgctttgctcagggacatttaatcacccttttctcagcaactaattattgtggtaccgctaataatgctggtgcaatcttagttttgggtagagatctagtggtagttccgaaactcattcattctttaccccctgcaatgtcatccccagaagcatcatcggaacgtcttatataggatacatggatgcaggagctgaatg

SEQ ID NO: 46356 - DNA, 412 bp, Glycine max
  Clone ID: LIB3107-074-Q1-K1-G2
gctccttctccatcctaaatcgaatagatagataggtgaaaatggcgcagtgtgtgaccaacacattcgtgcaaggaaaaccctttcttccagttgcagcagctcccactaaaaatgttcggagagcggttcagtgcggtgtgtggtgcaagaagaaggagatacacccgcaattctacgaggaatcgaaggtgtactgcaacggggagctggtgctgacgacaggtgggacccagaaggaatacgtggtggacgtgtggtcggggaaccaccccttctacctcggaagccggtcggcgtctatggtcagcgacgaccaggtcgagaagttccgcaagaagttcggggagctcaaagagatcatggagattcctgttctcaagggagagattgttatcccctcaaggcgcaa

SEQ ID NO: 46357 - DNA, 211 bp, Glycine max
  Clone ID: LIB3107-074-Q1-K1-G3
gaagagattgtagaaacagttagtgaagagattgttgagactgagaaagatgtcaacaaagtgcatggcattccagttgaggaagatgatacaaagagtgtactgaaggacagaatgaatgtatatataccgctcagacgtgagaaatgctatataaaacaatagagagggttatttcagtagttagaaaatgtggatttcatcccctcgg

SEQ ID NO: 46358 - DNA, 177 bp, Glycine max
  unsure (1)..(177): unsure at all n locations
  Clone ID: LIB3107-074-Q1-K1-G6
tttggttttttctaaataaaaaacataattggggccaggtttctttataaagggactcatacttattctcanactcaaatcttttctttcactgaatgacttaccactctaaataattttcaatcctgtcacatctcattctttttcattacaaaatatatatcacccacaaatcta

SEQ ID NO: 46359 - DNA, 413 bp, Glycine max
  Clone ID: LIB3107-074-Q1-K1-G8
tccaacaggcaaatttgcttcggtgaaaggaacaggttatgatttccttaagccacaaactgttggaagcaggatcaatcaattggctgaaaccaaaggctatgacatcaactatgttcttgatggtgagaagggccaaaagatcaagctagcagctatagtgcaggataagaaatcagggagagtgttggagttgttcacaaatgctcctggtttgcagttctacacttgtaactatgttaaggatttgaagggaaaaggtggatatgtgtaccaatctcattcaagactatgtttggagtctcaagccttccctgattcagtgaatcagcctaatttcccttcaacaattgtgacaccagaaaagccttacaagcattatatgctttttaagttttccaccaaaaatccct

SEQ ID NO: 46360 - DNA, 408 bp, Glycine max
  Clone ID: LIB3107-074-Q1-K1-G9
cccacgcgtccggaaaaagcctctaaatgtggctagctaataacggcaatgttcctttttggctctattgctgaagctggtctaaaattctgcaattatccaaaaggggggaaaaagggccttaaaaaacattgaggctttgctgtggcattgttattctgaaaaaaactttttattgcaagcaaggaccctcatttccaagctaactgaggagaaaaactctgccattcatcaaaatatcaagcttcagcaagaactggaactgttgagacgcgaagccaaaagaaaccaaagagggattccattcatttatgtatttcttgcgggcttgatcggcatcattttgggatacctattgaaaagaacatggccaccaccgtgttacacattcttcagtttctttgatgc

SEQ ID NO: 46361 - DNA, 439 bp, Glycine max
  Clone ID: LIB3107-074-Q1-K1-H2
gagtgtatgtgattgttgtgactcgttcttcttcgtcgttatcttcttcttttgttgtttgtgtgtttgttttttctctcacctgaaaatgtcttgctgcggtggtaactgtggttgcggaagcgcctgcaagtgcggcaacggctgcggaggctgcaagatgtacccagacttgagctacaccgagtcaaccaccaccgagaccttggtcatgggagtggcaccagttaaggctcaattcgagagtgctgaaatgggtgttcccgctgagaacgatggctgcaaatgtggagctaactgcacctgcaacccctgcacttcaagtgaggtgttggagagctaaagcttcaagcagaaatggcccttagaaataatgataaaaactatatgtagtttcaaaacttcaaaattatgtagtatgtattatgttgcactctgg

SEQ ID NO: 46362 - DNA, 335 bp, Glycine max
  unsure (1)..(335): unsure at all n locations
  Clone ID: LIB3107-074-Q1-K1-H3
ggttgaatgtagaacgctgctgccgaaacccttcccgatccctaaggtaagtgagtaatcggtggttgagaatggtggagaaggcgaagggtaggaaggaggaggtggttaccagagagtacaccattaacctccacaagcgcctccatggctgcacatttaagaagaaagctcctaaagctattaaggagataaggaaatttgcccaaaaggccatggggaccaatgatgtgagggtggatgtgaagttgaacaagtttgtctggagccagggaatcaggagtgttccaaggaggattatggtaaagaatngctcgcaagaggaatgacgatga

SEQ ID NO: 46363 - DNA, 437 bp, Glycine max
  Clone ID: LIB3107-074-Q1-K1-H4
ggatgtccgcatgcatattagccgagtaaaatttgttctatactcgatgcagggttttggcaaaacccaaatgtccgccaattggtgttgagtggaattcttcgatcaacaacacaatgaaagggttttctagttcaagccaaactttgtggttgaagaatagcaggccatcatggtactcgatcccaggatgggaagtgggattggtgcaaatttgctgaagcttatcttgaaaagaagaactagtggtaaaatgtttgtgcatggcatcgatgaagatgaagtggggtgtggagagtatcatgcactgaccactggtgggaggaggtattctggataaggcatctgtgacaacattcgtttttccgaacttgtattggatcgtgtagtcgtaacctagtagcttggagagataattttgttgttctagcgtctta

SEQ ID NO: 46364 - DNA, 156 bp, Glycine max
  Clone ID: LIB3107-075-Q1-K1-A10
ttggggagttttgtcgcagcattccatacgaggccgaatggaagagtttttgttgggtttggaagctaaataaggtttgcgttgaaaaaaaaaaaaatgggaagagaaaaagagacaacaaaggtagcttacacaatggaacatcttgtaaccttt

SEQ ID NO: 46365 - DNA, 296 bp, Glycine max
  unsure (1)..(296): unsure at all n locations
  Clone ID: LIB3107-075-Q1-K1-A2
gaatcattgcatcgtaggagtctcttattctcctttgtgatggaaagatagaaaccctcatcgtccaagcacgcgttctttttaatctctctctctcaacaaatatttgtgggtagattcaattcaccatgtcgagctcatcggagtactctgaattttgcggccagaaaccggctaggtcgccggagaaatcgagcttctctcagacttgcagtctgccgagtcaatacatcgaggagaagggtagcttcngagatcttaccctcagaatgacatcatgtgggtcacctgagaca

SEQ ID NO: 46366 - DNA, 212 bp, Glycine max
  unsure (1)..(212): unsure at all n locations
  Clone ID: LIB3107-075-Q1-K1-A5
cggttgtaagaccaccggaggggccattctttaatcttaaacacttggaaggaaaatatagttgcccacttcttccattatctcattttctattacatcggcatgatgaaaccttgtatattatactctaaaatttagaatcattcttaatttggtataattatactaaatattntactggtcgatatgggaaatgcactgatcacggatac

SEQ ID NO: 46367 - DNA, 105 bp, Glycine max
  unsure (1)..(105): unsure at all n locations
  Clone ID: LIB3107-075-Q1-K1-A8
ggttctagtgtatgtgattgttgtgactcgttcttcttcngtcgtatcttcttctttggttgtttgtgtgtttgttttttctctcacctgaaaatgtcttgctgc

SEQ ID NO: 46368 - DNA, 314 bp, Glycine max
  Clone ID: LIB3107-075-Q1-K1-A9
tcccgttcgacgactacagacgacgactctatggggttctagtgtatgtgattgctgggagtcgttcttcttcggcggtatcttcttcttttgttgtttgtgtgtttgttttttctctcacctgaaaatgtcttgctgcggtcgtaactgtggttgcggaagcgccttcatgtgcggcaacggctgccgatgctgcattatgtacccagacttgagctacaccgattcaaccaccaccgataccttgttcatgggagtggcaccagttaaggctcaattccagagtgcttaaatgtgtgttcccgcttagaacg

SEQ ID NO: 46369 - DNA, 402 bp, Glycine max
  Clone ID: LIB3107-075-Q1-K1-B10
gatagcagcatcatacaaagcattgaattcaaaaactaagttcatttcttgtgctttgctttattcctcaaaaccaaacatgtcgaacacatgcggcaactgtgactgcgctgacaagactaactgcaccaagggaaacagctatggtgttatagtagagactgagaagagctacatcgagactgttgacatggatgttccagcagctgagcatgatgggaagtgcaagtgtggcactaactgcacttgcacggactgcacttgtggccattaaggaatatgtatgaaaatgtaattgccatgtgtttggcaatacaaatctccaaataatggaatcttcgtatgaataaatgtgtgctgttatcctacttcaaggtctgtgtagtcatgcagtctgaatca

SEQ ID NO: 46370 - DNA, 318 bp, Glycine max
  Clone ID: LIB3107-075-Q1-K1-B11
gaatacaacctcaaaaagagttctttcaaaatgcaaacagccttaaccttcgctgcccccaacgttgtgccattggcacccacaaagagtgtctcccatattaccatctttcccaccaaattgaaagccccgcgctcctcacctcgttactctccgattagggttgcaaccgtggagcccgacacttcaactgtcgactacaactctgcgttctcagtgtttcctgcagaagcatgcgaaactgtatgaggggaagcctgcatggcggagatgtaccctgaaacgaagctacagccagaggctaagactccacgagtc

SEQ ID NO: 46371 - DNA, 345 bp, Glycine max
  unsure (1)..(345): unsure at all n locations
  Clone ID: LIB3107-075-Q1-K1-B12
gaattcttggggaatctgagcggtgacccatacattcttcacaccaatgtgttcagtcagggcaaaggcagcagagagcaacagttctatctgtggttcgacccaactgcagatttccatacctattccattctttggaatcctcagcgcataatcttctcagtggatgggaccccaataagagaattcaagaacatggaatcaaaaggagttgcattcccaaaggaacagccaatgaggatatactctagtctatggaatgctgatgactgggcaacaagaggtggacttgtgaagacagattggacacaagctncattcacagcatcatatagaaatttcaat

SEQ ID NO: 46372 - DNA, 97 bp, Glycine max
  Clone ID: LIB3107-075-Q1-K1-B4
gacgcgctgctatgcgcaatgcctggtagagagaacgtgtggcgcatgaagccaactgtcgattctactccctctagagatgcgcatgttcgtgaag

SEQ ID NO: 46373 - DNA, 330 bp, Glycine max
  Clone ID: LIB3107-075-Q1-K1-B6
ggcacttagcaatcaatcaacactggaattacaatatacacatcttcaattaagccatgactctctctaagcttatagttgcttcccttcttgcctcgcttctccttcttcatcttgttgatgctgatcaatcggcacatgtacaaacgcaggggtctcttctgcagaagatagattgtaatggagcatgtgctgcgaggtgtcgtttatcatctcggccacgtctctgcaaaagagcctgtggaacttgttgtagacgctgcaactgcgtgccacctggcactgctggaaaccaagaagtgtgtccctgctatgctagtttgactactc

SEQ ID NO: 46374 - DNA, 387 bp, Glycine max
  Clone ID: LIB3107-075-Q1-K1-B7
ccacgcgtgcgaccacgcgtgcgggtgcgtgaatacgacggatggagttgctaaggaacatcggtggcataaacctgaatgtggacagttctaactgcacaccaacaaggctacttcactaaagtgttttatctcttccttgatcatacatggaagcgtggatagctgggatggaagtgacttacattgaatcggagctccacactcttctgatcagaatgaccatcaccacaagacaaagcgttctgccagaggtgatgatgaaagcttgaaacgtgagagcagtgctcgacgccatagctctacgtagaagaagcctagagtgaatagggcaattgaggtgcccgctatcagcatcaaactagctgatctacatactgatgatta

SEQ ID NO: 46375 - DNA, 389 bp, Glycine max
  Clone ID: LIB3107-075-Q1-K1-B8
ggaggctaggagaagagaagtgttcccttagaagaatagtgtaaaatggcatcactcaaagctgagaaacctgttgaaaaatcttgttgctctcaaccatctgcaggacaggtgaagaaagagtcttctgccaaacctagttcaggcacttccaaagccccggtctcgaaaccaaccccaaagaatattccaagccagactaggtagaaggcaagcagcaataaataagctgaagatgcaagagtaaaaagtacgaaagactaaaaaataatagttgttgcacttggaattatgggaagagtcctaaggatactgttatatggtgctcttcaaccatggttataagtagtgctattaatgtctgtaccacttgcttatgttaatttctc

SEQ ID NO: 46376 - DNA, 332 bp, Glycine max
  Clone ID: LIB3107-075-Q1-K1-B9
ggtggatgagatgtgaaacttcgcagctgatcaccatcgccttcttcctccccttgtttctaaccaatcttcaaattccatgtttttttaggtatgaaactttatttccttcctttttatttttcgttttaactttttataatctttcaattatccttttttttccctctctcgagattatatgcaatgtttgccttgctatggattctccaatatttcagaaatctaactatctaactgtaaaatatgcttttgcatcccttttttccgtctttgggtttattaggcttcgattattttcatgtgaattaacttcataagaactatttcgt

SEQ ID NO: 46377 - DNA, 341 bp, Glycine max
  Clone ID: LIB3107-075-Q1-K1-C10
tcctgttttcaataaatcttatatgttgtatcattcttatgatggcagcttgcacagaaagaattgcagaagatcaacatgtacaaggcacccagggataaacttgtctgtattctgaattgttgcagggttattagcaacttgctgcttaatgcttcggttgcttccagagagaatcctccaggagctgatgaatttcttcctgtgcttatttatgtaaccataaaggtaatccaatgttccattacaaataatacatgcataattttcgagtagaaataatttggcttgatagaatgaagttattactttctgcactttctttaaaatatgggtatgac

SEQ ID NO: 46378 - DNA, 306 bp, Glycine max
  Clone ID: LIB3107-075-Q1-K1-C11
gaagctcaatagagagaactcaattgaatcatcaaatgaggacagtgatttcgcgcttgatccattccacgccttccatttccaggctcaatgccacggtagtgtcaatcagcgggagaaatctctgcacagattctaacaaagttgatgggccattcaaagttgaagaagcagagactgtaaatgtgcctccactcccaacagaaaagttgcttgtgttgggagggaatgggtttgttggatcacacatttgtagagaagccttataccgtgatttgtctgttgcgagtcttagcaggtctggta

SEQ ID NO: 46379 - DNA, 320 bp, Glycine max
  unsure (1)..(320): unsure at all n locations
  Clone ID: LIB3107-075-Q1-K1-C12
ggaagatgagggttggaaggaagagaggaacccagagagataaagctgttggaaaaagctgaaagtgaggtaaccgaaagaggaaaaaaaaagctttttaatttccttcctctattctattctcttagtcttaggtacccgtatctatcatcatcttctctagcgagctcagagctcatcctgctccttctcttaattctattatcatacaactaagaatgatcgacatgttagtgatccataactcattacctnccacttctgatgccgagaatggtactgctgctactgncactaataaaaggaagagaaggcctgca

SEQ ID NO: 46380 - DNA, 341 bp, Glycine max
  Clone ID: LIB3107-075-Q1-K1-C4
atggtagaggatgcacgaacagcgctaggcaatcaatttgtggggctccggacttgatggtggaggatgcatgaacaacgctaggcaatcatttcacggggctctagagtcaatgatggaggatgcacaaacagcgctaggcaatcaattcgtggggctccggactcgatggtggaggatgcatgaacaatgctaggcaatcaattcatggggctctggactcaatgattgaggatgcatgaacagcgctaggcaatcaattcgtggggctccggactcgatggtagaggatgcatgaacaacgctaggaaatcaattcatgggggctcagactcaatgat

SEQ ID NO: 46381 - DNA, 389 bp, Glycine max
  Clone ID: LIB3107-075-Q1-K1-C5
cggttgcaagagaccaactgagggggactaacccaaaaccaacctactccaaggaagtcccctaatcagaaccagagatggacaccaaacccaccgagatcagcagcggcaagatgttcggaggttacaacaagagattcaagcatttcagccttaccctgggatgctccatgaacttccacatctacttgcctccatctccttctgcctctcacaaattccctgtgctgtactttctctctggcctcacttgcaccgacgagaacttcatattcaagtcgggtgctcagcgtgccgcttacgccgagggtgttgccttggttgcccccgacacttctgcgagaggcttgaatgtggaaggagaagcaaacaactgggaccttggagta

SEQ ID NO: 46382 - DNA, 332 bp, Glycine max
  Clone ID: LIB3107-075-Q1-K1-C7
ggattagatctcaaattattatttctactgaaaactacagccatcgatcgaatttgctgcaattaacataatagcagaatcccttttccaacctttcttctcttcagatcggatcagatcagaatcccaccgccatggatttcatgaaggtcttcgatcaaaccgttcgagaaataaagagagaggtgaatctgaaggtgctcaaggttccggaaatcgaacagaaggtgctggatgcaactgataatgaaccttggggtcctcatggtactgtgctggcagagatttcacaggctaccaaaaaatttactgaatgccaaatgatcatgaat

SEQ ID NO: 46383 - DNA, 395 bp, Glycine max
  unsure (1)..(395): unsure at all n locations
  Clone ID: LIB3107-075-Q1-K1-C8
caaaatgacaacaacatggatcctcagcgtaaagcattttatgaatacttctcagctctcatggagccatgggatgggccagctcttatagcatttactgatgggcactatcttggagcaaccttggacaggaatgggctgcgaccaggccgcttttatgtcacccacagtggacgagttgtaatggcgagtgaagttggggttgtagacattcctcttgaagacgtgagtcagaaaggaggactaaatcctggcatgatgcttctagtggattttgagaagcatattgttgtgaatgatgatgccttaaaggaacagtattcattggcaaggccatatggggatggctcaaaagcagaagtagaactcaaaacatagntgattctgtcatgaat

SEQ ID NO: 46384 - DNA, 437 bp, Glycine max
  unsure (1)..(437): unsure at all n locations
  Clone ID: LIB3107-075-Q1-K1-C9
gatacttcaaaatccaaatctagcgattaattatagtttaggcagcaaattatggaatcccatgatgaggagcatgctgccaaactacttagagctcaaacccacatatggaatcacatatttagcttcataaactccatgtcccttaaatgtgtggttgacttaggcataccagatatcatacacaactatggccaacccatgccactctcaaacctcattgcttcactaccaatccacccatccaaaacttgcttcgtccattgcttgatgcgaatcatgatccattctggctttttctctcaacaaaaccatgacttggagaatgagctagaagccaagtatgtgctaaccgatgcatctgtactattgcttaaaaaccatncgctgagtgtgacaactttcttgcatgccatgcttgatccaattttgacaaa

SEQ ID NO: 46385 - DNA, 307 bp, Glycine max
  Clone ID: LIB3107-075-Q1-K1-D1
gaccggcttgaccgtggtattcaagaatctcagaaggtgttaatcgaaactcagtccgagatcatcatgctcgaggatagaaccgagtttgggcacgaggaccctcacgaattcgacacgtaccttgaagaacaactgggggattacctagttccccaggatgataaggttattgaaaagacaatcgcagaggtgctaccaaagagagttatatgtgtttggaagccaagataatcgccacagcctatagcatggagtcctctgaggagtgcatggtactcgagggattactggatcaacactgatt

SEQ ID NO: 46386 - DNA, 380 bp, Glycine max
  Clone ID: LIB3107-075-Q1-K1-D10
gtcccaaggtatcatttctaatacatccgttgggcgggctcggacacattgagtacatcctatacatgtatcataaatttttactgaatgtgacattggatcgtaatccttgaacatcaaaaattcaacattttcaatctagtaaacttgtaaacgaatttatatatattagataccagatgaatcaatgatttataaaaattttgataatcaaaatatacttatagattaattaataataagagaatagaaccaagatactttgatttcttatctttgttttcgcaaacatgattctaatttatatatcatatatggctatgctaatttgaattcattaatagtccacacaaaatttaatttttcctttttttaatttt

SEQ ID NO: 46387 - DNA, 153 bp, Glycine max
  Clone ID: LIB3107-075-Q1-K1-D11
gaacaaagaaacaacgcttcatatacccaacttgcgggttcttttcatctgtatacaatctaaatcctcctaaatactcctccctctttaacccatccaatcttacttacccatcccaacgactttccatactcttctttattatcacttaaa

SEQ ID NO: 46388 - DNA, 397 bp, Glycine max
  Clone ID: LIB3107-075-Q1-K1-D3
tcggccacgcgttcggccaagccttcctaccggttgtaagaaaactacaaaaaggggatcggcttttggtattaattcctccggattgggtcaaaaacatctctcgaatgagttattcaactgcagggatgaatcgaaaaatcactctctataggttctacctcctctgtgttatgaagagaatgaatctctttatcgaaggatcataaaagaatgggtccagacctcttgcgggaataatttggaagatccaaaacctacaatagctgtatctactagcaacaacatactggaggcagtcaatcaatatagattgatccgaaatctgattcaaatccaatatatcacccatggttacataagaaatgtttcgaatcgattcaattgcaacttcgaa

SEQ ID NO: 46389 - DNA, 275 bp, Glycine max
  Clone ID: LIB3107-075-Q1-K1-D4
atctaaaagaaagactaaaagttttatatattaagaaataaggagatttgattaacaaaatcttgtaagactatctattcttatttgagttttgcttttattactcatgttatttagacaaatagttgataattatgagtttggatatttatttaattaatccttgataatccatataaatctatctatgtgggcaatgacaataaaattatagtaaataagcttttaaaacttttaaactatagctatagattgattttcaaatcgttttatgt

SEQ ID NO: 46390 - DNA, 295 bp, Glycine max
  Clone ID: LIB3107-075-Q1-K1-D5
gaccccaaaggggtttttaaggaccacaccattgaaaattttggacctagaaccaaagaagggaccggttcatgatcaatacgatgatcttgttggttctttttcttcttcttcttcttcaacatcatcttctgtttctggaatttcaagtgggtcatcattggaatctgattcttttgaagaagtaacatcctctgcctcctcttcttcatcatcagcagctgatgatcaacttgtagttgtagctgatccattgggtgacatgacttctctctttcaacaacttcccatcaag

SEQ ID NO: 46391 - DNA, 293 bp, Glycine max
  Clone ID: LIB3107-075-Q1-K1-D6
ggttgaggaaattttttggaaggaaaacaaaaattcgatccgaatgtattagatctcaaatcatttctactgaaaactacagccatcgaattccctgcaattaacataagcataacccctttccaacctttctcctcttcagatcggatcagatcagatccaccgccatggatttcatgaaggtcttcgatcaaaccgttcgagaaataaagagagaggtgaatctgaaggtgctcaagattccggaaatcgaacagaaggtgctggatgctactgataatgaaccctggggt

SEQ ID NO: 46392 - DNA, 342 bp, Glycine max
  Clone ID: LIB3107-075-Q1-K1-D7
gggagaccgaaagaccggaacataaggcgggcaagagagttcgtttcttctctcttcaatggaaggcggcgaacaggttctcccttcggccaccaccgtcgccgccgtcggctatcccaacgtctctcctcctccgctcgctgatcctgtcggtgcttccgatctcgctgctgctgcctcggacgacgttgttgcggaacctgaaattcacgcgctgatttcagacgaagagcacgatcacgatcacgatcacgagcatgagcatgagcatgaccatgacctcgagcacgatcacgagcatgagcatgaccaccacgaggaccgcgatgatcacgcccgcgt

SEQ ID NO: 46393 - DNA, 308 bp, Glycine max
  Clone ID: LIB3107-075-Q1-K1-D9
gatattgatggtacccctgcttatgaagtcactgaatgagggttcttaccaaatgacagatgcttttctttactaccctacaagtctacctttccattccgacctacatctggttggagcacgaatctctcatcttgtaacacactacatctaacattaatcaaacctattgccctttgcaatatgcagtggagtattgactgatgctggcgggcaaaatatcaaagagctttcttctctagtgtgcttaaatatatctcaaaacagcttcctcactgacaaaaccctggagttaatttctgcgctta

SEQ ID NO: 46394 - DNA, 383 bp, Glycine max
  unsure (1)..(383): unsure at all n locations
  Clone ID: LIB3107-075-Q1-K1-E1
aggggacctttccacctttcaatttcattaggaaaggccaaaactgagcctcgaggaagataactacgatggaaccaggaggattggttgattccaacggcgttgctatcgttgctgttggtttcattttttccgccgttgagttacggagttgttcctcctcgtcctctgctcaataagctgtcggagggcaaatatctcaacactcangagctctggttcgaccaaaccctcgatcacttctctccctatgatcaccgacaattccggcaacgttactatgagtttctagactatttccggattcccgatggaccaatttttttggtaataggtggtgaaggtatattgaatggggtagcaaatgactatcttgctgtact

SEQ ID NO: 46395 - DNA, 299 bp, Glycine max
  unsure (1)..(299): unsure at all n locations
  Clone ID: LIB3107-075-Q1-K1-E10
gcacgtgaggcacgagaaatttattatgataggtgcaccaaagattcttctgactttatgagagatgaaagatataggaaacgtcccattttaattgcagcttctgtgggaagctatggagcgtatttggctgatggctctgaatatgttggggactatggtgatgcagttactgtccagacactgaaagattttcacagggaaagagtaaagattcttgttgaggctggtgctgacttaatagcctttgaaacaattccaaataagctggatgcacangcttatgctgaacttctcga

SEQ ID NO: 46396 - DNA, 245 bp, Glycine max
  Clone ID: LIB3107-075-Q1-K1-E11
aagaatgtatttacaagaaggaaccactgctagctgggacattttgaacctgagttaaagtcagcatcaaacacttcggatcagttaaaaaaacaattatttcatctaatattttttttcacgtatcatgtgtgtgatgattgacatatgggtcaacatgtgccaacatcaaatattgtatgatgtttccttacatgcaatatatcattaattaattgacagaacttattttatgttttattttc

SEQ ID NO: 46397 - DNA, 120 bp, Glycine max
  Clone ID: LIB3107-075-Q1-K1-E12
gatttctgtttctctaagataaacaacatgtgatggggtttttattgaagtgaaccaaattgatttatctcccatatcctaatttgcaatgatgtttgtttattctgcactgtccattat

SEQ ID NO: 46398 - DNA, 361 bp, Glycine max
  unsure (1)..(361): unsure at all n locations
  Clone ID: LIB3107-075-Q1-K1-E2
gggcccacttaaaagcatggttcctgactatgaaaatcaggcaacaacacagggaattccatctgtaagctgaagcatccttcatggacatatnttacactctgccatgtgaaacatgctaaggagatataagggtggttggatgattaagatagaagggaatgggggaaaggtcgcgggttcgattccccagctaacaaattaacaactaacatttgccgataaaaaaaaatgtgaaacatgctaacaactgattcttgattgtgtgtatattttttttttcagggaggtacttttacaggaatggaaacaacctttcagggaatgcatctggctgagaaatacttnntcccaacacaac

SEQ ID NO: 46399 - DNA, 224 bp, Glycine max
  Clone ID: LIB3107-075-Q1-K1-E5
ggcctactgatggggttacatgaccagaggaaaatattttcttttaataaaggaaacttataatcgaaacgaaaaatcgccatgaatcccaaaatcctcttcgtgtttgctctgcttctgaatctcgtatccaattcgttccaaaaccctaacccttgaacccccatatcaacgtcatcgcatgctcacgtggtgctcatcatccacggcttacccggcggtct

SEQ ID NO: 46400 - DNA, 266 bp, Glycine max
  Clone ID: LIB3107-075-Q1-K1-E6
ggctgctcaaccttttctttgtttctctcacttggtgggtctctctctaaaagctcaggactcagattgtgccctttttgacaaacctctgctctttgattccagggaatgtttagatgcagttgcaaatggatactctatttatttatttgtgggaatgatttactgtcttgtaatgcaatgtggggtttaagggctgattttggctttgtctgtgtgattcttattcagttggcttctcagaagtgggttagtgaaagttttta

SEQ ID NO: 46401 - DNA, 334 bp, Glycine max
  unsure (1)..(334): unsure at all n locations
  Clone ID: LIB3107-075-Q1-K1-E7
gctagatagagagtttcgttcgtcaccatgacttttaagcgcaggaatggaggtcgcaacaaacacggccgtggccacgtcaagttcattcgatgctccaactgcggcaaatgctgtcctaaggacaaggctatcaagaggtttctggtgaggaacattgttgaacaggctgcagtcagagatgttcaggaggcttgtgtctatgaacaatacacgcttccgaagctttatgtgaagatgcagtattgtgtttcctgtgctatccactctcatgttgtgagggttcgatcccgcactgataggagaaagcgtgagcctncacagcgatttatca

SEQ ID NO: 46402 - DNA, 266 bp, Glycine max
  Clone ID: LIB3107-075-Q1-K1-E8
ggaacttgggctgcgcaccctggtctcattccagggggcatggagattttgaacaacaacatgggcaatgcttccaaccagatagacacagtgaaacgcgaagatggggcaaacatcaccgagcaagacctcttgcagataccaagaggagcccgcaccatggaaggtctcagattgaacacaagggtgggaattcagtacgtggcggcgtggctcaccggaagcggtttggtgcctctatacaacctcatggaggatgctggcac

SEQ ID NO: 46403 - DNA, 277 bp, Glycine max
  Clone ID: LIB3107-075-Q1-K1-E9
attattatggatcgcaatacggggtctctcgctgggtactatcttcaattcttcatcacagaactcttggttccaagttccagcaacatcatcactattgtgtttatgaaacgttatttgcttatttatttaagtttgaatgctgatgggagcgtttttggttttggaattgatgtttcgcctaactctgattgtctactgagtcatgacagtgaccttccctgccatagacacagatgaagtgatatgctatatcattttgtaattctctctctct

SEQ ID NO: 46404 - DNA, 188 bp, Glycine max
  Clone ID: LIB3107-075-Q1-K1-F10
gaccttcacagaagcaattaatcatattcctctctgattctcactatagacacaaaacccttcccatcctaattaaggtgaaaatgaaggcatcacccattgcttggttcactttggtggttgtgtttcttgtggctgaagttcaagtttcaatggcagtgacatgcagcccagtgcagctgagtgca

SEQ ID NO: 46405 - DNA, 214 bp, Glycine max
  unsure (1)..(214): unsure at all n locations
  Clone ID: LIB3107-075-Q1-K1-F11
atctccatgcaattgatcagtgctactcanactgatggcagttgaaatgggaaagttggaaaagaagtctatttggaaaaacatcttccgaccttgccaacgtttggagcaaggcaggattgcgtcagtattttctttgaatgggatgctagttttggaattccaggagcattttacattaaaaaactttattgaactgatgagttttttccct

SEQ ID NO: 46406 - DNA, 262 bp, Glycine max
  Clone ID: LIB3107-075-Q1-K1-F12
gggggggaagttatagacacctttccatactttgtgtctggagtacttcacttaatttcctctgcagtattgggctttggcggtatttatcatgcacttttgggacctgagactcttgaagaatcttttccattcttcggttatgtatggaaagatagaaataaaatgactacaattttgggtattcacttaatcttgttaggtataagtgcgtttcttctagtattcaaggctctttattttggaggtatatatgatacgt

SEQ ID NO: 46407 - DNA, 158 bp, Glycine max
  Clone ID: LIB3107-075-Q1-K1-F2
cccacgcgtccgtctgcgtgagacaacacaacggtgatcgcgggctgcgaggataggaaagcgctagtaataagaatagcgttggatgacggatcgccatgcctcgcatactgtattacttttgcagagctcacaacaccgaaccttcattcccgact

SEQ ID NO: 46408 - DNA, 325 bp, Glycine max
  Clone ID: LIB3107-075-Q1-K1-F3
ggatggtcaccttcctcaagggggttgtggatgaatgggggactgtttccaaggagtggggaatggaggctatgccaaccttcctgttcttgaaagaaggcaacctggtggacaaggttgtgggtgccaagaaagaggagctgcaattgacaatagccaaacatgccgcaattgctgctgcttgaagtgccatatgaatatgttaagaataatagactattgtcttcgagtcagtttgcttttattactattaatctgttattgggtctgtttgcatgatttcagaacggatttagagttagtaaaacatggatgggttatgtgg

SEQ ID NO: 46409 - DNA, 394 bp, Glycine max
  Clone ID: LIB3107-075-Q1-K1-F9
agggtgtcatcactgtcaaacacaagaaaagagaatttcaattttcgacatacctattctattatatagaaatagacatatatgaagaaattaataatttaaacatgcacaagaattgatgcttgcttgatgggaccaaactaagtaaaggcacgcgcagcacaactcaacgcaatggagtgagttgcttatgagcatattgagaaaaaaaggcagaggctgaagcagaaacaaaaccccactttttcatggccaatatcattggcatgagcagaagaagaagaacaacgacgactcaacaactatgccacagaatggttcaccatgtcaacgtccacttgaacctgttccatagggtgtcctttcttggtcggttcatttgggacaggatgct

SEQ ID NO: 46410 - DNA, 266 bp, Glycine max
  Clone ID: LIB3107-075-Q1-K1-G10
gtccgcggagacgtcggaggcggcggtggtggtggcgaacgaccagctcttgctctacagaggattgaagaaggccaagaaggagagaggttgcacggccaaagagcgcatcatcaaaatgcctccgtgcgccgccggcaaacgcagttccatataccgcggcgtcacgaggcacaggtggactggtcgttatgaagcgcatctttgggataagagtacgtgggaccaaaatcatattaagaagggaaagcagtttacttggggcg

SEQ ID NO: 46411 - DNA, 323 bp, Glycine max
  Clone ID: LIB3107-075-Q1-K1-G12
tattatacaaaaaaaatccatcatagacactaatgggattagattcttggtgttcatagacaaactttggatttccgatctcaggtaagatcggttcatgatcatgggatccttgtttatcaaactccaagggctgcttcacaaaatgtacttctaatgaattgctccatagatcctatatctatctatatgaagaagaaatcatccgacggcggggattcttatttgtacaaaatggtacttccaaccttggaacgagtattgaagaaaataacgattcttctttacccttttgaagttgttcttgccggatcgggtcgcct

SEQ ID NO: 46412 - DNA, 278 bp, Glycine max
  Clone ID: LIB3107-075-Q1-K1-G4
gaccaaaccaaagtaagagtgagcaacttccaacaccatagtgaaatggcttccaaggctgcacttctcttgtgtttcaatgttctcttcttcaccgtggttagctccacatatgtgccatgcaacccaccccccaaaactccaaaacacccacctgtcccaaagccaccttccccaaagcaagcaagttgccccaaagacactattaagtttggtgtgtgtgctgatgtgttaggtttgatcaacgtgcaacttggaagccaccaaaaccccatgct

SEQ ID NO: 46413 - DNA, 261 bp, Glycine max
  Clone ID: LIB3107-075-Q1-K1-G6
gatccttatctggcagactagtatccgatcctctgtgcggtctaatctttgatcgttcaacatattctcaccatctcagtcatgggcctgctatcttgttttaggtctaccgccctgagaaaatgttccaaaggaagctctggcatgtcaagattcctgtatacgaacaattttcaacgaaacttgatttcgtctggtggcaatgaatcgtattatgggtattttaacaggagatcatacacttcactttatatgggaact

SEQ ID NO: 46414 - DNA, 319 bp, Glycine max
  Clone ID: LIB3107-075-Q1-K1-G7
ggggttgcgttgcgtcgagggactcagcttcttcttcttcgtcttcttcttcttcttcttcttcttcttcctcttctcgttcttctctcatccattccatggagcttcagaggcgtccagatcagtgcctcccggtgaggaaagggctgaagaggaagctagaggaggagttcgatgacgacccacagatctccgctcctcccaccggtgacgctcgcgacgccctcctctctgacgttaaggaacaggtttccctcctcgattccaatttctcctggaacgaacacgatcgtgccgtcggcaagcgcgccacgcacgc

SEQ ID NO: 46415 - DNA, 323 bp, Glycine max
  Clone ID: LIB3107-075-Q1-K1-G9
gaagcatagcagcatcatacaaagcattgaattcaagagacttaagttcattccttgtgttttgctttcttcctcaaaaccaaacatgtcgaacacatgcggcatctgcgactgcgctgacaagactagctgcaccaagggaaacagctatggtgttattgtagagactgagaagagttacatcgagactgttgtcatggatgttccagcagctgagcatgatgggaagtgcaagtgtggcactaactgcactttgcacgggactgcaacctgtggccatttaaggaatatgtaatggaaaatggtaattgccattgtttttg

SEQ ID NO: 46416 - DNA, 271 bp, Glycine max
  Clone ID: LIB3107-075-Q1-K1-H1
atacgacagaagggcgaaggagataattttgggggccccggctttttaatcccctgattgagggtccaaccgaatggccatttcatttctttgactcgctttcaagtcaacatttcattgccagcaagctttttggtgtactcgggtatctcatcatatacacacgacatcttccatatatcaacctattgcctgtgcatatgcggtggagtattgactgatgctggcggccgcatatcaaagagctttcttctctagtgtgcctaaatat

SEQ ID NO: 46417 - DNA, 261 bp, Glycine max
  Clone ID: LIB3107-075-Q1-K1-H10
tctttaggaggaggttctcaggtactcaattccgggcagagccttttcatatactgcagctgacggtaaaaaatctattgtggcacctttgagaagatgtggtggtaagccaacatcaaaagcccgagaccattttatgttgaaacgtgatcgcccaccacatgttacgattctttgtctactatgatatgctgcagctagattacctggaagtattggcactagagcagatgtttgtactttaattcgtgattctcaata

SEQ ID NO: 46418 - DNA, 292 bp, Glycine max
  unsure (1)..(292): unsure at all n locations
  Clone ID: LIB3107-075-Q1-K1-H12
gctctcttccactctctccctctttcctatcacactttctagatagctagcctgtaagatatatatatagatatttcatatatatcctatggtccgtgagtgcccttgttctgtaccaaccctttcttccacatgttgagtttcagcatcgtcctctcttgagtccccatatcaaatacccatcgaattcaaccccccatataacaaatctcctcccatcccatttttcagcaccaaagtttgaaactttctcaatngngttgaggagagttgactcaaattttattttcta

SEQ ID NO: 46419 - DNA, 69 bp, Glycine max
  unsure (1)..(69): unsure at all n locations
  Clone ID: LIB3107-075-Q1-K1-H3
aggaatggtacctttgtttccttgaaggccaaanaaaaagagagaatttaaaaaaggggagggggcggc

SEQ ID NO: 46420 - DNA, 254 bp, Glycine max
  Clone ID: LIB3107-075-Q1-K1-H6
gagaccatatcttattcaaggaacatgatttagaaaactgccaggcccacccatattcattctctcaaaacttccaaccatgaactgaagcgccacacatacccacttcctccaaagacatcatttttattaccaatcttccaatttcagagaaaattctttgtgggcatctcttaattaaaaaaatgtcaagcttccccaacacggtggcggaaggccgcatgtccaacaaggcaccggaaaaatcccacttt

SEQ ID NO: 46421 - DNA, 341 bp, Glycine max
  unsure (1)..(341): unsure at all n locations
  Clone ID: LIB3107-075-Q1-K1-H7
gaacgcaaactgtcatcttgtcattcaccgagaaagtcgtactgattcctcttcatctttcgttaaagcgagtacttttcgttcttgatctgttggttacgatgtcgtattcaaggagatctaggtattctccttctccttctccttctccatacaagcgatacggtaggtctgtgtccaggtctctctcaatatcaagatccagaagccgttcaaggagtttatcaagagatgcagaaaatccaggaaacaatttgtatgtgacaggattgtctcctaggattaccaagagagaactggagaanacatttgctgctgaaggaaagtgatagatgccatct

SEQ ID NO: 46422 - DNA, 108 bp, Glycine max
  Clone ID: LIB3107-075-Q1-K1-H8
gctcgctcactgtgatacagcaaattaacgggagcgggagccttatacagaggcttcgaatcctacctcgaaagaccaatcgtcgtatctcaggaatcgcaatcgcca

SEQ ID NO: 46423 - DNA, 419 bp, Glycine max
  Clone ID: LIB3107-076-Q1-K1-A1
gggtgtagtttagtgacatttgcagtagtagccagcaggacgaggaaaatgggtagtgtggccccaaggttccgcttcctcctggccactcccttccctcttctccgccgccggcaccaccaccaccaccgcaacctcttcctcctctccacccattccctccccttatcttccttctctttctctctcaaactcaaagcctcccaatcccaagcttccgcccctaacacctctccctgccctgagtggtcctcattcctctcccacatctcctccgccggctacctcccctccctccccgaccaagccttcaccgccgccgccgaacgtctctcctactccttcctccgcgacgccaccgcctgcctcgccttcgcacgtgaccgtcctaaccttctcaggttgctttctacgagaga

SEQ ID NO: 46424 - DNA, 333 bp, Glycine max
  unsure (1)..(333): unsure at all n locations
  Clone ID: LIB3107-076-Q1-K1-A11
ttgggtttggataggaggatcaatctttgcatccctcagcaccttccagcagatgtggatgtcgtaggtggattgtgatgagtctggtccattctttgtccacagtaagtgcttcatagttcaaagtaaatgctttaattgtgtgttatttgtttagtatgtgctgtttggagtctgtgtcatgtcttgcgaactttgttgcattgtgtaaggggtgtgatnngatgggcagggatattcggagagcttgatgtatcatatattgtgtggcatccctctggatggggcgggcacagaattgttgagaagcatttttcatcttggaattcatct

SEQ ID NO: 46425 - DNA, 394 bp, Glycine max
  Clone ID: LIB3107-076-Q1-K1-A2
gagtgcttcgcggacacagaaccgagcttgcagcagcgatttctcatttcatttttcacacttcaacaatggcgaaaaccttcaaatacatcatcctcggtggaggagtttccgctggttatgcggcgagggagtttgccaaacagggcgttaagccaggggagttggctatcatttcgaaagaagcggtagcaccttatgaacgtcctgctctgagcaaggcttacctttttccagagtcccctgctagacttcctgggttccatgtctgtgttggaagtggaggagaaaggttgcttcctgagtggtacacagagaaagggatagagttaattcttagcacagaaatagtaaaggtagaccttgctgcaaaatctctgatcagtgctggagg

SEQ ID NO: 46426 - DNA, 413 bp, Glycine max
  Clone ID: LIB3107-076-Q1-K1-A3
ggttaaggtcaaagatgaagaagaacttgatgctgatgatgacacagcttgccatttggattctattcttgacatgaatagcgaggcctttaattggaatattgctgagtcagagtcacctgcacaggcacaagaagatgaagtgagtaaagtgagaaccaataagaaggacatatttttgaggctaaactatgaagaagtcattactgcttgggcaagtcaaggttctccatggactacaggaaccccacctaagttcttcaactccgatgattgctggctagacttggtaacttctattcaaccctctttgcttatgcagcagaatcttcttgtgtgtttggtttgacttatttttatgagaataaatttttcagttttcttatagtatcatagccgatctcatatatatc

SEQ ID NO: 46427 - DNA, 351 bp, Glycine max
  unsure (1)..(351): unsure at all n locations
  Clone ID: LIB3107-076-Q1-K1-A5
gggtgtagggtattgacatttgcantactatccggcactaggaggaaaatgggtagtttttccccaatattccactttcttcttgccactcccttctcttttatacggcgtcggcaccaccacctccaccgtaacctattattactgtccacccattccctccccttatcttccttcacttttttttttaaacttcaagcctaccaatcccaagctttcgtccctaacaccttttcctgcccttgagtggtcctcatttctcttccacattttcttcggcgggtaccttccctgcctcccctaccaaacctttcatcggctctcccgaacgtttcttctacttcttttctt

SEQ ID NO: 46428 - DNA, 350 bp, Glycine max
  Clone ID: LIB3107-076-Q1-K1-A6
gagtgcttcgcggacacagagccgagctggcagcagcgatttctcatttcatttttcacacttcaacaatggcgaaaaccttcaaatacatcatcctcggtggaggagtttccgctggttatgcggcgagggagtttgccaaacagggcgttaagccaggggagttggctatcatttcgaaagaagcggtagcaccttatgaacgttctgctctgagcaaggcttacctgtttccagagtcccctgctagacttcctgggttccatgtctgtgttggaagtggaggagaaaggttgcttactgagtggtacacagagaaagggatagaggtaattcttagcacagaaata

SEQ ID NO: 46429 - DNA, 412 bp, Glycine max
  Clone ID: LIB3107-076-Q1-K1-A7
acctacagcgttgcatgacataaatggggatagtgacaaggatgattatcaacatcggtactattaatgggttgcctaacctcacaattactgtcggggacaaacctatgacccttacatattggaagacattgaatgaggactagggatcgcatgagcgagatgatgactgatgtgtattatgagcgatgaacatgcctacttcgcggtgtcctctttgcggttgggagaagaccatgataaggggtttttatacacaaattccatctggttagctttcgaggagggtatgacaacgctgacgcactggacattcaacaggttatattgcgtatgcatcaactaccgctgatgaggattgtgaaaaagccatttgggacgacgatattgcaggtgaacattatgaattctg

SEQ ID NO: 46430 - DNA, 200 bp, Glycine max
  Clone ID: LIB3107-076-Q1-K1-A8
gccctcatggctgaacaatcttccaactccatttacgatttcactgtcaaggacatcagcggaaatgatgtgagtctgaatgattacagcgggaaggttctactgattgtgaatgtcgcctctcaatgtggtgtgacacagacaaattacacagaattgaatgtattgtacgagaagtacaagaatcaaggatttgaaat

SEQ ID NO: 46431 - DNA, 434 bp, Glycine max
  Clone ID: LIB3107-076-Q1-K1-B1
agaagacgacagaaggggtattcaactatgtaaatcagctgtgcgagagcttgccgagtccaaatggagagtcagtagtagactgtaatagcatttatggattgcctaacatcacgtttactgttggagacaaacctttcaccctcactcctgagcagtatattctgaaaactggagaaggcattgcagaagtttgccttagtgggtttattgcttttgacattcctcctccacggggtcctctctggattcttggggatgttttcatgagggtatatcacaccgtctttgactatggcaatctccgagttggttttgccaaagctgcctaacaagacatgttggagattatatagggcatgttttaataagctcgttattgtattgtaaataagctttctgtaactactatggcacagggttacattatagat

SEQ ID NO: 46432 - DNA, 399 bp, Glycine max
  Clone ID: LIB3107-076-Q1-K1-B2
gaatggtcttggtgtgaaccatagcaatggcaacttcttcaaccacgctattgctatcatcactcacacttggaagcaccccatcaatcaactcccgaaacctctcattttttttgcttcaaaatcgttctttgaatcgacccaagaagcgagtttccttcgttgttcaagcagccaagcccactgttggtggaaattccaaaggtgcagcctcaatttaagcctccgtttcttgggttgactaagactgcagaaatatggaactctagagcttgcatgattggaatcattggagtttttattgtagagtttgtgagtattttatattgcattttagtttcacgtatacaataatgcttttaagcttttgaattgataaaactgtgttggtataatgag

SEQ ID NO: 46433 - DNA, 405 bp, Glycine max
  Clone ID: LIB3107-076-Q1-K1-B3
gagcccggtgaacatccagacgatgtggttgtcattaagtacgtgccttatgtaggggacagcaagagggccatggatgagtacacttctgagatattcatgggtggaaagaacacaattgtgttgcacaacacatgtgaggattcactgttagctgctcctattatcttggacttggtccttcttgctgagctcagcactcgaatcgagtttaaagctgaaaatgagggaaaattccactcattccacccagttgcgaccatccttagttacctgaccaaggcccctctggttccaccgggtacaccagtggtgaatgcgttgtcaaagcagcgagctatgctggaaaacatcctgagggcttgtgttggattagctcctgagaacaacatgatcctagagtac

SEQ ID NO: 46434 - DNA, 335 bp, Glycine max
  Clone ID: LIB3107-076-Q1-K1-B4
ggttgtagatagcgaaccccatactagaggtggcttccgtacaaacgttccagtcttctctgctttaacaatcaagggaataataattattagagatcttccgaaaccatggctcacgccaatactatgatttttgttgaaggaataataggtaaccttgtctccttctgtcgctttatagcaccaataccaacattctatcgagttcagcagaagaataccacggaaggtttccaatcacttacttacgtggatgcactcttcactataatgcgctggatatggaatgcttacatacaaactggcgaaatagttagtatgaccataacacattc

SEQ ID NO: 46435 - DNA, 382 bp, Glycine max
  Clone ID: LIB3107-076-Q1-K1-B7
taagcatcaagagtaaaagtataattgatttgagtgataagtttgatagaagtttagaaagaaaaaaaagtttaaaagtgacatttttttgttgttgaatgtttctaggcgtcattttcgcccgataaaaaaagttccggttaacgattgaaattagctaccaatatcaatcactattttcattccctcgctttttctgaaatgtgcaattttttttattattaatttgacattcaatatttataaaatgctaatgtaacaatatatagtgttgatagaaaagtgcaaatgtggagttagaattggtgctggaatttgagtcattatatatttcaaataatgcaatctagatcttcctctttttcaaatatccaacagttaa

SEQ ID NO: 46436 - DNA, 318 bp, Glycine max
  Clone ID: LIB3107-076-Q1-K1-B8
cgggctgtagctcacttaggtggaggccctaggttacacgagcgccaatgtttttttcataggagttatcatcttgtaatcaaaagagtatatcttatagtaagaaatcgatgtcttactacattttaaggaacaaatcacgagaacaatagcctgtccaagggttcagccataaaatcgaatccatcattgatttgagatatagataacgtgaatacttatttatcgacaatgctaggcataatgcgggtatagggacctaaaaaagattatctattcttcctattttatgaactctaaagtgtatgaagtgtcatt

SEQ ID NO: 46437 - DNA, 359 bp, Glycine max
  Clone ID: LIB3107-076-Q1-K1-C1
gggtgtttaaaattaacaccgatcctgttctctataggagacacagagcgagagagaatcttaccacatgcggctaccgggataagttgactctacgatttgagccatggcaacaacaacaccctcaaaccgatcatcagaggcgttagctctcatggcaatcctcagcactctgctttgcacggtggaggcggcgaatgagagcgtgtacgagatactccccaagtactgtctcccgagcggactgttaccggacaccgtcaccgactacacgctcgactaggacgggcaattcgtcgtctttttggcgaaaccctgctacatacaggtcgattacttattttactacgagaccaaga

SEQ ID NO: 46438 - DNA, 407 bp, Glycine max
  Clone ID: LIB3107-076-Q1-K1-C2
ggtattaggagagaagcatgtgaaggaggaggcaagaagcaagaaggaagtgttgtgggaggagagaggcagaggtgcaatcaccagagtggaagcgccaaacggtcctccccggctttccattttttctcttctgataaaattttagttcatcccagttgcgcataatcactcagattgagattgaatttaaagttaaattcggaaaaacgaacttgtgccactgtacatttacagatctgcggcttcgggctagcctgtgtagatctagtgtccgtaaagcggttaccatttcaccactcaccactacgaagatggaaagcgaaaagaaatcgtcggcaatatctgatgtgggagcatgggccatgaacgttgtcagctccgtcggaatattatggccaacaaac

SEQ ID NO: 46439 - DNA, 412 bp, Glycine max
  Clone ID: LIB3107-076-Q1-K1-C3
caatttgggttttattggatcatggagatgagatatctaaagataaatgcggtcttaattagtgattattaggagtcagaccacaggaaggcgaaattgaaggcagtgtcgtcaaattaagttggttggctcaccatttttctcacatgaatattgatgaggataacgttgagcaattacaaaggtttacccgtgcgtggatccttcgattcataggaggtgtcctctttattaacaaaagtagtagcagagtttccttaaggtacctacaatttttacgtgactttgaacagtgcagcacgtatgcgtggggacctgccgtgcttgcgtatttatatagaaagatgtatgttagccacgacgaaagtttcgcatatgactcatcccaatcgccatattcaattgcaatgac

SEQ ID NO: 46440 - DNA, 404 bp, Glycine max
  Clone ID: LIB3107-076-Q1-K1-C4
attttcttatgagctgggtaagaaggtttgcatttagatcttatgtttaaactctaaaaaatgttttttttttaggaagacaaccatatttttcatttttttctctataaatttttatatttttatttgtcattttaatatacataacatgtaacatgttttgatttatgaggtttaagataatgatacaaaagtttggttcaatgtgtagatgcaggagatttatagagcttatgtgtgtttgtgttcacttttttatttttaggacaaaactttggtgcagttttgtatatgcttttagtgttgttctttaattagaataggagtttcaccttggtaacaaacattaacattagatggaaacctttactacatggtttacgtgagtaaaactcaaattttga

SEQ ID NO: 46441 - DNA, 211 bp, Glycine max
  Clone ID: LIB3107-076-Q1-K1-C5
cactcagagtgtcatttttgtgaataccagtgtcaaggtggactggctcactgacaaaatactaagcaatgaccacacagtctctgccacccatggtgacatggaccaaaacacacgtgatattatcatgcgtgaattccggtccggctcttctcgagttctcattaccacgaaccttctggcccgaggtatcgatgtgttacaagtgtct

SEQ ID NO: 46442 - DNA, 197 bp, Glycine max
  Clone ID: LIB3107-076-Q1-K1-C6
agtttgttattagctgcgttagaaggattgcgcgtatagcttatgtgtaaactctacaaaatctattttttttagtgagacaaccacatttttcactctttttctctctaaaacttcataaaagtatttgtcattttaatatacataacatatgacaagttgtgatttatgaggttatagaaaatgattcaaaagat

SEQ ID NO: 46443 - DNA, 384 bp, Glycine max
  Clone ID: LIB3107-076-Q1-K1-C7
gattgaaaaggcgcccaagcaagtgtgttctggcgccgtcgtcgctgacaactcgcaaaccacaatgcctaagcagatccacgagattaaggatttccttctgacggcacggaggaaggatgcgaggtcggtgaaaatcaagaggagcagggatgtcgttaagtttaaggttcgatgctccaagtatttgtacacgctttgtgtctttgatcctgagaaagccgataaattgaagcaatctcttcctcccggtttgagtgttcaagacctgtataggcgctgagtgcggcagcgcgtgtttgtttatcattttgttgcctcatgctctatattatgaggcttgcttttatattttggtaaattgtatgaggatatgcttgtttt

SEQ ID NO: 46444 - DNA, 394 bp, Glycine max
  Clone ID: LIB3107-076-Q1-K1-C8
gagcattccaaagtgcacaggggagtaaaaggattgagtggttgtgatccaataaaccctaactcaatattggttgaagattgtgatgttctagtcccagcatctcttgggggtgtcatcaatagggaaaatgcaaatgaaatcaaggccaaatttattgtggaagcagctaatcacccaactgacccagaagctgatgagattttgaagaagaaaggggttgtgatcctcccagacatatttgcaaattcaggaagcgttacagttagctactttgagtgggttcagaacatccaaggtttcatgtgggatgaagagaaagtgaacaatgagctaaagacctacatgaccaaaagtttcataaatgtgaaagaaatgtgccaaacccatgaat

SEQ ID NO: 46445 - DNA, 398 bp, Glycine max
  Clone ID: LIB3107-076-Q1-K1-D1
gaagttttaagtgatcctgagaagaaagaactgtatgaccagtatggtgaagatgcccttaaagaagggatggggggaggaggctcgtttcataatccatttgatatatttgaatcattttttggaggagcaagctttggtggtggtggtagttcccgaggtagaagatagaagcatggtgaagatgtggtgcattctttaaaggtttccttggaggacgtttataatggcacaacaaagaaactatctctttctagaaacatattatgcccaaaatgtaaagggaaaggttcaaaaagtggaactgctggtaggtgttttggatgcaaaggcactggtatgaaaattacaagaaggcagattggactaggcatgattcaacaaatgcaacatgtctg

SEQ ID NO: 46446 - DNA, 349 bp, Glycine max
  Clone ID: LIB3107-076-Q1-K1-D11
gatggaaaccaacttgttgaggctgtcgaatttgaggataagatgaaggagttggagagcatttgtaatcccatcatatcaaagatgtaccatggtgctggtggtgatgtgggtggagccatggatgaggatggtcctgctgctggtagtggaagcggttctggacccaaaattgaggaagtctattaagcagaagattctcatgggtagtttttgtatttggtcatagaactttttgtaaatttatataacagcgtgtcattatgtttttattgcgattttatttttctcttttttttttaatgtacttttccccggttctacttgaacaatgatataagtttttgcc

SEQ ID NO: 46447 - DNA, 336 bp, Glycine max
  unsure (1)..(336): unsure at all n locations
  Clone ID: LIB3107-076-Q1-K1-D2
gaattgtagaatcggaacaaggaagaatattaattgatgattatgatgttgcacagtttgggcttgctgatttgcgtaaagatcttggcattataccacaatctcctgttctcttttcaggaactgtgagatttaatctcgatccattcaatgaacacaatgatgctgacctctgggaggctctggagagggcacatttgaaggatgtgataccgaggaattctttggggctggatgctgaggtatctgaggcaggcgagaacttcagagtcgggcaaaggcaacagttgagtctttcccggtctttattgcgtagatcgaaaanattagtacttg

SEQ ID NO: 46448 - DNA, 254 bp, Glycine max
  Clone ID: LIB3107-076-Q1-K1-D3
tgagaaaccagaaggggattggagtgtgaggatcactttttgagcgtgtttttgggattcgcttggttttgttcaaatagaagagacaactgatgagtataatgaagtaacctaggaatctaaaggtgtccactcacactggtgcttatctcatttaactgcttacaattactaagcgtctgaggacgtcaatcaatacggattctgacgaggtccgctataccattctgtgacggattttttatatgtcaacg

SEQ ID NO: 46449 - DNA, 392 bp, Glycine max
  Clone ID: LIB3107-076-Q1-K1-D4
catccatggccaaactaccaccaccatggccagggtaacaacaaaaaagcctcttcttcatcatttcttcagttcccatcatcaacccaacctgtgatgatgggaaaagatgcttcttgccctaaggtggtggtagagttgcagcagaatggtggtgatggcaaagtgttctctccctcttctgcaaatacagctgtgtcccagcctaacacctctcagaaaagaactgctcctgctccagtggtggggtggcccccaattcgttcattcaggaagaacctttcaagcagcagcagtgcttctaagccaccaccacctcctgagtctcaggctgagcagcagcacaacaaggttgctggtaaaaaacctgttgacaactatgctaataataa

SEQ ID NO: 46450 - DNA, 406 bp, Glycine max
  Clone ID: LIB3107-076-Q1-K1-D5
gaaatgaattagcgttgccattctcatcctcggctgtctctctctctccaccattgccatggatccttacaagctccggccatccagcgccttcaattctcccttctggactacaaattctggtgctcctgtttggaacaacaactcctctttaaccgttggagctagaggtccaattctgcttgaggattatcatcttgtggagaagcttgcaaactttgacagggaacgtatcccagaacgtgttgtccatgccaggggagctagtgcaaagggtttctttgaggtcacacatgacatttctcacctgacatgtgcagatttccttcgagcccctggagttcagacgcctgtaattgttcgtttctcaactgtcattcatgagcgtggtagccctgaaaccttg

SEQ ID NO: 46451 - DNA, 382 bp, Glycine max
  Clone ID: LIB3107-076-Q1-K1-D6
tctccagcagtgatacttgggtgggcgtctagacaattttccccaatggataagttctctcaagaatttggtccgagtgtttctaaaatggagccggttagaagaggatcctctggtacatcttcaagatttgccaaatctaagacatcttgagtttcttcaagtttatgttggtgagacattgcatttcaaggcaaaagggtttcctagtctgaaggtgttaggccttgatgatttagatggactgaaatcaatgactgtggatgagggagcaatgcctggtcttaaaaagctcatcatccagcgctgtgattcattgaagcagggaccattaagcattgaacacctaacaaaactaaaatcaatagagttttttgatatg

SEQ ID NO: 46452 - DNA, 201 bp, Glycine max
  Clone ID: LIB3107-076-Q1-K1-E1
cggtatgcactgaggccgttgttgtcaatggcggtacaagctcttccgccggcagcaatggcgacaccccgtaaataacagaccccctgtgtaatatgtttaaaaggaaccatgtttgtgaaattgtttctaaatcaagccctgtatagtaaatatgtcgagattaaagagtctttacttaagcccgttatacaatacaca

SEQ ID NO: 46453 - DNA, 404 bp, Glycine max
  Clone ID: LIB3107-076-Q1-K1-E2
ctttgacgtcgacggggaggaattcggtggttgaatcaaagattgatggtaaatggggtaaagggctggagtatgctgacaaggacagttctgcgaagcttgtggttgaggaaaagggaaatgaagaaaaccagcaccgttttaattatagggacatttctccaccagaattgttgcaggaagatggaaaaactttggctgcagaaacattaccagcatggggggtggatgaggaccaagaagctaagattgtggaagatgttgacggcaatcaattgagaagtgtggtactagggaggcatgagcttaattcaatatctgatgatttgaaaaggggttctcctgtggctagtgatggaagttctgattcatatacagattttggttcgacatctgattcttaa

SEQ ID NO: 46454 - DNA, 406 bp, Glycine max
  Clone ID: LIB3107-076-Q1-K1-E8
gaacgagaagaaggtgaagtcgaagaagtgaaggggttgagtgttttcttcttgtttggatctgagagagaagagcgagcgatgacggtctttcatttcttcaactgcgccattctcaccttcggcccccacgccgtctactattctgccacgcccttatctgagtatgatacactcggaacctctatcaaagccgctgttgtttatcttgcaacggcattagtgaagcttatttgtctagctacttttctcaaggtttcggagagtgatagctttgatccgtatcaggagtttttgaaggcattaataggctttatagatgttgctgggctttattttgccttgacccagttgactcacaggaacatctctcagaatcataaatttcaagctgttggacttggct

SEQ ID NO: 46455 - DNA, 359 bp, Glycine max
  Clone ID: LIB3107-076-Q1-K1-E9
ctatcccatattaccaaaacaagcactaattggatataaagaaatctcaatatttgaaactaaaatcagtgaaccggtttgttattctttccgccactctcccgacaacaatagcaaatttaacaagtacaaaatcgaaacagaaatctcactacttatgagggttaaagagtaagcaaacaaacactggtacgaacaatgatagtgtgttgaacacgagtttccaactgttacttcacgaaaacaaagcgggacagaatcggaaagagtaagtccaagttgggggaaagaaagaaacatagaggattctaggttttatttagcgaaaacaaatttgacaaaaacaaaaaaaaaacagt

SEQ ID NO: 46456 - DNA, 396 bp, Glycine max
  Clone ID: LIB3107-076-Q1-K1-F1
caagttaccattcaacagcccttttcttgatgatctgctcatgtgagcataggtccatacatgcagatggtccaaaagccaaaatttaacatgtccgacttcaatgagttagcatcccctctagtgattggaaaacactagtagaaaagagaaaaatacaaacaatttgtgggtcccaccatgttggtgggtcccacattgtttgtgtctcctactggtattttctagtatcaaagatgagttgttttcgggttcaattacctgaacactgtatagattttccctttttgtgataactgtgtatagatgtttcattgctctacaaatgcaggtagatttccatacaattatatacttggtaatatcttgcagtgtgtttggatgtggtatttaaac

SEQ ID NO: 46457 - DNA, 298 bp, Glycine max
  unsure (1)..(298): unsure at all n locations
  Clone ID: LIB3107-076-Q1-K1-F10
atggtttgtttttttggcaatgcaagagaagttcgactcaagtcattacgaattgatcatatctcttcctttcctttatcgtttcatttagaatatatggtcaccgngactctgtcactcctttctcttatgccggttcctgtccgtacaattgtttcatttgcatagacctcttgctctgtctctttcactctttcttactcctgctcggccaggcagaggttgtcttttttatantatatctgttatttttgtattttttctctgcggttccaaaacttacggtgacatgcggtgc

SEQ ID NO: 46458 - DNA, 414 bp, Glycine max
  Clone ID: LIB3107-076-Q1-K1-F2
ggaaaactgaaaagtaaaggcgaaagactttaggtttggaattgggaattagggttgttcgcgtcacgaagatgatcgaggtggtgttgaacgatcgattggggaagaaggtgcgcgtgaagtgcaacgacgatgacaccatcggcgacctgaagaagctggtggcggctcagacgggcacaagagccgacaagatccgcatccagaagtggtacaccatatacaaggatcacatcactctcaaggattacgagatccacgacggcatgggtctcgaactctactacaactaaacacaaggtgtgttttatgcatgatatattactatgatctgggaatgggatgaggcgccaaatgtaattttgacttgcgaaagtccctatgatttgaataatgtacatccccgaatgatat

SEQ ID NO: 46459 - DNA, 399 bp, Glycine max
  unsure (1)..(399): unsure at all n locations
  Clone ID: LIB3107-076-Q1-K1-F3
gatcttcataaatcctaacaagtacacgggacccagcatcagtatgtgttggtcaacacacacacagtttgagttagagttggatggacatggaatggtgcctataagaatcagagaaagagaaaggatccacaacattaggttgaagaggaaaaagttggaggacattccggaggaaaccgagcttcctattgatactaatccagcagagcttgaagaagcgagccttcacttggaaacagatttggaaatactgagccgagccatggatatgggactttgggcactctgcctcggtttcggctatatccttttcagagctcactttcgcccactttcttgacaaaaattcgttcaattattatgtacctcgcaaatagcaaatgttnttgcgaaaca

SEQ ID NO: 46460 - DNA, 277 bp, Glycine max
  Clone ID: LIB3107-076-Q1-K1-F4
cgatacgggggcgcgaagacgagactagggatcaccctcatgatcactatgctactatgcagatagatgatgcctgcgtaccaagggagaggggtgatgggcataaagatatggaggagtggcatcgtgtgaaacagttccatgaagaacacctacccaagcgtgaaagagaaaaaggacgaagttctgtaagacgtggacgacgggctgaacataaactttttgagaaagaataccgattcagagaagcaatgcggcacaatgaccaattgaagag

SEQ ID NO: 46461 - DNA, 389 bp, Glycine max
  Clone ID: LIB3107-076-Q1-K1-F5
atattcttggtgtttcagcatttgaattggaacccgaagctaattgctgctctgtcatgtgtgtgcaaatggtttgacgatctttcaaagcaagttctatggaaagaattttgtaaaacgagagctccgaagatgatgcttgatctgcaatctagtggaagccacagtgttgatgggaactggagggctctggggaagcttcttatattctgttcaggttgcaggcaaggcagtttgttcaataacgttcaggttcctggccattttgttaacaagactcgattttctagaacatcaggaaagagctttctcatgccacaatgcataaatgatgttttgtatgtgtctgatccttgtgagcatattggccaaagtgaagagggcgattt

SEQ ID NO: 46462 - DNA, 412 bp, Glycine max
  Clone ID: LIB3107-076-Q1-K1-F6
gagatgaagtattggatccacgaaagagggatgacctgcaaagagctagagataaccctgatgatcaatatgctactaggcagaaagatgatgcctgggtaccaagggagaggggtgataggcagagagatagggaggagtggcatcggatgaaacagtcccatgaagaacacctacccaagcgtgaaagagaagaaggacgaagttctgtaagaagtggacgaggggctgaacataaactttctgagaaagaataccaatccagagaagcaatgcggcaaaatgaccaattgaagagaagggatagaattcaggatgaaagtccacatcataaggggcgagatgatgcttctgcccgtggaaatcaatatactactgaggaaaggcgatctaggcaagaaaggtcaagtag

SEQ ID NO: 46463 - DNA, 383 bp, Glycine max
  Clone ID: LIB3107-076-Q1-K1-F8
gagattaagtattggatccacaaaagagggatgaggtgcaaagagctagagataaccctcatgatcaatatgctactaggcagaaagatgatgcctgggtaccaagggagaggggtgataggcagaaagatatggaggagtggcatctgatgaaacagtcccatgaagaacacctacccaagcgtgaaagagaagaaggacgaagttctgtaataagtggacgaggggctgaacataaactttctgagaaagaataccaatccagagaagcactgcggcaaaatgaccaattgaagacaatggatagaattcatgatgaaagtccacatcataaggggcgagatgatgcttctgcccctggaaatcaatatactactgaggaa

SEQ ID NO: 46464 - DNA, 225 bp, Glycine max
  Clone ID: LIB3107-076-Q1-K1-F9
aaggaactttgaacttgaactcttggcaaaataattctgtttcctacttcactgcaaaataatgaactatcccttggctgtgtaatttgtgctctgtttgtacagattaaaaatattatttttccttgtatattgtaaaacattgatgtgtgggtttatactattgttctagctgattttcatataacttgtatatttaaaaaacattaatctgtcaggtttata

SEQ ID NO: 46465 - DNA, 409 bp, Glycine max
  Clone ID: LIB3107-076-Q1-K1-G1
ggcagccgagaaaagaaaatcctcacccattttcttcgtagccaaacactctgaaattctcagttatgtcgtggcaagcgtatgtggatgatcacctactgtgtgaaatcgaaggtaaccacctcactcacgccgctatcatcggccaagacggaagcgtttgggctcagagcaccaacttccctcagttcaaacctgaggaaataactgccatcaataatgactttaatgagcctggatcacttgctccaactggattgtatatcggtggcaccaaatacatggtcatccagggtgagcctggtgctgtcattcgagggaagaagggtcctggtggtgttactgtgaagaagaccggtgcggccttgatcattggcatttatgatgaaccaatgactccaggtcaatg

SEQ ID NO: 46466 - DNA, 376 bp, Glycine max
  Clone ID: LIB3107-076-Q1-K1-G2
tacggttgtgataagactacatagcggggttctagtgtgtgattgaatgttgagggaactcgacacacttactttggtggactgggactggcgacgtttatactctaacaacaaaatgtcttgcttcgatggtaacatgtggaagatgaagctcctgcaaatgcagaaacaactgttgaggcttattgatgtacaaacacttgagctacactggctcaaccacacatcgagacctcaggaatgcaagactgacctgttaatacatcaatttgaagattctaaaatggattaacgatcttataactaaggctcgaaatgttgaccaaacagatgctgcaacatgtgcacttgatatatgaggtgttgggatgagcat

SEQ ID NO: 46467 - DNA, 404 bp, Glycine max
  Clone ID: LIB3107-076-Q1-K1-G3
gtacgatatgattataattaatctttgaagctctatttttgtatttctctacttgtattattctattgtttactctctgttatgcaatgaatgactgacaaatgtctgaaaattccatagatgagatattgtgattcatgatattgtctagtagtaggaacgaggaaggtgaagtaaatacctatcctgatttgtattgcttctgaagacaaagaaggaagcaatagatgtttaggagattgagggcattttgtttcaaagattggcactttatgccttctgcttatcaggaggggtgttaaccatttgggatgctagagtaactacacagttgattttctcttcacgaatctatcactctgtatgttttgctggatagaagtcatagacattggtagctaatg

SEQ ID NO: 46468 - DNA, 356 bp, Glycine max
  Clone ID: LIB3107-076-Q1-K1-G4
gtcgagaaaatttattgaacccaaaaggagagaactttgtttggtttgtgtttcattttgttgtggttttctgtaagattaaatggctgaggttctgaccaaggcgagattggtttcctcttcttcttcctcatggcatggggttggtcaacggcatcatcgaagggtttcaacggtttccaacacttgtaacttcagttcttgctgtgcaaagctctcttctatgattattacccctcaggttctcagatcttggtcctcttcttctgagtttcacggtataaagcttggctttcatgtaaatagatgattacccaatagggtcaattcgcgcttgagagcttcaactggggctc

SEQ ID NO: 46469 - DNA, 394 bp, Glycine max
  Clone ID: LIB3107-076-Q1-K1-G6
ggattcgcacctcaccacaacctcgctttctgggctccgtccgtgcggcctgggaagcaatggcatggagaggaaatcttttgaaaaacataaaagaacttcggtttttgatgtgccagtcatcacctgcaagctcacccacaagggcttttgtggaaaggaattataaggaactaaagacattgaacccaaaattgcccatattaatccgtgagtgcagtggagttgaaccccaattatgggcaagatatgatttgggtgttgagaaaggcatcaaattggaaggcttgtcagaggcgcagatctttaatgcacttgaagatttggtaaaagcaggacagtctatgaaagcttgatattgctgcttatgcactgtctgaagtggaataaatgc

SEQ ID NO: 46470 - DNA, 373 bp, Glycine max
  Clone ID: LIB3107-076-Q1-K1-G8
ggacttcaacatctaattacatgcatggatgaacattgtaatgaaagaaatggcaaaaagggtgatattgcctgatattgaaattattcttgaacttgtgctagaaaaaatatattaaaaaaaaactgaatgattcatcttggatttctataatgtatgatatcaaaacctgctctgcaattgcggcacagaaagattcataccccgtctcgtctccttttttttttttttggtttttcttaaaaaaagttcaggtgacttgaactcttgagattcacttcatagcgtccacgttaatcttgtatctaccggcattggtggttgccaacggttagctaggtccagtagcttcacttcacaactaataatggtt

SEQ ID NO: 46471 - DNA, 405 bp, Glycine max
  Clone ID: LIB3107-076-Q1-K1-H1
ggagaatggatggagggaaacgaggcacgattctggtcgggaacgacgacggtgtcgatgctcctggcttaagagcattggttcactccctcgtcaacgccaaccttttcaacgttctagtgtgcgctcctgatagcgagaaatcagctgttagccacagcatcacttggctccatccagtagctgttaagcaagtacagatcgagggaaccaccgcatttgctgtttctgggactcccgctgattgtgcttctctagggatttccaaagctctctttcccacagtacctgatctggtggtcagtggcataaacaagggtagcaactgcggttatcacattgtttactcaggcactgtagctggagctcgagaggccttcttcaatgatatactttctatctcca

SEQ ID NO: 46472 - DNA, 379 bp, Glycine max
  unsure (1)..(379): unsure at all n locations
  Clone ID: LIB3107-076-Q1-K1-H12
catattacaaagaggtgacttgcacattaccatcccccacaaggaaacttgcaaacaagtttttctcaatagtttccccctcaccatctcacgcaatccttctaataacatatgtaaacaagataagtgttaatgggtcaccttgtatgtaaattttttgagcgaaagattcataaatatttcagcaacatcaaatggtacttgattgtaaacatttccttaattcaatagaatcactttttattaaaacccaacctcttcatatagaacaaganattccaattaatcaaataataggtttttcataatctaactttaaagatagactttttcttttttcctttttctttatcaatggtattattcacccgccacacac

SEQ ID NO: 46473 - DNA, 356 bp, Glycine max
  Clone ID: LIB3107-076-Q1-K1-H2
agaaaaaagactacaggttgtgaccttcagatattttcaactgcccggttccttttgttaggaaaatataggcaaaaagaaaacgagtattaatataatgaacgggtaggaactccactttctcactcaaccgagtccattcacagttcctttggcaatggcaactcacagactcgctttgatcatccaaaacccttcgaacgacgacgagcttttgctcgtgaagcagtcgcgttcacccaaattccacgatgaagaatacgactctttcttcgattctgatctttgaaacttgccctcggtgcatttgaacccgttgcttgcaaaatcagagccaccggttgagtttgaacttg

SEQ ID NO: 46474 - DNA, 59 bp, Glycine max
  Clone ID: LIB3107-076-Q1-K1-H3
ttcggttgttaaaattactacacatgggcacgggtgccagaacacgacagaatggttct

SEQ ID NO: 46475 - DNA, 289 bp, Glycine max
  Clone ID: LIB3107-076-Q1-K1-H7
aaaacgacagaactggagagcatccttcacaacaggagcaagctgatcccaacctattctcttatcatgtttcacacttgaacactagcgaggaccattagatacattatgctctggggcggagtgtccaccgattataccgcgcgggagtttgtcaaacaaagcgcttagccaggggagtgggttataaatacgaaagaagaggtcacgccctatgaactcacttgtcttagcaaggcctaccatttttcagagtcccctgctagacttcctatgattcaacactttg

SEQ ID NO: 46476 - DNA, 423 bp, Glycine max
  Clone ID: LIB3107-076-Q1-K1-H8
ggaggaacaatacctaaacctacagatgctccagaatcttttagattgctagttcgagaattacgatctttagctatggaactgaatcatttccttgtatccgagaagaacttccggattcataggaaggaagcttaattggactgaatcagaatttttattctatgattgatcagtataaacatcaacaactccgaattggatcagtttctcctcaacaaataagtgcttgggcaaaaaaaatcctacctaatggagagatagtgggggaggtaacaaaaccctatacttttcattacaaaaccaattaacccgaaaaagatggattattttgtgaaagaatttttgggcctataaaaagtgggatttgtgcttgtggaaattatcgagtaatcagagataaaaaggacgacccaaaatttt

SEQ ID NO: 46477 - DNA, 72 bp, Glycine max
  Clone ID: LIB3107-077-Q1-K1-A10
ctcttagaaaagcttcaccgatctgacagcagctctagctcttcaagtgaggaggaaggagaagatggaggg

SEQ ID NO: 46478 - DNA, 408 bp, Glycine max
  Clone ID: LIB3107-077-Q1-K1-A11
tatgggacgttgtactctactcagaagtaacaaatcatttaacccataacttcatgtgattcatgtcatatgggagtcaaaattaatgggcaatttgtagcagactatgatgcatgcatgtagcccatggattatggatagcaatgagcagctagtattttccaaaacaggggaaagaaaaatatgcagctacacagtgtcctttttatcacttttgaacttggactctcatttctttcaagtgatatagatgttgcattgttcagctcaaacgataaaaattattctaacataattttaaaaagctaacctaggtttctatcccttttccaaaagttaattcgaatggttggctttgaccaataagtatttcttatttttttaaaaaggccaaaaataaactttaag

SEQ ID NO: 46479 - DNA, 383 bp, Glycine max
  unsure (1)..(383): unsure at all n locations
  Clone ID: LIB3107-077-Q1-K1-A12
tgtgacacacgtatgaataaaaatcaagctcttttctttctagtttctttctagtaactaacgctagctatgcaagatacatcaaaacccagttgatcatgttgtgtatagctctatagcctcagttggaaaagacacatagaagaagatactgcatatgattggagaggacaattcaacatgcgggtcgacacagagaaaacaggtggaacacaaaatccacatggactgtctatatccatagaggcaaagcttaaggggaaaaaatttctttaagttgcttggggatggaattctctctcttcattncattntatgtgcattgggtaatcttgtgcttgtaattaaaccacatgtaacttttatgtattcacttttatgga

SEQ ID NO: 46480 - DNA, 384 bp, Glycine max
  unsure (1)..(384): unsure at all n locations
  Clone ID: LIB3107-077-Q1-K1-A2
ggtgttcattgtgtatcgcaatgccattgctgcattggcccttgctccctttgccttgatctttgaaaggaaagttagaccaaagatgacatggactgtcttcatacagatattagtacttggatttcttgagccagtggttgaccaaggattcactttcttggggatgcaatacacttcagcttcctttgcatccgctgttatgaataccgtgccctctgtaacctttgtgcttgcagtaattttcaggttagagcatataaaaataagggaattacgcagtcaagcgaaagtaattggaaccttagtaacctttgctggggctttgttaatgacactatacanaggcccctcaatcgacctatgtcatcattcaaacacaac

SEQ ID NO: 46481 - DNA, 398 bp, Glycine max
  Clone ID: LIB3107-077-Q1-K1-A3
gataccatctttcgtggaattagtgtgataacttggttagacctaatctgttaattgtcattaaatgtcatccctggaatcggattttgttgttggttgtaacatagtaatcagattgaagaggacgattaagttaatcagagcaggggagaccactctaagttcccatttgcttcagtatgctaaataaaacatcagtttgctgttgttgtacaggccctgtcattggttttcagaaaacaatatgccatgacgttctctgagcgtaactgattgcaatttgcagaagaccattgaagcacgtgaccacaattttttagttgctcaattacgtatcaaattctgattacactgtcattatattgttaaatgcgcaagcagtatacacttggttcaat

SEQ ID NO: 46482 - DNA, 314 bp, Glycine max
  Clone ID: LIB3107-077-Q1-K1-A4
ggttggatttgctcctttgacatctcgtggctctcagcaatacagggccttgagtgttccagagctgacacagcaaatgtgggattcaaagaacatgatgtgtgctgctgaccctcgacatggccgctacctcactgcctcagccatgtttagaggcaagatgagcaccaaggaagtcgacgaacagatgatcaatgtgcagaacaagaactcctcctactttgttgagtggattcctcacaacgtgaaatccacagtctgtgacattcccccaactggcttgaagatggcttcaacattcattggtaactcta

SEQ ID NO: 46483 - DNA, 350 bp, Glycine max
  Clone ID: LIB3107-077-Q1-K1-A7
ggctttcgacaattccaaagtcttagcaacctgcggccgctacaactaaaaaagccctttgctttcttttccactcctcacattggctcttttatcactatcagatttagggtcccttctgccatactgcacacgttgaagatggcagcaacatcattttctggcatgcaatttgcaatgtcaagatcatgcattcctgcatcacaaaagattgcagatgctggtgccgtggttcttggcggcaagtccaagattggatcgtggaataaacttgcaagtgcatgtcatattgcatcagtgcaacctttcaggcggggcttcacttcatcgtccataaaatctgttaaaag

SEQ ID NO: 46484 - DNA, 381 bp, Glycine max
  Clone ID: LIB3107-077-Q1-K1-A9
ggttctagtgtgtgattgtttgttgttgtaactcgttcttcttcttttgttgttctgtgtttgtgtttgttttttctctcacctgaaaatgtcttgctgcggtggtaactgtggttgcggaagctcctgcaagtgcggcaacggctgcggaggctgcaagatgtacccagacttgagctacactgagtcaaccaccaccgagaccttggtcatgggagtggcacctgttaaggctcaatttgagggtgctgaaatgggtgtgcccgctgagaacgatggctgcaaatgtggaccaaactgctcctgcaacccctgcacttgcaagtgaggtgttgggagagcaagcttcaagcagagatagcccttaattaggaataatga

SEQ ID NO: 46485 - DNA, 272 bp, Glycine max
  Clone ID: LIB3107-077-Q1-K1-B11
aagatcgaagagatgaagaggttcttgttgaagcgggaaaaatagcggaaaaacgcctacctcccaaggttgctgaacagtctcagttggttgcttctaatgctggtgcagaagctacagagagggctgtccctggtgaaaccatatctccatcaaatgtgcaaattccaatggctgttccagataatgcatctactctagcttctcttcgtatgcttcgtgtatatttgagaacatatgcccttgaacaaatggtgcaagcttggaacgca

SEQ ID NO: 46486 - DNA, 265 bp, Glycine max
  Clone ID: LIB3107-077-Q1-K1-B2
agcgagacctcaggtcaggcggggcggccatcttagattaagcatatcaataccctgcaataatatatcacaccaaaaaaaaaaactatgcggcccctttatatgaaccaagcttacgtactcgcgcattcgacttaataacacttctatagtgtaacctaaatgaaatgcaatggccgataattaacaacatcgcgactgggaaaacactgacgaaacccaactaaatcgctttgaataacattcccttttaaccagctgttgt

SEQ ID NO: 46487 - DNA, 376 bp, Glycine max
  Clone ID: LIB3107-077-Q1-K1-B3
gaacctaaaaaatattcactaagatttatttcccttattttattcatttattctttgttcctagtctttatcttataatttctcattgcttgcccggtaattcaagatcaacttggaaaatttgcaagatttgggatgaaatctggtcggatcttgctttgtgggatggggattttggtgggtcttatttcaatacaaagctcttcctctctcaatcccatctccctctcttcttcttcttcttcttcttcataacacaaacacaaaacataaacctttcttccaaccaaccttttttccaattcattctttggttcttcaaaaatcttcaatccattttcaccttttcacaaatggggatggctgcaaaagtcac

SEQ ID NO: 46488 - DNA, 289 bp, Glycine max
  Clone ID: LIB3107-077-Q1-K1-B4
gatcacttcatagtaagcactatagaaaaaacgacattcattcatctatggctacccttattgctcccagcaaccactctccccaagaagacgctgaggctctcagaaaggcttttgaaggatgggggactgatgagaaaactgtcatagtaatattgggtcatagaactgtttatcagaggcagcaaatcagaagagtctatgaggaaattttccaggaggatcttgtgaaacgcctagagtctgagatcaaaggagactgtgagaaagccgtgtaccgatggatact

SEQ ID NO: 46489 - DNA, 397 bp, Glycine max
  unsure (1)..(397): unsure at all n locations
  Clone ID: LIB3107-077-Q1-K1-B7
gacttcacttttagttctctctctccctggtcctttgagcttcaagaagttgttcctgtttgttgtagcagttcctgtccttaatttcttcaaccttctcaacacataaccaccttggtctgtgtttgtttgtgtgtgcttattacttggtctcttcatattgtacatataaaaattatggatgatgaatatgccaagcttattagaaggatgaacccaccaagggttgtgattgacaacaatgcctgtgaaaacgccactgttattcaggttgacagtgtcaacaaacatgggattctcctcgatgttgtccaagttatatcagatatgaaccttgtaataacaaaagcctacatctnctctgatggngtgtggntcatggatgtgtttaatgtga

SEQ ID NO: 46490 - DNA, 146 bp, Glycine max
  Clone ID: LIB3107-077-Q1-K1-B8
gtagttgcaggggttcgtcgtttacccttccctaaagtatctggtgtgctttgttcggtaataacgaaaaacgatgggagctgaaactgaattatcacaagaaaagccagcacaagataggccaggctgtctttaagaacagtctt

SEQ ID NO: 46491 - DNA, 436 bp, Glycine max
  Clone ID: LIB3107-077-Q1-K1-B9
gacgacagaaggggatgaaagatcaatttgcaaattacgttgtacaaaaggtgctggaaacttgtgatgatcaacagcgcgagctgattctttcccgaattaaggttcatttgaatgcattgaaaaagtacacctatggaaagcacattgtctctcgtgtagaaaaacttgttgcagctggaggtacatgttccgtgtcattcctaaatttgtagtctgacacatttttatttttcaccatccatgtgtgcattaagagcaatttcattgatagcatgctcctacatgataaatgcattacacgagatacatgcatggaaaccaagccattctgctgcttctaattgtgttatgatatgcacatttaatttcaagcttatggttatcatatgtgaagtatttatgatatataagtttatgaaccggtcatgtattt

SEQ ID NO: 46492 - DNA, 233 bp, Glycine max
  Clone ID: LIB3107-077-Q1-K1-C11
gacgttattttgggacaaggccaagaaccaggacaagggtgtaattttttctgaccagcaacgtctaattttcgccggaaagcaacttgaggacggccgtacccttgctgactacaacattcaaaaggagagtactcttcacctcgttcttcgtctccgtggtggcatgcatatcttcgttaagacactcaccggcaagaccattaccctatatgttgaaagctcctacacca

SEQ ID NO: 46493 - DNA, 324 bp, Glycine max
  Clone ID: LIB3107-077-Q1-K1-C2
gacatgttaaatttccattatagcttttccttcataaggtctgcttaggattagaattgtagttgctaccatacactgtgtaatagttttgcttggtgaagttcataaggggaccgtgcgtttaatggcgttacctgataattgcagggagcgtgtaacatgaatgcgttacgtaataattgaaggggcgtctaacatggatcggtccaaaatggtaacatcacatgggtctgagaatcagttttgttttataggttataattatatgatatttgtgtgaaatatcttttagctttttttatctctttttaattatatttgttt

SEQ ID NO: 46494 - DNA, 374 bp, Glycine max
  Clone ID: LIB3107-077-Q1-K1-C3
gtccatcatctgaccgtagcccacagaaaagaggtgacacatctcccgacaatgataggttgagtagaagccctgcaagggaccctgaagataggggctatgacagccctaaagttaatggtcgtagtggcagccctagctgtagccccagggatgatgacaggagccccattgacgatgacaacaaccaccgccactcgccaagaggcagcgagtcaccttaagtatttctcagagaaagaactctgtatgtggcctataatttatatctgctttggttatctgatgcactttgctgtgaagatcggggcaatttttagcttaaaagagaaactttatgaattgtttatgggtatgaagaaacggttttatgt

SEQ ID NO: 46495 - DNA, 172 bp, Glycine max
  Clone ID: LIB3107-077-Q1-K1-D3
gggtttggaaagaaaatagaaatatttatgcggtggggaccaatatctagtgccctgcaagacaaagaaagaagggagagaagaagttgttgggttgagttggattggatttctaatctaatctattcctttcttttttcctatgcttttaaagcacaaacccttttttctt

SEQ ID NO: 46496 - DNA, 356 bp, Glycine max
  Clone ID: LIB3107-077-Q1-K1-D4
gaagaaaggaagaaacataccgaatgagagcatcaaactcttcttcttcgatttccattgcgaagcgttacttcttcttcttctttctcttcattttcttcgctcttcgatcttcgtccggggactgctccgaataccaccaccaccactcgccgatggccacgatcggaggcttacacgactcccaaggctctcaaaacagcgtcgaaaccgaagccctcgctcgattcgccgtagacgaacacaacaagaagcagaattcgcttctggagtttgctagggtggttagggcacaggaacaggttgttgctggtaccctgcatcaccttactcttgaggctattgaggctggtgag

SEQ ID NO: 46497 - DNA, 386 bp, Glycine max
  Clone ID: LIB3107-077-Q1-K1-D7
caagattaaccctaatgccccacttgacaaagttgctattgtcagctgtggattctgcacaggttttggggctactgtgaatgttgcaaaaccaaagcctaataatactgttgctgtctttggcttacgagctgttggtcttgctgcctgtgaaggggcaagggtttctggtgcatctagaatcatcggggttgatttacttcccaatcgatttgaacaagccaaaaaatttggggtcactgattgtgtaaacccgaaagatcacaacaaaccagtccaagaggtcattgctgaaatgactaatggaagagtagatcgtgctattgaatgcacttgaagcatccaagctttaatctcagcatttgaatgcactcatgatggttggg

SEQ ID NO: 46498 - DNA, 330 bp, Glycine max
  Clone ID: LIB3107-077-Q1-K1-D8
ttgaggaaagaaacaagagaattaggtttgaggaggagactagggataagattgatgaaaaggagagggaaattaagggttacagacagaaggttgagggattggagaaggttgctgctgagaaaaaaacagaattagatgagttggttaaacagaaattgaggttggaggaatcacttagagaatctgaggagaaagtgactggtttggagtccagtattcttcaattgcgtgaggaagcaaaggaagccgagagggtgatcatatcgctgaatgaaaaggcggtggagacggttgagacaatcgacagaggtttgaatggtgtacatg

SEQ ID NO: 46499 - DNA, 91 bp, Glycine max
  Clone ID: LIB3107-077-Q1-K1-D9
ggttgctgctgcttagttgaaacttgtatggtgattagctattaagaggaaagaagaacgaaaaaaacagtttaaccgctacagccttctc

SEQ ID NO: 46500 - DNA, 358 bp, Glycine max
  Clone ID: LIB3107-077-Q1-K1-E11
gataactctctgtagcgaaaagtcagcgccttcttttgtctctctctctcaaaaaaaaaattccacacactgcagagtttgtctctctatggcggaagattgggatctacatgcggtggttagaggctgctccaccgttacatcatcctcagtgtcttcttcttcatctccttcttcctctggttttgcctcttcttacttccaccctgaagctgcagtttcttcttcttcttcttcctattctggcttcaacatcttcaagggtgaacaaggaataagccaagttttgtcgctctctgcgtacccctttgaagcaaggagctccattgaggaattgcatgagctttgcaaacctttt

SEQ ID NO: 46501 - DNA, 356 bp, Glycine max
  Clone ID: LIB3107-077-Q1-K1-E3
gaacaaagcgaagaagaagaagaagaaacaccctgtacccttcttacatcttctaatttatttttctgaggacttttttatttttatttcttcgtttccaccattttctgttacgccaaactgcgtctgcgacgcgaattgtgattagtgaacggtgaatgttgaggatctgctactttttgaacattgaataaggtctatcagacaaggatttgacagaatttgtcagaatcaaattgttaattctcttctgaagatttcattcgttcgtttgcgatatttgaaggtgctcgttaatttctagttttagagatacatttttctctcgaaaatcgacgaatttcggaactctggac

SEQ ID NO: 46502 - DNA, 357 bp, Glycine max
  Clone ID: LIB3107-077-Q1-K1-E4
ggcattgtaggtgctgttacataatacatgttggatgttggttgccagttggataatcgttgatgcttattatgcagtagaggtcattggacaatattgtaatccttgttgctatctattgttatgatttatgaagcaccgtttggtatcttcatttgagaattttgatatgctagggggattattctttgatgttctgacatgaatgggtgctaaaaatggataaagattgcttgtacctccacattctctctgattttacagaataggaaaacattctacattttctgagctatccattgtttgttgatagcccttatgttattgggaattatattcaaagattcagcttcggaa

SEQ ID NO: 46503 - DNA, 386 bp, Glycine max
  Clone ID: LIB3107-077-Q1-K1-E5
gagagtgtgtcagagaaagtgccgctattacctactggggtgacaagtagtgttcatgagttggctttgatgatgaataataatgataataataagaataagtcaattgggatagtgaacaggaatccaaagtggtcggataagttcaatgagatgaccaacttcgatgatgttaatgtggcagcacaatcatcactgcctccaaggccaagggtggcaaggttgattccatcagcacctgctgcagcttctttcaatttcaatgcttatgagtactattggaggaccaagtctgcatcaccaaaaggtacaagtagtgttaaccttaaccaacttgaccaagagaaactgaagagcaggttgttgtgtctggggcatgaatacaa

SEQ ID NO: 46504 - DNA, 353 bp, Glycine max
  Clone ID: LIB3107-077-Q1-K1-E6
cattctttgatcatacacttagttgcttccaatggggagggttctgctagagaagctctgggatgatgttgtggctggccctcaacctgagcgtggccttggcaagctcagaaaactcaccaccctcaaaactattgatgaaggagaaagtagcaagctgcagaagacgttgtcgatgccgtcgacaccaacaaccccgatgactccgacgactccaacgacaccgggatcggcccgtaaagctgacaacgtttggaggagcgtcttccatcctgggagcaactccgccacaaagaccatcggtgctcatatgtttgacaaaccacttaccaacactcccactgtctatgact

SEQ ID NO: 46505 - DNA, 394 bp, Glycine max
  Clone ID: LIB3107-077-Q1-K1-E7
gacttatctaaaagtagatggtccagattagtaccacaaaaatggagaaatagaataactgaatatcgtatagctcaaaataaagatttaaccaaatgcaattcatatgaaaaaagccaattaattctttacaaagaacaacaagtaaacgcattaaaaaaaaaaaattagaaaacaatatagatacgatcttttatcctataattttatcaattatgcagataagaaagactcatatatttatggatatagatccctatttcaagtaaaaaaaaaccaagtgatttcttctaattacaacacgtataaaaaagaattattggatatcatagataatctctttatcaagaattatatatcggaagatgcgattctagatatggaaaaaaatatg

SEQ ID NO: 46506 - DNA, 380 bp, Glycine max
  Clone ID: LIB3107-077-Q1-K1-E9
aatattttcttatatgaaacacaactggctcaaagaaatgggaaaagcaatgatactcagaatcacatacaggaacaaaacaccatgttcatttgcaggaactttattcacgagcaagggagcaagaagaggagatcctctccctccgtgaacagattggcattgcctgtatgaaggaactgcagctgttgaatgagaaatgcaaactagagatgcaattctctgaactaagaatggcagttgatgagaagcaaaatgaagccatctcatacgcttctaatgattttgctcaaagaaaaagttatcttgaagaaaatttaaaacttgctcatgatttgaaagctgtagatgatgagagatacatcttcatgtcatctatg

SEQ ID NO: 46507 - DNA, 382 bp, Glycine max
  Clone ID: LIB3107-077-Q1-K1-F1
ggttctagtgtgtgattgtttgttgttgtaactcgttgttcttcttttgttgttctgtgtttgtgtttgttttttctctcacctgaaaatgtcttgctgcggtggtaactgtggttgcggaagctcctgcaagtgcggcaacggctgcggaggctgcaagatgtacccagacttgagctacactgagtcaaccaccaccgagaccttggtcatgggagtggcacctgttaaggctcaatttgagggtgctgaaatgggtgtgcccgctgagaacgatggctgcaaatgtggaccaaactgctcctgcaacccctgcacttgcaagtgaagtgttgggagagcaagcttcaagcagagatagcccttaattaggaataatgat

SEQ ID NO: 46508 - DNA, 324 bp, Glycine max
  Clone ID: LIB3107-077-Q1-K1-F10
gactctcttagcgctcaagcgggggattcccaataacaataatatgcgcatgttcaattaagctccttctactatacccatggctgctactaagctcataattgcttccctacttgcgtcgattctacttcttgatttcgtagatgctgatcaatgggaacatgcacaaacgcacgggtctattcttcatcagatagattgtaacggagcatgtgctgtgaggtgccgataatcatctcgtgcacgcctttgccaaagagcttgtagaacttgtggtagacgctagaactgcgtgccacctggaactgttggaaaccaagaagt

SEQ ID NO: 46509 - DNA, 406 bp, Glycine max
  Clone ID: LIB3107-077-Q1-K1-F11
gagggtgggcttcaagcagagagcacagaccgaaacgccccatcaaaccgttagtttcacagccggtaacacacgaaacgaaaggaaccaaccacccacaggccaaagcacaaaccctacacttctcctaagtcctaacccccgagagagagagaaatggatactgacgcagtgggaagcgaagggtactctccgctgaaggaattaagactggaaattgaagtaaaggaaggaactttctctctctgcttttggctatatttgacgagtttcactacatttcctgttaccattatccaacacggttttttctgttttctccgaaagtgcttctttttcttgttacttgatgataaataagagaaatccatatgttaccaatttttttctttatcatgaaaaagct

SEQ ID NO: 46510 - DNA, 359 bp, Glycine max
  Clone ID: LIB3107-077-Q1-K1-F12
gctcgtctcgtggaagtgtaagcaagcaaaaccctggcggcgcctgctttctttgttcgtgttttgcatcaggtgcgaactcaccctattgatttctatccacagctgatccttcttctctaattaatttattattatttttcatgtattgttctcgcttcactgcttcttatttggctccgtcatttgaaattgttttcttttaattcgagtttcaaattttcaatatctgttactgtgtttatgatttcaatttcatggtggaattattattgctttctacgtgacgttgaatttgtactgtatgtgttgatcttttgttctaaattgtgtcgcatagtgtttgtggcttgtttggt

SEQ ID NO: 46511 - DNA, 424 bp, Glycine max
  unsure (1)..(424): unsure at all n locations
  Clone ID: LIB3107-077-Q1-K1-F4
atgaatacttaacaataatacttacatccattgatccacacaagtgagggccataactatgttttttggattgtctgcttcccaatattatatatatccatccctgcatataaatgcaacttttctatattgtgatatgaaggaccacacaccatgttccgcaacagtgatctcacgccaagagctttagttggacgaaaaatctttctagctctttgcccctataagtacaatagatctaccatgcatatatggcaattaactaccttgggtgatattttaatatcagaataagtacaaaggcatccaggccataatcacactttcactttattaattttataacaacttgcatattgctaagaaaatggtacatttttttttcttgtaccacttattaancttttaattatttttttttaaa

SEQ ID NO: 46512 - DNA, 274 bp, Glycine max
  Clone ID: LIB3107-077-Q1-K1-F7
ggtggctcatagcgcacccaaaactagagctaccttccgttctaaccttacactcttctctcctttaccaatcaatgcaataatatttcttagagatattccgaaaccatggctcacgccaatactatgattttttgtgatggaattctacgtaaccttgtctccttctgttgctttctagcaccagtaccaacattctatctagtttgtaagaagaaaaccactgaaggtttccaatcactttcttacgtggctgcactctgcacttcaatgc

SEQ ID NO: 46513 - DNA, 258 bp, Glycine max
  Clone ID: LIB3107-077-Q1-K1-F8
agaatatgaaaaagaaaaaaaaagattctaaagaaatataactaatattctttagaataatcaaaaagaatattaaattcaaataaattttagatagaaaaaagacttaaaaaggaggatttgaaatgcgagatctaaaaacatatctttccgtggcaccagtagtaagtactctatggttcggggctttggcgggtctcttgatagagatcaatcgtttttttcagatgcattgatatccccttttttttcatctag

SEQ ID NO: 46514 - DNA, 352 bp, Glycine max
  Clone ID: LIB3107-077-Q1-K1-G1
agacctcatggaccatcagacattggatgaacatgctgtgaggttgcaagcagaggcagtccatctggcaaagcttcaataccttcattatctaatccgatcctcaaactccttgagcaccaacaagtcctatgaccaaagtgccaccaccaacatggaacctgcagctttcagtttgttgaactcaatctccaatgtgaaagagaatccagtcatgttgcaaccagctgatgatactcctgctgcctcattgtctgatggcattgatagctctcaaccactccaccacccgaacgtgctacctcatcaccttttagagccacaagtctcttttagctatcaatcatgtttg

SEQ ID NO: 46515 - DNA, 423 bp, Glycine max
  Clone ID: LIB3107-077-Q1-K1-G2
ggctcggcttctcagctgtcactatactctacgagtctcttgctcacgcctcacaatgaaaccctaaatccttttgtgtcagtttccttcctaatcgctgctcagccatcaccgtcgcgactcgcgaggagacacgttccatcttctggcaccccctcttccgattccggcgttccctcttctagttctggagtttactcgacgtccttcatcaaagtttccggggtctgttcgaggtgcgtttctgtttatgcgttcagactccatagcttacttttctgctttcatggtttttttagtttcacgaaagaacatagcagatttatttttgcttttatttcatgctctggtgtttcttctcttattaatttttaatttatgatttactgctttccttttaattggtgcccgtgacatactctg

SEQ ID NO: 46516 - DNA, 385 bp, Glycine max
  Clone ID: LIB3107-077-Q1-K1-G3
ggctcacatacatcacaactatgtccttgggaatgcttggatcccgagcgatttcattggcatcgaaacgattcctctgcaccaatgccgcttccgcttcccctcctcttccccctcctccttccgccgcctctcccagccgctggagcttcctcaaatacgccctcgtcggcgctctcaccggaggcactgtctttgccggttacgcctcttacgcttacagcttggacgaaatagaacagaaaacgaggtcgctccgtgaatcggccaagtacactgctggtgatggagtcactgctcttgataaatttcaaggtttgctatactcaactgcaatgaacagtcctgctaaagcagtagagctttatttggatgcacgaagggt

SEQ ID NO: 46517 - DNA, 220 bp, Glycine max
  Clone ID: LIB3107-077-Q1-K1-H2
catccaggcccgatcatgtccgatggtacgcagagataaattatggtcattttgcgccttgtgtcaaccaagaggagcgaattcgacagtatcaggatgatgttggtcgttcagtgctgatcattttcaaaatttttgcaagttccgctggcggggaaattgaccgaccgaatggtgtttcgctcgaacgaaatagtgtcttatctttactttcctttta

SEQ ID NO: 46518 - DNA, 324 bp, Glycine max
  Clone ID: LIB3107-077-Q1-K1-H3
gatagcagcatcatacaaagcattgaattcaaaaactgaaggtcattccttgtgttttgctttcttcctcaaaaccaaacatgtcgaacacatgcggcaactgcgactgcgctgacaagactagctgcaccaagggaaacagctatggtgttattgtagagactgagaagagttacatcgagactgttgtcatggatgttccagcagctgagcatgatgggaagtgcaagtgtggcactaactgcacttgcacggactgcacctgtggccattaaggaatatgtatgaaaatgtaattgccatgtgtttggcaatacaaatatt

SEQ ID NO: 46519 - DNA, 396 bp, Glycine max
  Clone ID: LIB3107-078-Q1-K1-A3
ttcaatttttcgtctctaattcaaaaccgaacgtgaaacttttgtttcattcggctcctttacagaaaaaattaagagatggaaaatcaaaaaattgacccataacatctatgtcagcctttttgttttgtatgaataagtttaaaacatcttgctttttagatgatccctctagaagagcagtattataataatctatgttttttttctagttacttcgttctctatttctatttaatagaatctttaggaaaagcataaaatttctgtcgagctaaaaaaatgtagatgtctctagtaaactaaaagaatcgtttaatagctattttgcttcaatctctactatacaaaaaaatggaagatttagttacgattagaaagaaactttctatatat

SEQ ID NO: 46520 - DNA, 330 bp, Glycine max
  Clone ID: LIB3107-078-Q1-K1-A5
ccacgcgtacgaccacgcgagcgggcgtgtgctataagacgacagaaggggaccaaggcactcgctttcacttcaaattgattggatggggctctattacttcaacggatacgccgggctagctcatgtaattaggaagtgttaattcaaagtgagacaccgtctgcttataaataaccttcttaccgatatatcatgatttccaactctttagatacaaaatctgaatactctcagaagaactgtaaccactacataccgcaacataaactttgtagagtcactttgaaatcaaatcgacactgatcatcattgctatatagcgaatat

SEQ ID NO: 46521 - DNA, 332 bp, Glycine max
  unsure (1)..(332): unsure at all n locations
  Clone ID: LIB3107-078-Q1-K1-A6
ggatctcaacggagccctctcttcaggtcaccatctagactgcaatcatggctgatggaccacagcatccatcagttgttcagaagctagctggacagtcttacctggtgtccaggcttagccccaactttaactctaggaattattctgcaactggttcttacgtcaatggcggaatgcactcgcctgggttggctgttgtgtcacctgtatctccagttactgtgcatgctccagcagagaaaggagtgagtggatttctagtggattntctgatgggtggagtatccgctgctgtatcgaagacagctgctgctccaattgaacgagtc

SEQ ID NO: 46522 - DNA, 323 bp, Glycine max
  Clone ID: LIB3107-078-Q1-K1-A7
ttaaggttttatgggtggccaaattttcggtgctggtgttattattgtagtttcttttctgctgatcctctgtggcatggttgtgggactgacagtgatatattctgcttgaaaagtctaaagagaacacttgacgacccctacaattatttgcaatcctggaatttcaataacaatacagaagggtatatatgcaagtttactgggttgagtgttgcaccctgatgaaaacaagtcttgaatctcaaactgtcaaacatgggaccaagggccccttcctcgcggattcagaattgtcaacatgacaggattagatttttcgc

SEQ ID NO: 46523 - DNA, 388 bp, Glycine max
  Clone ID: LIB3107-078-Q1-K1-A8
ttggggattaatcaaattgatgtagtatcgttgttcacaaacattaaacatgatgggtgaacggcaaaatcttccttggttttagaactcacattaaaatataattctctagaattcattataattgaaaaatgaaatattatagcatagtgactaaaaaaatgttgaactaaaaggacaatggtttagaattttaacatgatacttacagttccaccaacagtgggatctggtgtatgtagaaaacttatgaagttgcaagcaactccacccagtatgtagatcaagaaaaatgtaaatgaaccatagcctttgcaaacttgaggcccaaatgttaaaagggcccaacaactgacagccatgtgaaatattcctgcatgctgcatat

SEQ ID NO: 46524 - DNA, 57 bp, Glycine max; identical to SEQ ID NO: 12752
  Clone ID: LIB3107-078-Q1-K1-B12

SEQ ID NO: 46525 - DNA, 122 bp, Glycine max
  unsure (1)..(122): unsure at all n locations
  Clone ID: LIB3107-078-Q1-K1-B2
tgtacctccttccaagtaaaaagaatcgcttgatttcccctttagaaagaactacgtaggtctgatttcctcttcgatggagggtgcgtaggagcaagagccccgcttttgtcgnaccccta

SEQ ID NO: 46526 - DNA, 398 bp, Glycine max
  Clone ID: LIB3107-078-Q1-K1-B3
gttgtttatcaatttaggcgccttcacagtaagaagctgcagcacacttttcgattttattcccaccattggaggacttgggcagcttgctttatacaggctgcttggcgccgatataagaaaaggatgactatgaaagacctcagtttgagggaaaccattcctttagacgaagcagtagctggtgagagaaaacatggggactattctgctggttcaaattcaactcagactaaattgaaccttggggctacaattcttgcttcgagatttgctgctaacacacgaagaggggctctgaagatgaaagatgacatgccccagttacagaagcctgaagaacctgacttttccactgaagctgacgatgattagttacacttattcagtggcatttg

SEQ ID NO: 46527 - DNA, 399 bp, Glycine max
  Clone ID: LIB3107-078-Q1-K1-B4
tgtctgccgctctctgagaaaaacagatagtgtgggagagagaagagcggaagagaaaatgacgaccaggttcaagaagaacaggaagaagagaggtcacgtcagcgccggacacggccgtatcggaaagcaccgcaagcatcccggaggtcgcggtaacgccggtggcatgcatcaccaccgtatcctcttcgacaagtaccatcctggtttcttcgggaaggtaggcatgcgctacttccacaaacttcgcaacaaattctacaatccgatcatcaacatcgacaagctgtggtccctcctcccccaggaggccaaagacaaggccaccgccgacaaggcacccttgctcgatgtcacccagttcggttactttaaggttttgggtaaaggggtttt

SEQ ID NO: 46528 - DNA, 235 bp, Glycine max
  unsure (1)..(235): unsure at all n locations
  Clone ID: LIB3107-078-Q1-K1-B5
gtcncgctcttcttcggcgatatctacttcgtgtgatgtttgagagcttgatatttctctcacatgaaaatgtctagcatgcggaggtaactgtggttgcggaagcgcctgcacgtgcggatacggctgcacgaggctgcaagatgtacccagacttgcgctacaccgagtcatccaccaccgagaccttggtcatgggaccggcaccagttattgctcaatgcaagagtgctct

SEQ ID NO: 46529 - DNA, 392 bp, Glycine max
  Clone ID: LIB3107-078-Q1-K1-B7
ttctaccaaaccaaaggaagagtgggcaacttccaacaccatagtgaaatggcttccaaggctgcacttctcttgtgtttcaatgttctcttcttcaccgtggttagctccacatatgtgccatgcaacccaccccccaaaactccaaaacacccacctgtcccaaagccaccttccccaaagcaagcaagttgccccaaagacactattaagtttggtgtgtgtgctgatgtgttaggtttgatcaacgtgcaacttgggaagccaccaaagaccccatgctgcaacctcattgagggtctcgctgatcttgaagctgcagtgtgcctctgcactgctctcaaagctaatgtgttgggcatcaacctcaatgttccagtgaacttgagctt

SEQ ID NO: 46530 - DNA, 380 bp, Glycine max
  Clone ID: LIB3107-078-Q1-K1-B8
gtaatgtttttccaaaccaaacaaagagagggcaacttccaacaccatagtgaaacggcttccacggctgcacttctcttgtgtttcaatgttctctccttcaccgaggttagctccacatatgtgccatgcaacccaccccccaaaactacaaaacacccacctgtcccaaagccaccttccccaaagcaagcaagttgccccaaagacactattaagtttggtgtgtgtgctgaagtgttaagtttgatcaacgtgcaccttgggaagccaccaaagaccccatgctgcaaccttattgaggatttcgctgatcttgaaactgcagtgtgcctctgcactgctctcaaagctaatgtgattggcattaacctcaatgt

SEQ ID NO: 46531 - DNA, 390 bp, Glycine max
  Clone ID: LIB3107-078-Q1-K1-C1
cggtaaacatcatgttcccatgcagcaagggagacaacatgaaggttatcataagtaacaaatggatatcaatgaccattacaaagatttcattcaaaatacaagggagaagatgatgagaagcgtcacaaacattggttggactcatcagagcaaccatgcggctgcacctgaacatggcgaggctcagaacaagaacgaaagccatttttctgagattattcagcgtgctaggaagaagctcagaactacaacaactgttagaaagaataataattagtccaagaaagagtaagactcaccacaaattaagaaaggttaattattagtattgacgtttgttggtttggtgtaggaaaagtgttgagcatctaatctaggttattgttc

SEQ ID NO: 46532 - DNA, 297 bp, Glycine max
  unsure (1)..(297): unsure at all n locations
  Clone ID: LIB3107-078-Q1-K1-C10
ttaatgttttatcaaaaacaaaacacaagccgggggaaggggatataaaaagggaaacaaccagcataacgncagggaccagccacaagatgggggagaccttccatgtgggagggcacattaaggaggaagagcataatggtgagcaccatgctggagaatacaaaggggagcaccatggtgaacacaagtatgagtacaaaggagagcatcattggtgaacacatagctggagagtaccttggtgagcacaagccacagcacaaagaggggtacctaagacaaagtcaaggacaa

SEQ ID NO: 46533 - DNA, 367 bp, Glycine max
  Clone ID: LIB3107-078-Q1-K1-C2
gtacaaatggtacttcgaacttggaacgagtatgaagaaattaacgatacttctttaccttttgagttgttctgccggatcggtcgctcaagacctttggtctctacccggacctgatgaaaaaaatgggatcacatcttatggactcgttgagaataattctgatctagttcatggcctattagaagtagaaggcgctctggtgggatcctcacgtacagaaaaagattgcagtcagtttgataaggatcgagtgacattgcttcttcggtccgaaccaaggaatcccttaaatatgattcaaaatggatcttattctatcgttgatcagagatttctctatgaaaaatatgaatcggagtttgaa

SEQ ID NO: 46534 - DNA, 398 bp, Glycine max
  Clone ID: LIB3107-078-Q1-K1-C3
tgtgagcataaagaaacatctcaatctcaaaagaagcatctcgtgtattgtctcttaaaaacaatggaattgatgtgccattgttcgagctttcttcttccgacggagaatcctaacacgacgtgttcgctttctctaaagtacgctctcgttgttctcaaccaaagcctaccgagatttgctcctctgctctgggaccacgctcaagtacgagtttgcgctgatggaggtgccaatagggtgtatgatgaaatgcctcttttcttacctcatcaacaaccttcccatgttcgcaccacgtacaagcctgatgtaattaaaggagacatggattcaatcaggacagaagtacttgacttctatgcaaagctgggaactaagataattgatgagtctca

SEQ ID NO: 46535 - DNA, 402 bp, Glycine max
  Clone ID: LIB3107-078-Q1-K1-C4
ttttacagattgggaccaaagcgatggaggtggtgaaggatctggacgtgaagcggtacatgggtcggtggtacgagattgcgtgcttcccgtcgaggtttcaacccagtgacggcaccaacaccagagccacctacactctccgagatgacggcaccatcaacgttcttaacgagacttggagtggcggcaaaagaggtttcattgagggcactgcttataaggctgatcccaacagcgacgaggccaagttgaaggtcaagttctgggtgcctccctttttacccatcattcccgttactggggattactggcttttgtacattgaccaggattatcactatgctgtcattggccaacctttcaggaattatctttggatattgtccaggaagaaccata

SEQ ID NO: 46536 - DNA, 386 bp, Glycine max
  Clone ID: LIB3107-078-Q1-K1-C5
tatgtcagattgggaccaaagcgatggacgtggtgaacgatctggacgtgaagcggtacatggatcggtggtacgagattgcgtgcttcccgtcgaggtttcaacccagagacggcaccaacaccagagccacctacactctccgagatgacggcaccatcaacgttcttaacgagacttggagtggcggctaaagaggtatcattgagggcactgcttataaggctgatcccaacagcgacgaggccaagatgaaggtcaagttctgggtgcctacctttttacccatcattcccgttactgcggattactggcttttgtacattgaccaggattatcactatgctgtcattggccaacctatcaagaattatctttggatattg

SEQ ID NO: 46537 - DNA, 379 bp, Glycine max
  Clone ID: LIB3107-078-Q1-K1-C7
ttttagggttctgctgaaaggaaacgacaaaggggtatggttgctagaaaaggagaaagagttacagatgcgagaacacgacatgtggatccggatgaaaaagcactacaaaaggatactgttggtagaacacgacataagggttcagatgcaagaaaacaacaggatggtacggattgcagaggactacagaagggtactgttgctagaaaacaacaaaagggtgtgatagataagataaccggaaccgacctaataactatctgcacggtgaagtgccagaagacgcttatcaagctgaggatggtgccaactcatgcaaaaatcccttttggcgagactgagattgatgaaaatattgatcagtctttcacgcaca

SEQ ID NO: 46538 - DNA, 392 bp, Glycine max
  Clone ID: LIB3107-078-Q1-K1-C9
tttatggtttaccaaaaacaaaacacaagccgggtgaaagtgagaaaaaataaaaatcaaagagcataatgtcagggatcattcacaagattggggagacccttcatgtgggagggcacaagaaggaggaggagcataagggtgagcaccatgctggagaatacaaaggggagcaccatggtgaacacagtagtgagtacaaaggagagcatcatggtgaacacaaagctggagagtaccatggtgagcacaagccagagcacaaagaggggttcctagacaaagtcaaggacaagatccatggtgagggcggcgccgccgagggcgagaagaagaagaaggagaagaagaagaaggagcatggccatgagcatggccatgacagcagcagc

SEQ ID NO: 46539 - DNA, 387 bp, Glycine max
  unsure (1)..(387): unsure at all n locations
  Clone ID: LIB3107-078-Q1-K1-D1
ttgggacccacanactccacaagtgtcacaagtcataactcgttagagagagtttgtgtgtgtttttgtgtgtcaccttggtgcatacaacacaagatggaggaccaaaatggtagtggtaagttgagccaagggcttcgcaaggtgaagccttaccttgctatattgtcccttcagtttggctactcagggatgtatatcatcactatggtttctttcaagcatggcatgagtcattggatactctcagtgtaccgtcatgtagttgctgctattataatagtcccttttgcacttgtccttgaaagaaaaataagaccaaagatgactcttcccatcttcctgaggatagtggcacttggtttccttgagccagtgctagatcag

SEQ ID NO: 46540 - DNA, 404 bp, Glycine max
  Clone ID: LIB3107-078-Q1-K1-D11
ttatggggtaggtgcaagagtttgttgtgagctataagctagtttatcgtgaggagaatatgaagttgtttgttttctttgttgctgcagtagttttggtagcatggccatgccatggcgcaggctaccaaaggttccctctccgaatgaaaactggctatggtgagcgttcttcggaggtaaaatgcgcaagttttaggcttgctgtggaagcacacaacatccgagcctttaaaaccattcctgaagagtgcgttgaaccaacaaaggactacattaatggcgaacaatttagatcagactctaaaacagttaaccaacaagctttcttttatgctagtgaacgcgaagtccatcacaacgacatatttatattcggcatagataacaccgtactctctaat

SEQ ID NO: 46541 - DNA, 391 bp, Glycine max
  Clone ID: LIB3107-078-Q1-K1-D12
ttatggggtggtttgaacatggagccgttggctctgaggctcaccctttcaccgtctgcttcaacttcatcgcttcctgcagcacttgctcactgctccaagctatgtgagtctcaaccgcggaataagaagaaggtgcgtttcgacgcgcctaggcttgcggtgcggtgtgtgaaagcctaaacgcagcgaaccggagatactatctacgatggaaagacttggactgggttcaccacacctgtcatggaagtcaccacattcaatcgaaccactttcaccgatgctgctgactttcccagctgtgaaaagattgccgctgtccgcagacttatgtatggtctcgctgagtgaattatacttacatcttattattaagaaggcattgcac

SEQ ID NO: 46542 - DNA, 368 bp, Glycine max
  Clone ID: LIB3107-078-Q1-K1-D2
tgatggcaaggttaggacagacaagacataccctgctggtttcatggatgttgtttctattcccaaaacaaatgaaaatttccgtctactgtatgacacaaaaggtcgattccgtctccactctgtaagggatgaagagtcaaagtttaagctctgcaaggttcgatctgttcaatttgggcaaaagggtatcccctatttaaacacatacgatgggcgcaccatccgctatcctgacccactaatcaaggccaatgacaccatcaagctggaccttgaaagcaacaagatcactgatttcatcaaatttgatgtggggaatgttgttatggtcactggtggaaggaacagaggccgtgtcggtgtca

SEQ ID NO: 46543 - DNA, 373 bp, Glycine max
  unsure (1)..(373): unsure at all n locations
  Clone ID: LIB3107-078-Q1-K1-D3
ggagcgagagagagtgggggaacgaagaagctacagctacagctgaaacaggagctccttcgatctacaatctatagcgattaagctctcattttctgagagtgttctttctttctctctctctctctctcaccgngattccaccatttccccatcatgatttctgctaccaaactcaaatccgttgatttttacaggaaaatcccgagagatttgactgaggcgtcgctatcaggagccggattatccatagtggcagctctggctatgatgtttttatttggaatggaactaagtagttatttgtctgttagcacctcgacatctgtaattgttgacaagagttctgatggtgactatttacgtatcgatt

SEQ ID NO: 46544 - DNA, 384 bp, Glycine max
  Clone ID: LIB3107-078-Q1-K1-D4
gaccaaatctctctctctaataacatttctaatctcattctccttctgttcaaacactctctctcatggcatcagataagaagattaggatcggcatcaacgggtttggaaggattggccgtttggtggccagggttgcccttcaaaggaatgatgttgaacttgttgctgtcaacgatcctttcatcaccactgattacatgacatacatgttcaagtacgacaccgttcatggccagtggaagcattttgatgtgaaggtgaaggactctaagacccttctctttggggagaagcccgtcaccgtttttggaatcaggaaccctgaggaaattccatggggtgaggttggtgctgattatgtagttgagtcaactggtgtat

SEQ ID NO: 46545 - DNA, 397 bp, Glycine max
  Clone ID: LIB3107-078-Q1-K1-D7
gctagaaactacagtgggggtatcgcttgagcagacttaacaacgagcacagagcgggttactgtctgttcaagctaccatctctctctctctttcttagtgcctccttgccagaagttaaaatggtccaagaaactttcctattcacatctgaatcagtgaacgaggggcaccctgacaagctctgtgaccagatctccgatgctgtgctcgatgcatgcttggagcaggaccctgacagcaaggttgcctgtgaaacctgcaccaagaccaacatggtgatggttttcggagagatcacaaccaaggccaacgtggactatgagaagattgtgcgtgacacatgcaggaacatagggtttgtctctgatgatgttggtcttgatgctgacaactg

SEQ ID NO: 46546 - DNA, 388 bp, Glycine max
  Clone ID: LIB3107-078-Q1-K1-D9
ttagagacagatgttactttttatcatggtccaatacaaagggcaagaaggggtctaagtattgctggggactcaaatgtgtcagttaaagcaaggaaatctaatggtgacagtgatccattcccacgttgcgttgttcttgacattgaaggaactactactcccatatcatttgtttctgaggttctcttcccatatgcccgtgataacgttgggaggcatttatctctaacatatgatacccccgagactaaagctgatatcaagttgctttgttcccaagttcagagtgaccttgaacaagggattgcaggtgctgtgcctatccctcctgatgatgctgggaaagaggaagtcgttgctgcactctttgccaatgtgaatgcta

SEQ ID NO: 46547 - DNA, 285 bp, Glycine max
  unsure (1)..(285): unsure at all n locations
  Clone ID: LIB3107-078-Q1-K1-E11
cttctanaaagggtgtgtaaccttttttttgaggggctcacctgagagacatcttggatgtacggcgccgcatcggtaaatcataacccccactgtgtacattggatagcattccttactgaaaaacccaacggcgtctccccattatccttgcgcttattcaacaccaaaagaacgtgacagtgaacagcgcttgcattttataaacatttaggaatctcaataatgtttccgagagaaactcgtgtaaacttgactcaattagcatacggatataacactaac

SEQ ID NO: 46548 - DNA, 399 bp, Glycine max
  Clone ID: LIB3107-078-Q1-K1-E2
acatggaaaccaaggattgtgattctctccaaaatgacacccacatgtattgcgtttcacaggtgaatcattcttctccaaattcacaatggatttccctccatactgtcgatcccaattgcgtagcaacacttaccgtgccctcgttcacctcctctctcacatttctgcttacaacgcttcaattcttgaagcttcaactcaacccgtcaacattcccgataatggcagtggtagaatggatcaagaaaaccaggaaaaggagcctaagtgctccgaagttgttgattctgattttttggatcccaaggatcctatatgccagaaggatataccggaggtccaggaaaccattgagggggttgaagacaaggatatggattttacttctaacaagat

SEQ ID NO: 46549 - DNA, 412 bp, Glycine max
  Clone ID: LIB3107-078-Q1-K1-E3
aagagacttaaggggccatgttagtttgttgatcgagataactagaaacagtgtgatgaaaatgaaggtccttgttttcttcgatgctacaattttggtagcatggcaatgccatgcgtacgatatgttccctctccgaatgaacactggctatggtgcccgtactccggaggtgaaatgcgcaagttggaggcttgctgtggaagcacacaacatctttggctgtgagaccattcctgaagagtgcgttgaagcaacaaaggaatacatccatggcgaacaatatagatcagactccaaaacagttaaccaacaagcttacttttatgccagagacctcgaagtccatcccaaggacacatttgtgttcagtatagatggcaccgtactttctaatattccatactacaaa

SEQ ID NO: 46550 - DNA, 411 bp, Glycine max
  unsure (1)..(411): unsure at all n locations
  Clone ID: LIB3107-078-Q1-K1-E4
aattcgagcggccgctacanannggactttttattttttgttnganggatttaattgagagaattatggaaaacgataccaaattgggaaatattaaccaccactgtcttcattttttagtatccataaaacaaagatcgaaaggatactacccctcatgctcaggcatattgaacaagaaaagaaggggaaaatgaagtgttatcgcattttatgaacaattaggagtctcaattttgtttcagagtgaaacttgtgtcatctttgctcaattagtatcggtatctaacagtaacatgggccattatatacgtgacaggcatcctttctctattacctcagcccctggcgatgactacctgagtgttcacattcggcaactgggtgattggacacaggaacttaaaagag

SEQ ID NO: 46551 - DNA, 402 bp, Glycine max
  Clone ID: LIB3107-078-Q1-K1-E7
gcgggtgtgcgaaaccagtatgggtttctaagcggaaccaatgaatggggccgctatcaaaggtcttctcaggagcgatctaaatttcttctaaacaccctaagaggaacgctagagtatcctaatattcgaaaataaactttactttctccgggcattacgacgatgcatataatatggccaattgggagaggattacctatgtacgcatttttatgcgcactgggttagccatttattatataacaaagggtcactcgcactttagataacctggcgcttacccatatgtgtatatacggaataaggatttcctatgtactctcgatggactatttgattcttaccaccatgacgagcattaatgcgttaatgacagaattcgtgtgactgctagacatt

SEQ ID NO: 46552 - DNA, 240 bp, Glycine max
  Clone ID: LIB3107-078-Q1-K1-E8
acgagtatgggtttcaaaggaaaccaacaccggggccggacagggcgacgacccaagagctacgaccttgtctaagaggctatgagacacggtgctagccagtatggaacgacatgttcttccacggacaaaccacgatgttacggagtgacccggtcgaagattttaagtccgtatcgaaggtgacggggttattcgatatgagtaaagggcatcaaccaacttagagaacctgtgatt

SEQ ID NO: 46553 - DNA, 394 bp, Glycine max
  Clone ID: LIB3107-078-Q1-K1-E9
tgagggtttagagagtgtgcgcgttaccggttctcaacttaaactcaactcaactcacatccgaggctttctcattcattctctgtcgtagttctgcgattcaccactcagttatttttatcgtgtgctcgaagtgaagtctctgaaatttgtgctttctctgtgttcttcgattttggatttggcttctgtcgaattgaattagggtttgtatggcgagaagaagcagcagcgagtctgaggatgacgcgaggaagcgcagtggcagcgaatctgaggatgaggagaggtataggtatcggcggcgcggtgctgagaatggtaagaagagttccggtcaccgtgatgacggtcattcgggggaagaacgaagcggagccaagaggaatggtgg

SEQ ID NO: 46554 - DNA, 409 bp, Glycine max
  Clone ID: LIB3107-078-Q1-K1-F1
gcgagagacgacagagggggcactttacacttcttcaagacgacaggccacggcttcgccaaaccccttcctctccactctctctcaaaccttcgatgcccatttcgcccctgccccgaagtcaacgtctcttgaactcagggcgaggaggcacgttggggtgcgagtttcgaacgcgctgatcgaaccagatggagggaagctcgcggagcttgtggtgacggattttgagagggatttgaagaagggcgaggctctttcattgccgacgatcaagctctcaaggattgaccttgagtgggttcatgtactcagcgaaggatgggccacacccctgaaaggcttcatgagagaagccgagttcctacaaacgcttcatttcaactcgccccgactcgatgatgggtcg

SEQ ID NO: 46555 - DNA, 278 bp, Glycine max
  Clone ID: LIB3107-078-Q1-K1-F10
acttatagggttatgggaaaatgagttactagggtttgggtgttagttcaggtactgctccagtgtaccatggaacaaaacttaaagtgatggataggagggtgaggataacagatctggtgttaaggagtgtgagccttggtcttggaattgcagcaattgatcttggggtgactgattaccacgtcaaagagtttttctacgttcaggagaaagctgaatttacagacatgaacgctttaatgatcttggtagttgtgaaccgactaactgaaggc

SEQ ID NO: 46556 - DNA, 399 bp, Glycine max
  Clone ID: LIB3107-078-Q1-K1-F11
tttccctatttctaaggtcagagaaacatgctagaacaccagattgcatttatatatattttaccttttgtaccttattttataattacccttatgtttagttgaatttcatcaaaaccctaagaatctaagttgttggcatatagatattgagtcttagatgtttaagtggtttttaccttttgtatcttattttacaattacccttatgtttagctgaattttatcaaataatgtttatttagtatctgacaaaacatacaaaagggtcccacattccgttgtgagacacatcagaattgatggtgcatgtagttacaaatcaagtagagagaacggagcctcctttaatttacccggttatatattggtagtagtgagctgtttgtggacactgca

SEQ ID NO: 46557 - DNA, 352 bp, Glycine max
  Clone ID: LIB3107-078-Q1-K1-F2
aagttatgtgtgtcaggcatcactactttatctgatagagggatattaacatgcaagaagggataaaagtgaagcatgtctttgtcattggtgcttgttgcacagttgcaccttgcatcaagttaacaacacaaagtgacttgtgatagttgtattatttttcttcccattagcttaaggcctcaagtgataagagtcacttcctctttagctgtcttgtgaatttattttaatcacttccttttgttgacagactgaagctgtggctcttcattgcatatgttgtatcctttgtttctttagctggatcagcaggcctgctgatccaagattcacttgataaatccgcccc

SEQ ID NO: 46558 - DNA, 58 bp, Glycine max
  unsure (1)..(58): unsure at all n locations
  Clone ID: LIB3107-078-Q1-K1-F3
gagacctcatgtcaggcggngctacccgctgagtttaagcatatcaatangcgnnnna

SEQ ID NO: 46559 - DNA, 387 bp, Glycine max
  Clone ID: LIB3107-078-Q1-K1-F4
ggttcctttgcattctattcattcaagattcagcaagtgcgttttggaagcagagaccgaaatacttcgagatggcccgtacaaagcaaactgctcgtaagtcaactggaggaaaagctcccaggaagcagcttgcaaccaaggctgcacgtaagtctgcaccaacaactggtggtgtgaagaagcctcatcgttatcgccctggaactgttgctcttcgtgagattaggaaataccagaagagcactgagctcctaatcaggaagcttcctttccagaggttggttcgtgaaattgcccaggatttcaagactgatctgcgtttccagagccatgccgtgcttgcattgcaagaggctgctgaggcataccttgttgggctctttg

SEQ ID NO: 46560 - DNA, 417 bp, Glycine max
  unsure (1)..(417): unsure at all n locations
  Clone ID: LIB3107-078-Q1-K1-F5
gaacacagacgggggttacatatttattctatgcgtggaacaggcagtaagagcgttgtggaagcagagaccgagatacttaaaaatggtcacttcgaagcgaactgctctgtactcaactggatggaaaagctcccacgaagcagtttgaaaccaaggatgtacagtggtactgcaccaacaactgatggggtgaacaagcctcatcgttattggcctagatctgttgctctttgtgagattcagaaagagcagaggagtactgtgctcttaatcaggaagctatctttccagaggatgattcgtgtaattgcgcacaatatgaagactgatctgcgttttcagagtcatgccgtgcttgcattgcaaagaagctgntgaggcttaccttggtgagctctttgaggacactaactt

SEQ ID NO: 46561 - DNA, 394 bp, Glycine max
  Clone ID: LIB3107-078-Q1-K1-F7
aagacgacagaaggggaaggtgtccacttaactgaaatggtgtccttcatgggatcttggaattgaaacgaacgggacgtgtctgtctccgatggcttcctcataccgcgaccgcacgtcggagttccggttattattggagactctgaagaagatcggaagtccggtgcaacccgagaatgctccttcgacctctcatggcgagtcgtattcgagatccgaattcaaccgaaaggcctcgcgtatcgggttggggatccacgagacctcgcagaatatcgcgaggctcacgcagctggcgaggaaatctgtcatgttcaacgatcccgcagtggagattcaggagctgactgttctgatcaagaacgagatcacggcgctcaactcggctctc

SEQ ID NO: 46562 - DNA, 344 bp, Glycine max
  Clone ID: LIB3107-078-Q1-K1-F8
ttagggttctcaggaacatgcaactctttggagatcaaagtcaaactcaagctcctgtgatgatcttgtatagattacgggatgaatttgagtttttgtttctataattttttctagaagcgtaaataacttgagctgaacagaactttgaatagctcaactcaaagtaaacttatctggtaataacttacttcataaaaagaaaagcaaaatcaatatacgattggtgttagatcatttgaaagtttttaataatcgcacatgattcttgttaagagaattttatatttttttggattccgtccaatttaaaatatggtctattcaaaaatatcacaatggtc

SEQ ID NO: 46563 - DNA, 411 bp, Glycine max
  Clone ID: LIB3107-078-Q1-K1-G2
ggggtgaattgaatttatatttggagaaagaaaaggtagcagcgacgcaatgcacaatgggagcatccaaaccacagagttaatgcatctttcttgctaccgcagacacttttgaacatggagtgaacttggaatgacaatatattataattatgttacatattcgatatatataattaatatatatgtgtcttaattatatgaattatcttgaacttaacgtattttattccttaaattttaaaaaatttatgaaatttatctcatttatttatccattaataagcataaaaatggagatagaatttgctaaaaaataaaaagttggaatacaacgtgtcaaaaactaaaaaaatcgaatgtaaaatgtgtcaaaaattaaaaaaactggaggtacaaagcgtaattata

SEQ ID NO: 46564 - DNA, 401 bp, Glycine max
  Clone ID: LIB3107-078-Q1-K1-G3
tatataacatatttctaatatagatttataatatgtatattaacagatcgatcaggaatcacgaaaacacatctaataatatgacttctcttttcgcagtaacgggatcgagtgctaaacatttttttttattatgcgtgcatgtgttccagattccttttcttcttctccttctatttaatattgcagattcctatcaatccacaattcttattcttaaatccaccgacaggacaaactacaggatcattattgctcgttaatgtcatatcacatattgacaaaacaatctcattaataatatgatatttcaaatgaaatcacatgaaatccatggcttctataccccaagaatgggaatgggatctcatgcatcaataatagattgatgtcgtgctaca

SEQ ID NO: 46565 - DNA, 407 bp, Glycine max
  Clone ID: LIB3107-078-Q1-K1-G4
ggtttcattttcatgagaaataacgacaaataggagccaaacgagagagaatgagaggaagagagaccgagagacagagagactgagagtgggtgagtgacaaacagagagcatgtgggtgatcggttctgtgtccacttcggaagaagagggcatgacatctacgacacagtggacttgtcggagtggtggtggagagacagcacgagaaactcaagagacgcttgacatatctcgtctttctgctatacgcgtttccctgaagacattcgagaaaaagaattgtggtttactttcaagaaatgaggcgatgtcagggaggtttatatagctaaggacaagaatagaagtggatggagatatggttttgttcgactcaagggtgtatatcatgtgcaacaacttgg

SEQ ID NO: 46566 - DNA, 356 bp, Glycine max
  unsure (1)..(356): unsure at all n locations
  Clone ID: LIB3107-078-Q1-K1-G5
gtttgnggatgatcaaagcaaacgctaaagcgaagacgtggcattcggtctgaagctgatgctaacctcatgaatcaattgacttggaggcttggacttacaagacgagagacgcagaatgctatgacgtctatggcttacatgaagagcaggtggtgatggttacaaagcccggtactgccgtgcttgttctttatcacacaaccacccaaactgaagaaacgatgttgctgtctgaaaattatgatatagactattacatgagaacatattttatgaagcaaactgggggtcatgcttgaaagacaattgtgctgcttaatgctctatggtacttgacttgtgaagacaagctc

SEQ ID NO: 46567 - DNA, 406 bp, Glycine max
  Clone ID: LIB3107-078-Q1-K1-G6
tttcagcgcttgatttgaggccaggcaagccggactcaaccaccacacctctcctcgttcacgctacccctttctgctcttcttctacctttcaagttttaaaagtataaagatggcagagacattcctatttacctcagagtcggtgaacgagggacaccctgacaagctctgcgaccaaatctccgatgctgtcctcgacgcttgcctcgagcaggacccagacagcaaagttgcctgcgaaacatgcaccaaaaccaacttggtcatggtcttcggagaaatcacgaccaaggccaacgttgactacgagaagatagtgcgtgacacctgcaggaacatcggcttcgtctcaaatgatgtgggactggatgccgacaactgcaaagtcctcgtcaacattgaa

SEQ ID NO: 46568 - DNA, 386 bp, Glycine max
  unsure (1)..(386): unsure at all n locations
  Clone ID: LIB3107-078-Q1-K1-G7
tacgattaatggtttgncacagggagccaaaaaggggggccctggacaatgancagaggcaaaccaccaacgccatctatatttccacaaggcacccaacaaagaagagtttcaccaagaaacgtgccgcaagattaaagcactccacaaatatgattgctagcgagccaataaatcgacctttgcctggggtctagaagccagagtaccatttttggacaaagagtttatcagagttgcaatgaacattgatcctgattgtaaaatgataaaaaatgaagaagggcgaattgagaaatgtgcactgaggagggcctttgatgatgaagaacatccttatctgcccaagcacattttatataggctcgaaagaacaattcattgat

SEQ ID NO: 46569 - DNA, 398 bp, Glycine max
  Clone ID: LIB3107-078-Q1-K1-G8
ttagggttcagttgtattgttgaacaagggtttctctgtctgcttcttcactttctctcgtttcaatcgaaaccaaaacaaaaacatgggcagaaaattcttcgtcggtggcaactggaaatgcaatgggaccactgaggaggtaaagaagattgttactactttgaatgaggctaaagtccctggagaagatgtcgtagaagttgttgtgagccctccttttgtgttccttcctgttgtaaaaagtttgctgcgccctgatttccatgtttcggcacaaaactgttgggttcgcaaaggtggtgcttataccggtgaggttagtgctgaaatgcttgttaatttgggaattccttgggttattattggtcactctgaacggaggcagcttttaaatg

SEQ ID NO: 46570 - DNA, 403 bp, Glycine max
  Clone ID: LIB3107-078-Q1-K1-H10
ttgtatgggttcacatataagcatgtgtttatcgcgcccgtgcctgggtacaggcacctacctccgaatataatcgtcaccgaaaatcaaataagggaaatattgagaaaagcagatagtaatggagacggtcgtttgagcaaagaagaacttaagaaagctttcatagaatttggatccaagatgcccggatggagagcatgtcgtcttctaaggaaagctgacaccaaccacgacggagtactcaccatggaagaacttgacaccattgttgattttgctcttgctaggtacacattcaagaagtaaatatatatgcatgatatgatatcatcgcgcccatatgccttaatcccaaagcatctaaatgaagcgcatgtacgtctataactaattatttatg

SEQ ID NO: 46571 - DNA, 197 bp, Glycine max
  Clone ID: LIB3107-078-Q1-K1-H11
gacctcacccagttgcagaaagaaaagaccatcaaagtttcacttcagccttatccggtttagggtttcggtttttgacccaacctttgacgtatcgaaaccttaagtttcggatcaggtctgagcaatctggttggtagaacctttggtcttagagagtcaagttttatgtctgaattagacgatcaaattcctac

SEQ ID NO: 46572 - DNA, 392 bp, Glycine max
  Clone ID: LIB3107-078-Q1-K1-H2
tgtaccccttacccttaatcgaaggtaaaaagatgaatctgaagaacatgaaggttccgaacgttcgaggtggcggggggatctctgcgctgctgaagcttgggattgttggtggaattggtttgtatgcagctgctaacagtctctacaatgttgaaggaggtcaccgagccattgttttcaacttggtgtcaaagacaaggtctatcctgaaggaactcacttcataattccgtggtttgagaagccggttatctatgatgtccgtgcatgaccccatctagttctagttgagagtacatctgggagtcgtgatctacagatggtaaataatacatgtagctaggatttgcgtgtagtcacagagaaatggttttggtatcaaattcgta

SEQ ID NO: 46573 - DNA, 406 bp, Glycine max
  Clone ID: LIB3107-078-Q1-K1-H3
tgtgatgtgcttgtcatccatcattgggcaatttgtgaaattgcaggacatgccggaaaaccaaaaaatattgatgcacaatccgtaagtttccgtgacacaccggaaatcaaatggaagcatcgttgcataattaagtgaggttccgtaacattccgtaagtcaaaagggggatgattatgtaatccgcaaggttccgtaacattacggaaagaaaacaagtagcgttacgagattcgtaagtttccgtaactttacgaaaaaagaatcaccaaaaaaggtaagggggtgaacttatcaagataggggtgtaaatagaaattcaaatctaggcccttctagaacattttgaaagttgggttgcttaaggaggaagcaactgggcggcaagctcctccacgttttt

SEQ ID NO: 46574 - DNA, 400 bp, Glycine max
  Clone ID: LIB3107-078-Q1-K1-H4
gtatacaatgtgaacttcagaagcccccatggaggatccgcaagaagagcctgatccccagaaaccattagtcttgaatccaattcatatcaaagcaccaaagtgttcactgatgactgggagctcaattccccattttctgtcgtctcttcgctttatcaagaacctgaggcaaaattttctgtgcatgatcgtgtgctttcagaccaaattatagaagatgatgatgacgacgacgacgacgatattatgagctcctatgtcattgaactcaactccaacctcagaagggaagagtgtggagaatcagccattgatgaagcaattgcatgggccaaagagaagtttcaatcgcaaagctctgatgaagaatcaagcataagaaacgatggcaaagagc

SEQ ID NO: 46575 - DNA, 396 bp, Glycine max
  unsure (1)..(396): unsure at all n locations
  Clone ID: LIB3107-078-Q1-K1-H7
gggtctcaagccaacatttccaatcaagggatccgtatagttctccaactagctaatacantgaaatatatcaacaaattaaaatcgaaccccaccaatccaaagctatcataccctagcatgttcacgagctttctttcgattggtttgtgcagctgctaattattaaaatgacgagaacgaggataaagataaagaaaatcgacaacataacggcgaggcaggtaacattttctaagaggaggcgagggctattcaagaaagctgaagagctttctgtgctatgcgatgctgacgttgatctcattgatttctcatctaccgagaagctctttgattatagcagctccaggtacgtgtacggacgacgactggtatattataacacaccactct

SEQ ID NO: 46576 - DNA, 394 bp, Glycine max
  Clone ID: LIB3107-079-Q1-K1-A1
ggaactccagaacacaaacaaaaactcccgttttctctctctgtttttccatggccatctgatcaaacttttcttgattctctctctcagtttttgctattctgagtgatgggtatgccctgccgctgttcccacacctcccacatcactgaaatcatcatcaccagcttcttccgccacaagtcttaaattacaacaatttccctcaattattcatcaaccaaccaccttaatagccttttccaatggttccttaaagatccaacttggtcggagtaaacatggcggctagtggaagatccttttccaacatcactagcttccttcgcaaccaacaaccctcttcccaacctctcgattcttctctcttcctctctgctccttcaatttttgt

SEQ ID NO: 46577 - DNA, 377 bp, Glycine max
  Clone ID: LIB3107-079-Q1-K1-A2
aatagcgaccaatttggctatgacttcgaacccgacgccaacgttagcgaccacgaactcgacatttccaagttgggttcaccttcgcccctcgtccactccctccaaaaacgtgggatcatcagccttttccccattcagagagctgtgttggtgcctgcactagaaggtaaagatatcattgctcgtgcaaagacagggactggcaagactttagcattcggaattccaattcttaaaggtctcactaatgatgatgaacaaagtcctcacaggcggtctgggaggcttcctaaagcgttggtccttgcacctactagggagttagcaaagcaagttgagaaagagatacaagaatctgcaccttacctcaaaac

SEQ ID NO: 46578 - DNA, 389 bp, Glycine max
  Clone ID: LIB3107-079-Q1-K1-A3
gaaaacaaagggggaaaaattccaagttggggttctcacgatttcgattaaccctttctcccacaaactccgattcttcttgtaaacagcggtgccaggttcgatctttgcgttcgtcatgtttcttgcacgtttcatcgatctgctaacttgacatttgatccgacgcaagctcgttgcttttttttattggaaatcagattttcagatacccttttgtgttcccaattaatggattttgtctggcgattgtataagtgttaatctataagttgatataagatgggggcaatgatgtcgaggatctggctcatgttattccctgcaaaagagtataagattgctgttggtggattggatacgctcggaaaaccactaccctttataaa

SEQ ID NO: 46579 - DNA, 362 bp, Glycine max
  Clone ID: LIB3107-079-Q1-K1-A4
aacatccgagcctttaaaaccattcctgaagagggcgttgaaccaacaaaggactacattaatggcgaacaatttagatcagactctaaaacagttaaccaacaagctttcttttatgctagtgaacgcgaagtccatcacaacgacatatttatattcggcatagataacaccgtactctctaatatcccatactatgaaaaacatggatatggggtggaggaatttaatgaaaccttatatgatgaatgggttaacaagggcgactcaccggcattgccagagactcttaaaaattacaacaagctgttgtctcttggcttcaagattgtattcttgtcaagaagatatcttgacaaaat

SEQ ID NO: 46580 - DNA, 358 bp, Glycine max
  Clone ID: LIB3107-079-Q1-K1-A7
taaggaagaagaaaaagaggccggaaagataagctgccatggatgctcctttaacaacaaccaagagagaaggttttggattcctactcctgcacagatccttgttggacctatgcagttcgcttgctccatatgtagcaagaccttcaatacgtataacaacatgcacatgcatatgtgggggcatggatcagaatttaggaaaggaccatactcactgaaaggatcacaaccagctgcaatgttaacgctaccatgctattgctgtgctcaaggatgcaagaacaacatcaaccatccaaggtctaagccattgaatgacttcagaaccctccaaacacattacaaaagaaagcat

SEQ ID NO: 46581 - DNA, 421 bp, Glycine max
  Clone ID: LIB3107-079-Q1-K1-B1
ggttctagtgtgtgattgtttgttgttgtaactcggtcttcttcttttgttgttctgtgtttgtgtttgttttttctctcacctgaaaatgtcttgctgcggtggtaactgtggttgcggaagctcctgcaagtgcggcaacggctgcggaggctgcaagatgtacccagacttgagctacactgagtcaaccaccaccgagaccttggtcatgggagtggcacctgttaaggctcaatttgagggtgctgaaatgggtgtgcccgctgagaacgatggctgcaaatgtggaccaaactgctcctgcaacccctgcacttgcaagtgaggtgttgggagagcaagcttcaagcagagatagcccttaattaggaataatgataaactattaatgtgtagctaaaaacttatgtattatgtc

SEQ ID NO: 46582 - DNA, 217 bp, Glycine max
  Clone ID: LIB3107-079-Q1-K1-B12
ggatctcgccaagaaaatctggtgctttggccctgagacccttggacccaacatggtggttgatatgtgtaagggagtccagtatttgaatgaaatcaaagattctgtggttgctggattccagtgggcatcaaaagaaggtgctttggccgaagaaaacatgagagccatttgctttgaaatatgtgatgttgttctgcacgctgatgctatccac

SEQ ID NO: 46583 - DNA, 385 bp, Glycine max
  Clone ID: LIB3107-079-Q1-K1-B2
cagaagttgaagaggaagaagaaggtgatgttgtggcttatttagtgccttcttggtcaacattatccattgaagtttttaatagttattggtctgtttgtcaggtagaaggctaacattgaagttgctcatctctctacagctggcaagagttatggtgtagatagaacgacaaacaacctggctgctgctgttgatgctgagttaagtgaattggtgccggaatccacttttttagattctgaacaagttggtgacagtgcatcaaacaaccagactgatgctgtgaatgctgaatcaagtgaattggttccagaatccacttgtttagagtctgaacaagttagttatagtgcaacaaacaaccagactgatgctgtggatg

SEQ ID NO: 46584 - DNA, 314 bp, Glycine max
  Clone ID: LIB3107-079-Q1-K1-B3
gattgtatatcatgtacaatttcaaactctctctgggtgtctctctctctctagacttagattttgtgaatggctgaagtgtaacacggacaagtcatttgcgtccacaccgactatgagtggaagctccacctccagaacgcaaaacacttcaaaaaactgattgaggtgcattttactgctctctgccgtggtccatgccaccttatcgccccacatcttgcagacactgcaaaaaaatctcctcaatagatcttcctcaaagtggatctctatgaactgaggcctgatgctgaggaatatctcattgaggc

SEQ ID NO: 46585 - DNA, 406 bp, Glycine max
  unsure (1)..(406): unsure at all n locations
  Clone ID: LIB3107-079-Q1-K1-B4
atcaattaaattatttttttaaaaaatttttatgaattaggtacgaatcttatatataaaaatgaaaggaggattaaaattcattgatattgaaagggataacaaaaaatgcggtgaaacgggtcgatgcatgattaaagttgaaatatgtgcctgacttgaatttggcagtgcatagaatatgtagtcaactagtcaatgatctatagtcatatgtaataccaatttactaactgctatttttgaccactttcatgttttttttttctccttatgtcgntgacttatgtgcgatgcattatttattatataaatatagtgtcatctagaattgcatgcataaccatgacggagtgtggtcactgtttgggattagtttaagaaaatgtaattaaaatgtcatttt

SEQ ID NO: 46586 - DNA, 344 bp, Glycine max
  Clone ID: LIB3107-079-Q1-K1-B6
ggggggaacaataatcgaaatcgtgttttcctatgatacaagggagcgacgaggtgcacggaattggatccctgagcgcaacaataagaaaatccccaaaaggaaccctaggtggcggaaattcaagttgcatagttatagcaagagtaattattctaaaaaaagactcaataatcgtcatcactcaaacatcgatttataaagaaagaaatgaaaacacttaaaaaggagattgaaatagatccttcctagcacaagaaagaaaacaccaagtttatatccgagggattgattaaccgacttatcttcaaaggtgaaatctcaattgcgattctttaagcgtt

SEQ ID NO: 46587 - DNA, 391 bp, Glycine max
  Clone ID: LIB3107-079-Q1-K1-B7
ggagaaggaaaaactattgtctctggcgctgggggtttttcccgctaatcttcaggaaccgctcaatcagtatatggataagaagatagatggagacaccttgaagtcttacacgttgcattggccgcctcaaagatggtaggagtatgaacctattctgagctactgtcgcgaaaatggaattcatcttgttgcttgtggtacaccactgaagatcttaagaactgtccaagcagaaagaattcgtgggcttacaaaggatgaacgtaaactatatgcacctccagctggttcaggcttcatatctggctttacttctatctcacgcagatcttctgttgatagtactcaaaatctgactattccttttggtgcaagctcatacctttct

SEQ ID NO: 46588 - DNA, 392 bp, Glycine max
  Clone ID: LIB3107-079-Q1-K1-B8
gaagaccaagactcaagaggggggtgttggtgcccatttcttcagtcctgcacatgttatgccgcttctggaaattgtacgtaccaagcagacctctgcccaagtgatagttgacgtgttagatatttcaaagaagataaagaaaactccagtggtggttggaaactgcacaggatttgctgttaataggatgttcttcccatatacccaagcaggtctcttgcttgttgaacgcggtgcagatgtttatcaaattgatagagtaataaccaaatttggaatgcccatggggcctttcagattgatggacctccgtgggtttggtgtggcaattgctactggcatgcaatttattcagaattttcctgagcgaacatataaatcaatgctta

SEQ ID NO: 46589 - DNA, 192 bp, Glycine max
  Clone ID: LIB3107-079-Q1-K1-C10
tgggtcaatatcgcattatgcatgcttgtttcccaaatgctattcctaatcatcaagaagcaatgtctcgctcgttttacaaattcactaatcagtaccattttgctctacttgattgtttgtcactttgggacttcacctttctttatataacgaaaaaaaaagtaaaggctaaatggtgaaattttggtt

SEQ ID NO: 46590 - DNA, 347 bp, Glycine max
  Clone ID: LIB3107-079-Q1-K1-C12
atcaataaaaagctttaccaaagtaagtaacgtgcattttaatttaatttaatttctcttgggttaacctcttttcacacgtagcttgtgattaaagtgagcagtggtgatatatattttgaggttattttattttaaacatttcatcgataacttttatttatttttacttttttctttcaatcaaatcatatcctttatcatacttatatttctttctcattaaatatatactagcatttgggtgtcaaaatatatatatattttttcctgatggagaataactcgaacttacttgcagagaggaattatcttgtcctcaatgtcacgagtccataagggaccac

SEQ ID NO: 46591 - DNA, 394 bp, Glycine max
  Clone ID: LIB3107-079-Q1-K1-C2
ccatttacgttgttaatgtgtgtagaaatctaggttaaagcctacttttatgctcttatatatgaaaatcataagaatattacgtgtttttaaattctaaatggtacttggtatcaagatggtggagatgaaagttatgatgagctacaaagcgtgtgagaagaaggtaaatgaggttaagggataagtatggaagtgagggtgaaaatggtgatgtttatgttaataatttttatgtaatgtgggacataattaaaaatttgaaagtacatccaaggactaaaatgacatatgacagtatgtgattaaattcagtaatcaaaatgacatcaaatagttaactttaaggactaagttaaaaatgatatatatgttgtaacatccaagtcttgat

SEQ ID NO: 46592 - DNA, 377 bp, Glycine max
  Clone ID: LIB3107-079-Q1-K1-C3
ggcggcacaaagcattcactgtgtcggaaaaagaggaagagaaaaaagatgagcgacggaggaaaacgacaaggtggaagagcgttgccgccgccgccaagaggccctccgcctcctcccccctctcgccctcgcctcgaacccgtcgatcgcgaaaagacatgtccgttactgctgcgagtgttcactaagattgggagtcaccattccatggaagactttgccgtcagaggcaaagagcccaaagacgaggttcagatttacacctggaaggacgctactctccgagaactcaccgatcttgtcaaagaagttgctccggctgcaaggagaagaaacgccaaactctccttcgcctttgtattccccgacaaaaa

SEQ ID NO: 46593 - DNA, 382 bp, Glycine max
  Clone ID: LIB3107-079-Q1-K1-C5
gggcggcagtttggccgaccatgccgtccgagagggcgcgtggctccagggaggagtcaaggccaaggccgcgaatatgggagtgcgcgcccacgcgctcaatgcgggtcaggtcgcggctctcagagagtttcagctccgccatgatagaaacggcgaagatggtgcgagggagaaagaggctttcggggtttgtttagggttttgatgaaggcttggacttcggagtgcgcttgtgcgacacttaagttactgcttcagcatgtaactatatcaatgccgggatcgctagactgcaaaattagatgtatagtaattatgtatgtttaattataatcttacaaaacttagtctaagaaaactaaaattaatataacatata

SEQ ID NO: 46594 - DNA, 141 bp, Glycine max
  Clone ID: LIB3107-079-Q1-K1-C6
gatttttacagcctcaagtgactcaagaggggggcatgactcaagaagatggcacaagagatcaaagatttaataaagattctctggagaaagttagttatgtttctaaaactggagttctggatgacaaaaaaaaaataa

SEQ ID NO: 46595 - DNA, 236 bp, Glycine max
  Clone ID: LIB3107-079-Q1-K1-C7
aactctcttctacctgggggttatttacttaactttgtctctcttatctgatctcacaacaatatactgtaacaacacgcgaatatgcctgtcttcttgtaatatttccttcacctctcaaaacccattgtgagaaccctaaattctacagagaggttccatttggcccgatgcgattctaccaccacattatgcaatacattaaaattgtactttacactttcttgaacatagac

SEQ ID NO: 46596 - DNA, 414 bp, Glycine max
  Clone ID: LIB3107-079-Q1-K1-C8
gcatgatgtctcaatggtggctggaggtggcatggcttatattggagagaaaggagttaacttatcaagtggacagagagctcatcttgctttggcaaggtgctagcttcatgttctcttttcaatttgtgtagccaatcccattgacaataactttgtagttcacatttcatgatatatatgtatgtgaagaatgtatatatttcaaatcctactacatttattttcatgataagaaaaggtaggcaattcttatataaaaaaaattattatatatctcctttattattattgtaagttgtaaataaacatgttgtacatatacatatgtaatcctttattatatttataactttttaattatatttaaataaatttttaatttaatttgtatatatttataacgttttaatt

SEQ ID NO: 46597 - DNA, 395 bp, Glycine max
  Clone ID: LIB3107-079-Q1-K1-C9
gatctctcaattcaattggatcttttgcattctagctctctggtgtctgatttcagggttgatcttctcttcactgggttcaagaagcttgtgatgatgcttgcagcatatgccttgaggatttttgcaaaagtgatcctgccactgtcactaattgcaagcatgagttccacctgcagtgcattcttgaatggtgtcagagaagctcccaatgtcctatgtgttggcaacctatcagcttgagggatactacaagtcaagaactgcttgaggcagtagagctggaaaggagcttgaaggataccccatctagaaatgctgcgatttttcatcatccagcacttggtgattttgaattgcagcatttacccatggctatgaatgaagctgatatt

SEQ ID NO: 46598 - DNA, 326 bp, Glycine max
  Clone ID: LIB3107-079-Q1-K1-D1
gatagcttcatcatacaaagcattgaattcaaagggcgggagttcattccttgtggtcagctttcttcctcaaaaccaaacatgtcgaacacatgcggcaactgcgactgctctgacaagactagctgtaccaatggaaacagctatggtgttattgtagagactgagaagagttacatctatactgttgtcatggatgttccagcagctgagcatgatgggaagagcaagtgtggcactaactgcacttgcaccgactgcacctgtggccattaaggaatatgtatgaaaatgtaaatgccatgtgttttggcaatacaaatatt

SEQ ID NO: 46599 - DNA, 375 bp, Glycine max
  Clone ID: LIB3107-079-Q1-K1-D10
gatgtttcaagggataattaagggtgtagaagagtgattttattggacagtggggcttcccataatttcatttcacaaaagctagttcaccacatggattggccaattgaacagacccaaaaaatgaaagtcaagttagggaatggggttcaaatagaagcacaggggaggtgtagggagctagagatgtacattggcagtcacaaattaaggccaaatcttcaactgtttgaattaagaagaattgatgtggtgttaggcatggaatggttgaaaacattgggagataccattattaattggaaataacatacactgagtttttgggaaaaaaggaagatgggttactcttggcaataaaggagggtgcaaaaa

SEQ ID NO: 46600 - DNA, 81 bp, Glycine max
  Clone ID: LIB3107-079-Q1-K1-D11
aggactatctaaaaatgaagaattattcatgaagtacgtggtggatacgtgttccttctgttctataaatgtgtggatgtc

SEQ ID NO: 46601 - DNA, 318 bp, Glycine max
  Clone ID: LIB3107-079-Q1-K1-D12
gacccccatctcgcgttggtgcggagcatccttcgcttcaatctctctctctttgcgctttctgcaaaccgaacatttcatctccaaagggatcaacaggtcgaaggaaaaatggggctgacattcacgaatcttttcaacccgcttttcccgaaaaaagaaatgccaattctgatggttggtcttgatgcttcctgtaaaaccactattctctacaagcttaagctcggaaaagatcgtactacaattcctaccattgggttcaatgttgagactgcggaatacaagaacattagcctcaactgttgggatgttggt

SEQ ID NO: 46602 - DNA, 406 bp, Glycine max
  unsure (1)..(406): unsure at all n locations
  Clone ID: LIB3107-079-Q1-K1-D2
agggtggagcacattacggtggataggggcaagcttgccaagatcatggcagacttcgaggcctggttgaaggagttagagtccaagctgaaggagttcgagcagcgggcgactagggagagagaggtcaggcagcaacttgaagaagagttgctgatctacaagaatgaggttttggagcagcatgagaaaggctttaaaaaggttgtcaagcaggccggattcttccaaaaggaccttgacttgggtctttttgaccctttcaattgtttttggaaggttattatgactgaatttgattgtcaatgtttttcaaaagacctagtcaattacccatgcatttagatttgtcgtgctcatctttatacatgttctaaaatcacttaataatatggntattagtttt

SEQ ID NO: 46603 - DNA, 350 bp, Glycine max
  Clone ID: LIB3107-079-Q1-K1-D3
gaagtgcttatatctcttattagtactattgtatgtagaattggtttggggagaaggtatgaagaggagggatctgaaggtagcagattccataagttgttcaatgagtgtgaagctatgttgggtaacttctttgtttcagattatattcctttcatgggttggattgataaactcaggggactggatgcacgtcttgaacgcaatttcaaggagatggataagttctaccaagaagtcattgatgaacacgtgaattctaagaaaaagactccagaggaagaggatttagttgatgtcttacttcaactgaaagagaacaacacgtttcccatagatctcaccaatga

SEQ ID NO: 46604 - DNA, 412 bp, Glycine max
  Clone ID: LIB3107-079-Q1-K1-D4
ggttctagtgtgtgattgtttgttggtgtaactggttcttcttcttttgttgttctgtgtttgtgtttgttttttctctcacctgaaaatgtcttgctgcggtggtaactgtggttgcggaagctcctgcaagtgcggcaacggctgcggaggctgcaagatgtacccagacttgagctacactgagtcaaccaccaccgagaccttggtcatgggagtggcacctgttaaggctcaatttgagggtgctgaaatgggtgtgcccgctgagaacgatggctgcaaatgtggaccaaactgctcctgcaacccctgcacttgcaagtgaggtgttgggagagcaagcttcaagcagagattgcccttaattaggaataatgataaactattaatgtgtagcttaaaacttatg

SEQ ID NO: 46605 - DNA, 404 bp, Glycine max
  Clone ID: LIB3107-079-Q1-K1-D5
tttactgtcgttttaacaaaggtttttatttattaatttttcaactatacattttttataattctaagatatcacgcatagtttagttaatattataattttttataacttttcataatttataaaaaaaaataaaagttattttgtagaaaattatatataatttactgaaatagtaattttttatttcaacataattctaggagtaattttggttccaagcaatgctattatatcctcaacattaaaccaaatccttagttccaaacaatgcttatacagttgggataagatagtgtataacaaatatgctgaatataacgtggccaaaaatatatccagaaagattagtaatcatttttacgataaaccccaaaacataacaaaaacatgataaagcacgg

SEQ ID NO: 46606 - DNA, 412 bp, Glycine max
  Clone ID: LIB3107-079-Q1-K1-D6
ttattgcttgtctctttgtttccttgtttgtgagggggcatacagggaattggaaaagaggattggtgtcatcctttgaagaatttgagtcaagaagcaaggggaaaaccaccttaaggactattgaactaagaagcactccaaattgagtgaatcaccaaagagagaacaaccaccaaaattgagtacctttttgtaattttttaattggcaatttacttactttcattgctttcaaattttgtaacaaaaaggcctttcattggaagtaagttgggagcctccaataggtcaccctacttctatttgtgtgtaataattttaggcaatttccccttaggattgtgagtgttttgctgggaaccataaatgtggtcattcaaacactcttaggattcacctagtttacatt

SEQ ID NO: 46607 - DNA, 90 bp, Glycine max
  Clone ID: LIB3107-079-Q1-K1-D7
gagacctcaggtcaggcggggctaccctctgagtttaagcatatcaataaccggacgaatatagggcaaaataattatactcaaaatgcg

SEQ ID NO: 46608 - DNA, 392 bp, Glycine max
  Clone ID: LIB3107-079-Q1-K1-D9
gacttgtggtagttgagtgacacagaaattaagaggaagctacataggggtgggcttttctcaccttccttctctcccttcagacaagggacgaaaaatcagagagagagagagagagagagagagaaattccaaaaccatgtcgtcccacagtcatctaagtttcgcctttggggttctaggtaacatcgcctccttcgtgtgctttctggcaccactaccgacattttatagagtttgtaagaagaaatcaaccgaagggttccaatcaattccatatgtggctgcactcttcagtgcaatgctttggatcttttatgcctatgtgaagacccgagaaatgcttctttataccatcaatgcattcggttgcgtgattgaaaccaattacc

SEQ ID NO: 46609 - DNA, 369 bp, Glycine max
  Clone ID: LIB3107-079-Q1-K1-E1
gacatcacaagaagcacaatttctctctgggtttttgtgtccaaaatggctcctagttctactcacaatactgggttctatgtgcttatgctagttgggatagtgattagcactatggttgctacctgtgctggtagcttctaccaagactttgatctaacatggggtggtgaccgtgctaagatattcaatggtggccagcttctatctctttcccttgacaaagtctctggctctggcttcaaatcaaagaaagaatacctatttgggaggattgatatgcaactcaagctcgttgctggcaactctgctggcactgtcactgcttactacttgtcatcccaagggcccacacatgatgagattgat

SEQ ID NO: 46610 - DNA, 264 bp, Glycine max
  Clone ID: LIB3107-079-Q1-K1-E11
atgataaaggaggacaggttgtgagattttactgtagatgttacggtcactgatgaagatgatgcttgttcttactgtcaaaccagctcctccgtcgtgccaagctttcaagccaccgcgaaagactttgtagtcgctgcgtttgtgaacgacgagcgagcgtttagatctaggttttttcaagtgggcgttcttgatgttttttttccttcctttagatcttatctaattattgttcattattgtattttcccctttcggtct

SEQ ID NO: 46611 - DNA, 441 bp, Glycine max
  Clone ID: LIB3107-079-Q1-K1-E12
gattcatcttcaactcatcaattaatattctccagacacatcaaactagacatacactacctagcttgttcttaaattccacacaaacacaacaaaaactattagcatcatctactttctagcttattgttcaagagttgtgatcaagaatgagttcaacaagccgtgcttggacttggaccgtggcggcaagtgttggagtggtggaggccttgaaggaccaaggtatatgcaggtggaacagtgtgatgagatcagcacaacaacatgctaaacataatatgaagtctttgtctcagaccaagaagctttcttctcaatcatctgttatggcttcagccaaattgaaagatgagaaagctaagaaagcagaggagtccttgagaacccgtatgtacttgagttgctggggtcccaacttaatacagatgcatggatttt

SEQ ID NO: 46612 - DNA, 361 bp, Glycine max
  Clone ID: LIB3107-079-Q1-K1-E2
taatgtgacttgagaagtacagcatttattaggggagaactgaattagagctgccgctatgagtgcgacaaaatgtctaatgagaggaatggaagtgatcgacacatgagctgccctaagtgttccactatgtggagcaactctaggacaaattttcaacgtgcttgcagagcccattgataatttatgtcctgtagatactcgcacaacatctcccattcatagatctgcgcctgcctttatacaattatgatacaaaattagccatttctgaaacacgaataaaagtagtagatcttttagctccttatcctcctgcaggaaaaataagacttttcggtggagctggagagggtaaaac

SEQ ID NO: 46613 - DNA, 405 bp, Glycine max
  Clone ID: LIB3107-079-Q1-K1-E3
gagactcggtgagagttacgccatggacgattcgtggcaactcctccaagcagcttctgattttgttcactacccagggcctcacagcgatgattcctccagggactttctcaatcgtttccctctcccagtcatcatcaatgcattacagactcagttagatgtgcctggcctagaaaatactcttgttgcatgccttgaaaggttattcaatacgaagttgggtgcttctctgatcccacagtatatgccttttgttcaagttggtctgcaggcagattctcaagcagtcagatccttagcttgcaaaacagttacatcccttctggagaatctagacaatgatcacaaagttgctgctagtgcttgtctaattaaagacttcaacatatatcctcttttgct

SEQ ID NO: 46614 - DNA, 239 bp, Glycine max
  Clone ID: LIB3107-079-Q1-K1-E4
gatactcaattcattttcttcttctgcttcaccggtctcttctcttctctcatagggttagggtttttttctcttcattgctctctctgtcggtttatttccatggctcaacaagatgctcaaaatggtgggtcggagaatgcccctgctgccgtgtcctttgtcgctttgaagccgcaactccttatcgaagctcccaaagcgaaccacgccgttctgttctacaaggccccgtttgc

SEQ ID NO: 46615 - DNA, 230 bp, Glycine max
  Clone ID: LIB3107-079-Q1-K1-E6
tactacaaaaaaaacgacagagatctttttcacaacctatccatacatttactaggctgctttttctccattatacaaccaacatctccaacttaacttctcaacatagacatatctcacatacccattttaacattactcaacattccactgggggaacacccattcttctttacacacttaaatttactgtaagcacttgctttctactactccgataccaaaagcca

SEQ ID NO: 46616 - DNA, 403 bp, Glycine max
  Clone ID: LIB3107-079-Q1-K1-E7
ggcacaagtgagtttgttgatcgagataactgtggacattgtgatgaaaatgaaggtccttgttttcttcgttgctacaattttggtagcatggcaatgccatgcgtacgatatgttccctctccgaatgaacactggctattgtgcccgtactccggaggtgaaatgcgcaagttggaggcttgctgtggaagcacacaacatctttggctttgagaccattcctgaagagtgcgttgaagcaacaaaggaatacatccatggcgaacaatatagatcagactccaaaacagttaaccaacaagcttacttttatgccacagacctcgaagtccattccaaggacacatttgcgttcagtatagatggcaccgtactcttttatattccatacttacaaaaa

SEQ ID NO: 46617 - DNA, 330 bp, Glycine max
  Clone ID: LIB3107-079-Q1-K1-E9
gaagttttgtggtgtggtttagtgtcaaatggcggcgaggagaagctcttttcctctgatgaaatacttgagagtgcgcgtcgacgctcttccccgcaacactcccttaaccctcgctcccaactttttgattcgccgcttctgtgaagaggttaggggttgttttctcgacaagtctgaggtcacagatcgcgtcatttcctgcgtcaaaaacttccagaaagttgatccttcaaaggttaaccctaatgctcacttccagaatgaccttggattggatagtttagattcggtagaaattgtgatggctcttgaaggaagagttgggtt

SEQ ID NO: 46618 - DNA, 438 bp, Glycine max
  Clone ID: LIB3107-079-Q1-K1-F10
gactaaacaaataaatgtaacggcggccacggggaggcttgaacttagaacctttgctgaccctcgtggagtgatccggtggacgcaataactgcaggcagctctgacttcagtgcaagcaagcatcaaaacattgctttaaaagcatcaattcagcgtttctgcaagttccaattttccaactatccacagaaacggtcgtttgaaaaaaagctgttaattcgggagcgatatggaggtcgaactcaaagagctgcacgccgatcttcaatctctgagccaatcgcttcccgatccatctcaccatgatttgctccgcaagattcaattgcgtgttggggaccttgcgaagcttgcagaggcagcacctgttcgacgctctaaagttgaggatatgagtgctgagggtgtagatagcaatccttatagtcggcttat

SEQ ID NO: 46619 - DNA, 353 bp, Glycine max
  Clone ID: LIB3107-079-Q1-K1-F11
gtggtcttctacgagctgatatgctacaaggcaacaacaaaccaagaatgccaaggctattaatcgatggaccttatggagctccagcacaggactacaaaaattatgatgtaatccttctggtgggactaggaattggtgccacccctttgataagcatactcaaagacgtgctaaacaacatcaagcaacataaagatgtagaagaaggagaggtggaaaaggacaagagaaaaccttttgccactaaacgagcttatttctactggggtaccccggagggaaggtcctttggatgggttaaaagggggatgaatggagggggaaaaaatggcaagggaaggagtattgga

SEQ ID NO: 46620 - DNA, 439 bp, Glycine max
  Clone ID: LIB3107-079-Q1-K1-F12
ctagcactcagtctcagccaaaagggtgtcaagaggctctgtcatctcggagcctggaactgatttcagctgaaatggttaccattttagtgcatggccttgtgtagcatcatatcagaatcctcaaggggcacagaacgagcatgatccaaataataccactatttttgttgggaatttggatcctaacgtcacggatgatcatctgagacaagtttttgggcagtatggggagttagttcatgtgaagattccagctggcaagagatgtggatttgtccaatttgcggacaggagctgtgcagaagaggcactgcgggttttgaatggcacacttttaagcggacaaaatgttcggctttcatggggccgaagtccttcaaacaaacaggctcaaccagatgcaaaccagtggaatggtagtggtggtggtggatac

SEQ ID NO: 46621 - DNA, 404 bp, Glycine max
  Clone ID: LIB3107-079-Q1-K1-F2
gacaccaacaccaaaacaaacgcactaagatggcttcctttgtatccttcctagtgctgcttcttgcagcccttatcctcatgcctcaagggcttgctacttactacaaaccaattaagaagccaccagtgtacaagcctccagtgtacaagccaccagtgtacaaaccaccggtttataagccaaaaccaccggtttacaagccgaaaccaccggtttacaagccaccatataagaagccaccatacaagaaaccaccttatggaaagtaccctccagtagaggacaacacccatgcctaaagcaagcaatgaggtctattatctacttaataaataagaggaactgctttgtgttttctagcactgtgatttacaacttcgtagcaatgcatattcttgact

SEQ ID NO: 46622 - DNA, 425 bp, Glycine max
  Clone ID: LIB3107-079-Q1-K1-F4
gactcttcaaattaaaccagcaaaatcttatcttagctgccccatcacaacaaccacgatactatttctcatactctattaggcaaaaacaccaccaaatgggagaggttagttttagtttcatcatcatgtatattcgtcattcattcattcctttttcagtagtatattcagattcttgcaattccctttaacacttatcatcacgcgtttctaattaaaactcgtgtcgtttatggcaggaaaaggagcagcctaagaatgacaccgagaaaaagcccgaggaggtagcccccaagaaagacgacggacccatccctgtcgtttacaaactcgacttgcattgcgagggatgcgtcaagaagatcaaacgcacctgtcgccacttcgaaagtaaatttaaatcaaatcataataattaatca

SEQ ID NO: 46623 - DNA, 387 bp, Glycine max
  Clone ID: LIB3107-079-Q1-K1-F6
catgccaaatatagaggggagagaactggtgcggatattgcttgcagcaggagctgatccatctgctcaagattcccagaatgggaggacagctttgcatacagcagctatgactaatgacgtggacttggttaaggttattttaggtgctggggttgatgtgaacattcgcaatgtgcacaacagtatacctcttcacttggccttagctaggggtgcaaaggcatgtgttggactgcttcttgatgctggagcagattataattcgaaggatgatgatggtgacaatgcttttcatatagcagcagagacagcaaaaatgattcgtgaaaatcttgactggcttattgttatgctaatgaagcctgatgctgacattgaagttag

SEQ ID NO: 46624 - DNA, 396 bp, Glycine max
  Clone ID: LIB3107-079-Q1-K1-F7
gaatcctcaaccagtaacctgggggtttctctctcttctgctctcactctctcacttgggggttgaagatgagaatttgtggagcagcaatcagcagcagctacaccaccacgtccaattcgcttttagtgtttgcttcctcttccctctccagtcctgccaaaaccaagttcctgccctcactttctagattttctgtcaagcgtctctgcttcctttcccaaactcgtccgcacatttccgtgaacaagccctccatgaacctgttgaacagactcgggtttggcagcgcaagagcaccagagaacatggattcatccattcctcagggtccagatgatgacataccaacaccaggccagcagtttgccgagtttggtgctggctgcttttggg

SEQ ID NO: 46625 - DNA, 412 bp, Glycine max
  Clone ID: LIB3107-079-Q1-K1-F8
ttattgcttgtctctttgtttccttgtttgtgagtgggcatacatggaattggaaaagaggattggtgtcatcctttgaagaatttgagtcaagaagcaaggggaaaaccaccttaaggactattgaactaagaagcactccaaattgagtgaatcaccaaagagagaacaaccaccaaaattgagtacctttttgtaattttttaattggcaatttacttactttcattgctttcaaattttgtaacaaaatggcctttcattggaagtaagttgggagcctccaataggtcaccctacttctatttgtgtgtaataattttaagcaatttccccttatgattgtgagtgttttgttgggaaccataaatgtggtcattcaaacactcttatgattcacctagcttacatt

SEQ ID NO: 46626 - DNA, 273 bp, Glycine max
  unsure (1)..(273): unsure at all n locations
  Clone ID: LIB3107-079-Q1-K1-F9
gaacacaactccactcttagctgccattggtttttggggttccatttctcttcctttctaagcttttttcgattacccatttggagattctgtcctaatggctcttgctccttccaaagtttcctccttttccggattttctcccaaacccagtgttggggatgctctgaaaaacccaacttgctctgtttctctgagctttgcgaatgtgaaacttggaagcagaaaccttatggtttgtgcctcaactgtgcctctctcangggtgatttt

SEQ ID NO: 46627 - DNA, 276 bp, Glycine max
  Clone ID: LIB3107-079-Q1-K1-G10
gagattgcttgccatttctgattcccactccgaggtctttcttttatgtggtgaccactgaactctacttgatagatcatacccacatggatgctaccaatctcaccttgcatcaagaatatcactcatctaacttttatctgaaaagattgtgcgcgcacatacactatctgctcatgctacacatgtgaaatctgtttgttcaacgcccttaccctgccacatcatgaccagtacatttactgatgatgctactctcaaactcttccaaagtta

SEQ ID NO: 46628 - DNA, 310 bp, Glycine max
  Clone ID: LIB3107-079-Q1-K1-G11
gaaggtcacggcgagacgagccgtttctaattaagaataggtgtcaagtggaagtgcagtgatgtatgcagctgaggcatcctaacagaccagtagaattcacacttggaaaaatatgactagctttgtttacaatttagctagaagcaactgctataagatatgaagagggaagaagaatcaatttcaaagaaatagaaaattctcatatttcaggtatcaagatattgagtttctccaccttctagaagtctttcttgttttgtcaagtgaatctggaatcttaggagaatcattctgattttccact

SEQ ID NO: 46629 - DNA, 332 bp, Glycine max
  Clone ID: LIB3107-079-Q1-K1-G12
gggcgttggttggggttctaacgtctaagattgttttgttagagttaaacacgacaaactcaaatacgtgtgcattacaactcctaacccctcatcctcttcttctctctaatacatacccctccgtttttggttggattctcggctttttaaattccgtttctggtttttcccatttccaaagtagtctgttatcatcgtcatccctttataggacagacaaagctgattcacttaggagcctcaaaagctatgtctacaacttctcgtgctctttccactcccttggaaaacaagtttatgaaacccccattattcttttcaactttcac

SEQ ID NO: 46630 - DNA, 395 bp, Glycine max
  Clone ID: LIB3107-079-Q1-K1-G2
gccatattttagctcttcaagaagaaattgaggagctggaacgtgagaatcgtctccacagccaacaggaggcaatgttaaaggatgagcttcgcagtatggaaagatcaaagaaaagggaaggtgttgatatgacatatttgaaaaatgttatcttaaagctgcttgagactggtgaagttgaggtattgctaccagttattggaatgctgcttcagtttagtccagaagagatacagaagtgtcaacaggcatatcacaactccacagatgttccaccaccaaatcctgcaagcgatacttcaggatctggcctatcgcttttctcaagattcacattttcttaatggcataaatgggagtgctggcgaattttgttgttgctgttagaatgt

SEQ ID NO: 46631 - DNA, 410 bp, Glycine max
  Clone ID: LIB3107-079-Q1-K1-G3
ggctataggagtagtcttcaatcttcttcatctggatctgtactagctataccgttccttctgccacaaattaactggaaaggatggtgctgcccaagttctctccgttctcacggcttctcctttcttcccttgtgattctcttaataagctatccagttaaatgtgacgatgatgaggaagacaatctttatcagggtatcaacaagtatcgagcatcgttaaacttgaaagctctaacaaggaatgacaatgcagattgccttgctgaaaaaatagctgaccaattcaagaaacaaccctgcacaaataccacaggtgctaacactgtacctggcacagagcctcagttttctaactatccagaccttttatctaagtgtgacttggctatttccaacacaagggat

SEQ ID NO: 46632 - DNA, 233 bp, Glycine max
  Clone ID: LIB3107-079-Q1-K1-G5
gaccgaatcgacttaggtttccccgccgccgactacttcttcatcggacggagattctccgtcggatccgactaatccgacggatgacactctcactcgcacgctgtgattgacgacagtgtcctgaggttctgctctcattcctacaaatacttcaaccaaaactactactttgcgagcatccctctctgctgggacgcgctttaatttggtgacaacatcaataactacta

SEQ ID NO: 46633 - DNA, 324 bp, Glycine max
  Clone ID: LIB3107-079-Q1-K1-G6
gccatattttagctcttcaagaagaaattgaggagcgggagcgtgagaatcgtctccacagccaacaggaggcaatgttaaaggatgagcttcgcagtatggaaagatcaaagaaaagggaaggtgttgatatgacatatttgaaaaatgttatcttaaagctgcttgagactggtgaagttgaggtattgctaccagttattggaatgctgcttcagtttagtccagaagagatacagaagtgtcaacaggcatatcacaactccacagatgttccaccaccaaatcctgcaagcgatacttcaagatctggcctatcgcttt

SEQ ID NO: 46634 - DNA, 276 bp, Glycine max
  Clone ID: LIB3107-079-Q1-K1-G9
gtttccagtaaataatgttgatgagaaaaaaaatgcaaattggaacctacacaatattcatcactaaatgtttcattctttatcatgattttttcaggaaatgatcgttgctcaaagaaaagcaaaaacataagttgtgagaacctttgttgaagaatttctttcagaagctcattaaaatcagcttcacatgttcaacccataatcaacaaaaattaactattttgtaatattcaaactgaatgaaaaacattatcaatcaaatttaattaaata

SEQ ID NO: 46635 - DNA, 226 bp, Glycine max
  Clone ID: LIB3107-079-Q1-K1-H11
ggatctagagtaaatgttaatgttgtagtctaacgataacctagtgaaaatttcatatacattcagattcaacatcctctcctaaccgcttgagtcaccctttcacatacaaattatctccaattaataatatatcgtttgaatgagcctcacgaaaactgtcatgttcacaaaatctgcgtgtgtagcaaatctctttgctttcaccatacataatgagtttgtc

SEQ ID NO: 46636 - DNA, 373 bp, Glycine max
  unsure (1)..(373): unsure at all n locations
  Clone ID: LIB3107-079-Q1-K1-H3
gttccttgaatctttggtcgtttatttaaatagtttaatatattttgtaaaattttcattttattatttgttccttcctcccttcagtgtggggatcaagagtgttgtggatgagaatgaaagaaaatcatcgggtggtcatcatggtgctgcttgtcctgcgtgtgagatggctgttgtttggatgcagaaccagctgagccgaaatcagacacaagatcagatactaagttacatcaaccagctttgcgataaaatgcctagcccgatgggagaatcagctgttgactgtgggaatatctcttcattacctgtagtgtcctttactattggtggaagaactnttgagcttagcccagaggagtacatactc

SEQ ID NO: 46637 - DNA, 273 bp, Glycine max
  Clone ID: LIB3107-079-Q1-K1-H4
accacactcaaaagaacaaccaaagggagaccgggagtcttttttgctaccttctaacagaaaaatatactttcaagaatcaccattaccttatgggcgccttgcttccttcaacgggagcatcacaacatgcgtagatcaacataaaggaactatatgccaccaaccatgatggcgcccattctactgcctgtgatattgctatgaagctgatgcaggagcagatgagcactggtcaaactcttgatctcatcctgattttcgtcaacaacc

SEQ ID NO: 46638 - DNA, 360 bp, Glycine max
  Clone ID: LIB3107-079-Q1-K1-H6
atccattgaagttgctgttgttgatatctgtgggtcccgcattgcagcctggaacagtgaccagcttcctatctatgaacctggccttgatggtgttgtgaagcaatgccgtggcaagaacctcttcttcagcactgatgttgaaaagcatgtctttgaggctgacatagtgtttgtctctgtcaacaccccaaccaaaactcagggtcttggagctggtaaagcagcagatttgacatattgggagagcgcagctcgcatgattgctgatgtttcgaagtctgacaagatcgttgtagagaaatccacagtcccggttaaaacagctgaagcaatagagaagattctgacccacaatag

SEQ ID NO: 46639 - DNA, 400 bp, Glycine max
  Clone ID: LIB3107-079-Q1-K1-H7
ggcatagtggaaaaagaagaagttgctatataaggtggttaaagatctaatgttgggtgatgaagggaaagggattcaccaaagaattggaaagcttaaggatgctgctgctgatgctttgaaagaacatgggtcctctacaagagcactttcccaatttggcactgaattggagaactgaatttcaagatggccattcaagtaaattgattggttttcttaaatataagtagaataaaaagctaggaagcatcatcaaaagaaaaatattggttgaacttgctaagggtaatattttagttatgcacgaataagttggatgaataaaaatacagtatgatggtagaaagaattttaaaagttaactatcaatacacctattgatattcttgctaaaagc

SEQ ID NO: 46640 - DNA, 303 bp, Glycine max
  Clone ID: LIB3107-079-Q1-K1-H8
acaacaatactttgctgcaggggtgagtcaagcacagcctcctccactaaagaaaaatagaaaccttcctggcaacccagacccggaagctgaagttgacgccttgactccaaagactctctaggcaactaataggttcatttgtgagatctgcaacaagggatttcaaagagaccagaatctccaacttcacacaagagggcacaatttaccatggaagctgaagcagagatcaagcaacgagattataaggaagaatgtgtatgtgtgcccacaagccagatgcgtgcaccactacccttc

SEQ ID NO: 46641 - DNA, 411 bp, Glycine max
  Clone ID: LIB3107-079-Q1-K1-H9
gaaaatacacatgctgcaaattgctcacccaatcaccaggcatgggagaggttgacgcagcattcatccaagacccaccacacaggccaaagctctccaccatccaagccgaaggaattcccataattgatctctctccaataaccaaccacagagtttcagacccttctgctattgaaggcttagtgaaggagataggtagtgcatgcaacgagtggggtttcttccaagtaacaaaccatggagtgcccctcactctaaggcaaaacattgagaaaagcctaaaattgttctttgcacagagtgcggaggaaaagaaaaaggttagcaaaaatgagaagctttcaacgggttattatgacacaaaacacaccaaaaacgttagggactggaaaagtgtctttgattttc

SEQ ID NO: 46642 - DNA, 364 bp, Glycine max
  Clone ID: LIB3107-080-Q1-K1-A10
ggagctttgttctcttttgggttagtgagagaaagttctctctgcttctctctctaagactcaaaaccctattgcgtgctttgcaatcgaccccgattatggccaacagtaacctccctcgaagaatcatcaaggaaacgcagcgtttgctcagtgagccagcacctggaattagtgcgtccccttcggaagacaatatgcggtatttcaatgtgatgatccttggcccaactcagtcgcctttatgaagggggagttttcaagttggaattatttttgccagaagaatatccaatggctgctccaaaggttaggtttctgacaaaatatatcatccaaacattgatacgcttggcaggatatg

SEQ ID NO: 46643 - DNA, 372 bp, Glycine max
  Clone ID: LIB3107-080-Q1-K1-A2
gataccaaaaacacattctctctctctctctctctgtaaatactaaaaaagaaaagaagaaaaacaaataaacagtgatggaaattgaggcaagcaggccggtggtggcaaagaaggtatggaacatggtacgcgtgttgttcttcatgctgagaaagggcatagccaagagcaaaataatggtggagttccatctcatgctcaaacgtggcaaacttgcacttaacaacctcatcctcaaccatcactactacaacatgcagacctccttcttcacatgccgatcccaccaccacagcaccttcatctccccaagcgactacgagttcagctgcagcaacagccctgccatccccaccaaacgcaccaacc

SEQ ID NO: 46644 - DNA, 394 bp, Glycine max
  Clone ID: LIB3107-080-Q1-K1-A7
tttacggtacacacatcttacttctctctctttgatcatacacttagatgcttacaaataagatcgttctgccagagaagctctgggatgatgttgtggctggccctcaacctgagcgtggccttggcaggctcagaaaactcaccaccctcaaaactatggatgaaggagaaagtagcaagctgcagaagacgttgtcgatgccgtcgacaccaacaaccccgatgactacgacgactccaacgacaccgggatcggcccgtaaagctgacaacgtttggaggagcgtcttccatcctgggagcaactccgacacaaagaccatcggagctcagatgtttgacaaaccacttcccaacactcccactgtctatgactggctgtacagtgggga

SEQ ID NO: 46645 - DNA, 184 bp, Glycine max
  Clone ID: LIB3107-080-Q1-K1-A8
tgtaagataagaaaataaagaagtgaaataaataagtgttctaaattagttgaaatcaggttatgtgtaacctttgaagaagttagaagaggaaacttttaaagaaacctaggtgcataaattgactttaacttatgagagaagtttgattcattggaactccttattttcttcttctataaga

SEQ ID NO: 46646 - DNA, 240 bp, Glycine max
  unsure (1)..(240): unsure at all n locations
  Clone ID: LIB3107-080-Q1-K1-B10
agttctttatttgtttatgtacttagtgatttttatttgattggtcatcttatagatgaattcaggaattgacttgcgttttgacaagcctttttgaaacccaaacatgaattgagtacttaattaggattatctccaggaatagaataatcttggttaagtctcgctaattctcgaccattaatgttaattgcttgtgtcaatatgttcaagggattgagtatcangcaggtagtttgg

SEQ ID NO: 46647 - DNA, 367 bp, Glycine max
  unsure (1)..(367): unsure at all n locations
  Clone ID: LIB3107-080-Q1-K1-B11
tttgggttcaccaaaccaaagtaagagtgagcaacttccaacaccatagtgaaatggcttccaaggctgcacttctcttgtgtttcaatgttctcttcttcaccgtggttagctccacatatgtgccatgcaacccaccccccaaaactccaaaacacccacctgtcccaaagccaccttccccaaagcaagcaagttgccccaaagacactattaagtttggtgtgtgtgctgatgtgttaggtttgatcaacgtgcaacttgggaagccaccaaagaccccatgctgcaacctcattgagggtctcgctgatcttgaagctgcagtgtgcctctgcactgctctcaaagctaatgtgttgngcat

SEQ ID NO: 46648 - DNA, 295 bp, Glycine max
  Clone ID: LIB3107-080-Q1-K1-B12
tgtttgtttctcataaccacaggggaagaacacaaaatgatctatcaacatgcaacctcactcaccacacaccttcatttgcattccaagatatggtccttgaccatgattccgaccgcacctacgagaagagaaaggaaggcgaaagattcacgctagccacatgtgcgaaggccacgtataagaagcaagggagtgtgcgcgacacaactaataggggtggggaccaagatagactagtatcactaatgaacgtggaacatgcaaggccgaagcaaataacgtgctaacatca

SEQ ID NO: 46649 - DNA, 386 bp, Glycine max
  Clone ID: LIB3107-080-Q1-K1-B2
ctctgccataccatgtgctgaagcccttctttgtctattcatcagatgatcttatcatttgagcttccttttgctttggttccactcctcaagtttacaagcagcaaaaccaagatggggacacatgtcaactctaccatggtaaatttttttggtaacatgaaatttgtagttgtgcattgcaaccaaatagtaaattgattacatatttgacaaaaatcagtagagaggtgctgttagaactgtaaacataaaaagatgtgtctatattgagaacctggattccctgcagttcggaatttaacacacccacacagtcagctaattgcaatcatcagatgaagatcaaacgatcatattttatctcaaatcaaatttaaaatatg

SEQ ID NO: 46650 - DNA, 367 bp, Glycine max
  unsure (1)..(367): unsure at all n locations
  Clone ID: LIB3107-080-Q1-K1-B4
aaaaagtttacttatggggacacttatcatacatgaattttctctacccttccatattaaatatatagaaatattgcatattgattgctagtgtgtccaagaataaacatgtcggccaagttcctgaccgtgccgccatttgagtgcgcctggagagaggatttgaaattccgggaggcaggccggggttgcgtcgcctttgaagcattcgcctgcaacgatgtcacactggttttccgggagaatgtgggaagccagggctaccattataaaagagatagcagtcctcactacacaatcatattggggagtcacaggaatncgcgactcagaattgaggtcaatggaaagctgntgtcgatgtggc

SEQ ID NO: 46651 - DNA, 407 bp, Glycine max
  unsure (1)..(407): unsure at all n locations
  Clone ID: LIB3107-080-Q1-K1-B5
gtttacataagggggttctagtgtgtgattgtttgttgttgtaactcgttcttcttcttttgttgttctgtgtttgtgtttgttttttctctcacctgaaaatgtcttgctgcggtggtaactgtggttgcggaagctcctgcaagtgcggcaacggctgcggaggctgcaagatgtacccagacttgagctacactgagtcaaccaccaccgagaccttggtcatgggagtggcacctgttaaagctcaatttgagggtgctgaaatgggtgtgcccgctgagaacgatggctgcaaatgtggaccaaactgctcctgcaacccctgcacttgcaagtgangtgttgggagagcaagcttcaagcagagatagccctttattaggaataatgataaactattaatg

SEQ ID NO: 46652 - DNA, 356 bp, Glycine max
  Clone ID: LIB3107-080-Q1-K1-B6
gtaacataaacaagagtgttaacgttaaatctcacagtcccagccagagcagcaccgtggagtccgccaccccggagcgtgaagccacgcgccgctccacctccgccgcaatcgaccgtttcccgttcctacccatccagcagcaaatcctcatgacccaccccgtcgcagcacccatgcgcccggttttctttctcgaccgggcccacttcatgacccagtctttcccgctccggttcgaacccggtccggtccagagcgactccgactcctcctccgtcgtcgtcgattgtcaagccaaaagagagctcaatctcgatcttaacttggctccgcctaatgaatattaacccttt

SEQ ID NO: 46653 - DNA, 262 bp, Glycine max
  unsure (1)..(262): unsure at all n locations
  Clone ID: LIB3107-080-Q1-K1-B7
tatggtgtgacangacacagaaggaggaacatggactcactggggtgatgggcaatgttctggcccggcgcgcctccctgtttggggccggagggcatgcgcctgcgcggcgtctgcactggtaaccgtctcttgcttcttacctgccgggaattggcatctcttggcttgtgatgtcaacgcgtttgaaaggatacatcccttttctactgtgacaaggcgacggagactgacctgggctctcattgatatgatgcatcct

SEQ ID NO: 46654 - DNA, 349 bp, Glycine max
  Clone ID: LIB3107-080-Q1-K1-B8
gacggtttgcaattagcactgatttttttcacactgccggtgcaacactggcttcagagaagaaactttcgaacccaatgagggggataaaagtgctaaagctcgatctgaatatctctgatgaagagagtggagatcgcctaaccagagccgccaaggagccggaacatacttgatggccaaacgcacacagatttccaaagcaagggacactgatcgatcctttgggattagaagaaatgaaaagattgcatgctatgtcactgacagaggtgacatggcgatgcaactttataagaatgactcgaatgctaaagaatatgaacttatcagaaagaattacaatgat

SEQ ID NO: 46655 - DNA, 364 bp, Glycine max
  Clone ID: LIB3107-080-Q1-K1-C1
aaggacacggaggggacaacccaacgcaacccaacgggcactctctcttttctctcttaacacaaaaaccctatcgttcttcgcggtttcgccgattctcgccatgccgaaagccaaatccgacgccaaaaccgccgatagccggttgaagcgcaagggcgctggtgctggaaggaagcaatcgaagaaagctgctaaagatcctaacaagccaaagagacctccaagcgctttcttcgttttcatgtccgagttcagagagcagtttaagaaggagcatcctaacaacaaatccgtcgctgttgtcggtaaagctggtggtgacaaatggaaatcgctgtctgatgctgaaaaggcccccttc

SEQ ID NO: 46656 - DNA, 195 bp, Glycine max
  Clone ID: LIB3107-080-Q1-K1-C11
tctgatagaaaggatagtcgcaaccgacctaccagcaagcgcacgttgaaatcccagaagaccaagaccaagcagaggagggtggaaactgatgtcaaaatcccttctggcaagactgagaatgatgaaaatattgatgagtctttcacgcacaatgttgggctttctaacaaggtagatagtatgaaaccccct

SEQ ID NO: 46657 - DNA, 228 bp, Glycine max
  Clone ID: LIB3107-080-Q1-K1-C12
tttggttcttccaaaggaacgaaaaactggtctctttcctagaggtagaagagttgcaaatatgagactacgacatgtggagccggatgaagaagccctacaaaaggaactgttgggtactctacctgagtttcagatccaaaaggcagaaggctggaactgactgaggggactacagcagatcctgtgtctgggaactgaaaaggatgtgctagataatataactgg

SEQ ID NO: 46658 - DNA, 396 bp, Glycine max
  unsure (1)..(396): unsure at all n locations
  Clone ID: LIB3107-080-Q1-K1-C2
ggtggcgccgtttacgatctcactctgcactctctccttctcatcctcttctcttcgcttctctgttcgtgccacttcttctcgagcaatggcatctcatattgttggttatccacgcatgggacccaagagagaacttaagtttgctttggaatctttttgggatggaaagagtagtgctgatgatctgcagaaggttgctgctgaccttangtcagccatctggaagcagatggctgatgctggaataaagtatattcctagcaacactttctcatactatgatcaagtactggacacaacagccatgcttggggcagttccatctagatataattggaatggtggggagattgngttngatgtttacttctcgatggcnagagggaattcatc

SEQ ID NO: 46659 - DNA, 337 bp, Glycine max
  unsure (1)..(337): unsure at all n locations
  Clone ID: LIB3107-080-Q1-K1-C4
tttttnnnnnnngnccaattctattaattctttctaaaaataaaaaatattctaataactaataataaaaaggaaaataaagattcattagaatattataaaataacaaataatagaacaaaacaagattctttagttatatatgtaaaaaaaaaaaatggtttatttataagaatacatattccattctatatcaaaacaaaatataaaaatttggaatagattctatgaaatctcaaaaaatcccgctattcaattattcattaaacatatgaatattagtgcatattattttatcgattagattaaatagattatctatatatatagatagata

SEQ ID NO: 46660 - DNA, 264 bp, Glycine max
  Clone ID: LIB3107-080-Q1-K1-C6
gacacacacacattccacttagttaaacatggagaaatcaggctctaacagtcctaaatctgctttgaagtttgtgaagaccacatctcagtctgcagctcaatggagcagtactaattcaagaggaatgacaaaagatgtactcaaagacaagttctatgacaagactaaagcttcacgaaggtctccacccaaagaaagttacatggcttcaagaaggtctccacccaaagaaagtaacatggctccaccaaggtctccacc

SEQ ID NO: 46661 - DNA, 351 bp, Glycine max
  Clone ID: LIB3107-080-Q1-K1-C7
ccagacgacaacagacgggttcttgcttcaccaacacatccatggattgctatactggtaaccttcttctacaatcatctcatactagaattggtactttgattaatagcccgttttttacattgcagtggaatcatacctcaagattcgaaggaaggaatagatcaatatcatcttgggagatacaattctcacggcactgggcattgctatataaaactccaactgtgtgagttctaaaatacaagaaaatgccctaggtgatttttgaggcttaagctaaatgtataaccgatgaactaaatatgacgccacttatttttggcaatataagattaacgaatcattatt

SEQ ID NO: 46662 - DNA, 381 bp, Glycine max
  unsure (1)..(381): unsure at all n locations
  Clone ID: LIB3107-080-Q1-K1-C9
acacataaggggttctagtgtggattgttgtgtgtaactcgtcttcttcttttgtgtctggtttgtgttgtttttctctacctgaaaatgtcttgctgcggggaactgtggttgcggaagctcctgcaagtgcggaacggctgcggaggctgcaagatgtacccagacttgagctacactgagtcaaccaccaccgaaccttgtcatgggagtncacctgttaaggctcaatttgagggtgctgaaatgggtgtgcccgctgagaacgatggctgcaaatgtggaccaaactgctcctgcacccctgacttgcagtgaggtgttgggagacaagcttaaacagagtagcccttattaggaataatgataaactattatgtg

SEQ ID NO: 46663 - DNA, 383 bp, Glycine max
  Clone ID: LIB3107-080-Q1-K1-D1
cggacgcgtgggctgggaaaaaacgaaagaaggggggtatgaatgggatttccaaaggattaaaaataaaaaaatgaattaaaagacacaacacagaatcggaagaaagacttcttctttcacattcacaattcacaagcaaagcaaagcaggcagcagcagcgtccagtatcttcttcttctgctgcttcctccatggacctctctcaccctcaatccaacctgtccctcggattctcttcctaccacgcctatacgcctcgccgctccgacccgccggtgccgctgcagctcatggaaccgcagacggagaacggcaacaacctagatgtcgaatcggacgacgacgacgacgacaaagaagtcgaggagtttcgcattct

SEQ ID NO: 46664 - DNA, 404 bp, Glycine max
  Clone ID: LIB3107-080-Q1-K1-D10
gagagctcagaatcttcagctctacttcttcttccagaaaacaaagagatattcattcaaaaatcacctatctcatccctctcttgacccctccaacatgaagaacactaacagcaacacaaaactaatccttctccacccatatatccagaaacaaggaagctcaaaccgcttatggcttctagccttcatatccttcttcaccttagttttccttgccacactcatttacacaagagacacaacctcatctaccactaccactacctcttccacccctttatctagtttcaccaacacccttttatcatccactgtaataaacaccctcctccactatgcctcaaaatccaacgacacctttcacatgccccactcagacctcaaaaccatctccgacatgc

SEQ ID NO: 46665 - DNA, 348 bp, Glycine max
  Clone ID: LIB3107-080-Q1-K1-D11
ttatgttttaatagtggatgtagagagagaaagaggcagagagagggttcttttcttcttctcgtccttccttcttcgttgttgctcttgttctagagagagaaagagagagtgaatcttggagagataagcgcctgctccttcggcatttccgtcagacaaagttaacacttccaagaccgacgtagctgctactgctattattaatcaattcaattcaattcaattcgcctcttcaccattccctattgtagtagatgaactctcccaagattttgattagtagcggaatttgaaggtgagagagaatgggagaaaatgaagaagctacgacgactgacatgttgc

SEQ ID NO: 46666 - DNA, 379 bp, Glycine max
  Clone ID: LIB3107-080-Q1-K1-D12
ttttggttatcgcttgagcagacttaacaacagcacagagcgggttactgtctgttcaagctaccatctctctctctctttcttagtgcctccttgccagaagttaaaatggtccaagaaactttcctattcacatctgaatcagtgaacgaggggcaccctgacaagctctgtgaccagatctccgatgctgtgctcgatgcatgcttggagcaggaccctgacagcaaggttgcctgtgaaacctgcaccaagaccaacatggtgatggttttcggagagatcacaaccaaggccaacgtggactatgagaagattgtgcgtgacacatgcacgaacattggttttgtctctgatgatgttggtcttgatgctgaca

SEQ ID NO: 46667 - DNA, 382 bp, Glycine max
  Clone ID: LIB3107-080-Q1-K1-D2
ggtgcttgcatccatctttcatcatccaacatcacacacaactacaagaaagaacttccttataaccaaaaccaacaacaactatggcaagttatcagaagcactacgatgatcagggtcgcaaggtcgacgagtatggcaatgttgagaggcaaactgacgaatatggcaacccggttcatgccactagtgtcacttatgtagccaccaaaagtgttggtggctacaatgatgacgctaataagcaacatgatattactggtgtctatcccgagaaagacaccggtagacatcattttggtcgtggttacgacggtgacactaacaagcaacatgatgctactggtgtttatcccggaatagacattggtagagatcatgg

SEQ ID NO: 46668 - DNA, 383 bp, Glycine max
  Clone ID: LIB3107-080-Q1-K1-D6
ttttagtttttgaacccaagactaaagctagcttgcgttcaaaccttacactcttctatcctttaccaatcaagggaataatatttcttagagatattccgaaaccatggctcacgccaatcctatgataaccgtgttggaatgctaagtaaccttgtctccttatgatgctttctagcaccaccaccaacattctatcgagacggtcagaagaaaaccacgcgtggtttacaattacttgcttacgtgactgaactcttcacttcaatgctagagaaattttatgcgtacataaagacgggcaaaaaacttctcatcaccattaacgcattcgggtgtttcatagagacaagttaccttgtaatctatatcacttattggcc

SEQ ID NO: 46669 - DNA, 388 bp, Glycine max
  unsure (1)..(388): unsure at all n locations
  Clone ID: LIB3107-080-Q1-K1-D8
attaaccttgcattttgtgcattgtgtggcattgtagggggaattgttggaggcctacttggttctggaggtgggtttgttttaggacctcttcttctagagattggtgtcattcctcaggttgctagtgctacagcaacatttgtgatgatgttttcatcatctttgtcagtggttgaattctaccttctcaagaggttccccattccttatgcattatacctcacctcagtgtctgttttggctgggttctggggacagttctttgtaagaagattgattacatgtcttgggagggcatcaatcattgtattcatcctctcangtgtcatttttgctagcgccctcaccatgggtgtcgttggcattgaaaacagcattcaaatga

SEQ ID NO: 46670 - DNA, 397 bp, Glycine max
  Clone ID: LIB3107-080-Q1-K1-D9
gtatgtgtttaaccttgcattttgtgcattgtgtggcattgcagggggaattgttggaggcctacttggttctggaggtgggtttgttttatgacctcttcttctagagattggtgtcattcctcaagttgctagtgctacaacaacatttgtgatgatgttttcatcatctttgtcagacgatgaattataccttctcaagaggttccccattccttatgcattatacctcacctcactgtctgttttggctgagttctgacgacaattctttgtaagaagattgattacatgtctagagagggcataaatcattgtattcatcctctcaggtgtcatttttgctagcgccctcaccatgcgtgtcgttggcattgataacagcattcatatgata

SEQ ID NO: 46671 - DNA, 380 bp, Glycine max
  Clone ID: LIB3107-080-Q1-K1-E10
tgtgctcgggttaccgtgttttcttttccttcagtttcttccctcgccaaggagaaataaaacttcaagagctcaattttgtaatttgggaaacacataatacaagcgtcatttgactgtatgaccttgagtgggacttttcttttccccaggttctgatatgagaattctgattattcatcacttgcaaggttgacgcagatatagacttgtaaattctgattactcatgaagctatccttttgattactcaggaagctatccttagaatcctaacagaaaagtatttgcaattttttccgctgatttcatcatcatctttatttgctttgagtcaatagaaacaaggtgtctggtccttttatggatcaatgaatgat

SEQ ID NO: 46672 - DNA, 370 bp, Glycine max
  Clone ID: LIB3107-080-Q1-K1-E11
ttgggaaagccatcagaaaaaaagagtcaagcggcgagcaatggcgacatcgctggtgcgatcgggtttttttcgaagcgccctatgaggaagcgctcgtggctcccaagttccgaagcgaaactttgcttcctctggtcatcacgatgatgcatatgagacggacaaatgggagaagattacatatctaggcattgttagttgcactggcttagccgtttataatctatcaaagggccacccacacttgaaagaacctgctgcttacccatatgtgcatatccgcaataaggaattcccctgtggtcccgatggactatttgaaacgaagcaccatgacgagcattagtggtttaatgaaggtatttgt

SEQ ID NO: 46673 - DNA, 387 bp, Glycine max
  Clone ID: LIB3107-080-Q1-K1-E12
tttagatgtctacagaagggatacagaggatgttaatggttaaaagagtgtggaataaagaaaattgtaaacttcctcaaaagagggtatctgctgacctgctctatgactagtactgataaatacttcataatctgagcaagctcgttcacagattctcacaacctataaaagcaaacgaggaagttctaagtccatctataacaccacatagggtcaaacaagtcattaataacagggcataaatccaacttttgctaacctgctggattactttttctctttctattgagaatgcttcactttttttcagctgggccatttgttgctcattaaatacctacatataattaatgtgatagcatcagcattcaactgacttatatc

SEQ ID NO: 46674 - DNA, 372 bp, Glycine max
  Clone ID: LIB3107-080-Q1-K1-E2
cttgtgtaagctttgctaattttttttatattctttattcagttagatagggagaaggaagggtctttgtgacaaacaattcacatggatagcatatatagcattattgggttcccttcaagtggctttcaattcccattgaaggacaattttttccacttaaaatcaacaaaaataacatagcatgaggttccttatttgtttttgcatacttgtatttcataataacattggctaccttggctcctacctgtcacatgaaggcatagatgcacatcactttcaccaataaattacccaacaatgcaaacccttttggaaaactgctctcaagtctattaccaaatatggacaaaactgactagactatgc

SEQ ID NO: 46675 - DNA, 415 bp, Glycine max
  Clone ID: LIB3107-080-Q1-K1-E4
ggcgagaaagacgaacgaaagggtaaccggtttacaattaaataaacctaataatcaaaggtgaattttcaaatgctagctagacagcaataatcactacaacaattgtatgaaattgcaacactaatattgttacttctgacttcatatgtgcgcattagatgacagaggcaagaatttgtcattaaagaattcacagttaacgattctgtgagaaccttacttccctcacctctcaacgcaatcaattcgaattgaagataatagctagtaaactaagcttaaactatattgctgacatcgacattttttttcttttccttggagacaattatgtgttgaaatgagttagaccaaattacattaaaactccaaccttaatttttttcttgatccaattataatcattttttaa

SEQ ID NO: 46676 - DNA, 356 bp, Glycine max
  Clone ID: LIB3107-080-Q1-K1-E6
ggcacataaatacaatacaaaacaaaacagagcaaagagagagtgtgtgaaaagtgaaacaaaaaacagaacaacaatggcgacacttaaggttcctcagcctcttccccccgttgcagatgattgtgagcagctccgaaaagccttctcaggttggggaactaacgaggagctgattgtatcgatcttggctcataggaatgctgctcagaggaagcttatcagagaaacttatgcccagacctatggagaagatctgctcaaggccttggacaaagaactcacgagtgattttgagaggctggttcatctttggacacttgattctgctgaacgtgatgcatttttggcaaacg

SEQ ID NO: 46677 - DNA, 397 bp, Glycine max
  Clone ID: LIB3107-080-Q1-K1-E7
gacgacagatgttacctacactcactctttgactcttcttcgtctcaaatctcttcgttccttcgattcgttccatttcttccaaaatggccaaagacccagttcgcgttctcgtcactggagctgcagggcaaattgggtatgctcttgtccctatgattgctaggggagtgatgttgggtcccgaccagcccgtgatcctccacatgcttgacattcctccggcagcagagtcattgaatggggttaaaatggaattggtggatgctgcattccctcttcttaaaggtgttgttgccacaactgatgtggttgaggcatgcactggggtcaatattgccgtgatggttggtggattcccaagaaaagaaaggatggagaggaaggatgtgatgac

SEQ ID NO: 46678 - DNA, 399 bp, Glycine max
  Clone ID: LIB3107-080-Q1-K1-E8
tttgggttacctcagcagatttttggaaatactcaagagaatcaacattccccacaatctcaggctcatcttcagcaacatctacaacatcaacactcgttcaatagtcagcatcatcatcaccaccagcaacaacaacagcgacagcaacatcaagtggtagataatcaacagatttctagtgcagtctctacaatgtctcagtttgtttcagctcctcaacctcaatcaccacctatgcaagttatctcttccatgtgccaacagcaaaacttttctgattcaaacgggaacactgtgactactattgtttctcccctgcacagtatcttggggtcttttccccaggatgaaacatctcacctcctgaacctttctagaacaagctcttggattcct

SEQ ID NO: 46679 - DNA, 299 bp, Glycine max
  Clone ID: LIB3107-080-Q1-K1-E9
ggaagcccaaagtgcaacgtactttgcaaaaaccctaaaccctctctttctctctccgcgactctgtactcatcaatggcgacgcaatcgttagacgaagaaacaactaagaaagtcatacgacaggtcgagttttatttcggcgacagcaaccttctcaccgatggtttcatgaggaagagtatcactgaaagcgaagatggcacttggcgctgatttgctcgtttaatcgaatgcgaaaacaccttaatttgggtgatgttaagcccgatgaagtggcccaagaaaccgtgaatact

SEQ ID NO: 46680 - DNA, 366 bp, Glycine max
  Clone ID: LIB3107-080-Q1-K1-F10
ttatggtttttccacaaactccacaagtgtcacaagtcataactcgttagagagagtttgtgtgtgtttttgtgtgtcaccttggtgcatacaacacaagatggaggaccaaaatggtagtggtaagttgagccaagggcttcgcaaggtgaagccttaccttgctatattgtcccttcagtttggctactcagggatgtatatcatcactatggtttctttcaagcatggcatgagtcattggatactctcagtgtaccgtcatgtagttgctgctattataatagtcccttttgcacttgtccttgaaagaaaaataagaccaaagatgactcttcccatcttcctgaggatagtggcacttgg

SEQ ID NO: 46681 - DNA, 419 bp, Glycine max
  Clone ID: LIB3107-080-Q1-K1-F11
ttagggtaagtctaagataaaaaaaaggtgcagtgaagtggcggctgtggacattccctagggattttgattggggatggcttcgagcatccaacaagtggaaggggacgagtcagttgtgctgcgcgtgactcattccaatctcaaaaccttcgcctccgacatccgcttctcgcttcacctcaccgtcgaagccgtcaaagacaagctctggaaaaaatgcggcacctctgtcaactcaatgcacctccaactctacgacgacgctcgcaacaaaattgccgatctctctgatcattccaaaccccttgccttctattcccctcttgatgggtttcgtttgcatgttgtggatctggatccatcttccgtcacatctggtgggtggctcgaagatacttcgctggtcgaaaaataca

SEQ ID NO: 46682 - DNA, 375 bp, Glycine max
  Clone ID: LIB3107-080-Q1-K1-F12
aagacgacagaaggggaaggtgtccactgaactgaaatggtgtccttcatgggatcttggaattgaaacgaacgggacgtgtctgtctccgatggcttcctcataccgtgaccgcacgtcggagttccggttattattggagactctgaagaagatcggaagtccggtgcaacccgagaatgctccttcgacctctcatggcgagtcgtattcgagatccgaattcaaccgaaaggcctcgcgtatcgggttggggatccacgagacctcgcagaagatcgcgaggctcacgcagctggcgaggaaatcgtccatgttcaacgatcccgcagtggagattcaagagctgactgttctgatcaagaacgagatcac

SEQ ID NO: 46683 - DNA, 416 bp, Glycine max
  Clone ID: LIB3107-080-Q1-K1-F2
atcccctatctcccacttcacacctcggaacgcaccgttcttatagagagaggcgctttcacatcttcttaggctggggagaggaaatgttcccattttttaggatactccggggaacagatatccagtggagatgacggggtggggcctgtagctcagaggattagagcacgtggctacgaaccgcggtgtcgggggttcgaatccctcctcgcccacaaccggccaaaaaagggaaggatttttccctctgggggtaggaaaatcatgatcgggctagcggacccaaagctatggaacttgtgagtactttgtagaaatggaatggccttaccttactgttttctgtttattaaaaaaaagattcataaatcgtggatattattaaataaatccagtatgtcctaatcttttaa

SEQ ID NO: 46684 - DNA, 257 bp, Glycine max
  Clone ID: LIB3107-080-Q1-K1-F4
gaaaaaaaccacaaagggggatcattcaccatcacacacaactactacaggtatttccttacaatcaaaaccaacaacaactatggcaagttatcaaaagcactacgatgatcagggtcgcaaggttgacgagtatggcaacgttgagaagcaaaccgacgaatacggcaaccctgttcatgctgctagtgtcacctatgtagccaccagaactgctgctggtggttacagtgatgacattaataagcaacatgata

SEQ ID NO: 46685 - DNA, 370 bp, Glycine max
  Clone ID: LIB3107-080-Q1-K1-F6
ctgtattgttttttaagaataaatacaaagcttgaaggaaataggaaaataaaagctaatgtttcaatataaacaaattttaaggtgaaacataaaaggcagaggtagcagtaatgcaagaatccccttcaaacttattaacaaaggatgtcactacatctggaacttgcttggaccaaaaccattcatatgctttcggctgcttatttgatagttttttgctaattaaactctccagaggagcagatagctgaagtaaactagatcaataaaatatttaacaattttaaggcaactagggagtagaataaaatatcaaaactaaataaagaaagaaagaaataactagtaatgaaataaccatgaaaca

SEQ ID NO: 46686 - DNA, 319 bp, Glycine max
  Clone ID: LIB3107-080-Q1-K1-F7
tttgggtgtgaagattttgataacaggatggtgaaccactttgttcaagagttcaagagaaagaacacgatggacattagtggaaaccccagagcacttataaggttgaggactgcttgtgagagggccaagagaacactttcatcgactgctcagaccaccattgaaattgattctctatacgagggaattgatttctactccactgttactcgtgccagatttgatgagctcaacatggatctcttcaggaaatgtatggagccggtggagaaatgtttgaaggatgctaagatggacaaaagacgtgttgatgatg

SEQ ID NO: 46687 - DNA, 142 bp, Glycine max
  unsure (1)..(142): unsure at all n locations
  Clone ID: LIB3107-080-Q1-K1-F8
ggttctagtgtatgtgattgttgtgactcgttcttcttcgtcgntatcttcttcttttgttgattgtgtgtttgttttttctctcacctgaaaatgtcttgctgcggtggtaactgtggttgcggaaacgcctgcaagtgcg

SEQ ID NO: 46688 - DNA, 124 bp, Glycine max
  Clone ID: LIB3107-080-Q1-K1-F9
tggagagacgaataggtttgcgttgatcagcactgatcttttacacactgccgtgcacactggcttcagagaagaactatcgaacccatgagggggataaaagtgcaaactcgaactgaatatc

SEQ ID NO: 46689 - DNA, 351 bp, Glycine max
  Clone ID: LIB3107-080-Q1-K1-G10
cgagaagacgacagacgggggttggttctgtgtccaaaactacaacctatggcaaaccctttcttggtcgactctgcttatttctccaacttcacacacacacacacacagaaaaaaaaaaacatggcacaggatagaacaattggagtggctctggattactccaaaagcagcaagaatgctctgaaatgggcacttgagaacttatccgataaaggggacaccatttatgtcattcacattaactccaactctctagacgaggcccgcaacaagctatgggcagaatctggttctcctgttattcctttggtagagttcagaaagcctgagattatgaaaaagtatgat

SEQ ID NO: 46690 - DNA, 384 bp, Glycine max
  Clone ID: LIB3107-080-Q1-K1-G11
tttggtttgtcattgggagtcaaaatggttatctctggagaaggatctgatgaaatctttggagggtatctatatttccacaaggcacccaacaaagaagagtttcaccaagaaacgtgccgcaagattaaagcactccacaaatatgatttgcttgcgagccaataaatcgacctttgcctgggtctagaagccagagtaccatttttggacaaagagtttatcagagttcaatgccattgatcctgagtgtaaaatgataaaaaaggaagagggcgaattgagaaatggcactgagggggcctttgatgataaaacaccttatctgcaaagccattttatatggcagaaagacaattccatgtggagtggctatggtggatg

SEQ ID NO: 46691 - DNA, 404 bp, Glycine max
  Clone ID: LIB3107-080-Q1-K1-G12
tttaagtttttcatcgggagacaaaacggggggctcgggagatggatctgatgaaatctttggagggtatctatatttccacaaggcacccaacaaagaagagtttcaccaagaaacgtgccgcaagattaaagcactccacaaatatgattgcttgcgagccaataaatcgacctttgcctggggtctagaagccagagtaccatttttggacaaagagtttatcagagttgcaatgaacattgatcctgagtgtaaaatgataaaaaaggaagaagggcgaattgagaaatgggcactgaggagggccttttgatgatgaagaacattcttatctgccaaagcacattttatataagccgaaaagaacaattcagtgatggagttggctatggttggattga

SEQ ID NO: 46692 - DNA, 394 bp, Glycine max
  unsure (1)..(394): unsure at all n locations
  Clone ID: LIB3107-080-Q1-K1-G2
ggttgcgagtagtgtttccatcacactgtgatgattaagcaattggcttgtttagtttagtgaggaggaacaacctattggcaaatctatgtatgcagattcaaaccgcgtcatcttcccatgtatatatttattactatgtctctaagtttaatttcatagttcctgctgggacctcaacgcactcactcaccacacccccactttattcttctctctacgcgttcgaatatgttcttcttcactttccacttttcaactccctccactcctttccttcctagacacaaaactcaaaacaaataaacaaaagggtcttctcttcttgtttgaatttgacttaaagccacttacttgncttctgtattctctatttttggtttcaacatgatca

SEQ ID NO: 46693 - DNA, 331 bp, Glycine max
  Clone ID: LIB3107-080-Q1-K1-G6
tttgggcactattgatgaaaagaagttgtttcatcaacgggagctcttgctttgactgaaatccccaagagactcatagtcattggggcaggctacattgggctggaaatgggctcagtatggggccgacttggctccgagataacagttgttgagtttgcatcggagattgttccaaccatggatgcggaggtccggaagcagtttcagcgttctcttgagaagcaaggcatgaaattcaagctgaagactaacgtggttggagttgatacttctggggatggtgtgaagctaactcttgaaccagcagctggtggtgatcagactacac

SEQ ID NO: 46694 - DNA, 361 bp, Glycine max
  Clone ID: LIB3107-080-Q1-K1-G7
ttatggtgttgcgaatgatgaccgagaacccagagaaatatcaacacatgcttcagaatcttgttgttaaggctcagcagagtaacaatgaaaaactgttagagaacccgtatcttcaaatgtgtggcatacttcaactggcaaatgatctggggattgacctgtgatcttcaaggcatgactttctgggaggctatattatttggggtaggacatctgcattggttagaggatttgtggctattgattctgaagaaaaacttccattattcgattgactcagattgaaatgcatatccaggacatactcttagttgaaatgttcattcctgcaacagaattgcgattgattgtcaacatt

SEQ ID NO: 46695 - DNA, 396 bp, Glycine max
  Clone ID: LIB3107-080-Q1-K1-G9
ttgggttgctaagatggtctctggtaatcgagtaccaaaggggtgtaatcgattaccaggcttgaaaacgaggtcaggaagttatgagggcttctggtaatcgattaccaagggggtgtaatcgattaccaggcttagaaatgaaggcaacaggttgtggaggcctctggtaatcgattaccaatctgtgtaatcgattacacagaggaatgggtcactggtaatcgattaccaggtatgtgtaatcgattacacagtgcctttttcaggttatcatgtcctgaagctgtgtgattcaagtttggcctctggtaatcgattaccaaggttgtgtaatcgattaccagggaggaaaagccttgagatacccctttttacttgcatgtagtgggtatg

SEQ ID NO: 46696 - DNA, 348 bp, Glycine max
  unsure (1)..(348): unsure at all n locations
  Clone ID: LIB3107-080-Q1-K1-H1
gactcatagttagtagtaccaacaggtccatataccctctctttaacttccttcactcacttaattgggccatcccaattcaaatcccatcagaatgatgaaatttcaagcatgttcaaaccccatctcaaacttgttctatgcgtgttgtgtccttcttttaccaccaaccatggccttangagattgcacctgtgacacaaaagaggccaacaaagagtgactcaattgaagtcctccactacaaaattggctcaattgcttctgtgcttgttgctggggcacttggggtgagcctcccattgttaagcaagagaatcccaacacttaaccccaagaatgacatat

SEQ ID NO: 46697 - DNA, 345 bp, Glycine max
  Clone ID: LIB3107-080-Q1-K1-H2
gataccaaaaacaaaacacaagccaagtgaaagtgagaaaaaataaaaatcaaagagcataatgtcagggatcattcacaagattggggagacccttcatgtgggagggcacaagaaggaggaggagcataagggtgagcaccatgctggagaatacaaaggggagcaccatggtgaacacagtagtgagtacaaaggagagcatcatggtgaacacaaagctggagagtaccatggtgagcacaagccagagcacaaagaggggttcctagacaaagtcaaggacaagatccatggtgagggcggcgccgccgagggcgagaagaagaagaaggagaagaagaa

SEQ ID NO: 46698 - DNA, 387 bp, Glycine max
  unsure (1)..(387): unsure at all n locations
  Clone ID: LIB3107-080-Q1-K1-H7
ggttgagttgacgattgaagaaggaaggagagagagtgtgtgtgtgtgtgattcacattctgatcttgaattgaattcatctccaactccatggctccggcgatgaggatcgttttcggtcttctcacttttgtcaccgtcggaatgattataggcgctctctctcaattggccatcatacgaagattggaagactcttacggcaccgattctttgccatttagaagattgcgtggactcgacactgatcgtcaccttcaattgccaagaggtgttcctttttggaataatgacaaggaagcagaaatcttacgccttggatatgtcaaacctgaagtgcttaactggtctccacgaattattgtacttcataacttnctgagcatg

SEQ ID NO: 46699 - DNA, 370 bp, Glycine max
  Clone ID: LIB3107-080-Q1-K1-H8
cccacgcgtccggctatgaagtttacagttggggatagtagagtaaggaaaatgggagggtctcgactatccaagccaaagtctggctccgcttacggcagcacaaactgtttcatgctgtatgcgagagcactctcaattacctggggagacactccagaatattggatatgggtacaacagaaagaaacaagtggcacgatagtagagttggctaagttgaaaagggtttgctggctagaagtgcatggaaaatttgacacaagaaagctttcactaggaattctatatcaagtgtcatttctaattatgttggaagaatcatctaaagggtgggaagttccaataaatgttagattggtcctttctg

SEQ ID NO: 46700 - DNA, 347 bp, Glycine max
  Clone ID: LIB3107-080-Q1-K1-H9
ttatggtatcgggaaatggctgatgtgcttccaaagagaaggatactgatgcggtatgaaaagtcgcatggggaccaggaaacggcggcgtacacgaccacacccgaccataacattcagtcaacggcgcaaagcatgattcaggcccttcgcgccagcgaacaccttcgtcacatgggtgcagttctacatatccccctatgctcgcatctaatcgacactccgggagctcacacggtatttcttgaagaagaggatcatcggcgtgagggaagagtcgcgagttcgaaaacgagatatcgagaactttcaggtgggagagaggatgaaggttataaaggaaatgc

SEQ ID NO: 46701 - DNA, 120 bp, Glycine max
  Clone ID: LIB3107-081-Q1-K1-A1
aggtgtgaggacaagctaaggggtctgtatgcgagactgctcgtgaaggacacaacatttttttggtagatgaagctgcaatgatcaaagtggattatccaaataacaacgttttgacct

SEQ ID NO: 46702 - DNA, 331 bp, Glycine max
  Clone ID: LIB3107-081-Q1-K1-A2
tgtcaccaacaccaaaacaaacccactaagatggcttcctttgtatccttcctagtgctgcttcttgcagcccttatcctcatgcctcaagggcttgctacttactacaaaccaattaagaagccaccagtgtacaagcctccagtgtacaagccaccagtgtacaaaccaccggtttataagccaaaaccaccggtttacaagccgaaaccaccggtttacaagccaccatataagaagccaccatacaagaaaccaccttatggaaagtaccctccaatagaagacaacacccatgcctaaagcaagcaatgaggtctattatctactt

SEQ ID NO: 46703 - DNA, 320 bp, Glycine max
  Clone ID: LIB3107-081-Q1-K1-A8
tttgttctagtgtgtgattgtttgttgttgtaactcgttcttcttcttttgttgttctgtgtttgtgtttgttttttctctcacctgaaaatgtcttgctgcggtggtaactgtggttgcggaagctcctgcaagtgcggcaacggctgcggaggctgcaagatgtacccagacttgagctacactgagtcaaccaccaccgagaccttggtcatgggagtggcacctgttaaggctcaatttgagggtgctgaaatgggtgtgcccgctgagaacgatggctgcaaatgtggaccaaactgctcctgcaacccctgcac

SEQ ID NO: 46704 - DNA, 270 bp, Glycine max
  Clone ID: LIB3107-081-Q1-K1-A9
gaaaatcaaatgagttctgaacgagagaatagatgttttacaaccaaccacaagtttcatattggatacagtactcatactggcaattatggtcaagaattattctatcaactgccatctacttcagagataccatctgacacatttttttaaagtacaataagaaatagcaattcctttttttttaatttcatcataatgtaaataggaaagactaataccaaattcattaaaaaattcaagagaagcaaaaaaatgcaagggccgttg

SEQ ID NO: 46705 - DNA, 314 bp, Glycine max
  Clone ID: LIB3107-081-Q1-K1-B1
gtagcaatcttcaacccagacaggccgcgcgggagtgagtcatccaccatcatagacacgttgttcgtttcctttcctttctgcaatttctaccctaacacgccttcatttctgggcacatttttttacacgttccacatgcgttacgacacacatcttgtttgcttgctatcagacaacgcttatggattcaaccaaggacttagctctctgtacctctggctagacctagcctctctcatgacccaacattccagcgactgatttctgacttttcagcaacttggtttgattcactttaatggattgagtca

SEQ ID NO: 46706 - DNA, 176 bp, Glycine max
  Clone ID: LIB3107-081-Q1-K1-B2
tgcgcattcctctcccaagacagaacaagcgggagacatgcatgaaccatcgaacacaccacggtctgttccatacctttttacatcattctaccgaaacacaccatcattattggacacactatagtacacgtagaacatgccgtaacacacacatttcgattgaatgctttcag

SEQ ID NO: 46707 - DNA, 194 bp, Glycine max
  Clone ID: LIB3107-081-Q1-K1-B3
aggtgatcatccatgaccccacacatgccacgcgagcttgtttcagcttccagcggccacacccattacgataccaatactaaaacaaatttttacactaacacacctttatagatgggcacaatttacaacatgtcccaaatgcctcttttactcatatatagtcttatctcttttatacaactctttcgtat

SEQ ID NO: 46708 - DNA, 326 bp, Glycine max
  Clone ID: LIB3107-082-Q1-K1-A1
gccaaattgtttttgccacacagaagcatgtcagagttgaaaaaacgtcatgctgaggatttcttagcttcagacaaaacaaaagcgccgagatcttattctgctcaatcacctgcccaatctgggatgggtgcatatccaaatgcacagaaccagtggtctaattatggagttcaacctcaaacttggcctccagttacacaagcacaagggcaacaatggactgctggctacacccaacaagcttcctacggggcttatgctggatatgggggcaactatgcgaattctcaattgcctacatcagttccacaaagtactgcata

SEQ ID NO: 46709 - DNA, 107 bp, Glycine max
  Clone ID: LIB3107-082-Q1-K1-A10
tttgtgttcatatgcaatgatagcagtcccgtatttatgaaaggcccatcaactattgcacatttgtactctgatggcaaggcaagcggttctcctctttgggttct

SEQ ID NO: 46710 - DNA, 393 bp, Glycine max
  Clone ID: LIB3107-082-Q1-K1-A11
tttacttcagaaggggacatgagaagtgttttttgtccattgtagattgtcacatatagagaaacagaattagaagaagggtagctgggaaactttggcaattgaaacctttttttccattgagtgatagagagcatggagaacatgaagatgaacaacgatgaaaggtttgcacaaaagggtgtcccagttcatagccaggttatgaagatcaagcaagagtcagagaaaattgttgattggtcccctggcaagccagagataagatctgttcttcgcgaaataagccggcaaatttcccgatcgccgttggggatctccggccaaccgatttcagttggtgagtcataggttcagtatatggttaaggggttttggattagtgtgttgatg

SEQ ID NO: 46711 - DNA, 403 bp, Glycine max
  Clone ID: LIB3107-082-Q1-K1-A12
cgagaagacgacagcagggtttttctcttcaagctcttatccatggcttcctatggtggtgagcttcttctagattcatcttctacttgaagtggcatctccattcatctttctccttctccattccactgcaatcagacctcaagaagcaaaggaatccattgatgaagaagatccaaggtgatgcaatcctaccccgcaagggcattggatagaaaactccaagtagattgtgccagagatgcaagagaaggccctagggttcttatgagccttacggtagatttcgagcccatgggctaagtatgagcccacttatctttgtaaatattagattaaggtttcattatttttgggccttgtatttagggctccataatgtatgtagggtaccctagaaata

SEQ ID NO: 46712 - DNA, 382 bp, Glycine max
  unsure (1)..(382): unsure at all n locations
  Clone ID: LIB3107-082-Q1-K1-A3
gaatggtccggtgaagtgttcggattgcggcgacgtgagcggttcgctgcccgcgacgttgtgagaagtccactgaaccttatcatttagaggaaggagaagatggagagaaaaggaagaagaagaagaaggaaaagaaagggctgaaagagaagatcgaggagaaaatagagggtgatcatcatcatcacaaggatgaggacacaagtgtccctgttgagaaagttgaggttgttgaaacagcacatgctgaggaaaagaaggggttcctcgacaagattaaggagaagctaccagggcacaagaagacagaggaggccacagntactactccttcttcaccaccacctggtgcatcattggagcatggtgaaggtgctca

SEQ ID NO: 46713 - DNA, 276 bp, Glycine max
  unsure (1)..(276): unsure at all n locations
  Clone ID: LIB3107-082-Q1-K1-A4
gttgntgttgtaggaaatttaagtgaagagagaatgatgatgaagtctgctatgtgtgcattggtgcttgtggcactggttgtggttgaagtggggcccatggctgaggctgcggtgacttgcaacccaacacagttgactccttgtcttccggcaattaattcaggttctgcaccttcgagtgcttgttgccagaagctgaaggagcaaaagccatgcttctgtggctacctcaaaaaccctagcttgaagcagtatgttaactctcctaatgcc

SEQ ID NO: 46714 - DNA, 289 bp, Glycine max
  Clone ID: LIB3107-082-Q1-K1-A9
gcgagaaaacaccacattgggtcttacttacaaacaaactaccagctgtacttgctcattttgaaagatacaagtgcttcaatacaaacaaaggctgttactcaggaagatgtgaacactttcgggcattgtaggaagcccatttgtgtgcacggtccagatcgcccttaagttgaagggagttgagtacaaatttttggaagaaaactggggccacaagagagattcgctgcttaaatacaaccctggccacaagatagttccagtgtttggtcacaatgagcaaacc

SEQ ID NO: 46715 - DNA, 343 bp, Glycine max
  Clone ID: LIB3107-082-Q1-K1-B1
cggacgcgtgggcgagaagacaacagatgggctttaaacatggcaagccagtggaggtacaaaatccaagtggaaacacgtttcattatcaacagacgccgagagtttcctatcgacagaatattaatactgctatacacttgtcactgaggagagaagaacgtatctggagcgagcaacgttcaaacatgggaactagtatgacggagacacattctctcaaatgaacactgtattggctagcatccagaggggcttctgttcaaaaatatattgcatcaagaatctatgcgaaggaaatgatcttcagggcaccctcaaactctattgatgttagcatgtg

SEQ ID NO: 46716 - DNA, 343 bp, Glycine max
  Clone ID: LIB3107-082-Q1-K1-B10
gcccactcataatctaagaatatcaatcactacgactcctgttggtcgacctatcgagtcacaactcccacccaccctctttgacttcactatcagaagagctcgttggagcggacaactgacaataaaacatgcacacacaacggccgggggtagtagcatcacttctaatttgctgtttcaacacacatcgctatgggaaggaccacttctcttccttgaaaagaaccctagaagacactgcttaccccaagcaggaacatgtactggaagctggattagacaaaatcacagctacaagggcattgaacaagaccttacccgcggtgacagactctgtcta

SEQ ID NO: 46717 - DNA, 319 bp, Glycine max
  Clone ID: LIB3107-082-Q1-K1-B11
ttttgatctccgttctttaccttcctgaacgacaccgagaccagacacggtttggggcacagttaaagtggtagcagtagcattgttaggccatatcttcctttttttttttgcttggattgggggtaaactcacaaatattattactttgatctggggaagcaatggcatggagaggacatctttcgaaaaacataaaagaacctcggtttttgatgtgccaatcattttctggaagctcacctgcaagggctttttgggagaggaattataaggaactaaagacattgaacccaaaattgccaatattaattcgtga

SEQ ID NO: 46718 - DNA, 382 bp, Glycine max
  Clone ID: LIB3107-082-Q1-K1-B12
ggtgacagaacagcagaagggaagaagatggacttactggagttatgggcaattttcggccccggcgtcgccggcgctgtcttcggcgccggatggtggatctggcttgacgcggtcgtctgcagcttggtcaccgttcccttccttcactaccttcccggaattttcgcatcttttgcggctttgatgttcaattgcgttagaaaagaagacatcgattattctccatatgacgaaggcgagtggagactgaagctgtggctcttcattgcatatgttgtatcctttgtttctttagctggatcagctggcctactgatccaagattcacttgataaatctgccccttcagtttggactggagttgcaggtgttttgcagt

SEQ ID NO: 46719 - DNA, 175 bp, Glycine max
  Clone ID: LIB3107-082-Q1-K1-B3
gggggagacaatattagaattttagaggatccttataaaatatcaatataatcatcaggaacacattatgttagattatcaagaagagttttaggaatgtctggatccataatgtctaatcaaacaaatgcagcagaatctgaatcccgggtgatttttgatctatgtactcttc

SEQ ID NO: 46720 - DNA, 371 bp, Glycine max
  Clone ID: LIB3107-082-Q1-K1-B4
gaggtttttagggtttacaccgagcagccacacctcccgcagcagccatggttctcaaaactgaactatgccgattcagtggtgccaagatctacccaggaaagggcatcagatttgttcgtggtgattctcaggttttcctgtttgcaaactcaaaatgtaagaggtatttccacaatcgcctgaagccttcaaagctcacctggactgcaatgtacagaaagcaacacaaaaaggacattgctcaagaagctgtgaggaagaggagacgtgctgccaaaaagccttactctatgtccattgttggtgcgaccttggaagtaatccagaaaaagagagctgagaagccagaagttcgagatgcagctagg

SEQ ID NO: 46721 - DNA, 310 bp, Glycine max
  unsure (1)..(310): unsure at all n locations
  Clone ID: LIB3107-082-Q1-K1-B5
ggtttccttctccggcttgttcagtctttcttggaactttgttactctcacacatgtctcgctccgtgcctttggtttcaaccatttttgtcttgcttctgcttctggtggccactgagatgatggggccaacaatggtggcagaagcaagaacttgtgagtctcagggccaccgtttcaaggggccatgtttgagtgacaccaactgtggctctgtttgccgaaccgaacgtttcactggaggacactgccgtggcttccgtcgcaaatgcttctgcaccaaacattgntaattttaaaaaattaatta

SEQ ID NO: 46722 - DNA, 113 bp, Glycine max
  Clone ID: LIB3107-082-Q1-K1-B6
gggttacttcataatgacatgattggtgggctttatacctgataaactggaaaaaagtcatctatgtattggacctatatgtgacttaccaccataaaaaaatatattggggt

SEQ ID NO: 46723 - DNA, 380 bp, Glycine max
  Clone ID: LIB3107-082-Q1-K1-B7
ctattccctttgtcccacaatcctctatactttttatttttaaaaccaagtatttctagacagaaagtaaaaaattaatcccttagaatattaaaattcattagggtatgaggacattgctacgtgcacctagcaaaattgctggcacacccaacaattgcatgattttcccgtgttgcccttctataaaaggaacacggattgactaatttgaagtgtttttttttcttcaaaaatatattttatgaattaatttaaaattaatggtccaagcaagagttaactttcgtgttattaacacgacactctaaccaattaagcaaataagttaattatgttataaaataaataatgttactatatataacactaaaatttct

SEQ ID NO: 46724 - DNA, 303 bp, Glycine max
  Clone ID: LIB3107-082-Q1-K1-B9
ttagtctgagggggatttcttaatgagtgattagcacaacgtctcagtcccttcgatttcccaaattctgtatcattactcatcaccaccaagaatcgaatcagaatttggaacaatcagtgaattgagttttcatccctctcatctgcacctttctccgttgagtttagcaaaaagaaaaaaaaaaggcaggcacaaaaagcaacacgagcattattacacagtacttgcttgggtgcttcacactatcacagtctctctacttttctgttggctatatattataaaaacaaaagcaccctc

SEQ ID NO: 46725 - DNA, 393 bp, Glycine max
  Clone ID: LIB3107-082-Q1-K1-C10
ttgtgactgacaaacaaacaatttaccagctatacttgttccttttgaaggttagaagtgctacaatacaaacaatggcagctactcaggaagatgtgaagcttttgggtattgtgggaagcccatttgtgtgcagggtccagattgcccttaagttgaagggagttgagtacaaatttttggaagaaaatttgggcaacaagagtgatttgcttctcaaatacaaccctgttcacaagaaggttccagtgtttgttcacaatgagcagcccatagcagagtctcttgtgattgttgaatacattgatgagacatggaagaacaaccccatcttaccttctgatccttaccaaagagccttggctcgtttctggtccaaattcattgatgata

SEQ ID NO: 46726 - DNA, 338 bp, Glycine max
  Clone ID: LIB3107-082-Q1-K1-C11
accacagaggggcaaagtttccatacaaacacactaacgaggatccattcttgggcctgtctgatgccagaagccctactaatcacacgctgcctggcgcttatgtaaatgggtgccgtttaaaagctggtagttgcaccttggggtgcgtcgatcggaccgccttcagtgtgcaccgagcggatcacacattctggcaacaatacgctcctgtcacttaactggccgcttctagcctccggcgctgtcactttgaagaaattagagtgctcaacgctagcctacgctctgcatacattagcatgggatgacaccacatgatattgacactattgagc

SEQ ID NO: 46727 - DNA, 337 bp, Glycine max
  Clone ID: LIB3107-082-Q1-K1-C12
ttctaccttcaagctcttatccatggcttcctatggtggtgagcttcttctagattcatcttctacttgaagtggcatctccattcatctttctccttctccattccactgcaatcagacctcacgaagcaaaggaatccattgatgaagaagatccaaggtgatgcaatcctaccccgcaagggcattggatagaaaactccaagtagattgggccagagatgcaagagaaggccctagggttcttatgaagccttaggtagatttcgagcccatgggctaagtatgagcccacttatcttctgtaatattaaattaaggtttcattatttttggg

SEQ ID NO: 46728 - DNA, 317 bp, Glycine max
  Clone ID: LIB3107-082-Q1-K1-C2
ggtgagagagcgagcgagcgagcagtttcaaagagaggatttgggattgggaaggcgagggattgcgctgcgtctcttcctcttctctttcgattcatccctcattcataatcttccaatccaacaacctcagcctcacactcacacatacacacatctgaacgcgtatcgtccctcccatggcttcaaagcgcatcctcaaggagctcaaggacttgcagaaagacccaccaacttcttgcagcgctggtccagtagctgaggacatgttccattggcaagcaacgattatgggtcctgctgatagtccttatgct

SEQ ID NO: 46729 - DNA, 344 bp, Glycine max
  unsure (1)..(344): unsure at all n locations
  Clone ID: LIB3107-082-Q1-K1-C3
ggaggccaaaaatgcattggaaaattatgcctataacatgaggaacacaatcaaggatgacaagattgcttccaaactgtcttctgatgataagaagaaaattgaagatgcgattgagcaggctatccaacggctagatggaaaccaacttgctgaggctgacgaatttgaggataagatgaaggagttggagagcatttgtaatcccatcatagcaaagatgtaccanggtgctggtggtgatgcgggtggagccatggatgaggatggtcctgcagctggcagtggaagcggtgctggacccaaaattgaggaagtcgattaagcagaagattctcatgggt

SEQ ID NO: 46730 - DNA, 279 bp, Glycine max
  Clone ID: LIB3107-082-Q1-K1-C4
gacgcattttctgttctgttttgttctcattctgtgactctgtgcttagttaacgttaacagtgacttaagatggcggattctgcagatgtcacccacgatgttgtgtccctcctctcttctcctcaaagggactttcttcttcgaaacaacggcgatcaggttaaaattgacagcttgaagggtaagaaacttgttttgtatttttcggcatcctggtgtggtccatgtcaaacatttatcgccactttgtgggatgtgtacaatgaggttgcaaaaa

SEQ ID NO: 46731 - DNA, 110 bp, Glycine max
  Clone ID: LIB3107-082-Q1-K1-C5
tcgccttgaactggacgagaattataggagcttgaaggggtcgctcactttgaacacgcacgtagtcctccttactgctattaatgtatccatatcgttttgtgtccatc

SEQ ID NO: 46732 - DNA, 367 bp, Glycine max
  Clone ID: LIB3107-082-Q1-K1-C6
gacagcagtaaagtgagttaaaagaaccgataatagttgttccttcactctccgctctctctgccactgagccaagaagatggcctcacaggtttgcaaatctgcttccagagccgcgaggtcccttctatcctctcgttttcactctcaaggacgtgcgcttggggctgctgcggctgtttcattgagcagcaaagtgcctcttttttacggaaagaacggttctggaaatggatccgcttcttcatcatcatcatcatcatggatttcaggagctcttgctcttcctgccgcagcttacatgttccaagatcaggaggtgcaggcagctgagatttctgagattatatctcgttttgagcggaaa

SEQ ID NO: 46733 - DNA, 363 bp, Glycine max
  Clone ID: LIB3107-082-Q1-K1-C7
tatgggggtggcaggggagtgacacagaaattaagctagagcgtcataggttcttcttcttttctcaccttccttctctcgcttcagacaaagggacaaaaaatcagtgcgtgagagagagagagagaaattccacatccatgtcccacagacatccaaggttcgcctgtgggattctagggaacattgcctccttcgtgtgctttctggcaccactaccaacattttatagagtgtggaagaagaaatcaaccggacggatacaatcaattccatatgtggctgcactcttcagagcaacgcttcggatcttttaagcctatgtgaagaccggagaaacgcttcttatcaccatcaatgcat

SEQ ID NO: 46734 - DNA, 316 bp, Glycine max
  Clone ID: LIB3107-082-Q1-K1-C8
tgcctactttgttaggtattattgatcttttcccattttgctctatccaaatgagtgaagaatctatttttggtacttcccttgttaagcttgttggaagcagtatgatgaccctattctgatagcagagggatattatgagtccgtgactaaggaggtggaggtgactcttctctggtcgtggtgcaaactcccatccaaactagggatgctcatctcatctgaatattaaagataattataattcatatctaataaagtaatttatctagaatcataagtgaatattataattattacttacttttaaaatatg

SEQ ID NO: 46735 - DNA, 370 bp, Glycine max
  Clone ID: LIB3107-082-Q1-K1-C9
atattgagaaaatttatctatgacttacattagaacaaactaatgaaataaaatatataacaaattacgttgcaggcaagatgtaaatgctttaaactttaaaaaggaataattaaaataaaaaattaaaataatttaaagacggggtactcttatttaataaagaattaatgaatctcacaagaatatttttaatgaattaaaaataaaattaattttataaattataatatttaatgctttaaaaaacatttacttaatatttaattttttaattattgatttttaacaaataccatttatactgaaataacatttatataatagcttttaagatttatttattttaaagctagtgagtttttttaat

SEQ ID NO: 46736 - DNA, 357 bp, Glycine max
  Clone ID: LIB3107-082-Q1-K1-D1
cagaaaattgggagtggtggcattgtctgtgaaaactgtttctgatgatgacaaggctggcagtagtggtgctgctgctgctaattctccttctatggctagacaaaccaagaacagatatgcacctagcaacgctactgtggcaatcaacctcaaattgaagccggcatcaaatctgaaatggcatagagttttgtttaaaattagtggctctgcattggctggaaactgccagaacattgaccccaaggtggcaatgcagattgctagggaagtggcaacaacttgccgccttggggtggaagtggccattgttgttggtggtcgtaacttcttttgtggagatgcatgggtgtc

SEQ ID NO: 46737 - DNA, 375 bp, Glycine max
  Clone ID: LIB3107-082-Q1-K1-D11
tgtggttttagtagtatttatcaggcaagtgggggttggtttgtgtttttttgttatatttgtatgttgttctgtgctgggtccttaatttgtggctgagaattaattattattatcaattatgggtctctcaaatttcccaagtgcatctgaaggggtgctacctgtgcttgtgataaacacggttctctcagtggcagtgttgaagaacatgtttagatccatgctccaagtagtacttggtggcagtgctgctgctaatggttcaaacattgaacatgatgaaagttcatcatcatcatgggaaaggagggtgtcaataactcaatacaagtcattgtgccacaaccacgacttatgaggaacaagtatggc

SEQ ID NO: 46738 - DNA, 334 bp, Glycine max
  Clone ID: LIB3107-082-Q1-K1-D3
ggttggcgcgggtgaggtagaacccttccacggtggtgactgcgcgatgggtgcctacaagtatgtttcagagctatggcgcaagaagcagtctgatgtcatgcgcttcttgcagcgggtgaggtgctgggagtataggcagcaaccttccattgttcgcttgacaaggtcgacccgccctgacaaggctcgtcgcttgggcttcaaggctaagcagggctatgtgatataccgtgttcgtgttaggaggggtggccgaaagaggccagttcccaaaggtattgtttatgggaagcccacaaaccagggtgttacccaactgaaatttcagcgt

SEQ ID NO: 46739 - DNA, 281 bp, Glycine max
  unsure (1)..(281): unsure at all n locations
  Clone ID: LIB3107-082-Q1-K1-D4
gttattgttgtgactcgttcttcttcctcgntatcttcttcttttgtcgtctgcgtgtgtggtttttctctcacctgaaaatgtctcgctgcggtggtaactgtggttgctgacacgccttcaagtaccgcctcggctggcgacgctgcatgatgtacccacactttatctacaccgtgtcaaccaccaccgagaccttggtcatgggagtggcaccaggtaaggctcccttctagagcgctgaaatgggtgttcccgctgagaacgacggctgcaaatgt

SEQ ID NO: 46740 - DNA, 352 bp, Glycine max
  Clone ID: LIB3107-082-Q1-K1-D6
gactcacttcttctcactcggtaaaattgaattagggtttcattttcttcttcttcaccccactgtcactgcgcaaatccagttctccccttaccctctccctcggtcctgatcttttcccgccatttcccgcgtttcttttacccagattttgaatactagccgttggatctgccatttttttcaatttttttcgaccgttgctctcgccggagtgaacgggaaatgtctgcgtccgaagcggagaagaaggtcgaggaggaagagaagaaggaagaggtcaaagggggagaactcctgttctgtggtgccacttgttgggatatcattggtcgtcgtaaaggccccgtcg

SEQ ID NO: 46741 - DNA, 364 bp, Glycine max
  Clone ID: LIB3107-082-Q1-K1-D7
cgacagaagggctagtatcgttacgaaattcgtaagtttccgtaactttacgaaaaaagaatcaccaaaaaaagcagagggggtgtacttagtaaaaatgggggtgcaaatagcacccaggcccacttgggccctccagaatattcctccagaaggctgttgcttctggaggaagcaacctggctcgcctgggcgagctgggcggcaaccacctcccctattttgctataaataggggaggaagtgaagaagaaaagggttcagcgccttaggcacttctctctctttcgaatttgcttggaaaaattgtttccgtgaagaaaatgtaagccgaggcgcttccgaaacgtttccgtaacgtttt

SEQ ID NO: 46742 - DNA, 250 bp, Glycine max
  Clone ID: LIB3107-082-Q1-K1-D8
tgtgcttttaccgggtttctagaaatgcagaacaaggatgtatttgaacgagttaatcaattaaattaatttaatatggttaaaattataaatacgcttacttgttctttctcattagtgacatttgattcattcttatcttttaaaaaacactttctgaaagtcatctaaaagaaccactctacattttaacaagatatttaaactcatcaagatttgtcataccctaatttcttccgggaatatttac

SEQ ID NO: 46743 - DNA, 300 bp, Glycine max
  Clone ID: LIB3107-082-Q1-K1-D9
ttggggtcgtagtttattttcatccacaccacagagtaaaactacaacctcaggaggagaatgttcctctgaatccgaagtccgtgctctacccagcgactttgccagaaggggatatctggtgtaactgaaggtgtcccaatctcattttggagaacagtactatttgtgtgccactttctggattgattaaccatcttagtccaccatttcttgatttttggaggttaacagtgttcatattcaacactttgctatttcttaacttcaagtgcaagagaacaaagagcataaaatcct

SEQ ID NO: 46744 - DNA, 388 bp, Glycine max
  Clone ID: LIB3107-082-Q1-K1-E10
tgttctagtgtgtgattgtttgttgttgtaactcgttcttcttcttttgttgttctgtgtttgtgtttgttttttctctcacctgaaaatgtcttgctgcggtggtaactgtggttgcggaagctcctgcaagtgcggcaacggctgcggaggctgcaagatgtacccagacttgagctacactgagtcaaccaccaccgagaccttggtcatgggagtggcacctgttaaggctcaatttgagggtgctgaaatgggtgtgcccgctgagaacgatggctgcaaatgtggaccaaactgctcctgcaacccctgcacttgcaagtgaggtgttgggagagcaagcttcaagcagagatagcccttaattaggaataatgattaacta

SEQ ID NO: 46745 - DNA, 384 bp, Glycine max
  Clone ID: LIB3107-082-Q1-K1-E11
ggttctttgcgagatagaacagaaagccgtggctgtcctagtctcttctttccctctacccatttcagtttcaggatggaatctcacgtgaagcacgcccttgttgtcaaagttatgggtcgtactgggtctagggggcaggcgactcaagctagagtgaagtttttggatgatcaaaaccgacacatcatgaggaacgtgaagggacccgtgagaaaaggagacattctcaccctacttgagtctgtaagagaagcaagaaagttgcgctagaggatctcttcatggtttgacgcaagacttaaacaaaacatcgctggttttcgtgtaggtaaaggatgtcaaatgttaattgtcatggacctgaattatgcacctactatg

SEQ ID NO: 46746 - DNA, 388 bp, Glycine max
  Clone ID: LIB3107-082-Q1-K1-E12
ttatatttgagattttttgcttatctgactctttttaatatttcaatgttgggattagttactagttcgaatttgatacaaatttatgttttttgggaattggttggaatgtgttcttatttattaataggcttttggttcacacgtcctattgcggcaaatgcttgtcaaaaagcatttgtaactaatcgtgtcggggattttggtttattattgggaattttaggtctttattggataacgggtagtttggaatttcgggatttgtttcaaataataaataacttgatttataaaaatgaagttaatattttttttcttactttggttgccctcttgctattttgtggctcagtcgctaaatccgcccaatttcctcttcatgtat

SEQ ID NO: 46747 - DNA, 316 bp, Glycine max
  unsure (1)..(316): unsure at all n locations
  Clone ID: LIB3107-082-Q1-K1-E4
ttcctcatgaaaggagcatgagaagccacacatgaatcgtcgttgaaattcaagttattgctattggtgatgaagaaaggcttgctatcactttgccttctctatttgcagaatagctgagattgagtttgatgtccttctgtgtatgcatgcgacaacagtggtcattttatctggaactctggatatatttagtcctaaactggcatatgtaggttttagtgtcgctttgcttttttttaaagaaaacattgctgcagtatctcagtttataatttagtatgatggaattcttcacttcacaaaananaaaann

SEQ ID NO: 46748 - DNA, 366 bp, Glycine max
  Clone ID: LIB3107-082-Q1-K1-E5
gtgtgtttttcaggcaagtgggttggctggcgtttttttgttatatatgtggggttgtcctgtgctgggtctggtctcattctccttattaatttgtgttaagtagcaaaccaaaaccaaaccaattttgtggttgtgtgtgagtgagaaactgagaataattatcaattatgggcctctcaaatttcccaattagtgcatctgaaggggtgctacctgtgcttgtgataaacacggctttctcagtggctttgttgaagagcatgtttatatccatgctccaagtagtgtttggtggcagtgctgctagtagttcttcaaacattgaacatgatgatgaaattagttcatcatcatcatcacggg

SEQ ID NO: 46749 - DNA, 392 bp, Glycine max
  Clone ID: LIB3107-082-Q1-K1-E7
ttggggtcatgtacaacacatatcaacatgagatgccaaaaatacaagcacacacggatagaaaatagccgaattggtttgtagtaactctggtagcttataagttatttgataaatttatgagctactttaactaggaattcatatacttattatgatacaaatttatcccgtgctttgcactatgtacaaacaaaatcaagtaaatattccaatacaaataacaataaatgaacagaaaaaagagagttgtaagcgggaaaataaattagactattagagacacctttcttattgttgaacaattcacaaacatcatgttttagaggccgtctttttctgttggcaaagacgctaaatcaaacgaaattatgtttgaagaactagcaatg

SEQ ID NO: 46750 - DNA, 386 bp, Glycine max
  Clone ID: LIB3107-082-Q1-K1-E8
gatcgtctaacttgaaacactctctctctctcttcttcttcttcttcttcttgcacgtattgttctaatccacaaaaataatggccttaaattacaacattgccctcgccttctctacggttctcacgctgcttctccttcccttaccaacccttggggagctcgtgcaggagcagccactagtcctcaagtaccacaacggccaactcctgaaggggcgcatcaccgtcaatctcatctggtacggcaccttcaccccgatccaacggtccataatcgtggacttcataaactcactaagcagcgcgccaaacgcgccgcttccatcgactgccacgtggtggaaaaccacggagaagtacaaggggggaggatcctctgcgctc

SEQ ID NO: 46751 - DNA, 351 bp, Glycine max
  Clone ID: LIB3107-082-Q1-K1-E9
tggatcattatatattatatttttattttctggatgtaattttttaatattagaggcaatccatacttatcagtattgctttatctgtaatacatcaacttcgaagttgataaggtgattaatcggcatttaatttcacgtacaatgatacatgataggtttgtaaacattactaatgtatctttcaccttctatatattagagtaccttatttttttttatttctatttttgaagcaaatttattttttattacatgagatttaaaattctagcattaattcatgggcaataaagaaatcctaacattagctattacgttttcaattatctaccatctactcttgtatta

SEQ ID NO: 46752 - DNA, 271 bp, Glycine max
  Clone ID: LIB3107-082-Q1-K1-F10
ttatttcatgtctgttactcatttcttctcatcttctttttcttccctttaaaattattattccgtgcaaacacaacaacaacttcatcaccaacacgaagaacaagattagcgttatgggtctcttcctttctaggaatttggcttgcaaattcatatacccttttcttttttccaataaggtttcaaaggatttgttccccaagcagttggagaacatgatgtctctggtctctcctcgtactggcaggcatttgcagcgctatgacaa

SEQ ID NO: 46753 - DNA, 391 bp, Glycine max
  Clone ID: LIB3107-082-Q1-K1-F11
aaaaaaacaccgtatggggtgttaataggcaacatggctgggtgaaattggcacagggaagtgagagtcactcatcggattgctgtgtgctcgtgctccatagaagcgctctcgagacaatccagttgacttgctgatagttggattcacctaagtcttagacatgtctctttattcaaactgcaggcagtatagaataagtcagaatcttcagaataaagaagatatgctgatgattgaaagagaaacatatatatagtttattaaaactgtaacacaaatacaaggcaaaaaacttgtgagaatgtgagctatcaaggttccactacttttcatgccaatgatttttaatcaggcatcgtggtgtacacgttgcttagacattaatatc

SEQ ID NO: 46754 - DNA, 311 bp, Glycine max
  Clone ID: LIB3107-082-Q1-K1-F12
acagaaagggtaccttcacttgttgcgtacattgccttgcctttggaattattgattctcagtggagtaaaaatatgacacctttgaagcatccaaatcacaactaccgtcatgctcaaacttgatttcctattatctatgatgaatatatacgatacatgtatggaatacaatacgtatctatatgacgatatgattatttcaaaaatatatcaaattcgataatttagaaatattttaaacatcataccagttgcattctatctataattgcaaatcctttaagataccacaaaaaagattgaaacttt

SEQ ID NO: 46755 - DNA, 238 bp, Glycine max
  Clone ID: LIB3107-082-Q1-K1-F2
ctttggggctttctttcccggggttgttgcggttgaggagaacaacaacaataacaagaacaagatgaagaggtccccggtggtttctcggagcagcattgacgatggaatgctttccttcacttccctgccggctgcaaatataaaatcagttaacggtgcttgtgtcggtaccggtgattcggatcactcggatctggaagcttccgtggcgaaacaggtggtggagcccgagaaa

SEQ ID NO: 46756 - DNA, 241 bp, Glycine max
  Clone ID: LIB3107-082-Q1-K1-F3
ggaattaatatataaaaaaaaaatacttaccgtatttgcaaaacaatgttgaaggaggaaggatagtgttgttcaggttcacatagttcccagttacgatttgggtgccgcattttttcgcccttggaactccgattccaactccatcatcacaatgaattagagttctcttgactcaatcaaaccagcaaaggtcatcatagaaaaggaccgatgtgcttctgatgctacaatgttgtct

SEQ ID NO: 46757 - DNA, 396 bp, Glycine max
  Clone ID: LIB3107-082-Q1-K1-F4
tttctgtataactgatgtcaacattcatcatgcatacacattttttgctgttgttcattgtgtttaacatcgggtatttagagaaccgatgttgtcatatatatgttaacatcggttttacaaaaccgatattaatattgatacattcaacatcggcactttcaacatcggttttagaaccgatgtagaatgttctaaataaccgatgttgaaagtgtattttctaatagtgaataccctatagtaaatcccctttattaattttaataaggttaaattactcatttgttcctatagtttcacgattcttacctttttggtctctatagtttgaaagtggtttttttagtccatatagtttacattttaattcttttttaatccatataattttaa

SEQ ID NO: 46758 - DNA, 277 bp, Glycine max
  Clone ID: LIB3107-082-Q1-K1-F6
gtcctggttgcctacaggtccaattcataacccctcaatataacgtgcacgtgacgaacctaatatacttcggaggatcgaacaccaaatgcagtgaaaggagcgaaacctttcaggctacgtatgcggggaagatattgaacaagttggaagttgagaagttacactcggtggtgacaaagtatgggggcatggtggcttacaatttggtcaagatgttgggtgaagacaggatgcaaaaagaggatattgctagctccagtgtgaacatgatcaa

SEQ ID NO: 46759 - DNA, 369 bp, Glycine max
  Clone ID: LIB3107-082-Q1-K1-F7
tttgactacagaaggggactctcaatctcccttaattatgttgcaacccttcactacttgcttcacctttcttcataggaagaccaaattcttcctcaataaaccaagaatcaaggacatgatgagtgcatgccgcaagaggagacaatccaacagaaaattcacttcaagttctgacttgtcaacctcttctttccttcacatggagctctctactcagtttcatcaagttttcaagcttatcgacactaatggggatgggaagatatcagctactgagctcagtgaagtgctctcatgccttggatacaacaagtgcactgctgacaaggaagctgaaggcatggtgagagtgttggacttcaatgg

SEQ ID NO: 46760 - DNA, 291 bp, Glycine max
  Clone ID: LIB3107-082-Q1-K1-F8
ggatctgatgtagtgtacagtgagggggcagttgtggatctgctagaaacacttatgcagctctctggacctaatacaacaatatttttggctggagaactccgaaatgatgccattcttgagtacttcttagaagctgcaatggataatttcactattggccgcgtggaacaaacgctctggcaccctgattattgcagcaatcgggttgttatttatgttctagtgaagaaatgattgttgagaatatgatgtttaagtgtcttcaacgctaggaacatgatgtccata

SEQ ID NO: 46761 - DNA, 301 bp, Glycine max
  Clone ID: LIB3107-082-Q1-K1-F9
ttatagagacagagggcacgatgtcaccgttaaggacgagaagacccttctcttcggtgacaaggcagtcactgtttttggacacagaaaccctgaagagatcccatgggggtcaactggagctgacatcattgttgagtccaccggagttttcaccgataaggacaaggctgccgcacatttgaagggtggtgccaagaaggttattatttctgcccccagtaaggatgcccccatgtttgttggtggtgttaatgagcacgagtacaagccagagcttgatattattttcaacgctagc

SEQ ID NO: 46762 - DNA, 364 bp, Glycine max
  Clone ID: LIB3107-082-Q1-K1-G1
aaagattccggaagacggagggcggaatccacagggactttgttaatcctaaaatggaggcaaaccaaaataatgaccaggagataagacatttaaaatagaaaatatagacagatcaaagataagataaaaatttaaattaaaagatgatgaagataaaaaaaaaggagaagataaaacatataagaaatttcaaaatagacgagaagaaaaataaaggataaggatgattgtcataccctaatttcgtccggagattattacttgatgacatgcaacctttggttagccactttgagatacatggcatcctttgttgcacaataaatgaagtcccgacacatgtcagaaatcaaaagaaagc

SEQ ID NO: 46763 - DNA, 285 bp, Glycine max
  Clone ID: LIB3107-082-Q1-K1-G10
acgtgggttaaagaacatgttaacaaccattcctcgtgggggtcattctaacttgtgtggctttaaacacgtgcgacgccctgcggaagtgagaatgacttcgcggacaacgtgggcggcgacgcatctgaggaatccttcttggaggtggagagagaacaaccggagagagagaggataaggagcacctcgtacccaatatatactccggtcttagggcgcaggcactactattgcccacacactgtacaacaatgtgtcttgaagctctctggcctaactggt

SEQ ID NO: 46764 - DNA, 290 bp, Glycine max
  Clone ID: LIB3107-082-Q1-K1-G11
ttggggtattataaaaacatgttgaagcaacggggtgctcgtgaggtgtcgttgctaacttgccaggcttttaaatgcacgtgcgacgccctggcaggagtgagaatgacttccgacggagcaacgtcggcggcgtcgcatctgaggaaaccatctgggaaggagaaactgaacaacgcgttgagacagaggatagggagatccatcgtacccaagatatactacggtcttagggcgcatgggaactactatttgcccaaacactgctacaacaatgatgtcttgaatgc

SEQ ID NO: 46765 - DNA, 374 bp, Glycine max
  Clone ID: LIB3107-082-Q1-K1-G12
gacattgtgtttagtggaggacacatgaatagagctaggcaataacattcaggggctccgaaaagggggagaatggaggattgccttgagggtccacacttagccaatcatgaaacacagctccaaactcgaaggtggaggacacatgaacagcgctaggtaataacattcatggggctccgaaaaagggggagaatggaggattgccttgagggtccgcacttaggcaatcatgaaacatagctccaaactcgaaggtggaggacacatgaacagcgttcggcaataacattcatggggctccgaaaaaagggggttggagagacctaacggtgcaccgggtttttccacctgaatggcaaacatgctttttg

SEQ ID NO: 46766 - DNA, 367 bp, Glycine max
  Clone ID: LIB3107-082-Q1-K1-G2
cacggtgatgggaattttatgatgaacaacattagtgctcgtgcatctgtaggagccggtgttggtctttctggaaatacccctgaaattagttcacccaatttcagaatgatgtctctgcctaggcatggttccttgttccatggaaatagtttgtattctggacctggagcaactaacattgagggattagctgaacgtggacgaagtatacgacctgaaaatggtgggaaccaaattgatagttagaagctgtaccagcttgatcttgacaaaatcgtctgtggtgaagatacaaggactactttaatgattaaaaacattcctaacaagtatacgtcgaaaatgctgcttgctgcaattgatg

SEQ ID NO: 46767 - DNA, 380 bp, Glycine max
  unsure (1)..(380): unsure at all n locations
  Clone ID: LIB3107-082-Q1-K1-G3
ggaggtgtcctgaatgatggagttggtgctgattatgtgcaaaaagagaaggttcttccaaacagctttggttctaaagacaccgggataaggtgtgttagtttggatggagatgctgatcggcttgtttattttattgtgccacctgaaagcagtggtaggattgaccttgttgatggggacaagatactatccctgtttgccttatttattanggagcaactaagctttcttaatgagaaagaagacatgaaaaattgccaccaagcccatcttggtgtcgtacagactgcttatgcaaatggngcatctactaattaccttaaactgttgggacttgaaagtcaatttactccaactggagtgaaatatctgcatga

SEQ ID NO: 46768 - DNA, 374 bp, Glycine max
  Clone ID: LIB3107-082-Q1-K1-G5
gtcttacagttacaaacttacagttacccttgtgtgctctaaaacgaactctctgaacttcaccaacgtgattcgcatggcgatttccaattcaatggactttcttcaactcttcattgctgtcttcatcgcgttctcaatcgcattcagagctcaccgaaaaaaatccctcagcacttctggcgcaatcgctgggttcttcgttatggcccttcacatttttgtgggttacaggtttggggcgatgctgcttgcgttcttttactcttcgtccactctcacaaaggtaggagaggatataaagcgaatagttgatcctgaattcaaagaaggtggacaaagaaactggatacaagttctggccaatagtggca

SEQ ID NO: 46769 - DNA, 371 bp, Glycine max
  Clone ID: LIB3107-082-Q1-K1-G6
attgacatccaagttatataatgcatgtttgatgtcttggtcttattttcaataagaacgactatttttctcttatgcgtatatagaataacttaggaacaagaaattagtattgaattagccgatcctagattaaaaaaaaaaactaacaaaattcgtcagaaattgacacggtatttaaaaattaagaagtttttttaaacaaaattggatcaataaattaaagttggctaagtcgactgaatttcaataactgaaattgtaattgtgacaatgatgacataatattgtatatgttacatcattacttaccagataaatattactggtgggtaactaggtatgaaaaaaaatattatatgtaccaacac

SEQ ID NO: 46770 - DNA, 407 bp, Glycine max
  unsure (1)..(407): unsure at all n locations
  Clone ID: LIB3107-082-Q1-K1-G7
tttggggtatatgtttatcaggnncaagtgggttggcttgtgttttttntgttatatatagttgggttagtcctgtgcctgggtcntggtcttcattctccnttattaatttgntgttaagtagccaaaccaaaaccaaatccaattttgtggtttgtgtgtgagtgagaaacctgagaataattatcaattatgggcctctcaaatttcccaattagtgcatctgaaggggtgctacctgtgcttgtgataaacacggttttctcagtggctttgttgaagagcatgtttagatccatgctccaagtagtgtttggtggcagtgctgctagtagttcttcaaacattgaacatgatgatgaaattagttcatcatcatcatcacgggaaaggagggtgtcaataac

SEQ ID NO: 46771 - DNA, 390 bp, Glycine max
  Clone ID: LIB3107-082-Q1-K1-G8
caacctgcctgtgcagcaggctaatatgggtgagtctgcagggaacatcgcctctagccgaccacaaactccaccaaatccttctacattggttcaacaacctgctacttacaaccccatcagaaatgctcccatgcctaaaactgaaatgaatgcttacagagctgcaactgcaggcacccctcaacttgttcaagttcctacgagccaacatcagcagcagtatgtcacatactcacagattcaccatccttctcagtccatggctcccaattctgctgcccctgccaattatgcttttgattatgcggatcctgctcatgctcaaatatactactctcaacctatggcacccacaatgccttcacagtaccagactatgatgatgca

SEQ ID NO: 46772 - DNA, 385 bp, Glycine max
  unsure (1)..(385): unsure at all n locations
  Clone ID: LIB3107-082-Q1-K1-G9
gtgacttagattctgattctgggattggatggagctaggcctcatggataagaatccaacgaagctggaacactttgatgacatgtggaggcccgaatccactgccacactattatctcacttgaagggggatgatggtcgacatgtcttgacattggatcgtacaatattctatccgcaaggtggtggtcaacctgcggatactggctttgtactcattcatggctttgataacaacaaatttctggtttctgatgttcggtccaaagatggaattgtttttcactatggtttctttgagaacctgngcggngaatttgagcctacactcgagaaagggaaggaggtttcactctttgttgatcagcccangcgaaaactcaac

SEQ ID NO: 46773 - DNA, 422 bp, Glycine max
  Clone ID: LIB3107-082-Q1-K1-H10
tcgcccacgcgtccgcccacgcgtccttctgtttataagacgacagaagggtatccgcgacccttttgtcatccagaggcggcgggcccgatgacaagcagagaccaagtttggtcattctgcacccttgtatcatccagaggcggcgggcccgatgatacgcggagataccttacggttatccgcacccttttgtcatccagaggcggcgggcccgatgacaagcagagaccaagtttggtcattctgcacccttgtatcatccagaggcggcgggcccgatgatacgcggaaatacccgagtggttatccgtataaacattcttttgctatctgtaagacagaacgcttgatagcatgcagaggctgatacagtcttctgcaccttttgttcctccgggaacaacaagtcatttacatgc

SEQ ID NO: 46774 - DNA, 342 bp, Glycine max
  Clone ID: LIB3107-082-Q1-K1-H12
tatgcttattagggtaggagggttcttagaaacattatgtgctatttgtccaaagaaagtttatgtacgccaattgaggagaaattgcattgaagtggtgtactaacaaactacgaggcctaatctccataagtaagttgaattttggaaattagtaggatttagcaaaggagatagaatgaactgagttctattactttttaactaatgtttaacctttcattaggtgaggttaatgtaaaattgtccttgccaacatcttttacattccccacttcataatcaaagtggaattgttgggtttatgcccaaggaaaaagaagcgttccaaattttaaaatt

SEQ ID NO: 46775 - DNA, 360 bp, Glycine max
  Clone ID: LIB3107-082-Q1-K1-H7
tttatagtctacagaagggttcctgtcttttcgaatgtgaaattattttttattgctaaaggaatatgttcaacattagcatttttattagccttttaaatgtgaccttccaacctaccaaactaaaactataaaagtcatataaaatatattttctatgattaaaagataattaattaaaaaatatcactaaatccttcgttagagtagatattatgtcaaaatataaatttagtgcacaaaattaatttttaacgctaaatcgtttataattttaaataataaaaagaaaatgggtaaaataaacttattctactctattagtaactaaacaatcataaattatttttctctatattc

SEQ ID NO: 46776 - DNA, 243 bp, Glycine max
  Clone ID: LIB3107-082-Q1-K1-H8
ttggattgaggaacatctcacagttgagcccatcaatgaatatgtccagagttgtgacattgtggccttcaataaaatataaactacaattgtgggacttggagatcatggcaacgggaggaattgcaagttttaaaaactatgatattgggaaactaccctgaattgagaatttttgtctttagaaacccgcttgttatttgtttttatatatcagtctttgtgatgtcatcggctatttgg

SEQ ID NO: 46777 - DNA, 279 bp, Glycine max
  Clone ID: LIB3107-082-Q1-K1-H9
ttgggtctcacacaacccttcaatgacgtccatggccactttcttcgcccaaacctccttcccctcccactctctctccaaaaccttcgatacccatttcgcccctgccccgaaagtcaacgtctttgtgaacttcagggcgaggaggcacgttggggtgcgagtttcgaacgcgctgatcgaaccagatggagggaagctcgtggagcttgtggtgacggattttgagagggatttgaagaagggtgaggctctttcgttgccgaggatcaagctctc

SEQ ID NO: 46778 - DNA, 357 bp, Glycine max
  Clone ID: LIB3107-001-Q1-K1-A10
aaaaaaaaaaaaaaaaaaaaaaaaaaaataaaaaaaaaaaaaaaaaaaaaaaaaataagggatattaaaaaaaaaaaaaaaaaaaaaaaaaaaaaaaaaaaaaaaaaaaaaaaaaaaaaaaaaaaaaaaaaaatgggttccctttttaaagaatccatttttacttacccttcattgcaacctattactttttttttaggttaccttaatttaattttattggccgtttttttaaaactttatatttgtaaaaaccttgattttacccaatttaatcgcttttaaataaatcccctttttacaaatttgcgaaataccaaaaagcccctaacctaactcctttccaaaaattttacc

SEQ ID NO: 46779 - DNA, 395 bp, Glycine max
  Clone ID: LIB3107-001-Q1-K1-A11
ttaattatcatactctttatgttacattgctgggaagtataacataacgttttgattgcaaaaaacactaaaatataatcttaatgttggggtctttacttcatatgcgaacgatcgatatttggtaaatattcttagacctcaaatgtgatggattgacttggcgtaacttaatgtgtacattagtaatactcaaaaatgatccatatatctcggtcttattatgatattaatggtacaaatgatgaaattcaatcttatgctttcttgaattaattaaatttcttttcataatcttatatatttctgacgcactaaatactattattcctgttatttcaatatttcattatttttgtcatttaagtaaatccattattttcactattctttta

SEQ ID NO: 46780 - DNA, 59 bp, Glycine max
  Clone ID: LIB3107-001-Q1-K1-A2
acgcgagaacacacgatttagagcagattgaagagaatatcggggggggatttttgaaa

SEQ ID NO: 46781 - DNA, 189 bp, Glycine max
  Clone ID: LIB3107-001-Q1-K1-A3
aaactgtggtttgcaatttgcaaatttacatacatactcttatctattttgcatagctatcactttgtgcgatcaccatgatcatctatttgtaaaccatttaatacaagtatattgtttcttgcatgatacatgacttgtatcctaatacttttaataagttaatccttatcaaggcttacgtaaaaa

SEQ ID NO: 46782 - DNA, 317 bp, Glycine max
  Clone ID: LIB3107-001-Q1-K1-A4
taaatggaggacatattccaaatcagctgtggcagttttaaaaatagctatgaccactgttccagtcttgcagcttccttaatttgctcttccttttgatgacgaaacagatgtgttcaccactgctattggtgtcatcctttctcaactaggtcacccaacttctccggtaagaaactttgcctgcgcatgcaactagcttctacatacgcaaggggaatgccttccattacagatgctgtaagaaaatggcaccattatctaatttgcaacaaatttagaatattcacaaatcaccaaaatttgaacgcccttac

SEQ ID NO: 46783 - DNA, 402 bp, Glycine max
  Clone ID: LIB3107-001-Q1-K1-A5
ggatgcgaagaaaaactggtgagaaaaagagagacaggaagagataactgtttgaatcagacttagactgtggtttgcaatttgcattgtgacatacatactcttatctattttggtttgcaatcactttgtgcgatcaccatggtcatcgatattgaaaccttggaagacaggtatattgattcttgcaggagacatgacgtttttcctaattcttctattttgtcaagccttttcaaggctgaggtaaaaaagtccaaccatgagctgtgcatcctggagattttaattgatgacctaaaggatgctgatattgctccactttttgacttgtgcatgaactttgacgcttctgaaatagaggctgttgatgtacgtaatgaatcatcatgtgatttaaat

SEQ ID NO: 46784 - DNA, 207 bp, Glycine max
  Clone ID: LIB3107-001-Q1-K1-A8
tactcatgggggggcttatcacaacacatggttgggtatctactataatcaacttaatgtatttgttactcaaagatctaatcctgcatcttataactgtttgatcagaaactaactattatagcacatattctcacgataccatttttacttatgctactacaagactgaccataatgcttgtccttgaatcaattactttactat

SEQ ID NO: 46785 - DNA, 421 bp, Glycine max
  Clone ID: LIB3107-001-Q1-K1-B10
aaacaagtagttgagaactaagaagaaggaaatggcttcctcaatgatctcctccccagctgttaccaccgtcaaccgtgccggtgccggcatggttgctccattcaccggcctcaaatccatggctggcttccccacgaggaagaccaacaatgacattacctccattgctagcaacggtggaagagtacaatgcatgcacgtgtggccaccaattggcaagaagaagttcgagactctttcctacttgccagacctcgatgatgcccaattggcaaaggaagtcgaataccttctaaagaaaggatggattccttgcttggaattcgagttggagcacggtttcgtgtaccgtgagcacaacaggtcacctggatactatgatggacgctactggaccatgtggaagctgcctatgttt

SEQ ID NO: 46786 - DNA, 355 bp, Glycine max
  Clone ID: LIB3107-001-Q1-K1-B11
ggaaacaaagagaacccaggacagacatatccactgcatgagatgcccaaagcaaatgcatcatactataattaatactacaacattcacttacttcactctgtttccatgcttccgatcctagaaaccgctactttctctattattatcatcaagtgtgagatgcatgctcctgacaaattcccaaccccttttgtgcgagtgagacccatctaatcaaattaattaactcctaaacccggttcattaaccaaaattgagtacttgaccaaatttcacaagcttcaaaccaaggaacccaccaaacctaagaaacatcatcgtcagctccgaaagatcgcaagcttgttgcggt

SEQ ID NO: 46787 - DNA, 138 bp, Glycine max
  Clone ID: LIB3107-001-Q1-K1-B2
gattggcttctggaagtggactgtacatcaagcggcgggattatcaatagcggcggccgcgattgaagcatcgtattatgcaaggttcctgagtgggttgatggaggaaagagttgacgctgcaaaggtctttaaatc

SEQ ID NO: 46788 - DNA, 398 bp, Glycine max
  Clone ID: LIB3107-001-Q1-K1-B5
gaaggtgcaagagtttgttgtgagctataagctagtttagggtgaggagaatatgaaggtgggggttttctttgttgctgcagtagttttggtagcatggccatgccatggctcatgctaccaaaggttccctctccgaatgaaaactggctatggtgagcgttcttcggaggtaaaatgcacaagttttaggcttgctgtggaagcacacaacatccgagcctttaaaaccattcctgaagagtgcgttgaaccaacaaatgactacattaatggcgaacaatttagatcatactctaaaacagttaaccaacaagctgtcttttatgctagtgaacgcgaagtccatcacaacgacatattgatattgcgcatagataacaccgtactctctaata

SEQ ID NO: 46789 - DNA, 451 bp, Glycine max
  Clone ID: LIB3107-001-Q1-K1-B6
gacgcacttatcaatcaatcaaaacattcccaataacgatggtatacacatcttcaattaagctccttctcctatagccatggctctttctaagcttataattgcttcccttcttgcgtcgcttctccttcttcatttcgttgatgctgatcaatcggcacatgcacaaacgcaggggtctcttcttcagcagatagattgtaacggagcatgtgctgcgaggtgccgtttatcatctcgttcacgcctctgccaaagagcttgtggaacttgttgtagacgctgtaactgcgtgccacctggcactgctggaaaccaagaagtgtgtccctgctatgcaagtttgactactcatggtggcaaacgcaagtgcccttagacttaattggaccactatcctatgcatgcctttgatttatattataaaataaaaataatactatatataaca

SEQ ID NO: 46790 - DNA, 379 bp, Glycine max
  Clone ID: LIB3107-001-Q1-K1-B7
gcagttttagatatggaagcaggagtacttggttcaaattcgtgacttagtgggtctgcaaagaagcgccgatcgatgcagtctgctcctattcaggagcaagtaatagcagatggactcaggctaattactaagttctactcatcatgtaagcaacaggatatctcaaggtttgaggaagcaaggacagaacttggaaaactcaagtgcaagccaatactagaaacgatattcgagtgtgatagggaaccaattctgcaggcttctgctagtcgtgtcttacaagcagtttttcccaagaaagagatatatcatcaagttaaggatactatgcaacttcttggagttgtaaaatcctcatcactactatcatcaaggc

SEQ ID NO: 46791 - DNA, 193 bp, Glycine max
  Clone ID: LIB3107-001-Q1-K1-B8
agtccgtgagtcattcctttctctcactcttcgggcaggcttagatcaactgcgggcacagcacgtgactaaaaactatggtgtccaaacctaccgactctgcttccaaacttcgtaaacaacatgtacagccagcaaatgatgcaattggaaacttgtccctcaagataaatcacgtgataaagcaaatcca

SEQ ID NO: 46792 - DNA, 272 bp, Glycine max
  Clone ID: LIB3107-001-Q1-K1-B9
tccacaacatgtgttggaggggcagagggagtgacattggtggccatggcaacacaaacgtggctgaatgggaattaaggccaggaggaatggtcgtgcagaaacgtaactcggatttgaatcaaaattctgcatctaaattcaccatcaaagtcaaagtgaagtatggctcatcctatcaccaaattcaaatcagttctcatgcaagtttcggtaattccatccttgggcatttctctcttcattttatttaaaaatttaatctttacact

SEQ ID NO: 46793 - DNA, 332 bp, Glycine max
  Clone ID: LIB3107-001-Q1-K1-C1
agacttcttatcttataaaaaatttgtcctatagggagctccattcttattgctaggcctactatttatatatttatcattatatatggtattcgcaagtttataacatatattaactcatatatcgttttcggtcgtatctattttaatttcaattcatatgataaccttattattattcaaagaaatcataggattatctgattcctccaaaaaaggcatgataataacttttctttgctatcaatatatttagttactcgatgactttaattcaagccatttaccttttatggatttatatgaatcatcaaaaattctttcatggactt

SEQ ID NO: 46794 - DNA, 248 bp, Glycine max
  Clone ID: LIB3107-001-Q1-K1-C10
cccacgcgtccgattattactgcggatgggggttacataatttaaagtgtaatgcgcggatataattataacataaaatggatgcccaaaacataaatctcaagatcaactaagtttttaagaaggacccactctaatgattatctgtagatgatttaagtacaaataacacatacaaaagatcacaattagagcacaacaacaacaaatgaatggaaaagatacaaagcaaacaaaaggcaaagctt

SEQ ID NO: 46795 - DNA, 223 bp, Glycine max
  Clone ID: LIB3107-001-Q1-K1-C11
cccacgcgtcctcccactcgtccacccacgccttccaattcgagccaccactttttttgtcattcatttttatttttttttcgtactcaataacccttatcaatcattaatcaaccatattcttatacaacactataataacacacctccctctaatatacccacattcatacatttaccatctattctacaacaatcgccttatattaaatactcaaattaa

SEQ ID NO: 46796 - DNA, 399 bp, Glycine max
  Clone ID: LIB3107-001-Q1-K1-C12
gcaagcaacattagcagctgaagcaaatgctcaatcccttgcgttaatggtggattggcagatttaattcgattgtgggaacaacttatcgatcccccaatccgctgtgaacagatcgagggcgtggcctgtttgatttgaactgaatttcggattgaaggatctcattttcttggagcattaaagcagaaatttctagttaaggatgccccgaggcctgagggaattttaatgacttgagagaggcagaaaagtgtgtaccttgctaaagaagtgcattagaaaaaaggaagcaggaaattatttctttgttttgcattaatgtgccatataaatttaactgctcaagcttgacatttttttataaacataaaagattaaaatgttatatctcaaaat

SEQ ID NO: 46797 - DNA, 394 bp, Glycine max
  Clone ID: LIB3107-001-Q1-K1-C3
gtccctaattctcaatttcttggcggctctcacagtacgacacttcacatgtgacagtttactcaactccttgtttggttagaaccctctatcagtcaaaatcctatgtaggtagctcttttcgagacctcgacaatttgcttcagttgctttcaagatcaatgattgtttccataaaccatgaaaattaagttgctttctagaatttcttaaaagtaaaagtatggaaactattttcaagacatttacttatatctaaacatgaaaatgttaacaacacttttttttactctctctttctaagattctccctatattttggtgaagcgtaatggaagttaccaattttggtggcctcacttttaaatttggtgagaaaatttttaaatgaaaa

SEQ ID NO: 46798 - DNA, 305 bp, Glycine max
  Clone ID: LIB3107-001-Q1-K1-C4
gatctctcattctctcgtgcctcaacgctttttggacggctttcgcttttccattggaacctctttcacacttcagatctgtttcttcatcggttgttcaagtaaatggcctttgtcaccactgctgaagtgtgtgatgctaacccacagttaattttgagtggggagcttcgtgcccttcagccattttttcatatatatggccgtcgacaggttttctctggacctatagttaccttgaatgtgtttgaagacaatgttttggttcgtgagttccttgaatataaatgctatcgaagagttct

SEQ ID NO: 46799 - DNA, 90 bp, Glycine max
  Clone ID: LIB3107-001-Q1-K1-C6
tgggtacacaaacaacgattcgcacgaatcaagttgttggtttggtagagaatataagcaataaatcaatcaatcaaatcattcttacat

SEQ ID NO: 46800 - DNA, 337 bp, Glycine max
  Clone ID: LIB3107-001-Q1-K1-C7
cccacgcgtccgaagactacagaagggggttttgcatgagaacgatgaacattacccgcacattgttgccttagagcaggtgacacacggtgcagattaagaccactttgatcatgagaagaagtctgttctgaataaggtcaaggcaaaggctaagaaaattaatgacacgattaagaagcatggccatcaagtgcttgatcgtggtcatgagtataacaatgaagatcagcatacccttgatgatcatgacttatactaggatgatgaaatggctgaagacccacaagttcataaaacacctattcacgaatttgaatatgttaaaactgcaaca

SEQ ID NO: 46801 - DNA, 77 bp, Glycine max
  Clone ID: LIB3107-001-Q1-K1-C8
atatatatatatatatagacaggaaaaattatcagtacttgaatatgtagttagactttcatatgaatatttcttcc

SEQ ID NO: 46802 - DNA, 354 bp, Glycine max
  Clone ID: LIB3107-001-Q1-K1-C9
tcgactagcgctagatattactagtagtatgaccggacagagtgaaggtcacagtctgtgctgacacctctgaaaattaacaacgttgccttgtcctacatgagtttcctccgcaggttgtgcccctgtttgcacaagggcggcgcatccttccacgacggcgatgacgacgacatagatcgcaaccaccctggcgactccttcgacctaatcttcggcctccacactctccaactcgacaccaacttcttctccgacatcaaccggctatgtcatggaggctgtggtcctgttttcaggggattgatgccaaatggtcaagaagtggcggttaataagctgtcattggaatct

SEQ ID NO: 46803 - DNA, 368 bp, Glycine max
  Clone ID: LIB3107-001-Q1-K1-D10
gtgaactcaaagcgacagctgctgaataagtggagcagataacagcttctctagggagatcatcatctgatggcatcgcatcatcagaagcctcagacaggatcaaagctggtttcattcacttcaagaaggagaaatacgacaagaatccagctttgtatggtgaacttgccaaaggccagagccccaagttcatggtgtttgcttgctcagactcaagggtgtgcccatctcatgtgctagatttccaaccaggagaggcctttgtggtcagaaatgttgccaacattgtcccaccatatgaccagtcaaaatacgctggaactggggctgcaattgagtatgctggtttgcatcttaaggtgtcg

SEQ ID NO: 46804 - DNA, 212 bp, Glycine max
  Clone ID: LIB3107-001-Q1-K1-D11
agatcagattagtattggtaatggtcagggattaaaatcaattcataaggtgtaacctccttttaattcgcaaactcctcttgttcttaagaaccggctatttgttccttctataaccaaaaacttgatgagtgtcagtcagttttgtagaaataactctatttttgagtttcattcttagttttgcttggtcaaatctcttgtctctaaag

SEQ ID NO: 46805 - DNA, 306 bp, Glycine max
  Clone ID: LIB3107-001-Q1-K1-D12
cacaaaacaactttcaaactctgataaagaatggctgccaacacattgatgagtactgcgatctcagccttcccatgtctgctttcttcctcaaaatccagatttgccaccgcagttcctctttctagctttggtgtcaccaatgcctcttcttctcgcttttctatgagtgctgactggatgccaggccagcctagacctccttaccttgatggttcagcacctggtgactttggattcgaccctcttcgtcttggtgaagtaccagagaatcttgagaggttcaaagagtcaaaactcattcac

SEQ ID NO: 46806 - DNA, 236 bp, Glycine max
  Clone ID: LIB3107-001-Q1-K1-D5
gtggttggtgggagaaattaatgatcgttgagggtgtgagacattggtacaaagctttcagtgtagttgacaactacttgggaggagggaagaagaggaatctttcttccgctgttgtcgtgtgccgtggttggtgttctgttgatgtctcggaaactcgacagccctgtgcagactcagatggctgtggcagtgataaggagcagtccctttggaagagagtatcatgggaagca

SEQ ID NO: 46807 - DNA, 375 bp, Glycine max
  unsure (1)..(375): unsure at all n locations
  Clone ID: LIB3107-001-Q1-K1-D7
ggcatctcttgagaccaatccccactcaaccgccagaccactctctctggtcttctgctacctttcaagtttttaaagtattaagatggcacagacattcctatttacctcagagtcagtgaacgagggacaccctgacaagctctgcgaccaaatctacgatgctgtcctcgactcttgccttgaacaggacccagacagcaaggttgcctgcgaaacatgcaccaagaccaacttggtcatagtcttcntagagatcaccaccaaagccaactttcactacgaaaagatcttgcgtgacacctgcaagaacatcttcttcctctcaaacgatctgcgacttgattcttacaactgcaaaggccttgtaaacat

SEQ ID NO: 46808 - DNA, 320 bp, Glycine max
  Clone ID: LIB3107-001-Q1-K1-D8
tggatcgtgaggctgtttccggtaacctctgccggcgtcgctgagtggtgatcaaggaaatgggtcagacgctgagttgccgtgcaacagcacgaggaccatggtgtgctcttccctgcacttgcaagtggagaattgaaggttgttgaggccatgttggaggaagaccccactgtgttggaacacaccattggctgtaacaggctttctcctctgcatgtcgctgctgccaatggtcggatcgaggttctttccatgttgttggataggtctttcaatgttaactgattgaatcgacataaacagacctcgttgatgtt

SEQ ID NO: 46809 - DNA, 352 bp, Glycine max
  Clone ID: LIB3107-001-Q1-K1-E1
gaaaccaaacattaatttccgtcccattgagttttctgatgagcaacatgagcaaccctaagatgcagcaaaggagggagcgacgcatgttctccacctctgatgacagtgccatgaccaagcaagttgaggccactcatgcccctgatggtcgtgaaattgatgtcaaacccattctccaaattgtggatgaaatcttggttcggttcattgctcgcaccgttgagggtcatgaagtaaagcgagatcaagatgcattggagatgactgctgctctgactgaatttgacatgcttgactcgctggcttatatcataaacaaaatttcctgcgagctatcatgcaagtgctc

SEQ ID NO: 46810 - DNA, 259 bp, Glycine max
  Clone ID: LIB3107-001-Q1-K1-E10
ttaacaaatctagggttttagtctcttccttgagcgtatttactgtgagttgattcattctcttcctttatttttttctttgatttgtttttttctcgttaaaggaaaaagccactgcgaatgcattgcttgccgtgagagctcatcgcttttgattttcatatcagatatccatgatttgagctgagcttcttcggttagctcacgctcgtgtcttgtacttgttatgttttagggtctgttgtgttttttaggtttt

SEQ ID NO: 46811 - DNA, 209 bp, Glycine max
  Clone ID: LIB3107-001-Q1-K1-E11
attcccgctggacgccactcatccctctaatataattctcactaacttttctttccagaaaactttatagatatacaggaatgtctcttcaacaagttgtttgttcaaaaacctttaatccttctttattactatttttataacattccaattccatacttacaatattttccctctcctaatttacactccctcattttcccttactt

SEQ ID NO: 46812 - DNA, 158 bp, Glycine max
  Clone ID: LIB3107-001-Q1-K1-E2
tatgggggcgaagataggtaacctatggagtgggctgtggtggatagagggagaatgcgcagtgagctctttttgtggacccattttgattgtagagccctgcttgagtaggggtgtgcattgcatatgttgttgatgtggtattgtgccatgagggg

SEQ ID NO: 46813 - DNA, 402 bp, Glycine max
  Clone ID: LIB3107-001-Q1-K1-E3
caacaggtcttattgattatgatatgctggagaaaactgctactctgtttcgtccaaaacgcattgttgctggtgctagtgcttatcctcgggacattgactaccctcgtatgagaaaaattgcagatgaagtaggtgcttttcttatgatggatatggctcatataagtgggcttgttgctgcatctgtactttctaatccctttgagtattgtgatattgtgaccaccacaacccacaagtctttacgaggtccaagaggtggtatgatattcttcaagaaagatactgtgcatggggttgatttggagcctgccattaacaatgctcgttttcctggtctacaggggggtcctcataaccacacaattggaggactagtagtttgcttgaagtatgctc

SEQ ID NO: 46814 - DNA, 331 bp, Glycine max
  Clone ID: LIB3107-001-Q1-K1-E6
tggagttcccctaccgggaaactggattggggcgtaaatggagatgagctgaacaagctgaggaaatctgcttcctttggtttcagaaacagtggggtaactgcatcatcatcatcatcccccatagcacagccagaatttggcaccgagcaggatgtctcgtgggttcattcattggttaaagatgttccctccgagaggtctgagaagcaacaatatgatcatctcagcaaagagatgcttcttttaccatgggtagaaacaacaatatgatcttcttcagtaaagaaatgctgctttcaccatgggtggagcagctgtatatagagca

SEQ ID NO: 46815 - DNA, 423 bp, Glycine max
  unsure (1)..(423): unsure at all n locations
  Clone ID: LIB3107-001-Q1-K1-E7
gatgttgataattcagataaaagtcaaaagtctgaggacaagctttctattgataataattcagataaaagtcagaaatctgaggagaaacttactgatgataatgaacgccggtcaaaaagaaagtaccgttcaagatctagtagacatgaagaggaggaagaagaaaacaaagataggagggatcacaaaagatccaggaaaaaacatcactctcatcgcgcttcacaccacaatcgggacaggcataagcacaagagaagacattccttctccaaagacaaatattcttacagggggaccaagcacgatagctcctctgatgatgaacatcatcgctcaaggcatcatcgtcataaatatgatagctcctcctctgatgatgagcaccactcttccaaacaacgacatanggatgataac

SEQ ID NO: 46816 - DNA, 365 bp, Glycine max
  Clone ID: LIB3107-001-Q1-K1-E8
cgatggagattgcttgtcagtgcgaagcgcaaattaaagcgcacggaccattctacttcggtgctcttgaaaacatgggaaaacagagcacagatttctctgccctcaactgcatcgacctctccaaccctgacatcaaccaatccgacaatttactcaaacaggcatgttaggattccggtttttactacgttgtcaatcatggaataagccaagaattcatggaagaggtttttgcacagagcaagaaattcttatctctttctcacaaggagtagatgaagattctcaggaatgaaaaacacaagggatacacccatgttcttgatgaagtgcttgatcctgaagaccaagtgcatcgagac

SEQ ID NO: 46817 - DNA, 143 bp, Glycine max
  Clone ID: LIB3107-001-Q1-K1-E9
actataataagatccgtcgaattacatatcttttaagattcgatttagtgtctaataatcaccgaatcaaatcaaattctcgattggaattttaggaattgatgaacgaaggcttaagattagcgtaacgatttcgaaaccat

SEQ ID NO: 46818 - DNA, 358 bp, Glycine max
  Clone ID: LIB3107-001-Q1-K1-F1
taccgacggagaatgttgctgagtaggcagtttatccatttaggggggcgttctagctacccatagtctgatagtgatatactgctacacatatcaatgggatcccacatggcatgatgggactctacccacatagatgctcaatcaaccacacttaaaaggtaccgatcactcaccacagatcaaatagatgcttactggcaatcaatgcagaagatagcataagaacaccttagagctatatccaacttgtcacagactattcacgctagcaaaagcacataacctgagaacaagttgcataactcaatgaccatgcctgagacctgttcacaggactaccataatatgttcatat

SEQ ID NO: 46819 - DNA, 372 bp, Glycine max
  Clone ID: LIB3107-001-Q1-K1-F12
cttttaaattttagaaccctctcttctaccccgtggacgtaatcatactacatcgggggcaaataaaaacaaaaccctatgatccaacaaccgctcacatatccaccatcacaaatcaactacgcctgccttcaattccatatctctcttatcgtcacacctataaacaattcaatgtactccgatctccaacgctccgaatcccaaaactactctcttctacccatcttaatatccttctactaaattttactaattccacttaaactcttcacgaaaaaacccgaacactttaatttttccaacccacattcaatcttcattgataaacgaccaaaaccttaacaagcttcttaaacatcttaccatttc

SEQ ID NO: 46820 - DNA, 323 bp, Glycine max
  Clone ID: LIB3107-001-Q1-K1-F2
gattttagtacgatcagaatcaaacaacaccctgattgccaaacttcgcttaggcgaagacacttacttttcttcatgggttctatcggaattgagagctcgggacctgaggttgtcaccgcttatgtacatgcaaccaaggatctgatccagaccagtcatgtttatctggatatcaagacggtggaagagtttcataaagggcatgtggatacagagaggatcattaactgttcatacatgtttaatacaccataatgcacagtgaataattcacaatttctgtatgagttttcatatgcttgcaagaaagactatcatat

SEQ ID NO: 46821 - DNA, 364 bp, Glycine max
  Clone ID: LIB3107-001-Q1-K1-F4
cggttgggtggattctgctgagaagtacaactcggaaggccggtgttgggagccgctcccaagaatgaacaagaatagaaagttttgctcaggttgtttcatggacaacaaattctatgtccttggagggcaagatgagcatggaaaggacctcacttgtggggaattctttgatggaaaggcaaatagttggaacttgattcctgacatgtggaaggatattgtttcacagtctccacctcttcttgctgttgtgaacaatgagttgtacacactggatgcttcttccaatgatctgaaagtgtatgtgaaaggaaccaacacatggaagactttgggaatggttccttgtatagcttattca

SEQ ID NO: 46822 - DNA, 393 bp, Glycine max
  Clone ID: LIB3107-001-Q1-K1-F5
ggtctttcacccaggccaacaacatcaagaggaagaaggcaaggaggagaacatataatagcagagagaggaagcgccaagaacgaatacactgttactaattaccctatatttctctcgccagaaactgcacgtgtcgatcttccttcttctcacgctccaaattcaaaccttcagctacgctcttctctccgatctatcgtctttatttctctctttattttctcgggttttccattggaagcgagggttgaattgaggcgaagcatttgcagcatgagcatcgacagccccgagcaaggggacagctaggttttcgaggttccgactgtggagggcgagatttccatgggtgatggaggcgtcgcgtgcatgcatttgcagtatattatg

SEQ ID NO: 46823 - DNA, 330 bp, Glycine max
  Clone ID: LIB3107-001-Q1-K1-F6
ttactttaaggcttttttctctacaattcttgctgtctgcttcttcttgcacgttgttttcgtgctcttgctcttcccttcttcttctttcccccctttttttctctttgtagctccgctacctatactttgtttattggctccatgttcttcttccctcactgatttatcttttgtcagattcgatttgtctcatttggtttgcataagaatctttggcaataagctggtgtggtgtttctttcatttcactttatatgagtacatataattttgaagggttttaaggatctgcatcatgttacgctcattacctatattgccactccc

SEQ ID NO: 46824 - DNA, 374 bp, Glycine max
  Clone ID: LIB3107-001-Q1-K1-F8
tggttctagtgtgtgattgtttgttgttgtggctggttcttcttcttttgttgttgtgtgtttgtgtttgttttttctctcacctgaaaatgtcttgctgcggtggtaactgtggttgcggaagctcctgcaagtgctgcaacggctgcggaggctgcaagatgtacccagacttgagctacactgagtcaaccaccaccgagaccttggtcatgggagtggcacctgttaaggctcaatttgagggtgctgaaatgggtgtgcccgctgagaacgatggctgcaaatgtggaccaaactgctcctgcaacccctgcacttgcaagtgatgtgttggaaagccagcttcaagcatagatcgcccttaattagga

SEQ ID NO: 46825 - DNA, 384 bp, Glycine max
  Clone ID: LIB3107-001-Q1-K1-G1
cactctccaaatacgtagttgagggaggatctgagaccgtgacagacaagtccaacaatagttgaaacaaaaccaacaaatctccataccgctacctgagtcagccatctagtcattttgatggccaaaagcgtcatgttttttatgtaatgagtaagagttgctttaacagataatatatacagactacagagcaatcatttctggcttaggatgagaaacccacctgtatcttcagatgaaatttcaaggaaagggacaaaaaccttatatgctataataaattataggataaagatccgtccacatccatgctattaattagacactctttaaactcatatgatatatgattagaagaaagatatataaaatgaacttaaa

SEQ ID NO: 46826 - DNA, 416 bp, Glycine max
  Clone ID: LIB3107-001-Q1-K1-G10
ggcgagaaggaaaagttcggatattgatagaattcgtctaattcttctttgtaggggaagactttagtagattttgcttgatttataatagaatatttttcatttagtttagttttaattttgatttataagattttccattaaaaaaggagtctttatgtcacgttacagaggacctcgtttcaaaaaaatacgtcgtctggggtctttaccaggactaactagtaaaaggccaacagtcaaaagcgaacttagaaatcaatcgggcttcagtaaaaaatcttaatatcggattcggttaaaaggaaaaccaaaaatggggtttcattaagggcttaccggacggccattggttaaataccgtcgtattggcggaaaagcttaaggatcaactggtcaggttttattacaactac

SEQ ID NO: 46827 - DNA, 300 bp, Glycine max
  Clone ID: LIB3107-001-Q1-K1-G12
acgcttccgactgctgctaaaagtctactaaatggtatcatgtttctcaaagaagttatgcttcaaggtagtttagcgactgcatataattaatttccaatttaattaactacaattacaactactaatatattttaaatatagtccgtaactaataagcttacttacaattttttgtctcacaatttgaatcagtcaattcaatatcaatacaagattaaattggaacaggaccagaatgattcatatattcttaatggaactctaattaaacaattctgatcatgttctatactatta

SEQ ID NO: 46828 - DNA, 454 bp, Glycine max
  Clone ID: LIB3107-001-Q1-K1-G3
gacaccaacacatccattcattgtcttaatgttagcaatgtcttcctctttctccatccatggctgcctcctcctgtcaatagcccttttctcagattgttgcttaacagcatctcaagctcccaccaccaaatcacacccctatatccttcccattaacaaagaccccgcaacaaatttgtactacacttcaattggcattggaactcctaggcacaactttgatttagtcattgatctttctggtgaaaacttatggtacgattgtgacactcattacaactcatcatcctacagacctatagcttgcggctcaaagcaatgccccgaaattggatgcgttggttgcaatggcccctttaaaccaggttgcacatacaatacatgccctgcttatgtaatcaaccaattagccaaatttatttacagtggaggcttatgtgacgatttcata

SEQ ID NO: 46829 - DNA, 302 bp, Glycine max
  Clone ID: LIB3107-001-Q1-K1-G4
gaggaggtatgcattcaatcatgctaacgtcaagagaggacatgctcaattggtgtatgagtccaaaatgtacacaattctccagggaggaactggaattccaaatgtcagatggattctagtcggatggagattacaacgtactagtgatcgatctgcttgaaccgagtcctgaaaatctttttaacttctgcgatatacagctatcactaaagacagctgatcatgcttgctaatcaaatgatcaaccgagttcatacattcattcacaatcgatgctgcatctgtatatcaaacccgat

SEQ ID NO: 46830 - DNA, 345 bp, Glycine max
  Clone ID: LIB3107-001-Q1-K1-G7
tatggggagtttcagacacatatagagggggttgacattggacggatggacgctacgtctcttcctcttctctttcgatccatccctcattcctaatcctacaatccaaccacctcagcctcacactcacatatacacatatctgaacgcatatcgtacctcctatggcttcaaagctcatcctcaaggagctcaaggacttgcataaagacccaccaacttcttgcatcgctggtccagtagctgacgacatgttccattggcaaacaacaataatgggtcctgcttatagtccttatgctggacgtgtattcctagtcactattcacttacctccggattatc

SEQ ID NO: 46831 - DNA, 198 bp, Glycine max
  Clone ID: LIB3107-001-Q1-K1-G8
ctccattgacgaactgtaattccaaataacatattcttttcactctaaggagattacaatcttttagtgatccatctacatttaccaacactttaacatctttttaacttctacattataactctatcactaaatacatctctcatactcgctaatcaaatgatcaaccttattgacttcattcattcatactctttt

SEQ ID NO: 46832 - DNA, 420 bp, Glycine max
  unsure (1)..(420): unsure at all n locations
  Clone ID: LIB3107-001-Q1-K1-G9
caaatatcttggagagttcaacgcctgtcgttgatgggaaacagtactacagtttggctgtgttgacaaggacagctgatggagatgaaggtggcaagcaccagctgattacagcaacagtgaaagatggcaaactatacatttgcaaggctcaagctggagacaagaggtggtttaagggagcaagaagatttgtggagagcacagcaagttctttcagtgttgcctaagaacttaattagtggagtgctattctgcatgtaaatcatcttgaaggggtgtgtatgtcttgaattatgtggcccctttttgtccacaagtttcattatttgaggcttgtggttggagtaagcacttcgattcttaatttttcatgtcttctaaggacttaccctnctctcttgtccccctttttctctc

SEQ ID NO: 46833 - DNA, 374 bp, Glycine max
  Clone ID: LIB3107-001-Q1-K1-H1
gtacggccgcgcgaacacgaccgacagaaacccacatactgatacatctaaacacccctcgaggaggttaatatatcacggagagacgcaacgtctctcactttccccatcaaaaatcaccataactataacgacatatgatcaaccactatgaatctcacactcatatcttcttaatccaacgaatcctctacaatctaagtccctgattcctattctctgctgcatctcatacacaccgaatctcccaccatctctttttattcctcttctcatcatatatccctaaacatcaatgacaaaaatttataccccttcatcatataagcccttataacttataattatatcctaccactatctaattacctact

SEQ ID NO: 46834 - DNA, 205 bp, Glycine max
  Clone ID: LIB3107-001-Q1-K1-H10
attccgcgctggacccactcatccgctaagcttttacttcttccgcattactttataaccaagacgaaaggccacttggtgtgtctttcttcagggacggcagcgtactattattttagccttcattatctcatcccgtttgacgctaattactcacataaatctctgcagataacttctataaacttccttaattccgtacaat

SEQ ID NO: 46835 - DNA, 144 bp, Glycine max
  Clone ID: LIB3107-001-Q1-K1-H12
cggttcactccaacgagaaaatccacccactgtgatgcaactacatgctattggaccaatgatgcctcacaccgaatcgcccagtgcatacagtaaacagtgctcatctaatgacgatgccacactataccagctattctattg

SEQ ID NO: 46836 - DNA, 335 bp, Glycine max
  Clone ID: LIB3107-001-Q1-K1-H5
caacgccatggccaatatggaatccaccacgcctatactcactcctctagtgctcctcctcctcttctctctagccaaagggcttcacaaccccaaatgtgatgctgcctatcaacatgaccatgatggctcaaccctacaagtgttccatgtgtacagcccttgttccccattcatgccctcaaaaccaatgtcatgggaagagagtgtcctacagctacaggccaacgaccaagccaggatgcagaacctttctaacttgttggctagaagatccattgtcccaattgtctcacggagacaaatcacacagaggcctacatacatagtgaggg

SEQ ID NO: 46837 - DNA, 347 bp, Glycine max
  Clone ID: LIB3107-001-Q1-K1-H6
gataagcagcatcaactaagcctaaaatcttctgccccacccagcattgtagcagagtgattctgttcactacaatgccatcatcactatcctctttcctccgtatggctcctattctctcccttcttgtactctcatgtgtgatttgttctagtagtgctcagggaccaccttcacctggctactatcctagttctaaaattagacctggtagtttttatcaagggtttagaaacctctggggatctcatcatcagagactagaccagggctagatgacaatctggcttgactctaactcaagaaatggattcaagtcactttacttctatcgatctgggtacttt

SEQ ID NO: 46838 - DNA, 378 bp, Glycine max
  Clone ID: LIB3107-001-Q1-K1-H8
gacggacgagggtttcgtttggggtttgacgttgttcacaatcactttctgcgcttcactcactcccttcgtgcggttttctttctttgtcgaactcgtgcgaaaatgcgtgagattcttcacatacagggagggcaatgcggaaaccagatcggagcgaagttctgggaggtggtgtgcgcggagcacgggatcgattccacggtgaggtaccagggggacaacgagttgcaactcgagcgagtcaacgtctattacaatgaagcgagttgctgaatgttcgtgccgagggcggtgctcatggatctagagccagggaccatggacagcgtcagatctggtccctacggtcatgatttccgacctgataacttcgtc

SEQ ID NO: 46839 - DNA, 401 bp, Glycine max
  Clone ID: LIB3107-002-Q1-K1-A12
ttattatgctctatcaacacattaaaaagatgagtagtgatatatctgctgtggaagtaggtcaacatttctattggcaaatagggagtttccaagtacatgcccaagtacttattacttcttgggttgtaattgctctcttattggtttcagccattctaattattcgaaatctgcaaaccattcccgctttcggtcagaatttctttgaatatgttcttgaattcattcgagacgtgagcaaaactcaaattggagaagaatatggtccgtgggttccttttattggaactttggttctatttatttttggttctaattggtcgtgggctcttttaccttggaaaatcatacaattacctcacggggagttagctgcacccacaaatgatataaatact

SEQ ID NO: 46840 - DNA, 350 bp, Glycine max
  Clone ID: LIB3107-002-Q1-K1-A2
cgtaagtgtcatagagaaggagctatcctagatccaagctgtttattaccttgcatcttccgcaatcaccttctctcttcactcttatctctttctctctaaaaatgtgactttgttgtacgtgtgagagtgagcctaaaacagtacggatacttgagcaaaggaacacatattgaagtgtccaatgcgtaccaacaataccctttagtttactctctctaaaaaaaacacacaattctctatcctctacactctagtctctcgcttgctgttctctacttaactcacatctctaagctgtgtgcgtgaaccagcggatagcaaggatgagtaaacaagacatgatgaaa

SEQ ID NO: 46841 - DNA, 372 bp, Glycine max
  Clone ID: LIB3107-002-Q1-K1-A3
ccagaaaatgttgctaaagtaaaggcccggtacaatgagcttaatcttcagggtgtatttgaggagtacgagagtgggagctatgcgaagcttgtatcctccattgaagctcatcctatcaaagcagttcaagctgtattgaagtcctttttggctaaaatttacaaaaggcagaagtagagtcaacttaaggcgaggaccaaaattgtttaacatgcaatagaaactagagttctgatttctatctagtatctagagcagtatcatgtttcgtggcttggaatcttttaaaaattgattttcttcttgcctttggtttttctaattttggtttttcagtgttaagaatcttgtggaatttatcttgaaata

SEQ ID NO: 46842 - DNA, 398 bp, Glycine max
  Clone ID: LIB3107-002-Q1-K1-A4
caacgggacacaatgatacatgttgctaattgattttttggttgtctcacatgattagttcactgataagactcgaatttgtttccgagatgccctttaccgtcttgctagaaatacaaaacaacatgtactagaggacctggatggagatcttaacatgcatcatgaaatgccagactcagtttacaatgataccatgaggtctgaggacagtaaaccaatggaatcagagaccaacagtattgacagagcaattgcaaatctcatgttcaacaagatgtaaattaacataatagatcttacccttacaacactagtaaacttgaataaagaagtaattggaagtgaaggtcttcaaggacatagctcaaaagcctaggatgtgacaaaaagatctt

SEQ ID NO: 46843 - DNA, 325 bp, Glycine max
  Clone ID: LIB3107-002-Q1-K1-A7
ggaccaacacctgtgcagcaattctgtgcgccaaatttgatctttctttctttctttctttggcgggaatgacagaaacgggggtttctgataatttcaagggcttaatactggcgatgggttctagtgcattcatcggttccagtttcatcttgaagaagaagggtcttaagcgtgctgctgcacgcggtactcgtgcaggagttggtggctatacttatctactagagccgctttggtgggctggcatggtgacaatgattattggggagattgcaaactttgttgcttatatctatgctccggcagttctggttacttccct

SEQ ID NO: 46844 - DNA, 342 bp, Glycine max
  Clone ID: LIB3107-002-Q1-K1-A9
gagaggagagagtaacgaaggttgcttctgactgttcagaatcatgtcttggtgcaccattgagtccgatcccggtgtgtttacagaacttattcagcaaatgcaagtgaaaggagtacaggttgaggaactttattcattggatcttgactctctcaacagccttaggcctgtttatgggttgatttttcttttcaaatggcgtccaggagaaaaggatgaccgagtggttatcaaagatcccaaccctaacttgttttttgctagtcaggtaattaataatgcttgtgcaacccaagcaatcttgtccattcttatgaattcaccagacattgacattgg

SEQ ID NO: 46845 - DNA, 373 bp, Glycine max
  unsure (1)..(373): unsure at all n locations
  Clone ID: LIB3107-002-Q1-K1-B1
gaaaagtaaaagcttttgtagattcagaaacccgcacttgttgttggtgtggttgtgtttttgcatgcttcggacatgtcgatggcgatggtccacccttcggttcacccaatcgaagccccacccatgactgagcatgcaattgcaattgcaatgcccagacacactctgaaggatacgcagggcatgcccggcaccctcggtggcttcctcttgcgcttcgcccagttctctttcgccctcgtttccctctccgtcatggctaccacctccgatttcccttctgttactgccttccgctaccttgntgctgctgtcagcctgcaaagcttgtggagcctctctttgggagttgctgatatgtatgccattt

SEQ ID NO: 46846 - DNA, 379 bp, Glycine max
  Clone ID: LIB3107-002-Q1-K1-B10
ggtggcagagagcgaacccaaaactagagctgccttcccttcaaaccttccactcttctctccttttccaatcaagggaataatatttcttagagatattccgaaaccatggctcacgccaatcctatgatttttgttgttggaattctaggtaaccttgtctccttctgttgctttctagcaccagtaccaacattctatcgagtttgtaagaagaaaaccacggaaggtttccaatcacttccttacgtggctgcactcttcacttcaatgctttggatattttatgcttacataaagacgggcgaaatacttctcatcaccattaacgcattcggttgtttcatagagacagtttaccttgtcatctatatcactt

SEQ ID NO: 46847 - DNA, 338 bp, Glycine max
  Clone ID: LIB3107-002-Q1-K1-B11
gaagtgaaatgcagattcatgctctttcaggacatgataacactgtctgctctgtgtttacgcggccgacggatccccaagttgttacgggttctcatgacactaccatcaagatgtgggaccttagatatggtaaaacaatgtcaactcttacaaaccataaaaaatctgttcgagcaatggcccagcatcccaaagagcaagcttttgcatctgcttcagctgacaatattaaaaagttcaaccttccaaaaggagaatttttgcacaacatgctctctcaacagaaaactatcatcaatgcaatggctgtcaatgaagagggtgtgatggttact

SEQ ID NO: 46848 - DNA, 306 bp, Glycine max
  Clone ID: LIB3107-002-Q1-K1-B12
agaagacgacggcaggggatggaccactccggtattcctgatgtagcaaggggttggggcctatagataagaacggatgtacaactaactttcgagggcatataggactagcgtcttgactgtgatagcttgaaatgcaatgtgacctataacgtgattcgcgaaaccgaagttcaattgaaagaacaacattcaggccttaatgggctatatcatgctttacttctgcagtggaaaatacgctagtccataaatgattagtgagtttaaaaagagaggaataatttgagaagttgaaatgaacaa

SEQ ID NO: 46849 - DNA, 367 bp, Glycine max
  Clone ID: LIB3107-002-Q1-K1-B2
ttaaaagtaaaagcttttgtagattcagaaggccgcacttgttgttggtgtggttgtgtttttgcatgcttcggacatgtcgatggcgatggtccacccttcggttcacccaatcgaagccccacccatgactgagcatgcaattgcaattgcaatgcccagacacactctgaaggatacgcagggcatgcccggcaccctcggtggcttcctcttgcgcttcgcccagttctctttcgccctcgtttccctctccgtcatggctaccaccttcgatttcccttctgttactgccttccgctaccttgttgctgctgtcagcctgcaaagcttgtggagcctctctatgggagttgctgatatgtat

SEQ ID NO: 46850 - DNA, 339 bp, Glycine max
  unsure (1)..(339): unsure at all n locations
  Clone ID: LIB3107-002-Q1-K1-B3
tatcccgcaccacatgttgaactattgtggcngggtgaacaaacggtgcatgttattatcttaaccagatagggctttgatgaaacaaatgtttcgtatcagaactataacaccctgtttctctgtaaaaccttaaatggcatcttcctatctccacacaactcatttccaatctatccaaatttgcaagccatcatcatgtctgccttcacactccaatactcagaccacatcaattccatttcctactactcattatctatacaaacactgcaacagctcccacatcccccttagttccattgttcccctcaaagcaacatccacttccatccattc

SEQ ID NO: 46851 - DNA, 301 bp, Glycine max
  Clone ID: LIB3107-002-Q1-K1-B4
aaaacccccaaagggttcttctgcatagaagacgacagattgctacggcggcttaacgactacggaagggactcattctgcttctctattgctggctcatcacgtatcccaattcatatcatgatcagactctgtgtgcacgtgtgtgcatatgagctctcattatatttcgatagatctagattcttgagtgatctcatttacttactgaaacatacttaatatttaccatgctgagataaaatagcaaaattctgtagaaaaatcatctgatgtagcactgacactaagttttttcaca

SEQ ID NO: 46852 - DNA, 350 bp, Glycine max
  Clone ID: LIB3107-002-Q1-K1-B7
gaatatctatatcttggtgcccgttgattatgtatccaagtgaggggaagctataaacacccctaagaatgatgccatggtagtgataaaattcttaaagtacagagagccctaatcagtgatgggggaacacacttctgcaatgcataattgaagaagtttctggagtattacaatgtcagacataaggtggccacaccttatcatccccagacaaatggctaggcaaaagtttcaaatagagaactaaagcgaatccttaagaagactgttgcatcatcaagaaaggattgagctttgaagctggatgatgctctctggcttacaagatacgaacttaataaatttgt

SEQ ID NO: 46853 - DNA, 382 bp, Glycine max
  Clone ID: LIB3107-002-Q1-K1-B8
gatagagagagagagtttttagagagagaagggatgaagatcacggcattgttggtgcttaaatgcacaggtgagggttccgatcccgttattctggcgaacgcttccgacgtcagccacttcggttacttccagcgttccagcgtcaaggagttcatcgtcttcgtcggtcgcaccgtcgcccgtcgcacccctcagggccaacgccaatccgtacaacacgaagagtacaaggtgcacacatacaacagaaatggtctttgcgcgttgggatttatggatgatcattacccgattcggagtgcgttttctcttctcaaccaggtaatagatgaatatcaaaaaaactttggcgagtcatggagaaatgctcaggaagaca

SEQ ID NO: 46854 - DNA, 326 bp, Glycine max
  unsure (1)..(326): unsure at all n locations
  Clone ID: LIB3107-002-Q1-K1-B9
gtnaagtgacaaaaatacaatacaaaacaaaacagagcaaagagagagtgtgtgaaaagtgaaacaaaaaacagaacaacaatggcgacacttaaggttcctcagcctcttccccccgttgcagatgattgtgagcagctccgaaaagccttctcaggttggggaactaacgaggagctgattgtatcgatcttggctcataggaatgctgctcagaggaagcttatcagagaaacttatgcccagacctatggagaagatctcctcaaggccttggacaaagaactcacgagtgattttgagaggctggttcatctttggacact

SEQ ID NO: 46855 - DNA, 366 bp, Glycine max
  Clone ID: LIB3107-002-Q1-K1-C10
tggtgactggacgtagggacaagggtgtagccgaaccagtataaaactgagtttacattttctcttcccttaatctcctttatttattattgctttatattcatattcaaattgttttatttgaattaatatttaagaagattttcattaagggaattcataacttaaataaaaagtgaaatagatttttaattagggcaagtagtttggaatatcttaattcaaccccccaccccttcttaagatatctgaggccacttgtctaacaagtggtatcaaagcttcattcttgtataaagtttagaagcttcaagaaaaagatggtctcagcaaattccttattttcagaagggaattctatcaata

SEQ ID NO: 46856 - DNA, 350 bp, Glycine max
  Clone ID: LIB3107-002-Q1-K1-C12
ccggatgttgctgctgaagaaccctggtgtggtcttgagcaggaatatacattattgcagaaagatgtccaatggcctcttggatggcctcttggtgggtttcctgggccccagggaccatactattgtggaactggtgctaacaaggcttttgggcgtgatattgttgactcacattacaaagcatgtatttatgcgggaattaacataagtggaatcaatggagaagtgatgcccggtcagtgggaattccaagttggtccatcggttggcatctctgctgctgacgagttgtgggttgctcgttacattttggagaggatcaccgagattgctggagtggtgctttc

SEQ ID NO: 46857 - DNA, 398 bp, Glycine max
  Clone ID: LIB3107-002-Q1-K1-C2
gatcgatttgattgtttctgagtaatggcgtcgtcgcgagtagatctggatgggaaccccataaagcccatcaccatttgcatgattggcgccggtggcttcattgggtcccacctgtgcgagaagctcatgtcggagacccctcacagtgtcctcgccttggatgtctacaatgacaagatcaaacacctcttggaaccccacacgctcccttgggcctctcgcattcagttccatcgcctcaacatcaagcacgattcccgtctcgaaggcctcatcaaaatgtcagatctgactattaatctggctgccatctgcaactccgcggattacaacacgcgccctcttgacacaatttacagcaacttcatcgacgcgctttctgtggtgaagtactg

SEQ ID NO: 46858 - DNA, 360 bp, Glycine max
  Clone ID: LIB3107-002-Q1-K1-C3
acaagggctggatgtaacttcttccttacgaggaggacttcaaattccatgattatagagccgtcatcaaatgtgaagacccaaatgcaaatttgtattcatttgttgggagcatggagtttggagagcaaaaatatcctctttctgcccaacaacttcttctgagagactctaagcttcgtaatacagactatgtgtttggagcagtcatctttactggtcatgacacaaaggttatccaaaactccactgatcccccttcaaaaagaagcaaaattgagaagaagatggataagattatatacttcttgttttgtgttttatttctaattgcatttgttggatctattctctttggca

SEQ ID NO: 46859 - DNA, 390 bp, Glycine max
  Clone ID: LIB3107-002-Q1-K1-C6
gtatttttaaaaatataaaattctcagtctggcgtgtttttatagagatttgcgttcgtttcactctctgtgtcaaggttggcttttttttttttctcttttctttttcttctggatttattgagcttgtttcacccaagtcacatgccagtgttttcgttagagcgataaaaactagtgttttgttgtacgggaagatacaatcttggccttagatttgtaatattttatctggggaactagaccagactgtttttgttttttggttatatatatcagtttctttcacctgttgatgctcttttctctcctgcttgtgcgattgaagaggtgagagagcagatcaaagcttgaggcttgatttctgcgtttcttggagaatttgtcttc

SEQ ID NO: 46860 - DNA, 347 bp, Glycine max
  Clone ID: LIB3107-002-Q1-K1-C7
cccactcatcctcgcacacaaccccacacaactgtacttgtactaaaattaacttcttactcacgcacgtacttataaacacatgcatccacttccctcactcattcaaaatacccactttcatatttctattcattttttcttatcaattaattcaactagccaaactcatctctcattccccatacaacctctttagcgatactcacaacttcttaattcaccctatatatacaaagcagtcacttatacttctcattactcacacgtcataccatacttcactgattcccccttataaataaatatattattttctaacatctattaaaacatttacctctcca

SEQ ID NO: 46861 - DNA, 417 bp, Glycine max
  Clone ID: LIB3107-002-Q1-K1-C8
agacgacagaaggggataatcattgatagcgatggtgaaaatctcacttggtggatgcgatgatggggaaggacccagcaaccgaacccataagcgacgcagggaagatgatgatgacgacgacgaagaagagcaacaacaacaacgaagctttgagatggtggacccttcaataggaactcaagagaacgaagatcatgctgctccatccaatgatggatcgaattctaacggaaatggggctggaaccagtacccgggataggtccgttcctatcttcgtttccgaccctgatgtccttgattgctgcatttgctatgaacccttgacttcccctgtgttccagtgtgagaatggacatattgcttgctctatttgctgtgtgagactcagtaacaagtgtcccatgtgttcaat

SEQ ID NO: 46862 - DNA, 346 bp, Glycine max
  Clone ID: LIB3107-002-Q1-K1-C9
gactgcggtttttttctgctccataagaagaaagatccttaaatcaacattctctctccctcccttggttataatagcaagcttttcaagcatatttccggggtttgttcccttttccttgtttagggttttctttggaaaaaaaaggtaattaggtataataatataattaaagcaaaaaaaaaaaaaataacatgggaaggggtagggttcagctgaagaggatagagaacaagatcaatcggcaagtaactttctccaaaaggagagctgggttactcaagaaagcacatgagatctctgtgctctgtgatgctgaggtcgctctgattgtcttctcccacaa

SEQ ID NO: 46863 - DNA, 387 bp, Glycine max
  Clone ID: LIB3107-002-Q1-K1-D1
gcagaaaaggaacagatgttggaagatatgagagggttgcttcaggctgctgaagaaaaaaggcaagctgctctagctgagctctcagctaaacatcaaaagaatatcgagagtttggaggctcaaattaatgatgcattgtccgacagaagtaaggcaactgaatccatttcttcactgcaggttctagttgcagaaaaagaatccagaattgcagagatggaagcagcatcaacaggagaagctgcacgactcagagcagctgtggaaagtgtgaaaggggagctttctcacataaaagaggagcatgaaaacgaaagggaaagctgggaaactgcttctcaggcacttaaagcaaaacttgaaattgcagagagcaactgcata

SEQ ID NO: 46864 - DNA, 316 bp, Glycine max
  unsure (1)..(316): unsure at all n locations
  Clone ID: LIB3107-002-Q1-K1-D10
ggtgtgagagaacaatggcaatggtgaagtctcccaagaagcaagtgaacctcttctattcccttgactgtgaagaccttgcccagaacgttgctcttcaatcaccccacatcgttctccagaacatcaaatggaggtcatttgctgatggatttccaaatatatatataaataatgcagaagaacttcgaggtcaacatgttgctttcttggcatctttcagctcccctgcacatgtcttgaacaactttctgtcatatatgcactccctcgtttatttgntgcttccttcacattggtattgcccttcttttca

SEQ ID NO: 46865 - DNA, 372 bp, Glycine max
  unsure (1)..(372): unsure at all n locations
  Clone ID: LIB3107-002-Q1-K1-D12
gacagttagaagcaacgagcagcggctaggaccggaatctgcaaactcaagagttccatctcttcttccacacatccatcgttaatcattttcccgcaaaatattttctttctctgttctgtgccttcttctccaccgttggttcaaaaatcgcagccgttgatcagattgagcctccgtgttgatcttcatcgccatcatggaggtccgttccaatcccgccttcgacaactcctccgaccaccttcgaccgcccgccgtttcgtccaagcagccgctgccttctcctaccgccgtcgacacctncgccgtttctcagagactccagaaggaattaatggctctcatgatgagtggaagagatctcggggt

SEQ ID NO: 46866 - DNA, 390 bp, Glycine max
  unsure (1)..(390): unsure at all n locations
  Clone ID: LIB3107-002-Q1-K1-D2
ggtgaccgnctttcaccgtccatgtgtgtgtaggcctgtggattataaaatctgtaaatgagtttatattcattcaaggttttgtttttcatcaatcatcatagcgaaagataagtcttgtaattgtcttttgggttatcattataatcgatctttcgctctccggtcaaattcagatatatttccacgatcctttaagtcggcgacttaatcaaatttaaaattctgtcttttttctctctgcaataacgtattctgaaagtatattcaaaccttctttcgcagacttagcgtgatccatcaggatttaatttgatttgcattgtattggaaagacaaatggcgatgttgagaagatatgttacagctagtactattgcattatttgca

SEQ ID NO: 46867 - DNA, 397 bp, Glycine max
  Clone ID: LIB3107-002-Q1-K1-D3
tgggggcattatggtctcatgaaataaggcggccaccgcagccgcccgtacattaaacggcaacacagatctcctctccatctcttttttatttttgttttattttttcccactctttctcctcgtttccgaaccggaccgaaccgagccggaaacatgggagttccagcgttctaccggtggctcgcggatcggtacccactctcgatcgccgacgtcgtggaggaggagccatctgtcggctccggcgccgttgatgtgtctaaacctaatccaaatggcgtggagttcgacaacttgtacttggacatgaacggcatcattcacccctgttttcaccctgatggcaagtcagcacctactacctacgaagatgtattcaaatcaatctttgact

SEQ ID NO: 46868 - DNA, 387 bp, Glycine max
  unsure (1)..(387): unsure at all n locations
  Clone ID: LIB3107-002-Q1-K1-D4
tgttcaatcaagttagaccatcttgatttgtgtagtagttaatattataaagaatataagtaaaaaaataaaataattattttaaatttttttgtacgacagttattatggaagggagaaaatactaaaaattgcttcaatttttatgtaaatgtaaatcacatggactttaagtataattgaattttgggattcaatgctcttgtggtactttacatagcggcaccattattatttgcatgacaataatgtgctatgattgtactaaaagtttcggaatccaacaaacaactgccttaaacattaattattcaacggctccagcattcaacctanagaaattaatgcactattttaaaatttgttttttaaaanaagaacaaaatt

SEQ ID NO: 46869 - DNA, 396 bp, Glycine max
  Clone ID: LIB3107-002-Q1-K1-D5
gaaacaatcatgagcttcattctgtgtccgattctctttgcatttacctttctgtcctcgcccgttctctctgcttcggatctggtcctcgccaaggttgaccgtcgcattgatctgacttcacagattgtgcgcatcactacttcactaaaggtgcagaatacgggatctgatgttgtgtctgagattttgctgtcctttcctgagaaccaggcaagtaacttggcatacttgaaggcaacacttggtgatgggaagggaaaatcaaaaccatcttctggtgttggtttacctgtcgaagttgtccggcctaaagatgtgccaccttccttgacaatttattccgtgtctttacctaaggggcttgggaagggagatagtctgacgttggatgtc

SEQ ID NO: 46870 - DNA, 389 bp, Glycine max
  Clone ID: LIB3107-002-Q1-K1-D6
gaacgtgttcgtcggttgaagagcaggctggttgccctgaccaggagggttcagaaggttagagatgaaatagagcagcttatggatgatgatggagatatggccgaaatgtatcttaccgagaagaaaaggcgaatggagttgtcattttatggagaccagtctatggttggatataaatcagttgatggtgcatccatttctgctccagtctctcctgtttcatcacctcttgattctcggaagcttgaaaagtgtttcagcattgctaggagtcgacatgagagcatgatgagttctgaaagtactacggaaagtatagaggagcttgagatgttgctggaagcatactttgttgtcattgatagcactctaaataagttgacatc

SEQ ID NO: 46871 - DNA, 385 bp, Glycine max
  Clone ID: LIB3107-002-Q1-K1-D8
gatgcatagcaattccgaagtcctaattgtttaaacctaattctcatttcttcatcgttcgattcttctcctcctaaagatgcagatcttcgtgaaaactttgaccggtaagaccatcacccttgaggtggagtcctccgacaccatcgataacgtgaaagctaagattcaagacaaggaagggatcccacctgaccagcagagacttatctttgcgggtaaacagcttgaggatggtcgaacccttgccgactacaacatccaaaaggaatccactctccacctcgtgcttcgcctcaggggtggcatgcaaatctttgtcaagactttgactggcaagaccatcaccctcgaggtcgaatcctcggacaccattgataatgtc

SEQ ID NO: 46872 - DNA, 338 bp, Glycine max
  Clone ID: LIB3107-002-Q1-K1-D9
ggtaggtggccctattgagaggcagttccccttcgcgtctctcttcaaacaaaacagaactgaactcgctgactgaaactcgcaaaaattagggttttgcagtgatggcactgtccaaccgcgtccgatcgggaatctctctcttcaccaaatccacgttcctcacttgcgagcgatccactctccaacgattcctcgttgccccttccatttccttcgccttcagaaattacgccaacgtgccggggcaaaaggaaaacaaagttaaggtccctctggctttgtttggaggttcaggaaactatgcctctgctttggatattggatctgggaaaagc

SEQ ID NO: 46873 - DNA, 426 bp, Glycine max
  Clone ID: LIB3107-002-Q1-K1-E10
gagggtgttgttacttcttctctggttgagtcggatctagagtcttcagtttctcctcgttgttcttcgctttcctgttttcaatttcgattctttcgttaatttaataagatgtttgggagggcaccgaagaagagcgataatacgaggtactacgaaatcctcggcgtctccaagaacgcttcgcaggatgatctgaagaaggcttacaagaaagccgccattaagaatcaccccgacaagggcggtgatcccgagaagtttaaagagctggcgcaagcttatgagggtcttagtgacccctgaaagcgtgagatatatgatcagtatggtgaagatgcgcttaaggaaggaatgggtggtggccggtgccatgatccatttgatatcttttcatctttctttggcggtggagttcctttggat

SEQ ID NO: 46874 - DNA, 387 bp, Glycine max
  Clone ID: LIB3107-002-Q1-K1-E12
gggacttgtccttttcagacctgtctgtcgacgccactatttttccatcctcaccagaatatagagcgcagtcactcatctttctctctttttttttttttgccttcttttcattcctttcttttcttcaaatcaaggaactcagctatgactaccagagaaatccttcaaaagatgaaggtaaaagttggtttgggttcatcagaccctgactcagggaaaggaaagagcaagatgtcaaagaacataactcatgggtatcatttggtgaaagggaaatcatatcatgacatggaggattacgttggggctcaatttaagcaaatagataacaatgaattgggtttgtttgcaatattcgacggccatgcgggtcagaacgtacct

SEQ ID NO: 46875 - DNA, 337 bp, Glycine max
  Clone ID: LIB3107-002-Q1-K1-E3
gatacaatacaacgattgaaagtccaagtcttggggaatttccaatttccagctccaccaagatccctcttttcctacaaacccatctctctttcatccctccaatcttcatcctgtgaaaaccgcgaacgaatcaacaaatgggtggttgcgtgttgaagctagtagattccgttctgttcctgttcttcctcctaatagcggtggtggctcctctgatcgacgctcaaacctgtcttcctctctcttacttccccgacatcctcgtccaactcaaggaacagtacaccaatgactacggcgattaccttgtcgcagaaaagccgcacttttttgt

SEQ ID NO: 46876 - DNA, 386 bp, Glycine max
  unsure (1)..(386): unsure at all n locations
  Clone ID: LIB3107-002-Q1-K1-E4
gtgataataagaaagaagacggtgttgatatatcgctgcctgacatcaacaacggtgtatatggaacagatgagtttaggatgtacaacttcaaggtgaagccttgctcaagggcttactcccacgactggactgagtgtccattcgttcatccaggggagaatgcgaggaggagagacccacggaaatacccttacagctgtgttccttgccctgagttccgcaaagggacctgccagaagggtgattcctgcgagtatgctcatggtgtttttgagtcctggctacatcnccgccaataccggacaaggctttgcaaggatgagacgggctgtgctagaaaagtatgcttctttgctcacaaacctgaagagctacgccctgtg

SEQ ID NO: 46877 - DNA, 370 bp, Glycine max
  Clone ID: LIB3107-002-Q1-K1-E5
gaccgggtgctctgcatcgtgtgcgggaagagcgtcgagaaggaggagcagaggggaggctggcaccgcgtcgagctctccagtggacagttcgttcagcgcctcactttgcctgagaattccatggtggatcatgttaaggcctatatggataacggggtgctcactatcacggttcctaaacaccacagaggggtcaataaccgtgttagaaacattaacatctcttctcgtccgtgagtgttgttgttgtgtgtctcatgaaatgaaagaattgaaacctagctaaccgctatctttgcataagaaacacggttgtctagataaataaataatagtaacaaaagttatgcgtccaagtctagacttt

SEQ ID NO: 46878 - DNA, 393 bp, Glycine max
  Clone ID: LIB3107-002-Q1-K1-E6
cctcctccttgttttacaacatagatggagcgatgaaattaaagccaagcatcagacttgcctagagtgcacatttcttcaggtttctttcttgctacctcttttcttgtggtattatatttggccatggctccaataaccgcagcgacatccccacaaacaaatacttgatcttgcaccaaactgatgttgttttcaaccttgagagtctcatcacgtttttcttcaaaaacactttgaagaccaagaagaaagttaggaaagaggggattagatttgttgagaatccggagattacaagttgtatttataaagagacatagatttcgaagtgagatataacattttttaaaattattttgcattttattagaataaactaataattaatat

SEQ ID NO: 46879 - DNA, 369 bp, Glycine max
  Clone ID: LIB3107-002-Q1-K1-E7
gactcattctctctgcagattctaatcttcgcaaatcaacaacgtctctctctgttactctgaaaactgacttcaagttagtgtaactagctgccaagttgtgatggcattggtctctggaagaagttctgctctgaacccaaatgcacctatgttcatacctgctgcacttcgtcaggtggaggatttttcacctcaatggtgggatcttgtgaaatcttcaacatggtttcgtgactattggttgagccaacataaggaggaagaatttgaagaagttgccaatgactctactaatgatgatatggagaatatgctctcggaaacttttgatctaggcatggaagaagacttcaatgttctagaaaa

SEQ ID NO: 46880 - DNA, 371 bp, Glycine max
  Clone ID: LIB3107-002-Q1-K1-E8
tgtacaagattggaggtggtggaactgtgccagtgggacgtgttgagaccggtgtcttgaagcctggaatggtggtgacttttgcaccaactggactgacaactgaagtcaagtctgtggagatgcaccatgaatctcttacagaggcacatcctggtgacaatgtgggattcaatgttaagaatgttgctgttaaggatttgaagcgtggttatgttgcctcaaactcaaaggatgaccctgcaaaggaggctgctaacttcacagcccaagtcatcatcatgaaccaccctggtcagattggaaatggctatgcccctgtcctcgactgccacacttctcacattgctgtcaagtttgctgaactcatg

SEQ ID NO: 46881 - DNA, 368 bp, Glycine max
  Clone ID: LIB3107-002-Q1-K1-E9
gacagttaatttatcataacatttgtttttggtgcattcaaaaaatggctgggattgtagtgatttttgactttgactcaacaatcattgagtgtgatagtgataattgggtgcttgatgagaccggtttaactgaaaagttctatcagcttcttcctagcacgcattggaaccctctaatggataagatgatgaatgaacttcattcacaagggaaaaccattcaagacattgtacaaattctgagtaggacaccaatgcatcctcgcattgtccctgctattgaggcagcttattctcttgggtgtgacctgaagattgtgagtgacgcatatattttctttattgagacaattctgaagcatcat

SEQ ID NO: 46882 - DNA, 360 bp, Glycine max
  Clone ID: LIB3107-002-Q1-K1-F1
gactctgtggttctcttccaattacaacacaatcagtctgagattcgccaccgaaaaacctctcaccatggtttctcgccatttggtttcgctcttcctctgtttcctctgtttcgagatctctgtttcatcaattcgattgcccggtttggaccaagacgccaaggccacgcatggatcggtgcttaggttgaacagaggaggctcttcagtgaagtttgatcccacacgggtcactcagctctcgtggagtcccagggcttttctctacaagggctttttatccgatgaagaatgtgatcatttgataactctggccaaagacaagctggagaagtctatggtggcagataacgagtc

SEQ ID NO: 46883 - DNA, 395 bp, Glycine max
  Clone ID: LIB3107-002-Q1-K1-F12
gttcatcgtcggcagaagcatgtcattgtgatgatcaagcaatgcctacaacgtgccatgggtagaaaagtatcgtcccatcaaggtcgccgacattgtcgtcaacgaggacgccatctccaggaaactgttctcaaactaaacgcttccgatgataggtacgtttttgttatttctcgattcagttttcaattctgcacgattttctgttaatttatcctttcacttttggttatagatgatttgctccatggttgaactaacaggtggagaagttgagggaaatgagtccactttatgaatttgtcaaggaaggtatcaacatcaaggacattcaatgggcacagcactgattattatcaagctctcagattgcaatgcaagtgatgggaaga

SEQ ID NO: 46884 - DNA, 302 bp, Glycine max
  Clone ID: LIB3107-002-Q1-K1-F3
gttacacatgactattcagaagtacgtccgagcccatggatcgtacctaatgcataatcggatattaattggccatatctttatggtatggacgcaacttctataaatcattgtggttgcactggtaggacctggtatacatattttgacgcatttaaactacgatgtagactaattgtatatagactatgatcgtgtgcatgtacaatgctatgctcaattcatttctaacagatttaggatgatcgttaggagattctacttgttgtgagatcattcttatactcgctacatgacatcac

SEQ ID NO: 46885 - DNA, 381 bp, Glycine max
  Clone ID: LIB3107-002-Q1-K1-F4
atatcagtatgcacaatgtcgagaagctgagtgtttcttgtagctcctttctttgtatgttttgcttgttttcccttaatacaacccacacaaatatttagatccgtaaaatctagatcaggaagaatttcattatttattaatttttccatcctttctctagaaatgtgacataaacgtttatgccacaagaaagcagatcgttcattcactaaactacatttagtgccaacattatgatgcagagttaaaacagtcagcatacaaactgtctattttcaatttatataaactatcacaagaatatcagtaccaatgagatgattatgcttaaataaattgaaacatccattatcaaaattaatagagtatccagtaaca

SEQ ID NO: 46886 - DNA, 393 bp, Glycine max
  Clone ID: LIB3107-002-Q1-K1-F5
caatatctaagcaacagcatttcaaggaatagtatgtatactctgctgcaaccacggcttgatgtccttctttttgaaatagtgttcccccttatgtgcttcaatgataatgatcaaaagctttgggatgaagatccacatgaatatgtaaggaaaggctatgacattattgaagatttgtatagtcctaggactgcttccatggattttgtgagtgagttggttcgaaaacgtgggaaagaaaatcttcaaaaatttattcaattcattgttgaaattttcagaaggtatgatgaagtttctgcagaacacaagccctatagacagaaagatggtgcgcttcttgctatcggggcactttgtgacaaattgaagcagaccgagccatacaaa

SEQ ID NO: 46887 - DNA, 391 bp, Glycine max
  Clone ID: LIB3107-002-Q1-K1-F6
ggttcaccacatatagtgtgggggggggttagcttcgcgattcttatttctctctttaactctctctctctctcgtcctcgcggatggagagagagaaagtaagagagaaagagcggtggttggtggttttggtttggtgaagttcgattcgatgcgatgcgattgcgttggggattttgattctctctctctcactgtgcggtctctaattcgcttgctgcaggtcgggaaccggttttcgcgcggaatggaggaacggtcgccggcggcgaattggatcccgccttgcatcaactgaatcggaggccgcggtgaagctttgcctcgttttccgctcagatctcatctccgagattctaccaccagtattttttaaatttattttaatct

SEQ ID NO: 46888 - DNA, 404 bp, Glycine max
  Clone ID: LIB3107-002-Q1-K1-F7
tggtttcctggtttggtcatagagaaggagggagtatcaatgttccccaaaagaaaatcaaatagtatatggttttgtgaaattccatcatttttcagaccatgtatcgatgggtttcaatattgcaagctcgttgttcaagtcgacaaaacatggttgtacaaaaagtaaaataggatctttcttatggcagttgcacacgatgacaacaataaaatccttttaatagcctatgttgtgctcgaaggtgaaacaacaaaagtatgactctttcttcctcaaaattttaaaaagacatctcaccccataagatggtctatgtttgatttcaaacaagcatgtgtcaataaaaagtgcctacaaaaggtgtgatagtggatgaatgacacataattctatgcatg

SEQ ID NO: 46889 - DNA, 386 bp, Glycine max
  Clone ID: LIB3107-002-Q1-K1-F8
gataatgaaagtcaggagggagcagatgttgaaacagatgatgaggatagaacatattttgacacaaatgaatttttgtattctgatgccctaagaagtgcttcctatcgaagtagggaaggtatgggcaatgctagtatattcgatagagattatatttgttatgatggtgtgcatgggtttgacaaggagatcaaagatgtaagttatccatatgtcaaaagaagggataacctaccagagccaaaagaaaaagagaagcctgttggtttgtggtcaattattaaagacaatattgggaaggatctttctggagtttgtctccctgtttattttaacgaaccactgtcttcattgcataagtgttttgaagacctacagtattt

SEQ ID NO: 46890 - DNA, 363 bp, Glycine max
  Clone ID: LIB3107-002-Q1-K1-G1
aaggattcaaagtgaagggaagtgccccctgtcctacttcacttttagttttctctctcctctctctctttctctctccttggaccttggagttacaagaagttgattgttcctggccttaatttcttcaaccttctcaacacgtttaatatcactaaccacttcctcgttgaatcataacataaccacttgctctgtgtttgttcttgcaacttcatattgtacataaaaacatggatcatcaatatgctaagcttattagaaggatgaacccaccaaaggttgtgattgacaacaatgcctgtgaaaacgcaactgctattcaggttgacagtgtcaacacacatgggattctccttgatg

SEQ ID NO: 46891 - DNA, 348 bp, Glycine max
  Clone ID: LIB3107-002-Q1-K1-G10
gcgacgatggtcgtttctgcgccgattgcttgaaaaccaacttgttcggcaagtttcgtttcgccgtcacttcaaatgccatgataactcccacggacaaggtcctcgttgccttctctggtggcccttcatccagggtagctttgcaatttgttcatgacatgcaagagagggctcagaggaacttcgatgcgagtagggaccggtcgttgccggtgtctggtgttggagttgtgtttattgatgagagtgccgtgttgccgattccttctaatgaaatggaggaagcggttgaggttgttagtgaggttgtgtcgagtttggccccaccaagggaaggagtgcata

SEQ ID NO: 46892 - DNA, 363 bp, Glycine max
  Clone ID: LIB3107-002-Q1-K1-G11
gggctcctccttagactgccagcccaatatagccattggatcgaattcagtctgaattcggtctaatggtttgggagttctaattaagtctaagaattctgtacatatatatatttagaagatcacagggtgcttgatcagtggtgtatcaggatggacaaggtgacgaggttggcttctgaaaagggtgtggtgattttcacaaagagctcttgttgcctctgctatgcagtcaacattctgtttcaagaacttggtgtgaatcctgtggttcatgagattgatcatgaccctgaaggcagagaaatggagaaagctctattggggcaaagcttcactgctccagttccagctgtattcata

SEQ ID NO: 46893 - DNA, 371 bp, Glycine max
  unsure (1)..(371): unsure at all n locations
  Clone ID: LIB3107-002-Q1-K1-G12
gagggaaacaaggaagcgaaatgacacaatagtccttcttccctgtttccactttccaggttttctccttctcgtttgttgagcgcttttctctccctctccctcttcttcactcagtcagctgccgtagaaattcattatggtggcaacagctgcaacttcatcatttttccctgttacttcaccctcgccggactctggtggagcaagcagcaaacttggtggtgggcctgcgaaccttggaggtctaaaatccaaatctgtgtcttctggtggcttgaatgcaaaggcacaagccccttttgaaattaatggaaccccagtntgtacatctaaaganatcttgaagcatgaggatgatctacctttac

SEQ ID NO: 46894 - DNA, 374 bp, Glycine max
  Clone ID: LIB3107-002-Q1-K1-G2
tcaggggaaaatcatcaaagctcaagccggtctactcaaaccactctgattctcttgctctgctattaccctgcttcctgtggaacaaatttccatctagctctcctacgaattaggttttgttctggagaaatgtatgcagagactggtcttctcttcccatatttgaacaacatctctcacggtcttcatcagctcgaggagtactgcaaaacccagaagtccaatgcttcaatggatgaccttgttcagacttctgtcatgtcagagtatgatttggcagcagagggagatctgttcaaagctcctgaacctattattgaagagccaatcatggatatggatcccatgacagccaccatctccatgatatc

SEQ ID NO: 46895 - DNA, 376 bp, Glycine max
  Clone ID: LIB3107-002-Q1-K1-G4
ggcacatttggaattggagcaagatgttgccacggaggatgagcctaatcaggtcattgattttcctggagggaaagtgggatttacttctgaaatgagattcatttctgagtctcctgagaaaagggtgccctgttatcgtgttcttgatgacaatggtgagatcgttaaatacagcaactatgtacaggttagcaaggaaatgggtgtgaagatgtattctgacatggtcactcttcaaactatggacaacatattctatgaagtgcatatgcaaggtagaatttccttctacctcacccaaatgggggaaagaagcagttaacattgcatctgctgctgcacttgcttctgatgatataatattgcctcagta

SEQ ID NO: 46896 - DNA, 369 bp, Glycine max
  Clone ID: LIB3107-002-Q1-K1-G5
ggttcgagtgtgtgattgtttgttgttgtaactcgttcttcttcttttgttgttctgtgtttgtgtttgttttttctctcacctgaaaatgtcttgctgcggtggtaactgtggttgcggaagctcctacaagtgcggcaacggctgcagaggctgcaagatgtacccagacttgagctacactgagtcaaccaccaccgagaccttggtcatgggagtggcacctgttaaggctcaatttgagggtgctgaaatgggtgtgcccgctgagaacgatggctgcaaatgtggaccaaactgctcctgcaacccctgcacttgcaagtgaggtgttgggagagcaagcttcaagcagagatagcccttaat

SEQ ID NO: 46897 - DNA, 399 bp, Glycine max
  Clone ID: LIB3107-002-Q1-K1-G7
gaatcaatgttgtgagatctgtgtgggagacagtggggagcgtttcgtccgaagatgcttcagaccacatgagcaaccgttgtgggagttatagtctcagtgctgatgtcagcgagtcggagagctgcagcagcttctccgcccgccgcttcgacgccgagggagcttccagttcagccaacctctcaccgcgccccgtcgctgctcactttaacttcccgccggcgcaggtcttgcttcccgtcattggcggcaaagacgtcttcgtttgggatcacaagcgtgatctcgatttgtctggtactctttctctcgccttccgttttgctgatatcttttaactgagaatgttatgttgaatttgaagagcaattacattttttcttttttgcagaagtg

SEQ ID NO: 46898 - DNA, 303 bp, Glycine max
  Clone ID: LIB3107-002-Q1-K1-G8
tcccgctcgacccactcatccgcccactcaaccatacaaccgctcttatatcactgacaacacaacttcatcagcgcaggttttactaatcaggtcattgattttcctttacacaaaatcagatttacttctaaaataaaattcatttcttaatctcccgataaaacagatccctattatctccttcttcatcacaattcattacaactctaaatacatcaactatatacactctaccaacacaatctctgttaacatttattctcacactaccaatcttttaactatctacaacatattcta

SEQ ID NO: 46899 - DNA, 337 bp, Glycine max
  Clone ID: LIB3107-002-Q1-K1-G9
acatgcccaatggaaacttggatgattgggtgcatggcaaaaataaaggagataatttggtcgccgattggttcactaggtataagatcgccttgggcgtggctcagggaatctgctatcttcaccacgactgtgatcccgtcatcgtgcatcgcgatctcaaacctagtaacatattattggacgctgagatggaggccagagtcgcagattttggtgtcgccaagttgattcagaccgacgagtccatgtctgtcattgccggttcctatggctacattgctccagaatatgcttacacccttcaagtcggtgaaaagagtgacatttacagcta

SEQ ID NO: 46900 - DNA, 346 bp, Glycine max
  Clone ID: LIB3107-002-Q1-K1-H1
gatgaggtctaatatatcattcaaaagtttttgaaatgttgtcaccccttcttctatttctatgcctaactcttcctttgtttttgttgtccttcttcaaataccgtaaaaccttcaagaatccaccacttccaccaggtcctagaggccttcccataatagggaatcttcatcaactagatagtccttctcttcatgagcagctatggcatctctcaaagaaatatggtcctttattttcccttcaatttggattaaggccagccatagttgtttcctctccaaaattggccaaagaggtaatgaaagacaatgaccttgagtgctgtggacgacctaaattact

SEQ ID NO: 46901 - DNA, 378 bp, Glycine max
  Clone ID: LIB3107-002-Q1-K1-H11
cccacgcgtccgagacgacagaagggggggttaacaagcaaactaaacgtacttcggaggtcgcactctgcgaaacccaaacactgtctccgtcttgatggctgcgtcgcgaatcgtggcccatcctccgccctatctccaccgtcaatctccgccatcagacgccgcgccttccctcaaccttacactcctcccaaaacggtaccgtaacctcggcatttgcgcttcccttcgcggcgataagccccactccgtcgaactgcgagccaccacctccgacgtcgtcgtttcccgagatcttctctctcttccgcggcctttgtcttcgactcagttatctgcttcagtttccgatggctcttgcctttcgggtgcata

SEQ ID NO: 46902 - DNA, 340 bp, Glycine max
  Clone ID: LIB3107-002-Q1-K1-H12
aacatatacttggattacatgtaaataacgaaggaatagaaaataattttcctgtagaagcagctgcattgaataatttgattcaaatactaactgttgatttttcatgacatttaccatagatgttcaatacctggggtcacactgtatgttttgatttagtaatatttcattttaatgactgcactaagtattggatgctggatggaatgaattctatatttggtactggtaatgctaaatgctcaagtctagttcatttgtgtgaccaacaacaatggctcccaggttccgcctcaaagtgtagctggttatgccacagttgctactacagaggatg

SEQ ID NO: 46903 - DNA, 245 bp, Glycine max
  Clone ID: LIB3107-002-Q1-K1-H2
atatatcaaacatgaggccttgcaatgttgacaccccttcttctatttctatgcctaactcttcctttgtttttgttgtccttcttcaaataccgtaaaaccttcaagaatccaccacttccaccaggtcctataggccttcccataatacggaatcttcatcaactagatagtccttctcttcatgagcagctatggcatctctcaaagaaatatggtcctttattttcccttcaatttggatt

SEQ ID NO: 46904 - DNA, 162 bp, Glycine max
  Clone ID: LIB3107-002-Q1-K1-H3
cttaaatccaacttatataagtttcacagatgtaatctataatcattaggtcaattatatttcaccatccctacttctctttctattaccatctattcctttgaatcacttcacctttttcacatacttctactactacattaatacttcaatcccaccaat

SEQ ID NO: 46905 - DNA, 274 bp, Glycine max
  Clone ID: LIB3107-002-Q1-K1-H4
ctatcattcaaaaggccgcgacatttctacaccccttcttatatctctatgcctcgatacaaactataattattccactctactacaaatacctaataaccttcatgaatccaccacttacacccattcctacattccttccataataggtaatcttcataaactagatattccttctcttcatgatcaactatggcatctaccatagaaatatggtcctttatttccccttcaatttaaattaacgccagccatagtcgtttcctctccaaaa

SEQ ID NO: 46906 - DNA, 403 bp, Glycine max
  Clone ID: LIB3107-002-Q1-K1-H5
gacgacagaagggggaagaagggatggtagaaggagcagagctgatgtggttgagcagttcctcccagaccacaatgagtccatttctgcagttcttgacaagtttggtgccatgggaattgacacccctggcgtcgttgcactgcttggagcacacagtgttggtcgaacccattgtgtgaagttggtgcaccgtttgtacccagagattgatccagctctgaaccctgaccacgtccctcacattctgaagaagtgccctgatgccattccagaccctaaggcggtgcagtacgtgagaaacgaccgtggcactcccatgattctagacaacaactactacagaaacatattagacagcaagggtctcttgatagtggatcaccaactagccaatgacaag

SEQ ID NO: 46907 - DNA, 414 bp, Glycine max
  Clone ID: LIB3107-002-Q1-K1-H7
aagacgacagaaggggaactacttaaagccaacttatatgagtttcacagattgaatcgagaatcagggggtgaagtgtatttcacgatgccaaggttgcagtcaattaccattcagtgtttggaagcacttcagtttttgcacagtcttggactaatacattgtgacttgaagccggagaatattttggttaagagctatagcagatgtgaggttaaagtcattgatctcggaagtagctgttttgagacagatcacctttgctcgtatgttcagtccaagtcttatcgtgctcctgaggttattttggggctttcatatgacaagaagattgacatctggtcacttggatgcatcttggcagaactttgtactggcaatgttctcttccaaaatgattcccctgcgacatta

SEQ ID NO: 46908 - DNA, 383 bp, Glycine max
  Clone ID: LIB3107-002-Q1-K1-H9
ttggccgcgcgtgggttctggagcgggatttgagaattgagaaagattctcaatcctcttcctcaattcaattcaagctgtgtgaacatgaaattgaaacttggacaagaaaaattcaattaaaattccccccaaattaccgtgcatgtgtcgtcgcctggacccaaatcactctctctctctctgagcataatattagggttcaacaaggagttttcttcactctggcaataacactcacaacacagcgatgtcattttcgttgttcgccactccgcagcaacagcaaccgcagcagcagtctccttttcagccacagcaaactagtttgttcctttcgcaacagcagcaacaatttcaacaacagcaacaacaaccacaac

SEQ ID NO: 46909 - DNA, 357 bp, Glycine max
  unsure (1)..(357): unsure at all n locations
  Clone ID: LIB3107-003-Q1-K1-A1
acgaggggggcttggatttcgcaatagccgaagcaagaaaatatgggatcaagatggtgttgagtttggtgaataactatgagaacatgggtggaaagaaacagtatgtggaatgggcaaggagtcagggacagtccataaattctgaggatgacttttttacaaatcctgtggtgaagggatactacaaaaaccacatcaaggctgtacttacaagacgtaatagcatcactggagttgcttacaaagacgacccaactataatggcttgggaacttatgaatgagattaggtgcccttctgatcaatcangaaggacagttcangcttggatcactgagatggcatcttacctga

SEQ ID NO: 46910 - DNA, 315 bp, Glycine max
  Clone ID: LIB3107-003-Q1-K1-A10
tgttcaattcgacagtgaagagtctgcacagaatgcgtattgagaagttaaatggcatgttgatcaatgataagcaggtctatgtaggccattttctgcgaaagcaagatagagagaatgctctcagtaagacaaaatttaataatgtctatgtgaaaaacttatcagagtcaaccacggatgaagagttgatgaaattttttggagaatatggtaccattactagtgctgtaataatgagggacgcagacggtaaatcaaagtgttttggctttgtcaattttgaaaacccagatgatgctgccaaagctgttg

SEQ ID NO: 46911 - DNA, 348 bp, Glycine max
  Clone ID: LIB3107-003-Q1-K1-A11
gaagctgaatcttccaatgttggagtggagggtgaagctgaatgttccaatggtgcagttgagagtgtggctgagccttcaaatgatgcagtggagagtggagctgaaccttcacaaggtgcagtggagagtgaagctgaaccttcaaatggtgcagtggagagtgaagctgatccttcaaatggtgtatctgagagtgaaaatgaaccttctgtggatgtgtgtgagacaaaaaacgatgcagtgaatagtgaagctgaaacttcaagcggtggactgcatagtgaaaaagaggcttctgttgtgtctgagatggaaaacaattcattgtagagtgaagcttaacac

SEQ ID NO: 46912 - DNA, 132 bp, Glycine max
  Clone ID: LIB3107-003-Q1-K1-A12
tcctcatgcgataagactacagaatgctacgactgctagaatgctacttaagggtacggctgtgacacgactacagatgtgtacgggtgctataatactacagaagggtacggatcctacactaccacagac

SEQ ID NO: 46913 - DNA, 427 bp, Glycine max
  Clone ID: LIB3107-003-Q1-K1-A3
ggaagcatcgagaacatcgcagcgatggcgagagtgggtagaatgaagttgggttcacaaggcatggaggtgtctttgcagggacttgggtgcatgggcatgtctgcgttctatggtcctcccaagcctgaccccgatatgattgctctcatccaccacgctgttcaaactggtgtcacttttcttgacacttctgacgtctatggtcctcacaccaacgaactccttctaggaaaggctctgaagggaggggtgagagatgaggttgaattggctacaaagtttggaatcaacgttgctgaagggaagagagagatccgtggtgatccggcatatgtgagggctgcttgtgagggaagcttaaagagacttggcatcgattgcatagatctctattaccaacatcggattgatactcgtgtgccta

SEQ ID NO: 46914 - DNA, 259 bp, Glycine max
  Clone ID: LIB3107-003-Q1-K1-A6
ggacccagtctcttttctctctctatgggttctctctgtaaaagactcaatgcagcaagtgcgtcgtcgtggtgattgaggagtgctgagcgaaatgcggggtggtgtttccctgttgttggcgttagcctccgtggcggcggcggcgacagtgtcgtgcggtggtttggcggggacttttcttcctctggaacgggccattcctctgaaccagcaagtggagctggaggcgctgagagctcgcgacagagcacgccac

SEQ ID NO: 46915 - DNA, 404 bp, Glycine max
  Clone ID: LIB3107-003-Q1-K1-A8
gatatatgtaggagaaggtgtcaaaacacttcaactttaggctccatctcaaaaaaatgggtggtttagctagcaatcttcctctaattgttatggtgggtctgcaaattcattatgcagcacttgctatattcacaagagccgctttgttagatggattgagtacgacggtctttgtagtgtacaggcaaggcatagccactttggctttggcgcctatgtttttctctcctaagcggagacaatcagtgaaagattctttgggattcaggagcttctttttgatgtttgtgaccgctcttgttggagtcacagcaaatcagaatgcatactttaaaggtttattttatgcatcctctactgcagctaccgctatgagtaatctgataccagcattaacgttt

SEQ ID NO: 46916 - DNA, 369 bp, Glycine max
  Clone ID: LIB3107-003-Q1-K1-A9
ggtcctaaatcctcattccagccacacgcttcagaggacatgggctcattgggcgggttacaaaatgtgagcggcatcaattttcttatcaaagagggtccaaaagtcaatgcaaagttcgagctgaagccgccaccatatccactgaatggtttggagccggtgatgagccagcagacacttgagtttcactgggggaagcaccacaagacttatgtggaaaatctgaaaaaacaagttgttgggacagagcttgatgggaagtcactagaagagattattgtcacatcatacaataagggtgacattcttccagctttcaacaatgcagcacaggtatggaaccatgacttcttctgggagtgcatg

SEQ ID NO: 46917 - DNA, 330 bp, Glycine max
  Clone ID: LIB3107-003-Q1-K1-B1
tggaagaccatatgccaacttttttctccagacagcgcatagattaaacgttactacaataacaacactatgcacgtcacatccactattacttctcctatttcatactttaggaattataataataccaatcatgtggctcacatactttctacgcaactccctttactcccagttttgtcctttaaagctcccattatagcttccaatttctctgtgatccatattgctcttgaacctctcatgttttagaagctcagctaagcacaatagagagtttaattatgccactaacatatcatatgggtgtgactaagcctcatgtgctta

SEQ ID NO: 46918 - DNA, 423 bp, Glycine max
  unsure (1)..(423): unsure at all n locations
  Clone ID: LIB3107-003-Q1-K1-B10
tattcatgaagtaaatattttggttttatgtttgggtacaaggttgcatgttcctgtttgaattttgggttatgtacaggtaatgggtaattgtttttgaaataggagtttcttggcattttgtgaattgaaacccttatttttctccacatgtcaagttagttttgaaggttcgaattgaaagtgatagatttactcttggtgagaatttgagccatcatcatctattttattcggtgtattttgccccattgattgcttgcacaatagccttggcttgactcttgatgatacttcttgcttcacatgcatgttgggagatgatttangcattttgttcgtataagcctctagccaaatgagcctacctttgattaattcctttgatagcccctttgagcctatgttcccctttctttggtt

SEQ ID NO: 46919 - DNA, 301 bp, Glycine max
  Clone ID: LIB3107-003-Q1-K1-B11
ggaaaccagagagtagtaagtggtgatgaagagatgccttcaccccaaaaccagaagcattgaatgaacagaaggcattttcagcatcagcatcaacatgggtggggattctattgtttctcatggtacagacgaaggttcttgtttggaggagaattttcccttgctttcatctcactcctcacctgctctcagggataatttgggcttgcaagatgaagacaacagaatgaaagcggagaatgggttaacttgtaatgaaactgatgaagaaatcatacatccttctagagttgatttt

SEQ ID NO: 46920 - DNA, 253 bp, Glycine max
  Clone ID: LIB3107-003-Q1-K1-B2
taacatattcacaaagaatcaaacttttctgctctctatagtaacgttctgtgctaacaatatctggctttggtttaagtcctaatggttggcaaggatagtttgagaactcattacgtcttgaactttagctttaataagcttattatggtcaactgtggtgtaaatactttgaaatgagtcaactttaaagccgtggttatcacaaaatgtaacgatattccactttagctttttatgcacattttttcac

SEQ ID NO: 46921 - DNA, 397 bp, Glycine max
  Clone ID: LIB3107-003-Q1-K1-B3
ggcacgcagttcctggaaagtagcaaagtaaagctgtcttggttttgggaaccgaaacctaagaaaaacgcagaatctgtttcggaaagcgaaggaggcatggcatttgagtccaacgaagttgcagccacaacgctccaagccatatgctacaagcgcggttccctccagcttctcgatcagagaaagctccctctggagacagtttacttggaaattcgggattcaacggatggctggaatgccatacgggaaatggtggtccggggagcacctgctattgcaattgcagcggcactctctttggctgtggaagtgttcaatttagattttaatgggtcagctactgatgctgtatccttgctgcagaagaaattagaatatcttgtcacaagtc

SEQ ID NO: 46922 - DNA, 364 bp, Glycine max
  Clone ID: LIB3107-003-Q1-K1-B4
gactcctcaacgctttctcatcgcttgatcaaacttcaaaccctagctaggatttcaaggtacgcttaacggtggcttcaaaacgcattactaaggagttgaaggatctgcagcaggaccctcctgtttcctgcagtgctggccctgttggtgatgacatgtttcattggcaagctacaattatgggtccaactgacagtccttatgctggtggtgtattcctggtgaccattcacttcccaccagattatccatttaagccaccaaaggtttccttccgaaccaaggtatttcaccctaacataaacagcaatggaagtatctgtctggacattctgaaagagcagtggagtcctgcccttac

SEQ ID NO: 46923 - DNA, 305 bp, Glycine max
  unsure (1)..(305): unsure at all n locations
  Clone ID: LIB3107-003-Q1-K1-B5
cttattaaactatgatattaccatgaattggcattaatcaaaattatcttcgtgtgcaatcatatttatcaaagtacattaccaaaaattatgcatcaggatccattaccaaagttagaaagtttattagtgtagctaagagtagcagttctcattgcccagctggcagatgttaatacacgtggcaaacaattattagatagattcattttgataagtgatgttcagttagttataactaatgcagagttatgctattgtaacagntacagacttgtgataagataaccccctctctctttata

SEQ ID NO: 46924 - DNA, 421 bp, Glycine max
  Clone ID: LIB3107-003-Q1-K1-B6
ggttgcacccaaacaaaaaactaaatgtggcaactgcgattaaggtcatgaaggggtttttttgtacaccaattcgccacggcaaccccgaaacagcagtcagcagcagaaaccatcaaaataaaatgaaccccaacgatttccccctccgaagagaggcttgtcgaggcctctgctgaatcggtgaagaggtgagcgaaggagtggttgggattttgaagaaagcggagagtgtgtgtaagttgaaaaggttgatctctctgggtcccactcgaggattctcccccaggcgttcgggaagattcgtgccctcgttgtgcttgatttgtctcagaatcagttaagggtatacacggttttctatttatctttgtgtgtttattttaattattagtctcgagttcgagcttttgcagaaata

SEQ ID NO: 46925 - DNA, 271 bp, Glycine max
  Clone ID: LIB3107-003-Q1-K1-B8
gaaatctaattcgaatcttcgccagtggatagaaggtcaactttgagtagataatactgctggatgtctcgtctctaattattgtatttggaaaatagttttgagttgaggatctaatcattaccagatttaatatacttggcaaatggggtctgaaagtcctacgacaccgacaacaacaattcatgtgacaggatttaagaaattccatggagtttcagagaatccaacagaaacaattgccaataatttgacggagtacatgaattag

SEQ ID NO: 46926 - DNA, 262 bp, Glycine max
  Clone ID: LIB3107-003-Q1-K1-C10
cagaagggggggggtggggttggagcatccatttgtggatgtgaaggaataggaggttgttggggactggaatgagggatgctgtcaagggtgatggactttctgactgcctgctggcggcgaaaatccttctccgacggcaagggtggttccgaggttacggggcggaaggaagggctgctgtggtacaaggatgcggcgcagcacttgtttggtgaatactcaatggctgttgtcccagccaactaacctgctcgaggac

SEQ ID NO: 46927 - DNA, 319 bp, Glycine max
  Clone ID: LIB3107-003-Q1-K1-C11
ggttgcagttgcagctctgttggtaggatagagaatctcttacttcattcaattcagtttcaatgtctatctctccctccctcactcctcttctctgaactcaaccatgtctttttctcctctccactcaccacttcattttccccagcgcccacttttcacttccattcgccccattccaaaccgaacattcatctccaacccccgccgaacgccacgaaccccactctcactcgctcctatcaccttcgccgccaagtccacaccctccccgaacgacgacgttttgttcaaacgcctcgttcgcgcgctgttctgc

SEQ ID NO: 46928 - DNA, 411 bp, Glycine max
  Clone ID: LIB3107-003-Q1-K1-C2
gattcaatgtaaaaattgaaagtggtgagtgtcgagtccactcgagcgccttagctagtctcaaacactgtcgtccctttacctctgttgcttgtgttatccctttagctctattgcttgtgtcatggtggtggtttcatcgtcatcgtggtccgttcatcaccgtagtgttgttagaaaccctcgtgttgctgtccacgtcgatctgtgaaccatactcctccaccactgtgttgagaaatgtgtcaacaacctcagtattgagttcattggagatctcacgtgccttgcccttaccctagaaccccccctgtgccttgcccttacctctcttgctcttccgttccctttacctcttgtgtagttgtcgtcatggtgcttttatagtcagcgcttaacaacatggcggac

SEQ ID NO: 46929 - DNA, 348 bp, Glycine max
  Clone ID: LIB3107-003-Q1-K1-C3
aagaataaaaaaataaaaaaaaaaaaaaagaatctgtataaatagaaaaataatatatataaggtacaaatagtaaatcgaggtacccattttatgataaactttccttccatttttgttcctctagtaggcctagtatttccggcaattgcaatggcttctttatttctttatgttcaaaaaaacaagattttttagatacagaaaacaaagtaaaattctggggttttttattccccaattataatactaaattcaaaaaaaggagagtaatgagtataatctttcgctcagacgatgtactgatatattctatggcggaggttcgaagaacaagcaatttatttt

SEQ ID NO: 46930 - DNA, 398 bp, Glycine max
  Clone ID: LIB3107-003-Q1-K1-C4
gggaaacgtgtgcacattctgcctattgatgatacgattgaaggtgtcactggcaatctgtttgatgctttcttgaaaccctatttcttggaagcttaccgtcctgtcagaaaaggagatctatttcttgtccggggagggatgagaagtgtagagttcaaggtggttgaaaccgatcctggagaatattgtgttgttgctccagacactgaaattttctgtgagggggagcctttgaaaagagaagatgaagagagactggatgaagtcgggtatgatgatgtgggtggtgtcaggaaacaaatggctcaaattcgtgagttggttgagcttccattgaggcattcacagctttttaaatcaattggtgtgaaaccacccaaaggaattttacttta

SEQ ID NO: 46931 - DNA, 351 bp, Glycine max
  unsure (1)..(351): unsure at all n locations
  Clone ID: LIB3107-003-Q1-K1-C9
gatctatctgtcctgcataattttactacctcagcgcgaccagtgcttcttattatacatcacatctattgtatggccactgaaatattatagactgcgtactcattcataacatatcagctgtacgtgtttctgatatatatttgcctcttagtgggtcgatattaattgaagatcatggctganggaaaaacagcaactcaaaaatctcttcaagattttgatcctcaaaagacacccagaaggaacaagtatgctttcgcctgtgccattttggcttncatgacttccatattacttggctatgatgttggggtgatgagtggagcgattatatacataaagagagac

SEQ ID NO: 46932 - DNA, 382 bp, Glycine max
  Clone ID: LIB3107-003-Q1-K1-D1
ggatcgtgttgttgtgtttgctttggagaaacgaggtggtgttcgttgttggcgaatactcactcacgcgtttgtagttgcaggctctaatcagatcccaaatggtaatccgtgagctcagtggaatgattctttcccgtgcgctcaagcaatgtaattttgtggaatggcgaggacataaagttgtttataaaaggtatgctagtctctatttctgcatgtgcattgatcaagatgacaatgaattagaagtccttgaaatgattcatcattttgtggagattcttgaccggtattttggcagtgtctgtgaactggacttaatattcaactttcacaaggcctactatatactagatgaaattctaattgcccgtgagct

SEQ ID NO: 46933 - DNA, 288 bp, Glycine max
  Clone ID: LIB3107-003-Q1-K1-D10
gggcgaggatggcaaacacaaacagcgacaccaaagaagaaagcaaaaaaatggatgaaggagagacaatacctctcctcacctcatacaagatgggaaattttaatctatcccacaggattgtgttggcaccgttaacacgatcaaagtcttacaacttcgttcctcagccgcatgctgctctgtattattctcaaagaactactaatggtggcttcttgatcggggaagctactggtgtatctgatacggcaaaggatgggtaccctaatacacctggcatttgga

SEQ ID NO: 46934 - DNA, 128 bp, Glycine max
  Clone ID: LIB3107-003-Q1-K1-D12
ggagagtggaggcagccaagaagcagatcgagtagcaaaatgtgcattattgaattgaattcctctgttctattcgattccatgccagacagagacagaagaaaagaatttattattaaaacaacagc

SEQ ID NO: 46935 - DNA, 430 bp, Glycine max
  Clone ID: LIB3107-003-Q1-K1-D4
ctataggctggaccctggcagacattcctggtattagccgatccacatgtatgcatcggataaatttagaagatagggctaaaccaataagacaaccacagagaagactcaactcgatgattcttgatgtagtgaagaatgaggtaaccaagcttttgcaagctagaatcatttatcctgtctccgacagccaatgggtgagtcccgtctaggtagtctcgaagaaaaccggcctcaccgtgataaaaaatgagaaggaggagctgatttctactcgggtgccgaacaattgaagagtctgcatcgactataggaagctgaaccaagttaccaaaaaagaccattttccactgccattcattgaccaaatgcttgagcgcctggtaggtaaatctcactactggttccttgatgggttttctggttatat

SEQ ID NO: 46936 - DNA, 451 bp, Glycine max
  unsure (1)..(451): unsure at all n locations
  Clone ID: LIB3107-003-Q1-K1-D6
agacacatgaaggnngattttgtgcatgtgcaacttctncgagtttacgtgtggactgatggttaggactctgtangctgataaagacaacactcataccgttggaaagaaggatgctgctggccatgttgcttaaattagttcttgcnttccttgtcttcttgagttttatcagagacgggagtgcanggatcactagctctttcattcggtcagagtggccggcagttgacatcccccttgatcatgaagcatttgcagntccaaagggttataatgcacctcaacaagtgcacatcacgcaaggtgactatgatggaaaagcagtaatcatctcatgggtgaccacagaagagccagggcacaagcatatacagtatggcacatcagagaataaaattcaaactagtggagaaggcacaagtacaaactatactttccacaaatacaa

SEQ ID NO: 46937 - DNA, 410 bp, Glycine max
  Clone ID: LIB3107-003-Q1-K1-D7
tatagtatttggaagactctacttcaagcaagttttaaaacaccagtttcaaagtttatattttatttttcttttattcttaaagtttttgttgaattttacccttttctagacaatgtaagaatttatatattgcttcccttctacttatagtgtgtaaataatgtgttaataactcttgtctcactagctttgttttgtgcttatttttttaataggacaaaggaatttgtccagtatagttatgtggcactgtcatttagtagttgaaggactttgtgcttatcccatattttgtctcttttttttcttgattatctcatatcagctcttattcctgaaactatgttttaatcattcctccaatgtaaaccacttgaacttagatttgacaatttcacaactttaat

SEQ ID NO: 46938 - DNA, 423 bp, Glycine max
  Clone ID: LIB3107-003-Q1-K1-E1
gacggctaggaatccccctcccatccctaaactatatagagggaggtggatgattaactttacactgcatttggtaaggatgtgtgaaacgaaatgaaaagtaaggttgtttaactgagatgaaaaatagtgtagaaaatatgaaatacttgaattgaagtgattaagtaagtaagaatctttggtgaaggtgttgttatactgtttatacaatgtccttttctactcggatttggaattggctggaaagcaaaatccttgatcattcttttgatccctcttcttaatatctgctataactagctagtgaagcccgcatctgaaagtgacaggacttggtgtgatcttaaacacttttgggatgatcaaatgaggtttcagaataaattaaagttatatcttttcagcaagtcacaaattaac

SEQ ID NO: 46939 - DNA, 376 bp, Glycine max
  unsure (1)..(376): unsure at all n locations
  Clone ID: LIB3107-003-Q1-K1-E11
gaggagaaggaaataatcatcaaccatggcagggagattgacgaacgcagcatcgaggatcttaggcggaaacggcgtcgtttaccgatccgttgcttcctctcttcgcctccgctccggcatgggcctccccgtcggcaaacactatgttcccgacaaaccccttcccatgaatgaggaactcctgtgggacaacggcactgcatttcccgaaccgtgtatagatcgtattgctgacactgtcggaaagtatgaagcattggcctggctgtgtgggggattgagttttttcgcgtcgctgggattgttggctgtgtggaatgacaaagcctncaagacaccgtttgcacccaaagtatatccatatgacaatctg

SEQ ID NO: 46940 - DNA, 311 bp, Glycine max
  Clone ID: LIB3107-003-Q1-K1-E12
gtacacaaaagcacttgcaaacgggttttggtttgggaacatcatcacattacattagattggtggtaatggcagcgtcactacaagcagcagctactttcatgcaacccaccaagttgagcaggagcaacactttgcagcaaaagtctactcagtccattttcaaggcttttggtttggaacctgttggagctaaaaaggtcacatgctcccttcaagctgatcttaatgacttggctcacaagtgtgttgatgctaccaaaattgcatgattcgcccttgccacctttgccctcgttgtctctggggca

SEQ ID NO: 46941 - DNA, 405 bp, Glycine max
  Clone ID: LIB3107-003-Q1-K1-E3
ggcagcgcttgatttgaggccaggcaagccccactcagccaccacagctctcctcgttcacgctacccctttctgctcttcttctacctttcaagttttaaaagtataaagatggcagagacattcctatttacctcagagtcggtgaacgagggacaccctgacaagctctgcgaccaaatctccgatgctgtcctcgacgcttgcctcgagcaggacccagacagcaaagttgcctgcgaaacatgcaccaaaaccaacttggtcatggtcttcggagaaatcacgaccaaggccagcgttgactacgagaagatagtgcgtgacacctgcaggaacatcggcttcgtctcaaatgatgtgggactggatgccgacaactgcaaggtcctcgtcaacattgag

SEQ ID NO: 46942 - DNA, 340 bp, Glycine max
  unsure (1)..(340): unsure at all n locations
  Clone ID: LIB3107-003-Q1-K1-E5
gacactaaacaagtggaaagaagagcatcactgaactaacaaagcaaccctatgtcgaaggtggtttgtgtcaccggagccagcggcgccatcggatcatgggtggtcctactcctcctncagcgtggttacaccgtccatgccaccgtccaagatatcaaggatgaaaatgagacgaaacatttggaggaaatggaaagaaccaagaagcatcttcaattttttggaatgggtcctcttggaattcaattcattggcggtggcataaaaggttggtccggcgtaatccaacttgcatggtctaacatcattggtcaagtcgaagataccgagaaacaga

SEQ ID NO: 46943 - DNA, 406 bp, Glycine max
  Clone ID: LIB3107-003-Q1-K1-E6
gatatcaaggaaggtgccatactcaagcttttgaattgtcctgtggataattataccatcatgtatagcacccagaactgtggcattcatctgtgggatactaggtccaattccaatacctggactcttcaagctactcctaaggagggctatgcttcttctctggcatcaggtccttgtggtaattggtttgtatcggggtcatcccggggggttattacactttgggacctgaggtttcttatacctgtgaattcttggcagtattctcttgcttgccctatagaaaagatgtgcctctttctgcccccttcaaatgcttctgtctcttcagctgctaggccccttgtttatgtggctgctggttgcaatgaaatttctctttggaatgcagagaatgctagct

SEQ ID NO: 46944 - DNA, 248 bp, Glycine max
  Clone ID: LIB3107-003-Q1-K1-E7
gtatgcaagaattgtgtgtacctatgagagttacggtagatatttataagtattaagtaacgtgttttatgaatctctcatcactttgtcacgtctgttcaaaagatcatttatagattatgttaagtgtgctccatgcatgatgttcatgtttgtgatagcggtagttgtatgatttcaggaattgaatgccgaataataattactttaagaaacaacatcttggtagaacaaactcatcatgtgat

SEQ ID NO: 46945 - DNA, 417 bp, Glycine max
  Clone ID: LIB3107-003-Q1-K1-E9
gagggtgcaagagtttgttgtgagctataagctagtttatcgggaggagaatatgaagttgtttgttttctttgttgctgcagtagttttggtagcatggccatgccatggcgcaggctaccaaaggttccctctccgaatgaaaactggctatggtgagcgttcttcggaggtaaaatgcgcaagttttaggcttgctgtggaagcacacaacatccgagcctttaaaaccattcctgaagagtgcgttgaaccaacaaaggactacattaatggcgaacaatttagatcagactctaaaacagttaaccaacaagctttcttttatgctagtgaacgcgaagtccatcacaacgacatatttatattcggcatagataacaccgtactctctaatatcccatactatgaaaaaca

SEQ ID NO: 46946 - DNA, 380 bp, Glycine max
  Clone ID: LIB3107-003-Q1-K1-F1
gaagaaccttccttcgttagttcccatcatccttcgcttcaccggtttacttccccaactcatacaacaacaccccactttttttttttctttcgcaactagcttctcttcatttgaccatattaatcttactatatttaatatttctctctctttcttcaatttctgagtttttgttccagcagctgagtcgtaagaagctggagttggaagtttgctcgcgatcatgcaaaactccgtgctcgatccgcaagatcagagggttacttcctgcatggaagattccactgcaatgactattgaattcctgcgggcaaggttgctttctgaaaagtccatcttaagaagtgctaaacagaaagcttattaactggccaaaa

SEQ ID NO: 46947 - DNA, 349 bp, Glycine max
  Clone ID: LIB3107-003-Q1-K1-F12
gatgtttgtgagcgctccggttggagtcacggcaaatcagaatgcatacttcaaaggattattttatgcatcttctactgcagctaccgctatgagtaatctgataccggcattaacgtttgtaattgcagcaattgcgggatttgagaaagttgacataagcttaagaagcacggccaagatattagggacagtttgttgcgtggctggagccttaaccatggcattggtcaaaggacagaagctgttacacacggagttccttccttctatacatctcaccggcagtcaaggtgatgattggctgctgggttgcctattgctcttagcaagcagtgttttttggtca

SEQ ID NO: 46948 - DNA, 415 bp, Glycine max
  unsure (1)..(415): unsure at all n locations
  Clone ID: LIB3107-003-Q1-K1-F2
gggtatcaaattcagagtgttcttctggatttgatgggtagaaggacagtcccgcaagtatttgtgaatggcaaacatattggtggatcagatgatctcagtgctgccgtccaaagtggtgaattgcagaaacttctcagtgcaagttgatggtgtactagagatttacgagcactgacatccttcatggataatgaagttgtcaagcttttagaagcataatatgttttgatgcctttttagttttctgggtatttaggtgacagcgcgtattctttagaggaataggatgtcattctgcttaaaatcagcttgaattcttcacatggaaatgtangactcttgaaaagttgagctctaaaacatagaatccgagctctaattggtatattctacttgnttttatatttttttc

SEQ ID NO: 46949 - DNA, 305 bp, Glycine max
  Clone ID: LIB3107-003-Q1-K1-F3
gacccaactcttattcaaagcccatctacacactccgctcctttcgttttgtgttttgagtttgagaaatgaatttattagtaccatgtctgtgcattgggtgtacgatggaaggggacatatgactattaccagagctcctaggaataccggatccaagcaatcttttactagacttgaaggaggtcataataatcagtttagggagtgggggtacagacgggcatgcagaaagaattgtttcgaaaggaagtcgcgagagaaatatagtcaaaggtaacaatgatattgctgagacgggagaa

SEQ ID NO: 46950 - DNA, 407 bp, Glycine max
  Clone ID: LIB3107-003-Q1-K1-F4
aacaccaagtgttatttttacccgaggctttgcgacttcggggcttttaacgaaatgcatgaatcgttaatattagtacctgctttacagtcccattggttaatgatgcacgtaagtatgatgatattgggttatgcaactcttttatgcggatcattattatcagtggctattttagtcattacatttcaagaactcatacaaattattggtaaaaagcaagaatttctattttttaaatgaatcattttcttttgccgaaaatcaatacatgaatatgactgttaaaaatatggtttacaaaaaacttcttttttgtcttaatgaaattaatatagatctcaatttcttcaacaaattggatcggtggggttaccgtactattaagcttaggtttatctttttaa

SEQ ID NO: 46951 - DNA, 371 bp, Glycine max
  Clone ID: LIB3107-003-Q1-K1-F5
gtccagttctgaagagagaatctcccgtctttcactagtaaaattttcagatattcaaatagatcccgttgctgcattcagtaatcacaaccacctggaacgccattattcaattcaattggaaataaatcatgggtcgacctagaggtgatgaaaagtactggaatgaagtaacgagttttgaagagaacgggaagcagaagtggaagtgcaagcattgtgaaaaaacgtatggtggaggttattcaagaattaaactgcatttagataaagaacaaaaaggacaaggcattactaaatgccccgtttattgtagcaatgaagaagttctcaacatcattgcttccacttcaatccatccacaagaaact

SEQ ID NO: 46952 - DNA, 431 bp, Glycine max
  Clone ID: LIB3107-003-Q1-K1-F6
ggatgcccccggagcaaaggagtatgtgcatattggaattcagcagaggaatgggaagaagagtctgaccacagtgcaagggctgaagaaggagttcagctacgagaagatcctcaaggacctcaagaaggagttctgctgcaacggaaccgtggtgcaggacaaggagcttggcaagatcatccaactccaaggcgaccagcgtaagaacgtctcccacttcctcgttcaggctggccttgtcaggaaggaccagatcaagattcatggtttttgaccaattggtcttggttttgttagtagtaatttcaagttgttcttgagtttgtgagttttgaaaagttggattggttttctgtttgatgagtggtgttggaataagtttggtttggtttggttggtttgggtttccaatttttaatgattggatt

SEQ ID NO: 46953 - DNA, 233 bp, Glycine max
  Clone ID: LIB3107-003-Q1-K1-F7
gaaggtgcaagagtttgttgtgagctataagctaggttatcgtgaggagaatatgaagttgtttgttttctttgctgctgcagtagttttggtagcatggccatgccatggcgcaggctaccaaaggttccctctccgaatgaaaactggctatggtgagcgttcttcggaggtaaaatgcgcaagttttaggcttgctgtggaagcacacaacatccgagcctttaaaacca

SEQ ID NO: 46954 - DNA, 368 bp, Glycine max
  Clone ID: LIB3107-003-Q1-K1-F9
gatcccttccttgagccacatagggatgcttggaggctctaggctattaacaaggtggctgagcttgcatttagatgccttgcttttcatagtgacatgaggcctaccatgattgaagtggctgaggagctagatcttatcaggcgcagtgggtgggcgaccatggaggaaaccatatgcatggcttcttcggttgggtccgtgtgttcatcgcctcgaaatggaagtgttaattcacttagaggtgttagttttgagagagctgcaggacttgggagtgagacattgattgttccccacaagactgatgtttttttgcaatcaattgaggaggtgaaggacagctcttctgtgtctgtgcatgatag

SEQ ID NO: 46955 - DNA, 309 bp, Glycine max
  Clone ID: LIB3107-003-Q1-K1-G1
gaagccccttataagtttacaaatgctcttgaagctgtcaagaagctgagggcagaaccaaaggccaatgaccaatatttgcctccttttgttattgttgacgagagtgggaaacctgttggtccgatagttgatggtgatgctgttgttacattcaacttccgagctgatcgtatgacaatgattgctaaagctcttgagtatgaaaattttgacaaatttgatagagttcgttacccaaaaatccgctatgctggaatgcttgaatatgatggtgaattgaaacttccaagtcattaccttgtttct

SEQ ID NO: 46956 - DNA, 366 bp, Glycine max
  Clone ID: LIB3107-003-Q1-K1-G10
ggcagttcaattccaatatattccattctctctgtgtatttggctacctctcccttcaagatgcagatcttcgtcaagaccctcaccggcaagaccatcacccttgaggtggaaagctctgacaccatcgacaacgtcaaggccaagatccaggacaaggaaggaatccccccggaccagcaacgtctcattttcgccggaaagcaacttgaggacggccgtacccttgctgactacaacattcagaaggagagtactcttcacctcgtcctccgtctccgtggtggcatgcagatcttcgttaagacactcaccggcaagaccataaccctagaggttgaaagctccgacaccatcgaatacgtc

SEQ ID NO: 46957 - DNA, 278 bp, Glycine max
  unsure (1)..(278): unsure at all n locations
  Clone ID: LIB3107-003-Q1-K1-G11
ggagtgagatagagagagacgcttcgcaaatctcgatcnaatctcagaaaaatgagagaaatcatcagcattcacataggtcaggccgggatccaggtcggaaactcctgctgggaactctactgcctcgaacatggcatccagcccgacggcatgatgccttctgactccaccttcggtgtagcccacgacgccttcaacaccttcttcagcgaaaccggatctggcaagcacgtnccccgtgctgtcttcgtcgacctcgaacccaccgtcatcga

SEQ ID NO: 46958 - DNA, 402 bp, Glycine max
  Clone ID: LIB3107-003-Q1-K1-G3
gggtgaagcaagtaaccctaatgctatgctatatgagtttctgagcgttctcacgacacgcctactcattgcactcttcgatcgcaactctctttttcttccaaaagggaaaacgaatctcaaacttcacaagtgtttgaggcgccatggcggatcggttgacgcgtattgccatcgtcagcaacgacaggtgcaagcccaaaaagtgccgccaggagtgcaagaagagttgccccgtcgtcagaaccgggaggttgtgtattgaggttacttcctcgtccaagattgctttcatttcggaggaattgtgtattggatgcggtatttgtgttaagaaatgtccttttgaagctattcagattatcaacttgccgaaggacttggacagggatactactcata

SEQ ID NO: 46959 - DNA, 111 bp, Glycine max
  Clone ID: LIB3107-003-Q1-K1-G4
ggaattgttgtgttggagatgataactgggaggagtccaatgattggtgtccaagtcactgaattaggagctgatcaatctcataatgagaggttggcaacatgggtgagg

SEQ ID NO: 46960 - DNA, 361 bp, Glycine max
  Clone ID: LIB3107-003-Q1-K1-G6
gactttccattctcttcaaacctaacgcagggtcgctatgctcttcattccatggctttgcccaaccagcaaaccgtggattaccctagtttcaaactcgttatcgtcggcgatggtggcacaggaaagacaacctttgtgaaaaggcatctcaccggagaattcgagaagaaatatgagccaaccatcggtgtggaagttcacccattggattttttcacaaactgtggaaagattcggttttactgcttggatactgcttgacaggagaaatttggtggcctcagagatggatactatatccatggacaatgtgctattatcaatgttgatgttactgcccggctaacatacaaaaatg

SEQ ID NO: 46961 - DNA, 363 bp, Glycine max
  unsure (1)..(363): unsure at all n locations
  Clone ID: LIB3107-003-Q1-K1-G7
tatggggaccctggtggcaacgtattttcaagggatacactatcactacctggatggtggtattgaatctagggtctactggtcttttggtttcatggttaatgaaacatgctgataatattgtagaggtctattccacatcaatggcgatgctgctgacgatgatactttcactatttctcttcaacttcaaacctacactgcagcttttcttgggcattattatttgtatgatgtctctacacatgtattttgccccaccaaatatgctcttagatatgccattaacagttaagccagatgaagagaagctcattgaagtttctggtgatcgaagaacactttcatgatgttgnattgaca

SEQ ID NO: 46962 - DNA, 62 bp, Glycine max
  Clone ID: LIB3107-003-Q1-K1-G8
ctttcgattgttgtcagacattcaacatgaaaatgatagtttgctgaactggttatgatttc

SEQ ID NO: 46963 - DNA, 403 bp, Glycine max
  Clone ID: LIB3107-003-Q1-K1-G9
caaatgcatgtcacgaaatggaggtctagatatcaggcattgaataatgttggactgtgtatttaaactttgaagtttaatttcctgaactcctatcgaattatttgctaatgaaagtattgaaataagagcaaatataaagctagcaattaataaagtaaagtaaaataagatttttgaagttaaatcttttctttaaatactaaagtgaaaagtttcagtgattttcatgtgcatgtacttatggtattttattaaatgttaatttttttataagaaaagaatcattttaaaaataatagtcaaataaaaatgcattgcgtgtggatatgtatcaattttcactcctatcattttgcgtctgctgatgaaacacacccattgagtcacccactaatatgtc

SEQ ID NO: 46964 - DNA, 414 bp, Glycine max
  unsure (1)..(414): unsure at all n locations
  Clone ID: LIB3107-003-Q1-K1-H1
ggcatatccaaaggaacaaaaatattattaagatgagcaacattgttggagcacttgttctactctttgcatttctcttcctcagttgtgtgtatgcacaagacacaacaacccttgtgcctgcaatcataacttttggtgattctgctgtggatgtagggaacaatgactatcttcccacccttttcaaggctgattaccctccttatgggagggactttgttaaccaccaacctactgggaggttttgcaatggcaaattagctactgatttcactgctgacacattgggtttcaagacctatgctccagcatatcttagcccacatgcatcanggaaaaacctncttattggagcaaactttgcttcagctgcatctggttatgatgaaaatgctgctactttgaatcacg

SEQ ID NO: 46965 - DNA, 387 bp, Glycine max
  Clone ID: LIB3107-003-Q1-K1-H10
cctatgtcagatttaaaaagtcttattttgagttgttttttggctttagttccacaatgttttaacagtttgacaatgatttccaacaggaaagactgattgttctgtctgtcactctagcactggtgtattttgtagagcctgtctcaagattcgatatggtgaatgtgagaaaaaatagttcagccaacgataaggggcatctaaacaaggcaaacaaattaaaattgcattaagaaaaatccttggtttcacattaactttggttgtacagtaagggtattcatgacttagcttttgttaacttatattgagtccacccctggccaatctttacagcttgggtttatatatgcttgatatatagtagtataatatatgtaattg

SEQ ID NO: 46966 - DNA, 418 bp, Glycine max
  Clone ID: LIB3107-003-Q1-K1-H11
atattacataatttttagaatataggaaaatatctgatcatatgttagcttatcctcttggaatagttttcttatgtctccattatatcttagaattagttaccatgtttccttatcatgatttgcttccctaattagttaggattattatttgtataaacaatggtttgtactctaggtttttgaacttatcaatacattgtaatccatctcagttaatacttaatatcaattcagtattttattctcttttatctctcttcctccttctataccttaaaaccataatttcaacaataatgatatgttttctattgacacactgaaagaatacatgtaattttcatgttcaggccaaggaactcactctcctaatgattgatgtcaatccatactacaatcaactaaggattctttt

SEQ ID NO: 46967 - DNA, 445 bp, Glycine max
  Clone ID: LIB3107-003-Q1-K1-H12
ccccggactgacccactcgtaccgaccgttgcgagaagacaccaaacggatattacataatctttacaacataggatcatatctgataatgtgcgagcttctcatattcgaatagccttcttatgtctacattctatcacagaaatccgatacatgtatcctcatcatgattcgttcaaatcattccttcagattattatttgtataaacaatggttagtactctacgttcatgaacttatcaatacattctactgcatctcagttaatacctaatatcatctcaataccttactctctaagatctctatctctccttctataccttaaaaccatactttcaacactagtgatctgctatgtatagacacactgaaagaatacacgttcttgtcatgttcaagccaaagaactcactctcctaatgctagatgtcaattcatact

SEQ ID NO: 46968 - DNA, 435 bp, Glycine max
  unsure (1)..(435): unsure at all n locations
  Clone ID: LIB3107-003-Q1-K1-H2
gattgggtggaagagaaaagcagctcagtgcatgttggaggtggaggcgtgaacgtgcatacaggaaaaggaggtggcagtggcaccactgtcaacgttggtggaaaaggaggcggaggcgtaaacgtgcatgcaggccacaagggaaagccagtgcatgtttcagttggctcaaagtctccatttgattacgtctacgccgccacggaaactcaattacacgatgaccccaacgtggcactcttcttcttggaaaaggacttgcattctggaacaaagttggacttgcacttcaccaggagtacatctaatcaagccacgttcttgtcacgccaagttgcggattcgatacccttttcatccaacaaggtggactttatattcaacaagttttctgtcaaaccccggtcagaggaggctcanatcatgaagaat

SEQ ID NO: 46969 - DNA, 404 bp, Glycine max
  Clone ID: LIB3107-003-Q1-K1-H3
gaaaggcagtagtagcgttactttccaatttgaattgttccatgggcatttctttcgcaaaagttgcaactacttcctcagaaaaaaagtttctaaggtaaggaaatccagcgagacaaaaatggcccgtgacggtgcagctacatgcatagacatcctccttgccatcattctccctcctcttggagtctttctcaaatatggctgccaagtggagttctggatttgttcggagctgaccctttttggttatatacctggaattatctatgctgtctatgctatcaccaagtgatcaccctttaactttgtgtggacaataaacaaatgtcatgggcctttctggctctcaactcagatattagtgtttctttaatatatcggcaatgatgtcatattcctat

SEQ ID NO: 46970 - DNA, 431 bp, Glycine max
  unsure (1)..(431): unsure at all n locations
  Clone ID: LIB3107-003-Q1-K1-H4
gaactacacagtaaactctagttatagggcgttgtgtagattgaagagggggagccattttgatgagatgagaagtttcatgattatggagggcaaaaataccaacaaaagtggcacaatttgcttggagattacttaaaaacaggctgactgctaaagataatttgaagaatacctatgccctttttgcagacaaatggagatgactagttcacatctctttctctcgtgctcaaagatccaaaagttgtgggtagagtactatgcatcatggctcgtctaaatgctgnttttcaaaatgatgcagtgactcaagaaagagagatgagagaaatgcatgcgtgtttaaggaagtcattgatacaacaagaattatgctcacatatatcttggacatggtttagaagcctggaggcagattttagcaacag

SEQ ID NO: 46971 - DNA, 401 bp, Glycine max
  unsure (1)..(401): unsure at all n locations
  Clone ID: LIB3107-003-Q1-K1-H5
taatggtcaggtatatatatgtggattgagaagtgtacttactggctttgttgataatttcctattctaggtgcaaatggaggctaatgactcttctagtcagaaagaagagcagatgaaacctatgcgaaataaggtaatggggttgtgtgaataaagcttcaaataaggagttaaacttcacgtaaataatatcctgccaatgtatactaaggatggaattaatacttcatattagctatttatacttggcattagctcaagcatttcatcaaatgggttgtaggcaagtaggcaagttgaaaacaaaaacactacaggaccacatcacgagatcacatcatgttatcaacacaacatgaactatntatacttcgcttagctcaagcatttcatcaaat

SEQ ID NO: 46972 - DNA, 416 bp, Glycine max
  Clone ID: LIB3107-003-Q1-K1-H6
acacggatgtcccattgagtcccatgatatatcgggacgctcgtaattgaaaacagaagcgctgaccaaattcaaacgacaataacttttgactcagatatccgattgtgtcccgtaatatatcgagacgctcgaaattcagaacaaagctattagaaaaatcaaacgacgataactttttacacggatgtccgattgagtcccataatatgtcgagacgtttgaaattgaaaactgaagctctgagaaaaatcaaacgacaataacttttaactcggatgtccgattgtgtcccgtaatatatcgagatgctagaaattcagaacagaagctattagaaaaatcaaacgacgataacgttttacacggatgtccgattgagtcccataatatgtcgagacgttcgaatttgaaaa

SEQ ID NO: 46973 - DNA, 302 bp, Glycine max
  Clone ID: LIB3107-003-Q1-K1-H7
acgacagaagtggcacaagtgagtttgttgatcgagataactagaaacagtgtgatgaaaaggaaggtccttgttttcttcgttgctacaattttggtagcatggcaatgccatgcgtacgatatgttccctctccgaatgaacactggctatggtgcccgtactccggaagtgaaatgcgcaagttggaagcttgctgtggaagcacacaacatctttggctttgagaccattcctgaagagtgcgttgaagcaacaaaggaatacattcattgcgaacaatatagatcagacttccaaac

SEQ ID NO: 46974 - DNA, 354 bp, Glycine max
  Clone ID: LIB3107-003-Q1-K1-H8
gacatcacaaactgcttatcctgctcttctgccaacttcaacaacacagacactacctcctctcctctcctcgctcttccaatgccgtcttctcagatctagttactttctattctgcgagctttcactactgcttcattcggaaaacgacagcgtttttggtagggttgttgtattccattggacatgcggccgagagtaaattactccttccccgaggaggtgctggagcacgtgttctccttcatcgagtgcgacaaggaccgaggctcgatctccctcgtctgcaagtcctggtacgagatcgagcgctggtgtcgccggagagtcttcgtcggaaactgctacgccgtc

SEQ ID NO: 46975 - DNA, 380 bp, Glycine max
  unsure (1)..(380): unsure at all n locations
  Clone ID: LIB3107-003-Q1-K1-H9
tccctgatggtcgtgaaattgaccgaatagataagccacagtgtgagggctacaaattcgacccaaatggagaatacgtgcgacgctggcttccagaactttcaagattacccactgagtggatacatcatccttggaatgcaccagagtcagtgctacaagctgctggaattgagctaggatcgaactatcctcttccaattgtgggaatagatgcagcaaaaaacagattactagaagcactatcaaaaatgtggcaacaagaggcagcttcaagagctgcaatggaaaatggaacggangaaggacttggagactcttctgaatcagttcctgctgcttttcctcaagacacgcgaatggaggaaactcatgaacct

SEQ ID NO: 46976 - DNA, 428 bp, Glycine max
  Clone ID: LIB3107-004-Q1-K1-A1
ggagcacccagactgggttgtgaggacttgcgaacactcactcgccactgctcacgaaacgtcgaaaccctaaaacctcgatttttcccaatccattccacacacaatatggcttcagatgctgacatggaggactatggcttcgagtactctgatgaggagcaagaagagcaagacgttgatatcgagaatcaatattacaattcaaaaggtatggttgaaagtgatcccgaaggtgcgcttgctggttttgctcaggtagtgcaaatggaacaagaaaaagcagaatggggatttaaagctctaaaacagactgtcaagctacattatcgactgggaaggcataaagagatgatgaaagcctatagggagatgctgacatatattaagtcagcagtgactcgtaactatagtgaaaaatgcataaa

SEQ ID NO: 46977 - DNA, 51 bp, Glycine max
  Clone ID: LIB3107-004-Q1-K1-A11
tcgcccacgcgttcgcccacgcgttcgtccacgcgttcgcccacgcgttcg

SEQ ID NO: 46978 - DNA, 336 bp, Glycine max
  Clone ID: LIB3107-004-Q1-K1-A12
ggagtaaacgagctttgcactttgattctttccgaaatcgaagctgtaacgaaatctctgccacgggacagcgacaccgtacgaccttcccattgtttcctcaacgtgaacaatacaacaccacaccaccacccactaacaatacctaaagcctaacgaaccctaattcttgatcattgctcaattctttgttcccttcccatctcggagacacgaattcgccttcttcctcatttcccaaacaaatttcccctccgcactcccccaatttattctttttttcgcattttattttacccttttgaacctgtggcttcttttcgacgccccccatgt

SEQ ID NO: 46979 - DNA, 412 bp, Glycine max
  unsure (1)..(412): unsure at all n locations
  Clone ID: LIB3107-004-Q1-K1-A2
tccctttttagttttttttaaccttagacgctgcgtttcgctctctctgagttgaagaggatgaggctattgccttgcctcgctcgttgaattgatggtggacaccctaataatattattgcgtttctgccttgggtttgttcctcgccgtttgatttattgtggttattaaaatgcatgtgccagtctcgcccctaactctttttccctatttgtccttgctccattcttaagataatactgtatttcgtctttttctaaccataaagactgaaattcaataagcttatcatatttttttcaatttcttttatcagtttttttaagatatttttttaaattttacaaacttaattaactgcatacaattttactttaagatccttanataatacatatcatgangtcatga

SEQ ID NO: 46980 - DNA, 421 bp, Glycine max
  unsure (1)..(421): unsure at all n locations
  Clone ID: LIB3107-004-Q1-K1-A3
gggcgcgggtgaggtagaacccttccacggtggtgactgcgcgatgggtgcctacaagtatgtttcagagctatggcgcaagaagcagtctgatgtcatgcgcttcttgcagcgggtgaggtgctgggagtataggcagcaaccttccattgttcgcttgacaaggtcgacccgccctgacaaggctcgtcgcttgggcttcaaggctaagcagggctatgtgatataccgtgttcgtgttaggaggggtggccgaaagaggccagttcccaaaggtattgtttatgggaagcccacaaaccagggtgttacccaactgaaatttcagcgtagcaagaggtcagttgctgaggagcgagctggacggaagctgggtggacttanggtcctcaattcttactgggtgaatgaggactctact

SEQ ID NO: 46981 - DNA, 345 bp, Glycine max
  Clone ID: LIB3107-004-Q1-K1-A5
agagaagggtctgagtgatttggcaacccattatctcagcaagcatggagttagtgcaatcaggaggctgaggaaaactgataataatagaattgcaaaggcttgtggtgctgttattgtgaacagaccagatgaattgcaggagtctgatgttggtactggtgctgggttatttgaggttaagaaaattggagatgagtactttgcatatattgttgattgcaaagaacccaaggcttgtactgttctactaaggggtgctagtaaggatctattaaatgaagttgaaagaaacctacaggatgccatgtctgttgcaaggaacattataaaaaatcctaaact

SEQ ID NO: 46982 - DNA, 358 bp, Glycine max
  Clone ID: LIB3107-004-Q1-K1-A6
gatacggaggctgctgctatcgaatactcggataaggagggtaagggcggtgaagtgcggtacttcaatccccttttctctcttctccttttatttcatcactctcttcgttcctttcttcttctccaaagttttcaattttcacacttttcgaaacatcttttcaatggcgtcccaaattacccgtgagtggtctggaatcaatacattcgcacctgctacccagactaagttgcttgaactcttgggaaaacttaaacaagagaatgtgaactccttaactatacttgtgatgggaaaaggtggtgttggaaaatcttcaactgtgaactccatcattggggatagagtggtttcg

SEQ ID NO: 46983 - DNA, 186 bp, Glycine max
  unsure (1)..(186): unsure at all n locations
  Clone ID: LIB3107-004-Q1-K1-A9
aagaataaggaccatctacaaanaacgagagcgagtttttctttcttttttcgcttccaaatcatacgatcttaatcgaatcaactacattctccataaccacttttaacgaccctctccttccacttttccccccatcacctccttctccaacaattccaacctccaattctaataatctcaaac

SEQ ID NO: 46984 - DNA, 358 bp, Glycine max
  unsure (1)..(358): unsure at all n locations
  Clone ID: LIB3107-004-Q1-K1-B1
agggacacacaccacaatctttttgttctgaaccctttctgatggttcctcaggttcatcgatggagagtgaagccttaactcttctgcctcttccgggttcagatctcgttgttgttgcttccgattctttgattcttcgcttttttcttctcacttcacattccgattcgtcgcagattctttcagtttctaaacttgatgatcgccactgcctccacctgtaatcgttagttgaagtcacgtgaggtggtccagagaaatcaaaatctccttcaacttcgtcttccctttaggtggtaaagncagctaacgataaagaaatgaaatcgcttactgttaatactgaagattctttt

SEQ ID NO: 46985 - DNA, 137 bp, Glycine max
  Clone ID: LIB3107-004-Q1-K1-B12
gtttctatgtgtgttcagttgaagaagggataaataaatctttttagcttccaataaatctcacactcttattcttaaaaccatgggcctggattccatggcccgttccatcggagtctcgggccccgggctacgct

SEQ ID NO: 46986 - DNA, 323 bp, Glycine max
  Clone ID: LIB3107-004-Q1-K1-B2
gatggttttgcctatttgtgggggccgggggggctttggatttccttggggcctaattcaatttcatatgccgggggggggatttggtcaactggattttggtggttattagcatgatgaggaggatccgcctttgtgctatcattatttctctaaaacggatgtttttgttttagggttttgagttcacaatactagattgctgtgcaatttttcttgaagtttgagattacttttcttacatcttatctttaagttgaagcttaagtgcttggattgcctcgggttttgtagtctgagcatgttggtttaaggtatttttg

SEQ ID NO: 46987 - DNA, 352 bp, Glycine max
  Clone ID: LIB3107-004-Q1-K1-B3
gacttgaacaagaggtataagagggtgaatgatattctgggcaagggaactgcttgcagggttgtggagaatcagaacttgttggattcaatggacttgtctccaaagatgaaagaagaggttaagaagttgctcaattccaggcacttgttcttcagggaaatgtgtgcttaccataatagttgtggaaatgggaataacaatgctccacagcaaggagagtctggtggtgaagtgtctcagcctcagtctcagtctcaagctcaacctcatcatcaacagcagcagcaaccgcagcaacaacgatgttttcattcatcagaggtggcaaattttgggggttcaagtgtgg

SEQ ID NO: 46988 - DNA, 421 bp, Glycine max
  Clone ID: LIB3107-004-Q1-K1-B5
tctccagaagaataatactcagttgatgattcgttcatatgagctgggagtactatttttaccatcattattcaaacgacacgaatctgtattttcctgtaccagtaatgttacagtatctgaggataaatgcccagcccgagaatcttctgagatgaagaaaacaaaactagtaaccctgactgggattaaaaaggagagtatgcattcatcatctgaagttattatccctttacctttgccttacgagctccctcccctgccttattcttcccaagatatcccctggtcttgggaccggcaatataacaagaaagatgtctatggtcatgtttggccacggatgtgagcatatcaaatgacatgattgtttctgcaaccaagtttgcctgtgcatgtatatatgtgttttacatgggac

SEQ ID NO: 46989 - DNA, 415 bp, Glycine max
  Clone ID: LIB3107-004-Q1-K1-B6
tgattgaatattttgtgtacaagagatgcagaaacatagcttgccaaaaccaacttcctgttgaagattgtacctgtgagacatgcactaatggcaatggtttctgcaatctttgcatgtgtgttatctgcagcaagtttgactttgaagtaaatacatgccgctggattggatgtgatttgtgttctcattggactcacacagactgtgccatacgtgagcaacttatttgtatgggcccttctgcaaagaatggagcagggccaagtgaaatggttttcaggtgtcaagcatgcaacaggacttcagaacttctgggttgggttaaagatgtcttccagcattgtgcaccatcatgggatggagaggccttgatgagggaacttgattttgtcagtaggatctttcatggtag

SEQ ID NO: 46990 - DNA, 348 bp, Glycine max
  Clone ID: LIB3107-004-Q1-K1-B7
ggttctagtgtgtgattgtttgttgttgtaacgcgttcttcttcttttgttgttctgtgtttgtgtttgttttttctctcacctgaaaatgtcttgctgcggtggtaactgtggttgcggaagctcctgcaagtgcggcaactgctgcggaggctgcaagatgtacccagacttgagctacactgagtcaaccaccaccgagaccttggtcatgggagtggcacctgttaaggctcaatttgagggtgctgaaatgggtgtgcccgctgagaacgatggctgcaaatgtggaccaaactgctcctgcaacccctgcacttgcaagtgaggtgttgggagagcaagctt

SEQ ID NO: 46991 - DNA, 293 bp, Glycine max
  Clone ID: LIB3107-004-Q1-K1-B9
tctactacagcttaaggttgataagctttgcaagaatgaccatataagtggaaggaaaatacacgtgctgtgataaagtggagggaagatttctgagttagagttacctaacatggtcacaggggggatgctaactccctgtacaggcaaaataaaagaatcaaatattcttaatgatgctttgcagcatcgggttctataactcaacgaccagaaacaaataatgaattggatatctggctcccttcagcttggagtcttctcatctttgccttgtctagtcgggctcttcg

SEQ ID NO: 46992 - DNA, 407 bp, Glycine max
  Clone ID: LIB3107-004-Q1-K1-C1
ttgggggtttgggggcggactttcactgctgcaagcacaagattgagccaaagtgggaggaccctatctgcgccaatgggggaaagtggactatgaccttcccaaggggaaaatctgataccagttggttgtatacgttgttggcgatgattggagaacagtttgatcacggagatgaaatatgtggagctgttgtgaatgtcagaagtaggcaggataaaattgctatttggactaagaacgcttcaaatgaagctgctcaggtgagcattggaaagcagtggaaggagtttcttgattacaatgacacaattggctttatatttcatgaggatgcaaagaagctggacagaggtgctaaaaataaatacgttgtatgaagtgtatagcgtttttaactgggtagc

SEQ ID NO: 46993 - DNA, 322 bp, Glycine max
  Clone ID: LIB3107-004-Q1-K1-C10
ataggccctgtctctgtctcgattgataatagggctgcataattgtttatcattcgcaagcacattttggtccaatatgtaactgctacgtttcatgagggactctgaaatgatccctgtcgttcatggaacatatctactttttaagggtgatattatatatatgggaaacacgcttcacaatgatctaattaatggcttgtatttttttttatttttttttggaaatctttgtatacttgtcgtgggggaagtttttttgtcaaattttcgtaagtgtaagatgtagtatagccttggattattttactcaacttatgta

SEQ ID NO: 46994 - DNA, 294 bp, Glycine max
  Clone ID: LIB3107-004-Q1-K1-C12
tatatgtcacatggagattattcagatcaatcttgatatgacaccttattaactctttttttagcttttaaaaaatcttgtaaattaaaaaatatgattatttatcacatggagattgattggatcatatggtttgaggaatcatgtaataatttctcatcaaattgggtataatctgctgattttaatgcaacatatgattgtttacagggcacttgaccaccaaaagttatgtctatagcttcggggtagtcctgctagaactgcttacaggaaggagagccacagaccaaa

SEQ ID NO: 46995 - DNA, 387 bp, Glycine max
  Clone ID: LIB3107-004-Q1-K1-C2
ttttgagaccgaaagaccggaacatgaggcgggcaagagagtttgtttcttctctcttcaatggaaagcggcgaacaagttctcccttcggccaccaccgtcgccgccgccggctatcccaacgtctctcctcctccgctcgctgatcctgtcggtgcttccgatctcgctgctgctgcctcggacgacgttgttgcggaacctgaaattcacgcgctgatttcagacgaagagcacgatcacgatcacgatcacgagcatgagcatgagcatgaccatgacctcgagcacgatcacgagcatgagcatgaccaccacgaggaccgcgatgatcacgccgccgtggcagctgtctccttggaagatctcaaactcaagatcattaag

SEQ ID NO: 46996 - DNA, 332 bp, Glycine max
  Clone ID: LIB3107-004-Q1-K1-C3
ggcagttcaattccaatatattccattctctcggtgtaggtccctacctctcccttcaagatgcagatcttcgtcaagaccctcaccggcaagaccatcacccttgaggtggaaagctctgacaccatcgacaacgtcaaggccaagatccaggacaaggaaggaatccccccggaccagcaacgtctcattttcgccggaaagcaacttgaggacggccgtacccttgctgactacaacattcagaaggagagtactcttcacctcgtcctccgtctccgtggtggcatgcagatcttcgttaagacactcaccggcaagaccataaccct

SEQ ID NO: 46997 - DNA, 424 bp, Glycine max
  Clone ID: LIB3107-004-Q1-K1-C6
gtgccttgcagaaacaacgagatcactgcatttgtggcagagtttcatccatggcctttggagcggagtgataacagctagaagtgatacagattgataaattaaggtatcaagatgtcttatcgaagggggtcggatcagccaccgctaaggtgtggatactgcggactcagactgctgggaatttaggagccaattaaagagtatgaaaggatacattatacttggagaacatggaggaaagggaaactgggggcacacctccaataatccagacagtgagagcatgggacctggtattagttgtccaggtgaagtccacaccaaaggaaaagcagaagaagcaagagagagatgatggtatgaataatggatttgaacaagttcttttggtattagtggtgcaagctacttcactggaact

SEQ ID NO: 46998 - DNA, 312 bp, Glycine max
  Clone ID: LIB3107-004-Q1-K1-C9
gactggttttcatgggcaaaaaaattcgccatggtgttaaaccggagggtgccgattttcgtccttgaaaggaaaaaaccttttttttaaatgttcattttttgcttaaaattggtcaaccattgtgaccccaaaaaacttcttcttattcttaggaccaggatttggtcactgattccaggttttaggtggtttcctaatccaagataaagtttttttaattaatttttggctaggcaatccaaggtagtttcctaattaagattaataaatttagcttaatacttgccttgttttcagtacctttgttcc

SEQ ID NO: 46999 - DNA, 422 bp, Glycine max
  Clone ID: LIB3107-004-Q1-K1-D1
ggtcctagtgtgtgattgtttgttgttgtaacgcgttcttcttcttttgttgttctgtgtttgtgtttgttttttctctcacctgaaaatgtcttgctgcggtggtaactgtggttgcggaagctcctgcaagtgcggcaacggctgcggaggctgcaagatgtacccagacttgagctacactgagtcaaccaccaccgagaccttggtcatgggagtggcacctgttaaggctcaatttgagggtgctgaaatgggtgtgcccgctgagaacgatggctgcaaatgtggaccaaactgctcctgcaacccctgcacttgcaagtgaggtgttgggagagcaagcttcaagcagagatagcccttaattaggaataatgataaactattaatgtgtagctaaaaacttatgtattatgtct

SEQ ID NO: 47000 - DNA, 376 bp, Glycine max
  Clone ID: LIB3107-004-Q1-K1-D11
ggaaaagaaaagggtggtgaatgtgaagatagagggagcatgtggaatggttgtggtcactattatatatgttgtctcttacgctttgcatgtgactttctttctttctttatatcctttatatattaagtatatgctgcaatatatttaattaaagagagaagtaacatcaaggtgcagagagaggaattgaagcatgggaagagggaaggtggttctggagagaatacagaacaagatcaatcgccaagtaaccttctcaaagcgcagaaatggtttgctcaagaaagctttcgagctatctgttctatgcgatgctgaaatcgctctcgtcatcttcttcaacccgggcaagctttttcagtatagtagcact

SEQ ID NO: 47001 - DNA, 317 bp, Glycine max
  Clone ID: LIB3107-004-Q1-K1-D12
gttattgtagagactgagaagagttacatcgagactgttgtcatggatgttccagcagctgagcatgatgggaagtgcaagtgtggcactaactgcacttgcacggactgcacctgtggccattaaggaatatgtatgaaaatgtaattgccatgtgtttggcaatacaaatatccaaataatgtaatcttcgtatgaataaatgtgtgtgctgttatcctacttcaggtctgtgtagtcatgcagtctgaatcatttcaagttcctgtcttagttaatataacagccatggttgtggcattctatggtttattaga

SEQ ID NO: 47002 - DNA, 459 bp, Glycine max
  unsure (1)..(459): unsure at all n locations
  Clone ID: LIB3107-004-Q1-K1-D3
cggacgcgtgggatatttccacattcataaaagcttgaggtgtccattccttcctgaaagtgcattttatatttcctaatcatggtttctatggcaccgcaagagctcatccactcaactattagatgttctatccattggtcacatccttcaattttgagacaattctggtaacttagaacatgcaaaacccacaaaaatcacggatgaaataagaatttagggctctaaatgcgatcacattcacataggcaggtagtacttctcgtcaattgctgacagaaaacaagaaataggcttgcgccagttagttatactcgcataggaatcacaaggattgaacaggctctntgcctctngtgccttctttttggtgctttttcctttggtggttgaaagaaccccttaacggcagtatcaaagacgtcttttacatttggttatcacagtnacacatgc

SEQ ID NO: 47003 - DNA, 272 bp, Glycine max
  Clone ID: LIB3107-004-Q1-K1-D4
agggactcattcacatactataatactacgataggcgggactcttcccaattctgttgtgtgagtctgtgagtctttcttagctgatatggcggttgatcgctcccttacgaggtgctgtagcctcgtactgtggtcgtggatgttgctgaagatgatgatggcgcaaggtgcaaccgcgagggccaaccggaaggagtgggactcggtcataaagttaccggctgaaccggtcgatgctgactcggatcatgaagtgggaacacgatgggc

SEQ ID NO: 47004 - DNA, 319 bp, Glycine max
  Clone ID: LIB3107-004-Q1-K1-D5
ggtgtgtgtttaaattcaatgagagactaagttgaagacttgaagccatgagatgaatcacttatctcttgacactgaagattctcttgcaagcttgctgctggagcttgcagccaacaacgatgtttcgggtttcaaaagattaatcgagtgtgaaccttcctccatagacgaagttgggttgtggtatggccgccacaaagagtcaaagaagatggtcaacgagcaaagaactcctttgatggttgctgccacctacggtagcattgatgtcatgacgttgattctttctctatcagaagctgatgtgaaccgatca

SEQ ID NO: 47005 - DNA, 200 bp, Glycine max
  Clone ID: LIB3107-004-Q1-K1-D7
gacgcatacatgagataaggcaattgtgataagccattcactcaggtgaaaagaaaaaaaaaaacatattgttacaaaaccatggtgattcacagactcgaattgtgcataaacatggttcaactcgccatagagttcgtcgtgagcgtcgcggaaacagtggtcatagttcagcaaagaaccgcggagcctttcggaat

SEQ ID NO: 47006 - DNA, 419 bp, Glycine max
  Clone ID: LIB3107-004-Q1-K1-D8
atattgggacatttcatttatttattgtagactgtaattaacttataacaatgatgatttaattgagaaattaaatcaactttatataatttatcttgataatgattgttgttgataaaatgtgttatcaatagatttacaactttattgtgtatatcatgatatgacagtcaaatggaagctaccaaaaccaaacttctgttttaatttaatcatttttaaaatgcttcatttctcgcctctgactctgcctcaaagaattaagcttccttcaaataaaagactaattgaacaataatttagccttgtctaagaattgaagggtgaggaagtataggggttgggactacggcttcattgagtttcagtgttctgttattagaatgataaggttaattagctactcttttatgtgacac

SEQ ID NO: 47007 - DNA, 247 bp, Glycine max
  unsure (1)..(247): unsure at all n locations
  Clone ID: LIB3107-004-Q1-K1-D9
aggtaccgctgccaaaaaaccaccaaaagggtccggttccaaaaaaccaccgaaaggtaccggttccaaaaaaccaacaaaaggtaccggttccaaaaaaacaccaaaaggtaccggttgcaaaaaaacacaaaaaggtaccggttgcaaaaaaacacaaaaaggtactggttccaaaaaaacacaaaaagggacctcangtcaagccgggctacccgcctaatttaaacatattaataacggaagg

SEQ ID NO: 47008 - DNA, 422 bp, Glycine max
  unsure (1)..(422): unsure at all n locations
  Clone ID: LIB3107-004-Q1-K1-E1
gacttgacttttagatttctgcaagttgcattgtgtacatgcaattctcatcttttttttttatcatgtcttgaacaaataagtattatattgatattctaaactcataaattcattcttgataattttatttatcttacacattactactttaatttttgccaagataaattagagtcttttctcttcacaaattactcccagagtgttggaaaaggcaaaatgagtttggacacgataaagaaactcatcaaatccatacaaatatttactcattagatgaattttatctgctgatgagcgttgatctcttcatacttaactgtcctgtaaaaagatagttggacaaagaaaggtgtcagactactcaccatttnccataaggaaacaatttctttatttttctaataatattttttaat

SEQ ID NO: 47009 - DNA, 394 bp, Glycine max
  Clone ID: LIB3107-004-Q1-K1-E10
cgttcccctcttagctggtggatcaccaacgctgagtgcccgtacaccttgagtagcttgacattggagtcaatcgccgcctggacggccagggcacatgcttcatactcagccatattgttggtgcaatcaaaccccagcctggctatgataggcatacattgattgtctggagagaccaatactgctccaatgccatggcctagaatgtttgacgctccatcaaaccatacggtccatttgtcccggtcctcatctagtttttcctcaaacaaggccatgatgtcgtcatccgggaattcgggatgcatgggctgatagtcgttgagaggctgctaagccaaataatctgctaagatgcacgagaaatgcaatatgtattgggtatatatat

SEQ ID NO: 47010 - DNA, 329 bp, Glycine max
  Clone ID: LIB3107-004-Q1-K1-E11
ggatgcattggggcatgcttttaattgcctagatctcccaaacaaattgtagcataagtcccatggccaaagagactagtgttgtttatctatatcccagcaaatcacaagtttggggtgagaattttgatcataaaaaacttgtaataacaacactagctgctaatggaaagaaggaggagagtaatggagcacctaatgacacatatcctgcgtttcccgggtggtatgctgatgtttcctggccaggagaagcacacacatataaaatagaaaagattctattccacgggaaatcagaattccaagagcttcttgtatttgagtct

SEQ ID NO: 47011 - DNA, 215 bp, Glycine max
  Clone ID: LIB3107-004-Q1-K1-E12
aattcgagcgggcgcttttttttttttttttttttttttttttttacccaatgcgggggattattaaaatcaatggtgaagtgccctttaaccaaaaaaagggggggggcccttacaaacccaaagtgttttattttaccaaaccaacttaaccttgaacttcgttaaaacccgtggccaaaataaccaccccttgtcccttaattaattccaaa

SEQ ID NO: 47012 - DNA, 391 bp, Glycine max
  unsure (1)..(391): unsure at all n locations
  Clone ID: LIB3107-004-Q1-K1-E2
tcatggatggttaagtattgaaatgttgttttgcttctgctcttgatggttaagcctcgttggttctgccaagtggttaaactttgaggtatagtttctacttggtggttaagctttgataatttcatggattaatagtttgattgagcttctgccaaatggttttgttgttgatttcgcttgatgattaagctttgatgcttgctttggactcttggaagaagattgagaaagtcaaagttagttgaagatttttagaagtttttgtttctgaccgatgtattttcagcatgtttaactatatttcaagttttcaaaattttttcatttcctttaatgttgatatattgntttctctaagttagaagtgttttcaacaccttccagctta

SEQ ID NO: 47013 - DNA, 330 bp, Glycine max
  unsure (1)..(330): unsure at all n locations
  Clone ID: LIB3107-004-Q1-K1-E3
aattcgagcgggcgttttttttnnnnnttttttttttnnttttgggcccagaaataattatatggctttgtagattatttaagtgatctcatgaattattttttaaaaatattatattgaacgtgagtatttttatgattgcttaaatttggtacttaaaattatttaaaaagtaaaatggaaattaaaattatgttgctcctattagtatttaagttgataacttgtaaagaaaataaaaaatatgatactaatttttatgataaaaaattaagattcattttcaaattaattagaaatagacaatttacacaaccaatattttcaaat

SEQ ID NO: 47014 - DNA, 396 bp, Glycine max
  Clone ID: LIB3107-004-Q1-K1-E4
tgatttcaaggactggccattcattttgaggactattgaatttagttttaccccagatgttataggctccatggcagcacaattgcactcagatacaggatttatcactctacttcaagatgatgaacatgttagtggtcttgagatgatagatgattttggcacatttaaggcagttcctcccataccaggggccttcctttgcattgttggagatgttggacatgtttggagcaatggaaatttttggaatgctagacatcgtgtaatatgcaaggaaacgggtactggttattcatttggtgcatatatgttatcaccaagggatggtaatgttgaggcgcctaaaaaattggtggaagttgaccatgtacaacgctatcgaccatttaagta

SEQ ID NO: 47015 - DNA, 184 bp, Glycine max
  Clone ID: LIB3107-004-Q1-K1-E5
gagaagtggaagcaacgaagaggctgaacgaagtacaaaatttgcattattgaattggattcctctgttctattcgattccatgcgagacagagacagaagaaaagaattaattattaaagcagcagcaaagagtcttgatcttgatctggtggcaaacgatggcgtttcgtggtctcggtgtg

SEQ ID NO: 47016 - DNA, 109 bp, Glycine max
  Clone ID: LIB3107-004-Q1-K1-E7
aggtgaagatcctgctacaaaaacatcaactccccaagggaagcgtgctgcctcttgaattgaatccaaaagtttcaattccaaacaagatgtttccaaaaaccaaaac

SEQ ID NO: 47017 - DNA, 367 bp, Glycine max
  Clone ID: LIB3107-004-Q1-K1-F10
ggattgaaaaagattaactgcaagtagtactctcgacgcattgatcaaacattgatgataagttctgtcaaacaaagattgtttttgaacacttcattgctcacatgaaaaacttatatgatgattacttcagtcaaataatgattgttttttaacatttcattattcacatgaaaatcaatctgatgataattcctatcaaataatgattgtctttcgacgtttcattattcacatggaaaatcacattatttataatcaccatatgtttaccatcgcaaacatgtaattattctgccaaattgtgtcttcctttaggccgagcacaattcgcatgaataatttcatgcgacatttacgtaaattc

SEQ ID NO: 47018 - DNA, 325 bp, Glycine max
  Clone ID: LIB3107-004-Q1-K1-F11
gaaagagagttggaaaacaaagtatagagtgagagaatgggtgagaaaagcaagattttgatcataggaggcaccggctacatcggcaaacatatagtggaagcaagcgcaaaggctggaaatcccacttttgctttggtgagggaatccacactctctgacccctccaaggcacaactcatccacaattttgaggctttgggcgttaatttggtccgcggggatctgtacgatcatgagaagttggtgaaagctatcaagcaagtagatgttgtcatatccacgctgggtcacctgcagcttgccgatcagctcaagatcatcg

SEQ ID NO: 47019 - DNA, 369 bp, Glycine max
  Clone ID: LIB3107-004-Q1-K1-F2
ggtgtcatcgtgactgagattgaccccatttgtgccctgcaggctctcatggaaggccttcaagttctgaccttggaggatgttgtttctgaggctgatatctttgtcaccaccacgggtaacaaggacatcatcatggttgaccacatgaagaaaatgaagaacaatgccattgtttgcaacattggtcactttgacaatgagatcgacatgctggggctggagaactaccccggcgtgaagcgcatcaccatcaagccccaaaccgacagatgggtcttccccgagaccaatgtcggcatcattgtcttggccgagggtcgtttgatgaacttgggatgcgccacaggacaccctagttttgtgatg

SEQ ID NO: 47020 - DNA, 314 bp, Glycine max
  unsure (1)..(314): unsure at all n locations
  Clone ID: LIB3107-004-Q1-K1-F3
gactaccattcttattttctctctcgatacanagatacatagaaatggcctcttctcttgcatcctcatcaactgttctctggatcctttttctaaccattgcaactcttcatttgagttcaaccaggaagttgtcctggtcagacccgcagttgcagtttcaataccacagaggccctctcctcaaaggcaaaatctcagtaaacctcatttggtacggtcaattcaaaccttctaaaaagccatcgctgctgatttaatacctagctctcctttctcaaacccgtcaccgaccaaccatccgttgccacgtg

SEQ ID NO: 47021 - DNA, 381 bp, Glycine max
  Clone ID: LIB3107-004-Q1-K1-F4
gaccataaccactttttgtctcttgaatttcttttggcttggtcctttttgttttttcattgacatgttgaaggggtcttctttatctagctggagaaacaataatggttgctgtctagttctgtgaaattcaaccccatcatggatcttgagtctgtgatccacaggaacacaattaaggaagaatcatggaagacagttttgactttggcctatcaaagcttgggggttgtgtatggagacttgagcacttccccactttacgtttacaaaagcgcttttgctgaggatattcagcattcagacaccaatgaagaaatctatggagtgttgtcttttgtgttctggacacttacactgatttcactgctcaagtatgtg

SEQ ID NO: 47022 - DNA, 414 bp, Glycine max
  Clone ID: LIB3107-004-Q1-K1-F5
ggtgtgattgtttgttgttgtaactcgttcttgttcttgggttgttctgtgtttgtgtttgttttttctctcacctgaaaatgtcttgctgcggtggtaactgtggttgcggaagctcctgcaagtgcggcaacggctgcggaggctgcaagatgtacccagacttgagctacactgagtcaaccaccaccgagaccttggtcatgggagtggcacctgttaaggctcaatttgagggtgctgaaatgggtgtgcccgctgagaacgatggctgcaaatgtggaccaaactgctcctgcaacccctgcacttgcaagtgaggtgttgggagagcaagcttcaagcagagatagcccttaattaggaataatgataaactattaatgtgtagcttaaaacttatgtattatgtct

SEQ ID NO: 47023 - DNA, 321 bp, Glycine max
  Clone ID: LIB3107-004-Q1-K1-F6
accatgatgacatttgcaggccatgttgtgtagtctaggtcttggaaaatacgagctgttagcaatttggagacttcttgccatactgcttgacacctttcttcctccatctttctttttctttgaactataggttttgcttctcagcatatggagagtttgtgacaatggaataaaatatcggtcaaactcccctaatcaataaatgtcttttgaaccacgcacttgttgatctcgacactgatcaccactggatcgtcctgaaccggatatatcgccttgaaatcagatgtggtaaaagtgattggtggcttttttggg

SEQ ID NO: 47024 - DNA, 357 bp, Glycine max
  unsure (1)..(357): unsure at all n locations
  Clone ID: LIB3107-004-Q1-K1-F8
gatcctgcagaaattccagagggatatgaggagaagtggatggttaatatccacgccattgatacgcgcggcgtggtggataggatggggtgcactgagtgtaggtgtgacctttacaatgttacaaagaaagaacatggggagcctctaagttcagactataaaggaggttattattgttgttatgatcaaacccagtgcaggttgagggaaggctttgagggcccaaagaggagcctctacctaagatacacagtgaagtgggttgaatggaacaagttcattgtgcctgtaaagatttatatacttgatgtcactgatactttnnannnntcagatgattctagtggaatgatc

SEQ ID NO: 47025 - DNA, 417 bp, Glycine max
  Clone ID: LIB3107-004-Q1-K1-F9
gtagtatagtctgaattatatcaggtgtgtttcagtaaacttaatagtatgacaacgcattcatttcctatgcattgattcgatttctgatactatcggagtgaaaaaagtagatctaaagaaaaacgcgggttggattatattagtaacaagtaaattctttgtacgtaaaaagttccaagattttgttggacagaataacaattgcaaagtttgagatcacccagaaagcattatcaattttaaaagcctactcgggtattgagcgtttatcaaagtttacttaataagaacttaatttttttttttttcaataaagaatagtttgtaacttcggaaaaagagaatctagtttattttcttacatagaatcctcatatatgtgtgaataacacatacattttttctatagataca

SEQ ID NO: 47026 - DNA, 105 bp, Glycine max
  Clone ID: LIB3107-004-Q1-K1-G10
agggggtccatctcaaaagggcccctacaatacaaagtttaagggggtccttctttacagcttcattaattgggttttcccgtctcaagttttccttcctttctt

SEQ ID NO: 47027 - DNA, 309 bp, Glycine max
  Clone ID: LIB3107-004-Q1-K1-G11
tgaaacagaaaattcaaatatagttccagaagcaattataaacccaattagttctaaacactggaaaaccccatctaaattataccaacgtccaactgcccctgaccttctactagaagaaagaggagaaaataatttcaagagtttttctacaaataacatctatgaatggaatatagatgcttaaacagaatacaatatcatgaatacactccaacatatgacaatggtagccacgacttaccaaacctcccatgaatgttcggaagaaaccattataaacattttagtggcaggattttccggaca

SEQ ID NO: 47028 - DNA, 274 bp, Glycine max
  Clone ID: LIB3107-004-Q1-K1-G12
ggaaacaaccattgggtaatcctcacttggtgatactactaatcctgagaatgatacctccaacttcgcaataaccaccaaacttccctataaattaactttctctctttctttctttcttccctccctctcttctattctcttcttggctttacatcacaccctcttttccccttttgccaaagcttgatctttttcctcttccatccccgtttctccacttttcttgatcaaggtgccctcgtttcttcagttctgaatcatttttttgtct

SEQ ID NO: 47029 - DNA, 338 bp, Glycine max
  Clone ID: LIB3107-004-Q1-K1-G2
gccccccggaaaactattattacctccactccggatgggactcaaagtggcctctgaaacatcaccgactcccactgcgtcggttggcttatatgtagattggggttcaatatacgagactccgataagttttggggctacacatctgctagaacgaatggctttcaagaccactagaaaccggagtcactttcgggttgttcgtgaggtaaaagcaattggtggcaatgtgcaggcctccgcttctagagagcagatgggttacacttttgatgccttgaaaacctatgttcctgaaatggtcgagctacttgttgattgtgtcaggaaccctgttt

SEQ ID NO: 47030 - DNA, 366 bp, Glycine max
  Clone ID: LIB3107-004-Q1-K1-G3
ggagctggagcagcttctgcagtgcatgaagggccagaagaagagaacaaaggagggtagtggcttctctgactcttcacccttttctgagttcttcatgttcccccagtactcgacacgtgccacacagagcagcagcagcagcagcagcaaaggctaccctggcacgtgcgaggccaataacaacatggcacggaacccttcatcatgggccgtggcggacatagaagtgaccttggtggatggccatgccaacatgaagatactctgcaagaaacgaccagggatgcttttgaagatggttgttggtcttttaagtcttggtctcagcattctccaccttaatgttaccactgttgacgatat

SEQ ID NO: 47031 - DNA, 357 bp, Glycine max
  Clone ID: LIB3107-004-Q1-K1-G4
gcacgcacttagcaatcaatcaaaacattcccaagaacagtaatatacacatcttcaattaagctccttctcctatagccatggctctttctaagcttataattgcttcccttcttgcgtcgcttctccttcttcatttcgttgatgctgatcaatcggcacatgcacaaacgcaggggtctcttcttcagcagatagattgtaacggagcatgtgctgcgaggtgccgtttatcatctcgtccacgcctctgccaaagagcttgtggaacttgttgtagacgctgtaactgcgtgccacctggcactgctggaaaccaagaagtgtgtccctgctatgcaagtttgactactcatg

SEQ ID NO: 47032 - DNA, 305 bp, Glycine max
  Clone ID: LIB3107-004-Q1-K1-G7
gacacgcacctctttctgattgccttcgaatcacacactctcttcaatttctagggttttgctattgctttgcctccgttccccctttctcacaaaaacaacgccttttctcttctccttcgtatctattctttgcgtttggtttttggttgattgaaggcattcacagcgtaattcgttgctgcattttaatcgatttatctaaccaggactgaatgacctaatggagtctaaaggtgggaaaaagaagtctagtagtagtagtagtaaatcaattttttacgaagctcccctcggatacagca

SEQ ID NO: 47033 - DNA, 209 bp, Glycine max
  unsure (1)..(209): unsure at all n locations
  Clone ID: LIB3107-004-Q1-K1-G8
cccaaacacnacaacaggtgagagtaccgtcagaatgttacattcacaaatttggctagtcttaatcgttgtataagcaaaatccttaatcctgccatgcaacataatatctatcgacacataaacatccatcaaaaccatcatggtgacccatatcttatcaagattctctatatctcaagatatcactactctataactcctacctc

SEQ ID NO: 47034 - DNA, 324 bp, Glycine max
  Clone ID: LIB3107-004-Q1-K1-H1
gacacacaccttccctttgattccatttctcatgctcacttccaaaactcctccattcatttctcgcatttctaccttccaaagctctttctctaagatcgagctttggaaaacttgaggaagcatttgagtaacaaccccttttcagatccctgaagggttgggttcatttgtcgaaataataacaacttgcttggaacaagcataataagcatggcaagcgcgttgcaacttcaaggggttcaagggaactacctttgtgtgagtgtgaagaggggcttgcatcattgcaagcctcaaattgggtttgcagcatttggtgct

SEQ ID NO: 47035 - DNA, 256 bp, Glycine max
  unsure (1)..(256): unsure at all n locations
  Clone ID: LIB3107-004-Q1-K1-H12
ttccttganntgggaacctnncttcaaatnngatgatgnnaacacgcncnnaatatcctagacnnagtccanngtcagaataaaccaaaaggggatgtggcnnacccaaaaanntgggatcctnngattgggctganntgtcaagnncttgcacaanngctaaatatttcttcttatcnnccggattagcaanannatttaaaaccactttgatatttcagatagaaatatgagtgcattacncnnngaagtcatt

SEQ ID NO: 47036 - DNA, 359 bp, Glycine max
  Clone ID: LIB3107-004-Q1-K1-H2
ggatagcaacaacaatttaatacctcaaaaatggttcactctctgctcctacttcttctcctcctcactctcactgcaacctctgctcaacatgacggcccttcgatcacagccaccatggagcaattctccggttacaaaatccacgaacctcactctttccaaccctcttcactctccgttgatgctcaggctcttcagaaccagattgatgagcttgcggcgttttctgactcacctgctccatcagtaaccagggtcttgtatactgacaaggatgttttaggtcgcaggtatgtaaaaacccagatggaacttgctggcctatctgtgagagaggatgctgttggtaacatatt

SEQ ID NO: 47037 - DNA, 359 bp, Glycine max
  Clone ID: LIB3107-004-Q1-K1-H4
aggtgtggcgttgagttaggcgttaaggctaaattgtgagagttttcatttttccacatcttttattaagtgttttctgtcatgaaaaaggaaaaaaaatgcaatccgttttagtaatgtccatattaattgttttggatgctttggtttgcattccttgtcccgtgactgcattgatgtttgtgattattgtctgttttggtgcttggttatgtgaaatgacaaatatattgtttgaagtttttctcaatctacttcactgtattgcaagttggacaattgagagaagtgtccaacaaggttcacaatgcagaactgaaattgttttttgaagtggagctggggatggtaacattttt

SEQ ID NO: 47038 - DNA, 316 bp, Glycine max
  Clone ID: LIB3107-004-Q1-K1-H5
aattaccttcttgttttaatttgtttttcatatgtaagtaggaagctctaaatagctcaaactttgatcacgcatgagctagatttcataattattcattatttccaattagtgcttatacatggcaatacatatgaattggtttttttaagtttgatacagagaaaaatgttaaagttggaattgtatattatgtgccttcattgatagattctcatggaatcaaatttatggttggataatgcattgatcaagctgtttgttttaaattcttcgcttctattttccaggtctatgttgctgcaattcgcaacag

SEQ ID NO: 47039 - DNA, 361 bp, Glycine max
  unsure (1)..(361): unsure at all n locations
  Clone ID: LIB3107-004-Q1-K1-H6
gtgtagcctttgttgggccaaggcgaanaatttctttaatttcttagggataataaaaaagatgaagaaggatgttcatgcacttaagtgatcatatatccttcttaatctcttgaatatccatgaaaaatgaaagaaaaagatgggagtagctagagacctcgtttggttactggtgagaaagggtggttgagaattgaattgggaattaaattctcgggagagagaaaacgggagtgctatgactgtgagggtgacgagagattgaatgtgagtgatgattgcatggaacccccaagcttgggcatttattattgtggaaaattaatgagtgggaaagagagagagcgtggtgaatgtc

SEQ ID NO: 47040 - DNA, 362 bp, Glycine max
  Clone ID: LIB3107-004-Q1-K1-H7
gaaagtacagtgaggtttttgaaggcataaatgttgatagcaatgagcgttgtataatcaagattcttaagcctgtcaagaaaaagaagattaaaagagagataaaaatacttcagaacctttgtggtggcccaaatattgtcaagcttcttgatattgtcagagatcagcactctaaaactcctagcttaatatttgagtatgtcaacagtacagattttaaagttttgtatccaaccttgactgattatgacatacgctattacatatatgagcttcttaaggccatagattactgccattctcaaggcataatgcatagagatgtcaagcctcataatgttatgatagatcatgaatta

SEQ ID NO: 47041 - DNA, 334 bp, Glycine max
  Clone ID: LIB3107-005-Q1-K1-A1
tggatagtaggcggtgtccgaccattgcggcttcgacccctctttcactttgggtgacatcttttctcaaacgttgaagttgaattcttccacttattatacatattttccagtttgaaacaatagtttactcttacaatgtctttcgttgttttctttcttttagtgcaactggattggtccatgtttgacattttagttgtacgtgtgtatccgtgttggctaccctcgagctctaattaataattgtcttcttttattttaatttttaattggtattattttcaagagtcaaatacttcatgcaggtcctctctatattaacataggaaga

SEQ ID NO: 47042 - DNA, 371 bp, Glycine max
  unsure (1)..(371): unsure at all n locations
  Clone ID: LIB3107-005-Q1-K1-A11
gatagcagcatcatacaaagcattgaattcaaaagacttaagttcattccttgtgttttgctttcttcctcaaaaccaaacatgtcgaacacatgcggcaactgcgactgcgctgacaagactagctgcaccaagggaaacagctatggtgttattgtagagactgagaagagttacatcgagactgttgtcatggatgttccagcagctgagcatgatgggaagtgcaagtgtggcactaactgcacttgcacggactgcacctgtggccattaaggaatatgtatgaaaatgtaattgccatgtgtttggcaatacanatatccaaataatgtaatcttcgtatgaataaatgtgtgtgctggtatccc

SEQ ID NO: 47043 - DNA, 415 bp, Glycine max
  Clone ID: LIB3107-005-Q1-K1-A12
gtctgacaaattgacataaaaatcattgaaaagctggcctttagagtgcgtaagtgggttataacaaaaagttttaggcctcttcttcttacatcctctaaatatcatttttcaccccctttaactttaaaataaaccttaacttccaaaatatccctcactcgttaacatcatccttcctctctttgaacccttcttcttcttcctcctcttccgtcattcaatcattgtttcaatagaaaggatcaacaacagagcctgtaaatcaccacacatgtaattcaaaatgaaaattttacattttggattacttgatccaaaatttatcgcaacaaacaatctaaatattttaccggatgtgttacggattagaaaacttgtaaagtttgcaattctatggaggttttggattata

SEQ ID NO: 47044 - DNA, 432 bp, Glycine max
  Clone ID: LIB3107-005-Q1-K1-A3
gggggatttgaattaacgagagccaacaaaactggagaaaggttttggaactttctgatccgggttttgcatctttccatcatcgccaccatttacttccattatatgttactttcactttattttattttatatacatcttagggtagttagttttaatactagcttccatgccaatcatcaccaaaccaggtaaagccaagatcttcaacgacccattgccgagaagagtctcaaaacccagactctagccagacccagttatcagaatcgcttctttctcttaaacaagacacgcccatattgtatcatatgccccaacaccaaattagagagaacagtaatgggtatgggagctgagaggaaatggcttttcactctattcaatgcagtattcctatctctcatgcttcttttgatgtccctcttctc

SEQ ID NO: 47045 - DNA, 340 bp, Glycine max
  unsure (1)..(340): unsure at all n locations
  Clone ID: LIB3107-005-Q1-K1-A5
gatcttaacttttaattttataagagaagaaagagaggtaaatgagactggtatgccggtttccatcttgtttttgtcgggggttttggcagaattgggttcgactcccatagtcccgcggcattccccctgacctcgagataaaatgaaaaaacggacgataaacagtttgattgttaagggtaccattatttcattagtaagggactttttattggaacgggcttcgattccctttatacgcgatgtggcgaatcagactgatttaacgacgacgagatatgcgattcaaaactcgtcgtctacttttagganatgtttggaacagagaacttacaat

SEQ ID NO: 47046 - DNA, 428 bp, Glycine max
  Clone ID: LIB3107-005-Q1-K1-A7
cgagccggatctggtgtatcataagggatttgctgtttctattgattcctccggattgggtcaaaaacatttcttgaatgagttattcaactccagggatgaatcgaaaaatcactctttattggttctacctcctcttttttatgaagagaatgaatctttttatcgaaggatcataaaaaaatgggtccagacctcttgcgggaataatttggaagatccaaaacctaaaatagttgtatttactagcaacaacataatggaggcagtcaatcaatatagattgatccgaaatctgattcaaatccaatatagcacccatggttacataagaaatgtattgaatcgattcaattgcaacttcgaatatggaattcaaaggtatcaaataggaaatgatactctgaatcatcgaactataatgaaat

SEQ ID NO: 47047 - DNA, 391 bp, Glycine max
  unsure (1)..(391): unsure at all n locations
  Clone ID: LIB3107-005-Q1-K1-B1
caatccttagtgacaccctgatattcgaatatttgaaacgtgtaatttgctaagatgaaattcaatcgtcacgatatttcatctatgcagtagtttgtggtatgttatgactttggtgatttgatcggtaattacactaaaatgggggaggtttgttggacattttagtgtaattgatctctttattatgttaaaataagagtgcacgcttgttttaatgtaataacgagatgttcggtttaggcaaaagttggaagttacatggaagttactaaaacttncattaacggcaatttttaaaaataaataacttncatcaaccgccaaaaaccacctgttctttgattataaataatcatcctagttcagaaagcataacatgtgaaaaaca

SEQ ID NO: 47048 - DNA, 438 bp, Glycine max
  Clone ID: LIB3107-005-Q1-K1-B10
ggattcgaaatgcatgctaaccccttacgtggagagcttctaccctgtatccatgagctactaccccatctctctccctttgccatctacttgtaagccttcatcaaacataactctcttactagagaaacatatatatctgtatagcataggacttattggattcttgttaatccacaccacaagggtaattgacatgggatcaagcttctctagttggtatgagggagaatctgtgtctgcttctccaaagccaaccaaagcggaggctactaagggcggttcttgttacaacagggtctctatcacggacttgagttttcctggctcaacgctttcagaggatctctccgattgtgtagcggggtctaacctgcatgtgatgcactcgctgagctcaagatataacgcacggtttctgttggagtaactttctcg

SEQ ID NO: 47049 - DNA, 255 bp, Glycine max
  Clone ID: LIB3107-005-Q1-K1-B11
tccatctttccaaattggcctaaccgtccagacaagttcatcatgctgttgagaacataagtgtctagtttcagaccagatttacacatttggttaagaatctcctcacatttattcacacttgccattttggaataagcagacagaagaaccatgtgggacttcattggtggtggtattcccactcttttcatatctttaaaaacagcttcagcatctgaatttcattcataaagttgtgaaaggaaaaaaaca

SEQ ID NO: 47050 - DNA, 363 bp, Glycine max
  Clone ID: LIB3107-005-Q1-K1-B12
attctttctcaaattgaccttaaccgtccatgacaagtgtcaacatgctaggtgagaacatatattatctagtgttcagaccagtatttacacatttatcttaattaatctcactcacactttattcacacttgcccattttgataataggtcatacactaataaccattgtctgtacttcattggtatatgtcatcttctacatctattcatatctcttaaatacatgctccatcatcatgcatttcattcataagcttttgaactactaatttcatatatcataccattaaattctattaataggctacattcacactatataatatacattgacttatcctataattatctttcatcctt

SEQ ID NO: 47051 - DNA, 81 bp, Glycine max
  Clone ID: LIB3107-005-Q1-K1-B3
actacttgtcgcaagaaccatctaaagatgtattgtcagaggatgggggaatacgcaaaagatgaggaattgctgatacat

SEQ ID NO: 47052 - DNA, 99 bp, Glycine max
  Clone ID: LIB3107-005-Q1-K1-B7
ggttctaagggattaattgttggtggtggaacctgctcctttttctttgggggtcctgggtttgtgttttgttttttctctcacctgaaaatgtcttgc

SEQ ID NO: 47053 - DNA, 414 bp, Glycine max
  Clone ID: LIB3107-005-Q1-K1-B9
ggttggattttggtttgtatctgaagaggcattaacatgaaccgttgaattgaatttgtttgtgttgcagatttggctgtggacttgtgcaagcacccttggtgacaagctctggtcttcttactaaagtttggagtgttatctcttctcgtgatgaagacatagtttcatactcaggaaataatggactgtccttgaaagtttctgaggattcgggtttgacggttgttgcgtttgaggtcaacccggattttgatcttcaatctacagttgtttctttctctgatcccaaggagaataatttgaaccgctttgagtttctttgtaccaagaaacatccagatttctctgtcaacaagtctgtagttgatcttttttctaaaaatcttccgaggcttgatgagttgaagtcca

SEQ ID NO: 47054 - DNA, 401 bp, Glycine max
  Clone ID: LIB3107-005-Q1-K1-C11
gaatcaaccaaacacaacacttcactctgaagcttcaagcatgactgcttggtacttcctcctatttgccttcatccttttcctctccataaacttcttgatccaaacaagaaggttcaaaaaccttcctccgggaccattttctttccctataatcggaaacctccaccaactcaagcaacccctccaccgcacgttccatgccttatcacaaaaatatggccctattttctccctctggttcggctcccgttttgtcgtcgtcgtttcgtcgccgctcgcggtgcaagaatgcttcaccaagaacgacatcgtcttggccaaccgccctcacttcctcaccggcaagtatatagggtacaacaacaccaccgtcgccgtttccccctacggcgaccact

SEQ ID NO: 47055 - DNA, 57 bp, Glycine max
  Clone ID: LIB3107-005-Q1-K1-D10
gagacctcaggtcaggcggggctacccgcggagtttaagcatatcaataagcggagg

SEQ ID NO: 47056 - DNA, 252 bp, Glycine max
  Clone ID: LIB3107-005-Q1-K1-D11
gaggagtgtcgcggatgagagatctctggtgaggtctgtggaaatggcatcatcggaggtgacgatgaagggaaattgcttgaaccacaacgacggcggagccacggagcctcattcgccgtccacggccaaagacgcagaagctgcacttttcagggaactatggcacgcatgtgccggtcctctagtcacggtaccgcgggaaaaagagcgcgtgttttatttccctcaaggacatattgagcaagtgga

SEQ ID NO: 47057 - DNA, 316 bp, Glycine max
  Clone ID: LIB3107-005-Q1-K1-D12
gacaaccactctcttttattcttagctttgctttccagttcatacttcatcctattattactttccctctttgcattccaaatggccactgttgaggttgcacagcaaacaccaacaactgtgacagagaatgaaacaacgactgaggtaaccaagattgaggaaactaccccagaacagccagccaccgaggttactgccccagaaacagtcaacgaagaagcaaaagaggaagcagcagttgagactaatgaggcaacagaagttacagaggaagggaaggctgagaaaacagaagaagaagaagaagtgaaag

SEQ ID NO: 47058 - DNA, 437 bp, Glycine max
  Clone ID: LIB3107-005-Q1-K1-D9
ggttctcatttctctttctgtagccctgggtcaccggagagagagtgagtgcaaagccatcgtcttcttctcagacaagtagtttggtaaaagatggctgatgctgaggatattcaaccccttgtctgtgacaatggaactggaatggtgaaggcaggatttgctggtgatgatgctcctagggctgtgtttcccagtattgttggccgacctcgtcatactggtgttatggttgggatgggtcaaaaggatgcctatgtaggtgatgaagcccagtcaaaaagaggtattcttactttgaagtacccaattgagcatggtatagttagtaactgggatgacatggaaaagatctggcatcacacattttacaatgaattgcgtgttgctcctgaggagcacccagtgcttctgactgaggctccactcaacccaaa

SEQ ID NO: 47059 - DNA, 327 bp, Glycine max
  Clone ID: LIB3107-005-Q1-K1-E10
gatactcacagctactctatcacttttcggtttattttcttcttctgttcaatatagccactcatttttaggtagctgagtcttttttagagtgtgttttgtaattttgtttcagatttgcgttttgattcattgattccttcatttccttgctgagagtgcgtgtgatttctctcgtctcctttagaattccgattggtatttctaacactgtgaaagaaagagagatatggcaggaggtggtggagctccagcacctaagatcgatgagccacagccacatccaccgaaggattagctaccgaatgtttcttactgcattacgag

SEQ ID NO: 47060 - DNA, 328 bp, Glycine max
  unsure (1)..(328): unsure at all n locations
  Clone ID: LIB3107-005-Q1-K1-E11
gtcttgtgcttttgtgtaaaagcaatacttgttgatgtcgtatccttgcttagttataacatttcttttaagcccatcagcttgctttcttaatgtttcagaagcattttcatcaccaatgattgtatctttaaaccaatcagagaaagtcttgttatgcattttcaagacccagttctttgacatttttggttgactttggttgactaaaccttcatgctgaagtatgtatggcaaagcttcattactggtgntcaacacatacaagtgagcttgtaacaaatcttttagacttggagtgataacatgcaatccttttgaaccctta

SEQ ID NO: 47061 - DNA, 419 bp, Glycine max
  Clone ID: LIB3107-005-Q1-K1-E9
gacactccctgaggagggaagagaatctctctccgttttataaacccataaatttagggcgcgctttttcccggcctcccctcgccaccgcatctccatccatctccgccacgtcgcctcctctctctctcgcttttcgtagttatacttcttctctcgttcctagaaatgagcttctcaacatgcgcagagctgtcgcgttgtttcgccgcagcatcggcgaaacctaattccggtcagtcaaacggcacttccacaacaagcctcagttttctcactccaatcggtcgttacggcgccgtttcatcagtatcgaggtcgaataagaccaacagaatagtcgcggaagctactcaaggtcttacttacagggacgccggcgtggacatcgacgccggctccgaactcgtgcgcaggat

SEQ ID NO: 47062 - DNA, 335 bp, Glycine max
  Clone ID: LIB3107-005-Q1-K1-F10
accggaggggcgctacatacttagtttatcattaattgggtcatcacagctcgggacatacacaacgtaatcatgctactgaacatactagaccttcctatcactcacatccatatccatggggacgcagtaagcataagcaatcaaggaaccaccaagtgcgaggcccaaactggagaagccgatgatcgcactatatggctagctcatgctcatgcatctctgcattctcatgtgcacatgctgtacaatctaatggctactttgcatctaacttcttagaatatgcgtactgatataacatatcatcggcttgacgatcatatacttcgatg

SEQ ID NO: 47063 - DNA, 363 bp, Glycine max
  Clone ID: LIB3107-005-Q1-K1-F12
gatcctcagcaagaacaagaagaagaagaagaaacaatgtcttgctccaatctgacaatgttggtgtcctcaaaaccttccctttccgacccctcgaacctctccttccgctctgtcctgaacccttttcagctccctacacaaaacccagcttcatgcaccccttcacgctcctcaagcacccaaattcagtgtggtctgagagaactgagaacccgcattgagtctgtgaagaacacgcagaaaatcacggaggcaatgaagcttgttgctgcagccaaagtgagaagagctcaagaagctgttgtgaacggaagacccttctcagagaccctggttgaagcctctacaacatcaacgagc

SEQ ID NO: 47064 - DNA, 450 bp, Glycine max
  Clone ID: LIB3107-005-Q1-K1-F9
cccacgcgtccgaagacgacagaagggggtgaaggagtttaagatatctggagcagagtgtgttgttctctgggtcgaagcagcggaaacaaacatgtcgtggtgttactgcgctaagcctatgactttgcagttgccgttgcaatcaagagcagcatcatcgttccattcccacgttggaggagtaacagtaacattctcaacactgtctcttcgaccctcttctcctcttgttctgacccacaacctccacttccaacccaaactcaaacgcgcttccacaaccattcgctgctcctctgcgttgactcctcaattgaagtctaccttggatcaaggtatttgcttcaaataaagtagttgtgtttatgaagggaactaaagactgtccacagtgtggattctcaaacacagtggtgcaaatattgaagtctctaaatgtgccttttg

SEQ ID NO: 47065 - DNA, 338 bp, Glycine max
  Clone ID: LIB3107-005-Q1-K1-G10
gctgcttttaatgcgtttgatgcgagttttggatttgatgatgtatttgtaccgtttctgtgcgcctaccacctgattgcgagttaacactgagctagactttttgataatagaattggcggcggcaagcttgatttggaaaaataattaaatcatgagatggatttcgtcgagaatattggctgtgtaagaggacttgctaaaagccgtagatgttgagatgtttttggctgtagggaataccatggttttaaattaatcccggttgcagttttgtcacgatccttgatattgggggaaattgcagttgatgtggccgcaactgcggtcgcggtgag

SEQ ID NO: 47066 - DNA, 329 bp, Glycine max
  unsure (1)..(329): unsure at all n locations
  Clone ID: LIB3107-005-Q1-K1-G11
gacacatgacaagacaacaaacccaacacgatcatcatcgttcacgccaagtaaacgattcctctcttctccacctcaccctttctctctctttttctctctgttgcttcacaataccaacaacaccacctggttccgggtcacactacttgcccaggatcaggacccttctcatgcaacaaccgattcaagtgtttttcgcctttcccaaacaacaactatagggaactaaaatcgaccctttggctagataatcacaccaacatcaaaaaaatcgttttttgctttgtgggtattggnttttttttttttttttgagttgggaccaa

SEQ ID NO: 47067 - DNA, 401 bp, Glycine max
  Clone ID: LIB3107-005-Q1-K1-G9
gttggagggcttgatcgtttaagaaaggagtttgaacgggacattgtaagacgtataaaatatcctgaagattatgaggagcttggggtggatctcgagacgggatttttgctttatggacctcctgggtgtggtaaaacactgattgccaaagctgttgccaatgaggcaggggctacttttattcatattaagggacctgaacttttaaataaatatgttggagaaagtgagcttgcagttcgtacaatgtttagccgtgcaaggacatgtgcgccttgcatactcttttttgatgagattgatgctctgacaaccaaacgtggtaaagaaagtggttgggttgttgaacgactattgaaccagttgctcgttgagttagatggcgcttgacaacgaaa

SEQ ID NO: 47068 - DNA, 93 bp, Glycine max
  Clone ID: LIB3107-005-Q1-K1-H10
gcttctcctttgtggtgtcgagctgagaataccagatgctccagtagccggcgctaaacaacatggcggacaacgcggtcaccatcctaacca

SEQ ID NO: 47069 - DNA, 463 bp, Glycine max
  Clone ID: LIB3107-005-Q1-K1-H11
gaagacgacagaagggatcatttaaaaattatatttttactatctctttttctatgtaattgtttttattaatattttaaaaaataattaagtaaaaatatgtgagaaaaaataattaatatgtctaaaaattaaaaaataatcttataaaaaacaaataaatttatgaaaaaaatttataattaagattaaaggtattacactatcatgtattaagtcatgaatttaatttaatatttatagcttatttacttgcatggtttacatattagatcttggctttggatgtgaatcgcgaatactatgagttaggattgccaataattcaaaaagctggagtggctcacaagattgatttcagagaaggacctgctcttccgtttcttgacgagatgcttaaagatgtgggtgtacagtttctcaccatctcaagttttatccatgattttttgttaacattggg

SEQ ID NO: 47070 - DNA, 298 bp, Glycine max
  Clone ID: LIB3107-005-Q1-K1-H12
aggtgggtatgagaggaacaagaatttggattgggggagtgacaagtttttgcatgtaaagaacgtgaagttaccgtagacaacctatgtgtttgtgaacaggagcatgaacccaagggagtgtcaggatttttgcctcagggattgttcttgcactgcttatgccaacattcagatcacaaacgaaggaagtggatgcgtgacgtggagtggtgaactcatagatatgaggctgtatagaagcggatgcgtgacgtggaatggtgatttgtagatatgaggttgtattggtacgtct

SEQ ID NO: 47071 - DNA, 428 bp, Glycine max
  Clone ID: LIB3107-005-Q1-K1-H9
gttggagggcttgatcgtttaagaaaggagtttgaacgttacattgtaagacgtataaaatatcctgaagattatgaggagcttggggtggatctcgagacgggatttttgctttatggacctcctgggtgtggtaaaacactgattgccaaagctgttgccaatgaggcaggggctacttttattcatattaagggacctgaacttttaaataaatatgttggagaaagtgagcttgcagttcgtacaatgtttagccgtgcaaggacatgtgcgccttgcatacttttttttgatgagattgatgctttgacaaccaaacgtggtaaagaaggtggttgggttgttgaacgactattgaaccagttgcttgttgagttagatggcgctgaacaacgaaaaggtgtttttgtgattggtgctacaaa

SEQ ID NO: 47072 - DNA, 351 bp, Glycine max
  Clone ID: LIB3107-006-Q1-K1-A1
gtctctgttcacaagtttcgttggcaggtttcggcgcaatcggcttctgcttcaaggaaggagagcttgttattctctatcaacaagtaaaatgtcaggtgaagagggtgtcattgcagttgagccagctgctgctgctgctgccatcccaggcgagccaatggatatcatgactgccttacaacttgtgctcagaaaatctctggcttatggtggtttgtcgcgtggccttcatgaaggtgcaaaagtgattgagaagcatgctgcacaactttgtgttcttgcagaagactgtgaccagcctgactatgttaaactggttaaggccctttgtgcagagcacaatgttag

SEQ ID NO: 47073 - DNA, 394 bp, Glycine max
  Clone ID: LIB3107-006-Q1-K1-A10
gtcggatgattttgatgttttgatggtaaccaaggacatggttaacaaaatcactaactcaaaagatgacagtggagacgacctagaaatggttcatggaagattgaaagaaaagttgtcggggaaaaaatatcttctcgttctggatgatgtttggaacgaacatcgagatcaatggaaggctttacaaactcctcttaaatatggggctaagggaagtaaaattcttgtcacgactcgcagtaacaaggttgcttcaatcatgcattcaaacgaagtacgtggactaaagcaattacgagaagatcacagctggcaagttttctctcagcatgcattccaagatgattattctgagttgaatgctgaacttgaagatattgggaataagata

SEQ ID NO: 47074 - DNA, 396 bp, Glycine max
  Clone ID: LIB3107-006-Q1-K1-A11
gaaggccactccttttagcaagttaacaacactggggtcggcgttccattatctagggctcaattctcttcaccctttgcctctgaaagaaatgggtagtcttgaagcggaaagaacaacagtaggattggcagcaagagacccttcagggattctctccccatacacctacaatctaagaaacacaggccctgatgatgtttacattaaagttcactactgtggaatttgccattctgatctccaccagattaaaaatgatcttggcatgtccaactatcccatggtcccaggacatgaagtggttggtgaggtactggaagtgggatcaaacgttagcaagttcagagtgggagaattggtgggagttggactcctcgtaagttgctgaaaaac

SEQ ID NO: 47075 - DNA, 335 bp, Glycine max
  Clone ID: LIB3107-006-Q1-K1-A2
gagttctattaattttaattctgcaatgattagaggcttcatgtttctaacttcctttttttttccccttacccgtgctctttagatatgcaaggtctaaaatgaggaagcgttaggagaaacgggagctagacagtttccggataatttggttgttcgatacagaagattcgcaacatgtaagaaagattgggaatttggccaattttgcaaaatggtggtttggttattcctaaaaggctagaaccatgaattgggtaggaatttaaaattttcataaggttgcaaaaaggttggccctattggcagtaaaacttcttggcatatatttttaa

SEQ ID NO: 47076 - DNA, 434 bp, Glycine max
  Clone ID: LIB3107-006-Q1-K1-A3
gagttctattaattttaattctgcaatgattagatacttcatctttctaacttcctttttttttccccttacccgtgctctttagatatgcaaggtctaaaatgaggaagcgttaggagaaacgggagctagacagtttccggataatttggttgttcgatacagaggattcgcaacatgtaggaaagattgggaatttggccaattttgcaaaatgttgttctggttatgcctagaaggctagaaccatgaattgtgtaggaattaaaaatattcagaaggttgcataatgtttgtccctatcggcagtaaaacttctcggcatatatttttatggtaaatggtaaccacatcagttaataatatagtttttaaagggaaaattacacttagacgcttgattatgttggtctttggctttaaacaattacact

SEQ ID NO: 47077 - DNA, 420 bp, Glycine max
  unsure (1)..(420): unsure at all n locations
  Clone ID: LIB3107-006-Q1-K1-A4
tatcacaaagttattagttagatggattaaacttggatgaatgcaagtcgcatgagccctgcatatgaggaaggcattgaagagttcttgtcatttgcctctgaaagaagtcgactcgataaggatggaaaatatttttgtccttgtataaactgtttgaatgcgagacggcaagtactagacgacatatgggaacatcttctgtgtgaagggattaagaagaattatacaacatggataaggcatggtgaattgatagacatgaatatggggtctaaaactaaaccgattgatgtagaaatgggagatcgattagaggatatgatttgtgatcttggacaagattcatttgagcaagaacacgcncttatgtgtgatacattggaaagtgattcgaaagagcctttgtatcaggaatgc

SEQ ID NO: 47078 - DNA, 148 bp, Glycine max
  Clone ID: LIB3107-006-Q1-K1-A6
tggtctgccctagtctttttatttccaaggggggtaattcaaccaatcgcgggttaaccgctggaggtaccttttcttttttaatgtaaccaaattccttgattttcaatttgtgacccgccttaattgatttaccggatatccactt

SEQ ID NO: 47079 - DNA, 380 bp, Glycine max
  Clone ID: LIB3107-006-Q1-K1-A8
ctgggggctttacagagagtgatttcagtgagtgatcggcgttcactggatctcatcatcatgagccctgcctattgaggaagattccgatcagaaacatcatctgcctatggcctgaataggctacttaccgctacacattgaatgcggccttggctgaactgatctcaagctacatcttcatgttctacacctcatactccaacatcttctacgtcaagctaaccgacagcagcactcacatccattacggcctgatgtactgatatatatgccattcgtttgtactactaaaccccgtgttcgacaactccaacatctactgcaggctcttaaaccccatcgtcaacttcagtgccttcatcaacaacaccatcatc

SEQ ID NO: 47080 - DNA, 305 bp, Glycine max
  Clone ID: LIB3107-006-Q1-K1-A9
atattatactacctatgttcctacagtgattttgacgaacactatgaataatcctgcttcgtatacgtgaaattactcgagatgaagcatgtgattacacatggacgtatagaatcagtgcttaattatcacactttaatgacagatctgactggtctgcctaagcacaatgcttaatcgcttgattaaagaactgcatctgctgaatctctggcaatgtgtaataatatactaatggggaactagaaatctgttgttattttcaaataattgccacctgcaaactattgatatttcatgttact

SEQ ID NO: 47081 - DNA, 405 bp, Glycine max
  Clone ID: LIB3107-006-Q1-K1-B1
cgatcgcaatgttaataatatggattgatgcttggtatctcttcctctcatgtatgtcttttgcacttttatattttgcttcattggatatgaatgtacgctctcgctttgcttgttcacatgacctgcactccagagctgacagtagagtctgccagattgaaaatcgcacattctgcatgattggtgggggtgccataaccgttgagtaaaattgaacaaaaacacttgactgattgtttcgctgaatgaaagttaaatacaaacatgcatgcaacctcctgttatcatcttcagaagttttgcgaaaaatggacagtcattttggttatgataggcaccatgagcgagccttgagcaaacctagaggaagatgggaaatgctcgcccggtaggttggaaacc

SEQ ID NO: 47082 - DNA, 334 bp, Glycine max
  Clone ID: LIB3107-006-Q1-K1-B11
tggggacacatccaattccattatggaacggttaagcctcaaggttgcaacccaacacaaccaaaattcgctacttgttaacggctgcactataccataatgtctcagggaagacgcagtgcatctttagcctattgtggtcactgcggtttcactactgtaccttttggaacatgctaacgcagcaacttactccgttacaggacctgcgggatggaccttcaacactaatgcttgacccaatggaaaaagattcagagctggtgatatcctaatcttcaactatgactcatcgacccacaatgtggttgctgtggacagaagtggatacaac

SEQ ID NO: 47083 - DNA, 433 bp, Glycine max
  Clone ID: LIB3107-006-Q1-K1-B4
gagttctattaattttaattctgcaatgattagagacttcaggtttctaacttcctttttttttccccttacccgtgctctttagatatgcaaggtctaaaatgaggaagcgttaggagaaacggtagctagacagtttccggataatttggttgttcgatacagatgattcgcatcatgtaagaaagattgggaatttgtccaattttgcaaaatgttgttttggttatgcctagaatgctagaaccatgaattgtgtaggaatttaatttattcatatttttgcaatatgtttgtccctatctgcagttaaacttctcggcatatatttctatggtaaatggtaaccacatcatttaatattttatgttttaaagggtaaattactcttagactcttgattatgttgtctcttgctcttaaacaattacac

SEQ ID NO: 47084 - DNA, 428 bp, Glycine max
  Clone ID: LIB3107-006-Q1-K1-B6
gaaattcaagaaattttttaaacttgacatatctgctatcaccttttccgtttcttgcgattcgacgatggccgatcaaaagctttcagaaccggcgcttaaacgtgagcagcttgatgaattcgtgagtagtctatattttgaacaacgaattcttgaactccgacttcttcaagacctcgagaacaatgatgaatgtaggaaaaatgggagcctgaaaaggttaaatgaccagagtgatgtctgtggatttagaagttgcttcaaaaatcattatgattcgcttccgaatcagaggtgcttgaggaatcgagaagaagtgattcaggagacgatggaaatggagttggaaaatatgatggaactgggcaccctcaagggcaagaaaacatattcttttaagaatggtgcaagaagtgcgttgaacc

SEQ ID NO: 47085 - DNA, 189 bp, Glycine max
  Clone ID: LIB3107-006-Q1-K1-B7
gactcactgactcggtgactgactcgctcgctcgtcgttgacactattcaaattaaaaacctcttcctttcactctctccatcctcttcatctttctccttctctttttcactttgacggtttctagagagagatagtttgttatctacagataatgctcccttctccttttcatgactcttgcttaca

SEQ ID NO: 47086 - DNA, 423 bp, Glycine max
  unsure (1)..(423): unsure at all n locations
  Clone ID: LIB3107-006-Q1-K1-B9
ggcgagggtaaggtcgcgttgtgttgcgtcgtgtcgtgcgctgttcctctgtttgtggtttttgtgttcagaccgaaccctaactccgcatcgcaaccatgtcgaccaagcaaggtggaaaagctaagcctttgaagaaacccaagtctgataagaaggattacgacgagattgatgtggctaacattcagaagaaaaaggaagaggagaaggcgctaaaggagttgaaagccaaggcgcaacagaagggaagctttggaagttctgggctcaagaaaagtggaaagaaataagggctctntatcatgattgtatgcattcaatattgagccctgtaattacagttgctaccatgataacttctcttattattgtggcctaacttattgctaatgtgtactgaactgaagtatgtcgtgatgt

SEQ ID NO: 47087 - DNA, 332 bp, Glycine max
  Clone ID: LIB3107-006-Q1-K1-C1
gatcgttttgcatcgcgttagggtttgcagattgtcaatttcgcttcttttcgctacctttctcgcatagaatctcgcaattcctccgttgttccgtttccgcaactcatcaattcgaaagttattgcttcacaaggaggtagagcatgtaataaaggaaaaaaatggaggtcgaggtgccaatctcgcttgatttgaataatcaacttcagccagagaccgtagtttcagttcaaaatggggatcctggtgtttcctcttctgttgcaaatgctgttaacccgcagcagccagctacaaaaaaaccgaccaggcagtgggctgcatggact

SEQ ID NO: 47088 - DNA, 281 bp, Glycine max
  Clone ID: LIB3107-006-Q1-K1-C10
gatatgtttatataatttcaaagaccccatattcatgcgggtgctttgcatattatggttgctattaataattgcaacagcaatctgataggtagatgcccctttgggaaatagttgccgttgattgagaaaaggctgtagaccaatcctgttgttgaaagttagttccactctaaacaagccttgatcgatagtagaaaacaatgaagaacttatgtgagaatggctcttgtcctacccatttaacatcttatgctcttggatgctcatcatgggggact

SEQ ID NO: 47089 - DNA, 330 bp, Glycine max
  Clone ID: LIB3107-006-Q1-K1-C11
gaagaggatacttgttggtgcggcgcacctaaaaagtatgcctcttcctctgcgtcgtcgtcttcaaactcgtcttcctcgtcataataatcctcctcatctccaaactcaaaccctccaaagcactcttcttccaactcctccacatgatcatcattatcttcttcttcttcttcttggtgattggagaaagtgaggacaaggcgaccatcttggcgctgaatgctgaaattgttgtgagaaggaacagaaacagcttcgagaaccaaccttccattgtcacggtgggaacgcatgtgagttactgaagaacttgcttggtgatgaaag

SEQ ID NO: 47090 - DNA, 465 bp, Glycine max
  Clone ID: LIB3107-006-Q1-K1-C2
cccacgcgttcgcgacagaagggtcagctgctcgagtcaaggtctcttctatcaaagcaatgggaaagtgccaaagctcaacaggaccaaattaatttgaaagtctcagaaggtaagacacaatttgaaaagatcaattctgagattgatgaactagagcacaagttatgtgctttggttgtgactagagacaagctaaagagggccttggactcttgtgatgctgaaaataacaagctaaagactcaggttgcaaaatgggtgccagaatgcaagagtatcatcacagctttgaaggagtctgagacttattacaaagtggccctaaccgatcagaggaaaaccgatgatgaatgggctgatctgaataagacctttgtagctaataagaattgaatcatcttaatctatgcatatcttgacattacgtcttagccatatgctcttgtttcaccattttcatta

SEQ ID NO: 47091 - DNA, 439 bp, Glycine max
  Clone ID: LIB3107-006-Q1-K1-C3
gaatatgggaatacctcaaacgcgtgagaagaagcgtggaagaatgaattgcggagaagaggaggaagtggaaggagacatggtgggagaaaagggttgcgcagtgcgaaatcggacaatggcttttggaaaccctaagggggtgaaaaaattgttatatagtgagaagagggagaggaagaaaggaaggtggggagggtacgatacgaagaagacgtagatgacgtggatggagagggaccgtgtgataatggggggcagcgaatagacctgaaactcccatcgtaccaaacagggatgaacgcaacacaacgcagagaaagaggccgcaaggaagaaaagtgagaaaaaaagggtttggttttagagagagagagacgatgactgagtgagagtgagtgagccaaggaacgagcgatgcaagtgagccagaccgttg

SEQ ID NO: 47092 - DNA, 422 bp, Glycine max
  Clone ID: LIB3107-006-Q1-K1-C4
atcaaaacctgtggtactacaaagctactgcttgcaatcccacccatattgaaatttgctgaaatgctttccctcaatgttagatctgtgaattacaccaggggaagtttcatctttcccggtgctcagccctatccccatcgcaacttttctgaggaagttgctattcttgatggctactttggcaagcttagtgcaggaagcaatgcttatattttgggtggccaagacaaatcacagaactggcatgtctactctgtgtctgcagattctgtaactccatgcgacaatgtttacactctagagatgtgcatgactggcctggatagagagaaagcacaggttttctacaaagaacaatctgcttcagctgccattatgactgttaattctggcattagaaaaattctttcagattctga

SEQ ID NO: 47093 - DNA, 336 bp, Glycine max
  Clone ID: LIB3107-006-Q1-K1-C5
atactaagaacacaatcatcaggaacggactctggataaactcagtcacttatgctcgcattctactggtgctggtgctggtgctggtgctggcattagcgttatcgtcagtactaatgtgggtcgtgatgctggtgctcattctagtgctaatggtagtactggcgctggtacttcacatagcgttcacattcttatcttgattaaaccaatccttttgaacttgatatcacgttaaatgactcattgcccgaaggttcaatatgtaacctgttattgattagttgttgttcaatgttcacttctcaacttttgttaactgatttgtagtgattt

SEQ ID NO: 47094 - DNA, 125 bp, Glycine max
  Clone ID: LIB3107-006-Q1-K1-C6
ggaacctttgcattctattcattcaagattcaggaagtgcgttttggaagcagagaccgaaatacttcgagatggcccgtccaaagcaaactgctcgtaagtcaactggaggaaaagctcccagg

SEQ ID NO: 47095 - DNA, 204 bp, Glycine max
  Clone ID: LIB3107-006-Q1-K1-C7
tatgggggaaccttagcattctattcattcagggttcagggagtactttgggtaagcagataccaatatacttcgacatggcccgtgcaaagcaaactgctcgtcagtcaactgcaggaaaatctgccaacccgcagcttgcaaccaaagctgcacgtaagtctacaccaacaactgataaagtgaagaagcctcatctctatc

SEQ ID NO: 47096 - DNA, 396 bp, Glycine max
  Clone ID: LIB3107-006-Q1-K1-C8
gcgagaatacgacaaaacgggaataatacaacagaaaataatatactacagaggtttgtggtataattaaaaaattagttgatattttcagagataggagacaaaatttacatggatggtaagtactgcttgggctgctttaatggtagttgtgccattttctatttccatcgtaacatgggtaagaaatgtactatacggatactcaaaattgacttaacggatcaaagtacccattctgatatctacttgggtcattcaatatcttaactctaactattgtattaaaatatttcatttatactaattaattgagtccaaatatacactattataatatacatctgcattttaggttgctattatattctagtagtgtaataataacctatgtat

SEQ ID NO: 47097 - DNA, 459 bp, Glycine max
  Clone ID: LIB3107-006-Q1-K1-C9
cagacgacagatgggggaatcggcggaagaatacttgtgaggcgagggtaaggtcccgtagtgttgcgtcgtgtcctgcgctgatcctctgtttctcgtttttgtgttcagaccgaaccctagctccgcatcgcaaccatgtcgaccaagcaaggtggaaaagctaagcctttgaagaaacccaagtctgataagaaggattacgacgaggtatctcgttgaaatcccctttggagttatcttgttttttttaatattctatttatcgtggtcaaagattagaatttccatgcttgatggacttcggttttagaattggcaatcagtttaaggaagagataacacaggattgagatctttaggctcggttgaattattaggtgttttcaatatgaagctttgcaaaggtttactacataatcatttaatgtatattgctactattcttgctgctgcaat

SEQ ID NO: 47098 - DNA, 415 bp, Glycine max
  Clone ID: LIB3107-006-Q1-K1-D1
ggttggcatttggcattgcgtacttttttaatccaagttccacagacaccaacaacgctttagctctctcgttctatccgtcaccgctaccggcgatatacatctgaacccgttccagacactagatctcatatatccaaatggataacctaatctattaggtcaacaaagtgcagagacgcttgtaccgtcttatgcgaccacggtgaaaacagtgcactccccacactatgggactctgttaccgacattgacgttatcagaggtcaatactcatgaaagtacctcgtcttggatagcactgtccttaaatatttcttacgttgtggatcaagccttgttgcgctacaaccttttgtgttgcaaatgaacatgatttactggggaagcaacgtgtacgcagagttactgcatc

SEQ ID NO: 47099 - DNA, 394 bp, Glycine max
  Clone ID: LIB3107-006-Q1-K1-D10
gatggacaatctttgtatgtgcggccatcaacactgctttgatcatacttcactttgtaacgtgacgctccacatgtagggcagctgcgcatttcagcaaattgatgtctatacaaaatacaatcattagggcaagcatgtattttgtggtattccatacccacagggcataatatcttttttgcctcataatggttcttgggtaatgtgttatctacaggaagcatattcttcaataacaaaagtaattcgttgaagcttttgtcactccacccaaatcttgctttcaaattcaccaaacctaagaccgctgataaccgtgtgtactttgtgcatcccatatacaatggagtcgtagaatcaatatctaagctttcatagtaaggtgaatgtg

SEQ ID NO: 47100 - DNA, 226 bp, Glycine max
  Clone ID: LIB3107-006-Q1-K1-D11
ccaaatccatcatcatcttaaccactaatcaaatcacttaaaccacatccacacatatccaccaccctcattctccttcctcacccaaatacacataacctcacttctatttaactattaccacatctcctttccactactcacttaccacctcaaaaactcacttatctatttccctcaacaacatattcaccatctaattcttaatccaatcataaaactaacc

SEQ ID NO: 47101 - DNA, 398 bp, Glycine max
  Clone ID: LIB3107-006-Q1-K1-D12
tcaattgcttctacaaggtatggagacttttttggtggaaaaactgccagcttgtgtgtgcgtcgtgctgtttattatgatcctgagacaggaaaggaagatccttccaagaatggcatatgtagcaattttttgtgtaattcaaagcctggagacaaaattcagatcacaggcccttcagggaagataatgcttttacccgaggatgacccaaatgctacccatataatgattgccaccggtacaggtgttgctccattcagaggctatctacgccgaatgttcctggaatcagtccctacatacaagtttggtggactagcatggcttttccttggagttgccaacactgacagtcttctctatgatgaagaattcagcaaatacctcaatgacta

SEQ ID NO: 47102 - DNA, 444 bp, Glycine max
  unsure (1)..(444): unsure at all n locations
  Clone ID: LIB3107-006-Q1-K1-D2
tcgtgaagtacatgaagcaattttcaatgaacaggtgtttgatctggtgaatcgagaagcatttaacacagttgcaggtgtcagtgtgactggaatacgggaaaattatttacaattaagcttaggtcaagaaacctctgtgtacttaacactagtgtccaatagtcaagatcattctacagttgaaggtgaactcaccgataacgcagaaaatgcaattttacctctggaatcatctgatggaatgaagcgtgaagccaaacagaacacctctaacaaagggcagntttctaattccatctgctatgagatttatattcaacagatttttcatgaatatatatttggaaaaggtggtgataaaccaagttcctctggaaatcgtttgtctggcatacaggcaaaggatggatccagtcttcttggtcatttttttaaatcttt

SEQ ID NO: 47103 - DNA, 440 bp, Glycine max
  Clone ID: LIB3107-006-Q1-K1-D3
gatgagataatggctcgcagtatatcgtacataacggggtcgcagcttctctctctcagacgccatccaagcatcgccgtcgtcgatgtaagggacgatgagaggagctacgacggacacatatcggggtctcttcattacgcaagcgacactttctccgataacatctcaaatcccattcaggcagttaaaggcaaagacactctcgtcttccactgcgctctaagtcaggttcgtggcccaacttgtgctaggaggcttgtcaattatcttgaggagaacaaggaagatactgggataaagaacattatggtcttggaacgtggcttcaatgggtgggaagcttctggtagacccgtttgccgctgcaccaatattccttgcaaaggagagttgtctccttaatcaaagacgtatttgtggttggatggaattatgga

SEQ ID NO: 47104 - DNA, 363 bp, Glycine max
  Clone ID: LIB3107-006-Q1-K1-E10
tacgtagtaaataattaagtatgattactactaggaaatggtacttgtacttatgcacctctactctacacttaacacttcccttttggagttctatttattaggtaaaccaagtctttataattagctggtcaattgattactataaaaaagcttcgtccatttctctctccttatgtgtgatgtgataatcccatgctagatgctacacaagtcaaatgaaccaaaacaaatcaaagactattgcttttttcggtgattccgaaagctactacccaatcttattctgcctgctattaagtagtacgtaaatacccttgtgaaaatcaaagatgcttacatgtttgaattattatttctaga

SEQ ID NO: 47105 - DNA, 426 bp, Glycine max
  Clone ID: LIB3107-006-Q1-K1-E11
ggccatgtaaaggtgagtgtggaggaggttagagatgcagatgctccagttcctgtacccactaatgaggtttccttagtggggcaggcacttcacaccttccttgcttggccgacacatctggtcaagtctttatcacagtaggtacttattgtccttactatatgtttcttcttttcaaattaggctatttaactttgtttcatgaataggtagttgtgtctccgccaaaaccaccttcgaagcccgatccggaggtcgttgatccgctttatctgatgacattgaccatcccagagcttttcttgaggccttatcaggttagatgggatgccaccgtgttcacggtcgttaatccagatttccccctatacataaagcacgaagacctctccgaaatcgtacacggtggtcaatgtctcaaca

SEQ ID NO: 47106 - DNA, 383 bp, Glycine max
  Clone ID: LIB3107-006-Q1-K1-E12
acattccaacaagtaatagaaggagtaatagcctggattgtcattaatatgaattttgaaaccgccatcaactaagcacaagtgtatcacaaagacaactctggtgtgtgcttgctacatttcactttacatgagttgctgaaattagttgctaagatacaagattattgttttagtaatcattggtattagtggaattgtatagggaaggtagctttactctatgctttctagatctcaatttccttcagcaatatgttttgcagtctcgagagtgtcaacctatcatttcttaaagacaaaagttagtagcttctattaataggtactgttgcaatatagacccatccaattcaaaagattttcgtctgcacatgtgtact

SEQ ID NO: 47107 - DNA, 421 bp, Glycine max
  Clone ID: LIB3107-006-Q1-K1-E3
ggattgggaacgttatatacatgaactgctgaggatccagataccccagaactacaagatcaaagaaagcatcttcagcacctgtcagattctgtttcaactgattgtgatggtatgaatgaaaatacttctcaccgaattgctagattttcctgctctggttcaaatttggaaggtaaatttgatttagcagatttcaagtctcttgatcgacttctcactgaaaaggttggctggcaggatcaagccatatgtgctatcagtcaaactttgtccctttgtaaatctggtgcaggaaagcgtagaggctcaaatggtagagcagacatatggttggctttccttggacccgatagacttggaaaaaggaaaattgcttcagttcttgcagagactatatttggaaaccctgaaagcctaa

SEQ ID NO: 47108 - DNA, 255 bp, Glycine max
  Clone ID: LIB3107-006-Q1-K1-E4
gatcaacaactacaacttgagacacatgactcacttaatctgcttaattctgatccttgcagctctcattctatcccctcaaattcttgcaaactatgagaatcccccactgtacaagcctaccactgataaaccaccactttataagcccccagttgacaatcctactgtctacaaaccttcagctgaaaaccccccaatctataatcctccaatctagaacccaccagcttacaatcccccagttgataaacc

SEQ ID NO: 47109 - DNA, 231 bp, Glycine max
  Clone ID: LIB3107-006-Q1-K1-E5
gctctaaaattcagttgcgtgatggttctatagggaacctagatgataatgcggggaaccttgtattgcaagctctccatgaaatgtcaactagcgcattgcgctgattgggatcttcatacatggatttactcctcaaattatgaaatctacaatggtaattaagttcaatcttctcaactgcatttgcttaatctcttcaactgtctattaatcgaatgatcacttaaa

SEQ ID NO: 47110 - DNA, 447 bp, Glycine max
  Clone ID: LIB3107-006-Q1-K1-E7
agaatacgacagaagggcaagaagtgcattgagatgttctttgaaattgctgaaaagaaggaagactataacaggttttatgaagccttctctaagaacctgaaacttggtattcatgaggattctcagaacaagacaaagctagctgaattgctcaggtatcactccactaagagtggtgatgagatgaccagcctcaaggactatgttaccaggatgaaggaaggacagaatgacatctactacattactggtgaaagcaagaaagctgtcgagaattcccctttccttgaaaagcttaagaagaagggatacgaggttctctacatggttgatgctattgatgagtatgctgttggccagcttaaggaatttgacggaaagaagttggtctctgctaccaatgaaggcctaaaacttgatgagagcgaagacgagtagaaaaag

SEQ ID NO: 47111 - DNA, 362 bp, Glycine max
  Clone ID: LIB3107-006-Q1-K1-E8
gactcgtggcagttgtgtgacagagaaattaagctagagcttcatagtttcttcttcttttctcaccttccttctctcccttcagacaaagggacaaaaaatcagtgtgtgagagagagagagagaaattccaaaaccatgtcccacagtcatctaagtttcgcctttgggattctaggtaacattgcctccttcgtgtgctttctggcaccactaccaacattttatagagtttgtaagaagaaatcaaccgaagggttccaatcaattccatatgtggctgcactcttcagtgcaatgctttggatcttttatgcctatgtgaagaccggagaaacgcttcttatcaccatcaatgcatt

SEQ ID NO: 47112 - DNA, 416 bp, Glycine max
  Clone ID: LIB3107-006-Q1-K1-E9
tgggtttactgaaaaaagatatacagccttggcaatgacgccgttctgcggaatagatgactcatgctcctttaggttccttaaattccgtgggtggcgtagctacagagattaatgcagtcaattatgtttctcctagaagttggttagctacttctcattttgttctaggattcttcctatttgtaggccatttatggcacgcggtaagagctcgcgcagctgccgcacgatttgaaaaaggaattgatcgagattttgaaccagttcttttcatgactcctcttaattgagacatgagatcctatgaagtagaaatcactcttatattactataaatattactatcaatattgggttgaattgagcggatcgatttaaataagaacttctgttacttttttcttagagtctat

SEQ ID NO: 47113 - DNA, 434 bp, Glycine max
  Clone ID: LIB3107-006-Q1-K1-F1
gatgtctttgctgacttcttgttaaggttgtcggtgatgcaggtgttgttggttttgtgctaagagaagaagctgttgggaaggtttctttcgtcttttgatgatgatgtcacacaacttaacggggcagcttgtgggtgcagagatacatggctttcacacgttggatgatttggatgttagtaatactatggaggaagcaaaaagcagatggcttcgtcccaatgagattcatgccatactctgtaatcacaaatatttcaagatcaatgccaagctagtaaatttgcccaaaagtggtactattgtactatttgaccgcaagatgcttaggaacttcagaaaagatgggcacaattggaaaaagaaaaccgatggaaaaactgttaaagaagcccatgaacacttaaaagttggcaatgaagaaaggatcc

SEQ ID NO: 47114 - DNA, 410 bp, Glycine max
  Clone ID: LIB3107-006-Q1-K1-F10
ggattcagttagtaaagttggggatctgatctagcttgctttgatctttggtgaatcaatccctcttacttatttcttagtattagcgatgctcgtgtgtgtttctgtagttaattgatatcacgtcacgatgaataaagtagggtggagtttcaagagcttcaaaaccttattggttgtggcttctataaccttccctattttactcacacttactctcgtccaccaaaacaacaactctgtttctgatctctttcaaggatttcacgtattgtctggaagaaccctcaatactaatgctactgctattctctcgaaagatcatgatattattagagagtcaactctaggtccaaagaaccattcatttgaaagatggaagaatgctctggtcctatctactactacca

SEQ ID NO: 47115 - DNA, 364 bp, Glycine max
  Clone ID: LIB3107-006-Q1-K1-F11
attccaagaaccaccttattaaggcccacgaaatgagccacttcccaaccctgaaatcttgccaattttccatcaaggtttaatcctagacaatcctaagtcaacctttgtgcaatgaatgttcatatcatgaatggtaagttgagcttagcgcagaaactaaaaggtgcttttaagaatgacgtagttctaagaggttcaagttgttcacaactttgtgggcatcaacactctcatgtattacagcctaaccattgttcagtttgctggaattgccttcaactccacaggtcttgcactctctcttattacatctggtctaaatgcgcttggcactatcttgagtatggttttcattgataga

SEQ ID NO: 47116 - DNA, 421 bp, Glycine max
  Clone ID: LIB3107-006-Q1-K1-F2
cactagtgttgatgctggcaagctcttctgtggctataaatgggatgaaatttgtgccggaattggacgagagatcggaactgagtaatgaatctgatgataatgatcaccatcaaatccctcgaaaggagtatggaaaacctggatctggccaacgtgaagtggatgaggggtttcgtcacgtctacaccgttggcaatgactatggcacaccttgccagggaggaaattaaatattaaatgttattaattagtctatatattaattaatatatgcattattatagctgtatatatgtatgcatatgtcttgcatagtttgatgtgatgagtcatgaatgctagctgatgagatggtgttggtaatttggaaattcattgtaagtataattagttagactaatactttactacttcacat

SEQ ID NO: 47117 - DNA, 421 bp, Glycine max
  Clone ID: LIB3107-006-Q1-K1-F5
ggttctagtgtgtgattgtttgttgttgtaactggttcttcttcttttgttgttctgtgtttgtgtttgttttttctctcacctgaaaatgtcttgctgcggtggtaactgtggttgcggaagctcctgcaagtgctgcaacggctgctgaggctgcaagatgtacccagacttgagctacactgagtcaaccaccaccgagaccttggtcatgggagtggcacctgttaaggctcaatttgagggtgctgaaatgggtgttcccgctgataactattgctgcaaatgtggaccaaactgctcctgcaacccctgcacttgcaagtgaggtgttgggagagcaagcttcaatcatagatagcccttaattaggaataatgataaactattaatgtgtagctaaaaacttatgtattatgtc

SEQ ID NO: 47118 - DNA, 419 bp, Glycine max
  unsure (1)..(419): unsure at all n locations
  Clone ID: LIB3107-006-Q1-K1-F8
ggaaacgagtggaatgcgagccgagcaatgtacatgtggtcttcaatttcattttcgacctctgttctcataaaccctagaaaaattcaaactcttgggattccatcaacaacgatgtcttgggcatgcaaaaaatgcacctttgtgaaccccccttctcaaaaaggggaatgcgaaatctgcttttcccctgcgtccccgtcggcatcgggtccttcttcgtcttcgtcgcccccaaaatggtcgtgcaaggcctgcactttcttaaacccttacaacaacctctcttgcgaggtctgcggcactcgatgcccccgtctctccctttctaatctcaccgacttgaatgatgccaccgatcacgaatcttctgtgggttctgttttcttccctcttcaaacctgcaaanagagaaaggc

SEQ ID NO: 47119 - DNA, 296 bp, Glycine max
  Clone ID: LIB3107-006-Q1-K1-F9
caaggatgaaaatgagactaaggatttttatgaaatggagggagcaaagagtcatctccatttttttgaaatggatcttcttgacatcgactccattgccgctgccataaagggttgttccggcgtaatccaccttgcatgtcctaacatcattggtcaagtcgaagatcccgagaaacagatattggaaccggcgataaaaggaacggttaatgtgttgaaggcggcgaatgaagcatgggtgtagcgcgtggtggcgacttcatcgatttcgtcgattatgccaagtcctaatt

SEQ ID NO: 47120 - DNA, 430 bp, Glycine max
  Clone ID: LIB3107-006-Q1-K1-G1
gtcccttaacgcaaactgtcatcttgtcattcaccgagaaagtcgtactgattcctcttcatctttcgttaaaacgagtacttttcgttcttgatctgttggttacgatgtcgtattcaaggagatctaggtattctccttctccttctccttctccatacaagcgatacggtaggtctgtgtccaggtctctctcaatatcaagatccagaagccgttcaaggagtttatcaagagatgcagaaaatccaggaaacaatttgtatgtgacaggattgtctcctaggattaccaagagagaactggagaaacattttgctgctgaaggaaaagtgatagatgtccatctggtagttgatccttggacaagggaatcccgtgggtttggctttgtgacaatggagactcttgaagaggctgaacgatgtgt

SEQ ID NO: 47121 - DNA, 379 bp, Glycine max
  unsure (1)..(379): unsure at all n locations
  Clone ID: LIB3107-006-Q1-K1-G10
taggtttgattattacgtnttggctgttcttgttggatatggaggtttcggtgattggaagctctcaagcgaatctgggagcgtcggaattggcatctagggaagttggattttgcaatcttaagaacaatttaagggctttgaatgatagagttagttttggtaggaataatatacggtgggagaaggctgggattagcttcactttgagggctcttcagactgaacccgttagagaggagaagaagccttctgggattggaacaagatccaaaaatggcaaatggtttaagattatttgtggggcttcccctagatgcagtttcttatgcctgcaattcaataaaccatgctagagcaatttcagctggcctaaaag

SEQ ID NO: 47122 - DNA, 387 bp, Glycine max
  Clone ID: LIB3107-006-Q1-K1-G11
cggacataattaaactttattaaactcatgaaactccgttctagcgtacaattcggaacagcaaccatcagtcatctaccactatatattactcctcagctcttatatttagacgcacacaattatacagctctagagaatcaagacaattattatacccattaagatgaaaccgtacctacgtgcaatgttcctgttattccttatccttctcgatcaatttatttcagcgagtgctggtggtacttaatagtgaactattcaaatttattggtctaccatttaaagcactaagaaagataccgaacaagatagaaaatttggagaggttaaataaattgactgagaggttcaagaaagtgatgaacgcctgtgacaatttacaac

SEQ ID NO: 47123 - DNA, 295 bp, Glycine max
  Clone ID: LIB3107-006-Q1-K1-G2
gacactcaaatccaattccactgccaccggccaaaacgcgcaacacgttgtaattaaaacgacaccgaaactaatgggcgtcttcagcgaaaacccgaatccggacccggttgtgatccgccaggtttgggcttcaaatctcgaatccgaattccaactcatccgcgaactcatcgaccactatccttttatctcgatggacacagaattccccggtgttgttttccgaccacacctggaccccacaaaaccctacaaccaccgcaacaacatatcgaaccgtcacttcgaccac

SEQ ID NO: 47124 - DNA, 238 bp, Glycine max
  Clone ID: LIB3107-006-Q1-K1-G3
aactcgagcgaccacacttcataagggaacttttaaatcttacatgcgtcaccccatcttgggtaaatggggtacgttttgcggcacaatgtagattcgtacctattatcgtttatatctcatatctaatatcccaatccgtaaattattcatcgaccgctatcaacataattcgaactgaattagtgacgtctattcctttatagtcctcactatattaatctttaaagtctcccta

SEQ ID NO: 47125 - DNA, 349 bp, Glycine max
  Clone ID: LIB3107-006-Q1-K1-G4
aacccattgagcttagatgctttactagtgcttgtggcatggtttttccatttttcccttaaataaattctggaagctatacattaacaacttcttgcagataccagaatgcagactggagactacgtccacttcctgatgagatgataaggtatgattaacttttaactagtcagatttgacacttgattcatcatttttttcaccctttgtcttctttttgcactattggattttaaatgtgtttggtttcctaaaatatactggagctaattaatgagtattctagttttgcgtgattgtttagcatactaggaatctatagaatctggtaatccttgttttgatt

SEQ ID NO: 47126 - DNA, 330 bp, Glycine max
  Clone ID: LIB3107-006-Q1-K1-G5
ttggaactgcctgaactagatgttgagtgtgggaactcggggttagcagggttctcagtcaattctcttggacaagatgccttgtctttcttcaaaaagatgctactactcggcttcttcccttctgagttttcttttgctaccgtaatgagctcttgtgcaaaactctcttccttatttcaaggtcaacagttttatgctcagatcgtaaaagatggtattctagattacatatatttgtggagttctcttatagaaatgtattgttaatgtgtgtatttaaacagtgcaagatgtttctttgacgtgatgcctgttataaatactgat

SEQ ID NO: 47127 - DNA, 348 bp, Glycine max
  Clone ID: LIB3107-006-Q1-K1-G6
gaacgaggggcaccctgacaagctctgtgaccaggtcttcgatgctgtgctcgatgcatgcttggagcaggaccctgacagcaaggttgcctgtgaaacctgcaccaagaccaacatggtgatggttttcggagagatcacaaccaaggccaacgtggactatgagaagattgtgcgtgacacatgcaggaacattggttttgtctctgatgatgtcggtcttgatgctgacaactgcaaggtcctcgtcaacattgagcaacagaatgctgatataactcaaagtgtgcacggtcaccttacaaagaggcctgatgagattggtgctggtgaccaaggtcatatgtt

SEQ ID NO: 47128 - DNA, 340 bp, Glycine max
  Clone ID: LIB3107-006-Q1-K1-G7
ttgggaactataaagaaactaaggtaagaatgccctactagcaactgacttccttcaggtatgattcgttcgtgacctataagtgagcaagtcttcgcccgttgccattcaatagcaaaagctgtagttactacactcttctttctctgattatctatcgtgctgtcaagaagcaaggttacgcagtcctctacctatacgtacctctaataaggaagctatttcaatcctctccttgaagtcaagcaattgaagacttttgtatgttctcataagtttgttcataagcttcagacaaagtcaccaaaaaggaaaacattttcattgaaaggctgtcttg

SEQ ID NO: 47129 - DNA, 337 bp, Glycine max
  Clone ID: LIB3107-006-Q1-K1-G9
ggattacagacagtgagaaatgatgatgaagcaggtgttccttcaggttctcgtgggtctctatgtcacatttgagcatagtaagctactccaccacgtagaatccgatggtggatttgtaaaaacaagatgagtgcagcttatgctgaatgggagtccctactatgctaatggctttaatgcctattggcttatgtaccttgcctctgatccttaccagagaaacaaaatctcatcggtatatcaacacgcttcaaatcatggactcaacattgccagaacttgggccttcaatgatggtggatatcaacccctacaatactcttactgatcctac

SEQ ID NO: 47130 - DNA, 426 bp, Glycine max
  Clone ID: LIB3107-006-Q1-K1-H1
ggaaaaacaaccccatcttgccttctgatccttgcgcatagagccttggctcgtttctgggccaagttcattgatgacaagtgcgtggctctagcagcgaaatctgtttttattgttgatgagaaagagaaagagaaggcaaaagaagaattatttgaggctctgaattatcttgagaatgagttgaagggaaagttttttggtggagatgagtttggctttgtggatattgctgctgtgatcatacctataattcaagagatagcagggttgcaattgttcccaagtgagaaattcccaaagctctccaaatggagccaagacttttacaaccattcacttgttaaccaagttatgcctcctaaggaccaactttttgcctatttcaaggctcgggctcaaagcctcgctgctaaaagaaagaat

SEQ ID NO: 47131 - DNA, 441 bp, Glycine max
  unsure (1)..(441): unsure at all n locations
  Clone ID: LIB3107-006-Q1-K1-H11
agccaatatcataaaaagtcttcactttctacgagtattttataaaaaaacggtcttagaaaaaattatccttctaagacggttcttaactaaaaattatcttagaaagatacctttttaaaacgattcttagttaaaaaccatcttaaaatggtagattttttaaaatggtttttcagagaaccgtcttagaatatatattttaaaaaaatatatatttggaaattctaagacggttttttccaaaaaaaattgtcttaaaatatgtacattctaagaatgtttttatgtattttttttaaaaaaataaaatatattttaggattctaagatggttntaggattctaagatatttcaagatcctaaaatatattttaggattctaagaaaacctacattttaagacgattttttaagaaaccatcttagaaatgattttt

SEQ ID NO: 47132 - DNA, 478 bp, Glycine max
  Clone ID: LIB3107-006-Q1-K1-H12
tgcacgtactcggtctcggaatttcgacgcgatcgcgtcacgtacgtgcttgtcgagaagatcgacatgaagagggacattttgggttatagtaatgacgtgagagtttgaagagtggaaagctcattagagccagagttgtgtagagatgctaaaagtttcggggtatacatgtaaccagatccaacgtgatgactcttggtcggaatggacgtcgctagaaagggctttaatactatgctcgaatacttggccatcaaattaatctggatagcattcagattgagagcttgtatcccaaagaaatggggcctggcgtaatgactgttgaagacttcttgaaccgtggactcttgttgcttgataaagatattcaagatagagttgagaaggcagcttcaaatggaaatgtgttgcgctatgtctgtgtgatcatgggttcaaggtgtgaaagtggtattcaagagcttccaaaaga

SEQ ID NO: 47133 - DNA, 259 bp, Glycine max
  Clone ID: LIB3107-006-Q1-K1-H2
gatccacacgctcacaataacacactgtcaccgttccgttcggttttcctctgattttggtttctttctttcaaatccccgcttcgtggaaatcccgaaccagaaaccatgcttctccgaaccgctgctgcttctgcttcgtccctctccctcttcagcccgaacgccgaacctccccgttcggttcccgctcgtggattggtggttcgcgcagcgaaaggatccacgaaccaccgtgccctgaccggaatgatttttg

SEQ ID NO: 47134 - DNA, 424 bp, Glycine max
  Clone ID: LIB3107-006-Q1-K1-H3
aagacgacagaagggggcagttcaattccaatatattccattctctctgtgtatttccctagctctccctgcaagatgcagatcttcggcaagaccctcaccggcaagaccatcacccttgaggtggaaagctctgacaccatcgacaacgtcaaggccaagatccaggacaaggaaggaatccccccggaccagcaacgtctcattttcgccggaaagcaacttgaggacggccgtacccttgctgactacaacattcagaaggagagtactcttcacctcgtcctccgtctacgtggtggcatgcaaatcttcgttaagacactcaccggcaagaccataaccctagaggttgaaagctccgacaccatcgataacgtcaaggccaagatccaggacaaggagggtattcccccggaccagc

SEQ ID NO: 47135 - DNA, 391 bp, Glycine max
  Clone ID: LIB3107-006-Q1-K1-H4
gaccacaaagtgtaacttgagtgattagatctgatgagtgcagaaagaaggaaggattgttggtgatcgatcatcgatcatcgatcatcgatggcgtctgctagccttggaagtggtggcgtgggcagttccaggtctgttaatggtggcttcaggggttcttccagttccgtcgattggcttggcagagagatgcttgagatgtctttgagagaccacaatgactattgagatagtgagcctgacatcattgatggtttgggtgctgagacttaatacgtgataatagctatcgtttgtggccgaaatggtcaatctaagcagaatgttagttatatttctgagcatgttttgggaacaggctcttttggggttgttttcaagcctaatg

SEQ ID NO: 47136 - DNA, 161 bp, Glycine max
  Clone ID: LIB3107-006-Q1-K1-H5
gactgctcatggtgctccgaaatatgggtgcctggctcaattgaattgaagcatgacttacaatagtccatccccgcgtttcgggaacctatgctgggccaacatcgtgagaaaagcggctacggccattgctctcgctccgaacgccactctatgcgcca

SEQ ID NO: 47137 - DNA, 342 bp, Glycine max
  Clone ID: LIB3107-006-Q1-K1-H6
gccaaatggagatggataacaagcaaggatctgaagagaagttaaatgctagatctttaattaaacgaattgttggtacggatgttcgatccgtgcaagaggatcaaaaagagcaagatattaaaggcttggaagcagaagttctggccttagaagagctttcgaagcaattgttcttagagatctatgaacttcgtcaagcaaacgaagctgcatgcttattctcgaacttggagaggacacatgcataatctacttagctatgctttgtgtgaatattgtgtgtataaaatgatcaagtcattgcaaagtgttgttttcaaacaagatggttctgttgat

SEQ ID NO: 47138 - DNA, 436 bp, Glycine max
  Clone ID: LIB3107-006-Q1-K1-H8
gcaacacagagccatttcagtgtggcaaatgccaaccctcttcagtcccagatgaattctctttactcccaaccttttgctcactacaacacacagccgcttaacatgcaggctacccaacagcagcctcaggctcagaactcccaaaatcagaaaatccactataacgtttgaggaactttaggagcttaatgtggctttgatgggttatagtctttgcaatcagcaactgggtttgtgcctgtcttttgtgctgaaatacgtttgcatgtgacatccgaaggattgccttgggatagctatatcgaggaattggtatatatgatttcagttgatggaagtttggggcattacgaagatacaagcaggcgcatcccgggctgaaaattgataagataaccccctttaccgtactgaagttttgtattggttggga

SEQ ID NO: 47139 - DNA, 353 bp, Glycine max
  Clone ID: LIB3107-006-Q1-K1-H9
gggtagttgactagttgcaagttagtgagttcacgtattaatctcttttggcgtgctgcttgttggacataggataaacttttagtgccacaataacaccctatctctctctctttctctgactgcctctccctttgattcaatttccccctgcttattctggaacaatgtctgataaaaccacagctgataaccttattgaaaatcttgtggacacatttgttgataagaaaaaatctgtatcattctttgaagatgataagtcagactcagtgagttctcagatcaatagactgtttggacgccagaaacccgtgcaccatggtttaaggggttgaaaaatttgcgatgtc

SEQ ID NO: 47140 - DNA, 367 bp, Glycine max
  Clone ID: LIB3107-007-Q1-K1-A1
tggcggttcctgcaattggtcaaatcccgaaattatcatgtaccttgctgcgaattgcgcacaccattctttgctttccttcgaaactctacgaaatcccactaccgcgctctctatctctcataaaggcgccaacgtttatttcgcgtaactgctctgcacctaaaacttatatctccattctacaacttcatttattggaactggaactctaccctttcaaagctgttaaattttcgattcgcgatggacaaatacgagctcgtcaaggatataagatctgggaatttatgggaggccaggctcatgcgttacaaagacacacaagagcttggtgtcatgaaatacattgaacggtgtcacaaga

SEQ ID NO: 47141 - DNA, 432 bp, Glycine max
  Clone ID: LIB3107-007-Q1-K1-A10
ggtggcagagagcgaacccaaaactagagctaccgtcccttcaaaccttccactcttctctccttttccaatcaagggaataatatttcttagagatattccgaaaccatggctcacgccaatcctatgatttttgttgttggaattctaggtaaccttgtctccttctgttgctttctagcaccagtaccaacattctatcgagtttgtaagaagaaaaccacggaaggtttccaatcacttccttacgtggctgcactcttcacttcaatgctttggatattttatgcttacataaagacgggcgaaatacttctcatcaccattaacgcattcggttgtttcatagagacagtttaccttgtcatctatatcacttattgccccaagaaagctaggttctttaccttcaagatgattttcttgttcaac

SEQ ID NO: 47142 - DNA, 406 bp, Glycine max
  Clone ID: LIB3107-007-Q1-K1-A11
tattgctatggaacgagaagtagttgggggttggcgcaaagaaaaactggaagaggtcaagtcagctcttgtgaaggggacttccaattcaaccatcccccatgaagaagctggtatgctagtaagagctttggagtctgattgggctgtgctctgtgaagagattggcctctggatacctgctcaagtttctaataaagaacatgacgacaaacctgagggtgcagaggagtttgaggaggaggtccttcctggcagacccgtttcacccgagtgccatgctgaactgcacacagattatgatggcgccgcagtaagatggggtcttaccttccacaaagatagtgcaactgattgctgtcaggcttgcttggaccatgcgaaacatgccaaagaatgggaaaag

SEQ ID NO: 47143 - DNA, 422 bp, Glycine max
  Clone ID: LIB3107-007-Q1-K1-A2
ctattttgttgtgcaaaactacgacgtctgtagtttagtacttttgatacttcatccattttttcttttttttacaagtttcacttctttggttttcgccagttgccggtcagatagcaagatcgctcggatgaaattagcgaccttatctttacttagcttttcattttcaataaaagataagtaaagaggggcaactattagaccctaatttcatccatgaactatcattcattgatgttttgattctcgctaatcgaaaggtgttgttcgacaccaatttctacacaaggcgtgagatcgttcgacattttggtcaaggatgcaaaaaatacccaagagaaggggcaaaaaggtcatttcaggcaattttctggaccctggcttgcccaggctagcctttggcttgcctgggccccaaa

SEQ ID NO: 47144 - DNA, 331 bp, Glycine max
  Clone ID: LIB3107-007-Q1-K1-A3
gaagtcgaactaccaaaataaagagttagcaagtactaatggaaactccggaatttgcattcttggctttgcttcttctccttactagtgctactataagttcacttaacttaattagggcttcttcaaaaacacattccccaatgtggagcaaatggttcgctctgctgttgcacaaaagttccaacagacctttgtgactgctcctgccactcttaaactcttcttccatgattgctttgtgaggggttgggatgcttcgatttttcttgcaaattgtaagccagagaaagatcattctgatcaaaattctctagctggtgatgggttt

SEQ ID NO: 47145 - DNA, 355 bp, Glycine max
  Clone ID: LIB3107-007-Q1-K1-A4
gaaattagaggattctaaagtgtttgttgttggatctggtgctttgggatgcgaatttttaaaaaatcttgctctcatgggagtttcttgtggaagtcaagggaagctcactattactgatgatgatgtgatagagaagagtaacttaagcagacagttccttttccgcgattggaatattggacaggccaagtccacagttgctgcttcagctgctgcagctataaatcctagttttaatattgaagctctacaaaatcgggttggttctgaaactgagaatgtgtgtaatgataccttctgggaaaacttgagtgtcgttgtaaatgcactggacaacgctaatgcaagacta

SEQ ID NO: 47146 - DNA, 425 bp, Glycine max
  Clone ID: LIB3107-007-Q1-K1-A6
gatactattcctcagaatcacaagagattgcctgtgcatttagccttctaatcacatttttctctatatcctcgaactcaaaataatgggctggtcctaaaacttgtaatagcctcacaaaaatcgaccttttttcccatcaatgttacttacaaactactcattttttttcttctaattttctccctctctttccttttctggtgtgcacctctcatcactttttgagccaatattcaaaggtgcctagtagtgtttgagatgtctggtgttcttctttgggtgagttgtggacccaaggagaaccctatctccattgttggtcttggcgggagaggtggcagaagccagaggaggtttggactgtgcaatgggatcagttttgcaagcttttcaccagcagtggcagacccttcaagatcctc

SEQ ID NO: 47147 - DNA, 428 bp, Glycine max
  Clone ID: LIB3107-007-Q1-K1-A9
cttcccgggaaaattgtctataacgtccctctcaagctgggttaacaaataaaaatggcaaagacagtgaggttgcattttagtatatatatgatctaaggtcaagcggaattcaaatatgatgggaaatgacaaaaatatttctaatgagaaaaataaaagaaatgctgatcttctttcgtttatatatttttacacatacaatactactattttgtttatcacttgttttgatcaagatattcctcaatgttacagctgctttatcacttgtgcaaatcaatcatcttttttgcactcccactaatcaatgcatataattataaaacattaagaaagtatataaaaaattatgttcaaagggggacatatataaattaaatatgatgtaggttttataaaatataaaagttttaagaataatctta

SEQ ID NO: 47148 - DNA, 318 bp, Glycine max
  Clone ID: LIB3107-007-Q1-K1-B10
cccacacatcgggtgtaacaatacgacatatcggggctccgcttgagcatacttaacaacagggcaaggggtgttactgtggggttgaagctaccatctatctttctctttcttaatgccttcttgccagaagttaaaatggcccaagaaactttcctattcacatctgaatcaatgaacgaggggcaccctgacaagctttttgaccagatctcccatgctgtgctcaatgcatgcttggaacatgaccctgacagcaaggttgcctgttaaacctgcaccaagaccaacattgtgattgttttcctagagatcaca

SEQ ID NO: 47149 - DNA, 421 bp, Glycine max
  unsure (1)..(421): unsure at all n locations
  Clone ID: LIB3107-007-Q1-K1-B2
gattccacgagatatggcttcggctctgcttcccctggcaaccttcttcttagttctctccgcttcttatctccagattgctggggcgaaagcacaaccgttgactagtctcaagcttaactctccgatccttcaggagtctattgctaaagagatcaatgaaaatcctgaggcaggatgggaggctgctataaatcctcatttctccaattatacagttgaacaatttaagcgccttcttggagtcaaaccaacgcctaagaaggaactgagaagtacacctgctatatctcacccaaagtcattgaaattgccaaagaattttgatgcaaggacagcttggtctcagtgtagcactattggaagaattctatatcanggtcactgtggttcttgttgggcatttggtgctgatgaatca

SEQ ID NO: 47150 - DNA, 160 bp, Glycine max
  unsure (1)..(160): unsure at all n locations
  Clone ID: LIB3107-007-Q1-K1-B3
gatctcacttattattattattattaccacctcggaacttttgcttgattaggtccgaaattcaaganaataaaattattttcaacaaaaatggctttttatctgttgtcaatgttagatttgggtgctcttcgttagcgaaacaaaaagttcgttcagt

SEQ ID NO: 47151 - DNA, 413 bp, Glycine max
  Clone ID: LIB3107-007-Q1-K1-B4
ggatataagcttgtcagcattacagagaaaaagagagagagagaaagaaaagtaatggcaatggcaacgatggaagagattccacaaagcccagaagcgaagttggggatgcgagtggaggatctttgggacgttcaggaggcacagttgagtcccaccgagaagctcaacgcttgttttgaaagcatccctgtctctgcttttcctttggatccttcaaacacagaaattgagattaaatcagacgccaccctagcagatgctgttaagatattggcaggacacaacgttttcagcgcgcctgtggtggatgttgaggcgcctgaaaacgctagttggattgacagatacatcggaattgttgaagttgctggaattgttgtatggattttgcatcaatctgaatctacgtc

SEQ ID NO: 47152 - DNA, 361 bp, Glycine max
  Clone ID: LIB3107-007-Q1-K1-B6
tcttcttaaatctctccgcttcttatctacagattgctggggccaaagcacaacctgtgactattctcaagcttaactctccgatccttcaagagtctattgctaaagagatcaatgaaaatccttacgcaggatgggacgctgctataaatcctcatttctccaattttacactcgaacaatttaagcgccttctttgaatcaaaccaacacctaataaggaactgagaagtacacctgctatatctcaccccaaagtcatttaaattgcccaagaatttttattcaaggacacctctgtctcaatgtaacactattgtaagaattctatatcacggtcactgtggttcttgttggcatt

SEQ ID NO: 47153 - DNA, 426 bp, Glycine max
  Clone ID: LIB3107-007-Q1-K1-B7
taagatggttctgctagagaagctctgggatgatgttgtggctggccctcaacctgagcgtggccttggcaagctcagaaaactcaccaccctcaaaactattgatgaaggagaaagtagcaagctgcagaagacgttgtcgatgccgtcggcaccaacaaccccgatgactccgacgactccaacgacaccgggatcggcccgtaaagctgacaacgtttggaggagcgtcttccatcctgggagcaactccgccacaaagaccatcggtgctcagatgtttgacaaaccacttcccaacactcccactgtctatgactggctgtacagtggggagaccagaagcaggcaccgctgaagctgaagtctttagctaagatgaccgtgggttgcatgtaaatattgtcgttgttcgttaagcatctg

SEQ ID NO: 47154 - DNA, 443 bp, Glycine max
  Clone ID: LIB3107-007-Q1-K1-B8
ggagctgaaacaaaacctcatccatggcttctcttctccggttcaacggcgtctccctctttcccttaccttcccaacccacacgtgaccccatcctccccaaaccgtcacgcctcgtaacggtgcgcgcggaggtgaaagagacctccgcacccgccgccgccacatcctccgacgaaaagatccgcgaaatcctccgcaaccgtgactacgacaagaaattcgggttcagcgtggagatcgagtccttgacgatcccaaaagggctctcaaaagaaaccattggtctgatctcgtccctgaaggaggagccccactggatgctcgaattccgcctgaaggccttggataaattcctctccatgaaggaacccacgtggtctgacaacacttaccctcccatcgacctccagaatatctgctactactccgcccccaagaat

SEQ ID NO: 47155 - DNA, 53 bp, Glycine max
  Clone ID: LIB3107-007-Q1-K1-B9
gagacctcaggtcaggcggggctacccgctgagggtaagcatatcaataagcg

SEQ ID NO: 47156 - DNA, 432 bp, Glycine max
  Clone ID: LIB3107-007-Q1-K1-C1
attgaatcttcagaccttaacttttcaagatacggggacaccttttttgagggtgctttcactgggggtcgtacacaacctggaactaccaagcctgatgagggggaccgccacccatactctataatagagtgtgagcctaagcgtgaagtcattttaccatctgtaatctacatacaaaagattttgcggcgaaggccatttctcatcaagaaccttgaaaatgttatgcggaaattccttcagtccttggaacttttcgaggaaaatgagaggaaaaagttggcaatcttcacagcacttgctttctctcagaagctgtctggtctcccaccagaaactgtgttccaaccacttcttaaagataaccttgtggccaaaaggctagttctgtcatttatgactgacttctttaaggagtatctgattgac

SEQ ID NO: 47157 - DNA, 413 bp, Glycine max
  Clone ID: LIB3107-007-Q1-K1-C12
gccaagtaaccttctcaaagcgcagaaatggttggctcaggaaagttttcgagctatctgttctatgcgatgctgaaatcgctctcgtcatcttctccagccgtggcaagctttttcagtatagtagcactgacattaacagaatcattgagaagtatcgtcaatgctgcttcaacatgtctcagactggcgatgtagctgaacatcaatcggagcagtgcttataccaggagcttttggtattaagagtcaagcatgagtcactccagcggactcaaaggaatcttctgggagaagaactagagccacttagcatgaaagaattgcatagtttagagaaacaactggatagaacgcttgcacaagctcggaagcacctgacacagaagctggtatcacgaaatgacgaatta

SEQ ID NO: 47158 - DNA, 397 bp, Glycine max
  unsure (1)..(397): unsure at all n locations
  Clone ID: LIB3107-007-Q1-K1-C2
gagaatagtgagagtgagagatggatcagtttttgtggagggtgttgcctttgcttacaatccttgtttcctttggagtgttcttctacttgcaggattcttacacagcacagttatttcctctcataaagttaccgcgggataagtgcagccttcttccccatcgccacttctggatatccagcaaacgtattgtgaccccacaagggatcatttctggttcagtggagataaatgatgggaaaataatatctgtcgttgagggacatgctattcangggaagcctaagcaagaagaagtaattgattatggagatgctgttatcatgcctggcttgattgatgtgcacgtacatcttaatgagccttgaaaaactgagtgggaaagatttgatac

SEQ ID NO: 47159 - DNA, 428 bp, Glycine max
  Clone ID: LIB3107-007-Q1-K1-C3
gggggggaaggtaaggcattggggctatgaacaagatcccaactatgttggcaccttgctcacatcccatcctatgccccaaccccacctaaatttatatatccaaaagagatgaaacaaaaaacaacatggggggactataccaatacccatgctactgtaaggcaacccaatactgaggaagccctttaaaattacaggcaaaatgagaggagcaaaatacgggagcatcatcccacaaaaagagttcctgttagatacagcaaagttagctaaagaatctgcacattgatataggctgagattatgttagattattcgttgatttcagctaatacttccttttattatttggataatattgggaattaggctagaatatttctatgattttgtatgattccttttatattttttgggatctttct

SEQ ID NO: 47160 - DNA, 430 bp, Glycine max
  Clone ID: LIB3107-007-Q1-K1-C4
attgtctctcctggagctgatatgtcaatatatggcccctactctgaaaagcagaacaggcttacagccctgcatggttcaattgaaaagctgttatttgatcctgagcagactgatgaatacattggttcattgaaagacaagtcaaagcccataattttctccatggcaaggctagacagagtgaaaaacataactggattggtagaatgctttggtaagaacagcaaattgagggaactggtcaaccttgttgtagtagctggttatattgatgtaaagaagtcgagtgacagagaagaaattgcagaaattgagaagatgcacgagctcatgaaaaagtataatttaaatggtgattttcgttggattgctgcccaaacaaatagggcacgtaacggggagctgtatcgctacatagcagacacac

SEQ ID NO: 47161 - DNA, 431 bp, Glycine max
  Clone ID: LIB3107-007-Q1-K1-C5
atttcaaatgcaaagttaccttgtgtgggccctgacccaaagaatgtcatacttttggcatgtgacgcatttggtgtactcccacccgttagcaagctaaacctggcacagaccatgtaccatttcatcagtggatatactgctttggtggctggcacagaagaaggtattaaggagcctcaggcaactttttcagcttgttttggtgcagcattcattatgctacaccctacaaagtatgcagcaatgcttgctgaaaagatgcagaagcatggtgctactggatggcttgttaacactggttggtctgctggaagctatggtaatggaagccgtattaaactacaatacacaaggaaaatcattgatgctattcactccggaagtctcctgaatgcagagtacaagaagactgaaatttttgggcttga

SEQ ID NO: 47162 - DNA, 400 bp, Glycine max
  Clone ID: LIB3107-007-Q1-K1-C6
cagagacgtgttggagacattccatgtgcatagcagagcttccactagacaactttggagcatacatcatctcaatggcaactgcaccttctgatgtgcttgcagttgagcttctgcagcgcgaatgccatgtcaagcatccactaagagttgtgccattgtttgagaagctagctgatctagaagcagcaccggccgcgttggcgcgattgttctctgtagactggtacagaaacaggatcaatgggaagcaggaagtgatgataggctattctgattctggcaaagatgctggaaggttttcagctgcatggcagctgtataaggctcaagaggagcttataatggtggctaagcagtatggtgtgaagctgacaatgttccatggtcgtggagggac

SEQ ID NO: 47163 - DNA, 430 bp, Glycine max
  Clone ID: LIB3107-007-Q1-K1-C7
ggtggtagtttggcagcgacacgtatgttcatcaataatcgcaggagcagtttccggtgcatctcatcgtcttccaaaatgaacgacgcatatgtctcgaagcaaatccagcagatggtgcgtttcatccgccaggaagctgaggagaaagccaacgagatctctgtatctgccgaagaggaattcaatatcgagaagctgcagttggttgaagccgaaaagaagaagatcaggcaagaatacgaacgcaaagagcgccaagtcgaaattcgcaagaagattgagtactcaatgcagctgaatgcttctcggattaaagttcttcaagctcaagatgacgtgatcagttccatgaaagaagctgcatccaaggaacttttgaatgtcagtcatcaccatgatgatcatgtgtatagaaaccttctgaaag

SEQ ID NO: 47164 - DNA, 443 bp, Glycine max
  Clone ID: LIB3107-007-Q1-K1-C8
agaaggggtaccattgctcatgctctagaaaagaccaagtaccctgagtctgacatttactggaaaaaatttgaagagaaatatcacttctcatgccaatttactgctgatctttttgtaatgaaccacacagactttatcatcaccagcaccttccaagagattgctggaagcaaggacactgttggacagtatgagagtcacactgccttcacccttccaggactctaccgtgttgttcacggtattgatccctttgatccaaagttcaacatcgtctctcccggtgccgacatgagcatatacttcccatacactgaaactgagcgtaggttaacagagttccaccccgacattgaagagcttctttacagctcagtggagaatgaagaacacatatgtgtattgaaggaccgcaacatgccgatcatcttcaccatggc

SEQ ID NO: 47165 - DNA, 345 bp, Glycine max
  Clone ID: LIB3107-007-Q1-K1-D1
cctttactaagggatttcacttgggaaaaaaaatgtcccatactaatggattcgggtccacaaccattgggtcaaaatgtccaaatcttgtagcacttaccaaccagggcctatcgattagtattatacaaaaaaaattcatcatagacacttatataattagatctggtcttcataaacaaacttgggattttcgatctcaagtaagatcggttcaagatcatgggatccttttctatcagataagaaaggctgtttcacaaaatgtacttctaagtaattgctccataaatcctatatctatctatatgaagaaaaaatcatgtgacgggggggattcttatt

SEQ ID NO: 47166 - DNA, 403 bp, Glycine max
  unsure (1)..(403): unsure at all n locations
  Clone ID: LIB3107-007-Q1-K1-D10
gattgggagaaaagtaataatattgggggtttgcttctgctgcattcttctgcgcttcccaaaaacaatgcagtcctgccccttccctgatactaaccccctctctctctctctctctcttagaacattttcttttttgtttttaattttgatttcattgcttagatctccttcaatttcaattatatttgttaattgtttgttctgttactcttttgtttgatgataagtttataaccctaacctaatttcgcgctttgtaacctaatcacaggtactcttttgtttgttcctggtcttctgcaattctttcatacgtttctgtcactgttcttcatatgagaagagtaatgttttggaagggaaagtgaaaattttgttactntattatgaatgtgtggaa

SEQ ID NO: 47167 - DNA, 428 bp, Glycine max
  Clone ID: LIB3107-007-Q1-K1-D11
gtttcccctgatgtagtagaccaggatcatgtaaataagatactcactgctgttgttcaagggatgaattcaacagaagaaaacaatgatgtcaggcttgctgccataaaagcattgtacaatgcattgggttttgctcaggcgaatttttctaatgacatggagcgggattatatcatgagaattgtgtgtgagacaacacaatctcctgaattgaagattcgacgagcagcttttgagtgcttggtagctatttcttcgacatactatgaaaagttagctccttatatccaagatatcttcaacatcactgccaaggctgtgagggaagatgaggagccggttgcacttcaggcaattgagttttggagttcaatatgtgacgaagaaattgatatactagaagaatatggtggtgattttagtgg

SEQ ID NO: 47168 - DNA, 337 bp, Glycine max
  Clone ID: LIB3107-007-Q1-K1-D12
ggagggatgatctgtaattttggggttgggcgagtgtgttgatcggattggaggcaggcaaagtgcaaatcaagcgattatcaatctttggggcggtgctgttgaattctgcaatggcatcagcagcgcctaatgtcgatctcttcgatgcctattttcgccgtgcagatttggatcgagacggccgtatcagcggtgccgaagccgtttccttctttcagggctccggattgcccaaacatgttcttgcgcagatttgggcatttgcaaaccaaagccagagtgggttccttgggcgggcagagttttacaatgcccttaatcttgttactgttgc

SEQ ID NO: 47169 - DNA, 418 bp, Glycine max
  Clone ID: LIB3107-007-Q1-K1-D2
actctttcatatactaggggatttcacttggaaaagaaaatgtcccatactaatggattcgggtccacaacgatgggttcaaatgtacgagatcttgtagcacttaccaacgaggccctatcgattagtattatacaaaaaaaatccatcatagacactaatataattagatctgttcttcatagacaaacttgggatttccgatctcaggtaagatcggttcaggatcatgggatccttttctatcagataggaagggctgtttcacaaaatgtacttctaagtaattgctccatagatcctatatctatctatatgaagaagaaatcatgtgacgggggggattcttatttgtacaaatggtacttcgaacttggaacgagtatgaagaaattaacgatacttctttaccttttga

SEQ ID NO: 47170 - DNA, 430 bp, Glycine max
  Clone ID: LIB3107-007-Q1-K1-D3
gagaatacataaacatcaagattgcagttccaaacaaaacttatcaaaatctcatatactgattcagttctatacataaccatcgagatttactatcaaaccaaaaattctcaaaatctcttcacctctgtgatgaccatggaatacagaaccttagaactcaacatcatatccgcaaaggacatcaagaacgttaacctcttctccaagatggacgtatacgccgtcgttacgctctccggcgaccctctccaccctcagggcgccaccacccacgtgcacaaagacgccggcagcaaccccacgtggaactaccccgtgaaattctccgtcaacgaatcgctggccaaggagaatcgtttgtctcttgagatcaagctcgtcttcgaccgcaccctcggcgacaccgttatcggcaccgtccatgttc

SEQ ID NO: 47171 - DNA, 421 bp, Glycine max
  Clone ID: LIB3107-007-Q1-K1-D5
caagaccaatgcatgaaaactggagcgagtgtgtcgacaaaatggcggcggcggaagcggttacttatggcgtggtcgtgaattcttttgaggagttggagccagcatatgcaggggatttcaagaagatcagaaacgataaagtgtggtgtgttggccctgtttcactcagaaacaggaatcaattggacaaggctcagagagggaacaaggcctcaagtgatgcgcacagttgcatgaagtggcttgatttacaaaagccaaattcagtagtttacgtgtgccttggaagtatatgcaatttaattccgttgcagttgatagagcttggtttggccttagaagcatctgaaaaaccattcatttgggttatcagggagagaaatcaaacagaagagttgaacaagcggattaacgaatc

SEQ ID NO: 47172 - DNA, 423 bp, Glycine max
  unsure (1)..(423): unsure at all n locations
  Clone ID: LIB3107-007-Q1-K1-D6
actgggccaatacgcacaccaagacaaagaaaaagaaggataaaaatggaggaagaaagaaattttcagtaacaataccaaaatccttaaattttggagggtaccatataaatgaactttctctagatcttaattatcataattaataaggttcgtctgagattttaaatctaattgaataacaaatagtcgccaataatatatacaccacaaaatataatgtgaaccttctcctcatccaacttaataacgttgccactcaaaaaattattagctagttaaagtataactacagaattatcatttatcttgtaatgatctaacaagaaccttatcttcattaatcttcacatcttgtaccttgtattgggtgcttgtcttcactaatcttcattgtctggactacgtanatgcatgaagtgc

SEQ ID NO: 47173 - DNA, 429 bp, Glycine max
  Clone ID: LIB3107-007-Q1-K1-D7
gacaacaacacattaacacaacacagacacagaagcaaggagagagaaagagaaagagaaagagaaagagagacggctctaacttccaacgagtattcatattctacttttcagaccactacgcttacttcttccctttccctcttctacgttacccactctcattctaatcacattttctcccaaattcacctccctctacaacaaaaaaagcttttcattggatcacgtcacccatctttccttttgctctctcctgcctctgaattgagcatttacgggttccattgggctctgatcgaattgggtatgtgcaagatctgcggcttcgtttgttggtggcaaaaagatatgatcttggtggtgggaccaacccaattatcggattggatacgatcggggtagaaacaacgccatcagatggcgctg

SEQ ID NO: 47174 - DNA, 435 bp, Glycine max
  unsure (1)..(435): unsure at all n locations
  Clone ID: LIB3107-007-Q1-K1-D8
aatggatcgacattcatttcaaaatgggtgcagggcacataacatgtacaaatcatgctaataataaaaaagaatatattatttcacatataaatcatgctaataaacataacatcattttgcagtgaaaaaaataacatcattttaatctcatattcgattaattaagaaatacattaaaaaatcactatattagcaattttcaaacaatcggttgtaaattaaagggtcacacattagtgtcttgctttatagttcataatgaacatgcattaagaaaactgttttctctgccatggctagtgtgaaagtctatgaattaaggttatgttgttcttctaaaaaaaacgttatgttgtttaattttcaaaaagtgattttatgatacatnnttttaggtaaatatgatacattttatacagcttataactctta

SEQ ID NO: 47175 - DNA, 285 bp, Glycine max
  Clone ID: LIB3107-007-Q1-K1-E1
gtcccgtgaacaaagaaattaattggggtaacaaagtctcttcaatcggatatatttaagtacgtataaagtgaaaaaataaagataaatatatataatactacattcttcattcctgtcttttttttgaaagataacactacccttcaaggctaggaaaatatacataattttgaagtcacaaaaagtaaagcatgctgactagaagtcaaatatcacacattctatgtatctgctactggtagctcaaatggcgtgggagttgcaagtttgaggtctaaatct

SEQ ID NO: 47176 - DNA, 372 bp, Glycine max
  Clone ID: LIB3107-007-Q1-K1-E11
gagggcgtgggcgagggaatcaaacaaaccttgtgctacggtttatcttcatcctcatttttgtcgtcgtcgttcttcctttttccgtttttcatctggttcttctctcagaaaaagctcgccaatcgatcttgctctcttctacgcttttcgaattgctttcattccattatggacgcagattagattcgcactcacattcccttctcctcgatttgttcaaactctctgctctgagatctgatcgcattttcattcagaaaggaaactcgtgtgactgatttatgcgctaattgcaattgcactgcgagcgttactctgccgaatcggaagatgggaatagtgttcaccaaattgttttcctctcttttc

SEQ ID NO: 47177 - DNA, 401 bp, Glycine max
  Clone ID: LIB3107-007-Q1-K1-E2
ggcagcgcttgatttgaggccaggcaagccccactgaaccaccacacctctcgtcgttcacgctacccctttctgctcttcttctacctttcaagttttaaaagtataaagatggcagagacattcctatttacctcagagtcggtgaacgagggacaccctgacaagctctgcgaccaaatctccgatgctgtcctcgacgcttgcctcgagcaggacccagacagcaaagctgcctgcgaaacatgcaccaaaaccaacttggtcatggtcttcggagaaatcacgaccaaggccaacgttgactacgagaagatagtgcgtgacacctgcaggaacatcggcttcgtctcaaatgatgtgggactggatgccgacaactgcaaagtcctcgtcaacat

SEQ ID NO: 47178 - DNA, 403 bp, Glycine max
  Clone ID: LIB3107-007-Q1-K1-E3
gaaatttctcaccatggccagggtaacatgctcgccactcatgattccaagtccaaaagtgagaatgatccgtcatcaccacaccataatgatgtcgaggaagatgatagtgatgatgaagaagctaaagcagatgaataccggaagtttggtgcggcagatacatttgaaatcccagatgaggtagaccttgctcatcttagttagatctttcattgtgaaagccattctttagagttatgcagttgacaacattgtctgcttagctgttagtaggatttttataaatatttgttagttgcctttatcaattgtatcacctatttgatctattctagcagcgttatgtctgtgaacatgtgaatagtaattaagaattgagatgcaataattcctttgatat

SEQ ID NO: 47179 - DNA, 338 bp, Glycine max
  unsure (1)..(338): unsure at all n locations
  Clone ID: LIB3107-007-Q1-K1-E4
tttataaagttaaatttctcaccatnacccgcgtaacatgctcctcactcatgattccaaaaccaaaagtgataatgatccaccatcaccacaccataatgatgtcgatgaagatgacaatcatcatcaacaatctaaagcacatcaatacccaacgtttgttgtctcacatacattataaatcccagatgacgtaaaccttgctcatcttaattacatctttcattgcgaaagccactctttttagatatacacttcacaacattgtcttctcaactattaaaaagaattttataaatattttataaatccctttatcaatagaatcacctatctta

SEQ ID NO: 47180 - DNA, 413 bp, Glycine max
  Clone ID: LIB3107-007-Q1-K1-E5
gcttggcccaatggaaaaagattcagagctggtgatatcctaatcttcaactatgactcaacgacccacaatgtggttgctgtggacagaagtggatacaacagctgcaagacaccagggggtgctaaagtgttcagttcagggaaggaccaaatcaaactagcaagagggcagaactacttcatatgtaactaccctggtcactgcgaatctgggatgaaagttgccattaatgcgctgtgatatactagtagtgctcaatacttcttgaaatgaagtaactgttaagttaatggtcaattaactagcattagtaaatgttagtgtgtgatattgtatgtagtcttttttttatatgaagctgttatatatattaattactatagtttgtgaagcaagtgggagtgagctgg

SEQ ID NO: 47181 - DNA, 424 bp, Glycine max
  Clone ID: LIB3107-007-Q1-K1-E6
ggagattgggaagcatgggtggctggctaagctaagctaaaactaaactctttcagtttgttttagcttcagcttcttctgcttcttttgctttttccaccacaaccacaaccatgtcttctgccactgcctccaacactttcttccttcactcttgtttcctcctcttctgtctcctctcggctccttcctgtgtttccatgttctctggtattgagacaggagatttagaaaaaagagatgatttgtttccacagattctaagagacgaggcagtggcaaggctttatgagcttgggaaggtgagtgatgctagcggttatttggagaggacattcttgagtcctgcatccatgagggcaatcaatcttattcgtaaatggatggaggatgctggtttgagaacttgggtggaccaaatggg

SEQ ID NO: 47182 - DNA, 257 bp, Glycine max
  Clone ID: LIB3107-007-Q1-K1-E7
ctaacaaacccatgatgataaatctacatctgctccaagactaactgctttttgcaattcatccacacccataaattctgaatatgcctaaaacacttccttgcttgaaactacttccctgatctgctgtgcaatgtgctctatctgccagagttcccattatcattggggataatactaaagcgttcaaattactagacgaaatgtttattcattagattcacaacgatgcggtgattaggttttataaacaaagg

SEQ ID NO: 47183 - DNA, 405 bp, Glycine max
  Clone ID: LIB3107-007-Q1-K1-E8
ggatttcactcagttgcctcagggaggtaggaatactctagaggaagctggatggaaggtggggcgctctcctattttcgaaactgtaactgcagctgatggaactgttaagttgttgttgaagttggaggacaatagattgattgaaactgttggcattccagttatggttgataaaggcttgactcgcctcacagcatgtgtctcatcacaggttggttgccctttacgctgctctttttgtgccactggaaaaggggggttttcaaggaatcttcagagacatgaaatagttgaacaggtcttggccattgaagaggtcttcaagaatagggtgacaaatgtagtgtttatgggaatgggtgaaccaatgttaaacctgaaggcagtacttgaagcacacca

SEQ ID NO: 47184 - DNA, 369 bp, Glycine max
  Clone ID: LIB3107-007-Q1-K1-F1
gtatacaaagtcaacagatctgggtgaataaaaaatagtgtgtatggctacgcaaaccgttgaggataattctagatctggtccaagacgaactgttgtaggggatttattgaaaccattaaattcagaatatggtaaagtagctccggggtggggaactactcctttgatgggtgttgcaatggctctatttgcgatatttctatctattattttggagatttataattcgtccattttactcgacggaatttctatgaattagattcacaagaatcgggtaattagtttttcaatagaaaggaaagttaagcattttggtttcttattgtttgttagtctatttcatttggatttggtagtttgatc

SEQ ID NO: 47185 - DNA, 360 bp, Glycine max
  Clone ID: LIB3107-007-Q1-K1-F11
attgttatggagattgagtttaagtgcaaagttgaatgtggtaaattgcgagatacacgtaaacatgagatgattgattgtgacataatgagatgtgaaattgtgaacatgagttttagttgtaaataagtttgtgattaacacttgatgtgactaattgtattgtgagctgtgaattatacaataactcgaccagtatttatattgagaaaagtgtttatgcgcagtgttaaagagaaagtgtagcttcttagttaggaaataatgttaaatggtaacgcaatatgttaaacgtgtttgaaacacgagtgtgaggtcatggatattatattatttatgagcagtgtctgcttgcaaata

SEQ ID NO: 47186 - DNA, 400 bp, Glycine max
  Clone ID: LIB3107-007-Q1-K1-F12
ggtttgcctttgatcttcttagctctactgcttttatttgcagacacccaattaacgatggctgctctctccaacggccacggctcttccttcttcaagatgcccccaatcaagttcacaaagctcttcatcaatggggaatttgttgattccctttcagggagggagtttgaaacaagagaccctaggacaggggaggtgattacaagaatcgcagagggagcaaaagaagacgttgatgttgctgtcaaagcggcacgtgcggctttcgactatggtccatggccccgtatgcccggcgctgtacgttatcatttctccatttctttctctataactgttgtgttgtgagttatgacaattaatttgtgggtctcactaattaaatctactgcatttt

SEQ ID NO: 47187 - DNA, 423 bp, Glycine max
  unsure (1)..(423): unsure at all n locations
  Clone ID: LIB3107-007-Q1-K1-F2
gagggcggtgttactccttctctcgttgattcggatctagagtcttttttcactcttcagttctcgttgttgttcttcgctttcctgaaactagggttttcaatttcgattcattcgttaataattaaagatgtttgggagggcaccgaagaagagcgataatacgaggtactacgaaatcctcggcgtctcgaagaacgcttcgcaggatgatctgaagaaggcttacaagaaagccgccatcaagaatcaccctgacaagggcggtgatcccgagaagtttaaagagctggcacaagcatatgaggttctgagtgaccctgagaagcgtgagatatatgatcagtatggtgaagatgcgcttaaggaangaatgggtggtggcggtggccatgatccggttgatatcttttcatctttctt

SEQ ID NO: 47188 - DNA, 383 bp, Glycine max
  unsure (1)..(383): unsure at all n locations
  Clone ID: LIB3107-007-Q1-K1-F3
ggaattcataaccatatcagttaaattcagattacaatgttttagttgctgggtgggttagtgtttattcagctttttgaattattacatacatacacccaaaattaagtaaattaaaattactgttggttgcccaatttgaaataataataatggttttgggtaataaggcttttaactcccccggggacccttgtttttccatcaaaaggagaatcccaaacaaccttagttcctccaaggagaagtttgactagatcaacatttacctctaagacctcaaggcttgcagtctcacaatcagagaacaacaatcccgcctctagaccagcaagaagcagttcagtaactcgctcttgcatctnaacttcacactcacagta

SEQ ID NO: 47189 - DNA, 407 bp, Glycine max
  Clone ID: LIB3107-007-Q1-K1-F4
ggcatatccaaaggaacaaaaatattattaagatgagcaacattattggagcacttgttctactctttgcatttctcttcctcagttgtgtgtatgcacaagacacaacaacccttgtgcctgcaatcataacttttggtgattctgctgtggatgtagggaacaatgactatcttcccacccttttcaaggctgattaccctccttatgggagggactttgttaaccaccaacctactgggaggttttgcaatggcaaattagctactgatttcactgctgacacattgggtttcaagacctatgctccagcatatcttagcccacatgcatcagggaaaaacctccttattggagcaaactttgcttcagctgcatctggttatgatgaaaatgctgctactttg

SEQ ID NO: 47190 - DNA, 414 bp, Glycine max
  Clone ID: LIB3107-007-Q1-K1-F5
gagagcgagagagaatcgtaacaaaagcggtaaccggaataagttgggtctacgatttgagccatggcaacaacaacaccctcaaaccgatcatcagaggcgtttgctctcatggcaatcctcagcactctgctttgcacggcggtggcggcgaaggagagcgtgtacgagatactccccaagtacggcctcccgagcggtctgttaccggacaccgtcaccgactacacgctcgacgaggacgggcaattcgtcgtcgttttggcgaaaccctgctacatacagttcgattacttagtttactacgagaccaagatctccggcaagctcagctatggctccatcaccaacctcaagggcattcaagtccagcgcctcttcatctggttcaacgtcgatgagatcaaagtcgat

SEQ ID NO: 47191 - DNA, 394 bp, Glycine max
  Clone ID: LIB3107-007-Q1-K1-F6
ggatgcacgccaatgggacccgccctccaataagtctatcggatttttgttcaagaatgaaatcttattggaactgtccagttcaccctttggaaccatatcacattccggatatgatgaaataggatgaattgagacggtattttgtaagtacataattatcttgaataaattcactatttctttattttccgatcgtctggaaagaacaagatgtttcttttgttctttcttcaacaatttctgatctctattacacctctcactatgattcgaactcacatgaagttctgaccatctgtcagagaaaaaagaacgagtaactctgtattaatggaatctcatcatccatacataacgaattggagtggaatattcaaattataacatatga

SEQ ID NO: 47192 - DNA, 216 bp, Glycine max
  Clone ID: LIB3107-007-Q1-K1-F7
acacacgcgtacgtccactcattttaatacaaccgaactctaatgcataccacttgcttcctttaataaattgggctatcgcactaccccccaataactatttattattttaccaccattcaaaccttttcgatcactccatcattctaactcttaatgcctaccaatcctgctttccattaccatatcatcctttccatttttacattctactca

SEQ ID NO: 47193 - DNA, 425 bp, Glycine max
  unsure (1)..(425): unsure at all n locations
  Clone ID: LIB3107-007-Q1-K1-F8
gacagcgctaaccccttctctctctgctgtccggttctccgatcgccgtctttgccctgcccattcctgatcaatatgtctcgaagatatgatagccgtactacaatcttctcccctgaaggacgtctttaccaagtggaatatgctatggaggccattgggaatgctggtactgcaatagggatcttgtcaaaagatggggtagttctggttggtgagaagaaagtcacatccaagctgctgcaaacctcaacttccaccgagaaaatgtacaagattgatgatcatgttgcatgtgccgnggctggaattatgtctgatgctaacatcctaatcaatactgctagagttcaagcacagcgctacacgtatgcttaccaagagccaatgccggttgagcagatggttcaatctctttgtgacac

SEQ ID NO: 47194 - DNA, 405 bp, Glycine max
  unsure (1)..(405): unsure at all n locations
  Clone ID: LIB3107-007-Q1-K1-F9
aggagcaagctgccacttggaatcagttgttatgcggtcatattatgtcgagtgtgtgtgctttgtggtccaagagctacaatctaccccaataatgcaattggcaaagtctaaaatcatggaattgatggctattcttaaggatgtagaatctgctcagcttcgcgtggcctggttgcggaacatagttgatgaaattgctgaaaacattgaactcattgatgagcactgcatggcggagatggcaaaggctaactctgatcgtgaaatggaaacattgaacaaagagctggaatcaaatctggaaagtntggctcagaaagaacaagaggtaactgatatcaaaacaagaattgaagagatcagagagcatttaagcgagcttgagctgaaatcttttgattt

SEQ ID NO: 47195 - DNA, 384 bp, Glycine max
  Clone ID: LIB3107-007-Q1-K1-G1
ggagtgagtagtgagaatggagtttcaagggttaccggagggttgcattgctagtatactctctcgcactacgccggcggacgtgtgtaggttttccgtcgtatcaaagattttccgttcggccgctgaatcggacgctgtgtggaaacgttttctcccttccgattaccattccatcatttcccagtctccttcgcctctcaactatccttccaagaaggagctctatctcgctctctcggatcgccctatcatcatcgatcagggtaaaaagagctttcaattggagaaaaagagtgggaagaagtgttacatgcttgctgctagagctctcagcattatttggggtgacactgagcaatactggaactggacaaccgatac

SEQ ID NO: 47196 - DNA, 384 bp, Glycine max
  Clone ID: LIB3107-007-Q1-K1-G3
gaaactgcatagcgtcagcgtgggtgcaaattccaggtttgcttcctttagcctagcttttactcattatctctctttctctctctctcagaggttctagaaagatccactccgaaatggacggtgcgccacaatccgccggtgccggaggtccggcgccgttccttctgaagacctacgacatggtggacgatgcctccaccaacgacatcgtttcgtggagctctaccaacaacagcttcgtcgtgtggaaccctcccgagttcgctcgcctccttctcccgacctatttcaagcacaacaacttctccagcttcatccgtcagctcaatacctacggatttcgaaaaatacatccagagcgatgggaatttgctaatgatg

SEQ ID NO: 47197 - DNA, 309 bp, Glycine max
  Clone ID: LIB3107-007-Q1-K1-G5
gagagtggtggagtgtgcagaagagcgtcggggtcgcagccctaatcagaagaagcgcagcttcaagcgagtgacagccaccagccatgggtcgtatgcacagccgcggtaagggtatatcctcttctgctttgccctacaaaaggacacctgctagctggctcaagatctcttcgcaagatgtcgaagaaaatatctgcaagtttgcgaagaaaggtttgaccccgtctcagattggtgtcattctcagagattctcacggtattgctcaagtcaatagcgtcactggcagcaaaatccttcgcattc

SEQ ID NO: 47198 - DNA, 446 bp, Glycine max
  Clone ID: LIB3107-007-Q1-K1-G6
aagacgacagaagggggagagagagagagagagagagagagagagagaggtggatggtgtctctgaaacttcagaagcggcttgccgctagcgttctcaagtgtggtagaggcaaagtttggcttgaccctaatgaggtcaatgaaatctccatggctaattctcgacaaaacataaggaaattggttaatgatggtttcattatcaggaagccaactaagattcattcccgttcccgtgctcgcagaatgaatgaggccaagaggaagggacgtcactctggtaatggtaagcgtaagggtacaagataggctaggctccccaccaaaatcctttggatgaggaggatgcgtgtcctcagacgattgctccgcatgtacagggaagcaaagaagattgacaagcatatgtaccatgatatgtacatgaaagtaaagggtaatgtc

SEQ ID NO: 47199 - DNA, 425 bp, Glycine max
  Clone ID: LIB3107-007-Q1-K1-G8
gttctcaatccaaggtcaaagctatccatgtgccaagcgatttattgttctctattccattttgaagagacaccaataaaaaaaaagtgatggtttttttctcttcatgcaactcactcaaatttattttttctcttcattttctcttcgtgttattgataaggagttgtatgccttagtgagagcgttgaaaatatggctacactatctttatcccaaggagtttgggatccatagtgaccatgagtccctaaaatacttaaagggacaaggcaaactaaacaaaaggcatgccaaatgggtagaatttcttgagtaattcccttatgttattataaaaagggaaaaggaaatattgttgcggatgccttgtcaaggaggcactttttgctttctatgcttgaaacaaaaatgattggatttga

SEQ ID NO: 47200 - DNA, 427 bp, Glycine max
  Clone ID: LIB3107-007-Q1-K1-G9
ggttctagtgtgtgattgtttgttgttgtaactcgttcttcttcttttgttgttctgtgtttgtgtttgttttttctctcacctgaaaatgtcttgctgcggtggtaactgtggttgcggaagctcctgcaagtgcggcaacggctgcggaggctgcaagatgtacccagacttgagctacactgagtcaaccaccaccgagaccttggtcatgggagtggcacctgttaaggctcaatttgagggtgctgaaatgggtgtgcccgctgagaacgatggctgcaaatgtggaccaaactgctcctgcaacccctgcacttgcaagtgaagtgtttggagagcaagcttcaagcagagatagcccttaattaagaataatgattaactattaatgtgtagctaaaaacttatgtattatgtctgtgat

SEQ ID NO: 47201 - DNA, 343 bp, Glycine max
  Clone ID: LIB3107-007-Q1-K1-H1
gattgcattgcagtgtaagtatttacaaagcaaagcgaagcaagcattcactgaatgcgctctatctctctctttcgatctgggtactaaccctaacccgcttcgaaccgtggcttcctcaggctcgcagaacctctctcgaagaaaaccttctccttcttcgtcttcgtcttctcaacaaacacccgggtcgacccggatcgtttaccgagaatctcggatcccatcggaatccgatttcccgatctggcagcagaactggttcatcgcattgctcttcgtcatggctctcggattcttcgccctcgccattttcctcttcctcactctcgactctgacatc

SEQ ID NO: 47202 - DNA, 428 bp, Glycine max
  unsure (1)..(428): unsure at all n locations
  Clone ID: LIB3107-007-Q1-K1-H2
gagtgtgtgagttcattaacagatacaaattctctgtgttgtgttgtgtacttgtgttaattgtgttgttgttgtaggaaatttaagtgaagagagaatgatgatgaagtctgctatgtgtgcattggtgcttgtggcactggttgtggttgaagcggggcccatggctgaggctgcggtgacttgcaacccaacacagttgactccttgtcttccggcaattaattcaggttctgcaccttcgagtgcttgttgccagaagctgaaggagcaaaagccatgcttctgtggctacctcaaaaaccctagcttgaagcagtatgttaactctcctaatgccaaaaaaaccgntagttcttgtggtattgcctatccaacttgttaagcacctcttatatatatatataaaatgtgtgaacaatatatat

SEQ ID NO: 47203 - DNA, 445 bp, Glycine max
  Clone ID: LIB3107-007-Q1-K1-H3
gtatgtgcttggtgagaaagaagtccttttagggtgtagggaaggggatagtgtcaggttcctctctattgccaagaagttaaaaagacaaaattccaccagaaggtatatcctgaagatatgatcaatcagtccaatgggcacctgaaggccaggtaaatagccggtataacttccttcactctctggtagcgagaaagcttctgtaaatcagagggtagaaggtgaagcggtggtggtgatctagtcttcaaaagaaaatctcgaagaactagacaatactttacttaccagccttactaggcaagacagaaaccaatcttagaactacaagatgatacgacttctcctaacgacaagtaaaggcatacccgaacataaaggagagcggctttccctctattagaaaacaagaatggaagtccatataaattagggggaaagg

SEQ ID NO: 47204 - DNA, 441 bp, Glycine max
  unsure (1)..(441): unsure at all n locations
  Clone ID: LIB3107-007-Q1-K1-H4
tatcaggttgctcttgtttatgttcttacaagattggttctcaacgtttcacaggcataccttgctttctttgtcatcaatgacctacaaatggcccaatcagccaaagctttggttcctgctctcatatacatctgcagctttgttgtgtctatagcattacaggagattgcatggactggccgaatgcttaaggcctactactctgctggatgcattctttggattttttgtggtgcaatgatccttcttttaaccacaaatatgagttatgtcatgtacatagtatcggtattcattggcatagcaaatgctctcatgatggtaactggagtaagcatgcagaattntctcattggagagaaccttaatggctgtgcatttgttgttggatcattgagttttttggacaaaatttcatgtgggcttgctttatatgtt

SEQ ID NO: 47205 - DNA, 422 bp, Glycine max
  Clone ID: LIB3107-007-Q1-K1-H6
ggttctagtgtatgtgattggggtgactcgttcttcttcgtcgttatcttcttcttttgttgtttgtgtgtttgttttttctctcacctgaaaatgtcttgctgcggtggtaactgtggttgcggaagcgcctgcaagtgcggcaacggctgcggaggctgcaagatgtacccagacttgagctacaccgagtcaaccaccaccgagaccttggtcatgggagtggcaccagttaaggctcaattcgagagtgctgaaatgggtgttcccgctgagaacgatggctgcaaatgtggagctaactgcacctgcaacccctgcacttgcaagtgaggtgttggagagctaaagcttcaagcagaaatggcccttagaaataatgataaaaactatatgtagtttcaaaacttcaaaattatgta

SEQ ID NO: 47206 - DNA, 423 bp, Glycine max
  unsure (1)..(423): unsure at all n locations
  Clone ID: LIB3107-007-Q1-K1-H7
gtgctggatctttattggtggcaatttcattttcttctgtttttggtggttggttaccatgcaaactgtttagttccaattcaggtacttttgaaactttgagttacagcatgtatgcagcaatcttcaatgtgggctgggccgctactcangtttcacacatgtaataatttcctctgattcatcttttccatttgatgctgaaaattaaaaccataagtttgaatgtcaaattataagtggttggctggtttggttacttataaaatgatattccaacttgtgctcttggtaacttaaactttaaatttgaagtatctaaacatcattgaccttttgatagttatgtgatatctatattgggataagccataattttgttgagaaaagccattcaaatgaaatgatgatgactggtatgtg

SEQ ID NO: 47207 - DNA, 413 bp, Glycine max
  Clone ID: LIB3107-007-Q1-K1-H8
acataagccagatgaaggagcgggaagacctaggatgtagaagatcataacatgagtgattcggcagatttggattcctatatacccactcgtgcggtacttcattgtatgatctatatctatatatctatatctatatatctatctatagatatatagatatataagatccatctgtatagatatcatcatctacatccagaaagccgtatgctttgtaagaagcttgtacagtttgggaagaggttttgattgatcaaaaagaagaatctacttcaaccgatatgcccttaggcacggcaatacataacatagaaatcacactcggaaagggtggacaattagctagagcagcaggtgctgtagcgaaactaattgcaaaagaggggaaatcggccacattaaaattacct

SEQ ID NO: 47208 - DNA, 353 bp, Glycine max
  Clone ID: LIB3107-007-Q1-K1-H9
ggctgttcctgaaacatacacagatcaggtagcaggaggaggaggagttgcactttgctcaactctcctcactcttttcttctaacagatagatagatagatacatagtgagaaagaaagatggtttctgaaacctcactctcttcttctaaacgctctccagctactcctaagttctgcaactcattcactactaggatatttgctgatgttgctggtgacattacaattgtcgttgatggcgagtcttttcttctgcataagtttcccttggtgactctaagtgggaagatccggaagatggtggctgaagccaagggttccaatgtttcaagcttggagctcatcaactt

SEQ ID NO: 47209 - DNA, 406 bp, Glycine max
  unsure (1)..(406): unsure at all n locations
  Clone ID: LIB3107-008-Q1-K1-A10
ttcttgcatttatgtgatctttaacactgtttttcaggggcaagtgactattgctgcaaaacctggcttgaaattggaaattcctgatggggtgacgattgagaataaggtataatactaacttcagtacgggctttggagtctctttattacaaaacttcaccttttcattggttttattttctctgttctgttggtgctgtttgtggggttgtgatttgtaggttggatgcgtgttgggagaatttgttttgtttggactgtttttttatcagcgtttggacttggtataatgggtaccttttgtttcttgtttgctgatcaaagcatggggatttgtaattgttnttgtcatcattgactgggagaccctttcagttggatagcctgactgtgcaagcttaag

SEQ ID NO: 47210 - DNA, 410 bp, Glycine max
  Clone ID: LIB3107-008-Q1-K1-A11
gataataaatcacattcatacctcggctataatttacgtgagctttcagagggagagagaaaaaatgcagaagcatggttttgcatcaaagcgtaacgtgttgccgtatcaaacgccgaggctaagggaccactacgttctggggaagaagctgggacaggggcaattcggtacgacgtacctgtgcacccacaaggttacagggaagctctacgcgtgcaaatcgatcccgaagaggaagcttctatgccaggaggattacgatgacgtgtggagggagattcagatcatgcaccatttgtcggagcatcccaacgttgtccagatacaaggcacgtacgatgattccgtggtcgtgcaccttgtcatggagctctgtgcatggggagagcttttcgacaggatcattc

SEQ ID NO: 47211 - DNA, 415 bp, Glycine max
  unsure (1)..(415): unsure at all n locations
  Clone ID: LIB3107-008-Q1-K1-A12
ggcaccgcttgagcagacttaacaacagcacaaagcgggttactgtctgttcaagctaccatctctctctctctttcttagtgcctccttgccagaagttaaaatggcccaagaaactttcctattcacatctgaatcagtgaacgaggggcaccctgacaagctctgtgaccagatctccgatgctgtgctcgatgcatgcttggagcaggaccctgacagcaaggttgcctgtgaaacctgcaccaagaccaacatggtgatggttttcggagagatcacaaccaaggccaacgtggactatgagaagattgtgcgtgacacatgcaggaacattggttntgtctctgatgatgttggtcttgatgctgacaactgcaaggtcctcgtcaacattgagcaacagagtcctgat

SEQ ID NO: 47212 - DNA, 355 bp, Glycine max
  Clone ID: LIB3107-008-Q1-K1-A6
gataacattatccattcactaatcataatcacttccaagggctctgactattcactactactactggagatggcttcaactgcctcttgcacttctatttccccttctagtgatggttgcctttgctggtgacttaaacaaagactttgacatcacttggggagatggccgcgccaagatacttaacaatggagagttactcactctttcattggacaaagcatctggttcaagttttcaatcaaaaaatgagtatctctttgggaagattgacatgcagctcaagctcgtccctggaaactctgctggtaccgtcactggctattatttatcttcaaaaggatctacttgggat

SEQ ID NO: 47213 - DNA, 395 bp, Glycine max
  Clone ID: LIB3107-008-Q1-K1-A7
tagtctctaactttaatttgcatttgaccttattacaacaacgcattttgttttaacacaacttatttgttgtgtgctgatgtgctttacatcccggttgactcccccaaatttggggcaaattgccttgaaccatctgctctcctagaatctaagcaaggtatctggagatattcattcaagttcaaggttcaattttgaaaatgtaatttagctcacaaagggtgcaaaggatacaattataattcaaggcaagctttttggtcaattggcttgtatatacaatcatggccttcatcatgtccatattcatacatttcattctaaaattcagaaattgatacaaagactattactcaatgctagtcattcactcacagtttaagatcacactc

SEQ ID NO: 47214 - DNA, 459 bp, Glycine max
  Clone ID: LIB3107-008-Q1-K1-A8
gttaacgtctggccgagatccaggcataattccacgcaatgcacatcctccagagccagaaggcttggatagtaatctagatgttggtgctggtcagactcctcaattgcggttgcctcgctttaaggaggttgaggtgaatggcatccctattaaggtcaagtactgtgatacttgcatgctctacaggcctcctcgatgctcgcactgctcaatctgtaataactgtgtggaacggtttgaccatcactgtccttgggttgggcagtgtattgggctgcgtaattatcggttcttcttcatgtttgtcttctcaactacgctactgtgtatatatgtttttgcattttgctgggtctatattgtaagaattatggcatcagaggagacaacaatttggaaggcaatgattaaaactccagccttcatagtggtgataatttacaccttcatatcaat

SEQ ID NO: 47215 - DNA, 404 bp, Glycine max
  Clone ID: LIB3107-008-Q1-K1-A9
gaataaaaaccattctcttcccttctatgggattgacaccttcacactgtcgctatcaccaatcccttatatcccccctccacttagcataccataattcaccgtcaatttccccattgatgatccatttggcatttcatcatatttcaccacttgtcctactccacttggataatttcctaacgtatagttttcaaaaatccttgttcttcatgagcttatagtttatgagtcctacgatttttggcaattcagcaacactatagatatatcttaggctaagagaagccttagcagcaactcaaatccaaaagtgtaagcctttcttcttgttattagtccatcttcaccaatggaagagaatatgaagtgtgaacaagatggtctcattgatgagttaatgc

SEQ ID NO: 47216 - DNA, 425 bp, Glycine max
  unsure (1)..(425): unsure at all n locations
  Clone ID: LIB3107-008-Q1-K1-B10
ggaagtgtgaagcactgagcagttgaggaaatgggaacccttgggagagcgatctacagcgttggtaactggattcgagaaactggacaggccattgatcgtctcggttcccgtcttcagggcggttactacttccaagagcagctctctaggcatcgaactctgatgaacatatttgataaggctcctgttgttgataaggatgtatttgttgcgccaagcgcctccgtcattggagacgttcaacttggaagaggatcatccatttggtatggagttgtcttgagaggtgatgttaacatcatcagagttggaaatggaactaacattcaggacaactctctggtgcatgttgcaaagtcaaatttaagtgggaaggtgttgcctacaattattggggataatgttactgtcggncacagtgc

SEQ ID NO: 47217 - DNA, 410 bp, Glycine max
  Clone ID: LIB3107-008-Q1-K1-B11
ggaagtgagtgagtagtgagaatggagtttcaagggttaccggaaggttgcattgctagtatactctctcgcactacgccggcggacgtgtgtaggttttccgtcgtatcaaagattttccgttcggccgctgaatcggacgctgtgtggaaacgttttctcccttccgattaccattccatcatttcccagtctccttcgcctctcaactatccttccaagaaggagctctatctcgctctctcggatcgccctatcatcatcgatcagggtaaaaagagctttcaattggagaaaaagagtgggaagaagtgttacatgcttgctgctagagctctcagcattatttggggtgacactgagcaatactggaactggacaaccgataccaattccaggttcccggaagt

SEQ ID NO: 47218 - DNA, 179 bp, Glycine max
  Clone ID: LIB3107-008-Q1-K1-B2
aggtgttagtacacctcagaaagggcatctaaccacatacttatcgagatattattcagtaccaagacattgggaccggaagtgtgacggctttaactgttaatgctcaagttaaaagtttaattcatgcaagatattggagctccttcagtatcacttgaatttgtatcactagcctc

SEQ ID NO: 47219 - DNA, 387 bp, Glycine max
  Clone ID: LIB3107-008-Q1-K1-B3
attgtctcttctggagctgatatgtcaatatatttcccctagtcttagtagcagaacaggcttacagccctgcatggttcaattgaaaagctgttatttgatcctgagcagactgatgaatacattggttcattgaaagacaagtcaaagcccataattttctccatggcaaggctagacagagtgaaaaacataactggattggtagaatgctttggtaagaacagcaaattgagggaactggtcaaccttgttgtagtagctggttatattgatgtaaagaagtcgagtgacagagaagaaattgcagaaattgagaagatgcacgagctcatgaaaaagtataatttaaatggtgattttcgttggattgctgcccaaacaaat

SEQ ID NO: 47220 - DNA, 181 bp, Glycine max
  Clone ID: LIB3107-008-Q1-K1-B4
aggtataataccacataaggagacaaactattaatgtgtatctaaaaacttatgtattatttccagaatagtgtgtctcacactgtgctgttttgttttaaacaaacatacttagaataaagtggtcatgtcttgcctttgagcaaactcaactgatatcaacttctgacgcctgtaataa

SEQ ID NO: 47221 - DNA, 371 bp, Glycine max
  Clone ID: LIB3107-008-Q1-K1-B5
ggacccatacatgaaatagaatctcaattcaattcgtcttcgtcttcctcctcctctgtgcctatcaatctcttttgcaaacttctctttggactcttccttttgcatcaggctttctcccgatactcctcccttctctgcacccaacgaaaagcacaattctttttctccttttcgataaccccatcacacattctgcgtctaaaatgccaaaataataccccccttgtcttttccttcttggtgggcttgctctatggttatccttttcctctccctctcgagctcttttctccacaattggacaaaaccccttttgttcacatcaatcgcacaagacaattccctgttcaaaatcctgactatgtctc

SEQ ID NO: 47222 - DNA, 149 bp, Glycine max
  Clone ID: LIB3107-008-Q1-K1-B6
tggaaccacccttctcctattaactctgcaacgagcaatgtgagcaactgcgtgaacaacaacaacagcaatggcatccaaattccaacaccaccactcactcccaaaaccaattccagatctgattccaacccttaccctaccacttt

SEQ ID NO: 47223 - DNA, 320 bp, Glycine max
  Clone ID: LIB3107-008-Q1-K1-B8
tgaatactacagaatgggataaactattaatgtgttgctaaaaacttatgtattatgtctgtgatggtgttccagcactctggtgttttgtgttaaacaaacatacttagaataaagtggtcatgtcttgcctatcaacaaggtcaagtgttttggacttgtgatgggtgggttaaactcatgagtgcttctttatttttttttttaatgttaggtaaatggacgcttttgtttaaaagtcggctaatacgaaatatgaatctctgcttataatattaaatactaattccgggcacaaaaaagactatgatctgaacaaa

SEQ ID NO: 47224 - DNA, 479 bp, Glycine max
  Clone ID: LIB3107-008-Q1-K1-C1
gataccaaaaacaaaacacaagccaagtgaaagtgagaaaaaataaaaatcaaagagcataatgtcagggatcattcacaagattggggagacccttcatgtgggagggcacaagaaggaggaggagcataagggtgagcaccatgctggagaatacaaaggggagcaccatggtgaacacagtattgagtacaaaggagagcatcatggtgaacacaaagctggagagtaccatggtgagcacaagccagagcacaaagaggggttcctagacgaagtcaatgacaagatccatggtgagggcggcgccgccgagggcgagaagaagaagaaggagaagaagaagaaggagcatggccatgagcatggccatgacagctgcagcagcagtgacagtgattaaactgctgcatcacctatatatttaaaatgtttatgggaccatagtagcgagggctgtgcctaaattgatctctctc

SEQ ID NO: 47225 - DNA, 324 bp, Glycine max
  Clone ID: LIB3107-008-Q1-K1-C10
ggttctagtgtgtgattgtttgttgttgtaactggttcttcttcttttgttgttctgtgtttgtgtttgttttttctctcacctgaaaatgtcttgctgcggtggtaactgtggttgcggaagctcctgcaagtgcggcaacggctgcggaggctgcaagatgtacccagacttgagctacactgagtcaaccaccaccgagaccttggtcatgggagtggcacctgttaaggctcaatttgagggtgctgaaatgggtgtgcccgctgagaacgatggctgcaaatgtggaccaaactgctcctgcaacccctgcacttgctt

SEQ ID NO: 47226 - DNA, 392 bp, Glycine max
  Clone ID: LIB3107-008-Q1-K1-C12
gaaaccgcgtcgatttttactttctttcggcatgggtttttccttctccaacccacattcttcttattccagaatatacacccaaattcctctttcctagggttttagtccaaagggttttggaggcatcaccatcaccatgagagccaaattgtttgtgttcccaatactatgcatgaactggtgcttctccagaaccatcgatcactctctctccgcttcccatgcttcctctcaatcccccttaaccctcaaagacttgtggaccaacatcaacgttggtgataagcccctgaacaccaaaactgagctctttgtctattacatcggccacatgatgaataatgcttggattggcttggataaagcgcccgaagggtctttcaagaaca

SEQ ID NO: 47227 - DNA, 276 bp, Glycine max
  Clone ID: LIB3107-008-Q1-K1-C2
gataaactattaatgtgtagctaaaaacttatgtattatgtctgtgatgggtttcgtgcactctggtgttttgtgttaaacaaacatccttagaataaagtggtcatgtcttgcctttcaacaagttcaagtgttttggacttgtgatgggtgtgttaagctcatggttgcttctttttttttttttttaatgttcggaaattgggcgcttctgtataaagttcggctaatctgaattatgaatctctgcttataatattaaatactattactggg

SEQ ID NO: 47228 - DNA, 359 bp, Glycine max
  Clone ID: LIB3107-008-Q1-K1-C3
atccttttgttgaattacttctaacaagactttcactcgagataactggtctaatttatagacagaatataaaaaatttcataaaaaaattagctctggtaaaatataaaacaaaggatacattttatagaaaaatgaaattaaaattgttagttattcatcaattattaagattgtgacatataaatgtatgcccttgtttttctttttttctttttaaaaacgcacctgtgttacttcagagcaatcaaatccaacaaaaattatccaaattttaaatcaagttcacaccttttttatcatttagaattttccatccttaacgttatcccattgagagtactttattaatatgaatc

SEQ ID NO: 47229 - DNA, 359 bp, Glycine max
  Clone ID: LIB3107-008-Q1-K1-C4
ggtcgtttgcggcgttagaagacctattggggcgtgatggcgaagaagcgatcagccccgagtggcggtcgtctgtaaaaccgagccgaatcatcttgccgacggctcaactcagctttcggtcgcagaaaactcgttgtgttcttcatcgtatcgtccatcatcgctatcgtcacttatcgttatcgcttcagacaatcttctccttcgcaaggccttgtcacaactcatgctaattgccaacatatactcgccgaaaattcaaaagtatcaggaaattcgtctcagcgccattatacttatcctgtgcttggctacattactccctggaattctcgaggttatgaattggcaaaaag

SEQ ID NO: 47230 - DNA, 265 bp, Glycine max
  Clone ID: LIB3107-008-Q1-K1-C6
gataaactattaatgtgtagctaaaaacttatgtattatgtctgtgatggtggtcgtgcactctggtgttttgtgttaaacaaacatccttagaataaagtggtcatgtcttgcctttcagcaagttcaagtgttttggacttgtgatgggtgtgttaagctcatggctgcttctttctttttttttttaatgtttgggaattggtcgcttctgtataaagttcggctaatctgaattataaatccctgctcataatattaaata

SEQ ID NO: 47231 - DNA, 408 bp, Glycine max
  Clone ID: LIB3107-008-Q1-K1-C9
atgggagtatttacaggttgagtctaagtttctgcaaatatcatcaccttttgtgcaatcatgatattattctgatatcattgtttttttcatgggtattagtttgccacttgtggtcagttaatatttaatagatttttgaacatatcactgtaaaaattaatacttgacaacttttcacgagtatgatagccatcagattaccaatacaagctttatcatgttagctcacatcttgttcctctctgcatctgttcaattagattagttgtttccaaatgcatgttttgtcttaagtatacgtggttctgatttattttgttttcatagtttataatgtggtttagtagtgcgccttttacaaaccttgctcatgagggttgcgatgagaaagaaatcatttatgtg

SEQ ID NO: 47232 - DNA, 363 bp, Glycine max
  Clone ID: LIB3107-008-Q1-K1-D1
gaattcacctatcccaataacaaaaaaacctgacttgaatgatcctgtgttaagagctaaattggctaagggaatgggtcataattattatggagaacctgcatggcccaacgatcttttatatatttttccagtagtaattctaggtactattgcctgtaacgtaagcttagcggttctagaaccatccatgattggggaacccgcggatccatttgcaactcctttggaaatattacccgaatggtatttctttcccgtatttcaaatacttcgtacagtgcccaataagttattgggcgttcttttaatggtttcggtacctacaggattattaacagtaccctttctggagaatgttaa

SEQ ID NO: 47233 - DNA, 190 bp, Glycine max
  Clone ID: LIB3107-008-Q1-K1-D11
atttagagggtgagaaagattcatatagaattatgaatatacttgattgtatgctaattaaaaggattaattctataaacatattgatgcaactttagacccaaaatccccctaaatatgatactctattatgtatctggaaaatgatcattaaacattccaaattgaaaatagatcctctatgataaat

SEQ ID NO: 47234 - DNA, 130 bp, Glycine max
  Clone ID: LIB3107-008-Q1-K1-D3
ggttctagtgtgtaatggtttttggtggaacctcgtccttcttctttggttgtcctgggtttgggttggtttttctcttaacctgaaaattcttggttccggtgtaacctttggttgcggaagctcctgc

SEQ ID NO: 47235 - DNA, 481 bp, Glycine max
  Clone ID: LIB3107-008-Q1-K1-D4
gaaggtgacattctcatgtgattgcctatcacatttccattgcccaagaacattagtgtggaactagtttaaagcttcttgcagattcttctgaattttcatttgtaaaaagcttcaagtttttcctcctagatttttatatcagtgctgtacatgttgtcttcggttttgtggagaggagcgtgattcgaactcgtgttgattatttagttaattgtacagaaaaacattccagttatggttaaaccctttcttccctgtgtaatgctaatttcgtgaaacgattttgaaggtgcttcagtcactcaatggaacaagattgcctcaactcaactaaccaaggcacggatcataacatgcatcccattgttgaaatgtacatatatggagctctgaaatgggttaaaagtgacgtgttagacacaacaacaacgaatagagtgtgatcgcgtcatttgaaatgttacaaaatatttaacga

SEQ ID NO: 47236 - DNA, 478 bp, Glycine max
  Clone ID: LIB3107-008-Q1-K1-D6
gaaaaccaaagagccgaacccggcctttagggaagaaaagaagaaaaaaaaaatcccttctctttttgtttccctctcttctctcttccatggaaaaaatggctgcagcttctagaaaaccaggaagcgcagtaattggatccctttcttcaacccctaggttctgcaactctcactctacatcatcatcttcttcttcctcagctttcgcttcttccacctccagcttcacctctcgctcctcctccttctttcaccgctcttgctctccaacacgtgtcaacctctactgttccaccgctccctccgtccggttcttcctcgaccgttcggtctctacgaaccgctccatctcggtggcgccgcgaaccggcgcttctaggcaaagcagtagcccgcaccaccagcagaagcggacctgcatgtgctcgcctacgacgcaccctggctccttccgttgcagccttcacatgaagag

SEQ ID NO: 47237 - DNA, 482 bp, Glycine max
  Clone ID: LIB3107-008-Q1-K1-D7
ggaggaatcctgaaactttgcttgattaaatttttatggtggcacatggcagggtagttgtcggcttgagaatggataaaagcatatctgacaaggatcagggagctcttgtagaaggttttgatttttgtttgccagaggttttgattcatgggtggttcttctgagtttgagacagagttgtactttggacagatatataaaatactgatcttcactccttccttccaaggtcagttaagtcattcctgttaaatttaatgtggtgtatcattgttatgcattacatataaggattcatcacatcaatcaataattgattcttttattggattattgagctaacccagttggcatttctggttgaatattggtttactcattttgtgcaaataggaaatgcaagtgggtttatttaaattctacattatccttttctttaaggagaagattggattttttttacttctgatttagtgttt

SEQ ID NO: 47238 - DNA, 389 bp, Glycine max
  Clone ID: LIB3107-008-Q1-K1-D9
ggaggaaagaagagagagaacaaagcacttagtgcgattcaataattacgaaaaaccaacagcgagtgttgtttttgtttggtccaggctggaccagggaatgaatagagatgagaggctttcggttgaagagaactgagttaagcggcgaagccaaacgcagaatctgcggcagaaattgccaccggaagcacgtctaagacgggtgaaccaaacacaatattccatccaccacttctcttttcaatccccaactcaaatctgtgaagaaaatctcaatttctaaattgtaattcttagcactactgctagtagtagttataaagtaacaattagaaagtagtagagtgtttgtttttctttttttcgtgtgttttacttttaagatg

SEQ ID NO: 47239 - DNA, 302 bp, Glycine max
  Clone ID: LIB3107-008-Q1-K1-E1
gattgtgaaatcaacagagaaacatttcactaatagagagacataagcataatattgagaaataatggagggttgtacttattgtgtgaagttgctatgccttgttgggtttgtggtgcttgtgagtactattgcaggggtggagagtgctggtgaatgtgggaaatctaccaccccagataatgaggcttataagcttgcaccatgtgcctcagcagcacaagatgagaatgctagtgtttctcagagttgctgtgctcaggtgaagaaaattgggcagaacccaagctgcctctgtgcag

SEQ ID NO: 47240 - DNA, 420 bp, Glycine max
  unsure (1)..(420): unsure at all n locations
  Clone ID: LIB3107-008-Q1-K1-E12
gagggggaaagatcccagttttgagtgacccttctaatctttttatcttctcttctctgtccctcactccttcctttttcctctctcacacatataaatatatagcttctggatcttcttccacctcttaacggatctcagattccaaaatctatctcctttaggctctccaaatttttacttcagttcttaatctcctgaaattctgtttttttttttgtgtgtatgtgtgtgtgttcgaacttcaaaaaaaaaaacatgagtgaaagcatgcaactttgtagtcaaagagtgaacggcacatagcagcaagttttcagctttggaaagttcacttagctaattggtttttccccctttagctgctttatatttntccttttagtctttgacaattggcttttctctgcaagctctttt

SEQ ID NO: 47241 - DNA, 398 bp, Glycine max
  Clone ID: LIB3107-008-Q1-K1-E3
tgggcaattaagggttttggggaagcatatacgttaagagagccaaattttgagtctgagaatcttctcttcccgttccttcatctttaaagaatgacttgtatataattgttaatcatttgttcatcaatttaaagtggcatatagtgaatccaggagggccattatttgcgagcatagaaattggattatatctgatgtgcctttttcatgttgcagtctgatgttaacactgtctgctttgctgatgaatctggccatctaatatattcccggagtgatgatagttttatcaaggttacattcataacttggttatgttgaatttgctaatatccacttatatctatgttggcagcaatatctgtatttaatggatgtctttattccaatattgg

SEQ ID NO: 47242 - DNA, 270 bp, Glycine max
  Clone ID: LIB3107-008-Q1-K1-E4
gatggatttaactggactcatttacaatatgtgggtaccatttttagtgcacctaacttctgttaccgatttttgaacatggcttacatatcggaggttgattattgcaagggccacacatttattcagtttgaacctgctcctatgagaggtgaaccttatgtcactctgagaacgccctattacttcttataatgtagctgacgaatgtcatactgctatatcaaggtttcctctactgcacttattttatgttgtttcgcattctta

SEQ ID NO: 47243 - DNA, 468 bp, Glycine max
  Clone ID: LIB3107-008-Q1-K1-E5
gaagatgagcaacctaagaagaaagtgcgattggggagtcgggctactcagtggatatcagtgtataatgctcgccgtcccatgaagcagagatatcactataatgttgcagacactatgctacggcagcatgtagacaagggtattgaggatgggttgtatataagctgtgtggcctctgcaacaaatctgtgggctctaatcatggatgcaggaacaggtttttcttcacaagtttatgagttatccccggccttcctgcacatggactggattatggagcagtgggagaaaaattactatatcagttcaatagctggcgcagttaatggaagttccttggttgtcatgtccaaaggaactccttacacgcagcagtcctacaaagtgagtgaatcatttcctttcaaatggataaacaagaagtggaaagaaggattccatgttacctcaatgactactgctggc

SEQ ID NO: 47244 - DNA, 202 bp, Glycine max
  unsure (1)..(202): unsure at all n locations
  Clone ID: LIB3107-008-Q1-K1-E6
cgcgtgcgtgcggaagaccacataagggatatcgaacgaattaattgacttttctttttgaaagtttcnttaccttggaggcgctatatttctggtaatttcttaaatatgcttactatagctacataccaagactatgcatgtctgtntggtgctactgttacttaaactttttaagcgtgcttttttttttttctaatct

SEQ ID NO: 47245 - DNA, 297 bp, Glycine max
  unsure (1)..(297): unsure at all n locations
  Clone ID: LIB3107-008-Q1-K1-F1
ggctcacgatctgaggaagacaccaatcttctctccacgcccttcttgggtaaccgtctgaagtgcaggaatggcagatggattgcattcgcagcatccatcggtagttcagaagttatctggacagtcttatcttgtgtccaggcttgctcctaatcactccagaaactgttctaccactggtagttacttcaatggaggtttgcagtcttcaggtttggttccagtcacggcacacgcgccggctgagaaaggggtgtctggattnttgttggatttcctgatgggcggagtgtc

SEQ ID NO: 47246 - DNA, 422 bp, Glycine max
  Clone ID: LIB3107-008-Q1-K1-F10
ttcgcatacatgagataagccaattgtgataagccattcactcaggtgaaaagaaaaaaaaaaacatatagtaacaaaaccatggtgattcacagactcgaattgtgcataaacatggttcaactcgccatagagttcgtcgtgagcgtcgcggaaacagtggtcatagttcagcagagaaccgtggagcctctcggaatgttgaatcgcgcaagtacacctcttcctttctatggctacctccgttgaatgttgaagagcatcgcttgattaattactttctagctttcttttcttctatgaaatttcgcaatttttatagaccccgttgtttctttccttttgggtgcattaagcgctgattgatgcatacccacacgagttgcttgtgttagtgaaattgatgcccttgtttttttttt

SEQ ID NO: 47247 - DNA, 416 bp, Glycine max
  Clone ID: LIB3107-008-Q1-K1-F12
accgcccatcagagccatcgttaaccattggtctttaagaagacgtattctcaaaatacctatatctacggctgtggcaataggcgcatgatttggtaatactccaatttgtccgctattagtagataaaatgatttccttcacttccgaatcccaaacaattcgattgggggtcagtacacaaagatttaaagtcatttcttcaaattgctctccatttctaagttcgtagctttcgcagtagcttcatcgatattacctaccaaataaaaggcttgttcaggaagaccatctaattctccagaaagaatcaatttaaaccctctaattgtttctgctagactaacatatttccccggcgaaccggtaaaaacttctgctacgaaaaaaggttgtgataagaaacgctcaatttt

SEQ ID NO: 47248 - DNA, 229 bp, Glycine max
  Clone ID: LIB3107-008-Q1-K1-F4
gagaacagagtgacgccaacgcaggaggcaggggcaggttctccaccacaccattctctctacgtgcaagtcaaaaccggcattcgcacgagtcacaaacttcaccgaacttccgtataaattctcttctcttccgggattattactgaaagaggaatagaatagtcagcgatggcacagaagagattcatcatcgaggtcgagaaagcgaaggaggcgagcgaaggaa

SEQ ID NO: 47249 - DNA, 195 bp, Glycine max
  Clone ID: LIB3107-008-Q1-K1-F6
gggtgtttaaaattaaaaccgagcctctgggccaaatgagagacagagcgagagataatcgtaacaaaagctgtatctggaagtagatcgacatacgattttagccatttgatcaacaacaccctaataccgatcataatatgctattgctcgtatggcaaacctcagcactattcttttcacggccgatgccgc

SEQ ID NO: 47250 - DNA, 479 bp, Glycine max
  unsure (1)..(479): unsure at all n locations
  Clone ID: LIB3107-008-Q1-K1-F7
ctaccgttgctttagctttacttacatcaattgcatgtttctagtcgggtctttcaaaaaaaggattancttattttaataaatacatccaaccaaccccaatccttttaccgattaacatcttagaagatttcacaaaacccttatctcttagttttcgacttttcggaaatatattagctgatgaattagtagttgctgttcttgtttctttaatacctttagtagttcctatacctgtcatgttccttggattattcacaagcggtattcaagctctcatttttgctactttagctgcggcttatataggtgaatccatggaaagccatcattgaccagttttctacaaaatagtccttttcgtttagcttgccgcacatatattgcggctcaatataatctacttagtaaacatctatatctatctacctatatctatatagatataggtagatagatatagatagatattcgat

SEQ ID NO: 47251 - DNA, 415 bp, Glycine max
  Clone ID: LIB3107-008-Q1-K1-F9
atatcaaacatatataatttcaacaagtacccttcagacattgggtagcacacttaatgaagaagagttggctgatataaaagatcaatttgatgctatagatgtggacaaaaatggttctattagcctggaagagatgagacaggtagcatttaatttactggctttgtgactaacttaaatctatatacatcgcttacttattggtatttagcaaattattcccttatatatcatttccctactttagtctaaagggaagattttgtgcatgctcttgccaaagatcttccttggaaattgaaagaatcacgtgtactatagatattgcaagcggttaataatgttgatctttttacaaaaaacacacattggtttgattgctggttctcaatctatattcaaagtctaaatt

SEQ ID NO: 47252 - DNA, 429 bp, Glycine max
  unsure (1)..(429): unsure at all n locations
  Clone ID: LIB3107-008-Q1-K1-G12
ggtagagaagagttaatggctggagcgtgaacagatcagaggcatacaggtggcaagtaagggaaattaatgcgagttacaggtgcatacatgtataccatgcttgtgatggcacagctatgaatgctggtgtcagtttcaatatggctttcttcgtgtttacattttccataaggaaatttgtcaaaggataattctcaaatttaatttccatgagtaatatcttcatactgtattaaatggagaaagtattgacttttttatatttttaatattgtttttattagaaaaaatcacaaacaaataataggaaatttataagttaaaaatatatcttatttaatcaattgagtttagactcttttatttttttaatatattaatatattttaatttttatntaatatttatatttaattacaactcatt

SEQ ID NO: 47253 - DNA, 143 bp, Glycine max
  unsure (1)..(143): unsure at all n locations
  Clone ID: LIB3107-008-Q1-K1-G3
tgtgtggtcctctaccaccaaagtggtatctgcgctggcttagcctgatcacgagttagtgggaaacancttctctagtggagcacaagcttttaatgcaagcagaaattgagctatattaatgtgaagatgtttagttattt

SEQ ID NO: 47254 - DNA, 505 bp, Glycine max
  Clone ID: LIB3107-008-Q1-K1-G4
cccacgcgtccgatcacatatcctggatcaagtaaagactctgggattccgtcaagctacggatacatccatttcattaggaattgatgaccttttaacaataccttctaaaggatggctagtccaagatgctgaacaacaaagttttattttggaacaacatcatcattatgggaatgtacatgcagtagaaaaattacgccaatccattgagatatggtatgctacaagtgaatattttcgacaagaaatgaatcctaattttaggatgaccgacccctttaatccagtccatataatgtccttttcgggagctagaggaaatgcgtctcaagtacaccaattagtgggtatgagaggattaatgtcggatccacaaggacaaatgattgatttacctattcaaagcaatttgcgcgaagggctttctttaacagaatatataatttcttgctacggagctcgtaaaaggggtgtagatactgctgtacgaacatcagatgct

SEQ ID NO: 47255 - DNA, 233 bp, Glycine max
  Clone ID: LIB3107-008-Q1-K1-G9
cactgtctcaattaattctgctatttgccgtctagagttctgttcgctgaaggcgctctttctcgaacattcttcttaattcttgcaatacctcatgcgtggtgacgaacccctcggagctttgctcaagaaatgcaacttgtgcatcaatttctctggttgaaaccattaattattctctgaatcgagttctatgatagctctctttggaatgtgatcacattgatgaatcc

SEQ ID NO: 47256 - DNA, 110 bp, Glycine max
  Clone ID: LIB3107-008-Q1-K1-H1
ggtttgtccatgtcaagattgttaatgttacttgataaattagtaactaacaccttggtgtcatgcatgggaaacattaatggtaaatcgattaagttttcaacttaaat

SEQ ID NO: 47257 - DNA, 422 bp, Glycine max
  Clone ID: LIB3107-008-Q1-K1-H10
tcgagcatcatcggaggttggtaaatctatgggtggttgtgttatactattgtagtcatgggcttggtaccgcatgccttttattgcaccaagagtcccacgacccgaaacaacgtttccactggctaaaaggttatttacatatagcgaaatgtaaatttttttatttcaatgacttgtattataacattacaatgaatactgattttgtatgttttacatttcagattgagtggtggtagattagaatatagggccacacctcatggtgacttagtcggatataggtctcatatagatcatatggagagccataaggtataatactatcatgatctgcaccttaaatatgtacatacatactaacatgttgccttgttggcatatatttcagttttcttgggtcccatatagaggatttg

SEQ ID NO: 47258 - DNA, 426 bp, Glycine max
  Clone ID: LIB3107-008-Q1-K1-H12
gaaaattctaattaaaaaaaaagcaaaaataatttatatgttcttaaagaacaaaatgtttgttatgcttaatatctttaatttggtctgtatttgtattcactccgtcctttattcaagtagttttttctcggcgaaattgcccgaagcctacgctttcttgaatccaattgtggatattatgccagtaatacccttactcttttttcttttagcttttgtttggcaagctgctgtaagttttcgatgatatctgtaatttgagtaatgtcttaaaaaaaaattaagaatttatcagaaaactaaaattcgaacattttaacaatttaaaagatcaaataagtcttacagtgtgaattatcgattccaatattgaaatttttggatatttacgaaaaaatacggaccatctcatcatctacgttt

SEQ ID NO: 47259 - DNA, 250 bp, Glycine max
  Clone ID: LIB3107-008-Q1-K1-H2
gacaacaaaaagataacattaataacaattaacaaaccctggtctctattttcacttcttttcttttcttctttttaaggatccaccccttctctctttatgctctttcttggggaatgtatgtgtgtggaacaataaccaatcttttcttgctaaagcaacttcctttcatctcttcttgttagctttcaacacaatccatgaccccacaacattagtctctctctttctctttctctctctatatctc

SEQ ID NO: 47260 - DNA, 391 bp, Glycine max
  Clone ID: LIB3107-008-Q1-K1-H6
ggcctcatcgagacctacaagttgaacggccaattcagatggatatcctctcagatgaaccgtgtgaggaacggagagctctaccgtgtcatctatgacacaaggggtgcctttgtgcagcctgcagtttatgaggcctttgggttgactgtggttgaggccatgacttgtgggttgccaacgtttgccacatgcaatggtggtcctgctgagatcattgtgcatggaaaatctggttaccacattgatccttaccatggtgaccatgctgctgagatccttgttgagttctttgagaagagcaaggctgattcatctcactgggacaaaatctcccatggtggactcaagcgtattcatgagaagtacacatggcaaatttactcggaca

SEQ ID NO: 47261 - DNA, 279 bp, Glycine max
  Clone ID: LIB3107-008-Q1-K1-H8
tattgggatggtgcaagagtttgttgcgagccattagctagtttatcgtgaggtgtatatcatatcggttgaactctttgttgcttcaatagtttttttatcaaggtcattccattgagcatgctaccaaattttctttgttcaaacgaaaactgtctttcgtgagcgttcttgttaaaaaaattcacaagtcctaaacttgctgaagaatcacacatcatatcttcctttaaaaccatttctgaaaaatgcgatgaaccaacctaatacttcattaac

SEQ ID NO: 47262 - DNA, 272 bp, Glycine max
  Clone ID: LIB3107-009-Q1-K1-A1
gtgtgcatggttgtgatgtgtgcacacaacactgtgcaaggcattacatgtgggcatggtcacggtaacctaacaccatgcctagggcttctacataatgggggggctgttaccataagatgctgcaaccgcctcaggagtattgggagcaatgctaggaccactgatgatcaccgtcgtgtgtgccaccgattgatgcttgctgctgatgctgttcgtaggagcaacacttacaatggttaagctctccccgggtaatgtgggggctacat

SEQ ID NO: 47263 - DNA, 394 bp, Glycine max
  Clone ID: LIB3107-009-Q1-K1-A12
tatatatatttttaaattatgtttaattcggaaaatatgaatgacagataaaattgtgactaatactttaaaataataatatttcatgttacaattttattatttttattatggtaaattttatgataaatattattttgtgctttaatgttatatgtttataatacatataaataatttttaatataaactattatattaaatatttaacataatagtttataatacaatattagaataataatatttaaattttattataaatttaataataaaatattaatattgtatatgttatctcttaaataattagaattccaataaatattaatttggtaaccgtcatgttgatatgcataattagaatatttaaataattatattagactggttc

SEQ ID NO: 47264 - DNA, 400 bp, Glycine max
  Clone ID: LIB3107-009-Q1-K1-A2
caacagaacggggtgcaattgaaagagagatttgatagcctaaactcaagtaagggttttctctttgagaaaatcgtatcttacaccttttggtgaccactttgagtgagagaagagaaattaagagagatactcaaattagattcaagagagatggccatcaaccatgaaacttgggctttcattttcggtcttctaggcaacgtgatctactttatggtgttactcgctccattaccaactttttaccaaatctacaagaaaaaatctacggatggggttcaatcactaccttatattgttgcactattcagatcaatgctctggatttattacgcactcgtcaaaaaggatgctagcctccttctcattactattaactcctttggatgtgtgatag

SEQ ID NO: 47265 - DNA, 340 bp, Glycine max
  Clone ID: LIB3107-009-Q1-K1-A4
aacaacacaaaagggtgcaatttcaaaaaatatttcttaccctaaactcactgcggcatttgatatttggggaaatcgtatcttacaccttttggtaaccactttgactgacacaatagatattaacaaaaatactcatattataatcataagagaatgccatcaaccatgaaacttcgactttcatttatctgattctaggacaactgatctactttatatattatacttacttcattaccaactttttaccaaatctacaaaaaaaaatctactgaatggaaacaaatactaccttatattgtttcactacttcatgctaatctcatcatttattaca

SEQ ID NO: 47266 - DNA, 423 bp, Glycine max
  Clone ID: LIB3107-009-Q1-K1-A5
gacaacaaaccaaaaaacagagctgggtagcaagactaaaatgggagaaactgcagtgtccttggcaggtcagcaggcgcttccaaaaatattggaagctgtcaaaatgttgagagatctcccaaaagaagttagagacattacagatgaacttgaaagctttcaagatttcatcaatgatgctgataaagtggctgaagctgaagaagatgatggaaggcgtcatagaataaaagaaagggtgatgcggctgagagaagcagcttttcgcatggaagatgtcatcgatgaatataacatctcctgtgaggataagcaacctgatgatcctcgatgtgcagctttactatgtgaggctgttgccttcatcaaaactcaaatccttctccttcaagtgcgtataagattcaggatgttaaatcc

SEQ ID NO: 47267 - DNA, 349 bp, Glycine max
  Clone ID: LIB3107-009-Q1-K1-A6
gacaacaaaccaaaaaacagagctggctagcaagactaaaatggcagaaactgcagtgtccttggcaggtcagcaggcgcttccaaaaatattggaagctgtcaaaatgttgagagatctcccaaaagaagttagagacattacagatgaacttgaaagctttcaagatttcatcaatgatgctgataaagtggctgaagctgaagaagatgatggaaggcgtcatagaataaaagaaagggtgatgcggctgagagaagcagcttttcgcatggaagatgtcatcgatgaatataacatctcctgtgaggataagcaacctgatgatcctcgatgtgcagctttacta

SEQ ID NO: 47268 - DNA, 432 bp, Glycine max
  Clone ID: LIB3107-009-Q1-K1-A7
gacaacaaaccaaaaaacaaaacgggctaacaagactaaaatggcagaaactgcattgtccttgacacgtcagcaggcgcttccaaaaatattgaaagctgtcaaaatgttgagagatctcccaaaagaagttagagacattacagatgaacttgaaagctttcaagatttcatcaatgatgctgataaagtggctgaagctgaagaagatgatggaaggcgtcatataataaaagaaagggtgatgccgctgagagaagcaacttttcgcatggaagatgtcatcgatgaatataacatctcctgtgaggataagcaacctgatgatcctcgatgcgcatctttactatgtgaggctgttgccttcatcaaaactcaaatccttctccttcaaagtgcgtataatattcacgatgttaaatcccttgatcg

SEQ ID NO: 47269 - DNA, 417 bp, Glycine max
  Clone ID: LIB3107-009-Q1-K1-A8
ggtatcaaaatttttgaacctgaaaattgttattttgatagggtttacagcaaatgcagcatagcctgcctcgtcacaaaatactgaacgccgcagctctgtggttgatcgacgcattcttcacttcaatcccacaatgtctataacgcacagcctcaccacttcactctcttcttcttcctctgctttcttagctccctcttccttcaattccagaggacaggtttcgttgcctgtgaagagcgtgagcatttgcaaatgcgttgccacacccgaagctgagaccgcctacaagacaggggtcactcgcaatccaaatatggggaaacttcaagctggctatctctttcctgagattgctagaagaaggtctgcacacttgctgaagtaccctgatgctaaagtaataagccttgg

SEQ ID NO: 47270 - DNA, 247 bp, Glycine max
  Clone ID: LIB3107-009-Q1-K1-A9
gatgctcctattaatacctgtctcatatatattaggccatcttttctatcctgggagacacacttaattattataatctccaactattctctttaaaatccttttctaatataaatattatataccgattgaaatgtaaccacacgcttaaattaagcatattatgaaagcattcttatgcacagctacttattcttccactcttctatcctcttccaatttcttcataatgaaacacgtttataaa

SEQ ID NO: 47271 - DNA, 440 bp, Glycine max
  Clone ID: LIB3107-009-Q1-K1-B1
ggttttcgtgttgggttcaaaggaaactatcaagggagcaaggaggagaagtattttattaataaccacttgagtttcagagtcatgtatcacaaggatcctgaaactggttctgctcgtattgttggatttgaggtcaccccaaacagtataaatcatgaatacaaggagtggaatgacaagaatccacaggtaacaacatgcaataaagataccaagaatttgatgcaaggtagtactgtcccacaagaagttgatacaagcaaggatattgtattcacatatgatgtttccttcacggaaagtgatatcaaatgggcatcacggtgggacacatatcttttaatgaatgatgatcagatccactggttctgcatcattaactctctgatgattggtcttttcctgtctggaatggcggcaatgatcatgatgagaac

SEQ ID NO: 47272 - DNA, 322 bp, Glycine max
  Clone ID: LIB3107-009-Q1-K1-B10
gattactgggacatcccaagcggactgtgctgtgcttatgattgattcgaccactggtggttttgaagctggtatttccaaggatggacagactcgcgaacatgctctggtttaattcacccttggtgtgaaacagatgattgctgctgatacaaaatggatgcttctacacccaagtattccaaggccaggtatgatgaaattgtcaaagaagtctcttcctacttgaagaaagtaggatacaaccctgacaagattccttttgttcctatctctggttctgagggagacaacatgattgagaggtccacataccttgact

SEQ ID NO: 47273 - DNA, 241 bp, Glycine max
  Clone ID: LIB3107-009-Q1-K1-B11
ccgtctcgactcacgcgttcgacccacacatcactacagaagacaacacacgtcgacccatccagaatatattcactgaatagggactctcttaggttcaaccactatgacgcattaccataaacttgcatactgcacatatgatcaaactattaacgtcaaacacttattttcaataacatcgatctaattatattacagataatgagatcactatacactactgcacataatatattct

SEQ ID NO: 47274 - DNA, 415 bp, Glycine max
  Clone ID: LIB3107-009-Q1-K1-B2
gaccacacaccacacacatagtagctattatactgtctagagtaattgcggaatctgctagaattttctaataatggcgaaagacgttgagcaggtcacagagcaaggtgaatactccgcgaaggactaccatgaccctcctccggcaccgttgatcgacccagatgagctcacaaagtggtccttgtacagagccgccatagctgagttcatagcaacactcctttttctttacatcaccgtgttgaccattattggctacaagagacagagtgacaccaaaatccccggtaacaccgaatgtgacggcgttggcattttggacatcgcttgggccttcggtggcatgatcttcatccttgtttactgcactgccggaatctctgggggacacatcaaccctgcggtgacattc

SEQ ID NO: 47275 - DNA, 447 bp, Glycine max
  unsure (1)..(447): unsure at all n locations
  Clone ID: LIB3107-009-Q1-K1-B3
ggttctagtgtgtgattgtttgttgttgtaactggttcttcttcttttggtggtctgtgtttgtgtttgttttttctctcacctgaaaatgtcttgctgcggtggtaactgtggttgcggaagctcctgcaagtgcggcaacggctgcggaggctgcaagatgtacccagacttgagctacactgagtcaaccaccaccgagaccttggtcatgggagtggcacctgttaaggctcaatttgagggcgctgaaatgggtgtgcccgctgagaacgatggctgcaaatgtggaccaaactgctcctgcaacccctgcacttgcaagtgaagtgttgggagagcaagcttcaagcagagatagcccttaattaggaataatgatcaactattaatgtgtagctaanaacttatgtattatgtctgtgatggctntcgtgcactctggtg

SEQ ID NO: 47276 - DNA, 353 bp, Glycine max
  Clone ID: LIB3107-009-Q1-K1-B4
cggccagagagcgtgatcatattatgttctaaactgcctataccggacccatggtctactatgattttatcaataaccactcaaatgtctatcgcattgttcataaggatcttaactccccgaacgccatcaattgcccttctgaggtcacctctatcgccttagatcatctcttcaaggcgacctatgacaagaatcccctagcaacgaccagcaccacactgcccagaactaacatcaacgatatgactgttctacgagaaaagcctaccatcatggacattgtaaacacatacgatgcttgtttcacggaaagtcatatcagatgtgccttacgaatgcacacatatctc

SEQ ID NO: 47277 - DNA, 427 bp, Glycine max
  unsure (1)..(427): unsure at all n locations
  Clone ID: LIB3107-009-Q1-K1-B5
gaagaaaacagaagatgggtgagggcatagttgagagatcgctgaacagcttaggaaagggcttcgacttggcctcagatttcaggctcaagttctgcaaaggcgaagagcgtttggttcttctcaacgaaacagagaaacgagagctcatggtgccaggtttcagacccatcagagatgtctccgttgacatcaaatgcgacaagggcgatcgcacccgctaccaatccgacatcctcaccttcacccaaatgtcagagctcttcaaccagagaagttcaatccctgggagaattccatctgggtatttcaacaccgtgtttggatttgacgagggttcatgggcaactgatgcagctaacacaaagtgtttgggtattgatggctactttatcaaactcttcaatgctcatatngatcggtaccc

SEQ ID NO: 47278 - DNA, 404 bp, Glycine max
  Clone ID: LIB3107-009-Q1-K1-B6
gatgaaaacaaaaggtgcctgtgggcatagctgagagatcggtgtttattttaagaaaggacaacgacttggcctgaaatttgacgctcaaattctccacaggcgactatcattactttcttcttaacaaagcaaacaaactaaatctcatggttccacggttcacacccaccacaaaagtctctggatacatcaaatgctactatttctatcacacccactgccaaaccgacatcctcatcttcacccaaatgtcagatctaattccccacagaccttgaatacatcggagaatgcattatggatattgcaacacctgtttgagcttttaccatgtttcatgaacaatggatgcatcgaacacagcgggtaccactatcaaatgctactgtatctagcttttc

SEQ ID NO: 47279 - DNA, 443 bp, Glycine max
  Clone ID: LIB3107-009-Q1-K1-B7
ttcggtaaaaattgatttatatttgaactttaatgaatttagtgtctgaatgtaaaaaaataatgattttggcctattaatcatagataatttttactgtgaagaggaacaaaaattattagttttttataaattaattagaggactatatatttgacccttcattgtaactatcttaaaaataataataataatttctgattagaatataattagactcatcaatgattttatgcctaataaactcaattttaatttatgttaaagattggtggtggaaaaaaagaaagaacgatgaaaacatgcattactttgatttatttactgggtagataatgacagggccgttgcttgcttctttaacgatgttcacgaagacaacctctgcgaaatggtgtattatgcgtttgggtataaaaagattgaaccatggctgtggaaca

SEQ ID NO: 47280 - DNA, 392 bp, Glycine max
  Clone ID: LIB3107-009-Q1-K1-B8
ctcactaacaatggacttatatacgagctttagtggatttagtgtatgaatggggaaaaataatgatttttgtatattcatgatatataatttaaactgataagaggaacaaaaattattacttctttataaattaattagatgactatatattagacccttcattgtaactatattaaaaataataataataatttttgattacaatataattacactcatcaatgatttcatgcctaataaactcaattttaatttatgttaaagattgtttggggaaaaaaagagagatagattgagaacaagcattacttagatttattcactgggtagataatgacagtgccgaatcttgattctttaacgatgttcccgaagacaacctctgcgaa

SEQ ID NO: 47281 - DNA, 388 bp, Glycine max
  Clone ID: LIB3107-009-Q1-K1-B9
gtcagagtcgaagaaatcagtgcttagttcggtggatattattgggcttggaactggacctgaattggagaagaaacttaagtatgcagctgacatttcttctggaatcattctcggaagggagcttgtgaattctccggctaatgtgctcacgccaggggtattggctgaagaggcatcaaagattgcttcaacatataatgatgtttttactgccaaaatattagatgctgagcagtgtaaagaattgaaaatggggtcctatcttggtgttgctgcagccttagcaaatcctcctcattttatccatctgtgttataaaccaccaactggacctgtcaatgtcaagttagcattagtcggaaaaggtttgacttttgatagtggt

SEQ ID NO: 47282 - DNA, 330 bp, Glycine max
  Clone ID: LIB3107-009-Q1-K1-C10
ctcttgtttcaagacctagatgaactctatagaggcatacattgggatgtttttctctatggtagctgagtcatagatctacatatatcacgccgttgctggagatgttatactccttaacattgtgtgatcaagtacttgctattggtgactctatcactgtgcattttaatttctgtagacttaatttacacagatttttcataacatgattatcctgaaaaatctagagaaccttttttgatatatggatttcaattggctcatcctagactttctatgattgttaaatttgctgatattaatactctatggaatcttcttatgtcc

SEQ ID NO: 47283 - DNA, 416 bp, Glycine max
  Clone ID: LIB3107-009-Q1-K1-C2
ggaagagtgaagagaatggctcccaagggtttaacctttctggctgtgttaatatgcgtttcaacactgtcactgagtccttctgttgcgggggaagggcaaaataatggccttgttatgaacttctacaaggaatcatgccctcaggctgaagacatcatcacagaacaagtcaagcttctctacaagcgccacaagaacactgctttctcctggctcacgaacatcttccatgactgtgctgttcagagttgtgatgcttcactgttgctggactccacaagaaggagcttgtctgagaaggaaacagatagaagctttgggttgagaaatttcaggtacattgagaccatcaaagaagctttggaaagagaatgccctggacgtgtttcatgtgctgatatcctcgatctctc

SEQ ID NO: 47284 - DNA, 396 bp, Glycine max
  unsure (1)..(396): unsure at all n locations
  Clone ID: LIB3107-009-Q1-K1-C3
aagacgacagaagggggagttgaaggggttagggtttaggaagggatggaagcggcagtggtggacgtcggctctaagctcctcaaagcgggctttgcaattcctgaccagactcctgccatgataattcccactcagatgaagcaattactcgatgatggatccgtcgcagataattcactggctgacaatgtcaccgttgatcccgttgtgcgaggatttattagagattgggatgcaattgaggatttgttgcaccatgttttgtataccggcctcggatgggaaattggcaatgaaggacaaatactatttacagatccactgtgtaccccaaaggcgaacaaagaacagtggtgcaactaatgtttgaacattcatatatcangatttatg

SEQ ID NO: 47285 - DNA, 335 bp, Glycine max
  Clone ID: LIB3107-009-Q1-K1-C4
aacacgacagaagtgggagaagacggcattagggtgtagaaaggaatgaatgcctcccagggggacaacctatctaaccgcctcaaagcgggctataccactgctacaccagactttttccttcataataacgactcaaataaagcctttacttgaacatgtacacggaatcaatcactcactctctaaacatcataacagaacacgctatgctcgactacatactccacaataacactgctttctacgatctgatgaaccattttcattattccgctcttcaaaagtaaaatgcttaactagtactaatactctcaacaaatacactttgttcc

SEQ ID NO: 47286 - DNA, 507 bp, Glycine max
  unsure (1)..(507): unsure at all n locations
  Clone ID: LIB3107-009-Q1-K1-C5
accggnccggaggtccacgctcgacccaaccatacaacgggtagtatgaacgacgtaagggattaagtacggaactaaaccaaacatggggacaatgggatataagcggctcaaagcggccttagcaattcctgaccagactcctgccatgataatttccactcacatgaagcaattactcgatgatggatccttctcagataattcactggctgacaatatcaccgatgatcccgctttgcgaggatttattagacattgggatgcaattgaggatttggtgcaccatgttttgaatacctgccatctataacaaaatggcaatgaaggacaaatactatttacacatccactttgcaccccaaaagcgaacaaagaacagttgatgcaactaatgtttgaaacattcaatatatcacgattttatgcctcacaacacgcaatgttatcactctatgctgagggacgtatctcatgctgcacttgtgatattggacatggaaaaat

SEQ ID NO: 47287 - DNA, 351 bp, Glycine max
  Clone ID: LIB3107-009-Q1-K1-C6
gacacttgattagctgaggaggaagagagaaaaaccatggcaataacactcaacaatggcttcaagatgcctatcattggattgggcgtgtggcgcatggaaggaaacgaaatcagggacctaattctcaattccatcaaaattggttatcgccattttgattgtgctgctgactacaaaaacgaagcagaagttggagatgcgcttaaggaggcttttgatagtggccttgtgaagagagaggatctcttcattaccaccaagctttggaattctgatcaaggccacgttcttgaggcgtgtaaagacagtctcaagaagcttcagttaacgtatctagatttatatctt

SEQ ID NO: 47288 - DNA, 366 bp, Glycine max
  Clone ID: LIB3107-009-Q1-K1-C7
gaagggatcaaagcatcacctgtggacatcgggtataatcggctcaaagcgcacttaacaattccttaccaaactccttccatgataattcccactcacataaagcaattacctcaatgatggatcctacgcaaataattcactgactgacaatgtcaccgtttatcccgttgtgcgacgatttattagaaattgggattcaatttacgatttattgcaccatgttttgtatacctgcctcggatgggaaattggcaattaacgacaaatactatttacagatccactttctaccccaaaagccaacaaaaaacagtttgtgcaactaatgtttgaaacattcaatatatcatgattttatgcctc

SEQ ID NO: 47289 - DNA, 398 bp, Glycine max
  Clone ID: LIB3107-009-Q1-K1-C9
cttcagtttcaagacctaaatgagcacaaaagaagcatacatttggaggttattcgagatggtagaagagtcgagatctccatatatgatgttgttgttggtgatgttataccccttaacattggtaatcaggtccctgctgatggagttttgatcactggtcactctcttgcaattgatgaatcaagtatgactggggagagcaagattgtcgaaaaaattctagtgatccttttctgatttctggatgtaaagttgcagatggcagtggaactatgctggtaacagctgttggtattaatactgaatgggggcttctaatggccagcatttcagaagacaatggtgaagaaactcctttgcaggtacgcttaaatggtcttgctaccttaattggt

SEQ ID NO: 47290 - DNA, 435 bp, Glycine max
  unsure (1)..(435): unsure at all n locations
  Clone ID: LIB3107-009-Q1-K1-D1
gaaaacaaaaaccaatattttacttatcagagttgtttccaggagaaatagtagttacgtgtccctttaagcgaaaaaaaatccaaatctgttttgacccaattgatgttcatgtcggctgtgtcctttaacttcgtggaataacaaaaattcggttgcaacaattcatgaattcattaccccaatttgctttctcgcaaaaggaagcgaccctgattggttttgttgcatgtaatggagattttggattatgggcaccccgcataatccaaaaaggtcttacttttcttttgggagaattgtcagagaaagtctcttgtgctaatggagcattaaaatcatttccaggaagtgttgaagcatangaagctctagattcctcagcccctatcttgttattccttttggcaacagatgagatgtaatatatgagtc

SEQ ID NO: 47291 - DNA, 379 bp, Glycine max
  Clone ID: LIB3107-009-Q1-K1-D12
gctccttcttgggccacctttggcctcatgaaacccgccatgcagcatatcgctgtccaggaaggcatgctgtggggttctgttgcggagcgagtcagaggaggctccgattttgacttcgagaatggcagagtcaaaccctgggagggtgagagaatacacgaggttggaatggatgatttggagcttactctaggagttggaaaggcttgatttgttgcaatcccttgcttggatctgctactctactactaccctcagggcaattggttgttatgcttaatttctctatatttttcccttttatgtgtacagtttccttttcatatagcagtggttaggtgttacatttcattacttggaatttgacttcattgta

SEQ ID NO: 47292 - DNA, 444 bp, Glycine max
  Clone ID: LIB3107-009-Q1-K1-D3
ggcacaagtttgttgagatagctagaagcaataagatgaaaatgaaagtgcttgttttgtttgttgctacagttttggtagcatatgaatgccatggctcagactaccagaagttccctctccaaatgaaaactgggtttggtgggcaatacagcaatgaggtggcatgtgccagttggaggcttggcgtggaagcaaacaacgtagtcaagtggcaaactgttcctgcagcttgcggagagtacatagctgactacgttctaggagaccaatatagatcagattccaaaacagttaaccaacaagcttatttctatgctaaatccctcaaactcaccaacaaagatgtctttgtcttggacgttgacgacactactctctctaatctccagtattttgctaaccatggatttggtgtggaaccacacaatacgacggcgttta

SEQ ID NO: 47293 - DNA, 354 bp, Glycine max
  Clone ID: LIB3107-009-Q1-K1-D6
cactacaagagctaactaaaggtgtgagatcttggcacgcattccacgaacacacatgggcatcaatcatgttaagacattaccaggtacacatagaggtcacgataggtactaaagtattcctcgaaacatccacaaactttttccagattaagggaaagaggactaacatttatctcgcttataatacaactatcatcactaattctttaggtcacctatcttacacaagaacactcactcttgaacccttccatgcttagcaattaacgccttactaactaccttacactattcttaaagtgtaacactaaaccttttagctattctttacaactttttcaactactctat

SEQ ID NO: 47294 - DNA, 316 bp, Glycine max
  Clone ID: LIB3107-009-Q1-K1-D7
cgaccccaaagatcactatatactggttacaatgtgaagcattgaacagactgtcattgcaaagagggaagtctattaaattcttcagccacacaagctgaacaaaattcattcaaatattaacttatggtgggaatatttccatgaatgagaacaggttgtccaacatgactctttgcatgaccaagtctatcatgcccaatactattacacctattacatgtatttacatgatcatctctaactaaatttatcgtcattaataatcatcaactatcatacatgttgacgcacacacttatctgtatcttgaatc

SEQ ID NO: 47295 - DNA, 218 bp, Glycine max
  Clone ID: LIB3107-009-Q1-K1-D8
cttcctacaaacattctaattatccgacaaacccatccacttatttgccaccatttcagcatactaacacatttccacctaaaaaccattctaatattcctatatgcgaaattttttcttccttcctattctccccctatttttactttacctaccatttttttttctctctcactcaccatatatggtctttttcacatcttctttacttgtccaat

SEQ ID NO: 47296 - DNA, 397 bp, Glycine max
  Clone ID: LIB3107-009-Q1-K1-E1
attgtcgattgacttttctttgaccttcccatttgggtatcaagcgatcatgagattctacgggactcaatcggacatccgacttaattattattgacggaagaatttactcagagctactattttcaattacgagcggctcgatatattacaggactcaatctgacatgctagttaaaaattatttttatttgattgttctcacagatttccattacaattacgagcgtctcgatatgtgatgatgacataacctagggcctacgaccatgaatcacttgaaggttccatgaccagaggcagacttaaacaagcccaacacgttatagagacaaggctggtcattctgatagctggcatcgatgatgattgaaggcccagaggcagaggcactacc

SEQ ID NO: 47297 - DNA, 416 bp, Glycine max
  Clone ID: LIB3107-009-Q1-K1-E2
gagagtagaggctgagattgacacgtctactaaaccaataaaactcatatcaacaattgtttctttttcttattatctagtaaatttgttctgagtcattacatggtacagtgaagatttatacaaacgaagacttccaagaaacaaagcaaaagatgcagagaagcctttccacttatctgtccaagataggagctcaagatgcaaattgtctttcttaaaacttatcctattgataaccatatgcggcatttttgtaaccctcctatactctccggaagtttacaataccaaccatttatcaagctctggcactcggtggatatggggtggttcagatcctcgttacatgtccaatgtagccactgactgggatgacatactgaaaattacggagaaactgacaggggaagatg

SEQ ID NO: 47298 - DNA, 369 bp, Glycine max
  Clone ID: LIB3107-009-Q1-K1-E3
cataattttttaattttttctaacattaacacttctgctaaactgctaaaactgatatcaacattaataattttaacatataatctaataaatatgaactgaaccattacatcttacataatatattcatacatacgaagacttctaatttacacaactaaacatgcaatgcttcctatccactaatcttatctaaatatgatctcaaaatgcacattcaatttcttacaacttatactatatataaccatatttccccataactacaaccattctatacttttaatatgtatacaataccaaccatttatcaaactctttcactcattaaatattaggtggttcatatccttacctcatatccaatat

SEQ ID NO: 47299 - DNA, 422 bp, Glycine max
  Clone ID: LIB3107-009-Q1-K1-E4
cattttgattgcaaaaagcatggtaatataattgtaatgggtggatatttactgtatatgcgagggatcaatatttagtaaatgttcttaggttccaagtgcaagaaatcgacttacgataattatgtgtgcatcagtaatgttaaaaaatgatttatacatgttagtcttattaaaatactaagggtatgaatgatgaaatctaatcctatatcttcttaattttattcaagtcgttattattgttttcatgatttacatatttccaacacactaaatttcgtatttttcttatttcagttatttacgtaaatccgatatttttactttaagttgtctttagttaatcaaaccaaaaccaatgacattgaattaaatttgtacataactattaaaatgataacctttatccgaatgaatta

SEQ ID NO: 47300 - DNA, 384 bp, Glycine max
  Clone ID: LIB3107-009-Q1-K1-E5
agttatcaaaatatatgatttttaggaacaacaggtgactagaaatgtcaatgtcaaggactatgttgatgtattactctcaaggaaagctactactgttattttcagtgcagctaaagaatttgatttcaacatctctattgagctattttgcagatgaactatttatgaatgatgatgcgagctctcaaagctcaatgaactccttcaagtgtttcaatttcaattgctgtgaccctggcaatgaagatgagcatgatccaactctagtactaggagcagaacacctttactacaccccaaaaggaaacgaaatgtgcataagattttgtcctagagaaaaagtgatggatgctgatttcaccaaacagttatgcaacatga

SEQ ID NO: 47301 - DNA, 377 bp, Glycine max
  Clone ID: LIB3107-009-Q1-K1-E6
ccacgctcgaccgacgcctacctaccgataagacaacacaactttaagagtttatgctcatatttacacctttggtaaacccgttaaactgatatcaacagttttttcattctattattatataataaatttcttctgaatcattacactttacagtgaagatttatacaaacgaagacttcccataaacaaaacaaaacatgcataaactccttttcacttatctctccaacatatgagctctaaatgcaaattgtctttcttaaaacttattctatttataaccatattccgcatttttttaacactcctatactcttcggaagtttacaataccaaccatttatcaaactcttgcactctgaggatattgggtg

SEQ ID NO: 47302 - DNA, 384 bp, Glycine max
  Clone ID: LIB3107-009-Q1-K1-E7
ggtcacgaggaagggcgcacgggctaaccctgacgaaaacgcctttcaattccgataactctcgttgtgccgaaaccctaaccttaaccggattttctcgttggttgggattgaattgacatcggatggaggcgatcgattgcaaaattggttgtatgtaatttagcgttgaacaacgatatctgctgctgtttgctagaagcaagacatctttatacgaagagcttcctgcttctccgacactctacaagaagctccagtgttcctcttcgacaatttgatttcctcctccctctcacgccaaccaactatgacctctctttccccacatggacaacttgattcttgagagacctctccaagaatgtggcaatgatataaatg

SEQ ID NO: 47303 - DNA, 398 bp, Glycine max
  Clone ID: LIB3107-009-Q1-K1-E9
aggcagccacggtggatattccaccaactcagcttgtgggtggaatgatgccacctggtttgggtacaggatatcctacgcgaccaaccttgcccacaatgccaccaatgtataatcctgctgtacctgtgcctccaaatgcttggatggttccacctcgacctcagccatggttttcacagccttcagctgtttcagttcctcctgctgccccatacacacagcagccattatttcctgtgcagaacgtgaggcctacactgccagctactgcttctgcgctccaaactcagattactccttctggattgcctacatctgcacctgtcccaatttcacaacctttatttcctgatgctggaaataaccatacaactactcaaagttcaacattttct

SEQ ID NO: 47304 - DNA, 433 bp, Glycine max
  Clone ID: LIB3107-009-Q1-K1-F1
gtatctgaaacaaagtcaaattctgttcaacaatgcagggcattagcaagttgagatacaggatatctagtctgttgaaaattaaaaggatttaggtagggaaagaaggaaaaaaaaactcacagttataacctgaaattgcatcaatttgatgtcatacgaaacacaaagtactaacctaagtatcacatgagaagaaagataattgctgttatcttagtccatgacattcattatatgtctagacctcaactgaggcaatcttccatgataaatcaaaataatgttattttaaacatttttatctgtatcttctcaatcaaagtgaaacagaaggtacctttcactttttgtctatgttgagttttggaatcattctaggaacatgcagcaatcatagtaaggtttccatcttgagggactctcatgatat

SEQ ID NO: 47305 - DNA, 368 bp, Glycine max
  Clone ID: LIB3107-009-Q1-K1-F2
gatacaaagcattgaattcaaaaactaagttcatgtcttgtgcttcgctttattcctcaaaaccaaacatgtcgaacacatgcggcaactgtgactgcgctgacaagactaactgcaccaagggaaacagctatggtgttatagtagagactgagaagagctacatcgagactgttgacatggatgttccagcagctgagcatgatgggaagtgcaagtgtggcactaactgcacttgcacggactgcacttgtggccattaaggaatatgtatgaaaatgtaattgccatgtgtttggcaatacaaatctccaaataatgtaatcttccgatgaataaatgtgtgttgttatcctacttcagggtct

SEQ ID NO: 47306 - DNA, 451 bp, Glycine max
  Clone ID: LIB3107-009-Q1-K1-F3
catcggaaacgaaatagttgttgagagtagtcaagatgagagacagcaagaagaggaatttacagaaaagtttaatgaaaagttgaagactccacaaaatgataccgaggagactgcagaaacaaacaccaatgatactgagaaacaagggattgaggatgatggaaaattcgatcaagaaaaagcgaaagggattgaagaagcaacaaaagaacagttaccagaggaagaagtcaagacagcattgcccactgctgcctttgtccaaggcgatactgatcaaataccacagcagcaaacactgccggatgatgattcagaagtgattggtattgcgaagaacatcgacactccagaaattgaaattggcggaaggtccacttgtgttgaggaacctgaacaacccgaaaacatggacaacatcagcgaggagactgcagaaacaaacacc

SEQ ID NO: 47307 - DNA, 298 bp, Glycine max
  Clone ID: LIB3107-009-Q1-K1-F4
gatctaaatgcttgtgcttaaaaatggtcaccaggaaccataactggccgccgttatcactcacatccacaccaccgccttgttgaaatttgaacgtaccattacggtttattctgatttctctatccatttttgcaatctccagctcattttaaatcatggttcgctcttgttcttcaatttcattgcaccaccatgcttaaaaatatagtctctttatcatgtcgaggattcaaaattctgacggtgatgtgctctttctagacatcagagagcaaagagttggagcataaacaat

SEQ ID NO: 47308 - DNA, 375 bp, Glycine max
  Clone ID: LIB3107-009-Q1-K1-F5
accacacgtccgaacggcattgaaaacacaatagatgtggcgactaatcaaggggagatacgagcatacggggtaactacattaaaagattaatgaaaagcctaaaactctacataatgataccgtcgagactgcaccaaacaaacaccaatgatactgagaaacaacggcattgtggatgatacaaaaaatcgatcaagaaaaattgaatcggatggaagaaacttcatcttaacttgtaccatgatgaagaattcaagactagattgtccactgcttcctttgatcaaggcgacactcttcaaataccacaccattcaaacactgccctatgatgatttctaaatgattgatattgcgaataacatgcacact

SEQ ID NO: 47309 - DNA, 326 bp, Glycine max
  Clone ID: LIB3107-009-Q1-K1-F6
acccttttcatccaacaaggtggactttatattcaacaagttttctgtcaaacccgggtcagaggaggctcagatcatgaagaatactattagtgagtgtgaagagggtggaatcaaaggagaggaaaagtactgtgccacttcgcttgaatccatggttgatttcagcacttccaagcttggaaataatgttgaggttgtgtccacagaagtggacaaggaaacgggattgcagaaatacaccgtagcaccgggagtgaagaagttatcaggggacaaggcttgtgtgtgccataagcaaaactacccttatgcttgtttttact

SEQ ID NO: 47310 - DNA, 356 bp, Glycine max
  Clone ID: LIB3107-009-Q1-K1-F7
gggaatagcatcggcagcaccacaacactgtgccgtctttctctctttccttcgcagaagccatggcctcatttgcacgtggagccgcatctttaacccgcattggtctttccacttccaagactccccttcaactcatccaccgccgtggcctcgccgatcaccatggccctcccaaagttgcctgctggaaagatccaatgagcccatctaaatggaaggaggagcactttgtgattgtctctttaactggttggggactactcatctatgggggatacaagttggccacaggaggcaagggcaagaaagaagaggaattggcaaaagcataacactgaagtttggaagaatat

SEQ ID NO: 47311 - DNA, 387 bp, Glycine max
  Clone ID: LIB3107-009-Q1-K1-F8
gggaattgcatctaaagcaccacagcgctgtgcgctctttctctctttccttcacacaagccatggcctcattcgcacgtggagccgtatctttaacccgcattggtctttccactttcaagactcctgttgaactcatacaccgacgcggtctctgcgatcaccatggccctaccaaagttgcctgctggaaagatccaatgagcccatctaaatggaaggaggaacactttgtgattgtctctttaactggttggggactactcatatatgggggatacaagttgaccacaggaggcaagggcaagaaagaagaggaattggcaaaaacataacactgaggcttgtagaatattaaaaatacaaagtgttcttgataataatgct

SEQ ID NO: 47312 - DNA, 409 bp, Glycine max
  Clone ID: LIB3107-009-Q1-K1-F9
gaagacgacagaaggggataccagctcatgtgatacagtctgtcaaacatctatgtttctggttttttgtgtggaaaactagttgttctgatcttcctaaaagttgaactggcttttcttcttttcctggagttgttgccaaccaaattattcctctcttcacttactactactttcttctttctttctccacctgaagtagttctccacaacttggaaggtgatcatctccaattttccatcatggctactgagacttctgcatctgatcatgcttctactactgatgagcattatgtgaagaaggaaaaggacgagtccattgcacaaaagatcgcttctttagcaaatgaagatgaagtcaaacatgacaatactccttcatctaagacagaagaagatgtggtga

SEQ ID NO: 47313 - DNA, 425 bp, Glycine max
  unsure (1)..(425): unsure at all n locations
  Clone ID: LIB3107-009-Q1-K1-G1
gcattgaggcaagtagaaaattgacccgcccaagtggggattcaagtcgggtaccgaacgtgcgactataaagggaatgaacgtggacaccccacgctttcttcacggcaacagaagaataatcaaatttctcagatctatccgacgtcgccgcagatccaccaaccgttatggctgccttcagcggtgatgaaacggctccgtttttcggctttcttggagccgcagctgccctcaacttctcctgtactccttccactctcttcaattaccccaatcacttccattagatccgtatttaccgtttcattatttatgtaatccgnacctaaaattgactttgaatccaatttcatgttccactgctcagaaccgtatatgattttaggtgttgaatntggaaccattgatgttggagattcaat

SEQ ID NO: 47314 - DNA, 387 bp, Glycine max
  Clone ID: LIB3107-009-Q1-K1-G10
gtgtgcaaccaaatatagggttgtttagaatggttgcaaagacttgaattccttaataagtccttattgtatgaacagccaaaaatggctagtggtttgccaaaaatatttgtactttggtagtaaaaaagagttgaagagtgttttgttttacctttacatggattccaatgtacttaaacaaagaagcaacaattcatttctattgagtaaacgtgtgtttggatggttgtaaacagaaaaacaaacgcaggccaagactttgagtcacaataatacgagccaataatactctaatgatattaacatgttggacgtacatgaagtaggttccaagagtttccatttataaatgaggtaaggtcatgattaatataattttcttct

SEQ ID NO: 47315 - DNA, 216 bp, Glycine max
  Clone ID: LIB3107-009-Q1-K1-G11
gacacatatccttctttttgaacgacttattgggggaaggactagatttgggggctacaactcttactgaataaagatacatcaacatgactctttaagctttacatctctctgtcgatgcattccccatatctgatttcctagaatctgtattacacacttattctataactcttaactcccttttcaccaaaaaaccttttacaatcatcacac

SEQ ID NO: 47316 - DNA, 104 bp, Glycine max
  Clone ID: LIB3107-009-Q1-K1-G12
gactcttttgacaacacgtcaagaggattcccatgcgctgggaccactaaatggtcctgatgcgaaaaaacgacctaacattaccactgctaaaaaacgaccta

SEQ ID NO: 47317 - DNA, 395 bp, Glycine max
  Clone ID: LIB3107-009-Q1-K1-G3
gggataacaacaacatgcttttgcttgttagcgctagaagccgaaagatgctttacgaatggatttctccttgtgagaatatgggagttgcagctgaacatggttactttctaagaatgaaacgagatgaagagtgggaaacacatgttgcagcaacagacacgtatttggaaacaaattgccgaacctgtaatgaaactttacactgaaacaactgatggatccaccattgaagacaaggagactgcacttgtgtggcgctatgaggatgcacatccagactttggatcgtgccaagctaacgaactccttgatcatcttgagagtgtgcttgcaaatgaacctgtaacagttaagaatgaccagaacaatgtagaggttaaaccacatggtgt

SEQ ID NO: 47318 - DNA, 397 bp, Glycine max
  Clone ID: LIB3107-009-Q1-K1-G5
gattcaaaatacaaataaacgctcgcgctccaagggcagatatgaaagttcaccactccgaccaactccttctttctctatttctactgcttgcatttcacgttcctcatatggctgttggcactgcggagcttacagctctgatggagttgaagtcccctctggatccagacggcaagatccttgggtcatggataagtgatggtgatccatgcaatggcttcttcgaaggggttgcgtgcaacgaccaccgtaaaggggccaacatctacttgcagggaaagggtctttctggttggatatcttcaacactggctgaactcaaatgcttgtcggctttatacttgcactacaacaacctttctggtgagatacccccacacatttccaatctcac

SEQ ID NO: 47319 - DNA, 441 bp, Glycine max
  Clone ID: LIB3107-009-Q1-K1-G6
ggtctctttcatctcacaacgaacgtctcaagtgagaaagtttctgagagtctgactcgttttgtttttgttctctctaatctcttggttcgcgttgcagattaaatgattttgtatctttggttctcttttaggatcaatggattttagagatttagctcacaagttctctcgttgtattgttactgtaagtcttcagtttttcatatccttacttgccttggccttgagtcagatctgtttgcccgaaatttgatgttctttgaatttaagctctttatttctctcaattcaaatatcatgctgtcatagacacatttttagaccatacctattctttaataaactggtaatctatatccaaatgcgtgtaactaactggtaatattaactcaataaattacctattctgtaagataaataaattatgcttatgaaatt

SEQ ID NO: 47320 - DNA, 440 bp, Glycine max
  Clone ID: LIB3107-009-Q1-K1-G8
gttctttgtgactttcaagccacctgggaggtattaagctatgcgtcaagctaatgacgttaaacaagcgcttcctgggaggcaacccagtttataattgttgttaactatgtttttcatgcatttaatcatttggaacttgttgtatgatttgtacatacgagtatatcagcctatcttttgctaagcgcaagcctcacgctaagtgtatctttgttcatgtgctatgccgtgagtctcaagtgcttaccgcccaacccttgcatctgagctaatccaacttcaattcgaactgaattcggctaagcgacagtcaaaccgctaagcgataccttatccttggctaagcgtgactcagtgtcgccaagcgcaattccttacggccataactgacgtcaatgaagctaagtgtcagtcatggcagctaagcgagattcatt

SEQ ID NO: 47321 - DNA, 210 bp, Glycine max
  Clone ID: LIB3107-009-Q1-K1-G9
aggcgtgcgaagacaacacaacggaacgcatgtaacgggagatatccaagtcatgtggggacattcaagtaaagggtgccgtactttgttacggactgatgatgagctaataccttccccgtacttaaattcaacttcggaacctttcacttaaagagttcctagattgcgtattttacagttattccgacacttttatgaaattaacga

SEQ ID NO: 47322 - DNA, 429 bp, Glycine max
  unsure (1)..(429): unsure at all n locations
  Clone ID: LIB3107-009-Q1-K1-H1
agaagttaaaagctactctacttcagtttaacttcaagtgcangtgtgacccttcggtattcatctacactgattccaataacactggtttatatgctactgtatgttgatgacatcattgtcactggaaacaacttctccatcaaatcactagttactaaactcaattctgagttttctcttaaggacctaggaagtcttgactatttcttgggaattgaagtcagatctcagcccaatggtgctcttattctaactcagtccaagtacattagggatttgttgagtaaaacaaagatggacgaagctaatctcatctcttctccaatggttagtggttgcaaattgactaagtcagggtatgaatctttccctgatcccacacactacangtctgttgtgggagccttgcagtattcaactattact

SEQ ID NO: 47323 - DNA, 393 bp, Glycine max
  Clone ID: LIB3107-009-Q1-K1-H10
ggactgacatgttctcgaaaaacgtgcactatgggaactgggtgtaacgatggttgcctaacatgaatacttccccatgctatgaatgtgttgtttagcaaacttgggaccctaaagcaccagattgattatcagttgcctgtttcctttattgagattcttaatgaagaagtatgagactggctgcatcccttctccatgagtaaaccagaaactgctaacggacatgcaggaaaaatgacctctactgagaagccaccaatacaaatttgtgagacctcaaatggtgtcatcaccctcgcatgatctactgaaattagtgtatctacactaatagaaatggctgcttgcttgtaacatgtatcattgagcagaccaactgggatcacagat

SEQ ID NO: 47324 - DNA, 352 bp, Glycine max
  Clone ID: LIB3107-009-Q1-K1-H11
tacatatcaatttcccttagagtgtggaagattcagggtattgttgaggaaacatttgaacatgtccgcttgcccaaaattcattcgaacatcaataatttatacttattgttattcatcaaaatccaagatagatgagaagattggttgtccatacctaacatatgatacaaaaccctatagcatgtgacaaattgattccccccaaactaatttttcacttgctttataatttcatttccgtaatttaaaaaatgattaattcaatttcttaaactatttatatataccgctttttagtaattagatttcccctatggacctgtattttctaaacatatctttttttttt

SEQ ID NO: 47325 - DNA, 378 bp, Glycine max
  Clone ID: LIB3107-009-Q1-K1-H12
gacattggttttgtatcgaaatgcgaccaaatgggttcttctcctgtgatggaggacgagcataaaaagttggattctttgcctgaaattgaattatcagagtcagaggaatattccaaggaattggaggtggctgttagagcagtgcaaatggcgtgttccctctgccagagagtgcaggacactttgatttccaacgctgggacaaatcatcgtcaggttcagtccaaggacgacaattctccggttacagttgcagattggagtgttcaagcaattgtcagctggatgttgtcagaatgtttagggagtcaaaatgtctcaattgttgctgaagaagatgttcaaactctttccaaggctaatgcatccgaactg

SEQ ID NO: 47326 - DNA, 298 bp, Glycine max
  Clone ID: LIB3107-009-Q1-K1-H2
gataccaaatacaatacacaagccaagtgaaagtgagaaaaaataaaattcaatgagcataatgtctgggatcattcacaagattggggagacctcttatgtgggagggcacaagaaggaggaggagcctaagggtgagcaccatgctggagaattcaacggggagcaccatggtgaacacaggaccgagtacaaaggagaccattatggggaacacaaagctggagagtaccatggtgaggacatgccagtacacaaagaggggttcctagacaaagtgaaggacaagatccatggt

SEQ ID NO: 47327 - DNA, 410 bp, Glycine max
  Clone ID: LIB3107-009-Q1-K1-H3
agacgacagaagggggatcacaattgtgtttttctctttctctccttcaaaatcgttgacggggacgcctgtttctttgtgaactcccttagattctctccatcgggtcttcaaaaatgcggatgagctgcaatggatgtcaaggtctcagaaaaggttgcagtgaaaattgcagcataagaccctgtttacaatggatcaaaagcccagaatctgaagccaatgctactgtgtttcttgccaaggtctacggacgcgctggtctaatgaacctggttaacgcaggccccgaacatcttcgtgcagcgatctttacctcggtggtggacgacgcatgcggtcggatattgaacccgatttacgggtctgtcaggttgttatggtccgggagctggcagatatgtcaagcc

SEQ ID NO: 47328 - DNA, 274 bp, Glycine max
  Clone ID: LIB3107-009-Q1-K1-H5
taatgggattctataccacaatgaacccagtgcaaaaattggactatgggcaacaattcacacatatttctaaaacactatcttacaaaccccttcattctacatataccctctctattttgtcacacttattaaatacacttcccccatatacacatcttactgtctaccaaaaccccttagattcaaaccaaaactactttcttgcatatcaacctttaccatcttgctcacataatgaaccctcacaacccaatctccgttcctctcacaa

SEQ ID NO: 47329 - DNA, 288 bp, Glycine max
  Clone ID: LIB3107-009-Q1-K1-H9
cattacatgcgccatttacgtgtgcaagactacagtgatctctgaagtaacggtggaacacgtacgattgtccacaacacgttgaaacatatgtgttatatacttaatgacattcatcaaaactcatgattgatgtgaagataattatagcaaacctaacgtatgatacataaccatactactggagacatattgattgcctacaatgtaattatacacttgcttaatatcttctttgcttaaataatactcgaactatcaattccttaactataatttaaactcctt

SEQ ID NO: 47330 - DNA, 407 bp, Glycine max
  unsure (1)..(407): unsure at all n locations
  Clone ID: LIB3107-010-Q1-K1-A11
cattagataacttgtaattagatctttaatttgggtgcacttgttgtacttagtttctctgaagttttttcaaagaattttgtgggaattaatccttctaaaatatagtttgaatcagcccctgtgtcaaataaggccgttgtatctaaaacaaaatcattaatattaattttaatgtttatgtaaaaattttggattttaatcttgttgattaatcccataaatatatcattttccaaatttttagtttggttntctttactggttttgacactttcagaatcactatcttnctcaagttgagaaaggatgatttggtgaatttcttgttgttgacgaagttctttaacttctctttctagattattaatttctgtttggagatcttggattgttgttggttttgc

SEQ ID NO: 47331 - DNA, 385 bp, Glycine max
  unsure (1)..(385): unsure at all n locations
  Clone ID: LIB3107-010-Q1-K1-A2
ggctgcaaatgtggggctaacgtcaccttcaagccctgcgcttgcaantnatgtgttgcagagctaaagcttcaagcagaaatggcccttacaaataatgataaaaactatatgtagtttcaaaacttcaaaattatgtagtatgtattatgttgcactctggtgttttgtgtctaaacaaacacccttagaataaagtggtcatttcttgcccttgagcaagttcaagtgttttggacttgtgatagatgtgttaaggtcatggctgcctttttttatatatatatatatatataaatgtttggtcaaaaaaaaaaaatatatacattaatatcattcactgaataccattccactgataccaaaaatattacaactacctggc

SEQ ID NO: 47332 - DNA, 439 bp, Glycine max
  unsure (1)..(439): unsure at all n locations
  Clone ID: LIB3107-010-Q1-K1-A3
aagactacagacggggacactcaactatttctgactacgttttgctctgcgcctctgcctctctctcggaaatcggtctcttcnattttagggttttgttttgctgctgcctccgttccccccttctcataaacaacgcgttttctcttctgcttcgtatctattctttgcttttggttttggttgattcaaggccttcacagcattcgttgcggcattttaatcgatttatccaagcaggactgaatgaactaatggagtctaaaggtgggaaaaagaactctagtagtagtagtagtaaatcattgttctacgaagctcccctccgatacagcattgaagacgttataccaaacggtggaatcaagaaattcagatctgctgcttactccaactgcgctcgcaaaccttcctgatatccatccagattgatagttca

SEQ ID NO: 47333 - DNA, 392 bp, Glycine max
  unsure (1)..(392): unsure at all n locations
  Clone ID: LIB3107-010-Q1-K1-A5
gatgtaaaaagtgtgtgatgttaattagtgagtgaggaancattnaaatttagtggaaattaaagtcaagaatcaaactgaccaaggagtattcaggtatgctaattccttcaacttgaaactcctttcattctttgcttggacctgcatttctcatttctggtcgttaatgcatctatttgcattcaattgaagagttcatttcatttcttacccttcttgcatatacatgttaattgattcccatggtgaaagatttacatatatacctcttatacattcttgcatgcccaaattgatatatgtaagcattttatgaattgatatacatatattaaccctcacattcttcttctttttagtctataaccgaatgcctgacacgctcaagt

SEQ ID NO: 47334 - DNA, 429 bp, Glycine max
  Clone ID: LIB3107-010-Q1-K1-A6
agaaggggacatatctccattgagagaattaaaaggttagtgaggggatggggtacccaatactctagattttgctgactttaagacttgtgtggactgcattaagggtaagcaggccaacatgtctaagaaaggtgctaacaggagttcaagcatattagaaataattcatactgatatttgttgtccagatatggatgcacgtggtcagaaatattttatcacctttatagatgattattcacgatatatgaatatttatttgcttcataacaaatacgaagcattggatgccttcaaagttgttaaggctgaagttgagaaccaatgtggaaagcaaataaaaatagtgagattagatagaggtggagaatactatggcaggtatactgagaatggacaagcacctggtccctctgtgaagtttct

SEQ ID NO: 47335 - DNA, 250 bp, Glycine max
  Clone ID: LIB3107-010-Q1-K1-A8
tcacttctctttcaccacattctaaacataacactttttaccccatcatccccaataatttcttcttccccaaccttttcttttattaccatcttctcttctcttttttaacctatttcctccacaaaattattactcaccacctcattcaccacaaccctcttaccatttactttatcaaactcatcttttcccacaactttcatacttaacaccctcttcctcacatcctttacctttaattccccac

SEQ ID NO: 47336 - DNA, 420 bp, Glycine max
  Clone ID: LIB3107-010-Q1-K1-B1
gtctcttaattggtaatatcaatttattgtgtttgggtcattgcagacctgtgattcatcagttcagctgcggaaggccgggaaagtcactgtcagagaatcaaacttgaaaaaattaggtgctacccattttagaaccggcgtagcaaacgagcatttcgaggtatataaacatcttagtatgagtataattgccaaattaaacattgtttattagcaagggtcaatttatagattgaaaatgacatttgctcataactatttatatcaattgttacattcaaaaatataattggcataaataagtgatggcaagacttgtatttatttgtgttttttaactacactttggagggtaattctctagaagcatgatgtatatagtttattgtttggttttaaagtgacaaagtttgcact

SEQ ID NO: 47337 - DNA, 371 bp, Glycine max
  Clone ID: LIB3107-010-Q1-K1-B10
gacctcaacgcagcagaagcagcaatgaagaagaagatgatggcaagcacggccatctccctcgtcttcgccgcgctcttcctcttctcctccgtccactctttctacctccctggtgtcgctcctcgcgatttccaaattggtgaccccctctttgtcaaagtgaacaagttatcatctaccaagactcaacttccatatgactactacttcttgaagtattgcaaacccaaaacgatattgaacaatgcagaaaatttgggagaggttcttagaggtgatcgtattgagaattcagtatatacatttcatatgaggaaggaacagtcatgtactggtgtttgtcatgaaacattggatgctgaatctgc

SEQ ID NO: 47338 - DNA, 254 bp, Glycine max
  Clone ID: LIB3107-010-Q1-K1-B12
agacgacttaagggggagcacatggaatcattattgtttatgacgtgacagatgaagatagcttcaataatgtgaagcaatggctcagtgaaattggccgctatgccagtgataatgttaacaaacttttggttggaaacaagagtgatctgacagcaaatagagttgtctcatatgacacagctaaggaattcgcagatcaaattggcatacctttcatggaaacaagtccaaaaaatgctacaaatgtggaa

SEQ ID NO: 47339 - DNA, 414 bp, Glycine max
  Clone ID: LIB3107-010-Q1-K1-B2
gcctgccaccttcacttttcttcataggactcagaaacaactcagctcatcgttattcactttctctcaccacattctaaacagacagtagtagcaccatcatccccaataatggcatcatccccaacctttgctttgagaaccatctcctctttctctgtgaaacctgttaccaccacaagatcatcactcaccacctcatccaccacaaccctcttaccatttacttcaacaaactcatctctccccagaactctcaaactcaacacctcttccccacatcctcacctttcactaccccacaagtctttcacttgtagaagccaggctgagccatcttctgattcagccaaagtccaagaactgagtgtgtatgagatcaatgagagagatcgtggaagccctgcttatctt

SEQ ID NO: 47340 - DNA, 410 bp, Glycine max
  Clone ID: LIB3107-010-Q1-K1-B3
ggtccacccgctcattagatctaacggggactgatccactttgtggttctaactactgaggaaaaatggcgcgtatgaagatcagagagtatgactcatagaggttgatgaaggagcactttaagagactctctggcaaggagtggccgatcaagtctgcacaaattaccgcatcaactgatttcactgagctacaagagatggaaccctggctttcatcttctaaattggttgataaacctgacatgttatttggaaagcgtggcaaaagtggtttggctgccttgaattcggattttgcacaagttgattcatctgtgaaggagcgtcttggaaaagaggttgagatgagtgcatgcgaaggacccataacaactgtcattgttgaacctttcatgccacacaatgaa

SEQ ID NO: 47341 - DNA, 404 bp, Glycine max
  Clone ID: LIB3107-010-Q1-K1-B4
ggaacggaaaagcactggcgcaggtaccctgaggcttctcttctcttctcttctctgtcgtgagtcatcatggtgagggttagtgtgctgaacgatgctctgaagagcatgtacaatgctgagaaaaggggaaagcgccaagtcatgattaggccatcctccaaagtcattatcaaattccttttggtgatgcaaaagcacggatacatcggagagtttgagtatgttgatgaccacagggctggtaaaatcgtggttgaattgaacggtagactgaacaagtgtggggttattagtccccgttttgatgtgggcgtcaaagagattgaaggttggactgctaggcttctcccctcaagacagattgggtatattgtattgactacctctgctggcatcatgga

SEQ ID NO: 47342 - DNA, 395 bp, Glycine max
  Clone ID: LIB3107-010-Q1-K1-B6
gatctcatcacaatagcaactagctagctagaggcgctctgatctgatgagacaaatttcttggatggatatggacaataacgaggaaataccctcaacaccctcaacaccagacactcctggtgcacctctttttggtggcttcagtaatggcaggaacaataatagcaagaagtccctcctgaagagaagtacgtgcttcaatgtggaagagcggagcctacaagatggagggctaccggcagtgtcatgctcattgccactgccatcgtctacaccagtagtcactcttgcaagaaagattggagcggagttcatatggaccttcatcctcatgttctcaagcactgacgtttacattgtcaaccaaaagacaaatggctcttataccctta

SEQ ID NO: 47343 - DNA, 386 bp, Glycine max
  unsure (1)..(386): unsure at all n locations
  Clone ID: LIB3107-010-Q1-K1-B7
ggattctagaatacattataataataaagaaccttgtaaatactggggaacagtcactattttcntgtttgtagctctttacttgtttgggatttagatgatgacatcgtcatctgttacgcccgtgcaaaatttttatgtgtctcaagagaataacaatgacgtgaaagaacataatgaggctaatgaacacccaactgacccctctaataacaattctcagcaaattgaatataataaacgtgatctttcttaggatacaaccaaaagggatggttgtgtcacccctgctacaaactattacgtgacagaaaaacatgacaagaaatcatacgaaaaatctcaataaaaaccttcttgcgattcacccaaaaaaaattttattt

SEQ ID NO: 47344 - DNA, 448 bp, Glycine max
  Clone ID: LIB3107-010-Q1-K1-B8
gcgtactcccactcgtcctttcttctagattacgacttaagggggaacggaaaatcactagcgcagcgtcccttaggcggctctgctcttctcttctctgtcgtgagtcatcatggtgagggttagtgtgctgaacgatgctctgaagagcatgtacaatgctgataaaaggggaaagcgccaagtcatgattaggccatcctccaaagtcattatcaaattccttttggtgatgcaaaagcacggatacatcggagagtttgagtatgttgatgaccacagggctggtaaaatcgtggttgaattgaacggtagactgaacaagtgtggggttattagtccccgttttgatgtgggcgtcaaagagattgaaagttggactgctaggcttctcccctcaagacagtttgggtatattgtattgactacctctgctggcatcatggat

SEQ ID NO: 47345 - DNA, 370 bp, Glycine max
  unsure (1)..(370): unsure at all n locations
  Clone ID: LIB3107-010-Q1-K1-C1
atactagaatagataataataataagcgaccgtggagttactgttcaacagtgactattgtcgtgtttgtagctctttgcttgtttgggatttggatgatgacatcgtcatctgttacgcccgtgcaaaatgtagatgtgtctcaagagaataacaatgaggtgaaggaacagagtgaggcgaaggaacagccaactgacccctctaataacaattctcagcagtttgaagataatcggggtgatctgtctgaggatgcaaccaaaggggatggtagtgtcacccctgctacaaactatgacgtgacagaaaaacaggacgagaaatcagacgaaaagtctcaagaaaaaccttctgaagatccccnnna

SEQ ID NO: 47346 - DNA, 384 bp, Glycine max
  Clone ID: LIB3107-010-Q1-K1-C12
gatccaattggaatgagaagaaccaaaattatacaactagcatatttaagggtccatttgctaagaagaaaagaaataggtacaaattagccttttttttatttttttgtttttgtaagtttatttttttaattttaacacaaacttatgtaaacaaaaatttaaaaaataaacttggaatgaaaaaaattaaaaaaaaatgctaacttacaaattataaaaatatatttaagcgaaaaaaaaacgatggatgaaagtagggaaagggaatgaaaataactaaatggttatctcaaaattctcaacaagcggcacttttcatacttcacgtcattgattatctcaataaaaccttaattaaatcatgggcacacgttttatttt

SEQ ID NO: 47347 - DNA, 407 bp, Glycine max
  Clone ID: LIB3107-010-Q1-K1-C3
gactcaaacatatgggccccggttccctagtttagctacttacctcaatctttctcatgggaaagtttgccctagccaatatcctcttggtccttctcttgaacttgagcactttgctcaatgttcttgcttgtccctattgcccttacccttctcccaagcctccaaaaaagcctcccgttgtgaaaccaccggttcacaaaccaccaaaaccatgtccaccacccaagtcatctccaaaaccaccccatgtacaccctccctatgttccaaaacctcctcactaccttaaaccaccagttcatccacatccaccccatgtcccaaaacctcatccaaagcctccagtgcatccccatccaccttatgtcccaaaaccaccagttgtgccagttacaccaccatat

SEQ ID NO: 47348 - DNA, 415 bp, Glycine max
  Clone ID: LIB3107-010-Q1-K1-C4
tatgctctatcaacacattaaaaagattatatgatatatctgctgtggaagtaggtcaacatttctattggcaaatagggagtttccaagtacatgcccaagtacttattacttcttgggttgtaattgctctcttattggtttcagccattctaattattcgaaatctgcaaaccattcccgctttcggtcagaatttctttgaatatgttcttgaattcattcgagacgtgagcaaaactcaaattggagaagaatatggtccgtgggttccttttattggaactttgtttctatttatttttgtttctaattggtcgggggctcttttaccttggaaaatcatacaattacctcacggggagttagctgcacccacaaatgatataaatactaccgttgctttagctttact

SEQ ID NO: 47349 - DNA, 376 bp, Glycine max
  unsure (1)..(376): unsure at all n locations
  Clone ID: LIB3107-010-Q1-K1-C5
ttattctataatanatcataatcataaagaaccttttaaattctaagtaacaccnaccattntcctttttttttctcttttcttcctttccatttttattattacatctttatctttctctcccactcaaaatttttatttttctcaaaacaataacaattacctttaataacatacttaatctaattaacccccatcttacccctctttttacaatcctcatcattcttattctaatcccaattatctttctttacattcaaccaaaatccattttaatttcaccccttctacaaactattactttacataaaaacatgaccattaatcataccaaaaatctcaaaaaaaacctttttaattttcccctttttta

SEQ ID NO: 47350 - DNA, 397 bp, Glycine max
  Clone ID: LIB3107-010-Q1-K1-C6
ctatcaacaccttccaaagatgaaaccgttatctcttggggaagaagctcaacatcactatcaccaaatccttattttccaagtacatgcccaaatacttaccacttcttgaactgtaatcactcacttattcccttaagccattcacattattacaaatcatgtaaaccattctctacattcgctcaaaaaacacttgaatatcctctctaattcacaccatacatgaccaaaactcaaatagttgaaaaatatcatccgtgcgttacttctattgaaacttcttttctatttattttacattctaattcgtcgggtgctcttttaccttgtaaaatcatacaattacctaacctttagatagcttcacccacatattatataaatactatccgtt

SEQ ID NO: 47351 - DNA, 398 bp, Glycine max
  Clone ID: LIB3107-010-Q1-K1-C9
ggcagtggagagagagtgttagcaccaaaaatgtggaagttaatcttcgtggtccttgcactaattcctcttctctgcacctccctctcgccagagaaaccctcagatcggcgcatcctcgttttgctcgatgacttcgccatcaaatcctctcactctctcttcttcaactccctcaaatctcgcggcttcgatctccaattccacctcgccgacgaccccaaaattgcgctccagagatacggccagtacctctacgacgccctaattctcttttcccccaccattgaacgttttggaggatccattgacgcggctgcaattttggattttgttgattcgggtcatgatttgatcgttgctgctgatagcaatgcatctgattaatcagggaaata

SEQ ID NO: 47352 - DNA, 360 bp, Glycine max
  Clone ID: LIB3107-010-Q1-K1-D1
tgaattgccgtgtcgaccgactcatacttccactcgtccctacagcttcttttatacttcagtaaccgactcaaacatatgagtccccggttaaatatttaagctagttaccttattctatctcatggtaaatttttccttatccaatatcctattcatccttctttccacacttaacacttttctcaatgttatttcttgtacctattgcccttaccttttttcctatcctccaataacaccattcttttttaatcctcctattaaaaaaccaccaaatcttttatcacctcctctttcatcttcaaaactaccctatatacacctctcttatttttcataacctaataactaccttaa

SEQ ID NO: 47353 - DNA, 200 bp, Glycine max
  Clone ID: LIB3107-010-Q1-K1-D10
ggagtgtgtgagagagcgagcgagcgagcagtttcaaagagaggatttgggattgggaaggcgagggattgcgctgcgtctcttcctcttctctttcgattcatccctcattcataatcttccaatccaacaacctcagcctcacactcacacatacacacatctgaacgcgtatcgtcccttccatggcttcaaagcgc

SEQ ID NO: 47354 - DNA, 349 bp, Glycine max
  Clone ID: LIB3107-010-Q1-K1-D11
tgcatgtttctgaaacatctgaggtcacttctggttccaacattaaaacaaaggagcttgactttaatgaggatggcttcttggaaattaatgatctcattgatactgaacctacattgtcaaatgttgaaaattctgtggagtaccagcattttgaagatgggttaagtgaacttgatttgttccaagatgcacagatgtttcttcgtgacttggggccaattattcatgaaacagattcacatgcatatacaaatgcccttgtcagcagcaatattgaatgtcaaagttaccaattgctgccaaatccagaggatgccaatcaaactgttggtgaattctggatgca

SEQ ID NO: 47355 - DNA, 385 bp, Glycine max
  Clone ID: LIB3107-010-Q1-K1-D12
gttgaaattgagagtgagagtgaaagtgaaaattcagagtctgaaagcccttcttctgattctggtagcggaagtagtagtagcagcagcgacagtagtagtgatagcgaggacaccgacgatgatgataaagatgatgatgtggaagttgaagaaggcgagataagtggttccgatgaagagaaaatggttagttggagcatggctgatgaagatgatgatgaaaatggtgatgtgggaagaggacccatcaggtcaaagaacgagcttcaggtgttcttttatttatttattttgtttttcaattttagatttatatattaaatttttggtaacttgattgtgtagagtttcattgggaattaacagttttttttatatatat

SEQ ID NO: 47356 - DNA, 394 bp, Glycine max
  Clone ID: LIB3107-010-Q1-K1-D4
agggcaggcgaaatcgggggtcagggtccggcagagagaacgcgttcccatcgcacggctagttttggcattaagatctctttcagcccttcttcaaccaaacccaacctgtcttttattttacgaccccaaatctcaaatcaaatcattcactatttcttctttcccttttttccaaaccctaactttatttcccctttcaaacccaacaacaatcctaccccacgcgcatgtgcaatcctcgcaatttctcgaatcttccgtaattgatttcgttgctatcgtgattttttgtctcatcaataggttcattcaatggccaagggcgccgattccgacgagttcgtggtgctttctagggttcgtacgggtctcaagagagagttcgcattcg

SEQ ID NO: 47357 - DNA, 424 bp, Glycine max
  Clone ID: LIB3107-010-Q1-K1-D5
ggtggctgagagcgaacccaaaactagagctacgttcccttcaaaccttccactcttctctccttttccaatcaagggaataatatttcttagagatattccgaaaccatggctcacgccaatcctatgatttttgttgttggaattctaggtaaccttgtctccttctgttgctttctagcaccagtaccaacattctatcgagtttgtaagaagaaaaccacggaaggtttccaatcacttccttacgtggctgcactcttcacttcaatgctttggatattttatgcttacataaagacgggcgaaatacttctcatcaccattaacgcattcggttgtttcatagagacagtttaccttgtcatctatatcacttattgccccaagaaagctaggttctttaccttcaagatgattttct

SEQ ID NO: 47358 - DNA, 396 bp, Glycine max
  Clone ID: LIB3107-010-Q1-K1-D6
ggcaagtcggttggcgttggcacgatgcagagatttggttcgctgcctgaaacctaatggctccgaagcccaaaccggcgccgtcgcagcctgctcctcctcctgccctcgaagatctctttaccacgctcaaccgccacattcaggctttcgcatacgacaatgccgtcaggctcacggatcagattctcgccattgctcccggcgacgaggacgcgctccgatgcaaggtcgtcgcgctgataaaaaatgaccgcgtcgaggacacactctccgccattcggtcctctaagaagcagctcgatgattttcatttcctcaaggcatactgcttatacagacaaaacaagttggatgaagctttggagtctttgaaaagacaagagagcaatgatg

SEQ ID NO: 47359 - DNA, 312 bp, Glycine max
  unsure (1)..(312): unsure at all n locations
  Clone ID: LIB3107-010-Q1-K1-D8
tacataatnctattcaacaactattaaatttttatatacactggaattagttctaaaaatgatttcccctaccacaaccaatantcattaaacaatatttccccaccccattaatactacatattccacaacagcttttacatgctcttattacttcaactatttcatactcctttttattcaaactcaactcttttttcaaataatcccacccaataatcaatcactttttactctatttccttcccacaataccatgttccttacaataactttcactacttctaattcactcaaattctacttaaaccc

SEQ ID NO: 47360 - DNA, 415 bp, Glycine max
  Clone ID: LIB3107-010-Q1-K1-E1
cgcctggatacagcccaacctcacccggatatagcccaacctcgccatcgtatagccctacttcccctagttacaatccacagtcagcaaagtatagtccttcgttagcatattctccaagcagtccgagattgtctccatcaagtccatatagtcccacatcaccgaactatagcccaacgtcgccatcatattccccaacatctccatcttattctccatcaagcccaacatacagtcccagcagcccttataattctggtgtgagcccagactatagcccaagttcgccccaatttagtcccagtacgggttactcaccaagtcaacctggttactcaccatcttcaaccagccagtacactccacaaactagtgacaaggatgatggaggcactcgctgaggtaaactaac

SEQ ID NO: 47361 - DNA, 378 bp, Glycine max
  Clone ID: LIB3107-010-Q1-K1-E10
ggaccttgtcacagcctaaaaaccccctcctctttttcagattcggattaggtaaaatagcctacgcattaacagggaagtgctaaccatgctaagaccgtttacgctgcaaatttaactgattactagtcataaatcctatgcatcctctcttcatgccaaagcagatttgtccacttcttcgagaataagaacaggagattcttgctaaactggggattaacaagtagagctaagactgtagccctgtattgattgcagtctccgaaggtaggtgaatgaggacgcataccacagcacccagaataggtaagttaggaaagttaacatcaaaccaccaggcatagcgtgatgccaatgaagacaagcaaaataatg

SEQ ID NO: 47362 - DNA, 227 bp, Glycine max
  Clone ID: LIB3107-010-Q1-K1-E11
gactggtgccagctatgtaagtgagttttttgcgattgctgctgctatcggttcctttttccgaactttccatcgttttaggaatatcacaccaattcgtgaaatcgaaggattccgacagaatcgtacgaattattgttcattgtttgcctctactgttgtgctccaacttggtaaactagaagtacagatttatttcttcaatgggggatgctgagaatgccctt

SEQ ID NO: 47363 - DNA, 430 bp, Glycine max
  Clone ID: LIB3107-010-Q1-K1-E12
gaagacgacagaagggggttcaaatgtacgagatcttgtagcacttaccaacgaggccctgtcgattagtattatacaaaaaaaatccatcatagacactaatataattagatctgttcttcatagacaaacttgggatttccgatctcaggtaagatcggttcaggatcatgggatccttttctatcagataggaagggctgtttcacaaaatgtacttctaagtaattgctccatagatcctatatctatctatatgaagaagaaatcatgtgacgggggggattcttatttgtacaaatggtacttcgaacttggaacgagtatgaagaaattaacgatacttctttaccttttgagttgttctgccggatcggtcgctcaagacctttggtctctacccggacctgatgaaaaaaatgggatcaca

SEQ ID NO: 47364 - DNA, 417 bp, Glycine max
  Clone ID: LIB3107-010-Q1-K1-E2
gacttcaatccattagccttcttcccaggtttggtcccctctctgtggtgaccaggctctaacataaaacataagcctttgtgaaaaaaaagagaagagaatgctccctccacaacagcagtcacgggttggaggactacaaacctctatatctctagtttcttcagatccccgcctttctcccgaggagcctagatcaaactctgacaatctacgtgaatctcctactgaaagtgccagttctcgagaaacttggcctactgctgatgcaattgctgcaaagaagatggaaaatggaaaagcataaatggattgccctgatcagtcaattattcgctgtgtttctagtgcagacaaaattagtcttcaagacattgcaagagaacgagtggatataatatgtgagaaaaatcatca

SEQ ID NO: 47365 - DNA, 413 bp, Glycine max
  Clone ID: LIB3107-010-Q1-K1-E3
gtacttggaagaggtaaaacaagagcgggacaggtgctcccaggataacagcaacacataaggatcaaatgaatcaagcaaggagttatggtcagaagctaatgctgctgcacaagaatcaggtgcaatgagatttgatcagattaacattctccaatcaaaggcagaaagcttcaagaacaaccaaaccacttccccaacagagatctccaattccaactcactccaatctggtttccatcttgctgacatgcaaagtccaaacaagccaaaaagcacttctgagatgcatcagaattctccaggtagcattctttcagtggacatggaaatgaagcctcatcatcatggagaaacaaataatatcactagagaaggccagaacaacaacacaacaacaaagtttggcattg

SEQ ID NO: 47366 - DNA, 370 bp, Glycine max
  Clone ID: LIB3107-010-Q1-K1-E4
gatagcagcatcatacaaagcattgaattcaaaaacttaagttcattccttgtgttttgctttcttcctcaaaaccaaacatgtcgaacacatgcggcaactgcgactgcgctgacaagactagctgcaccaagggaaacagctatggtgttattgtagagactgagaagagttacatcgagactgttgtcatggatgttccagcagctgagcatgatgggaagtgcaagtgtggcactaactgcacttgcacggactgcacctgtggccattaaggaatatgtatgaaaatgtaattgccatgtgtttggcaatacaaatatccaaataatgtaatcttcgtatgaataaatgtgtgtgctgttatcct

SEQ ID NO: 47367 - DNA, 419 bp, Glycine max
  Clone ID: LIB3107-010-Q1-K1-E5
acatacacaaatgccttaaagatagtcaggttggggaatgatgtccgtgctgttgtcaacagtgatcctgaggtcaacggctacttgaaagttgtgtttgtcccaaattacaatgtgtctgtggcagaggtgctgattccaggaagtgagctttctcagcatattagcactgcaggcatggaagcaagtggcacaagcaacatgaaatttgctttaaatgggtgccttataataggtaccttagatggagccaatgtggaaatcagggaggagattggtgaggataattttttcctttttggtgccacagcagaagatgtccctcgactgaggaaggaaagagagaatggactgttcaaacccgatcctcgatttgaagaggcaaagaagtttattaggagtggggtgtttggaagcta

SEQ ID NO: 47368 - DNA, 418 bp, Glycine max
  Clone ID: LIB3107-010-Q1-K1-E6
tagtcaacaactattaaatttttatagagactgggattaaattttgaaatggttttctctagaaaaagaaataggcattaaaaaataaggccccgccccattaatacgagatatcgttgagagtttttacaggcctggttcgggagactataggatacggctttttatccgaactgaactcttggggaagggaattccacccactcatcaatggcatctactctcttcgcttgcccgtcgttgtgttcctcctcttcttctatattttctacttccgtcaaattctccttaaacccgaataaaatttctcttccgttcgccggaaacaaaaaacctctttcggctccaattcgaaggcggttcaatgtcattgctatggctccccctaaacccggtgggaaggccaagaaaggtgatt

SEQ ID NO: 47369 - DNA, 423 bp, Glycine max
  Clone ID: LIB3107-010-Q1-K1-E7
ggttgcccacatatgtacacaacacggaccacgcgagcactgtgtttctgatcaccacgaacccgagcgagcgacacggtccttagttgaagtgttgaaccacaacccagagttgaagttgtgagtggcaaggggtgttcgaggctgttttcatcttcaattccttcattcagaggtttgcaaccattggagccaatgtctcctgcttcgtctcctttgcaagtgccatcatcaactgctccttttgctggtcttgtcatatgcgttactggtttatctaaagaagcaagaaatcaggtcatggaggctacagagagattaggtggacagtatagccccaatttgcatcctcaatgtacccatttggtggttcagagttttggtggacgcaagtttgagcatgcgctgtagcatggagcaaaa

SEQ ID NO: 47370 - DNA, 323 bp, Glycine max
  Clone ID: LIB3107-010-Q1-K1-E9
ggttctagtgtgtgattgttggttgttgtaactcgttcggcttcttttgttgttctgtgtttgtgtttgttttttctctcacctgaaaatgtcttgctgcggtggtaactgtggttgcggaagctcctgcaagtgcggcaacggctgcggaggctgcaagatgtacccagacttgagctacactgagtcaaccaccaccgagacctttggcattggaattggcacctgttaaggctaattttaagggtcctgaaatgggtgtgcccgctgagaacgatggctgcaaatgtggaccaaactgttcctgcaacccctgcacttgc

SEQ ID NO: 47371 - DNA, 418 bp, Glycine max
  Clone ID: LIB3107-010-Q1-K1-F1
ggtacgtcacaattgtgaagcacagaagaatgaggaattctgagagaagcagtgtaagaaagtacaacaaatctgaacttccacgcctgcggtggacacctgaacttcatcaacactttgttgaagctattcaaagtctaggtggatcacacaaggcaactccaaagcgaattttgcagcagatgcgtgtgaaaggactgaggatcgctcacatcaaaagccatcttcagatgtacagaaacatgaaaggacatgccattgttgcaccagtggatcagttgctggaaggaaaggcaaaagatttcaaaatatgctccaatatttgtccaaccgaaaggaatctcaagcgggaacttcatttgttagactacaaagatgggctttcacaaaccagtgaggaaactgattatgatctaaa

SEQ ID NO: 47372 - DNA, 340 bp, Glycine max
  Clone ID: LIB3107-010-Q1-K1-F11
ggtggggaaaaaagatagaagaggaaaagtcatgaaaagcataagaatctgcaacaaatagtcatggctgcgcttggggaccaatcagaggaacaagccatggctgcccaacctaaacctcagaaccgacccatttctaacatcgtcatcatcgttgctatgcagacggaggcacttcccattgttaacagattccagctcactgaggaccctgacaccccgtttccgcaaggggttccttgggtccgttatcaagggacatacaaagatcttaatataagcttgatttggccgggaaaagatccaactttgggggttgatagtgtaggcacgatatcat

SEQ ID NO: 47373 - DNA, 370 bp, Glycine max
  Clone ID: LIB3107-010-Q1-K1-F12
gaaggtgcaagagtttgttgtgagctataagcgagtttatcgtgaggagaatatgaagttgtttgttttctttgttgctgcagtagttttggtagcatggccatgccatggcgcaggctaccaaaggttccctctccgaatgaaaactggctatggtgagcgttcttcggaggtaaaatgcgcaagttttaggcttgctgtggaagcacacaacatccgagcctttaaaaccattcctgaagagtgcgttgaaccaacaaaggactacattaatggcgaacaatttagatcagactctaaaacagttaaccaacaagctttcttttatgctagtgaacgcgaagtccatcacaacgacatatttatattc

SEQ ID NO: 47374 - DNA, 174 bp, Glycine max
  Clone ID: LIB3107-010-Q1-K1-F2
ctatatatacacagcggtcaaataaatacaactaattcctcttatccctttctcactccttcctaattgtatcttctacgtttcacaccttcctttaccccaaaccattcttcccttgttttaaaaccttccatacacaaccaatcatgtccatactacttctttgtccctatc

SEQ ID NO: 47375 - DNA, 417 bp, Glycine max
  Clone ID: LIB3107-010-Q1-K1-F3
ggtttggccgatgttcctttcttgtgagccgaggagaacgaagagtcgttcctgagaagctcgtcgctatgggttctctccctgtgcccgcatttccatccaaacactgccttgacgagagcagccacattgacgaagccaccctctcggcgctattcaagtcgcagcagagccacctgaacttcttcttcgaccacatcgaccactcccaaaccctagccttcacgcgcgcgctcctcaatgccgtcggcaccgtcttcttcaccgtcgtcagaaaatccggcttcgtcgcgcacaagatctcgcagacgctcgtctctctgggcgttcgctccgcgttcctctcgccggtggacgctctccacggcgacattagaatcctcaccaatcgcgatgtgctcatcctcctcagcaagg

SEQ ID NO: 47376 - DNA, 368 bp, Glycine max
  Clone ID: LIB3107-010-Q1-K1-F4
tgggttgtcttatgtatatcctcgtctgccgttcttactttattataaccacttctaatatccattttaaaaaaataacatgccccatttaattcattcaacaatacctatattagtgacataagaaacctatttttgatggaaaacgcattaactctcctgaaatctgtgcaacacctccaaaagtcattcttctttcttacgaacacctactaataagcataataactactccttctccttatatatcctgttaccaataaatcctgcacttgattatcaatctcttcttttgggacattaagatatctataggctttccatcagacagatgtgtcattgattatatcgatcttatcatcacattc

SEQ ID NO: 47377 - DNA, 420 bp, Glycine max
  unsure (1)..(420): unsure at all n locations
  Clone ID: LIB3107-010-Q1-K1-F5
ggtctccgtttgaaacagtttcagtttctgtctgtntcttcggctgctacgttctctgaacttccatcgacgcgccggcaaacgccttctgcacgcttcgtgtaacagcagaacccaagagaaaatgacaaatgagaatacagcaggcattgagatagattatgaatatgaagattgcaataattctaagcgcccaaaaatgacttctaaagtatgggaagaaatgcagcgtattcataccactgaaggtagtaaagttctgtgcagacactgcggaaaactgttgcaagataactgtggaacttctcatttaaagcgtcatttgatcatatgccctaagcgtcctaaaccaatggatattattactcaagattcaatgcctacggtgtgttttagaggtcctagcagtgtcaaagattc

SEQ ID NO: 47378 - DNA, 417 bp, Glycine max
  Clone ID: LIB3107-010-Q1-K1-F6
gaaagtcaataaaatcggcaaaccctagtattggtttcttctctatagatgcacagagatcaaagagagagaaagagattcctttttatccctttctcgctccttcctagttgtttcgtcgacgttgcagagcttgcttgaccccaaacccttcttcctttgttttctttccttttttccacaaccaatcaggtccatgctacttctttgtctgtatcttggaagtgagagtaaggctaggattatttttacttcgaaaggagaagcgttttagaagatagttatgcctaccgatggttaattcagtgccagatttttttagcctacttcaatatattttgttgaggatttgctattgaatcgtaataactgaagtttaaaagaagggttttgacttgtgagctttttagcggactg

SEQ ID NO: 47379 - DNA, 415 bp, Glycine max
  Clone ID: LIB3107-010-Q1-K1-F7
gaagttggaggatagtaaagaagagaagggtctggaaaggaatccccacacaacgaaaccaacgcttcccacactccaatttcctattctcaatctctgtgatttcactccaaatttcaccctcagcttgaagataacgtgtgagatggatttggtgaaaatgatgatcatatagtgccccatgccagtgacaaacataataatcagtttgtaatacaagaagatagctgtaagaaatcacgtcatgaattacatggtatcagaaatagtgattatgtgaatagctatggtactcagggtaaagaggaattgtacttagaaaatatgacccaaaaagaaagaatgcaggaaaaggattcatggcctcacacacctgaagatgtgttttcttcatgtggtagtgactcaagcaaag

SEQ ID NO: 47380 - DNA, 388 bp, Glycine max
  unsure (1)..(388): unsure at all n locations
  Clone ID: LIB3107-010-Q1-K1-G10
gaacccaggttgtctgttacggattagcatcagagcaagttaacaaaatttgggtgcgtcctggattgacccttttgccccctctccctcaccctccactaactcctcctttttggtttttataaagcacattcccaatagaggagggtccctacacaacacaacccttcaatgacgtccatggccactttcttcgcccaaaccttcttccnctcccactctctctccaaaaccttcgatacccatttcgcccctgccccgaaagtcaacgtctttgtgaacttcagggcgaggaggcacgttggggtgcgagtttcgaacgcgctgatcgaaccagatggagggaagctcgtggagcttgtggtgacggattttgagagggatttga

SEQ ID NO: 47381 - DNA, 242 bp, Glycine max
  Clone ID: LIB3107-010-Q1-K1-G11
ggcacaagtgagtttgttgatcgagataactagagacagtgtgatgaaaatgaaggtccttgttttcttcgttgctacaattttggtagcatggcaatgccatgcgtacgatatgttccctctccgaatgaacactggctatggtgcccgtactccggaggtgaaatgcgcaagtcggaggcttgctgtggaagcacacaacatctttggttttgagaccattcctgaagagtgcgttgaag

SEQ ID NO: 47382 - DNA, 418 bp, Glycine max
  Clone ID: LIB3107-010-Q1-K1-G12
gaaacaaaacctcaaaatctatatattaaattaatggcagaaacttgatatattattacgcaaccaaactttcacacctttgaattttagttgtcaacaccctctttttaaagctttgaagcatctctgtcttctagttagcttccaataacaaatggtacttttgatagagaaacttacaaaacattacttcaagctggagaatcaccaccatgccatcacacaccttcaaccagaggagttatcatcctcactgcttgcatttaaatcccatatgtccaaatcaattgaccaactagcatcggatttgaaacccggatcagagacccccctgtccttaacatggtttggaaagtgtttcggcctcttgccctcatcaacaaggcttttggaaaagcttgtgtggatattgactacc

SEQ ID NO: 47383 - DNA, 390 bp, Glycine max
  Clone ID: LIB3107-010-Q1-K1-G2
gcagcatgggtgttgttggagtgccagaggggctcccattagcagttactttaacgctggcctactcgatgagaaaaatgatggcagataaagccttggtaaggaggctttctgcctgcgagaccatgggctctgacacaaccatatgcagtgataagactggtacattgactatgaatcagatgactgtggttgatgcttacgcggggggtaagaaaattgatcctcctcacaagttggagtcctatcctatgcttcgctctctgctcattgaaggtgttgcacagaacactaatggcattgtttatgcacctgaaggtgccaatgatgtcgaggtttctggatcaccaacagaaatggcaattttacaatggggaatacagattggga

SEQ ID NO: 47384 - DNA, 394 bp, Glycine max
  unsure (1)..(394): unsure at all n locations
  Clone ID: LIB3107-010-Q1-K1-G3
attganggaccgaccgacgcatacgtccactcatcctcccacacgtccttccacttttctattccaataatacaacagggggtgtgagctcattacaagcagggtcacacgtattcaccacataaatttacgccaaataaaattccctacacggatgacttatgaccaactttcatgataaacaatttcttttttctaatcaataatcattaatattattgtcgacaccccactaactcacatactcaataccaacacctatatccatcttacctcttctactacaaacgacctttataagcctaacttcaaacctatcacttttgatacgactatccaaaacaataagtatctcatcccaaatcaccatgactatctcatttactatcttatg

SEQ ID NO: 47385 - DNA, 409 bp, Glycine max
  unsure (1)..(409): unsure at all n locations
  Clone ID: LIB3107-010-Q1-K1-G5
cctataccaataattaaggagcgtntgggaactgatggcgaacagttcctcaagtatccaccacctaaagtgatgcaagtcgacaagtctgcatggatgactgatgaagaatttgcaagagaaacaattgctggtttgaatccaaatgtcatcaagattattgaggagttcccactaagtagcaagctagatactcaagcctatggtgatcatacctgtataataacaaaagagcatttggagcctaacttatgtggtctcactgttgagcaggctatccaaaacaagaagttgttcatcttagatcaccatgactatctcattccatatttgaggaaaataaatgcaaataccacaaagacttatgctacaagaaccatatttttcttgaaaaatgatggaactttga

SEQ ID NO: 47386 - DNA, 389 bp, Glycine max
  Clone ID: LIB3107-010-Q1-K1-G6
ggcagttcaattccaatatattccattctctctgtggagttccctacctctcccttgaagatgcagatcttcgtcgagaccctcaccggcaagaccatcacccttgaggtggaaagctctgacaccatcgacaacgtcaaggccaagatccaggacaaggaaggaatccccccggaccagcaacgtctcattttcgccggaaagcaacttgaggacggccgtacccttgctgactacaacattcagaaggagagtactcttcacctcgtcctccgtctccgtggtggcatgcagatcttcgttaagacactcaccggcaagaccataaccctagaggttgaaagctccgacaccatcgataacgtcaaggccaagatccaggacaagga

SEQ ID NO: 47387 - DNA, 415 bp, Glycine max
  Clone ID: LIB3107-010-Q1-K1-G7
gttgcaaatatacttgccatggctgagactgttcgggaggttctacctcatattccagatgacatgatattccaggacttgcaaaggacaaattcagtcacggttactgtgaataatctcctccaaatgtgatgaatcaaggtattattttactcctcaaggaatatgaagaagggcatagagttactactacaattgtccttggaaaggcataggctttcattttatgtatatagagtcagcacattcaatctgttgtactcaagaaagatagcagaaaatataggcattttctttctttctttgtcttctccttgaatctgtagtaaaataaatgtggggtgtgttcccaagttgggtaagttcctatctgtcatggttccatttcaattgtaattttgaatttgctgctacc

SEQ ID NO: 47388 - DNA, 417 bp, Glycine max
  Clone ID: LIB3107-010-Q1-K1-G9
tggtccacatttaattcactcactctcatgtaaagtatctttatctcatatgatatgtaatcatatatattatcattaatttcttaattcttatctttatgacaccaataaatatttcaccttaaaattatattttttgtctcaccttttattttaaataatgaagattcattaaagaaaagatgttatgactcataatcttaaatgctcttaaagaaacctactagtattaattattaaagaaaaaatggatattaaatgaagcttgactatgtttggttataaattaataaaatttggtcctttatgtaacactactttcgttttataaattaaaaaaacaaacaccagtttatcaaaactaataaaaaaaagtagttacagttagtttattttaataatattataaatttaatt

SEQ ID NO: 47389 - DNA, 442 bp, Glycine max
  Clone ID: LIB3107-010-Q1-K1-H1
cccaaaccaaaacttttgtgacttacacacaaacacgcactcccttataactatgtctgggtccaacccatgtgccagttatcatctccctccactctgtgtgaaaacaatgagggccatccaaacatgcccccaaccaaaattcatgaggagcctgacatgttcgtccttttgatccccaaacccccaacaacaacaacattcttcgaacaacgccaaaataaccaaaagccccataaaacccatttttccctcgccctcgacgaagtcaaatgcgtagccaacatagcattacccatggtgctaaccgggttactactctattctcgctccgtaatctccatgctcttcctcggtcgcgtcggtgagctcgccttagctggtggctctctcgccattggattcgccaacatcacgggctattctattctctcgggcctcg

SEQ ID NO: 47390 - DNA, 277 bp, Glycine max
  Clone ID: LIB3107-010-Q1-K1-H12
gagaatgtgatggaagcatgtgcaagaacacctggcataacaagatgcgtgttcacatcatcactatcagcttgtgtatggcaagacaatgcacaatcagaactttcctcagttattagtcatgggtcttggagcactgaatcattctgcacagaaaagaagctttggtatgctttaggcaagatgagagcagagaaggctgcttggagaatatctgatgaaaggggtttgaagctcactactatttgtccagctctaattacaggtcctgaatttt

SEQ ID NO: 47391 - DNA, 458 bp, Glycine max
  unsure (1)..(458): unsure at all n locations
  Clone ID: LIB3107-010-Q1-K1-H3
gggcgacagacgcgtgctcccaaaccaaaacttttgtgacttacacacaaacacgcactcccttataactatgtctgtcttcaatccaggggccagttatcatctccctccactctntgtgaaaacaattaaggccatccaaacatgcccccaaccaaaattcatgaggagcctgacatgttcgtccttttgatccccaaacccccaacaacaacaacattcttctaacaaggccaaaataaccaaaagccccataaaacccatttttccctcgccctcgacgaaatcaaatgcgtagccaacatagcattacccatggtgctaaccgggttactactctattctcgctccgtaatctccatgctcttcctcggtcgcgtcggtgagctcgccttatctggtggctctctcgccattggattcgccaacatcacgggctattctattctctcgggcct

SEQ ID NO: 47392 - DNA, 315 bp, Glycine max
  Clone ID: LIB3107-010-Q1-K1-H4
ggagccagctgaaggcatacttttgagggttgaaagtctgacttgagaaggaaatgaaattcacaatataagcatcacacaaagtgcccttactgtcactagtgaagaagctgggacaggggaacaagccaagaagatagtccttatgttcttggagagattgtctcatccattgggccttccgaaatcaaacaaacagcagagaaacacagacatgattgctcgtatattgccttacctaacctatggtgaacctgctacaatggatgcgcttgcccatcattttactccttacttgcaagattggagtacatt

SEQ ID NO: 47393 - DNA, 430 bp, Glycine max
  Clone ID: LIB3107-010-Q1-K1-H5
agaagggggatctggggtttgcatatcttccttgcaaatctgtgggctactttggcttggctttctgaattttggtttttcaacgctgagagctgaacaagaagatggggggtggaaatcaagaggcagtcaagcagctgcagaccctgatggaaaatgtggatgatgagcagctgaagaatacattccagattatgcaccacggttatcaaacggaaacgttaatacggtttctcaaagctagggactggagtgttgccaaagcccataaaatgttaattgattgttcgaactggagggtggaaaatgagattgacaatgttttaaggaagcctatccctactgatttgtacaaagccatactggattctgaacttataggaatgtctgggtactcaaaggaggatctacctgtcattgtctgtggtgt

SEQ ID NO: 47394 - DNA, 372 bp, Glycine max
  Clone ID: LIB3107-010-Q1-K1-H6
gatagctttttcagaggaacaatggcggtcgggggttcgacgtgcttcttcttcgtgtttgctctttctctccttcttccttttgagatctccgctgaggaatcatcggcgaaagagttcgtactcacattggatcactctaactttcacgacactgtcagcaagcacgatttcatcgtcgtcgagttctacgctccatggtgtggccactgtaacaagcttgctcccgagtatgagaaagctgcttctatcttgagtagtcatgatcctccggctgtttcggctaaaattgatgccaatgaggagatgaacaaagaccttgcatctcaatatgatgttaggggatacccaacaattaagattctgagaaat

SEQ ID NO: 47395 - DNA, 346 bp, Glycine max
  unsure (1)..(346): unsure at all n locations
  Clone ID: LIB3107-011-Q1-K1-A1
ggggatggctggccgctgaaccggaccggttcggcttggagagatcttgttgggctcggaaacacgcatttgcggcggtgatgagagggagctgctgctgctggaaccgtcggacagagcagcggttccgcctcctcgcgatctccaccgttaaatcactcaagatcaagcttctcctcttttgctgcgtcgccttcacgcttctcgccttttccaccaacgcttcttccttcgtactatggatcaacaaccaaacgccgncgtcttcgncaactagctttcccgattccgggttctatttctttctctgtctcttttatacttcattcaactacttaatatgtac

SEQ ID NO: 47396 - DNA, 435 bp, Glycine max
  Clone ID: LIB3107-011-Q1-K1-A10
gctcttgccatggagacccctcagcagaccgacgatttctcatcgtacctgcactcgtatcaggtcgagtatatgtggttgatgtgaaaacaaatccaagggctccatctttgcacaaagttgtcgagcctgccgatatcatacagaagactggattagcttatccacacacatctcactgccttgcttctggtgatataatgatctcgtgtcttggagataaagatggaaatgctgcaggaaatggatttcttcttcttgattctgagtttaatgtgaagggaaggtgggagaaaccgggtcacagcccactatttgggtatgacttttggtaccaaccacgtcacaataccatgattagcacatcatggggtgctcctagtgcttttacaaaaggttttaacttacagcatctctctgatggattatacggga

SEQ ID NO: 47397 - DNA, 365 bp, Glycine max
  Clone ID: LIB3107-011-Q1-K1-A11
accactcgtacatgacgatgcaagcagaccacgcaatggaagaacatgaatggaataacggaaaatatgcgaacacaggattctgtataccaggatgtctagaatgaaccgaggaatgtggtcgtagcatgcgaatttgacaccagtactgtgcacttcataaagaatgcagatcacgaagagttgcgatagctgcgttctggtacatctgggactgggtaccatggaaaatggacaggatcaaatgatgcatttaaaatgaataaagaaatgctgcttcgctggtcgatcttgagaacaagaaatattgaccatagagttaatggcgggaagcatgacatactttccaagctgaaccatccaaa

SEQ ID NO: 47398 - DNA, 407 bp, Glycine max
  Clone ID: LIB3107-011-Q1-K1-A12
gacaacaaaccaaaaaacagagctagctagcaagactaaaatggcagaaactgcagtgtccttggcaggtcagcaggcgcttccaaaaatattggaagctgtcaaaatgttgagagatctcccaaaagaagttagagacattacagatgaacttgaaagctttcaagatttcatcaatgatgctgataaagtggctgaagctgaagaagatgatggaaggcgtcatagaataaaagaaagggtgatgcggctgagagaagcagcttttcgcatggaagatgtcatcgatgaatataacatctcctgtgaggataagcaacctgatgatcctcgatgtgcagctttactatgtgaggctgttgccttcatcaaaactcaaatccttctccttcaaagtgcgtataaga

SEQ ID NO: 47399 - DNA, 135 bp, Glycine max
  Clone ID: LIB3107-011-Q1-K1-A4
gatgcacgtattaatccctgtctcatatatatcaagccttctgtgctatcctgagagacacacttaattattatgatctcttactcttgtctttgaaatccttttctaattcaaatattatataacgattgaaat

SEQ ID NO: 47400 - DNA, 382 bp, Glycine max
  Clone ID: LIB3107-011-Q1-K1-A5
gtatagcatgatccaatgtatataaactgtaaagagtctttattttttctctggctgtgctacaatattgtcacgtactgaccattgtgatgaacatttaagtttaaaacttacactaattagggttgggatattctttgtagtgctatgttagtcaattggtttttatatatttagattaaccactgttaagcgatatacttgctcaatcataattaatcctacatactactactagctaggttgtattaaccaaggtaatttgcatatgcaacttgatctggttttctttctttgttgacccagtaattaaatgttcttatatatggtaggttgaatatggtattgccactgatatatataaatggtatgagtcttggca

SEQ ID NO: 47401 - DNA, 384 bp, Glycine max
  Clone ID: LIB3107-011-Q1-K1-A6
gactatccatcactggttaccaacgtttacactctcaacctctcaacaaaagacgcattttttttttttttggtttggaagagagaagaatggagagaaaggttctgatattgtgctctgttgtggccttcttggggctgttgtcggctgcaactagcttcggtgcagaagcgacaaggattaaggtttctcaagttcattttgttacaccaaaccagtgcacgtatcctcgtagtccagctctgcctcttggtttaattgctgcagtggctcttgtgctatctcagataatcataaatgttggaactgggtgtgtttgctgcagaaaaaatttgcaaatccctgattccaattggaaggtggcactggcctgctttggtttat

SEQ ID NO: 47402 - DNA, 414 bp, Glycine max
  unsure (1)..(414): unsure at all n locations
  Clone ID: LIB3107-011-Q1-K1-A7
gaaggcacagttgcaaactacactttggataactacaagtctggctacattcatcattgtcttattgaaggccttgagtataagacaaaatactactatagaattggaagtggtgattctgctcgagaacttttggttcgaaacacctcctaaagttgggccagatactccctacanatttgggatcattggtgatttggggcagacgtttaattctctttcgacccttgagcattatttggagagtggaggagaggctgtgttatatgttggagatctttcttaatctgatgaacatgactacaaagatatgggtttacggtgggatacatggggccgatttgctgaaaggagtgcagcatatcagccatggatgtggaatgtgggaaaccacgaagtagaggttttgcctga

SEQ ID NO: 47403 - DNA, 398 bp, Glycine max
  Clone ID: LIB3107-011-Q1-K1-A8
gattgcctcaattctcatttttcagttgagttcagataccataaccataccataccataccagaaaattaaactgaagtgagagagagatgacagtactgtctccttctctttctcggcctaagttgcaatcttcctttctttgttgccctctcaaatattctaagcctacaaatagaaatattcaaccaaaacccacttcttatccacgcattagagctttggaccttgatcaaaacacggtagtggctataagtgtaggtgttgttagtgtggctgttgggattggcattccagtgttctatgaaacccaaattgataatgctgtgaagtgtttttgactccacactataacatttattttatttattctaatctaatattggttttggcaattct

SEQ ID NO: 47404 - DNA, 433 bp, Glycine max
  Clone ID: LIB3107-011-Q1-K1-A9
ggttctagtgtatgtgattgttgtgactcgttcgtcttcgtcgttatcttcgtcttttgttgtttgtgtgtttgttttttctctcacctgaaaatgtcttgctgcggtggtaactgtggttgcggaagcgcctgcaagtgcggcaacggctgcggaggctgcaagatgtacccagacttgagctacaccgagtcaaccaccaccgagaccttggtcatgggagtggcaccagttaaggctcaattcgagagtgctgaaatgggtgttcccgctgagaacgatggctgcaaatgtggagctaactgcacctgcaacccctgcacttgcaagtgaagtgttggagagctaaagcttcaagcagaaatggcccttagaaataatgatgaaaactatatgtagtttcaaaacttcaaaattatgtagtatgtattat

SEQ ID NO: 47405 - DNA, 317 bp, Glycine max
  Clone ID: LIB3107-011-Q1-K1-B1
ggcacaagtgagtttgttgatcgagataactagagacagtgtgatgaaaatgaaggtccttgttttcttcgttgctacaattttggtagcatggcaatgccatgcgtacgatatgttccctctccgaatgaacactggctatggtgcccgtactccggaggtgaaatgcgcaagttggaagcttgctgtggaagcacacaacatctttggctttgagaccattcctgaagagtgcgttgaagcaacaaaggaatacatccatggcgaacaatatagatcagactccaaaacagttaaccaacaagcttacttttatg

SEQ ID NO: 47406 - DNA, 363 bp, Glycine max
  Clone ID: LIB3107-011-Q1-K1-B10
gcaagggttatgtgggatcagaagactgttcatgcaatgcgatttggatgcgtttaattccgtacccaacaagatgcacaacgctgtatacatgatttgactgatctgtggcttggacgtagacagatccgttggcactcgacgacacacggtgctgttggctatgaacagaagcagagactaaatgcaaaaagtgtggtgcaactcacgaaggtctcatctagagatggtaaacacacatgtcacatggactgctctgagaacaattctcattatactactggttatgtgggttaccttgctacataggtaactaaactcgatctccgatcccagttgcatgctcttggcgctaggactgat

SEQ ID NO: 47407 - DNA, 424 bp, Glycine max
  Clone ID: LIB3107-011-Q1-K1-B12
gacacatttttcatgaccgccgtgataacacactaacaccaccacttcatcaactttacttgacaacaatattgtacaactcaaaatctagtgtcatactatctttcttctacttgaaatggctctacaggctgcttctctagttcctgcttctttctcggttcttaaagagggaaagagtggtgtgactctcaaggactccaccttgttcgaacattcattctcagaacctatcaaagctaacttcaactcttctgcattgaagcgcaagagggaattcgaacataagctctgtgctgagagggccgaaacagtggctacagtctgtccatcaattaccaagtctacaccataagggaagaaaacattgaggaagggcagtgttgtgataactgaggcttcatctggactaggcccggacact

SEQ ID NO: 47408 - DNA, 126 bp, Glycine max
  Clone ID: LIB3107-011-Q1-K1-B2
ggctacccgatgacaatttaccgctgaaggtttccaatgtcacattgggtcacttgggtacccttgctagaatacgactgatgcttactaccatgcaaacatacaaccacggctatactcttacat

SEQ ID NO: 47409 - DNA, 373 bp, Glycine max
  Clone ID: LIB3107-011-Q1-K1-B3
gatggaattttgctacgagaagttcagaatgatattttggtgaagcgctattctgtcttaattcttgatgaggctcatgagaggagcttgaacacagacattctgattgggatgctctcacgtgtaattaaaacccgccaaatgatttattatgaacagaagaagatgatactttctggggaaagagtaagtcctgaaaaaatgatttttccattaaaacttgtgcttatgagtgccaccttgcgagtacaagacttcacttctggaaagttattccatactacttcaccagtgatagaagttcctacaaggcaatttccagtaacagcgtattttgcaaagaaaacagagaaaacagattacattggagaag

SEQ ID NO: 47410 - DNA, 308 bp, Glycine max
  Clone ID: LIB3107-011-Q1-K1-B4
gacgcacacgcatacgcacgtgtgagagacgacttcagtacgtgatagtgcatgatgctacaccgtggcagagcgggtctgtctaaattcttgattagactcattagcacttcttcaacacacacattctaaaagggatgctctcacttctaactaaaacccatcaaatgatacattatcaacacaacaggatgatcctttctagtgaaagagctagccctgttaaaatgctcattacactcctactttgactcatgaatgccaccttgcgagtacactacttcacttttccaaagttattccatact

SEQ ID NO: 47411 - DNA, 356 bp, Glycine max
  Clone ID: LIB3107-011-Q1-K1-B5
attccgtcgacacgctcgctgcaaaacgacgaggggtgaattgattggtggacaggattctagagccgagtcatcactcggtgctcgcctgcttgtcacaccgccgtgtctaccgttgaatggccgtgaagtgttcgattggcactgagcgtcctgccggacgtgtagagccactgaccttatattaagaagaaaatacatcaagtgcagaagagattgaagcatggaagagggaagggtttggaagatacagaacaagatcaatcgcagtaccttttaaacgcaaatggttgctaagaagcttcggctattgtctatgcgatctgaatcgtctcaatttctcagtctggagcttt

SEQ ID NO: 47412 - DNA, 421 bp, Glycine max
  Clone ID: LIB3107-011-Q1-K1-B6
gactttagcgaaggatcaaaaaccctgtgaaagtgtgtttgtttggtcgagttgattgaattcgctggcagcttacagctatgatcatcaacaacgccccttttcctctatgattgattcgattcgattgaagtcgattccgtagagagtgagaaatcagatcacaataatcatcgatgggtaatttgttcgtgaagaagcccaaggtaacagacgttgataaagcaatcctcgcactcaagacccagagacgcaaactcgcccaatatcaacaaaagctagatgctgttattgaagcagaaaagcaagctgcacgagacttgattcgtgaaaagaagaaggacagggccttgttagcactaaagaaaaaaaagacacaagaagaattgttgaagcaagttgatgcttggcttataaatgt

SEQ ID NO: 47413 - DNA, 415 bp, Glycine max
  Clone ID: LIB3107-011-Q1-K1-B7
ggggaagaagaagaagaagaagaagaaaaagagaagaagtagtttggtgtgttaattgttcgagagaggaatggacgactacacgagggaaatgatggacctgaagacactggtcactcgcactctcgagaagaaaggcgtccttgccaggatccgtgccgaactcagagcgagtgtgttcgaggccatcgaagaggaagatcatgtgattgagaaggaacaagccctacctcctgcattgcttggtagctgcaacgatcgagctaaacagcttcacgcttctcctccagggagacttctttcggcgatgatatgtgaataccttgactgggcgcagctcagtcatacgctaaaagtttatcttccggaatgtaatttggagaaagatttttggaagacagagcttaaggagttt

SEQ ID NO: 47414 - DNA, 437 bp, Glycine max
  unsure (1)..(437): unsure at all n locations
  Clone ID: LIB3107-011-Q1-K1-B9
ggaacctttgcattctattcattcaagattcagggggtgcgttttggaagcagagaccgaaatacttcgagatggcccgtacaaagcaaactgctcgtaagtcaactggaggaaaagctcccaggaagcagcttgcaaccaaggctgcacgtaagtctgcaccaacaactggtggtgtgaagaagcctcatcgttatcgccctggaactgttgctcttcgtgagattaggaaataccagaagagcactgagctcctaatcaggaagcttcctttccagaggttggttcgtgaaattgcccaggatttcaagactgatctgcgtttccagagccatgctgtgcttgcattgcaagaggctgctgaggcataccttgttgggctctttgaggacactaactngtgtgccattcacgccaagcgtgtgactattatgccc

SEQ ID NO: 47415 - DNA, 336 bp, Glycine max
  Clone ID: LIB3107-011-Q1-K1-C1
gccagagtaccatttgtggacaaagagtttatcagagttgcagggaacattgatcctgaggggaaaatgataaataaggacgaaggtcgaatcgagatatggacactgcagatgacctttgatgatgaagatcatccttatatggctaagcacatcttatataatcataacgaacaatccagtgatggagtaggctatggatagattgatggccttaaagcttatgatgaacaacatgcaactgacagatttatgctgaatactggccacactatcacctgtaacacttacaccgccaatgaactataccactacagaatgatatcagagagggtc

SEQ ID NO: 47416 - DNA, 418 bp, Glycine max
  Clone ID: LIB3107-011-Q1-K1-C10
tatgcgaggagatcatgagggacataggccttgccaggctctacaatatggcggattctttcttcttccagagacttttgcaagacaaaccttacataagtgaaacactgttagccatgattattatatctttagtctggtggacatttcatccattcatatggcagaacagaaagatctactcagttctaatactgtgcacggttctatcactcttactagcttctcaagttctgcgaatagatcacattttattatacacaacttccagctccaaactaccattgacaccagggttctaaacttgccacattgccccatacagatactgaccttgaagtgctcttgatctattatccgcgtggcgttgtctatggatatagtgatttgatattatcatcacacatgatctttactc

SEQ ID NO: 47417 - DNA, 445 bp, Glycine max
  Clone ID: LIB3107-011-Q1-K1-C11
ggatcgaggaaaaaaaatatcatttgttagctctgacagaaagagagagagagagagagagtgtgtgtttatttgagtttgcgatttgtgatttctgatttgttggcccagcttggcaaagcaatggctctttctgtatcccttatgcaactcagttgcgtctctcttcttcacaataatccctcatcatcatcatcaccggtgacccttttgcccaaatccctctttccttgtggaatttccctgaaactgaaagggttggttttttggagtaaaagtagttcagtgtgtggaagaagaagagtgggagttgggagtatcagtgtgaatgcctctttggttgaggctccagttttgtgggctggaaggctatgcatcttctatgccctcctcaaggctggcttggctggatctcaagccaacccacttgtctcagatttggaaa

SEQ ID NO: 47418 - DNA, 281 bp, Glycine max
  Clone ID: LIB3107-011-Q1-K1-C12
gaggggatcgatgtataaaaatatcatgaggtacctctgacataacgagagatagagagagaaagtgtctgtttatttgagttagctattcgtgatcactgattcgttggcccagcttggctaagcgatgactctatatctatcccttatgcaactcatgtgcgactctcatgtttacaatcatccctcatcatcatcgtcacactgtacccttttctcttaatgactctttccttgtggaatgtcccattgactgactgggctggacacttggatctaaa

SEQ ID NO: 47419 - DNA, 329 bp, Glycine max
  Clone ID: LIB3107-011-Q1-K1-C4
gactggtgccagctatgtgagtgagtatattgctattgctgcggctatctcttcctctctccgcactctccatcgttttaggaatatcacaccaattcgtgaaatcgaaggattccgacagaatcgtacgaattattgttcattgtttgcctctactgttgtgctccaacttggtaaactagaagtacagatttatttcttcaatgggggatgctgagaatgcccttccaccttcaaagaaaagggctgctggaaaggagctcactcgagatactcccattgatgatgaagaagatgcccctgagcttgaaactggcactttcaagaag

SEQ ID NO: 47420 - DNA, 414 bp, Glycine max
  Clone ID: LIB3107-011-Q1-K1-C5
attcatgatgataccaaaaagttgcttcgttgggatggtcaccttcaaaattattgggaagcctctccttattttctcgaggacaaaacctccaagaagagacaaagtatgcacatagctaaattctcggacaggaagaagaatgatttcactcgtgactctctctcacaagttttaatgttcaatgatttccctcaggagttagttcaaggtgcatctaagcgtgcgtcgagaagaaaaaagtttcgatggaacccagagtcagagatgaagaaacttgatttctttgaacaacaagagaaaacaaaccagggcaaagaggaaaatgatgaaaatgaaaagaaagatggagaagatggagacgaggatgaaaatgcacaagaggaggatgaagaagatattaatgatgatgat

SEQ ID NO: 47421 - DNA, 227 bp, Glycine max
  Clone ID: LIB3107-011-Q1-K1-C6
aaatataacaaagaagataacagattacacagcagaggatatatcagccatagtgggcaccaattttgagtccgtttaccatttgtgtcaagttgcacacccacttctaaaagattctgggaatgggagcataggtattaattctttcgtaacaaggttaaaaggctttcctggggtccctggttattcaacctttaaaagagccatggattaattcaacaaaaact

SEQ ID NO: 47422 - DNA, 412 bp, Glycine max
  Clone ID: LIB3107-011-Q1-K1-C7
tcagttctaattattttaggcaggccatttatgaaaacagctcgaaccaagatagatgtttatgctggcacattgtctatggaatttggtgatattgttgttcattttaacatgcttgatgccatgaaacatccatctgaggatcattctatttttcgtgctgagataattgatcagattgttgatgattatatgtttgattttgattctattcttcatggtaggaaacatccatttttatctgatctgcatacttgtcattccttatgcattgaatctgaatctgagtttgaatttgatcctatatataatttttatgctgagagtgaatttgaatttgagtctggttctgattttctgggtgttgcacctcttgatgttgattttttagagtcagaatgcactaaccatg

SEQ ID NO: 47423 - DNA, 393 bp, Glycine max
  Clone ID: LIB3107-011-Q1-K1-C9
ggcagcaagtgccattttattttgcgctacctcgtcgattctagggtctcaacaatggcgctgttccttctctacgaatccgcttcgggctacagcctgttcgaggttcacggcgtcgatgaaatcggccagaacaccgaagcggttcggaactccgtgtcggacctgaacaggatcggcaaagtcgttaagcttcgctccttcaaccctttcacttacgctctcgatgctctcaaacagtgcaacgccgtctccgaaggcatattaactgatgagctgaggactgtcttggagaccaacttgcctaaagtgaaggaagggtagacgtccaagttcagtttaagtgtgtccgatcctatgattggttcccagatatctgaaatgactaacatt

SEQ ID NO: 47424 - DNA, 189 bp, Glycine max
  Clone ID: LIB3107-011-Q1-K1-D1
ggattgggtttggttcttagggaaccctaatacaggggcattaggacgaagaagcataataagatgaaagacagtaaccgagtgatctacagataattccctagttatgctcactgatagactcactgagtctatgcatcgtgataccgatattcatttttgccggaacaaactcatgctacgatcata

SEQ ID NO: 47425 - DNA, 426 bp, Glycine max
  Clone ID: LIB3107-011-Q1-K1-D11
aagtgatgttacggaatgagttgtaaaatgatgtgaattgggctaagttgagcttggtatacttatgttatatatatgtgctattgtatatctctgcatgtttaggaatgtaataacttactccatgtgtgttgttagtgtctggatcctatgatgatatctgaccttgtgttcgtgagatcaaatgattagatagatgactataaagaaccttatgctaaatgacgatgaacactatactctgataggatatgacattagagcttaggattttacattgattttatcatatgctatgataagatatgtagttgaacatgatttatttttatatttctcattgaaatatcagttgtaatatcatcaagtttcacctcttgaagttctcaaagtagtagttaccctttcgtacatgtctactatagc

SEQ ID NO: 47426 - DNA, 414 bp, Glycine max
  Clone ID: LIB3107-011-Q1-K1-D12
cgcgacatcttcttttacgtattgaatctcacaattggctaaattagatcttttggtgctctttgaataaataaagctcttttctttattttgtacatatctctgctctcatatctcatcaaccttaacctctcctataccacctacaagctgatcgcatagtacatattgatctatagatcacgaatggacctttcgtgcaatccaatgactatatcattaccacttaacaacccttcacatcttcccaagtagcactatcattgtaccatcacatgtcaatctactgttgaaaacaatgaaatgattttatacccacatgccattttcatgcatccattcacaagtgctaacaatattctagttatctgtgatgcctacactccttctggaaaacctatttccacttacaat

SEQ ID NO: 47427 - DNA, 194 bp, Glycine max
  Clone ID: LIB3107-011-Q1-K1-D2
gactactgatgggggaactgttaacctcttagattgcacagattctgctccatggggctgaagcactagttgaagcctctgcacaacatgcgaatatatagaattcattcccaagacaaggatctggatttctcaacatagtcggcatcatagtttgcaaaatatcttagtatgaattacaaactgatgaactt

SEQ ID NO: 47428 - DNA, 411 bp, Glycine max
  Clone ID: LIB3107-011-Q1-K1-D3
ggcttcaattggccggttcggcggttcggttccgatccgattggctcgtcttcagtgtgaaattcctcgctcatcgcgttccgaatcttcctctcttgttatccagcaaccggtttggcggcgcggcttttcacacgcgtctcacaattcgtccacgtttttgttttttttgttttttggataacgagaattctagatctcttgaacgcaccgtttttggcggttatagaggatcgggacgcgaggcggatgacggcgaggaggttatcggatgtggtgctggactgcgtgatgccatacatacacgactccaaggaccgcgacgccgtgtcgcaagtgtgcaggcggtggtacgagctcgactcgctcactcgtaaacacgtcactattgcgctgtgttacaccaccacg

SEQ ID NO: 47429 - DNA, 374 bp, Glycine max
  Clone ID: LIB3107-011-Q1-K1-D4
gaaggtaagatcgattgcagaaaaggaaaaaatgacgatggacgatgatagctgcatatatgtagggggtcatccctacgacgccaccgacgaaaccattcgcaccgtcttcaatttgtatggcgctatccttgatgctaagataatcaacgacccacgcaccacgggcaagtgctattgatttggtacattcacaaatgctaggtctgcaattgatgccatcaacgacatgaatggcaaaaccattgactgacgtgtggttaaagttaacggggtgaggactcgtggaggcaggtcaaacttttggcagataacgttattactatcataatgattagaggaatggtaattgggatcgcattaagtatctaaac

SEQ ID NO: 47430 - DNA, 403 bp, Glycine max
  Clone ID: LIB3107-011-Q1-K1-D5
caaggtttctggtcctcaatgtggtggttcctcaatgcaacaagcatcatcttccactcctgctgagaagaagcaagataattcaaatgctgttgggagcatgaaagcctctgatgatgacctcacttgcagtgtatgcttggagcaagttaatgttggtgacgtactgcgaagcttaccttgcttgcatcagtttcacgcaaattgcatcgatccctggctgcgccaacaagggacatgccctgtatgtaaatttcgagctggatctggttggagtgacaatggacataatgatatcatcgcggacatggtctgaatacctcgtctaattttatttatggacgtgtgattataaccttgtacaactgtaacttactctcttcatgtatcaagattagtatct

SEQ ID NO: 47431 - DNA, 271 bp, Glycine max
  Clone ID: LIB3107-011-Q1-K1-D6
tgggcatctctagttttaattatgcaggggactgtcggctgtgtgtaataatcgggctggcaataaagtaagccatctttggctttaggggaattttatttggttgagaaaccttggtccaaattggttggaaattagattccggaaaccaccaaggaaaaggtaacctctcaatgggaattaaaaaaatccttggcaagttattacacttttataaatggaaaatttgcaaattttatctttcaaaaggatatatttttgaaagggtttt

SEQ ID NO: 47432 - DNA, 397 bp, Glycine max
  Clone ID: LIB3107-011-Q1-K1-D7
gcatctctagttttaattatgcaggggactgtctgctgtgttgtattatctagcttggaataaagtaagtcatcttttgctttaggggaaatataatacgatgagaaaccttggtacaaaatagtcgggaattagaatactgaaaacaacaaagaaaatgctagcttctaatggtgatcgacagaagtcgtggcgaaataatcacttttataaatagaaaatctcaagattctatctatcagaatgaagattcatgtaagagattattttacaatgcaataggtgactgggtcagagtattaggctcatatgagtaactacataaactaagttggctgttatagagactggttataatcaaatttgtatttcttatttagatttttgaatgttccca

SEQ ID NO: 47433 - DNA, 443 bp, Glycine max
  unsure (1)..(443): unsure at all n locations
  Clone ID: LIB3107-011-Q1-K1-D9
ggttctagtgtgtgattgtttgttggtgtaactggttcttcttcttttgttgttctgtgtttgtgtttgttttttctctcacctgaaaatgtcttgctgcggtggtaactgtggttgcggaagctcctgcaagtgcggcaacggctgcggaggctgcaagatgtacccagacttgagctacactgagtcaaccaccaccgagaccttggtcatgggagtggcacctgttaaggctcaatttgagggtgctgaaatgggtgtgcccgctgagaacgatggctgcaaatgtggaccaaactgctcctgcaacccctgcacttgcaagtgaggtgttgggagagcaagcttcaagcagagatagcccttaattaggaataatgataaactattaatgtgtagctaanaacttatgtattatgtctgtgatggttttcgtgcactct

SEQ ID NO: 47434 - DNA, 420 bp, Glycine max
  Clone ID: LIB3107-011-Q1-K1-E1
catactagacttataactgctgataatttgtgccgtccactaagggatttagatacaagatgccaatagggcacagtcaatgttcacaagatatagagtgagtcgcatctgcaacagaatgacatgacttataaaatatatattcgcacctacgcaagctagcatttttccttctgtcagtccataaacttaatgtgaaatcttccatagttactgttagaatgtgttaggacccaattgcaaggcatgggactagagtaccactcctcacatttgaagcatgggattccagtgagatttatagggtctagcgctctacaactacatcggctaacatttgtagtatgtttattcaaaggttctaatatcaattggcatcacagctttccaccatgtctttcagccacaaacgagctgtgc

SEQ ID NO: 47435 - DNA, 433 bp, Glycine max
  Clone ID: LIB3107-011-Q1-K1-E10
tgcacgtttaaagaacattattaaattgattgttgcttcttcttatgcattctgagcctatcatttaaaagggggttaaaagtttgttagtgaaaaattttgtaagacttaattcaccctccccctcttaagttgttgaggtcacttgtccaacagagatctcgatgaactttaaagaattgcactaaggtctgagagaaggatgaatcggcaccactattgtgagctctgccatcactgccgctacgccacctcatcaacgagtagatctgactcccaaacattcaaatctaacttgcaatgaaggagaatgaaatgattatcccacttgaagtttctcattgaggatggcattgtgaagggcaaggaagtcctggaaggagaagtggaagttatgttgtaaagggagggtgaggagaacctggtgggggta

SEQ ID NO: 47436 - DNA, 441 bp, Glycine max
  Clone ID: LIB3107-011-Q1-K1-E12
agagatattgagcttttacagcctcagacattcattaatgatactatcattgacttttatatcaagtatttgaaaaagaaactcccaactgatgaacagaacaggtttcactttttcaatagcttcttctttcgtaagcttgctgatttagacaaagatccatcaagtgcttgtgatggtagagcagcatttcaacgtgtacgcaaatggacaagaaaagtgaacctttttgaaaaggattatatcttcattcctgtaaactacagtcttcactggagtttaattgtcatttgtcatccgggtgaagtgtcatgcttcaaagatgaagaaattaaggaatcttccaaagtaccttgtatcttgcacatggattccctaaaaggaagtcataaaggtctcaagaatgttttccaaagttacctatgtgaagaatggaaagag

SEQ ID NO: 47437 - DNA, 429 bp, Glycine max
  Clone ID: LIB3107-011-Q1-K1-E2
caacccactgatcaacagttacaatagcctattgatctagctctctaacactgattatctgtcaactaaccaatggttagttgagcttacatctggcacaaaacagtaagatataactacagctgtacaaagaaaaaactcttaaccgttagagtaagtctactctaataataagcatgcaaactaattctagttgagtagcattttccttggtgtgatagctgaatcttttagattgattgatttgttagcaagtaatgtttgtggttgctcactgctcaatattatcacaatgtgtgacaaaattgcaaatggtgccactctgacatgtggactggtactgggagagcacttgtcaatgcttaatatgcaaaacatggggaggggaacatatttcaagtatcttgaagaattaaatgagtatttcat

SEQ ID NO: 47438 - DNA, 411 bp, Glycine max
  Clone ID: LIB3107-011-Q1-K1-E3
ggcagcgcttgatttgaggccaggcaagcccgactcaaccaccacacctgtcctcgttcacgctacccctttctgctcttcttctacctttcaagttttaaaagtataaagatggcagagacattcctatttacctcagagtcggtgaacgagggacaccctgacaagctctgcgaccaaatctccgatgctgtcctcgacgcttgcctcgagcaggacccagacagcaaagttgcctgcgaaacatgcaccaaaaccaacttggtcatggtcttcggagaaatcacgaccaaagccgacgttgactacgagaagatagtgcgtgacacctgcaggaacatcggcttcgtctcaaatgatgtgggactggatgccgacaactgcaaggtcctcgtcaacattgagcagcag

SEQ ID NO: 47439 - DNA, 353 bp, Glycine max
  Clone ID: LIB3107-011-Q1-K1-E4
aaggaagagagagcaagtgagtgttgcttaggatccaagacaagacagtgataatattggaatttttggaagccaaattaggcttccattctgattctactattttatctgtctagttttagggtactgtttatcatcgttagaatctgaaggtgtgaagagtgaagatggcagaagaaaaagaatcaacgtcaattcctcttagtcaaggggacaatgcatcttgcgacgatcccgaagacccagccaagtctccactaagctcgcccaactcttccactcgcagggcttgctgctttgttctccagagttgggtctctaagaaatttatgactggatgcgtagttcttttt

SEQ ID NO: 47440 - DNA, 379 bp, Glycine max
  Clone ID: LIB3107-011-Q1-K1-E5
gcggccgcttttttttttttttttttttttttttttttggtcacttgttgatgcttctgttttgaaaggatcaaagccgttaacttcaagcattcctgagttttcaattgattcgcttttttgactggtatcttcataaaacttggtcgaactaaccatttcaaggagtttactgaaggaagtgttgctaccaaaatggttgtactttgctgtgctggacagaacttctacttctgagttgctatctgagcatgatcctattttctcaggattttgatcatttgaaaaatctccagatatttgagaggaaaaaacagagccttgggatgaaactatgtcatttaactctttcctatcaccattgtaacatgatttttct

SEQ ID NO: 47441 - DNA, 417 bp, Glycine max
  unsure (1)..(417): unsure at all n locations
  Clone ID: LIB3107-011-Q1-K1-E6
tctcttgcatctttggcccaatcttcgtggagtctgctatccaatgcccttggggggtaggattgcatcagttgccttacccctcttgcgtgcgagaggttcgttcttttcttggtcatgcagggtttataggcgctttatcaaggattttagcaaagtggcccttccactatccaatctactgcaaaagaatgtggagtttgattttgatgaccggtgcaaagaggcttttgattgcctcaagcgtgcagtggctaccacccctatcattcaggcacctgattggacagccccatttgagctaatgtgcgatgcattcaattacgcattgggggttgtccttgctcaaaagattgacaagctatctcaagtgatctactatgctttcagaactttggatgctgnccaagaaaatta

SEQ ID NO: 47442 - DNA, 407 bp, Glycine max
  unsure (1)..(407): unsure at all n locations
  Clone ID: LIB3107-011-Q1-K1-E7
gccacatgcaaaacaaaatcaagttttaatcaattaaatacagaatcaatgtttaatactttaatttaaaaactgaatcaaatatccctcatcttttttatttcaccgcctccacaccactgtgtatatttcttggtgttgctttatcggatttctcctcgcgaaattaagtcctcgttgaccaaaaagaggttgtgaatacaagagtacatgcatagtgggaaaggaataacataagaaggggattgggtttagttaagtttagtttggttttggccattcttcttggaagcttcatcgttgttggtgggaccgatgtagcttattctgcactgctcaattctgtctcccatgcatgccactgntttcttttcatgaacggagtggaattaattaatattactaat

SEQ ID NO: 47443 - DNA, 316 bp, Glycine max
  Clone ID: LIB3107-011-Q1-K1-F1
aggcgttcgaccacgcctgcatgcggattagagaacgacacaaggagatgagttctaaggtctcattcggacctttttgatatgtggtcaccacttcttctatttctatgcctatctatgcctctgtttgtgttgtccttattcaaatacccgtaaacctttatgaatccaccacttccaccaggtcctatatgccttcccataataaggaatcttcattaactaaataatccttctcttcatgagcagctatggcctctctcaaagaaatataggcctttattttacccttcatttcgcttaaagccagccctaa

SEQ ID NO: 47444 - DNA, 394 bp, Glycine max
  unsure (1)..(394): unsure at all n locations
  Clone ID: LIB3107-011-Q1-K1-F10
gaatcaaacacaacacacacacggaacttcagctgngttggaggaaaaacgaaaaaggaaaacaatgggttccgataatcaccagaacttggagttcttgaaggagatcggtttgggctcttccaacattggctcttacattaatggccagtggaaagccactggttcttctgtcacttctgttaatccttctaacaatcagagtatagctcaagtgaccgaagcaactttgcaagattttcgaggaggggttgcaagcttgcagtgaagcagctaagacatggatgactataccggcaccgaagagaggtgagattgtgagacagattggtgaatcattgagggccagattggatcctttgggtatgctggagtctcttgagatgggaaaaat

SEQ ID NO: 47445 - DNA, 322 bp, Glycine max
  Clone ID: LIB3107-011-Q1-K1-F11
aggcgtgagaacacctgagagaggacaaccgaagagtgccgctaggatattgcggctgataggctatgacatacaggaatgactgccatggatcctacctatgccgctcagcatatacgcatccgataactgatgcttaatgcttctgctgatatgaaccggcctaattacgatctcattatgaacgtttacaaggaatcatgcactaagagtgacgacataatcatagaacaggtcgtgcttatatacagctcgactataacactggtatgtatatgctcaggaacatactacatgacatgatgctcagagatgcgatgct

SEQ ID NO: 47446 - DNA, 438 bp, Glycine max
  Clone ID: LIB3107-011-Q1-K1-F12
tatgtggcatctggcctgagaatgaatgtgtagaggtgagttaacctgtcagtttcacattgcaggtccttctttatggggtaattttgaccgtggtaggagagtatcacatggagcttctttgtatccgtgccacataaatctggtccaaacattaaactatagagaatgtgtcaacaggacattctttctttctgactcttaaggtaaaaatagaaagcatggataaagaaactaaaaatgaagttagaccatatgtggtacataaagtttcctaaaaataatgcaagtgaagcaaaatgagatttactgtaataaaacgatgacaataacatgcatataaaataactgcataagctctctgtcttatgttacttctggacatagttttatacactataatgaagtctctataatagcatattacacccctgatta

SEQ ID NO: 47447 - DNA, 416 bp, Glycine max
  Clone ID: LIB3107-011-Q1-K1-F2
gaggtcgaggacgccttcattgcgacctatgtgatgcatcctcttcaaactcacactcttcatacataattagatacattggttgcgcgctcttcctcgtttcctttgtctttctctttcggctttttccatcccttcctttctgcatgcagtgatgctgtgataaactgtgttagagcaacatcatggaacttttcaacatgtaatgattaagaaggaagatcattcatttaactgattaatggcactgatttccgagctactggctaacacaatactcttggtgatgaggcatttttctctacttagactggcatgcttgtttggtatcaaaatcgcattaactgtcatatatacttggacggagttgatcggaacaacaattaagtttcatgcaaacattatattaagaatta

SEQ ID NO: 47448 - DNA, 417 bp, Glycine max
  Clone ID: LIB3107-011-Q1-K1-F3
ggggttggttcatttgatctgcgagtggagaagagaatcgtgatgggaggaggacacggtcacggcaccacctacaaaggagttaccgttcatcacccaaagcgctggcacactatcaccggcaagggtttgtgcgcggtcatgtggttttgggtattctacggggcaaagcaagacggtcctgttgtattgggctggaagcattcttgggagggtcatcacgatgatcatggcaagggccattaagcattccttaagcatgagctccaagaacaggaagaacagaatttgaagtgtctggtgctgtgggtgtgctgttagttgaaatgtttactttgatcaattcaataaatttggctgtaaaataagagatttctttttgcgtggtttcatgagcattagatatgattgtgcatg

SEQ ID NO: 47449 - DNA, 427 bp, Glycine max
  Clone ID: LIB3107-011-Q1-K1-F4
cttattatatttattctctttttatccttaaacattacataaatatatccatgaatgtaattttatattttttaattactgtaacaactaattttatcaaacataaccttttatattcacaagtgctatgcgaattaaggatattaaatacattaaaagttgcccgagtaattaagttgtattttctatattgccctttggctgatgtttaagtggattgattctcctaaatacataaggtgaaaatgtgatattagcaacatttgagtaattaagtcaaatttaagatatttagttaagataaaataacctaatataagttgatcaacatgttttatggtatttaaaaattaccttcagttgatcatgcattcacggtacaaattacaatatacccacaaatcaaaatcatttatagaattaaata

SEQ ID NO: 47450 - DNA, 417 bp, Glycine max
  Clone ID: LIB3107-011-Q1-K1-F5
gaagagggtcttaagcagttgcaaaaggcagagagaatacagaaaaaaggagggatggttatgtgtgcatcaacgcttgttataatgtgctttgtcatgctagttctcttgatactcaaggagattctcttctagtcgttactgagcactttactggccggcatcatgttaattcttccgttcaatgataatcatgatgccggtatcattggggcactatgataatgcgtttcaggtttggggatttgtttttgaagtgccatgggctaaaatgattggctccttattgagaggcaaattggggatggcactggacagcatcccttcgtgctaacattgctattagttttaacaaatcctgtaaggagggattttcagcaagttcatcttccagtggccaatttttttagaaaaagg

SEQ ID NO: 47451 - DNA, 421 bp, Glycine max
  Clone ID: LIB3107-011-Q1-K1-F6
ggtgttgtgttggatttgagttttcagttttcactgcagtggaaaacaaaatgactgaatctccaatttccacacgccattggcaacgagtcaattaaaaagtcaagctttcaatgggtttcaatttgcatcccaatccaaccaatgttgcaatttccattcttcctaatccgacctacccactgttgcttccccattcaataattcaattcctgcactgcaccaatggagcttttgaagcctttgcaccctcaccatgcacccattttgcgaattccctttcacgctgtcccctcttcatcttcttctcaatctcagtctcaggttcccctccctatgatttctaaggttcatgtcgctgttgggaaatcgctcgacaaagttgctcctctgcttcgatggactttaaaccactttcgga

SEQ ID NO: 47452 - DNA, 415 bp, Glycine max
  Clone ID: LIB3107-011-Q1-K1-F7
ggaaacaaaacacagtgaaaatcaaggtaaatccgacgagatgtgagtcctctgtaaagaggtgcgtttcttggtgcttggtataaagcgcaagcgtttttgggttcgggaaaagaaggaatgaagagaagggtctagaacaacgcaacactacggattgaatattgaattaaacgacgctcatggctacggtgccggagaagaaagcgaaggaagcattcttcgacgacgaattcgctctggccgttgatctctactctgaagccatacgattggatcccaacgacgcaaatctcttcgcggacagagcccaagcccatatcaaactcaacgctttcgctgaagccgtttccgatgccaacaaagccatccaattaaacccttccttgttcaaggcctatcttcgtaaaggcac

SEQ ID NO: 47453 - DNA, 381 bp, Glycine max
  Clone ID: LIB3107-011-Q1-K1-F8
cggagaacaattcaaggctctgtaattgcgtcttcttgcgtcaatatcttccttgggtttagtaagacgtgcggaaatttgacaaggttgtttagtcccataatcattgtacctttggtatgtgtggcgggtcttggcctgtttgccaggggatttccattggtagcaaactgcgtgcagattggattacctatgctcattctactggttataacacaacagtatttgaagcgccttcatcatgctgctcatcaagtacttgacaagtttgctctacttctctgcattgctgttatctgggcatttgctgctatccttactgaggctgttgcatacaatactgctaaaccacatgacccaagtgagctgtcgcacatatcg

SEQ ID NO: 47454 - DNA, 441 bp, Glycine max
  Clone ID: LIB3107-011-Q1-K1-F9
ggaaaccaagtgttgctatcaacggaggagcgcccagactggaaaaaaaatctccggcgattgttccaccgaacctcttccgttctccgccccgatcctggattcaatcgtcgattccagtttctcattctagttgatcgagttcgtaggtttttatggtgcttcgttggacacacggtggcgatttgcattactcagtgggtggtggtggcaccgtgaattattgagtctgattacactcgctttgaaaaatcgaagagagaaatgtcttatcagcataaaagcttttggatgccacgagatgctggctgcatggctgaagaaaatgtgggatatgaaaattcttccagagtagaatccaagcgcagtcataagtggtttatggatgcaggtgaacctgaaatattcagcaacatgaaacaagcagttgaagctgttagt

SEQ ID NO: 47455 - DNA, 325 bp, Glycine max
  Clone ID: LIB3107-011-Q1-K1-G1
ggggtccgatgaagaaaactatgccttgactagaaaagttcagcgtgacgtatggatacatcagcatcctttgaactgcagcagcccggatgtcaagttccttgttactgactgggaaagattacctggatttggaattggggctcatattgctggcatgtgtggacttcttggtattgcaatcaacgaaggaagaatccttgtcactaactattacaacagagctgaccattggcattgcaaagggtctttcccgtctacatggagttgctacttctttcctgaaaacttcctaaaatgtcggctacgtgcatttgaactcatg

SEQ ID NO: 47456 - DNA, 405 bp, Glycine max
  Clone ID: LIB3107-011-Q1-K1-G11
gattcttctaactggtaagcaggtgatcctcctcttgctgctctctgtgttctttgctgtaatttctaatttttgaggatccacagaatggaactgttggttctcgatggtatcatcagtaccctgattcaagtcatactctgacctgagaaacacgttcaactttcaaaggcagatatcaagcagctttttgcgacttgcatagatatctttactatacagcccaatctgttactactggatccaccaattaagatatgtggagacattcatggtctatattctgaccttctgagactttatgagcatggtggattgcctactatgtccaactacttatactcaggcgattatatcgaccgtcgaaagcacatctctgacactatatgtattcttttggcatac

SEQ ID NO: 47457 - DNA, 443 bp, Glycine max
  unsure (1)..(443): unsure at all n locations
  Clone ID: LIB3107-011-Q1-K1-G12
tcttgctaatcgagtagctacacttttagaatgtgaggttttttaatgcatacataatcaatctcgcaggaaaccaaaaaaactactagacttcgtaagcatttgtagcactgaaatgctctattgacataggtagccagggacaggaacaagtattaaaagacatatcttgagactacctaaatctttcaattttggatccattcttttggtatagaaaaaggatgtgtagtttaaatatgagagagaagtattcactacctgctggttattgaagacatgtcaactgtattctgtttatagttttaaacaatccattttagtaaatctttaaaaactaatgttttctctttattcaacctgagtctgtacatattttcttccatttcctgtacctctattacctgcgctctcagtttgntatcaccagtaactttgatgtg

SEQ ID NO: 47458 - DNA, 402 bp, Glycine max
  unsure (1)..(402): unsure at all n locations
  Clone ID: LIB3107-011-Q1-K1-G2
gacacatatccttggtgttgaacgggtttttgggtgaaggagtagtgttggtggcttcatcttttagtgaataaggatacagcagcatgcggtggtggcttactctctctgttgatgtataccgcaaagtgatttccttgaatctgtattgcaaagttattctgtaactcttaagtcccttttgatcaaaaaaccttttacaatcatctcactcatctcttccttgccttgaatcaatgggatccaatttttttgttgttgttccttgttatgtccgtcagatcagctgaagaaacccacccncagcttgtttcaacctcttcttttcaacttagcctctttaaacattntagttgtcattagtttctagcctttttctccttgggtgtctgtagacaagtc

SEQ ID NO: 47459 - DNA, 427 bp, Glycine max
  Clone ID: LIB3107-011-Q1-K1-G3
cttgttttaaaggtttacaaaaataatgaaagatttacgtactcacttaagatcccaggatgtttatatgtgtgtgatttatttatttaatcaaaaaatttgtgtttaatttttattgagtacaaattttcttggtcaattgcaatcagaaaaatttatgtttgaaagctaaaatcagctcttacaacaccactaacaaaactgggaacaaaatcaaaaacatgaaagctaaaatcctcttccatcgcatattataattaaaggagataacttcattttattttttacaatttttttttattttacctctaatcaatacatatacactcaagtaactacttgtgacaaaaaaaataaaattatccataggcataaactgatattaaagtagggtcgtaaggatgttcataacttaatcaaaatttca

SEQ ID NO: 47460 - DNA, 378 bp, Glycine max
  unsure (1)..(378): unsure at all n locations
  Clone ID: LIB3107-011-Q1-K1-G4
gacacatatccttggtgttgaacgggtttttgggtgaaggagtagtgttggtggcttcatcttttagtgaataaggatacagcagcatgcggtggtggcttactctctctgttgatgtataccgcaaagtgatttccttgaatctgtattgcaaagttattctgtaactcttaagtcccttttgatcaaaaaaccttttacaatcatctcactcatctcttccttgccttgaatcaatgggatccaatttttttgttgntgttccttggtatgtccgtcagatcagctgaagaaacccacccccagcttgtttcaacctcttcttttcaacttagcctctttaaacattttaagtggcattaggttctagcctttttc

SEQ ID NO: 47461 - DNA, 413 bp, Glycine max
  Clone ID: LIB3107-011-Q1-K1-G5
caatgaagccgtttctcagactattagtacaaactgcatattctggcaggtatatgatgatacaactgaaggcagaaaagtctgcacttattacagactggattcaattcctgttgtacttgttattgatcccatcactggccaaaagatgcgctcttggattggaatggttcaacctgaaagcttattggaaggtctactagcattccttgatgcagggcctaaggatcatcatattaccatgtctcacaagcgtcctagaggaagttctagcccaccaaaatctaaagccttggtagaatcagatgagaataaagaggagtatgaagaagttcaaagagctctggcagcttctatggagagcatgaaagaatcaactgctatggctggaagagacaataaagatgcagatg

SEQ ID NO: 47462 - DNA, 422 bp, Glycine max
  unsure (1)..(422): unsure at all n locations
  Clone ID: LIB3107-011-Q1-K1-G6
gggggatttagagagagagagaacttcaactgagggtgagagtgacacaaatctagggagcactactctaaaagttctattagattcttcaaaacatgaccatgcatcgcgagtcttgggcttttgtcttcggcgttatgggcaacatcatctcctttggagtgttccttgctccattgccaaccttttaccaaatctacaagaagaaatccactgaagggttccagtcacttccttatgttgttgcactgttcagtgcaatgctttggatttactatgctttcgtcaaaagggaagctgccctccttctcattaccattaacacatttggaattgttgtggagtcaatttaccttgcaatcttcctactttatgccccaaggaagcctangcttacaaccatcaagcttcttctcttactg

SEQ ID NO: 47463 - DNA, 420 bp, Glycine max
  Clone ID: LIB3107-011-Q1-K1-G7
ggcccccctctctctcaccctcctcttcacacatgttctgtgcgctctaacaaacattctcgttcacactttcagattgtgtgaagatgggggcgggtggccgaactgatgttcctcctgccaacaggaagtcagaggttgaccctttgaagcgggtgccatttgaaaaacctccatttagtctcagccaaatcaagaaggtcattccacctcactgtttccagcgttctgttttccgctcattctcctatgttgtttacgacctcaccatagccttctgcctctattatgttgccacccattacttccacctccttcccagccctctctctttcttggcatggccaatctactgggctgtccaaggttgcatccttactggagtttgggtcattgcccatgagtgtggccaccatgcat

SEQ ID NO: 47464 - DNA, 426 bp, Glycine max
  Clone ID: LIB3107-011-Q1-K1-G8
gactctcttgtaagcgagtgaacataattaccaagtgcacatatagatatatgggcatgatgagaatgagtggacttacatggtcagtgctaaagagtgagctgtgaaatagaggggagagaaagagagagaatggaacaaattccattgtttaatgagaaaatgaaattggctcagaaagcagccatggctaaacgatgggaagacttcaagaaaataatgaaggacgaccaggagaacttgctcaagcagtttgatctgtttgagaacagtgccatccatgttgcaactcgctctaacagcccacgactcctcagagaattgatagagatgttaccaaaagaagaaaggtggcaagctttgtgcaaggaaaatcgcgaagggaacacggttttacacgaggttgtgttttgtaagaagaagaaa

SEQ ID NO: 47465 - DNA, 414 bp, Glycine max
  Clone ID: LIB3107-011-Q1-K1-H1
ggccacacaacaaataactctggacatataatgaacctaagacccgcctctgattctgaacaacaaaaggctaatttggctcttttgacgacaatttttgctgacacctaaagcatctagcagcttatcaaaatggagactaaccatacagcaaaacggtgttgtaagactttagtatgcatttgatcaagagcagctaggaagcatttttacaattacaaaggttgaccactcattgttctgatcactgagtaaataatttctttttagatgcaaacttctaagaagcacccaacttcagctggtatccatttatacctgcagcctgcacaagatattgatccttacactcattaccaaatattgcaaagcaattcatgccatgataatagcagcagccagggaaccactatt

SEQ ID NO: 47466 - DNA, 430 bp, Glycine max
  Clone ID: LIB3107-011-Q1-K1-H10
cccacgcgtgcgtagacgacagaaggggtagctacagcagctgctggtgttccacagaatgagggtgcagtcttttctgaagaaaggattaaaaaacttgtatcaatgggctttgataggacgcatgttgaagtggctctggctgctgctgatggtgatctcaatgtggcattggaaattctcatgaaccatcacggttgaaaaataaagcttctgttggattctgaacgcgacctaactgacactgatcattgactatgtcatggcgctttgctcaatacatgcatctggataatctttggactaccactaacaattagcacacacctgatcgccatgctcacgccaattagcagaattgaacatatgtaaatgatacaagcaatgtttaagaatatgatgctagatgctgacataggcaacattttgg

SEQ ID NO: 47467 - DNA, 283 bp, Glycine max
  Clone ID: LIB3107-011-Q1-K1-H11
caattcgagggaggatgtattgagagggctgatgaggcgatgtgcgtatttgaaatatgttgagggaagattgggtgatcgtgtcctttatgcagatgagattttgaaagatggattttgcttgaacatgattgacacccctctttgccctctcaaggttgtcacaaacctgcaggatgctgtgtgggacgcatatattgtgattaatggcttgccatcaacggaaacccgtgaggtatttgaagaaattagcatgtactggaaagagagaatcacagtgcct

SEQ ID NO: 47468 - DNA, 446 bp, Glycine max
  Clone ID: LIB3107-011-Q1-K1-H12
agaagttaaaagctactctacttcagtttaacttcaaatccaggtgtgacccttcgttattcatctacactgattccaataacactggtttatatgctactgtatgttgatgacatcattgtcactggaaacaacttctccatcaaatcactagttactaaactcaattctgagttttctcttaaggacctaggaagtcttgactatttcttgggaattgaagtcagatctcagcccaatggtgctcttattctaactcagtccaagtacattagggatttgttgagtaaaacaaagatggacgaagctaatctcatctcttctccaatggttagtggttgcaaattgactaagtcagggtatgaatctttccctgatcccacacactacaggtctgttgtgggagccttgcagtattcaactattactagacctgagataagttt

SEQ ID NO: 47469 - DNA, 432 bp, Glycine max
  unsure (1)..(432): unsure at all n locations
  Clone ID: LIB3107-011-Q1-K1-H4
tacataacaatttcccttagagtgtggaagattcagaatattgttaatttaacatttgaacatgtccgcttgtccaaaattcattagaacatcaataatttatacttattgttattcatcaaaatccaagatagatgagaagattggttgtccagacctaacatatgatacaaaaccctatagcaagtgacaaatcgattccccccaaactaatttttcacttgctttatattttctttacgtaattaagaaatgatgaatcaatttcttaactattttttatacacttttagaaatagattccctaagaactgatttctaaacatccttttttttagaagccaattatgaaattagtttccaagaaccgatttcataattggtttcttatttttttcaatgttntttttggtatttctttaaattcttttt

SEQ ID NO: 47470 - DNA, 417 bp, Glycine max
  Clone ID: LIB3107-011-Q1-K1-H5
aactttctttcgagcataatgatccatgcaactcggccatttatagtaaacgagtggattcaaacgaagattgaaggatatgaggtttctggcacagttgagcatgtaggctggtggtcaccaaccatcatcagaggtgatgatcgtgaggcagttcatattcctaaccacaagtttacagtaaatgttgtgagaaatctgagccagaaatctcattggcgtatcaagagttacattgctatcagtcacttggatgttaacaaagttaataatattgtagctgatatgcgcaaggttttgtctaaaaatcctcaagtagagcagcaaaaattacacagaagggtctttttggagaatgtcaatcctgaaaatcaggctcttatgatattaatatcttgctttgtgaaaacttctcat

SEQ ID NO: 47471 - DNA, 427 bp, Glycine max
  Clone ID: LIB3107-011-Q1-K1-H6
gggaaaaccacggagaagtactaccacctgagtgccaagaacaagaaggctgcttcttctctttctctatcactgggcgatcagtttctcgacgagggtttctcgctggggaagtcactaaccagcaagaacctcgtcgagctggcatccaaagggggacagaggaacgccatcaacgttgttctgacatccgctgacgtggcagtcgaaggtttctgtatgagccgatgtgggacccacggctcctcctcttctgcatctcacgtgaagaagaacaacaacggcaagaactacaagttcgcttacatctgggtcggaaactccgaaacccaatgcccggggcaatgcgcttggccattccaccaacccatttatgggccccagagcccacccttggttgctcccaacaacgatgtgggacttgacg

SEQ ID NO: 47472 - DNA, 340 bp, Glycine max
  Clone ID: LIB3107-011-Q1-K1-H8
ggtgcagttcaaagcgaagaaagattcgaaacgaagaatgaaagcgttgtgaagaatggcggaagagggacaagtgatcggtgtccacagcgtagaggagtggaaggaacatctcaagatgggagaagagtccaagaaattgattgtggtggattttactgcttgttggtgcggtccatgccgtttcattgccccaattcttgcagagtttgctaaaaagttgccgaatgtcaccttcctcaaggtggatgtcgatgaattggagactgtttccaaggagtggggaattgaggctatgccaaccttcctgttcttgaaagaaggcaagctggtggacaag

SEQ ID NO: 47473 - DNA, 399 bp, Glycine max
  Clone ID: LIB3107-011-Q1-K1-H9
caggcttgacccatgcatacgaccaccgaacgacgactgcaataactccactgattgaggttaacaccaaatagaaatgagacacctaggtgatctatttactctgattccaataacactgttttatatactactatgtgcttatgacatgatcttctctatatacatcttctaccatcaaatcactatttacataatctcaatcctgagtctttctctaatgacctagtatgcattgactatacttcgggtatcgaagtcagatctctgcccaatagtgctttaattctaactaagtgcaagtacattatggatttgtcgcgttaaacaaagatggacttagctaatcatatcatttactcaattactagtgcttactaatcgtccaagttagggcat

SEQ ID NO: 47474 - DNA, 377 bp, Glycine max
  Clone ID: LIB3107-012-Q1-K1-A11
ggtttctttgagactaatctcagaaaccttaagagtgttttttccagcgaccgtggcattaacgcttacacactctggcggtcaacgattcgcgcgtggagacaattggtacggacagtaacaagtaacaaagtagttcctatgtagctgattatggcggagatttcaagttcagggtacaaggaatatgcggctggcttgttcgctggtgttgccgctgtagccactggccacccctttgacaccgtcaaggtgatgctgcaaaagcacaatgcagaagcacataagattcagtataaaaatggatggcattgcactgctaggatattgaagactgaaggaatcaaagggctttatagaggagcaacatcatcttt

SEQ ID NO: 47475 - DNA, 353 bp, Glycine max
  unsure (1)..(353): unsure at all n locations
  Clone ID: LIB3107-012-Q1-K1-A12
accacttcatattattcttaagtagtgaaggtattgcagactacagaaaagggttttcagttcaatcctttcataacttaaaaaaataagattgtttaatgtataaagtggtatttatcttaccctctgtgtttgtctgaattgacaacgactgtgatgctgtttgaaatctgttcaaacgttctgctcctctatgtcccatgcctgttacctctcacttcctatgtataattaaacgcaatatcttggcatacatctaatcccttcctctgcaattcccaattgcaacaccttcatatctttgntatcctctaaatatgttaaaatctctaatagatctctatcaatcacct

SEQ ID NO: 47476 - DNA, 420 bp, Glycine max
  Clone ID: LIB3107-012-Q1-K1-A3
gaccaccgacaggatgctcattaggaactctcttcattcacatcgagctgatttccatatgtcggagaggcctagttctccccctcttcttttcctgaatcctcaaaagtatcacgcattcatcttacaatactcacaataaaactttcatgactctttttcaaatatcgatagcacacgctattattgatattaataactactaacgttttactacctttctcccattcctgttactccttacatagaccctattacagcgttactatcaatacaatttcgctaaaaccacataaattaacaaaagagttaatgatatccaataacactttcattcccatgttatttacatatgcacaaacaatacatatctttcatgaatatgcacactttgccttacgaagcttaatgtatttcttt

SEQ ID NO: 47477 - DNA, 235 bp, Glycine max
  Clone ID: LIB3107-012-Q1-K1-A5
acaatttcaatctcttattcaccaattaccattatctactcctcatataaacattcatatcaatccttttttaaatcccacatctacaactcctcaatcatcattgataacaatactctttttgtatcaaagtaccaataattttacttttaaaatgttcccaataacaatctttaagcaactactttataatatacttcaactacaaaaaccttctttcatacaatcttctaac

SEQ ID NO: 47478 - DNA, 216 bp, Glycine max
  Clone ID: LIB3107-012-Q1-K1-A6
gtcaaacttttattggctcatatttcatacctcgtcagccatatactaataagggcctactaatctacgatatgcttctattacttgcaacaattcgtacatccagacatttcctacatacagtaacctttcacactgctgcttctttctcgctcattctagagacaactctaagaactgaaacatcttattattcagatgaaaagaaagctaatg

SEQ ID NO: 47479 - DNA, 330 bp, Glycine max
  Clone ID: LIB3107-012-Q1-K1-A9
ttttctaacgtatgtcattgatattaccgccgcttcttaatcacgggctgcttcttttgttctttgtctgtttgttttttctctcacctgaaaatctcttgctgcggtgataactgtcgttgcagcagcccctttttttctccaactgcttcccatgctgcaatatgtacccacacttgatctacacctagtcaaccaccaccgacaccttggtcattgtaatggcaccacctaatgctcaattccaaaagtctcaaatgggtgttccccctcgaaaccatggctgcaaatttttatcttacttcaccttcaacccctgaactttcaaat

SEQ ID NO: 47480 - DNA, 180 bp, Glycine max
  unsure (1)..(180): unsure at all n locations
  Clone ID: LIB3107-012-Q1-K1-B11
cgagaaacgacagaaggggtatgaaagtagtataagtaattatagtaccggtatagggtgtaacaataattatagattattttatgattcaagtttagttgttataaaagaaaattaagatcatatgtattgtgatagaaatttcatgtatgttatatttataaaaataattattngacg

SEQ ID NO: 47481 - DNA, 406 bp, Glycine max
  Clone ID: LIB3107-012-Q1-K1-B12
ggacaccaacaccaaaacaaacccactaagatggcttcctttgtatccttgctagtgctgcttcttgcagcccttatcctcatgcctcaagggcttgctacttactacaaaccaattaagaagccaccagtgtacaagcctccagtgtacaagccaccagtgtacaaaccaccggtttataagccaaaaccaccggtttacaagccgaaaccaccggtttacaagccaccatataagaagccaccatacaagaaaccaccttatggaaagtaccctccagtagaggacaacacccatgcctaaagcaagcaatgaggtctattatctacttaataaataagaggaactgctttgtgttttctagcattgtgatttacaacttcgtagcaatgcatattcttgactc

SEQ ID NO: 47482 - DNA, 352 bp, Glycine max
  Clone ID: LIB3107-012-Q1-K1-B2
ggttgttacttttgctttaacacattacactcgcactctttgtgaaaaaggggagtttcttattctttctagacgcttccattgatcggcgatttcttagacatggcggagcatcacgaacacgaggaagtgaagggtgagtccttgttggagaagatttctgggaagatccacgaccacgattcgtcatcttcgtcggattccgacaacgagaaaaccagcgcttctgactccttgaagtcaaaggttttcaggcttttcggcagagaaaagcccattcaccatgttcttggtggcggaaaaccggccgacgtttttctctggagaaacaagaagatatctgcatcgacac

SEQ ID NO: 47483 - DNA, 62 bp, Glycine max
  unsure (1)..(62): unsure at all n locations
  Clone ID: LIB3107-012-Q1-K1-B4
aaaaanaaaanaagaaacaaagaaaaaaagaaaagaaaaaaaagaagaaagagaagagggag

SEQ ID NO: 47484 - DNA, 416 bp, Glycine max
  Clone ID: LIB3107-012-Q1-K1-B5
agaaggggatggcaactctaaccccaatgtgttactcatgttcgaacggccatattcaatggtcggcaccatcatcatggctatcaactaaaactaaaaccctcagttttgaatttcagacctcataagcaaaatagaagcatcagaatccgatcaccctctgcctccaacccgaaccagaatgagtcttcttctcccggattatactctgccaagaaattccacctcaccgcatccaacgtcgacctcgttctcgacgatgttcgcccttacctcatcgccgacagcggcaacctggacctggtgtccgtggaagaccgcgtggtatctctccgtcttcaacgaacatgcgagagctgcctccacttcaccaccaccatgaccatggggatcgagcgcgttcttaaagaaaaatt

SEQ ID NO: 47485 - DNA, 191 bp, Glycine max
  Clone ID: LIB3107-012-Q1-K1-B6
aaacgacacaacgggtatgaaagttttataagtcattataattccggtctcggggggaacaataattatagattattttatgaatcaagtttagctgccataaaaaaaaattaatatcctctttattgtgaatgaaacttcacgtatggtctctttatcaaaataattattagacgaaaaaacacctaatg

SEQ ID NO: 47486 - DNA, 202 bp, Glycine max
  Clone ID: LIB3107-012-Q1-K1-B7
acacgtgagaacacaccagcatgcgttttttcgattactaattacacaatccggccggtttattaacaacgggaggtccttattacttcaacacgccttcatttttagatgaattattcgctctgtcaataccttaataaaccgaattagataaaacgcacgtcttgaaaacaaaaattctctacagaaaccattaccacaa

SEQ ID NO: 47487 - DNA, 204 bp, Glycine max
  Clone ID: LIB3107-012-Q1-K1-B8
ttggattccaagcagtacctcctctcaatccgacgcattcttaaaaaggggcggtgttatacaatacaacattcattacacatactcaaaatatcttctaaattcgattccttttccaacaccatgaagaaaaattttcatcctttttgacaatatattttccaactaacactaccaccatttaattttgctaaccggattccc

SEQ ID NO: 47488 - DNA, 381 bp, Glycine max
  unsure (1)..(381): unsure at all n locations
  Clone ID: LIB3107-012-Q1-K1-B9
aaaatatgggcaatacttcccttgtgaaggcttcttgatttcttctcttgaatcttgaattcatcttttcttgaatcttgaaatcaaacttctcttgattcttgaatcttcttgatttcttctcatgaagcttgaaattaaacttgatcttgaacttgttgactcaatcttaaaattattctttggagctttttgtcatcatctttgtcatcattaaaactacttgaatcaacttgattcatcatcatgaagcttgcttctacattttcaactaggaaacataccatatcaatttcatgcacaagctcctcaaaaatgataatggacacaagaaatgataaaggaagtaacctcanttaattgtatgattcatgcaatctg

SEQ ID NO: 47489 - DNA, 385 bp, Glycine max
  Clone ID: LIB3107-012-Q1-K1-C12
gggcagcgcttgatttgagggcaggcaagccccactcaaccaccacacctctcctcgttcacgctacccctttctgctcttcttctacctttcaagttttaaaagtataaagatggcagagacattcctatttacctcagagtcggtgaacgagggacaccctgacaagctctgcgaccaaatctccgatgctgtcctcgacgcttgcctcgagcaggacccagacagcaaagttgcctgcgaaacatgcaccaaaaccaacttggtcatggtcttcggagaaatcacgaccaaggccaacgttgactacgagaagatagtgcgtgacacctgcaggaacatcggcttcgtctcaaatgatgtgggactggatgccgacaactgc

SEQ ID NO: 47490 - DNA, 148 bp, Glycine max
  Clone ID: LIB3107-012-Q1-K1-C2
ttaaaccaccttctaatatccaacttactaccctcattcacttcataactctttatatttacctaaattcaattactcccatcttttacaacttccttacttgaaaaaccctacattacccaacttaattccttcatcacattccctt

SEQ ID NO: 47491 - DNA, 271 bp, Glycine max
  Clone ID: LIB3107-012-Q1-K1-C6
gaccaccaaaagggctcatgctactttatctaccgttggggattatctaacaggctaaattatcccaactacttttaatcatgattctctctgttaaattactgattgtgctcctgatcagaacgaagataatgctttccctggcatgattaaaccttacaaagctgttatcttccacaaaacctgtgctcgcctctaataagacgctcatactgtcagactatacgatcataagcttctcctgctggcctttagccctatagataaacaa

SEQ ID NO: 47492 - DNA, 290 bp, Glycine max
  Clone ID: LIB3107-012-Q1-K1-C7
agaattgggagtggtggcattgccactagtggggggctttggtttaagaggatcgcaactattgttggcaactctctgtctgtgaaaactgtttctgatgatgataaggctcgctgccatggagggggtgctaattctccttctatggctagacatactaacaacatatattcacctatcaatgctaccgtggcaaccaacctcaaaccaaagccagcgtcaaatctaaaaatgcatacagttttgtttaaaattaggggccctgcattggctggaaactgccacaacat

SEQ ID NO: 47493 - DNA, 372 bp, Glycine max
  unsure (1)..(372): unsure at all n locations
  Clone ID: LIB3107-012-Q1-K1-C9
tgcactggtgggaatttantaagttcaaggatgatttccatcttggcggcgagaccacttacaacanatttgagttgcaccaatttagcattcattttttacgtacccatacctacatgtaatttctctttccattattattcacaccaaatttcccattgaaatagttattctcatttattttcttggatacacatttattatggttttgacgcttcatataaccaaccaattcccatgaactgactcattaatactatcaataaatgtagcatcattgttaagcaatgatgtcaccaaattggtaattgcaagtgttacatcactaatgagtctaggttgatcttgaatgaaattaangcttgttggtgt

SEQ ID NO: 47494 - DNA, 392 bp, Glycine max
  Clone ID: LIB3107-012-Q1-K1-D10
gagagtgcgcagagagcatggcaataataccacattaccacttccaccctcaccttgctgagcctatccctatggcggccataacccgactcgaaaagcgcacctcccccctatcttccatggcgcgtgagttatcatataacgcgcctacgagcaacgaggagacgaatgttcagagcatgtttctgggttgccctggcgtccgaaaatgcacctataccaaccgactatacaaccttctcagagatcctcacatagccactggcgaacttgttcgccacgaactaccatccaacggacccctttcttcccaactatcagaaattgctaatcaaggcaaattggtgtcagatgaaatcataataagcttattgccaaagacgctggctgat

SEQ ID NO: 47495 - DNA, 412 bp, Glycine max
  Clone ID: LIB3107-012-Q1-K1-D11
ccacataaggggacacacttaacaatcaatcaaaacattcccgggcgcaataatatacacatgggcaattaagctccttctcctatagccatggctctttctaagcttataattgcttcccttcttgcgtcgcttctccttcttcatttcgttgatgctgatcaatcggcacatgcacaaacgcaggggtctcttcttcagcagatagattgtaacggagcatgtgctgcgaggtgccgtttatcatctcgtccacgcctctgccaaagagcttgtggaacttgttgtagacgctgtaactgcgtgccacctggcactgctggaaaccaaaaaatgagtccctgctatgcaagttttactactcattggggcaaacgcaaatgcccttagacttaattggaccactatccta

SEQ ID NO: 47496 - DNA, 366 bp, Glycine max
  Clone ID: LIB3107-012-Q1-K1-D12
ggcgtcggaaggaagagaagatgagggagaatttgatggagaaagtgagcgcactgggagagcgcctgaaaatcggaggcgtggaagtggggagaaagatgagcgaggggatgagctccatgagtttcaagctcaaggagttcttccagcctgggcccaatcaggccgacaagcttgtggaggacgctacttccgaggccctggacgagcccgaatgggccctcaatctcgatctctgcgacctcgtcaacaccgacaagctcaactgcgtcgaactcgtccgcggaatcaagaagcggatcattctcaagagccctagggttcagtacctcgcccttgtcctcctcgaaaccctagtcaagaact

SEQ ID NO: 47497 - DNA, 412 bp, Glycine max
  Clone ID: LIB3107-012-Q1-K1-D5
ggaacaattaatcccaatgataaatttaaaggcgatgctgagggtgaaaagtccaaagatggggtatctggtccaaagaagggaagtaggtatgtaccatcttttattccacctccaatggcaaccaaagggaaagaatctgaaaggaaaaaagaggaggaaaagccaaaggagaaagagaaagggaagtcaagaaacattgatcattttatggaggagctaaagcatgagcaagagatgagggagaggcgaaatcaagaacgtgaacattggcgtgacgggcgtcatacagaacattctatttccagtcgctttgacgagctgcctgatgactttgacccaagtggaaaacttccaggatcatttgatgatggtgatcctcaaactacaaatctttatgttggaaatctct

SEQ ID NO: 47498 - DNA, 405 bp, Glycine max
  Clone ID: LIB3107-012-Q1-K1-D6
gatagcagcatcatacaaagcattgaattcaaaaacgaggttcatttcttgtgctttgctttattcctcaaaaccaaacatgtcgaacacatgcggcaactgtgactgcgctgacaagactaactgcaccaagggaaacagctatggtgttatagtagagactgagaagagctacatcgagactgttgacatggatgttccagcagctgagcatgatgggaagtgcaagtgtggcactaactgcacttgcacggactgcacttgtggccattaaggaatatgtatgaaaatgtaattgccatgtgtttggcaatacaaatctccaaataatgtaatcttcgtatgaataaatgtgtgctgttatcctacttcaaggtctgtgtagtcatgcagtctgaatcatgt

SEQ ID NO: 47499 - DNA, 370 bp, Glycine max
  Clone ID: LIB3107-012-Q1-K1-D7
accactttttcggacacactcttttattggaggtgattcatgtaaggccgtctaaatatgcgagtttcattccacatttggtgggtttcatgtaagttcttttattggatgtaattctagtgtagggagacacatgtttttcaatcaacaaggagaaaaatatgttggaaggaaagtgttacattgagtgttactatcacttctatgtgattcatttatgcaatcttcataatcataatcagaatgatgtgctgttctaattagttaaatttgttttgtcgttgtcccctttgatcaatgggggtgctagaagattcccaagaaagattgtactttttattttcatttaaaattattaaaagggatttat

SEQ ID NO: 47500 - DNA, 362 bp, Glycine max
  Clone ID: LIB3107-012-Q1-K1-D8
gagttgaaattgttgcatcacctatttcaatggagactcaacaaataaaagtaaaatgaaagcaaaagcaagaatcttgatccttggcaaaattacttttgcttcaaaagtcactttgtaccggattgtcaaacatgctctcagttagcggcatctatttattccttgcctatgccttctgcttttaatttcctcacaacttctctgcttccctttctccctctctatcgaggaaacatggtatttttgggtgttctcttggtggggtttctcttaagtgcttatggggacagtgatggttggatggatgctcatgctaccttctatggagggggcgatgcctctggcacaatgggtggagc

SEQ ID NO: 47501 - DNA, 417 bp, Glycine max
  Clone ID: LIB3107-012-Q1-K1-D9
agaaggggataggtagctactcactagcattttagttcccacgattcgtatcccttcctgggatgaagactctccctcaaacaccagggaaaaccatcccagatgcttgcgactacaaaggtcacccagcagagaggtccaaaaccggtggttggactgctgcggccatgattttaggagtggaagcatgtgagaggttaacgacaatgggtgttgccgtgaatttggtgacatatttgacgggtacgatgcatttgggcagtgctaattctgccaacacggtcaccaacttcatgggaacctctttcatgctctgtttgttcggtggttttgtagctgacacttttatcggcagatacctcactattgccatcttcgcgactgttcaaaccactggtgtgacaatattaacaatat

SEQ ID NO: 47502 - DNA, 386 bp, Glycine max
  Clone ID: LIB3107-012-Q1-K1-E10
tattggggcgtcggaaggaatacaaggggagggtgaatttgatggagagggtgagcgcactgtgagagcgcctgaaaatcggaggcgtgtaagtggggagaaagatgagcgatgggatgagctccatgagtttcaagctcaaggagttcttccagcctgggcccaatcaggccgacaagcttgtggaggacgctacttcctaggccctggacgagcccgaatgggccctcaatctcgatctctgcgacctcgtcaacaccgacaagctcaactgcgtctaactctttcgcggaatcaagaagcggatcattctcaagagccctagggttcaatacctcgcccttgtcctcctcgaaaccctattcaagaacttcgagaaggccttc

SEQ ID NO: 47503 - DNA, 402 bp, Glycine max
  Clone ID: LIB3107-012-Q1-K1-E11
tatcttaaagattttattgacagtaacaacactttaatatttataaataaaaaattaaatatcatactcattatatatttataaataaaaaattaaatatcatactcattataaaaaaaagtatacacatatctcaagtcaaatctcttggtgatataacaataaaagtcaaccaaatactcctgttttagtttttttttttatatttggatttctctctattttgttacaccacatcatcacttatattggttactgatctgatctctcatatagtcatattttagtatctgagttgtatcataaccaatatttactccaaaacaaaatatctttccgttcatatatgcgtcaagtcaaaagctttatatatgtccgtttagtgaagagcaaactggatta

SEQ ID NO: 47504 - DNA, 329 bp, Glycine max
  Clone ID: LIB3107-012-Q1-K1-E12
cctgaagagaccacgggctgggtatcttataaagggggctgaggtggatcatatgaggaatttaatggaggattcaatgaaatcacaacaaaggagaagaaatctaacaaaaacacaaaatcatttttcagaggaaagaggcttaagaaagagaaaaacttttattatataaaagaaacaaatgaagagaagcacgattattttgaaaggctttcttataatagagaaagtgtcccacaatgtagttcttaaaagaaagaagttgatgaatcaagtggagcttttatgcaaaatatttattggagaagaaataatttgatttcttgaag

SEQ ID NO: 47505 - DNA, 280 bp, Glycine max
  Clone ID: LIB3107-012-Q1-K1-E4
catctctatatcatttttaacttcatattttatattaagcacataaaactcttcttactttacatccatgaatgactaatattttcttttatttgaagacaaatatttactattcatcccattaataattatctttccttatatttaccaatatttttttacatctcaaaattctaacctttctcatccttccaccatctttcacaattataaaccattttatattccttatatataaaattctatatccatattttattcatttttgtatcctattttt

SEQ ID NO: 47506 - DNA, 398 bp, Glycine max
  unsure (1)..(398): unsure at all n locations
  Clone ID: LIB3107-012-Q1-K1-E5
aggccatttttttctatatcatcccacggctgtattctcaccagggacggggggccatggacatcngaaagaacaagcgcatctccaaggggaagaagggtggcaagaagaaggcagctgatccctttgccaagaatgattggtatgacattaaagctccttctgtttttcaagtgaaaaatgttggcaaaaccctcgtctctcgtactcagggtaccaagattgcttctgaaggactcaagcatagagtgtttgaggtctccttggctgatcttcaaggggatgaagatcatgcattcaagaagattaggttgagagcttaagatgtgcaacggaagaatgttctgacaaatttcttgggaatggatttcacaacagacaatctgaagtcattggta

SEQ ID NO: 47507 - DNA, 92 bp, Glycine max
  Clone ID: LIB3107-012-Q1-K1-E6
aaatatcatactcattatatatttataaataaaaaattaaatatcatactcattataaaaaaaagtatacacatatctcaagtcaaatctct

SEQ ID NO: 47508 - DNA, 401 bp, Glycine max
  Clone ID: LIB3107-012-Q1-K1-E8
agcatagttcccgtccctgtccccgaattagcggtggggggtttttgatgcccatccccgtccccgcgggaaatttttccccgactgcaaggccccgaatggggcagtccccgcggggatccccaagttgtggggagaattgtcatgcatacccgcacccgcttacacccctaattttttttatgtcttttattatttattgctttgaatttttttatctttctaaaaaaagaaaaattaattttttgttaataaaatttgtatttaccccacaaatttacttgaactaaaaaagggtttaagttaacataaattagaatagaattacaaagaatacaataatttggttttaatttgttttggtttgaattttttttatggcttttattaggtattccttt

SEQ ID NO: 47509 - DNA, 391 bp, Glycine max
  Clone ID: LIB3107-012-Q1-K1-F12
atcctgcaattgcaattcttggtatctgctgcggcgggcagttatccagagtgaggcccactgtttcggagctttttggtttgaaagacttcggtctattgagcaacttcatggctttggggaacccacttggtgcatttcttttctctgctcttctagcaggacatatatacgacaatgaggcagcaaaacaacacggtgtaggcctcattgcttcaagtgttgcatgcatgggtccaaattgtttcaagctaacctttttgactctggctggtgtgtgtgttgcgggaaccatctccagcattatcttgaccgtaagaattaagcccgtttaccaaatgctttatgccgggggtgcttttaagctacctcaaacttcaggccagtaaaa

SEQ ID NO: 47510 - DNA, 118 bp, Glycine max
  Clone ID: LIB3107-012-Q1-K1-F7
agaaaacaacacaaaggtactttttcgagaacacgacatatggtttcggcggggatattactacagaggggtacgtcttctacaacactacttaagggttctgcttccaaaacactac

SEQ ID NO: 47511 - DNA, 153 bp, Glycine max
  Clone ID: LIB3107-012-Q1-K1-F8
agcacaggcttatctttgcgggtaacatctagaagagggacgaaccctttcaaattataacatccagaaggaatctaccctgcacttggatttgaagcttcgttgtggcatgcaaatctttgttaatactttgacctgaaaaacaataacttt

SEQ ID NO: 47512 - DNA, 421 bp, Glycine max
  Clone ID: LIB3107-012-Q1-K1-F9
ccacataagggggatggtttctcatccccaatatatttactttaacgatacctcacgttgatggggggtccaatttgtcaattaaaattcggtggtctcagaaaatactctactccaaaggccagttctctttgaatgtgccgtttacctttccacattttgttaaccctgcggggaagagaatatctaaaatagaaaagattctaattaatggggattctgttactggagttgagcttctgtgcaagacaataacccacccactgaatgaagtgaggcctcattcttggagtatcggcttcttatatgattcccaatgtctcttatggtctacagtccattttagcttttcatatgcctgttctttaagtcatataaatggtggtggtctttttgaatcttcatctgtgcaatattttca

SEQ ID NO: 47513 - DNA, 373 bp, Glycine max
  Clone ID: LIB3107-012-Q1-K1-G12
ggcagagcaaagcaaagcagagccgacaacaagaagaacaaaaccggcatcaacaaccacaagaagaagaagcttgcaaattagaagaatcttcagttgaaagggaagaacacacaagaacaaagagaggaagaaacgcgaatgaagggagaattagagttgccaccagggttcagatttcaccccactgatgaagaattggtgaatcactacttgtgtaggaagtgcgcgggtcaaccaatcgcggttcccatcatcaaagaggtcgatttgtacaagtttgatccatggcagcttccagaaattggctactacggcgagaaagaatggtacttcttttctcctcgggatcggaaatacccgaacggttcac

SEQ ID NO: 47514 - DNA, 389 bp, Glycine max
  Clone ID: LIB3107-012-Q1-K1-G5
gagaacgatggctgcaaatgtggaccaaactggtcctgcaacccctgcacttgcaagtgaggtgttgggagagcaagcttcaagcagagatagcccttaattaggaataatgataaactattaatgtgtagctaaaaacttatgtattatgtctgtgatggttttcgtgcactctggtgttttgtgttaaacaaacatccttagaataaagtggtcatgtcttgcctttcagcaagttcaagtgttttggacttgtgatgggtgtgttaagctcatgggtgcttcttttttttttttttttaatggttgggaattggtcgcttctgtattaagttcggctaatctgaattatgaatctctggttataatattaaatactattactggat

SEQ ID NO: 47515 - DNA, 399 bp, Glycine max
  Clone ID: LIB3107-012-Q1-K1-G6
gaggcatactagaaaatctatctatgattatgagagcgtagttgaaagcaacgactgaaatcgagagggagacgaaaagtttagatcgagagagatgggaaaggagagtagcaaagatacggttccggtgacgcagtggctgaatcgaatggtctcagaaccttactacctcttccatttcttaaccttcttctcctatttcgtcgttcgcagctccgcaacccaaatcttagcgcctcatctcactcaccatctccttcgtcgcgaaatacaaacactgctagtgttcgcgatattggctttcatcaagggaataaaagaagaaacatgggaagcctttatagctgatgtgcttttcctggccaagatttgtctttttctcctagcctttacaatgga

SEQ ID NO: 47516 - DNA, 381 bp, Glycine max
  Clone ID: LIB3107-012-Q1-K1-G7
gggaaacactcccctttgccgctgttgttgggggtgcaccaccgaacagctggccctgtaaatcgcgtttcgtttgtgcaaggttttaaaagatggctgatgctgaggacattcaacctcttgttgttgataatggaactggaatggtcaaggctggttttgcaggtgatgatgctcctagggccgcgttccccagcattattgggagaccacgccatactggtgtaatggttgggatgggtcataaagatgcttacgtgggtgatgaatcccaatcaaaaaggggtatactcaccttgaagtatcctattaagcatggcatattcagcaacctgggacgatattggagaagatttggcatcacacattttacaatgagct

SEQ ID NO: 47517 - DNA, 409 bp, Glycine max
  Clone ID: LIB3107-012-Q1-K1-H10
agaaggggtggaaagagttttagactaaggtggcttaattatcttagggccaacattaagcgtgggcggtgctctgaagcagaagataaaataatctgtagcctctttgctagcattggaagcaggtggtccataatagcatctcagttgccggggaggactgacaatgatatcaagaactattggaacaccaagcttaagaagaaaatgatggccatgaatccttcactccaaaagaagcctcaacaaattacccttttatccatccttcaaagttcagcatattcatcaccatcgtcattcagagacagtaacaacatctcatactaccaccctcacgggtccttttcctactcgtcaaatcttctgagtggtaacaacacttctgcttctgcttattccttctttt

SEQ ID NO: 47518 - DNA, 254 bp, Glycine max
  unsure (1)..(254): unsure at all n locations
  Clone ID: LIB3107-012-Q1-K1-H11
gggancgacgggnaacaaaaagaggaggaccacttacaggaggggggggagcggnaaagtgccaaatataacattttgaagggggcgaaccaacaggaggggaagaaagggaagatgagtttgaggactcttgcaatgctactggggtgggcggaaagacaaagggggagactaaaaaaggaccaatggacaggggttggaagaatccaaaaaaacggaaacaaggagagaaaaaagaaaaaggggagggaaag

SEQ ID NO: 47519 - DNA, 340 bp, Glycine max
  Clone ID: LIB3107-012-Q1-K1-H2
tttgcgtagttttaatttgacggggggttgtgaatccttacattttttaagtagcttttattgttttagttagtcttgcttgaggacaagcaagactctaagtttggggtgttgataaatgtcaaatttattggatttttatatgtattttgtgacgtttatttggcattttatgttttagttatttttagtgattttttgttaattttccagcaaaaatatcccgcttaattaagtgtcagagctccaatggtccaaaatcaacagaaagttctagaaaaagaaattacgagaattgtaaattaaagttaggaaaatcaaaagcaaaatatttttcaag

SEQ ID NO: 47520 - DNA, 307 bp, Glycine max
  Clone ID: LIB3107-012-Q1-K1-H3
gaaattaaaggagggtaaaagaaacacacaccggggcttatttatatttggctggcgcaccaacagttttctacttcacacctttccactgatcatctgcaactgccacaatgattcaaaattgctaagatctttgacatggcacattcatcattgaccaaattgcaattttttcaaaagaatagcaacaatttatgaagtttctgaaacaataaggagtagtggacacaaattaagatcattggtattataggagaatttgatggtaatcatacacagttgctaggaaaagatataatggctactg

SEQ ID NO: 47521 - DNA, 364 bp, Glycine max
  Clone ID: LIB3107-012-Q1-K1-H4
tttgggggatatatggctaacaaaaagagtgggaccacttacaggagtactgggagtggtaatgtgccaaatataagattttgaatttggtgaaccaattggatgtgatgaaagtgaagatgagtttgaggactcttgcaatgctactgctttggccgcaaagacaaagtgtgagactaaaaaaggaccaatggacaggttttgtaagaatccaaaaaaatgcaatcaattagagaaaaatgaaaatgttgaggcaaaggaacataagagtcaatggataagaatgaagtcttgaaggtgcatcaatatattgctcgtttttggtaccaaactagtttgtcattcaacttcattaaattgaaaa

SEQ ID NO: 47522 - DNA, 369 bp, Glycine max
  Clone ID: LIB3107-012-Q1-K1-H5
ttggggggatatatggctaacaaaaagagtgggaccacttacagtagtactggtagtggtaatgtgccaaatataagattttgaatttggtgaaccaattggatgtgatgaaagtgaagatgagtttgaggactcttgcaatgctactgctttggccgcaaagacaaagtgtgagactaaaaaaggaccaatggacaggttttgtaagaatccaaaaaaatgcaatcaattacagaaaaatgaaaatgttgaggcaaaggaacataaaagtcaatggataagaatgaagtcttgaaggtgcatcaatatattgctcgtttttgggccaaactaatttgtcattcaacttcattaaattgaaaaagtttg

SEQ ID NO: 47523 - DNA, 128 bp, Glycine max
  unsure (1)..(128): unsure at all n locations
  Clone ID: LIB3107-012-Q1-K1-H9
aaaaaacaaaaagcnaaaaacaagaaaaaaggggaagataaaaggagggaaaaagaaaaacaaaaggggggtgatagaaaaaggggggggggaccaacagatttgtgcttgaagcctttacagagggc

SEQ ID NO: 47524 - DNA, 163 bp, Glycine max
  Clone ID: LIB3107-013-Q1-K1-A1
gtgaaaacagcacgacagagggggcaccaacacacgccgttgcaattatcctaggcgcgcactccctgatgagtgaagagaatctctctcctttttactagacccatacaatttagggcgcgctttttcccggccttccctcgccaccgcatatacatacata

SEQ ID NO: 47525 - DNA, 368 bp, Glycine max
  Clone ID: LIB3107-013-Q1-K1-A10
gttggactgagtcatctagtgctaatgtgagaggcccaccggcacttcctttcaaattgcctcagttggatgaaaaacttagagctggttataagcttaccactgctgggaaattcactgaagctcttaagacatttgttaatattcttcatacaattcctttgattgttgttgagtcaaggagggaagtggatgatgtgaaggaactaattgtcatagtcaaagagtatgttttgggcatgcagatggagctgaagaggagggaagttaaggacaatatagtacggcagcaggagcttgcagcatatttcactcactgcaaccttcagacacctcacttgaggttagctttgcagaatgcaatgact

SEQ ID NO: 47526 - DNA, 431 bp, Glycine max
  Clone ID: LIB3107-013-Q1-K1-A11
ggagagagagagagaaacaaagcagcacccatttggatcctctcttctcttctttgatctccgttaccctttttgttttctcaacagagagagagagagagaatctttcgaagttcgtttgcgtgtgttgtgtggtcagtcaccgatggcagcaccacctgcgagggcacgtgccgattacgattacctcatcaagcttcttcttattggcgatagcggtgtgggaaagagttgtctgcttttgcgattttctgatggttccttcacaaccagttttatcaccaccattggcattgattttaagataagaaccattgaacttgatggcaaacgcattaagttacaaatctgggatacagctggtcaggagcgatttcgaactattaccacagcttattaccgtggagccatgggtatcttgctcggttatg

SEQ ID NO: 47527 - DNA, 389 bp, Glycine max
  Clone ID: LIB3107-013-Q1-K1-A12
acacacaccacaatcatggaagttgatagtaggtttgggaacactggcctcctccttgtggccacaatccttgtggtcaagctcatctcaaccttcatagtgcccaaatccagaaagagggtacccccaattgtgaaggggtggcccttaattggaggactcatccgtttcctcaaaggtccaatctttatgctccgtgacgagtaccctaagcttggaagtgtcttcactctcaaactcttccacaagaacatcaccttcctcattggccctgaggtttctgcacacttcttcaaggcctcagagactgatctcagccagcaagaggtgtatcagttcaatgtgccaacttttggacctggggtggtctttgatgttgattactctgt

SEQ ID NO: 47528 - DNA, 403 bp, Glycine max
  Clone ID: LIB3107-013-Q1-K1-A2
gaaccaaaacacgttgtttcaattattctattcgcgcactccctgaggagtgaagagaatctctctcctttttataaacccataaatttagggcgcgctttttcccggcctcccctcgccaccgcatctccatccatctccgccacgtcgcctcctctctctctcgcttttcgtagttatacttcttctctcgttcctagaaatgagcttctcaacatgcgcagagctgtcgcgttgtttcgccgcagcatcggcgaaacctaattccggtcagtcaaacggcacttccacaacaagcctcagttttctcactccaatcggtcggtacggcgccggttcatcagtatcgaggtcgaataagaccaacagaatagtcgcggaagctactcaaggtcttacttac

SEQ ID NO: 47529 - DNA, 334 bp, Glycine max
  Clone ID: LIB3107-013-Q1-K1-A3
gactattccctcctccttcctttgcgtctttcgcttttgctttctaggtttttttttttttttcttgctctttctctgtgtcgatggcgggaaaaggagggaaggggcttgtggccggaaaaaccacggcagcgaacaaggacaaagacaaggataagaaaaggcctgtctctcgttcatcccgtgctgggatccagtttcctgtgggtcgtatccataggcagttgaagcaaagggtgcaagcaaatggacgtgtgggggcgactgctgctgtgtacttggcctccattctggaatatctgactgctgaagtgctggagctggcggggaatgc

SEQ ID NO: 47530 - DNA, 433 bp, Glycine max
  Clone ID: LIB3107-013-Q1-K1-A4
gaccaaacctcaatttataaacactctagaataagcctgagggcaagattcacacactcactcctgtcacttccctacactcctgcatggccgaaccactatatctagaggaagattacaaaccaaaagattatacccctgaagccaaaagtctatccttccttgcctctattgttgcccttttcatctacatatgtgtcttctataccttcaacctatctacctattctatcctcaacaacaacatcttttggtttttcatgtccaataccctcaatctcatcattgctgctgactatggagcatcctcttcaaacaaacataaacaagatctctatgaagagtatgtgcgacatagtcaagcaagaaactgtgactcgtcatcatacgtgcccaaatatgatcatgaacaattttataaaaaatgcattta

SEQ ID NO: 47531 - DNA, 423 bp, Glycine max
  Clone ID: LIB3107-013-Q1-K1-A6
ggtggcagagagcgaacccaaaacgagaggtaccttcccttcaaaccttccactcttctctccttttccaatcaagggaataatatttcttagagatattccgaaaccatggctcacgccaatcctatgatttttgttgttggaattctaggtaaccttgtctccttctgttgctttctagcaccagtaccaacattctatcgagtttgtaagaagaaaaccacggaaggtttccaatcacttccttacgtggctgcactcttcacttcaatgctttggatattttatgcttacataaagacgggcgaaatacttctcatcaccattaacgcattcggttgtttcatagagacagtttaccttgtcatctatatcacttattgccccaagaaagctaagttctttaccttcaagatgattttc

SEQ ID NO: 47532 - DNA, 319 bp, Glycine max
  Clone ID: LIB3107-013-Q1-K1-A7
gaaccaacacacgctgtttcaattattctatgcgcgcactccctgatgagtgaagagaatctctctcctttttataaacccataaatttagggcgcgctttttcccggcctcccctcgccaccgcatgtacatacatcttcgacacgtcgcctcctctctctctcgcttttcgaaaatatacttcttctctcgctcctagaaaggagcttctcaacatgcgcagagcttgcgcgttgattcgccgcaacatcggcgaaacctaattgcggccagtcaaacggcactttcacaacaagcctcaattttgtcactccaatc

SEQ ID NO: 47533 - DNA, 217 bp, Glycine max
  Clone ID: LIB3107-013-Q1-K1-A9
aaacccctaaaagttactattctctacttccacaatctcgcaactttcctaagccgaacctaaattctctcatcaaaccctcacttatccaatccccacccaaataacacaaatcaacctcactcacctaaaataaaccatcgcctgctctctcaccgacgaaatcatcgcatcgccgcctcccctacggtaggtatctgatgggacacattatact

SEQ ID NO: 47534 - DNA, 440 bp, Glycine max
  unsure (1)..(440): unsure at all n locations
  Clone ID: LIB3107-013-Q1-K1-B1
aagaagaaaccagcagcagagaagaaggaggaagttgaagtgacagaagggaagaaggaagctgaagtcatagaagagaagaaggaagtggaagtgacggaagagaagaaggaaattgaagtaacagaagagaagaaggaagctgaagtcatagaagagaagaaggaagtggaagtgacggaagagaagaaggaaattgaagtaacagaagagaagaaggaagcagaagtgaaagaagagaagaaggaaggggaagtgacggaagagaagaaggaagttgaagtgacggaagagaagaaggaagcggaagtgatagtagaagagaagaaggaagttgaagtgacggaagagaagaaggaagtggaagtgaccgaaggaaagaaagaagtggaagtgatcgaagagaagaangggaacagagtgacagaagaaaagaaaga

SEQ ID NO: 47535 - DNA, 389 bp, Glycine max
  Clone ID: LIB3107-013-Q1-K1-B11
gagaagaaaaaataaataagcttgggctataagctacaattagcttatgcataagttgaaattatttttttagagaagataaaatcatttagcttctccaaaaagctgattctaatttatacataagttaattttggtttatgaaggagtttatttcatttttttttgcaagtacgtgcttatagagaagtttattcaaatatggccacattaacattcatatcttgcagtaaaatgatgtttttctttctaaccaatcttatgatgctttataggttttgtggaggcaaacagaagatgctgtggtaccgggactgtagagacaacatccttgttgtgtaatccaaaatcaccaggaacttgttctaatgccacacagtatgtgtttt

SEQ ID NO: 47536 - DNA, 363 bp, Glycine max
  Clone ID: LIB3107-013-Q1-K1-B12
ctaagaaattatacaatgtaccaggaactgtgtgctgcccttgagaaaatgttcagctgtttcactctaggtcaatgtggttcccatggagctccaggaagagaaatgttgagtgagagcaagctgaaggacctcctgcatggttcagaatatgtactcacttatgaagataaagatggtgactggatgcttgtcggagatgtaccatgggatatgttcattgacacatgcaaaagactgaaaatcatgaagggttctgatgccattggcttaactcccaaggccatggaaaaatccaagagcaagtgctagttggtattggaacatgaagagtgtggaaagagaacttatgatataaatgac

SEQ ID NO: 47537 - DNA, 386 bp, Glycine max
  Clone ID: LIB3107-013-Q1-K1-B2
ggcgctcacatcgtgttctctgcggcgcgagctaggtagggtttagaacctcgcagttacagaaaacatggcgactgtggtgccaacctccgaagaagacgctgcactctccgtcgttcgattcgcctctgaacttgcctgggccgatgccggtcccgaagttgctgagccccaagttagcaaactctgcgtggaagctgaagaattcattgttatgggaaagtggttggagctagcatcattgatgattacctgtgctgaattgattttctcggaaggttctggaaaagatatagagtccattttcactatcatctgccatcttgttacaaagaccggaaattcagatgaagtgatggagattgttaaaggtattactacaaaaa

SEQ ID NO: 47538 - DNA, 403 bp, Glycine max
  Clone ID: LIB3107-013-Q1-K1-B3
gatctatcaccctcagagtcgaaccagacacacttgcacgtcaccaccaccaccgtggaaggtggagcgtgaggctgtttccggtaacctctcccggcggcgctgagtggtgatcaaggaaatgggtcagacgctgagttgcgtgcaacagcacgaggaccatggtgtgctcttccctgcacttgcaagtggagaattggaggttgttgaggccatggtggaggaagaccccactgtgttggaacacaccattggctgtgacaggctttctcctctgcatgtcgctgctgccaatggtcggatcgaggttctttccatgttgttggataggtctttcaatggtgacgtattgaatcgacataaacagaccccgttgatgttggctgtgatgcatggaaagact

SEQ ID NO: 47539 - DNA, 403 bp, Glycine max
  Clone ID: LIB3107-013-Q1-K1-B4
gaatcgccaatttctgattgcaaaacagcgttttctggaagccccaaacgtacgcgattcgttcgaaacagatgaacttttatctgaattcaacgctcgtttgctggcttggaattctggattcgctgtagcgcggataaagagaacaagaaatggctacggttgatgttatcaaatcctgcatcggttccattagacagatatcagagcatattcaagacgctattgtttatttagatgctggatctacagaaagtttccaatttattggggcatatccagtacttcttgaacttggggcacgagctatttgcattttggaaaacatgttctcacttgatgtggtggttgattggaactcaaattctaattcttcgaagaaacttgtggttatcacattaag

SEQ ID NO: 47540 - DNA, 385 bp, Glycine max
  Clone ID: LIB3107-013-Q1-K1-B6
gaccgttccattgctgagcaacttctgctacttcctactccaaccgcacttctgctccgcaattatcatgggcaaggtcaagatcggaatcaacggatttggaagaattggccgtttggtagccagagtggctctgcagagagacgatgttgaactcgttgccgttaacgaccctttcatcaccaccgattacatgacatacatgtttaaatacgacagtgttcatggacactggaagcatcacgatgtcaccgttaaggacgagaagacccttctcttcggtgacaagccagtcactatttttggacacagaaaccctgaagagatcccatgggggtcaactggagctgacatcattgttgagtccaccggagttttcaccgat

SEQ ID NO: 47541 - DNA, 322 bp, Glycine max
  Clone ID: LIB3107-013-Q1-K1-B7
gacacacaacacagtttccactttccacttggactgtaccaaagtcacgcttgctccctctctcaacggcttccctcttcttcctctctatatctctctctctggacacacacatacttggtgttgaacgggtttttgggtgaacgagtactgttggtggcttcatcttttagtgaataatgatacagcaggatgcggaggtagcttactctctctagtgatgtatcccgcaaagtgatttacttgaatctgtattgcaaagttattctgtgactcttaagtcccttttgatcaaaaaacctttaacaatcatcttactcat

SEQ ID NO: 47542 - DNA, 360 bp, Glycine max
  Clone ID: LIB3107-013-Q1-K1-B8
gaatcgccaatttctgattgcaaaacagcgttttctcaaggcccccaaacgtgcgcgattcgttcgaaacggatgaacttttagctgaattcaacgctcgtttgctggcttggaattctggattcgctgtagcgcggataaagagaacaagaaatggctacggttgatgttatcaaatcctgcatcggttccattagacagatatcagagcatattcaagacgctattgtttatttagatgctggatctacagaaagtttccaatttattggggcatatccagtacttcttgaacttggggcacgagctatttgcagtttggaaaacatgtgcgcacttgatgtggtggttgattggaac

SEQ ID NO: 47543 - DNA, 299 bp, Glycine max
  Clone ID: LIB3107-013-Q1-K1-C1
cactcttccattgttgctttcaacacttgtgttcttctccactttcacacatgccttctcttcttctgtgtttccggaattgaatcctattaaacctaggcactcacgtcttctcaggagtgctgtgcaacgagaaactcctacatctcagttgtctgaactatggtcacctctggaaagccaaggatggaaaccttatgttgaatcaaataagccaacattaccagagaagtcagagggatatatccaggtctttcttgatggaggttttgaccaacaaaagatggggatatgtgatg

SEQ ID NO: 47544 - DNA, 443 bp, Glycine max
  Clone ID: LIB3107-013-Q1-K1-C10
gggaattgggagtttcattttcattaatttttggttcgccccttttctcaatgcttttcttaatgttgaatccttcacaaatcgtcaagagttagcccacccagaacaacaacgcgtttcagctggccacacacattcttaatttttttggctggcctatagtaaaaactcatatcaatgtcctcaagaacgttgaggagaagactccatcatggggatgttgatggcaaaaggcaggagcatttggagacttcgggattagattcgttgagtgagcccttgctggcagatgatgattatattgagaataagaagatatgtactcttgaagatctatgggatgatgagaggaaagaggcccagtttcattggacattcatattctcaaacctcattgcacaatgggcacagtggttagcaaatgttgtactaagatctggatc

SEQ ID NO: 47545 - DNA, 410 bp, Glycine max
  Clone ID: LIB3107-013-Q1-K1-C11
gagagtggtggagtgtgcagaagagcgtcgcggtcgcgaccctaatcagaagaagcgcagcttcaagcgagtgacagccaccagccatgggtcgtatgcacagccgcggtaagggtatatcctcttctgctttgccctacaaaaggacacctcctagctggctcaagatctcttcgcaagatgtcgaagaaaatatctgcaagtttgcgaagaaaggtttgaccccgtctcagattggtgtcattctcagagattctcacggtattgctcaggtcaatagcgtcactggcagcaaaatccttcgcatcctcaaagctcacggacttgcgcctgaaattccagaggacctgtaccatttgattaagaaagcagtttcaattaagaagcatcttgagaggaacaggaaggac

SEQ ID NO: 47546 - DNA, 327 bp, Glycine max
  Clone ID: LIB3107-013-Q1-K1-C2
aagaagaaaccagcagcagagaagaaggaggaagttgaagtgacagaagggaagaaggaagctgaagtcatagaagagaagaaggaagtggaagtgacggaagagaagaaggaaattgaagtaacagaagagaagaaggaagctgaagtcatagaagagaagaaggaagtggaagtgacggaagagaagaaggaaattgaagtaacagaagagaagaaggaagcagaagtgaaagaagagaagaaggaaggggaagtgacggaagagaagaaagaagttgaagtgacggaagagaagaaggaagcggaagtgatagtagaagagaag

SEQ ID NO: 47547 - DNA, 327 bp, Glycine max
  Clone ID: LIB3107-013-Q1-K1-C3
ggttctagtgtgtgattgtttgttgttgtaactcggtcttcttcttttgttgttctgtgtttgtgtttgttttttctctcacctgaaaatgtcttgctgcggtggtaactgtggttgcggaagctcctgcaagtgcggcaacggctgcggaggctgcaagatgtacccagacttgagctacactgagtcaaccaccaccgagaccttggtcatgggagtggcacctgttaaggctcaatttgagggtgctgaaatgggtgtgcccgctgagaacgatggctgcaaatgtggaccaaactgctcctgcaacccctgcacttgcaagtg

SEQ ID NO: 47548 - DNA, 393 bp, Glycine max
  unsure (1)..(393): unsure at all n locations
  Clone ID: LIB3107-013-Q1-K1-C4
cccacgcttgcttacngataaaacaacacaacttaatttattcatccaacatcacacacatctggtacgtttactttcttacaatcaaaaccaacaacaactactacaacttatcacaaacactaccattatcaaagacacacagcttactaatattgcaacgatcagaagcaaaccgactaatacatctaccttctccatgctactattgtcacctatgtacacaccaaaactactgctttagcttacagacataacattcataaccaacattataccaccaatgcctactccattaacactgantaacaccattctacttgctgctacgaatgtcacactaataaacatcatataactacttgtgcccttaatgataacaccaataaacat

SEQ ID NO: 47549 - DNA, 399 bp, Glycine max
  unsure (1)..(399): unsure at all n locations
  Clone ID: LIB3107-013-Q1-K1-C5
ggaacacaacacaacgttagccttggaagtttaaaccttagcagcgtcgacaatggccggcgaggagctcgccggagaccacacgccggagctgctgtgtctggtccatgacatcgccggaatgtgctcggcgttatcctcctccgccggctccgccggcgccatgttccgcaaggactgcaccgatctggttcgccggatctccctcctcacccacctcttcgaggagattaaggaactcagcaacaacgttgncggngggtcttcttcttctccttctccttcttcctcggcttcttcaaagtggtcttctgatctggtcctcgcgcttcactccgcaagacgcttgctttccgtcgctagaaacttccgctccaattgctcctctgatggagctgc

SEQ ID NO: 47550 - DNA, 418 bp, Glycine max
  Clone ID: LIB3107-013-Q1-K1-C6
gatgatgaaagcggcagcatcaccctttaacctaaagtattaaaatgttggtttattattattactcatagctcaaaacccaattttaccctaccaattaaggtctctcatacagtagtattttatttgcactacgtactggctactttatttatttaagcagaagcaggtgagtgagtgagtgagcaagagtgaagagcgaagagaatggctcccaagggtttaatctttttggctgtgttatgcttctcagcactgtcactgagtcgttgtcttgcggaggataatggacttgttatgaacttctacaaggaatcatgccctcaggctgaagacatcatcaaagaacaagtcaagcttctctacaagcgccacaagaacactgctttctcctggctcagaaacatcttccatgact

SEQ ID NO: 47551 - DNA, 412 bp, Glycine max
  unsure (1)..(412): unsure at all n locations
  Clone ID: LIB3107-013-Q1-K1-C8
gatcatccaacatcacacacaactgctacgggtacttccttacaatcaaaaccaacaacaactatggcaagttatcaaaagcactacgatgatcagggtcgcaaggttgacgagtatggcaacgttgagaagcaaaccgacgaatacggcaaccctgttcatgctgctagtgtcacctatgtagccaccagaactgctgctggtggttacagtgatgacattaataagcaacatgataccaccaatgcctacggcgtagacactggtagacagcattctagtggtggctacgatggtgacactaataaacatcatggaactactggtggctataatgatgacaccaatagacatcatggaactaccggtgtctatggtatagacaccgataggcaacaacantggactactg

SEQ ID NO: 47552 - DNA, 296 bp, Glycine max
  Clone ID: LIB3107-013-Q1-K1-C9
gacatatgatcttgagtctgccgcatttgccatatcacgacggttcctaccaattggtccattgattgcaagtgacagcaacaaaagttcactctggcaaggagacacaactttcttagactggttagatcagcagccacctcaatcagttatatatgttgcctttggtagtttggcagtaattgatcacaaccaacttaaggaattagctctaggactcaatttccttgacaagccttttctttgggttgtacggccgagtaatgataatgaggcaaacaatgcatgctctgatg

SEQ ID NO: 47553 - DNA, 391 bp, Glycine max
  Clone ID: LIB3107-013-Q1-K1-D10
acgacagaagggtgaaggagatatattagttacatttatctatgaaaaatcgagatcgggtgagataacacaaggtcttccaaaagtagaacaggtattagaagttcgttcgattgattcaatatcgatgaacctagaaaagagagttgatacttggaatgggcgtataacaaaaattcttggcattccttggggattcttgattggtgctgagctaacgatagcgcaaagtcgtatttctttggttaataaaattcaaaaagtttatcgatcccagggagttcacattcataatagacatatagaaattattgtgcgtcaaataacatcaaaagtcttggtttccgaagatggaatgtctaatgtttttttgcccggtgaactaattgga

SEQ ID NO: 47554 - DNA, 428 bp, Glycine max
  Clone ID: LIB3107-013-Q1-K1-D11
gggagagaaaaacgaagagtgagtcaccgttccgtgttcccgccgagtcggtataaacgagtgagcgagtcacaactcaccgcgctgcatggaccctctagaagctttggtcgcccaaatccaagggctttcgagcactcccggcgacctcactcgcctccacagtgttctgaagcaagccgatgactcgctccgatccgagtcaactcgcctcgctccgattctcacccagctcgacccctccattcattccctcgggtttctctacatcctagaagcttcaatgaccgatccggtaaccaaaacgcaggctgagaccgtcgttccgatcgttactaggtttattggcgcttgcagcccggagcagattcgcttagcgcctgataaatttttatctgtctgtaagaggttaaaggatcaagtgatgc

SEQ ID NO: 47555 - DNA, 445 bp, Glycine max
  Clone ID: LIB3107-013-Q1-K1-D12
ggaggcgaaagggtcatagggtactgttgtggttagggattcgaattttgattatcgaatcgcaaaattctgaatcaatcaatcagtaattagagccattaacgactgcaatggtctgcgagaagcgtgagaagaaattatcgaaggtgatagtaccagacaaatggaaagaaggggccagcaatactaccgagggtggtggccgcaagatcaacgagaacaagcttctctccaagaaaaacaggtccttttaacttaatctctagctttacatactttgataatttctttttttcttaattttaaaattgggtataagaattaagaagcataacttggctctgtcacctgtgtattttataattagctgataacatgttaaagcgatcatttctagttccatagcagagcctttggaatgtaaatgacttgacagttgacactt

SEQ ID NO: 47556 - DNA, 440 bp, Glycine max
  Clone ID: LIB3107-013-Q1-K1-D3
gggaactgtttataatttcattttgactctctctcgctctgattgcttccttttcccttttattttgctctcttctctgcacaacaattccttctcattccagatattccaaccatcgaccgatctcaattctcaaccttaacctctcagaatgtcttacgcttatctcttcaaatacatcatcatcggtgacaccggagttgggaagtcttgtcttctacttcaattcacagacaagcgctttcagcccgtccatgacttgaccatcggtgttgaatttggtgccaggatgatcacaattgataacaagccaatcaagttgcaaatatgggatacggctggtcaagaatcattcagatctattacaaggtcttattatagaggggctgcaggtgcactgctttgttatgatataaccaggagggagacatttaatcact

SEQ ID NO: 47557 - DNA, 443 bp, Glycine max
  Clone ID: LIB3107-013-Q1-K1-D4
taaataagacaattgacgagcttaatgcagagttggaccgtattggcaggccaattgctgtggactcaggggcccaactttacactattttagagatgtgtcgtgcatttgacaaagtgtttagagaacacctggatggaggacgtcctggtggggaccggatatatggagtttttgatcaccaattaccggctgctttaaaaaagctcccttttgatcgccatctttctttaaaaaatgtccagagagttgtcactgaagctgatgggtatcagccccatctgattgctccagagcagggttatagaagactcattgaagggtcaattggctatttcaaaggcccagctgaagcctccgtggatgctgtccactttgttttaaaagaacttgtgcggaagtcaatttcagaaactgaggaactaaaaagatttcccacactt

SEQ ID NO: 47558 - DNA, 474 bp, Glycine max
  unsure (1)..(474): unsure at all n locations
  Clone ID: LIB3107-013-Q1-K1-D5
aattcgagcggccgctnnnnnnnnnntnnnnttttttttttttttgcagtacaatgaaatcctgggcgaaggagcttccaagacagtatatagagcatttgatgagtaccaagggattgaagttgcttggaatcaggttaaattgtatgattttctgcagagccctgaagatctcgagaggctttactgtgaagttcatctcctcaagacgttgaagcacagaagcataatgaaattttacacttcttgggttgatacagcgaacagaaatatcaactttgtgactgaaatgttcacttctggtacccttagacagtgagttccctccattttcaaccttttgccactcctctatattatatttgtatgatcattatcctttttgtgcttttgagaagntttgntattttttcttcttttatttattttaattatcacaatagatataggcaaaagcacaagagagttaacatt

SEQ ID NO: 47559 - DNA, 412 bp, Glycine max
  Clone ID: LIB3107-013-Q1-K1-D6
accactttttcggacacactcttttattggatgtaagtcatgtaagtccttctaaatatgcgagtttcattccacatttggtgggtttcatgtaagttcttttattggatgtaattctagtgtagtgagacacatgaatttcaatcaacaaggagaaaaatatgttggaaggaaagtgttagattgagtgttactagcactcctatgtgattcatttatgcaatcttcataatcataatcagaatgatgtgctgttctaattagttaatttgttttgtgttgttccctttgatcaatgtagtgctagagattcccaagagtatgtactattatttcattaaattatcaaaggatgatgaagtcctaatgaattatgataatgacttatcagcaaatgatatacattattctt

SEQ ID NO: 47560 - DNA, 277 bp, Glycine max
  Clone ID: LIB3107-013-Q1-K1-D9
gatagaagtgaggggtgatcgatcttttccacactcaaacctagagagtctcataaaaaaaactatgcaagcttctctcatccgaaccggctccgtgccggtccagaacacggttctccccggttcaccgcgagtctcactcacgcgccaagcctccttctccggcgacaagagccacgcgcattctcccaggttttcaatccattcttcccactccaacaaccgcagatcctcgtcggagcgcgacgacgagaatttcggcgttcgccgggatctg

SEQ ID NO: 47561 - DNA, 414 bp, Glycine max
  Clone ID: LIB3107-013-Q1-K1-E1
acaccgatttacaaagtatcgtagggtattttatattagaaatgattgacgaaatcgtttctgacaagaatatccaaataccaaatccgacctatatataacctctgcaaagtaaaagaagttcttggaaaaatcaaagaaaaagtctcttcttcttctgtaaagaattcttccaataatttttctgaccctaatcttttcaaaaaagtgcgcgcagtacttttgtgcttacgagccaaagtttttatacaagaaagccgaagtatatatcttatttgatacaaactcttttttttgcggatccattgtaataatgagaaaaatttcggcatatccgcaaaaaccggtcaataatatcaaaatcagataaattggcccaaaccggcttactaatgggatggccaaatacattac

SEQ ID NO: 47562 - DNA, 428 bp, Glycine max
  unsure (1)..(428): unsure at all n locations
  Clone ID: LIB3107-013-Q1-K1-E10
catatactaggggatttcacttggaaaagaaaatgtcccgtactgatggattcgggtccacaacgatgggttcaaatgtacgagatcttgtagcacttaccaacgaggccctatcgattagtattatacaaaaaaaatccatcatagacactaatataattagatctgttcttcatagacaaacttgggatttccgatctcaggtaagatcggttcaggatcatgggatccttttctatcagataggaagggctgtttcacaaaatgtacttctaagtaattgctccatagatcctatatctatctatatgaagaagaaatcatgtgacgggggggattcttatttgtacaaatggtacttcgaacttggaacgagtatgaagaaattaacgatacttctttaccttttgagttgttctgncggatcg

SEQ ID NO: 47563 - DNA, 452 bp, Glycine max
  Clone ID: LIB3107-013-Q1-K1-E11
cgggccggccgacgcgtacgcaagaagactacataaggccatatactttttgatttcacttggaaaaaaaaatgtccggtctgatggattcggatccacagcgatcggttcaaatgtacgagatcttgtatcacttaccaactaggccctatcgattagtattatacaaaaaaaatccatcatagacactaatataattagatctgttcttcatagacaaacttgtgatttccgatctcacgtaagatcggttcatgatcatgggatccttttctatcagataggaagggctgtttcacaaaatgtacttttaagtaattgctccatagatcctatatctatctatatgaagaagaaatcatgtgacgggggggattcttatttgtacaaatggtacttctaacttgtaacgagtatgaagaaattaacgatacttctttaccttttgagtt

SEQ ID NO: 47564 - DNA, 336 bp, Glycine max
  Clone ID: LIB3107-013-Q1-K1-E12
gacttactcctgggtttttcatggcaagcatggcaagaggaaaagcaaatgtgaactccaaaaaaaaattggtcacagctgtgttggttttggtgattggtggggggtttttctatttctattctcaaaataatgattcatcttctggtgggtatggggataaatctttgagccactttggtttgggaggggacaaagattatggtgaatctttcttcacagttgttggaagagagggcaatgttgtaccaaagagcattccaatctgtgatgatcgattatccgagctgattccttgtctggacagaaatctcatataccaaacaagattgaagc

SEQ ID NO: 47565 - DNA, 432 bp, Glycine max
  Clone ID: LIB3107-013-Q1-K1-E2
aggatcatagatgttgtactgatcaatgttaccaagcgcttgatccatggcatagctatacccagactcacactcatcagattccttctgcctgtgaaaatcacatctactcattagttgccggaaagtctggtcggagatcatagcatggctccaccaatacgtcactgtgcccaagttatcatagtagttgtctgtcactgcatttcctacctgcattgcattattaatattaacaaaacttcaccatcaatattccaccccttcttataacaacgtctatataatcttatcttaaaatgtcaagatattacattttaagttgttaaaaagtgtaatttactcttgggtccggctaatcattcaaggtcctaagagtattaattaaagaattaaaaaggataaatctttttggtgagatacataaaggta

SEQ ID NO: 47566 - DNA, 420 bp, Glycine max
  Clone ID: LIB3107-013-Q1-K1-E4
aggttcctatttaggaaccagtgttgaattgtagcgcaatatgttgtgcgtgcttaagacacgagtgtgaggtcgtgggtattgtataattcactagcagtgtctgtgtgctaaaatgattttaggggctggacctgaatcaggagggagaggccctgatagactcttcggagtgtacgccttgggggtcatcgggtttgagtgcttctttaagcctatgttgatcccatatggttggagcattctcgcaaaacatcgtgaccctgactggtctccctatgatcttacttagtgagagtgacctgacaaacccattgtgtggtgtgtcttgttatgtactcctaagcgccgcagggtggttattcactgacatggtaccacattgcatgtaggcttgagtcttagcataattgtctcatg

SEQ ID NO: 47567 - DNA, 425 bp, Glycine max
  Clone ID: LIB3107-013-Q1-K1-E5
cgacagaagggggagaaagagaaagcatagaaaggaaacgaaaaaacagagtgccgcgcagaatttgaaaacaaaggctgaaatttgaagaaactgagatcattgggtgtgaaatatatggcagaggttgtcctgctagtcgatgatttgaaattactttctgcgagtcctcgttgtagaatttgtcatgaagaagagtttgaaagcgtagaaaccttggaagcaccttgtgcttgttctgggaccgttaagtttgctcatagagattgcatacagagatggtgcaacgaaaaaggaaatacaacctgtgaaatatgtctccagcaatatgaacccggatatacagctcctccgccaaagaagtctaagataaatgatgaaacaatgtccattagggaggaggaagaaccgtccaacgcaagaat

SEQ ID NO: 47568 - DNA, 256 bp, Glycine max
  Clone ID: LIB3107-013-Q1-K1-E6
tcattgttattgaaatatatactatcaagttctctgctctacaatgattttaaattcctttcttcaattcctacgtatagaatctgatatactcaacagtttttaagccttgaaacccattaagcaccttttccttgttaagccaccgttaattccattcatatagatcatatacacagatcattctacccataactaaacacactatgagcattatttctccaactgacctaacccacctattcagttcctttct

SEQ ID NO: 47569 - DNA, 389 bp, Glycine max
  Clone ID: LIB3107-013-Q1-K1-E7
gagaatagtgagagtgagagatggatcagtttttgtggagggtgttgcctttgcttacaatccttgtttcctttggagtgttcttctacttgcaggattcttacacagcacagttatttcctctcataaagttaccgcgggataagtgcagccttcttccccatcgccacttctggatatccagcaaacgtattgtgaccccacaagggatcatttctggttcaggttttgcttttttaaaccttgattattattattattattattattgagtagtgctatctagtaggaatgttgctaacacgaattgttacgaattcaaaaacagacaatcaaattaattgtattaacatccaggtagagagcggataataactatctgcaataaa

SEQ ID NO: 47570 - DNA, 351 bp, Glycine max
  Clone ID: LIB3107-013-Q1-K1-E9
gattaagaaacactatgtctaatatccatcgagagagtgacacaaaaccctaaccaaaacgacaccgtgggatctgttcctcctctcagattttgctgcaatgggcaagaaaaagttagattcaaagtccgatcgcaaattcgaaaagaaggtccaattttattccaaggtgaaagatgctgttacctccttgagtgcccaaaagtctattactaagaaaaagaaaaagagcaaacaacaaaggcggcagaagaaattgaaggcatataatctatcttcacttttagaagcccttcctgaggtgaaagcatcaaaaaaaccaagttgtgcgaatgacagcaaacttacgtg

SEQ ID NO: 47571 - DNA, 366 bp, Glycine max
  Clone ID: LIB3107-013-Q1-K1-F1
ggttgcagctgaaagacgacaggttgatgaaaaagttaaaaaaatcattgaactgaagaataaggtttgttctggtaatgatagcaattttgttgtcctcaatcaaaaaggaattgatcccccatctctggacctgcttgcaagggaaggaataattgctcttcggagagcaaagaggagaaacatggaaagattggttttggcctgtggaggggaggcagtaaactctgtagatgatttgactcctgaatgtctgggttgggcaggattggtatatgaacatgtccttggtgaagagaaatatacattcgtagaaaatgttaagaatcctttttcctgcacaatcttgattaaaggtcctaatga

SEQ ID NO: 47572 - DNA, 148 bp, Glycine max
  Clone ID: LIB3107-013-Q1-K1-F10
gacaacatttttctctctccgcgtctttttagccacgatcggttcacgggtccctctcttcccttggtctggtctggttgctctggttggttcctaagaaaagaaaaaggcctaattggggtcccttatatttatttttctttactct

SEQ ID NO: 47573 - DNA, 77 bp, Glycine max
  Clone ID: LIB3107-013-Q1-K1-F11
gtaaatcaaaattataagagagaaaatggtgcttttgtactacagattactataaataaaaaacttttatggtttcc

SEQ ID NO: 47574 - DNA, 343 bp, Glycine max
  Clone ID: LIB3107-013-Q1-K1-F2
taaaatcatcttactttctgtttcgagaagactatttaaaggattaattctatatctaatacgtgcgacatactcctacttttggaagggatgcatttattatactaaaattcaacacaggctcttcctgttacttttactactcaagataactcctctgatcatactaccttttttctctctacacattattcaaatttctcccctatcaacttttcattgttctatagttttctaccatttttgttacagttgaccataaattatatttctattcctgtaacgtaacctgacaaacgtctaccacttccaatttatttcatcatactccccaattacccat

SEQ ID NO: 47575 - DNA, 361 bp, Glycine max
  Clone ID: LIB3107-013-Q1-K1-F3
gaaagcaacatcgccaggagtaagagagagcaaaggtggctccttttcatgtgagttttgagtgattcattgattcttctgctaccatcttcttttctactcgaaaaaggaagaggggaaaagaaattgaaacatgggttggattccctgttccggaagttcaaacactaagaagaagttaaagaagaaattggagaagatggaagggcagagcagcctcgttgatccgatcaaagccaccccagggaaattaaagaggaatccatccatgaattccaaaaattcctccaaaaatgggaaccctgagcacattgctgcacagacattctcattccgtgagttggcaactgcaactagaaac

SEQ ID NO: 47576 - DNA, 405 bp, Glycine max
  Clone ID: LIB3107-013-Q1-K1-F4
aattcgagcggccgctttatttttactacttttcttttcatatctaatagaaatatccccccgccgtcctcttttgctgagtttggacagctttattctatttgctttaaacatgcataggactgatatttcaagatgaatcttaggtattatcagttttgtaaaagagagattgattatttgttgaatgctatttttgattgcttagctatggtaagaccctctactcaacattacggctaagatattgtaattgttcaatcaaaagatggtaaagttgttcttttaatgtgtgtgtggtgtatgtgccatattccttttagtatgaaattttggaaatatgtaaggtgagaacaatctcatctgggtttgtttcgttaaatgtattaaatgctggaaaaaaca

SEQ ID NO: 47577 - DNA, 370 bp, Glycine max
  Clone ID: LIB3107-013-Q1-K1-F5
ggaacctgaaaggctagtttcttacaaggctctactctactgcttcaccttctgctctagaaaattcagtggtgatacatggcttcggctactctctctgtagccaaaccagcccttcaggcaaatgggaaaggcttctctgaattctctggcctccgcagctcatcaggcttccttcccttttctagaaaatcttcagaggatttccattctgtcattgccttccagacctatgcagttggaagcagtggaggatacaagaagggtgtgacagaagcaaaactgaaggttgccataaacggatttggaaggattggaaggaacttcttgaggtgctggcacggtcgcaaagactcccctcttgatgtca

SEQ ID NO: 47578 - DNA, 391 bp, Glycine max
  Clone ID: LIB3107-013-Q1-K1-F6
cttgtaagcgaacaggtgttctctttttggctcagtggtggtccaaaagcgaaagatggtggtgaactaatttttggaggtattgatcctaaacacttcaaaggagatcatatttatgtcccagttactaaaaagggctactggcagattgaaatgggagatttttttattggaggtctctcaacaggtgtttgtgagggtggctgtgctgctattgtggattcaggaacatctttgcttgctggtccaactactgttgtaactgaaatcaatcatgctattggagctgaaggagttctaagtgtggaatgtaaggaagttgtttctgaatatggagaattgttatgggatctcttggtatcaggggtacgacctgatgatgtatgctcac

SEQ ID NO: 47579 - DNA, 342 bp, Glycine max
  unsure (1)..(342): unsure at all n locations
  Clone ID: LIB3107-013-Q1-K1-F7
ctaagcttttcccattcatgtgtggtggttatngngataacattggagttagaaaccgtgcctataccgtcgcaacttcaattggaagaaaatgctataatcaatagtggatggtggaataaatcaaaatcagtagcttcgcgcaatatctgttcatggtatggtatgtccngcaacgtcgctggaaacgtaactagaatcaactatcccttttatacancctggattcgattagcaacactaaacctcttttgttttaaaaatttaaaatggcttgaggtcttaaacttgggactacaaaagactatcccatctgatattggtaaatctcctaaactcact

SEQ ID NO: 47580 - DNA, 335 bp, Glycine max
  Clone ID: LIB3107-013-Q1-K1-F8
aaatataatattgaaaacgggggatctgcaccagagggaattacttacaatatatattaaaacacaacaacaattaatgagtacttgattgcatcatatctgccagatgtgtatattaccacaacatgtgttacaagctatacagtcccttaaggaccatttgatgttgaggtttttgattcagcaattgattatatataatataataattcaatttttgatttttaatttatcatgaaactgctgtcatcttataaattcacattctttttattatgcacttcattaggttttttgtagcatattcaaatattatattttttgattaacttttt

SEQ ID NO: 47581 - DNA, 426 bp, Glycine max
  Clone ID: LIB3107-013-Q1-K1-F9
gacaacacaacgcggcagagcgaagagaaggggcaaaagagaaagaggcgcttatcgaactcggacggaagcactgagttgactcggagggagtggaaagtgttgttgcgtaatgtctggtggtatcgctcgtggacgcctcaccgaggagcgcaagtcgtggcggaagaaccatccccatggttttgtcgcgaagccggagacgctgcccgatggaaccgtgaatttgatggtgtggcattgcactatttccgggaagactgggactgattgggagggtggctacttcccacttacgctgcactttagtgaagactaccctagcaagcctccaaagtgtaaattcccacaaggtttcttccaacctaatgtttattcttctgggactggttgcttgtctatacttaacgaggatagtgggtggag

SEQ ID NO: 47582 - DNA, 427 bp, Glycine max
  unsure (1)..(427): unsure at all n locations
  Clone ID: LIB3107-013-Q1-K1-G1
gactcacttttgctctctgatttcacctcaatgcacgacactgcacgtaagtactcactacctttggctcttctttactatggatgaagctgcaggcagccaaccctagcttgcatatcccctcactctccatttcagccgcaagccacgcaccattcttcatctcttatagttttacttcatctccgttcatagcatatatattattatgcgtaagtgaaccaaccactcacctnctcatctccgaccaccaccagcagcctaaccagtcaggacttgcccgccatgaaccaccatacatgcgtgaaccaactgcagtgacttcctctttaaccaacccttgtgaactataggaaccacgtgcagtagcgaatcagcgaggaaaaagtggtagccacagcaggaatcaaagaaacaagaagaacgt

SEQ ID NO: 47583 - DNA, 418 bp, Glycine max
  Clone ID: LIB3107-013-Q1-K1-G10
gacctccaagtccatgctttttgttcttgcaagaggaacagagaggaggtggacaaacaaagctataatttttagaggggttaccaccctcaccttctgccaaaccaaacccacccttttctctctttaagctactattgtgctgagagctgaagaggagatggggggtggaaatcaagaggcagtgaagcagctgcagaccctgatggaaaatgtggatgatgagcagctgaagaacacattccagattatgcaccagggttatcaaactgaaacgttaatacggtttctcaaagctagggactggaatattgccaaagcccataaaatgttaattgattgtttgaactggagggtggaaaatgagattgacaatgttttaaggaagcctatccccatggatttgtacagagccata

SEQ ID NO: 47584 - DNA, 346 bp, Glycine max
  unsure (1)..(346): unsure at all n locations
  Clone ID: LIB3107-013-Q1-K1-G11
gaagacttctttccatttcccattttctcattctctgtttcgctttcaccgagtaacttcactttccccaactccacctgagaaaaagatacccataattnggacgcacgcccgcacgcacttgttctgactcagtgcttgtggtggacgcagaaaaaccagaaaagaaaaacaagcacgaggagatgatttacttcgaagaaaccgagttgcgactcggccttcctggcgggtctgcgagtgatcacaacgagtcaacaacggtcaagggcaagggtggaaagagaggcttatctgacactgcttcttgtgatttgaagcttaatctttctttcagtgatgactc

SEQ ID NO: 47585 - DNA, 407 bp, Glycine max
  Clone ID: LIB3107-013-Q1-K1-G12
gaagtaaaagaatctctgtgttgtcatcacacttcggtagatccagccccatcatggcttcagagaagcaagcggctcttgccgtcactccctctgatgctgatgctcctaccatatttgacaagatcatcaataaggaggttccttctactgtggtttatgaggatgacaaggtgcttgccttcagggacataactcctcaagctcctacacatattcttatcattcctaaattcaaagacgggttaagtggtctatccaaggctgaagagaggcactttgagattcttggccgccttctgtacactgccaagctggttgcgaagcaagaaagactcgacgacggcttcaggattgtaattaacgatgggccgaaaggatgccaatcaagttaccacattcatgtg

SEQ ID NO: 47586 - DNA, 410 bp, Glycine max
  Clone ID: LIB3107-013-Q1-K1-G3
aaatcaaatgctcctgacagttttttgatcccggcaggattgaaagttgatcatgatgactgcaagtatgttggggatccttccatcttcagttcttcagttgtgccttctttaactaacatggttatgtgtaggtgactccatgattcatatcttagtttccgggttctttacttctctcactcctttgcttttaagtacatgtatttagcccctaaaccttagtgcatcttttcgatgcctgtcttgtccagatcttcacgtccagtatctattctcttcgtccatttcctttgataacagagaaatttatcttaggttagtctttttctttcccacctttcattagttttgtggtttgtggcatcgaagccaaggaggcaaggatgatgccatacaagttttggcat

SEQ ID NO: 47587 - DNA, 438 bp, Glycine max
  unsure (1)..(438): unsure at all n locations
  Clone ID: LIB3107-013-Q1-K1-G5
ttctcgcttctttgatcactgcttcgcaaattgatcgttcggcgactaattgtgcattggtgtgctggtgatgggtatggtttggatttcaaatgtctttcttctcgggtaatgagatgcatcaagttttgaagcacagtgagcagggatggatattgctgctcttttaacttctgctggaattaatattgctgtgtgtgtggttctcttttcattttattctgtattaagaaaacaacccagtaatgttaatgtgtactttgggaggagactagcctctcagcattcaagacgcattgatctctgcttggaaagattntgtccctcccctagctggatattgaaagcatgggaaacatctgaggatgagatattggctattggtggcttggatgctgtgggttttgtgaggatacttgtttcagtattcgagtgttt

SEQ ID NO: 47588 - DNA, 373 bp, Glycine max
  Clone ID: LIB3107-013-Q1-K1-G8
ggattctacaggtgctttataagagattttagcaagggagggcgtccactatccaacttgttgccaaaggaggtggaatttgacttgaatgataaatgcaaagaagcctttcattgcctcaaaagagcattgactaccacccctatcattcaatcacttgattggacagccccatttgagctaatgtgcgatgcatccaattacacattgggggttgtccttgctcaaaagatctccttacttcaactgacttcttttccaccatgacttagggagtttttctttttctatctcctttcttacttttatcacaatttgtcgattctatttgattggttaattgcttttaatctttaaattgggctacattgag

SEQ ID NO: 47589 - DNA, 463 bp, Glycine max
  Clone ID: LIB3107-013-Q1-K1-G9
acgacagaagggaattcagaattaataataataagagagtaaggaagggcactccaagactttggtggagagcaagagctataagtgtgagaagtgattggaaattgttggaacccaccctatcaacaaggagaagctgttttcgttcgtcgccactaacactaatcgtttcttcaatgccttacgagaaggaactcgccgctgcaaagaaagcagtcactctcgctgctcgtctctgccagaaagttcagaaggctcttctgcaatccgatgtgcactcaaagtcagacaaaagtcctgtcacagtggctgattatggttcacaagcattggtcagctttatacttgagagagaacttccttctgaatcattttcattaatagctgaggaagattcaggtgatcttcgtaaggaaagtggccaggatactctgaatcgcattacagaacttgtcaatgatac

SEQ ID NO: 47590 - DNA, 394 bp, Glycine max
  Clone ID: LIB3107-013-Q1-K1-H1
cagggtagtgaaactcatttgtaagtactggtaattgttgattgccgaacttcattttgtgttttatattttggtaggagactttggagggcttcatcttgttgaatacctgcaaaacgagaaaaaatatcaacaacaacattattaactccttttatatgttcaaaatttatctttattccgttatcataaacatattcttggaataaaagccatcttttctgagattttttatcggtatttatttgttggctactattacttcgcaatcagttcttatggtgatttcacttttattaatcagaaagagtttaaatccttctagagcgtttatcacaacattgacttcataatctgtagaagttgagtatacctatggtttcgtgtgatattt

SEQ ID NO: 47591 - DNA, 277 bp, Glycine max
  Clone ID: LIB3107-013-Q1-K1-H11
agggacttaagttagtaagatgtctcacgtgaggaacaaacttgtactaataaaagactatgataccggatttatcaaagaatcccacatgaatattcactaaagtaccataacatcgaagcttgcacaacgttccaactgatgtctggctcaaaaactcgtacttgtctttgagatccgaatataacgaatttcattaacaactcctaaggcgccttccaatatgatgagcttacactaatggctctccattaataggatatggagagactaaagt

SEQ ID NO: 47592 - DNA, 310 bp, Glycine max
  Clone ID: LIB3107-013-Q1-K1-H12
gaagtttttaaactcttggacgcatgcatcaacccggaggaatttatctaattcatcatctcaccccccaatttgtcagctttttaatttaataataagggagcttgtttcttttttcggcgtatatcaagtgcttgttatgatgagtcagaatgttagcttgttgtactaggtggattgtaaatcacgtattttgctagagtcatccgcgtaaagcgtgaaaatgcagaaaattacaaatgtctaagctgcgtctgtagtatacctactgccaaccattgttctttctacaagtaactcctcaatccca

SEQ ID NO: 47593 - DNA, 370 bp, Glycine max
  Clone ID: LIB3107-013-Q1-K1-H2
cataactttatttatatctagtttcaaattacttggttagcacttaataatcttgagcccttcaaccaacatatttcattttatttagtttataggttagactgaaatgttatctttgtgtattcaaatacgtgaagctgacatctttcgacttttttttgcagatgatctttgtttaaaaatttattggaagtttgcctcttgattaacattttatttgtttaaaataatatcatctttaattattaatgttgctcttcttatccttttaatattgctttgtaaaacaatttttttggggataaatatgatatattaacttttttttgcttgattcacaaaattctgcccatacctaaatttgcaacta

SEQ ID NO: 47594 - DNA, 353 bp, Glycine max
  Clone ID: LIB3107-013-Q1-K1-H7
ctctctggtaatcgattaccaatggcaagttttgtgttcgaaaagctttcaactgaatttacaacattccaatgaatttcaaaatggtgtgtaatcgattacaatgatttggtaatcgattaccagtgtgtttgaacgttgaaattcaaattcaattgtgaagagtcacatcctttcacaaaaaagttttgtgtaatcgattacaatgatttggtaatcgattaccagtgataagttctgaacaaaaatcaaaagatgtaactcttccaatgattttcaagtttttctaaaagttataacttttccaatggttttcaagtttttctaaaggttataactcttctaattggttt

SEQ ID NO: 47595 - DNA, 270 bp, Glycine max
  Clone ID: LIB3107-013-Q1-K1-H8
ttatgggatagcgtcatcatacaaagcatcgaattcaaaaactaagttgattgcttgtgctttgctttattcctcaaaaccaaacatgtcgaacacatgcggcaactgtgactgctctgacaagactaactgcaccaagggaaacagctatggtgttatatgtgagactgagaatagctacattgagactgttgacattgatgttccatctactgatcattgatgggaagtgcaagtgtgtcacttactgcacttgcacggactggactt

SEQ ID NO: 47596 - DNA, 239 bp, Glycine max
  Clone ID: LIB3107-014-Q1-K1-A10
acgcctacaaccactcatacgtacatttgctaaatgacgatatatgggtggtcttcagataccatgtccataccatactataccattcaattatactgttgtcagagcgttatctctgtattatcttgtcctctgtctagaactatcttgcaatcaacgttcctttatttacctctcaactatatttatactactaatatatttattcaattaatatataattaaaatcctcacattat

SEQ ID NO: 47597 - DNA, 340 bp, Glycine max
  Clone ID: LIB3107-014-Q1-K1-A11
gtcagagtcgaagaaatcagtgcttagatcgatcgagattattgggcttggaactggacctgtattggagaagaaacttaagtatgcagctgacatttcttctggaatcattctcggaagggagcttgtgaattctccggctaatgtgcttacgccaggggtattggctgaagaggcattaaagattgcttcaacatataatgatggttttactggcaaaatattagatgctgagcaatgtaaagaatttgaaaatgggtgtcctatcttgggggttgcttgaaccctagcaaattcttctcattttatccatctgggttataaaccaccaactggacct

SEQ ID NO: 47598 - DNA, 339 bp, Glycine max
  Clone ID: LIB3107-014-Q1-K1-A2
gagaggaatgatcatggaagaatcctcggtacacgagatcaaaacccctctcctgtcatctaacaaggaggaagatgaagttggaagcagtactagccataggcagcaaaatgaagagaactcgcccataaaacaagtggccctaacggtgccaaccaccgatgacccatctctttcagttctgacgttccgaatgtgggtgttgggaactctatcatgcgtgctgctgtcgttcctgaaccagttcttctggtaccgcattcagcctctcaccatcaccgcgatctccgcccagatcgcggtggtgccgctcgggcaactcatggccgcaacgatcac

SEQ ID NO: 47599 - DNA, 381 bp, Glycine max
  Clone ID: LIB3107-014-Q1-K1-A3
tgcgggttggagaacactagcttaccttacacctatgggtagcaaataattcaaggttcccaagacatgtagcttaattcagttcttgaaccctttgtactatagagttctatcaaagactggacatcacggatcaccaactatttctttcggacacaacgaccaggagttgacattcccaccaatcatgaaccatttgcagcaccaaagggttataatgcacctcaacaagtgcacataacacacggcgactattatgtaaaagcacaatattctcatacctgaccccagatgaaccaatgactcgacatgtgcaatatagcacatcaaaggataagtttcaaactattgccgaaagcacaactgcaaactacactttct

SEQ ID NO: 47600 - DNA, 393 bp, Glycine max
  Clone ID: LIB3107-014-Q1-K1-A4
gactttgagcgatgaaaatgttcagattggtgatacaacttgcccatgggttgcaaaggtatggaattctgttgaaaaacacatgcatggagattatacctctgtaattcatggtaaatatgcccatgacgaaactgtagcaactgcttcttttgctggcaagtgtataattgtgaagagtatgaaggaggctgaatatgtttgcgactacattcttggtggtgaattgaatggatccagttcaaccaatgaagcctttttagagaaatttaaatttgcactttctgagggctttgatccaaacagagacctgattaaagcttgcattgcaaattatactacaatgctcaagggagagacataaaacatttggaaacttttggagaggactat

SEQ ID NO: 47601 - DNA, 154 bp, Glycine max
  Clone ID: LIB3107-014-Q1-K1-A5
aaatttaaaaccatttttcataaatttttaatccatttccctataattttttcatatttcttttttttttttctaaacctatccatctcattaaaatattttatttaaaaccctaaaaaaaaaaccatatattcctaataaacccaaaatttaa

SEQ ID NO: 47602 - DNA, 336 bp, Glycine max
  Clone ID: LIB3107-014-Q1-K1-B10
gatagcaaatagcgggcccaaaaggggagctacctacccttcaaacctttcactcttctctcctttaacaatcactgcaataatattgcttaaagatattccgaaaccatggtttacgccaatcctatgattttagccgttgagaatactacgtaaccccgtctacttctgcagcttcttagcaccacgacctacaatctatctacaattgtcataagaaaaccaccgaatgttttccatcacatttcttacgaggctgcacacttcacttcaatgctttagatattacatgcttacctaaagacaggcgaaatacttctcattaccattaacaca

SEQ ID NO: 47603 - DNA, 365 bp, Glycine max
  Clone ID: LIB3107-014-Q1-K1-B11
gtcccagcaggaatatattcactgaattgcttgcctcttaggttggttcactctgaggcatcaccaattcgatgcattctgatcaaatgatcaaatgatggggtcaaacctggttttcaattgcacggtatgattatattacgagaatgggtcatattgtttctgtgcataattatccttatccttattaagtcaaaatactgatgctaaaggatgaacctgccacaagaagcaacgtaacccccaatacaattagtggtgtccataaaaagcaatttgatgccaattgcaagctaagctgatagtaatatgttgaattactcttaatttacgtccttgggttggaaagtacttgaattattggg

SEQ ID NO: 47604 - DNA, 396 bp, Glycine max
  Clone ID: LIB3107-014-Q1-K1-B12
agacgaccacagaatgtttcccaccaggaatatattcactgaattggtggcctattagggtggttcactctgaggtatctccaattctatgcattctgatcaatatgatcaaatgatggggtcaaacctggttttcaattgcacggtatgattatattacgagaatgggtcatattgtttctgagcataactatccttatccttattaagataaaatactgatgctaaaggatgaacctgccacaagaaacaacttagccacgaatacaattattgatgtccataagaagcaattttatgcaaattgcatgctaaactgatagtaacatcgtgaattactcttaagttacctacttcatttgtatgaactgaattattgcgattaaactttaattg

SEQ ID NO: 47605 - DNA, 396 bp, Glycine max
  Clone ID: LIB3107-014-Q1-K1-B5
caaaaccaaaaaaagcctcgggggttgagtgagtgagggggttctttttccttctttctctgttctttcctgcttttgcggcttctcgccgcctttgccgttcggttctgccttttttctgcgccaattagtggcgcgcattaaagcggtgcgtcttttattatatataaaactctccccagttttcaagttccactactcagcagcacagcagcaacaacaacaattacaagtgtgtactgcgtagtaacttaacttcattcactatctcattgcatttaaagcttcctttgccatttccatgaatagaatacagaattcttaggcatatgaacatttagcccatctctgccactgactctgctccacagcattcaattataacatagaccattt

SEQ ID NO: 47606 - DNA, 422 bp, Glycine max
  Clone ID: LIB3107-014-Q1-K1-B7
gctatttttggatcctctaactgtacatgttggtgattaaatgttatgttcaaatgatgcaggataaggtcctacaggaacaaaataacactctcgcaaagaaggtaattaatgtattttgtatttaatcaacaactttagttgactctagttagtttggactttggatactaaatgtatgtttggattcatgttttaacacctttttagataaatgtttatataagcatttatagaagaagaaataaaaaaaatattaaaatttaaaataaacttatagaagctaatatgaaaagatttctataaaataacttacaataaattaatttaaacttataaagaaatttaatttttttcatttgtctttatcttataagctcttatgaaaaaatgtatccaaacagaccttaatctttcagtgt

SEQ ID NO: 47607 - DNA, 419 bp, Glycine max
  Clone ID: LIB3107-014-Q1-K1-B8
gacgcacttagcaatcaatcaaaacattcccaatgacaataatatacacatcgtcaattaagctccttctcctatagccatggctctttctaagcttataattgcttcccttcttgcgtcgcttctccttcttcatttcgttgatgctgatcaatcggcacatgcacaaacgcaggggtctcttcttcagcagatagatcgtaacggagcatgtgctgcgaggtgccgtttatcatctcgtccacgcctctgccaaagagcttgtggaacttgctgaagacgctgtaactgcgtgccacctggcactgctggaaaccaagaagtgtgtccctgctatgcaagtttgactactcatggtggcaaacgcaagtgcccttagacttaattggaccactatcctatgcatgcctttgatttat

SEQ ID NO: 47608 - DNA, 202 bp, Glycine max
  Clone ID: LIB3107-014-Q1-K1-B9
gagagaaaatgttgaggaaggagggggggaggggaacggatctgctgggtgggactagataaagtgaagcacgctgacaagactaatggaagattggatggtggaaatggaatctgtagctgaaaaccctaattacccggcggtggactacaagcgaccttgcatcttgtcatttcctctgaggcccgacctcatagttaca

SEQ ID NO: 47609 - DNA, 411 bp, Glycine max
  Clone ID: LIB3107-014-Q1-K1-C1
gaatagtgatcttataagcttggcagcatcgcagttacagagaaaaagagagagagagagagagagaaagtgtaatggcaatggcaacaatgggagagagtccacgaagcccagaagcgaagttggggatgcgagtggaggatctttgggacgttcaggagccacagttgagtcccactgagaagctcaacgcttgttttgaaagcatccctgtctctgcttttcctttggatccttcaaacacagaaattgagattaaatcagacgcgaccctagcagatgctgttaagatattggtgcgacacaacgtattcagcgcacctgtggtggatgttgaagcgcctgaagatgctagttggatggatagatacatcggaattgttgagtttgctggaaatttgtgatggattt

SEQ ID NO: 47610 - DNA, 388 bp, Glycine max
  Clone ID: LIB3107-014-Q1-K1-C10
cggcaggatagcgagactgcatatgcaagtccatatggtgaggatgtcattaacgtaactgattcatatttcacatataatattcctcgtgcacctgaataatatctgcctcatagatgacttgtggagtaccctggacaggtggagaacatttaacctgttaatcctgcaaataaaattaagacagatgtctcatatgatctgattcttgtgtaatatcgacatacatcattcagcatttctacacagatgatctaaacaaagtttttattgagctattaaattaactcgcaaaaagcatatacgaatatctggatcatccttctaatgttccatctatcactatgtattccatgattctagaaccaagtttgtccagaaaagtttt

SEQ ID NO: 47611 - DNA, 180 bp, Glycine max
  Clone ID: LIB3107-014-Q1-K1-C11
gctgattttaatacttcatatgcgagttcatagggtgatgatgtaattaatccagctcatttatcttaccaactgatagctatttaacacttaactaaactttgtgataatataaacgtctgcagcaagcttgacttgtaaaaatcattaaatcatgagatggattacgtcaagaatata

SEQ ID NO: 47612 - DNA, 219 bp, Glycine max
  Clone ID: LIB3107-014-Q1-K1-C12
cgggaggatagtgagactgcatatggggttacatatggttaggatgtgattaatctaactgattcatatttcatataataaattcctcgtccacctgaataatatctgggtcattgttgacttgtggagtatcctggacatgtggagaatatttaacctgtaaatcctgcatattaaattaatacatgatgtctcatatgatctgattcttgcataata

SEQ ID NO: 47613 - DNA, 400 bp, Glycine max
  unsure (1)..(400): unsure at all n locations
  Clone ID: LIB3107-014-Q1-K1-C2
gacacctttgttcactcttcttctcttgcggctagggttttagcgcagcttcttctagatttaaggaagatgggtaaggaaaaggttcacatcagtattgtggtcattggccatgtcgactctgggaaatccactaccactggtcacctgatttacaagcttggaggcattgacaagcgtgttattgagaggtttgagaaggaagctgctgagatgaacaagaggtctttcaagtatgcctgggtgctggacaaacttaaggctgagcgtgaaagaggaatcaccattgatattgctttgtggaagtttgaaacaacaaagtattattgcacagttattgatgcgcctggacatatggatttcattaagaatatgattactgggacatnccaagctgact

SEQ ID NO: 47614 - DNA, 365 bp, Glycine max
  Clone ID: LIB3107-014-Q1-K1-C3
gacactaaacaagttaaaagaagagcatcactgagctgacaaagcaaccctatgtcgaaggtggtttgtgtcaccggagccagcggcgccatcggatcatgggtggtcctactcctcctacagcgtggttacaccgtccatgccaccgtccaagatatcaaggatgaaaatgagacgaaacatttggaggaaatggaaggagcaaagagtcatctccatttttttgaaatggatcttcttgacatcgactccattgccgctgccataaagggttgttccggcgtaatccaccttgcatgtcctaacaccattggtcaagtcgaagatcccgagaaacagatattggaaccggcgataaaaggaac

SEQ ID NO: 47615 - DNA, 53 bp, Glycine max; identical to SEQ ID NO: 13458
  Clone ID: LIB3107-014-Q1-K1-C4

SEQ ID NO: 47616 - DNA, 408 bp, Glycine max
  Clone ID: LIB3107-014-Q1-K1-C5
gattacctataatttcagagctagctagttcacagcttcagttcgtttttgttgatcctgtgaacttatggctgacggggtggttctgttggatacatgggccagcatgtttgggatgagggttaggattgcattagctgaaaagggtgttgagtatgaatacaaggaagaaaatctcaggaacaagagtcctttgcttttgcaaatgaacccaattcacaagaaaattccagttctgatccataatggcaaaccaatttgtgaatctgcaattatagtgcagtacattgatgaggtctggaatgataaagctccaatcttgccctctgacccttatgagagagctcaagccagattctgggtagattacattgacaaaaaggtgtatgacacttttgaggaaatgtg

SEQ ID NO: 47617 - DNA, 424 bp, Glycine max
  Clone ID: LIB3107-014-Q1-K1-C6
gacttgcggctgcagtagagaagcactcttcgttcttcgactgtctacgatctgctttctctgaattgtgaaaatgtcgctcggagaaactgcttgttcatacgcagctctcatccttcatgaagatggaattagtgtaactgctgacaagatcagcaccttgttgaaaactgcaaaggttccagtagactcttattggccaaccttgtttgctaaacttgctgagaagaaaaatcttggcgatttgatagcaaatgcggcaggcggtggtgcaccagttgctgttgcagctgccccagttgctgctgctgctggtggtgctgctgccgcagctccagctgctgaggagaaaaagaaggaagaaccggaagaagagagtgatgatgatatgggattcggctcggttgattagggacattctcaa

SEQ ID NO: 47618 - DNA, 419 bp, Glycine max
  Clone ID: LIB3107-014-Q1-K1-C8
gccatcggacttgattatctctggatgaccataagttgtctctgtgtgccaatgaactcgcttgtctctggttggcaaaggggagattgcaatagtcttggtcgaaagacattgagtcttcaacaaagggagcagatgacgaagggaagactttaatagtctcggtcgaaagacattgaagttttcgacaaagggagcagatgaccatatttgtctttgcgtgccattggacttgattgtctctggatgacgaaggcgagactttaatagtctcagtcgaaagacattaagtctttgacaaagggagcagatgaccatatttgtctctgcatgccaacggacttgcttgtctttggatggcaaaggagactgtaatagcctcgaacaaaagacattgaagtctttgaaaagggggtaga

SEQ ID NO: 47619 - DNA, 388 bp, Glycine max
  Clone ID: LIB3107-014-Q1-K1-C9
gaggatagtgagactgcatatgcaattccatatagttaggatgtgattaatttaactgattcatatttcagataaaaaatttctcgtccacctgaataatagctgggtcattgttgacttgtggagtaggctggacaggtggagaagatttaacctgtaaatcctgcaaaagaaattaagacagatgtctcagatgatctgattcttgtataatatgggcataaatcattcaacatttcgacacagatgatctaaacaaagtttttattgagctattaaattaactcgcaaaaagcatatacgaaaatctggatcatcctcctaatgttccatctcccactttgtattccaagattctaaaaccaagttgtaccaaaaaagtttcttt

SEQ ID NO: 47620 - DNA, 380 bp, Glycine max
  Clone ID: LIB3107-014-Q1-K1-D1
ggtggcagagagcgaacccaaaactagagctaccttcccttcaaaccttccactcttctctccttttccaatcaagggaataatatttcttagagatattccgaaaccatggctcacgccaatcctatgatttttgttgttggaattctaggtaaccttgtctccttctgttgctttccagcaccagtaccaacattctatcgagtttgtaagaagaaaaccacggaaggtttccaatcacttccttacgtggctgcactcttcacttcaatgctttggatattttatgcttacataaagacgggcgaaatacttctcatcaccattaacgcattcggttgtttcatagagacagtttaccttgtcgtctatatcactta

SEQ ID NO: 47621 - DNA, 307 bp, Glycine max
  Clone ID: LIB3107-014-Q1-K1-D11
aggcgttcgaacacgtcttataggactatatatatatatatatctaagactatcttagacaacgtggaatcatacttactacaaaatactgtccagttcaaaatactgagttatatatgtatttgaatgatgatattgaacattaccactctcagtttgacattctgaattgatcaaaattgaaagcatataaatatcatattttttaatttgttatctagagatatctcattagtcattcttgtttctactgtataattttactgctctatttcatacaaattgttaattactttcaagttgaaat

SEQ ID NO: 47622 - DNA, 427 bp, Glycine max
  unsure (1)..(427): unsure at all n locations
  Clone ID: LIB3107-014-Q1-K1-D2
gctcttgggcaagtagtgtgcctcttcttcgcagagtccgcgactcataaattctaaggggttccccgaaatgggaccgcctgtatcggaaaagatcacagaaagggggcgccaggcggaaagaaaagggtgcggcgtgccccacaagaagaaagccccggtttcaaaggtgcccgtcaaagcccggtcttctcaattctcccgtctggaaagaatatggcccgtnntatttgaagaaaagggaaggtaccgcctcagannngtgtcggtacccggtggcttcccgtatacccttggcttgcagttcttcgagataccctnnagctgccgaaggtggctttgagnnttggctgggaaatgcccagcacgttgaccaacccaagaagaaccagggattatntctcaaagaacacgttgcccttttggc

SEQ ID NO: 47623 - DNA, 376 bp, Glycine max
  Clone ID: LIB3107-014-Q1-K1-D4
gacttccagaacaactttctcatcatcgaagcccgtcgcgagaagaagctgcttcgtcgcggttcccaaaatcgcgtttcccaagctccgtttcaaacccgtcgctatggctacgctcggcgctcgcatggtggccgccgcacccaccgtcactccgccggcctcgctcgacttcgaaacctccgttttcaagaaggagaagattaacctcgctggacacgacgagtacctcgtgaaaggagggagggatttgttccctctgttgcagggtgctttcaaggggattaagcagattggcgtcattggatggggttcgcagggacctgctcaggcacagaatttgcgggactcgcttgctgatgcaaagtctgatatt

SEQ ID NO: 47624 - DNA, 368 bp, Glycine max
  Clone ID: LIB3107-014-Q1-K1-D5
tactttagaagacgtgctgcagcctgcgggttttctcattgaaatttatgatattcttggtaacctcaagaataaaaactcgtgaatgaggaagagaacaccatcatcttttcttctttttttttgacaatgaaccggcgtcattgaaaaaagaaagatgatgaactaaagcttaaacttattcttaaaaagggaaataaagttgaaacctgagaattgagatgatgaaaaattacattatttggctgatcggtaagaagctatggaaattacaattaccgatacagagcacttttcaaattaaaaaagaacgttacagcatagtgaagttcaactattaccgttcatgtattgcaatataatgaact

SEQ ID NO: 47625 - DNA, 372 bp, Glycine max
  Clone ID: LIB3107-014-Q1-K1-D6
gacaggaggtgatactagatatcacactacatagttagcaatagtgaataaattaggacatatgtactaaatggctggggtccataaatggtatcatactttttgaacacggacaggtcctttctatacaacggagcctttctttcttttcattcttattacatgaacctaatgatattgttaacttgtacaggtcacactatttggctctacccatccaatatttagttcagtaagtagattttttcacaatgaaatctagttatacagtaacggtatttaattatgaaaatttgctgggtagctgaccttcttattccgttcgtccaaaatccatcaaaattcattcattaaggacatactttatcttta

SEQ ID NO: 47626 - DNA, 364 bp, Glycine max
  Clone ID: LIB3107-014-Q1-K1-D7
gatcacaaatctttcgctaacactcattaatggcgagaatggcacttcggtgcttggtgatgtccctttctgttctcttcactcttggtcttgcgagagaaagccatgccagagacgaagatttttggcatgctgtttggccaaacactcccattccaagttcattgcgagatcttctaaagcctggccctgcaagtgttgaaatcgatgatcaccctatgcaaattgaagaaacacagtacccgaaaaccttcttctataaagaagaccttcatccaggcaaaacaatgaaagtacaattcatcaagcctccctttcaacaaccatggcgtgttggtacatggttaaaggaaattaaagacac

SEQ ID NO: 47627 - DNA, 387 bp, Glycine max
  Clone ID: LIB3107-014-Q1-K1-D8
catcctcaccacttgtatttttgaaatctttcatcttgttcttctctttattgtaaagaaggcttcctggtacggaaagctaaatcctctgttggatcttccctgtaggtacctgatgtaaatatatttttatctatttaatgatgttttgtgtgttctctatgctatctgcttttcattccaatattcctttaccttgatcacgtagatgcatgctttgttagggtcattcaacagtggaaactggtctgactctaaagtccttgatagtacagggctaagttgtcgtactatcatgaggaatcggggtgcgatagcttagttgtgtatgactgtcttaatgcggtcctggttgagcttagtcttacaagaggaatttacggacgc

SEQ ID NO: 47628 - DNA, 377 bp, Glycine max
  Clone ID: LIB3107-014-Q1-K1-E1
aatgcatgatattatatgaactgttattcctaaaaaaagttatataagtttttaaagtctttgatcatactttttaaacaatgtaaacagattcgaatttaaaaactgtaatatcatatcccatttcttcaaaaatccaacacatcaaatatagaattataaaccaaatattattctacaagaattaagattgagattaaaagtacgtgtttcaattctcgtgtctaatgaaatttccttttgctgataaaaaaatgtgtttcaattctaagttaacatctgaattgaccttgattatatatttctctctttttgagaaatagaaaaaaattgaagaaaaagcaacataaagaagtgaaacacacacactacactgg

SEQ ID NO: 47629 - DNA, 381 bp, Glycine max
  Clone ID: LIB3107-014-Q1-K1-E10
agctggcatagggcgaacccaaaactagagctgcctgtgataataacctaatactcggatgtcctattacaatcacggtattaatatactatagagacagtctaaaaccatggcacacgctatcactatgagaatcggaacgggaatactaggaaaactggacaacaaaaggagtcaactagcactcagtctcaacataggagacagtgcatctgacgacgatcacggaaacccagccatgtcttcactacgctggcgcaacttttacactaacacggcttactgcttaggtctacatagttacgtctgtaagacatttatgactggatgcctaattctttttccagatgctgtcaccttattcattacatggtggtatat

SEQ ID NO: 47630 - DNA, 343 bp, Glycine max
  Clone ID: LIB3107-014-Q1-K1-E11
gaagacgacagaaggggataccagctcatgtgatacagtctgtcaaacatctatgtttctgcgtttttgtgtggaaaacgagttgttctgatcttcctaaaagttgaactggcttttcttcttttcctggagttgttgccaaccaaattattcctctcttcacttactactactttcttctttctttctccacctgaagtagttctccacaacttggaaggtgatcatctccaattttccatcatggctactgagacttctgcatctgatcatgcttctactactgatgagcattatgtgaaagaagaaaagggacgagtccatttgcacaaaaagatcgctt

SEQ ID NO: 47631 - DNA, 428 bp, Glycine max
  Clone ID: LIB3107-014-Q1-K1-E4
agaagggtctgaacagtataataactcttgaaaaatctattttggagtaccagaggtatgtggcggccttttaagtgttcatatttgtatgtgtttcttcaaccggcacttggttttgtgaaattagtttttttactctatgtattcactgtgcagataccctcataagatgcatcaatcatttagttttggactccgctgattcttctgaagtaccaggcactattcaaatgcatcttttaatttgtacttttagtctatttgattattaaagaaccagattctgaaacttgtatttttttccttcttatcttagtagattttccccgacatgtttttaaaatcttgttatacctcattcctctatggaagaatattgaggaacgggtgaattttggggcaaagaaaactttattataataactttt

SEQ ID NO: 47632 - DNA, 279 bp, Glycine max
  Clone ID: LIB3107-014-Q1-K1-E5
cgacataacaaaagtacactgtcgctctaactgcgcgttaatctaatattcggaggtactacttcagttctcctactctcttctgcttcgcctaactattttcatattctaacacatgatgaacctcgggttaccgaacaacctacagctcttttacgcaagactggttattcgcatatggcttaacatccctagtatccagcctcattacaccccaaacccttatcacgattatgacgcacaccttgaaagtgattcagataccgtttaatgatcaaa

SEQ ID NO: 47633 - DNA, 420 bp, Glycine max
  unsure (1)..(420): unsure at all n locations
  Clone ID: LIB3107-014-Q1-K1-E8
gcttcccatttgatgaccacaattgcccttgccatttaggctggaatggcaaggacaggattgatgatttatagtcttctagtattcttaaaggtgaagagtttctaagcattttctaacgtgcctggtatttgcattttctaatgtgcttggtacttgttctgcttggtattcttaaaggtgaagagtttctaagcatttttctaagcatatattttataggtgcatgcttaggggatttcggcttcacagatgcccttactgaattaggtcctctataaccgtctcatatcataatggtatgcttgccattcttgtactaaaatctctcctactgcttatagtccatgaccattctgttagtagatttataatgtcatgttattgntgttccttttcttgattaagttcttgatattt

SEQ ID NO: 47634 - DNA, 279 bp, Glycine max
  Clone ID: LIB3107-014-Q1-K1-E9
gccacacgaccacacaactgtcaaaatacaacacaaaatgcagcttcaatgggctaaattgagaatcaagagctaatactataatacactgactgaataaactatccctaatcttacatataatactatctccataccactgcctatattccattactattgctttaacagatttctcatccagaaactaatatcttgactaacaaacctaggatgataatacttcaattcatgcaaatatccaatagaataacaccttaaaaggatctgaccaagtta

SEQ ID NO: 47635 - DNA, 354 bp, Glycine max
  Clone ID: LIB3107-014-Q1-K1-F1
ggaagaaatgaagcagctgccaacgctgctgatgaagtccctctcactctcagtgtgttctttgccagcagcagcttccacaaccacccttcaacaaattgctctccatcaacccaaaggtgttgcaaaggttgtacttaaaaaggggaagacacaactctttaaggatggcaacccaatggtgtacagtggagctgttgatagaataattgggaggccaccttccaagaccggggatgttgttctggtagcagatgggactgagaaaccaattggatggggcatgtacaactcagtttctatgttctgtgttcggctcatgcagcttgaagatgaagctactagcgattcatc

SEQ ID NO: 47636 - DNA, 250 bp, Glycine max
  Clone ID: LIB3107-014-Q1-K1-F10
acccaaaggtgcactcatgctgatgctaagaatatatttatagagtacattattgtataataggactctctctaggtttcatcctaacttactcgcgccttcttctgtcaaatttttctatagtctatacctatatttattttattgactttcatattacatcctttatactttgaaaaccttctcaatacttaacttatttaatcgtcatcaaatacttttttatataattaatactattacttacata

SEQ ID NO: 47637 - DNA, 384 bp, Glycine max
  Clone ID: LIB3107-014-Q1-K1-F2
gactctaatttgttttagtaaaagaaagaagaccagcttgttcggttgttgtgttgttctaaatgggtgctacctctatggtccgaggaggagtcacgaggtttctaccccgaagggaatcattggggtgcgagaaactacaacttggagttggagatgtggagtttgaatttctcgatgatggtgagatgatgatgtcgttggtcaaaagtgatgaaagttctggcgatgagtttcgtcaatccaatgaaatggaattggatgatgatgatgacggtgagagggttgatggtggcagcgttgaggagaatagaagcttttgggataatcaacaccagcttttgcagaactacctatatagatcaacttctattgagtcaagga

SEQ ID NO: 47638 - DNA, 447 bp, Glycine max
  Clone ID: LIB3107-014-Q1-K1-F3
ggcaaccagagaattgacattcccagtagatgaaaggggaaccatgaaatctgttgtggagtgcttctatgagacatatgggtttgtcattcaacatactcagtggccttgtctgcaagttggcaatacacagagacctaactatttgccaatggaggtttgcaagatagtggaaggtcaaaggtactcaaaaaggcttaatgagaggcaaatcaccgctttgctgaaagttacatgccagcgtcctgttgagagggagcgtgatatcatgcagacagtacaccacaacgcataccatgaagatccttatgccaaagaatttgggatcaagatcagtgagaagcttgctcaagttgaagctcgcatccttcctgctccatggctcaaatatcacgatacgggcagagaaaaggattgtcttcctcagttgggcaatggaatatgatg

SEQ ID NO: 47639 - DNA, 384 bp, Glycine max
  Clone ID: LIB3107-014-Q1-K1-F4
gggcagagagcgaaccccaaactagagctaccttcggttcaaaccttccactctggtctccttttccaatcaagggaataatatttcttagagatattccgaaaccatggctcacgccaatcctatgatttttgttgctggaattctaggtaaccttggctccttctgttgctttctagcaccagtaccaacattctatcgagtgtgtcagaagaaaaccacggaaggattccaatcactttcttacgtggctgcactcttcacttcaatgctttggatattttatgcttacataaagactggcgaaatacttctcatcaccattaacgcattcgggtgtttcatagagacagtttaccttgtcatctatatcacttattgccc

SEQ ID NO: 47640 - DNA, 295 bp, Glycine max
  Clone ID: LIB3107-014-Q1-K1-F5
gatattaacagccttaaaacattggatttagggtgggatcttataataagatgaaaattgcgcttctcagattgacacataagaatgtttaaccaatagtatgaatggaggtacaagtccagcttaagttgaactttattaagggaaaaaacacctatataaccatcatgacctcatgttgaacagcgtagctgttagtcctttactatgcagggcaattactactagcgctgacatcattattggactagcattgaaatagtcaccaatttgaatcagcttgtgcgactgaaca

SEQ ID NO: 47641 - DNA, 349 bp, Glycine max
  Clone ID: LIB3107-014-Q1-K1-F6
gatcatttacaatttcaatgtcgctctctctctgtgggtgtctctctagacttagattttgtgaatggctgaagtggaagagggacacgtcatcggcgtccacaccgttgatgagtggaaactgcaactccagaatgcaaaagactccaataaactgatcgtggtggattttactgcttcctggtgtggtccatgccgttatatggccccagttcttgcacagattgccaagaaaactcctgtattgatcttcctcaacgtggatgtggatgaagtgaggcctgctgctgaggaatattccattgaggccatgccaaccctgctcttcttgaaagatggctagatcgtg

SEQ ID NO: 47642 - DNA, 397 bp, Glycine max
  Clone ID: LIB3107-014-Q1-K1-F7
ttatcaattataaggcttggttcaagtaaagcgtaggctttgtatatcgaaggaatcgattaccatttatcgtaattgattacaaagcatctaaaacacttagattgcttgttggacattgaaataattgattaccacatattgtaatcgattaccacgattctaaaaatgcagaataatggtatttaattaatcgattacagttacttgtaattgattaaatctgtttttttttctactaaatctataaatacctcacttgttctatctcttatatgactttctgcgaaactatcacttcataatatttctaatagtcatctaaagaggttttgatgcattttccctcaagagattgactcagcataaatcttggaatcttcatcatgggttgatc

SEQ ID NO: 47643 - DNA, 254 bp, Glycine max
  Clone ID: LIB3107-014-Q1-K1-F9
tgacgacctatcggacaacaattcaaggggctgtaagtgcgtcatctttcgtcaatatgatccttatgtgcattaagacgtgctgaaatttgacaacggaggttagtcccataatcattatacctttggaatctaacgacagccttctcctgtctgccaggatatgaccattggttgcacaatgtgtacagattgcattacctatgctcattctactgtacattacacaacagcatttgtcactcttacatcat

SEQ ID NO: 47644 - DNA, 403 bp, Glycine max
  Clone ID: LIB3107-014-Q1-K1-G1
ggaataaatgaagcagctgccaacgctgctgatgaagtccctctcactctcagggtgttctttgccagcagcagcttccacaaccacccttcaacaaattgctctccatcaacccaaaggtgttgcaaaggttgtacttaaaaaggggaagacacaactctttaaggatggcaacccaatggtgtacagcggagctgttgatagaataattgggaggccacctcccaagaccggggatgttgttctggtagcagatgggactgagaaaccaattggatggggcatgtacaactcagtttctatgttctgtgttcggctcatgcagcttgaagatgaagctactagcgattcatcttgtgcattgaatatggagaaactgattgaaacacgaattgatgcccct

SEQ ID NO: 47645 - DNA, 384 bp, Glycine max
  Clone ID: LIB3107-014-Q1-K1-G11
gactctcttgtaagcgagtgaacggaattaccaggtgcacggatagatatctgggcatgatgagaatgagtggacttacatggtcaatgctaaagagtgagctgagaaatagaggggagagaaagagagagaatggaacagattctattgattaatgagaaaatgaaataggctcataaagcagccatggctaaacgatgggaagacttcaagaaaataatgaaggacgaccagtagaactagtttaatcagttggatatgatcgagaacagtgccatccattttgcaactcgttctaacagtccacgaatcctcatagaattgatagatatgttaccaaatgaataaaggtagcaagctttgttcaaggaaaatcgcaaaggg

SEQ ID NO: 47646 - DNA, 405 bp, Glycine max
  Clone ID: LIB3107-014-Q1-K1-G12
ggcctactgtcctgttgttcatgcatttgctatggggacattcaattctgctgtcatttatgtggacaaacaaaaggtttctgttgaggtacaaactcatttagtggagaatggaattgaaattcaagagtatacagccgtaagctctgatgcgacattgcttgcaactgatgagctagatgctgtatctactgccaaggctgctttagccgaaacagaggccagaaaaattcccagtgaaattgataagagtgtaaatggtgaacatcaagcagaagaaaatagtaatgacctcatatgggctgatccagtttcatgctgttatgcactgtatgcaaagttgaaccccgatacagttctcttgcagcaatcacctttagcccttgcaaaagctttaaagaactc

SEQ ID NO: 47647 - DNA, 347 bp, Glycine max
  Clone ID: LIB3107-014-Q1-K1-G3
gactcataatctgagactactgagtggttcaaaggtgagaagtcgccaagatgggtccattcagtcacaagggtcaaatgataaagggcactatggtggttatgcagaagaatgtgttggatatcaacagcatcaccagtgtttaccggatccatggctccgtcttaaactttttaggcattgcacttgattcagttacttttttagcctacttcatatgcatccaacttattactgctaccaaagctgatggtgctaaaggaaaagtatgcaaatgcttcaaatttgagaggaaagataacattacccaccatatgaactaacgaagaagcatactatgctcaatt

SEQ ID NO: 47648 - DNA, 52 bp, Glycine max
  unsure (1)..(52): unsure at all n locations
  Clone ID: LIB3107-014-Q1-K1-G4
tgcacgtacctcggtccgnngaattcctcgggtcggacccacagccgtccgt

SEQ ID NO: 47649 - DNA, 174 bp, Glycine max
  Clone ID: LIB3107-014-Q1-K1-G6
aaattaaagtccttgttttcttcgttgcttcaattttggtagcatggcaatgccatgcctacgatatgttccctctccgaatgaacacttgctatggtgcccgtacttcggaagttaaattctcaagttggaagctttgctgtgaagcacacaacatctttggcttttagacca

SEQ ID NO: 47650 - DNA, 428 bp, Glycine max
  Clone ID: LIB3107-014-Q1-K1-G8
gacctagtgctagtagtaaagagtagaagaacgtgttttttcatattgttttgctatcctaatagacgcgaggactattttaaaatccggaccgtcgaatcggaccaccatcgttccaccggcgccgtcgacctcaaaggctcgaaccaccttccttctactcaactgcactcgcactcgtcggcgcaagctcccaccgtcgcacgcctcagccgcttccagttaacaagggaaatagcatttggtcataagaaaggaaggaaggaaaatggtgtttgggcaaatagtggttggtcctcctggctctggcaaaacaacttactgcaatggcatgtctcagtttcttagtcttattggaaggaaggttgctgttatcaatttggatcctgctaatgattcgttaccatatgattgtgctgtgaacattg

SEQ ID NO: 47651 - DNA, 131 bp, Glycine max
  Clone ID: LIB3107-014-Q1-K1-G9
gactctattgtaagcgagtctacggtaataccagaagcacaggtagatatatgggcatgatgagaatgactgcacttacatggacctagctaaagattgacctgcatgctatagcttagagaatcagtaga

SEQ ID NO: 47652 - DNA, 425 bp, Glycine max
  Clone ID: LIB3107-014-Q1-K1-H1
ctctattctttaactactacatttttataatcataatttgtagtgactttttcttatcctcaagtaaaataatacgatgaagtagacggaataatacataaataaaacaaaatccgcaaagtttttgagttttaaaaataaatttgggaataaatatcaataaattataattaaataaacaaatttaaataaagataaaagaagcaactttatgtaaagatgtttgtgccgtcgtatgttagtatataatttaattttaatatacttattagtctaagttttattatcaattaattaaaaaatttcctgaatataatttcaatatattattacaaaaataatattatgaattgccgttgttaactcttaaataacaattcaaagtagatctctaattaatttcaaagctttacttaaggattttt

SEQ ID NO: 47653 - DNA, 407 bp, Glycine max
  Clone ID: LIB3107-014-Q1-K1-H10
tacataacaatttcccttagagtgtggaagattcaaggtattgttaggttaacatttgaacatgtccgcttgtccaaaattcattagaacatcaataatttatacttattgttattcatcaaaatccaagatagatgagaagattggttgtccagacctaacatatgatacaaaaccctatagcaagtgacaaatcgattccccccaaactaatttttcacttgctttatattttctttacgtaattaagaaatgatgaatcaatttcttaactattttttatacacttttagaaatagattccctaggaactgatttctaaacatccttttttttagaagccaattatgaaattagtttccaagaaccgatttcataattgttttcttatttttttcaatgttttt

SEQ ID NO: 47654 - DNA, 188 bp, Glycine max
  Clone ID: LIB3107-014-Q1-K1-H11
gaccacctaagggtacctttactataccttgcatgcggggtttttggggggctatggatttcattggctatcatctccttcaaggatcttaaaacctcaataatcgatttctctaatccggattaatattgtgccataatctatatttacaatatcgtacttttgactgaacctatccaccaacatta

SEQ ID NO: 47655 - DNA, 316 bp, Glycine max
  Clone ID: LIB3107-014-Q1-K1-H12
gattcctcaagaactagggtttgcagtcactgcgctgtttcaccgagtttgggcgtttagatcagaaccaaatcgtgttctcttccattggcaaacacggcaactcaaatgagcaagaagagaaagtttgttgcggacggagtgttctttgccgaactgaacgaggttctgacacgtgaattggcggaggacggttactccggcgtcgaagttagggttacgccgatgcgcaccgagatcatcatcagagccaccagaacccaagccgttctaagtgagaagggaaggagaattagggaacttacctcagtggtgc

SEQ ID NO: 47656 - DNA, 389 bp, Glycine max
  Clone ID: LIB3107-014-Q1-K1-H2
gacaacaccacacacagatcaattgcaacggttgaattttgactgaagacaaagttagaaaaaaaaacatgtcttgctccgtcgcggtttccaattcgccggtgttctctccttcttcttccctcttctgctcgaagccctccatcatctcttcttcgccggaatccctctccctctctctgtcgcatctcaaaccttcgaactcttctacgtcgtcgtcttgttcttcgccttctgctgctgctgcttcttcttctccttcttctccgtttcgacttcgccttaccaagccttccaccgcgttctccgcgtcttctgctgcttctgcttcgtctacctctccgaactgcaccgctttgaagaggaagcgacccgctatggtggacata

SEQ ID NO: 47657 - DNA, 382 bp, Glycine max
  Clone ID: LIB3107-014-Q1-K1-H3
cacgctatcagttacatgacataatacagagtgttcaattagagcataatgggatccaaaaatgcaaatgggaagaaccacaaggacaaaaggaacaaatttaaggataatttgagttctagttattcatcacccagtgatgccaaggttatcctcatcagtgatcctcgatattcaaaggctcacacggatcctcggttccgtgaggctccaaagcgtgaaacgaatgtggctgttgactctcgcttcaaccgcatgttcactcacaagagttttttgccctcttctgctcctgttgacaagagaggcaagcccaagaacaacccaacctctcagattggttctctgcgccgttactacaaaattgatgaaaaggaatttg

SEQ ID NO: 47658 - DNA, 423 bp, Glycine max
  Clone ID: LIB3107-014-Q1-K1-H4
gatcacttattaattgtgttaagaaatttaagtgaggagctagagaatgatgatgaagtctgctatgtgtgcagtggtggttgtagcacttcttcttctggcggaggtggggcccatggctgaggctgtgacatgcaccccaacagagttgagtccgtgtcttccagcaatcacttccggtgctaaaccttccaatgcttgttgcacgaagctgaagcagcaaaaaccatgcttatgtggctacctcaaaaacgctagcttgaagcagtatgttaactctcctaatgcccgaaaaaccgttgcttcttgtgggattccctttccaacttgttaattaattaagccttcttataattaaagtgtgggatatatatatatatagataaacagtttaatttatacacactttgatcctacaaagca

SEQ ID NO: 47659 - DNA, 200 bp, Glycine max
  Clone ID: LIB3107-014-Q1-K1-H5
ctcgattacttaacgactacctcatcatacacatgggtggccaacgacacttgctgatgctcacgtaaacaagtacgatgaagcagacggcatgattcatcgatgccacaaaagccggacagcatttgagttgtaagcacggatttggggatagatgtcggtaaaccattgttagattaacggatctcaataaggattgg

SEQ ID NO: 47660 - DNA, 338 bp, Glycine max
  Clone ID: LIB3107-014-Q1-K1-H6
agggatcactcattaatcgtgttaataagattcaagtgaggagctactgaatgcagaggtagtctactaaacatgccttgctgcgtctcgcacttcaatttctcgcggatgtctcccccatggctgacgctttgacatgcaccccaacagagtttagtccgtgtctaacagcaatcactttcggtgctaaacctttaaatgcttgctgcactaaactgaagcatcataaaccatgcttatgtggctacctcaaaaacgctagcttgaagcaggatgctaactctcctaatgcccgtaaaaccgctgcttctgcgggattccctttccaacttgttaat

SEQ ID NO: 47661 - DNA, 408 bp, Glycine max
  Clone ID: LIB3107-014-Q1-K1-H7
ggagtgagcaagagtgaagagcgaagagaatggctcccaagggtttaatctttttggctgtgttatgcttctcaacactgtcactgagtcgttgtcttgcggaggataatggacttgttatgaacttctacaaggaatcatgccctcaggctgaagacatcatcaaagaacaagtcaagcttctctacaagcgccacaagaacactgctttctcctggctcagaaacatcttccatgactgtgctgttcagagttgtgatgcttcactgttgctggactccacaagaaggagcttgtctgacaaagaaacagatagaagctttgggttgagaaattccaggtacattgagaccatcaaagaagcctatggacagggaatgcccaggatttgttatctgggctgatatt

SEQ ID NO: 47662 - DNA, 383 bp, Glycine max
  Clone ID: LIB3107-014-Q1-K1-H9
agcgaggatgagatattgcacgcgaggattttgaagaacttcacattcaatgagctaagaactgctacaaggaactttcgtccggatagtatggtgggcgaaagtgggtttggatgtgtgtttaaggggtggatcgatgagcatacacttgcccgtactaaaccagagacaggaatggtcattgctgtgaataggcttaaccaagaaagcaaccaggggcacattgaatggttgacagaaatcaactacctggggcagctcagtcattctaatcttgtgaaactaattggttactacttagaagatgatcaccggattttggtgtatgaatttgtggccaatgttagtttggataatcacttgttcaagaggggttcttactt

SEQ ID NO: 47663 - DNA, 447 bp, Glycine max
  Clone ID: LIB3107-015-Q1-K1-A10
ggttctagtgtatgtgattgttgtgactcgttctgcttcgtcgttatcttcttcttttgttgtttgtgtgtttgttttttctctcacctgaaaatgtcttgctgcggtggtaactgtggttgcggaagcgcctgcaagtgcggcaacggctgcggaggctgcaagatgtacccagacttgagctacaccgagtcaaccaccaccgagaccttggtcatgggagtggcaccagttaaggctcaattcgagagtgctgaaatgggtgttcccgctgagaacgatggctgcaaatgtggagctaactgcacctgcaacccctgcacttgcaagtgaggtgttggagagctaaagcttcaagcagaaatggcccttagaaataatgatgaaaactatatgtagtttcaaaacttcaaaattatgtagtatgtattatgttgcactctggtg

SEQ ID NO: 47664 - DNA, 426 bp, Glycine max
  unsure (1)..(426): unsure at all n locations
  Clone ID: LIB3107-015-Q1-K1-A11
ggaaaggagatgtttgaataaaaataattcccctgcaagttctgattttttgagaggactggacaatatgaatgttttattatgctctatcaacacattaaaaagattatatgatatatctgctgtggaagtaggtcaacatttctattggcaaatagggagtttccaagtacatgcccaagtacttattacttcttgggttgtaattgctctcttattggtttcagccattctaattattcgaaatctgcaaaccattcccgctttcggtcagaatttctttgaatatgttcttgaattcattcgagacgtgagcaaaactcanattggagaagaatatggtccgtgggttccttttattggaactttgnttctatntatttttggttctaattggtcggnggctcttttaccttggaaaatcat

SEQ ID NO: 47665 - DNA, 436 bp, Glycine max
  Clone ID: LIB3107-015-Q1-K1-A12
actagtgcttattctacattttctactgctatgtactgggtggtagtttttaacataaacaattttgagggctagtggatttcatcttttggtataccaaacatgggtggtaataacaatcatgcattatattttcacccctgcaaggtggttttttgtaactaacatgtccccttcttaattatggattcatttagggtctttggaacatggccaaccgcattgttagctgcacacaggaagaaagtgaaaatcgaaggacctgtatgtgattcatcacaagtcattggttggcatcttaaggatatgaacaatgaaactgatacaatcactcccccaattcatatttcaagttttgcttttaatagctccatcctttgggaccctgagagatggggtcgcacttcctctgttcaagacacttctcatgtataca

SEQ ID NO: 47666 - DNA, 413 bp, Glycine max
  Clone ID: LIB3107-015-Q1-K1-A2
ggcaggctagagagagaaagacacggactgagaaagagagaatgctctgagtttcagagacactgtaatagagagagaaagagagtgtgagtttgcgatgatgagaaccagagaccgaaagagcaaaacgacattcacaaatctgcgcaaacctctcaatcttatttcctgagcattctcttgcgttttgtctccaccgtcgtcgtttttgtttcttgaagcatttcgcgcgcgagggagggtaagatgagtcgtttagggttcaagcacgaggtgtacgacggcgacaagcacatcggcgaactagatttgattcctccgtcgtcgttgacgacgacgacgccgtttcacaacaacttccgcttcccgaacaacgagattcgcatccaccacttcagcgcgaagagcgagcg

SEQ ID NO: 47667 - DNA, 369 bp, Glycine max
  Clone ID: LIB3107-015-Q1-K1-A3
accacaaggacgaggataataagccagtagaaaccgatactggttacgacaacacatcatattccaagccttctgatgactatgactctggtttcaacaagccatcgtatgagtcttctggcggtggctatgaaggtggttacaacaaaacatcttattctagtgatgagccagcttctggtggtggctatgaaggtgggtacaagaaaacaggttattctggtggcattgatgagacttctggtggctatggcgctggtggtggtggatactctgacgtcactgatggtggctacggcaaaccaagtggtggctatggcgccggtggtggtggtggtgtgtaccctgacactaccactgatggtgggt

SEQ ID NO: 47668 - DNA, 98 bp, Glycine max
  Clone ID: LIB3107-015-Q1-K1-A4
ccatgcatgctttatatctaagagagactatttgcacagaaagttttattgtataactataagattgaacttatgaatgttaatattacatcaaaatt

SEQ ID NO: 47669 - DNA, 132 bp, Glycine max
  Clone ID: LIB3107-015-Q1-K1-A5
accacatggacgaggataataagccagtagaaaccgatactggttacgacaacacatcatattccaagccttctgatgactatgactctggtttcaacaagccatcgtatgagtcttctggcggtggctatg

SEQ ID NO: 47670 - DNA, 418 bp, Glycine max
  unsure (1)..(418): unsure at all n locations
  Clone ID: LIB3107-015-Q1-K1-A6
ccatgacagcttgatagctaagagggactagttggacagaaagttttattgtataactctaggctcggactcatgagtggtaagttgaggtcaaagtggattgatccttttgtggtgactaatgtttttccttatggtacaattgagatcaaaagtgaatccacagataagagcttcaaggtcaatggacaatggctgaaaccattcctcataaatccctccttagtggatgtagtgatggaggagacctccttacttcatcctacttctcttccgccatgacttagggagttttctttttctgtctccttctttacttttattgcacttgtccaaatttattgattgttctgattgctcttgatcttatgattatgctacattgaggacaatgtgttgtttaagtgtggnggggggg

SEQ ID NO: 47671 - DNA, 398 bp, Glycine max
  Clone ID: LIB3107-015-Q1-K1-A7
aagaacatggatgccataatgggaaacatacgaccacaggagtctgaataccaggatgacaagaatgaaccgaggaatgtggttgtagcaggggaatttgacaccagtactgtgcagttcataaagaatgaagatcttgaagagttgcgagagctgggttctggtacatttgggactgtgtaccatggaaaatggagaggatcagatgttgcaattaaaagaataaagaaaagctgcttcgctggtcgatcttcagaacaagaaagattgaccatagagttctggcgggaagctgacatactttccaagcttcaccatccaaatgtggtggcattttatggtgtagttcaggatggaccaggagcaacattagcgactggtaccgagttcatggtgga

SEQ ID NO: 47672 - DNA, 371 bp, Glycine max
  Clone ID: LIB3107-015-Q1-K1-A9
ggttctagtgtatgtgattgttgtgactcgttcgtcttcgtcgttatcttgttctcttggtgtttgcgtgttcgttttttctctcacctgaaaatgtcttgctgcggtggtaactgtggttgcggaagctcctgcatgtgcagcaactgctgcggacgctgcaagatgttcccagacttgagctacaccgagtcaaccaccaccgagaccttggtcatggtagtgtcaccagttaaggctcaattcgagagtgctgaaatgggtgttcccgctgagaacgatggctgcaaatgtggagctaactgtacctgcaacccctgcacttgcaagtgaggtgttggagagctaaagcttcaagcagaaatggccct

SEQ ID NO: 47673 - DNA, 427 bp, Glycine max
  Clone ID: LIB3107-015-Q1-K1-B10
ggtgtgcttctcgtgccttctttcactttataacgcactctcaccccttccctcatgtgatttcttcttccccttctgcacttcttcatctccttcttcactcacacatcaaaataaccaaattctcaaaaattaccctcaaaatatcaaccacagcactaaatctttgatgatgccccctcagcaagaaacctctattacatcaaacattccggccatccccaaccggccggaaaacagctacgtccatgccgaaccaccgagctccgccaccaacgacattaaacccactttcacgagcaatgacattcacagcaataattcttctcagcaccaccaagcagctccttcagcacccagattttctgttcttcagcaatccttgcgccctgttaccctcaaatttgaggatgtttcctacagcata

SEQ ID NO: 47674 - DNA, 418 bp, Glycine max
  Clone ID: LIB3107-015-Q1-K1-B11
gggagcgaagtgaatggaaattgaggtgactcggggtgagttgactcagcaatggcggaagaggtgactcgggtgatggtggcggtgaacgagtcgagcattaagggataccctcatccttcgatcagcagcaaaggggctttcgactggaccatcaacaagatcgttcgcgacaacgtctctgccttcaaccttctttttcttcacgttcaagtccccgatgaagatggttttgatgacatggatagtatctttgcttctcctgacgattttaagaacatgaatcagagagatagaattagaggagttcatctgctggaatacttcatcaataggtgtcatgaaattggggtggtttgtcaagcatggataatgcatggtgatcccaaagaagtaatatgtcatgaagtgaaacgac

SEQ ID NO: 47675 - DNA, 442 bp, Glycine max
  Clone ID: LIB3107-015-Q1-K1-B12
gaaaagagagatgggaaccgttagtaacattggctgcccttcactattcagagttcatctagattcacaagtactatcaaagcatatgaagaataaatcatcgtgcgattttatggttccttctaatcataactactctgttaggctgagtccaatatgttgtaagctatcagaaagtgggattgaggagaaccgcacgagcacgagcacgggcgagaggccctctaagatcaaggacaggatggaggagtacaatatagctatgaagaaaatgatgaggaacccttatgagtatcaccatgatctgggtcagtttcatctctatcctattattgtttattggtaccccctacaacatttgacatttgctacctagtacttttgtttgatctatttctatgaaatgctacatatgtttgatatgattatgatattgagaaat

SEQ ID NO: 47676 - DNA, 392 bp, Glycine max
  Clone ID: LIB3107-015-Q1-K1-B2
gcattttcccttgtctcttccttggtctctctacaaagagtgtgtgtgagagagagaaggatttggaattttggataactagagcgaaagcgtgacaccaccaaaaaccgaactgttcccagatctccctctctctctctctcttccaacaatccaaatccaaatccaaaaccctaccaacaccacactcaatcgatcgatggggcagaagtctctgatctacgcgttcgtgtcgcggggaactgtgattctcgcggagtacacggaattcagcggaaacttcaactccatcgccttccagtgccttcagaagctccctgccaccaacaacaagttcacctacaactgcgacgcacacaccttcaattacctcggcgacaatggctacacat

SEQ ID NO: 47677 - DNA, 408 bp, Glycine max
  Clone ID: LIB3107-015-Q1-K1-B3
gtaccaaagacggtgagtttatcagcaaactacctttacttcagtatattcactccaagtggggccttctcaatgttgcagctaaattgcctcattactccttgcagaatgatgtaggacccaagatatatatatcttatgggattagtgatgaacttggtagaggtgattcagtgacaaatctccacttcaatatgcgtgacatggtgtaccttttggttcatacaaatgaagtaaagctgaaggactggcagagaactaaaattgaaatgatgcaaaaagctaaagctaataaggaatttgaggcaaaagaatcacatggggatcctcaaatatcttcaagggggagttcacctgattcctcacttggtacaaaaagtagtggactggaaatagactcaaaccaga

SEQ ID NO: 47678 - DNA, 311 bp, Glycine max
  Clone ID: LIB3107-015-Q1-K1-B4
gcgcatagagattgataggacaggaaggatacctatgttgaagctccgcgatcgagagtcatatgtacggaataagacaaaggaatatgatgatattgctatgaagtatttgatctatgttctatttctccttgctgctggtttttctggctactagctgatgtatgagcgtcacaagagctggtattcttggattctgtcttcggtcacaagttgtgtatacatgaacggctgtattattatgggccctcaattgctcatcaactactagcttaaatctgatgctgatctaccttgggagaaatgacata

SEQ ID NO: 47679 - DNA, 431 bp, Glycine max
  unsure (1)..(431): unsure at all n locations
  Clone ID: LIB3107-015-Q1-K1-B5
tctgtccagttacaacataccgttggtggctgatgttcattttgctccctctgttgctttgcgggtagctgaatgctttgataagattcgtgtaaactctggaaattttggtaagcatctcttcttaattcattagtcttatgtttttttctatcatttttttttcatgtgttggctttcattctgattccaagatgttggtcttctacagctgatagacgggctcaatttgaaacattagagtacacagaagaagactatcagaaagaacttgagcatattgaaaaggttaaatcatccatctgttagttttataactcaaatttcagtgaagagcatgctgtatgctaatttatcagtacttcttttgaggtccctcttctgtcatacacatatacatncctncttagtccttactgaagatgtgggaa

SEQ ID NO: 47680 - DNA, 455 bp, Glycine max
  Clone ID: LIB3107-015-Q1-K1-B6
ggcctgctacatttcaccaccccctttatccttatctcctctcttcttcatttgttctgctcgtcccctctatttaaagctcacacaaagggatcatataccttggttgcactttggtaaggtgagagaataggaaaaagggaaatatggcatttgcaggaacaactcagaagtgcatggcttgtgacaaaacagtttatctggttgataagttgacagcagataaccgagtgtaccataaggcttgcttcagatgccaccactgcaaaggaacactcaagcttagcaactataactcttttgagggggttctttactgcaggccacacttcgaccaactgttcaaaagaactggtagtcttgacaaaagcttcgaagggacaccaaaaattgctaaaccagaaaaaaccggtgaagaagaacctgcagcaaccaaagtcttaagtatgtttggt

SEQ ID NO: 47681 - DNA, 308 bp, Glycine max
  Clone ID: LIB3107-015-Q1-K1-B7
agtctttcttggtgtgatattatgcagtttgggaggatgaatgtccctaatagtgatcataatgcgccaactgatgagaagactgagctgctgtagacactgcaatggacgtgaatggtcctcatgagagtaatccagattactgtgttcttgccggtagctgatgcaccatcggaggctactgtcgttgtggtggccaccatttagcatgattgtcgatgttcatgagtaactgatgcataagatcaactatcattacaccaatggctaatgcttgaatgcctaaaaattacactattactactcct

SEQ ID NO: 47682 - DNA, 411 bp, Glycine max
  Clone ID: LIB3107-015-Q1-K1-B8
aaccacaagctcaccgatgctgttcttcctccaacgaaagactggagaaaagaaggtatagtgagttcagttaaagatcaaggcagctgcggatcatgctggacattcagcacaactggggctttagaagcagcctatgcacaagcatttgggaagagtatctctctttctgagcagcagctagtggactgtgctggccctttcaacaactttggctgccatggtgggttgccatcacaagcctttgagtacattaaatacaatggtggactagagacagaggaagcatatccctacacaggaaaagatggtgtctgcaaattctcagctgaaaatgttgctgttcaagtccttgactctgtgaatatcaccttgggtgctgaagatgaactaaaacatgcaagtgcattt

SEQ ID NO: 47683 - DNA, 301 bp, Glycine max
  Clone ID: LIB3107-015-Q1-K1-C1
gatacataccctttgcacattcttcttcttcttcttggtctctttctctctctgaagcaagtgcagagcaattaataactcaagttttgggtcactccgtgaccgtgatgatcgtaaagttattgtcttttgagtgatgggtttgtgctcttcggtccccaaaaacgctaacgaagacatgaagctcaaactctcgttcggttcaaaatctgagaagcttgtgattcctccaacatccatcaagggacaacaaccacaacaaccccaaaatgggtggtcaacggctcggtcaacgaccacc

SEQ ID NO: 47684 - DNA, 437 bp, Glycine max
  Clone ID: LIB3107-015-Q1-K1-C10
aagaaggagttgatctctatctttaagcaattagaagagacactaactgacaaacccttttatggggatgacacgtttggctttgttgatctttgtttgatcactttctctagttggttttatacttatgagacatatgggaacttcaaaatggaagaagagtgtcctaaactcatggcttgggtcaagagatgcatggagagagagactgtgtccaatactcttcctgatgctaagaaggtgtatggtcttattgtggaactgcagaagacacttgaatcgaaatagaagatttcaataaatcaacccattaaataatattttcatgttaaatatgttgttgtaaggtcttgtgtacttttcctctatggttgtgtgggttgggtcagtcatttatgtggtttactagacactaatacatcttctctattgaagat

SEQ ID NO: 47685 - DNA, 449 bp, Glycine max
  Clone ID: LIB3107-015-Q1-K1-C11
attatggtttattaatgccactagtgactgtgcattagtgcttcttgttgttgaaacagctttgtctttcgaggtcatacttattacttgggggagttaatggcgtagcattgaggtaatttccttcgtccattttatgtgtagttacaattataaatgtgtctgtttccgcgtgtttaatagatatctagagtttttttcgtaaaaaacaaaattttcgtgcataaatatgtattttgacatttttgaaactaaattttaaattttaatcttttagtaacatttatcacgaaattaattgtcaacataagcatgctgaatagattggaaaaaaatgttaataagatctcattattgaactaaaatgtctctaattttttgttggacgaaaatgtcaataattttgtttggacaaaaatatcagtcatttttaatttggatcaaaatgt

SEQ ID NO: 47686 - DNA, 420 bp, Glycine max
  Clone ID: LIB3107-015-Q1-K1-C12
gacatcttcttttacgtattgaatctcataattctctaaaagagatctttttctgctctttgaagaaagaagggtctttgcttgattttggagatgtctctgctctcagatctcatcaaccttaacctctccgataccaccgagaaggtgatcgcagagtacatatggatcggtggatcaggaatggacctgaggagcaaagcaaggactctcccaggaccagttagcgacccttcagagcttcccaagtggaactatgatggttccagcacaggtcaagctcctggtgaagacagtgaagtgattttatacccacaagccattttcagggatccattcagaaggggtaacaatatcttgcttatctgtgatgcctacactcctgctggagaacctattcccactaacaagaggcacgct

SEQ ID NO: 47687 - DNA, 347 bp, Glycine max
  Clone ID: LIB3107-015-Q1-K1-C2
gctcggttttcgcgtactctactcgtgcatcccgacatggtttgcttggcttgtttgctgcccctccttctcgtcccaatcgtcaacatcctccctcttctcttccattttatcatggggaaaatctatcgggtttttggttgggagtacaggaaaccggagagggctcctcctgcatgtccattcaagcctccagccaacagggttagtgaagctgaagcagatgttgaaccagttccagcagatcctgttaagcctggaaatgtagatgtcaagcaagattaatctggcgtacctattgtataagatttgagtttgacaggagtaaaatgtatgataacatctga

SEQ ID NO: 47688 - DNA, 455 bp, Glycine max
  Clone ID: LIB3107-015-Q1-K1-C3
cccacgcgtccgaattcgagcgggccgattttttattgtttattacttttttttttttactggaattttaagcttcaattcttttatcgtttattttaatcagccaaaaaaaacataatattatataatgaggtacgacctcccttttacaactgtatccatcaaatttcctttccagaaaaaaaaaccccaccaaaatatagagtacagatgttctttttaagaggattacagatgttataaattatttaatattttaccctatgatttggttaattaacattaaaggcggttaaacaagagcttaattgtttaatttttacttttaaaattttaaattataataattattatacacactattgattatcaacttatcgatgatttgagtaaaattagatttatatctcttaagcaagattcaattggaatgagtaattagctaattttttgac

SEQ ID NO: 47689 - DNA, 384 bp, Glycine max
  Clone ID: LIB3107-015-Q1-K1-C4
ggaagcgtcgcatttgatggcttcgaaccctttgcgacaagatggggcccacaagtccgggtcggttgggaaacccgtgggtcaggaaatgggcattttagacgaatcgggtcgggtccaagaggctggtatcagtggagaggtttgcattcggggatccaatgttacgaaaggatataaaaataacgtggcagcaaatacggcgtcgtttctgttcgattggtttcatactggtgatattggatactttgattctgatgggtatttgcatctcgtgggtcggatcaaggaactcatcaaccgaggaggtggaaagatatcaccaatagaagtggatgctgttcttctttcacatgcagaaattgctcaagcagttgcttttgg

SEQ ID NO: 47690 - DNA, 431 bp, Glycine max
  Clone ID: LIB3107-015-Q1-K1-C5
catgccaccactcctattctactattttttgtgcctgtggttcaataagcattagtcaaaattctaatccccctcagcctaaatgtaacctcctaagttcctcattcacactagtttcctatctcaataatttgttttcttttaaaattcaacaattgatttaactctcattataggtgttgcccatgcttttataatcttgtgaaatatgttgagttgcaggattatcacagtcaacaactattatggggcaaattattattgactttttgggagttttcaatctaataaacatttgtcaggcatgtggcgtggttttatgttgcataagcaagattgagagattttgtgccttcctatttttaagtattgagtctcaacatgtcaatgttattgaaacttttctaaattgatggcttgagaagtagtat

SEQ ID NO: 47691 - DNA, 406 bp, Glycine max
  Clone ID: LIB3107-015-Q1-K1-C6
ggaggaacctttgtctctcatcaatggctgccacgagaccggtgcagtgtttgttacgaagggtttgcaggggaagtaggagttttggggttgccacagaagttaatgcttcttcttcatcttcttctcagaaaatcatcgacaaggaatatgaacacagtgcccacaattaccatccccttccgattgtattttctcaggcaaagggaacctctgtttgggatccagagggaaacaaatatcttgattttctatctggttactctgctgttaatcagggacactgccatgctaaaattctcaaagcattacaagaacaagcacaaaggctgactgtgagctctcgagccttctacaatgatcgctttccagtctttgctgagtatgtgacaaacatgtttggtta

SEQ ID NO: 47692 - DNA, 416 bp, Glycine max
  Clone ID: LIB3107-015-Q1-K1-C7
ggatcaccgtcgatggcgtgcaggggctctgggtgccagtccggtggctgctacaaagacgaagacgcaacatgtaagcaaccacccaagtccgaagaagccgattcaaaaaaccctagcaatgtctgcatcaagtgcaagctcaacgacgccgtttcgggctacggcggaatcgacgatggtcgtttctgcgccgattgcttcaaaaccaacttgttcggcacgtttcgtttcgccgtcacttcaaatgccatgataactcccacggacaaggtcctcgttgccttctctggtggcccttcatccagggtagctttgcaatttgttcatgacatgcaagagagggctcagaggaacttcgatgcgagtagggaccggtcgttgccggtggttggagttggagttcgtgttattga

SEQ ID NO: 47693 - DNA, 455 bp, Glycine max
  Clone ID: LIB3107-015-Q1-K1-C8
cccacgcgtccgaattcgagcgggccgcttttttttttttttttttttttttttttttactggaatttgaagcttttattcttttatcgtttattttaatcagccaaaaaaaacataatattatataatgaggtacgacctcccttttacaactgtatccatcaaatttcctttccagaaaaaaaaaccccaccaaaatatacagtacagatgttctttttaagaggattaccgatgttataaattatttaatattttaccctatgatttggttaattaacattaaaggcgtgttaaacaagaacttacattgttaatttttacttttaaaattttaaattatactaattattattcccactattgaatatcaacctatcgatgatttaaagtaacttagatgtatatctcttaaggcagattccattggaatgagtaattaactaattttttga

SEQ ID NO: 47694 - DNA, 432 bp, Glycine max
  Clone ID: LIB3107-015-Q1-K1-C9
aagaaggagttgatctctatctttaagcaattagaagagacacttactgacagacccttttatggggatgacacgtttggctttgatgatctttgtttgatcactttatctagttggttctatacttatgagacatatgggaacttcaaaatggaagaagagtgtcctaaactcatggcttgggtcaagagatgcatggagagagagactgtgtacaatactcttactgatgctaagaaggtgtatggtcttattgtggaactgcagaagacacttgaatcgaaatagaagatttcaatagatcaacccattaaataatattatcatgttaaatatgatggtgtaaggtcttgtgtacttttactctatggctgagtgggttgggtcagtcatttatgtggtttactagacactaatacatctactctattg

SEQ ID NO: 47695 - DNA, 355 bp, Glycine max
  Clone ID: LIB3107-015-Q1-K1-D1
gattatcatagtagatattcattcgccttatctttctctcttctctctccccgcccaaaccctaactccctaccctattccgctttctctcatccatcatgaaaggaggaaagtccaagaccgaatctaagagagccgatgccaaacttgctgtgaataagaagggcgccgccaccaagactaggaaacccgccggaaaggggaaggcagcgaaagatcctaacaagccaaagaggcctccaagtgctttcttcgttttcatgtaattataatatattggtatctctacgattcatttgacttccgatgcgctctcttatctttcctccgaataattttatcgtcaaaactttta

SEQ ID NO: 47696 - DNA, 248 bp, Glycine max
  Clone ID: LIB3107-015-Q1-K1-D10
cgacatcttcttttacgtattgaatctcataattcgctaaactagatctttgggtgctctttgaataaagaagggtctttgcttgattttggacatgtctctgctctcagatctcatcaaccttaacctctcctataccaccgagaaggtgatcgcatagtacatatggatcggtggatcacgaatgtacctgaggagcaaagcaaggactctcccatgaccacttatcgacccttcacagcttccca

SEQ ID NO: 47697 - DNA, 353 bp, Glycine max
  Clone ID: LIB3107-015-Q1-K1-D11
tcatccacaactattaaatttccatacacactaagatccatttggaaaattagtatctatacaaatccacataaacattaattcccaatgccccaccccattaatactaaatatcacttacactttttacaggcactaactcattaaactatatgatactcctttttatcctaactgcactctttcataatgtaattccacccactcatcaatctcattatactctcttaactttcccttccttacattcctcctcttattctatattttctacttacctcaaattattctttaaccctaataaaatttctttttaaatcttcaaatacaaaaatcctctatacacttcaatt

SEQ ID NO: 47698 - DNA, 452 bp, Glycine max
  Clone ID: LIB3107-015-Q1-K1-D12
aggcgtgcgaacacgtccgagaggaccacacaagggaagtgttgttacggggtgagttgtaaaatgaggggaattgtgctttggttagcttgttatacttatgttatatatatgtgcttttgaatatctatgcatgtttaggaatgtgatatacttactccatgtgtgatgtttgtgtttggatcctatgatgatatcggaccttgttttcatgagatcaaatgatgagatatatgactataaacaaccttatgctaaatgacgattaacactatactctgatatgatatgacattagagcttatgatttgacattgattttatcatttgctattataacatatgtcaatgaacatgatttatttatatatatctcattgaaatttcaattgtaatactagcaagtttcacctcttgaaggtctcaaagaagttgttaccctttcgtacatg

SEQ ID NO: 47699 - DNA, 355 bp, Glycine max
  unsure (1)..(355): unsure at all n locations
  Clone ID: LIB3107-015-Q1-K1-D2
gattatcatagtagatattcattccccttatctttctctcttctctctccccgcccaaaccctaactccctaccctattccgctttctctcatccatcatgaaaggaggaaagtccaagaccgaatctaagagagccgatgccaaacttgctgtgaataagaagggcgccgccaccaagactaggaaacccgccggaaaggggaaggcagcgaaagatcctaacaagccaaagaggcctccaagtgctttcttcgttttcatgtaattataatatattggtatctctacgattcatttgacttccgatgcgctctcttatctttcctccgaataattntatcgtcaaaactttta

SEQ ID NO: 47700 - DNA, 429 bp, Glycine max
  Clone ID: LIB3107-015-Q1-K1-D4
attggattgcattttggacatgtactgatacacttacaggatcatccttccaggttgaagcactggcttctcctaggcttagctctccttacttcaggacttattcttcacttcactcatgccattcctttgaataaacaattgtacacgctgagctatgtttgtgtaacatctggagcagcagcattacttttttcagccttctatattatggttgatatttggggtttaacattcttgttcttgcctttgaaatggattggcatgaatgccatgcttgtttatgtcatggcagctgaaggaatcttcgcaggattcattaatgggtggtattatggtgaccctcataacacgctggtctattggatccagaaacatgtcttcattaaggtttggcattcaacgagagtaggcatcctgctatatgtg

SEQ ID NO: 47701 - DNA, 403 bp, Glycine max
  Clone ID: LIB3107-015-Q1-K1-D6
ctgctgcagaaacgttggggttagaaacctcagagcgcacttcatcattggaaacttcttttgcttgtttcttattaggagacaggtgaggttcagtatcagcaacgcattggtcgtagtcacgcttcagttccgtccttgactcctcattgttctcctgctttccttcttctaatgtatgcacacaaaccactttttctcccatcaaaatcaaagaacagagcccctgggaatccaaacgtggtaactaccagataaacaccactgccgcacagcattcacaaagaaactcgaactgacttgaacttccacacaagattcgtgtcaaatcaaagcctcaaaaccacagcagcgttttgtaattagggaaagaaggtagctgtaatattataagtatttgtgc

SEQ ID NO: 47702 - DNA, 421 bp, Glycine max
  Clone ID: LIB3107-015-Q1-K1-D8
ggttgtgcgaatggctacgtttgcaattgggacacacttgcccatgttccagcatttgcataattctagacttccacttcttggcctttgcaccgttgaatcttcacccttctttggctcctcttcttgcagaaccagattcgcaggtgccatccccacgttgctccgtcacaatgtattggcacgtgccgaagataaggccagagaccctacaccttcttcctttcagcctcaacaaagttctcagcaacagtttcagaacttaacaccagaatctgggagttgtgatcccctatgttcactcgatgaaacaagctcacaagagtttgaagacagctaccagcccaagactgatttcctcaaagctgttgcaatattagcaacagctgcaactggggcagtggccattaatcattcttgg

SEQ ID NO: 47703 - DNA, 404 bp, Glycine max
  Clone ID: LIB3107-015-Q1-K1-D9
gacatcttcttttacgtattgaatctcagaattggctaaaagagatcttttggtgctctttgaagaaagaagggtctttgcttgattttggagatgtctctgctctcagatctcatcaaccttaacctctccgataccaccgagaaggtgatcgcagagtacatatggatcggtggatcaggaatggacctgaggagcaaagcaaggactctcccaggaccagttagcgacccttcagagcttcccaagtggaactatgatggttccagcacaggtcaagctcctggtgaagacagtgaagtgattttatacccacaagccattatcagggatccattcagaaggggtaacaatatcttggttatctgtgatgcctacacttctgctggagaacctattcccac

SEQ ID NO: 47704 - DNA, 404 bp, Glycine max
  Clone ID: LIB3107-015-Q1-K1-E10
gggctcctgggtacatttgtgctcgctagctttcaagattgctttgaaccctaaactgcttgctccttgctccttcgtttgaaccctccctttctgcttgctccttcgtttgaaccctccctctctttgacattgaatccctaccccttcttccattgaagctccttcacttgatcttccattgaagctgctaccccttcttccattgaagctccttcacctcttcgacttcatcgctccaacttctggttcagcatattcaagttttacaatttcgtggctctgaaactattagatggggaatagtttgcgcaagatcaatcatgctttacaagattgtgaattcatcatcagctcaattctaacgtgactgggaagagcaaactggtggactttgtgaacat

SEQ ID NO: 47705 - DNA, 395 bp, Glycine max
  Clone ID: LIB3107-015-Q1-K1-E11
gaatcaaacacaacacacacacgtaacttcatctgggtttcaggaaaaaagaaaaaggaaaacaatgggttccgataatcaccagaacttggagttcttgaaggagatcggtttgggctcttccaacattggctcttacattaatggccagtggaaagccactggttcttctgtcacttctgttaatccttctaacaatcagagtatagctcaagtgaccgaagcaactttgcaagattttgaggaggggttgcgagcttgcagtgaagcagctaagacatggatgactataccggcaccgaagagaggtgagattgtgagacagattggtgaagcattgagggccaaattggatcctttgggtaagctggtgtctcttgagatgggaaaaattc

SEQ ID NO: 47706 - DNA, 383 bp, Glycine max
  Clone ID: LIB3107-015-Q1-K1-E2
gagtgaagagagagagaagacgaacactatcatggcttcttcactcagaatctcaagacttatctctcgctccttttcttctacttctttcttttcacgaggtgggaatggtttccttggttcaagacaaagtaaattcagcacttctgctgccattgaggaagaacccattaaaccatcaatacaagtagaacacacccaactcttaattgatggaaaatttgtagatgctgcttctggtaaaacttttcaaactttagatcctaggacaggtgaagtgattgctcatgttgctgagggtcactctgaagatgttgatcgagcagtttcagctgcacgaaaagcatttgatcatggaccatggcctaagatgacagcttatg

SEQ ID NO: 47707 - DNA, 385 bp, Glycine max
  Clone ID: LIB3107-015-Q1-K1-E3
tccatcgcctcctcctccacgttacagcagaagaggaggagggaggagtcccagccctaggggccgctatcctccccgtccccgacaacaagatctccctaccagccttcttgttcgtaaccttcgtcatgactgtaggtacacatggactcacactcgcctctctttcccttccctttacttgtaccttatctgtatatatcattccaacgaacgagtgagcaattttgcaggcctgaggatcttcgcagaccttttggtcaatttggtcctctcaaggacatttaccttcctaaggattactacactgggtgagttaccatactcccttcccttctttccttttcactcctccatgtatcatgcattctctatcatattttta

SEQ ID NO: 47708 - DNA, 390 bp, Glycine max
  unsure (1)..(390): unsure at all n locations
  Clone ID: LIB3107-015-Q1-K1-E4
caacccactgatcaacagttacaatagcctatttatactagctctctaacactgattatctgtcaactaaccaatggttagttgagcttacatctggcacaaaacagtaagatataactacagctgtacaaagaaaaaactcttaaccgttagagtaagtctactctaataataagcatgcaaactaattctagttgagtagcattttccttggtgtgatagctgaatcttttagattgattgatttgttagcaagtaatgtttgtggttgctcactgctcaatattatcacaatgtgtgacaaaattgcaaatggtgccactctgacatgtggactggtactgggagagcacttgtcaaatgctaatatgcanaacatggngaggggaa

SEQ ID NO: 47709 - DNA, 406 bp, Glycine max
  Clone ID: LIB3107-015-Q1-K1-E5
gtcgcaagtgggtcatccacatcgagcgcataaccggcgagaaggtgaatggctccaccgtcaacgttgggattcacccctccaaggtggttgtcacaaagctcaaattggacaaggatcgcaaggccattctcgatcgcaaggccaagggtcgtgccgccgccgataaggagaagggtaccaagttcgctcccgaagacatcatgcaaaccgttgattagtctctttatcatacaaaccaattttatgtatgggttttggtagcctttttctatctctccattttgcaggattttgttatcttttcttatgttaatcaaactgttttatcccatgagcttatcattaactattttaattcgttttcatgcgtgaagacagtgatgccagttatttcaagcgaatc

SEQ ID NO: 47710 - DNA, 440 bp, Glycine max
  Clone ID: LIB3107-015-Q1-K1-E6
gatcccctttttcttctgcaagaactacaccaacgaaaacctccttcttctttgtttttttttggaggctggtgtgtgtttttctttttcttcttcttcttcttccaatccttaaggaaaaaaactaacgaaaaaaaagtgagccatgtcaggcttgtataatcccaacttctctcctgctagagcagcttctcctcagattaggagcaatccagaagtggacagtcagtacctatcagagttgctggcagaacatcagaagcttggacccttcatgcaagtgcttcccatatgcagccgcctcctaaatcaagaaatattaagggtttctggaatgttgtccaatcaaagttttggtgacttcgatagactgcgacatagaagccctagtcctatggcttcttcaaaccttatgtccaatgtcagtgggactgggttgg

SEQ ID NO: 47711 - DNA, 368 bp, Glycine max
  Clone ID: LIB3107-015-Q1-K1-E7
actgatttatacgggtcacaccctgtgtacatggatctcagaaatgaaggtggcaagccttatgcacatggtgttcttttgttgaatagcaatggaatggatgtgttctatagaggaacctctctcacgtacaagattattggaggggtgctcgatttttacttctttgctggacccacccctctcaatgttgtggatcagtacacttccttaattggcagacctgctccaatgccttattgggcttttggattccaccaatgcagatggggctatcacaatctatccgttgtagaagatgttgtcgagaattacaagaaggcaaaaatcccggttgatgtgatctggaatgatgatgatcacatgga

SEQ ID NO: 47712 - DNA, 439 bp, Glycine max
  Clone ID: LIB3107-015-Q1-K1-E8
accatcggttcattcaaaatccctatctccggcgagttctcctgtgccggccgtcggtactccggcaatatctccggcgatttctattccgacactggcaccggagacggggactccaccgccgtctcttgggccttcatcatcttcaccaccgtctccgggtccttcatcttcttcaccgccgtctccgggtccttcatcatcttcaccgccgccggcggggccaacttcaccgccgtcgttagcaccgtcgtctaattcaactgcgccgtcaccgaagaacagtggattttctgtggctccttcaagcgttttgatgtattgtgttacaattgttgctggtgctgcgttgttgcgttattgaacaaacattttgggttgaaattgagacatactttagtgacatgcttcgtgctagaacgttctttgtgggacacat

SEQ ID NO: 47713 - DNA, 442 bp, Glycine max
  Clone ID: LIB3107-015-Q1-K1-E9
agagatattgagcttttacagcctcagacattcagtaatgatgctatcattgactgtcatatcaagtatttgaaaaagaaactcccaactgatgaacagaacaggtttcactttttcaatagcttcttctttcgtaagcttgctgatttagacaaagatccatcaagtgcttgtgatggtagagcagcatttcaacgtgtacgcaaatggacaagaaaagtgaacctttttgaaaaggattatatcttcattcctgtaaactacagtcttcactggagtttaattgtcatttgtcatgcgggtgaagtgtcatgcttgaaagatgaagaaattaaggaatcttgcagagtaccttgtatcttgcacatggattccctaaaaggaagtcataaaggtctcaagaatgttttccaaagttacctatgtgaagaatggaaagaga

SEQ ID NO: 47714 - DNA, 338 bp, Glycine max
  Clone ID: LIB3107-015-Q1-K1-F10
taccgtcccaatgaccgggtctaaccacacgttcctacctgttctaaaaaaccacatatgggtcacgccaagagtatctccacgttctgtaacattgtaaactatcgcattcacaagttactgttctatatcctccatataccatacaacatttacacaaccctcaatacatgcttcaagcttttgagcgatataaaactttctgattcctataacatcattcttatttctccacacttaattattttgaaagactcattatccattccacagtttgtcaacaaaactggcttgactctacccctttgtatatatatatagagtattcatctactatt

SEQ ID NO: 47715 - DNA, 437 bp, Glycine max
  Clone ID: LIB3107-015-Q1-K1-F11
ggaagcgtacgtcaaatgttgtttcctgttaactaacgaagacgacaaagtctgttttgctggcaactacacctcactgaagcttcctcaaccgaaccccacgccacgctacgacgcgtcgtttcattattattcatagtcttcctttgcatgcgccaccatcatcaattcaattccaatgggtaatatctgtgctcgtttgaagtcgaagccgccgccgcaatcctcagccaagaagcgttcctcttcccgccgagagaggaggctcgacgacgccgcgattcgcgagcaggccatcgccgccgcgattctcttcaagcagcaccagcaacagcagcaattcgatcgctccacttcgcttcggtatccgaatggagtctccaagaagaataacagcaacaccttgccaaggagttcgagttccagggcaaggtccc

SEQ ID NO: 47716 - DNA, 387 bp, Glycine max
  Clone ID: LIB3107-015-Q1-K1-F12
ctacggggggctgctgggtacattactactagctagctttactgattgctatgaaccctatactgcttgctccttgctccttcgttagaaccctccctatctgcttgctgcttcgtatgaaccctacctctatttgacattgaagccctaccggttctttcattgaagcttcatcacttgatcttccattgaagctactaccccttcttgcattgcagctcctttacctcttcgactttatcgatccaacttctggatcagtgtattcaagtttgacaatttactggctctgaaactattagatggggaattgtttgcacatgatcaatcaggctctataagattgcgaattcatcatacgctcagttctaacgtgactgggaagag

SEQ ID NO: 47717 - DNA, 383 bp, Glycine max
  Clone ID: LIB3107-015-Q1-K1-F2
caataattgattggattgagtaacagtatgcattgaagtttacatgattgcttttgactgtgccggattttgtagtgtttgatatattataatggtatcattctgcctattgaaacttaagttgacaagttactgactgcataagctatgctattggcagttaatttctcccccccaaagctagtgattcttcatatgaatatggcactacatgtgtatgaagatatcatgaggatgactgaaaacctgagtgagaagtatataattggatatggagcatcaagtacagtttataaatgtgttcttaagaattgcaagccggtggctatcaagaggatctattctcactatccccaatgtattaaagaatttgaaactgaact

SEQ ID NO: 47718 - DNA, 383 bp, Glycine max
  Clone ID: LIB3107-015-Q1-K1-F3
tgactcgtgtttatcataaaaaaatggaagatctatctactgcttttatgtggacaacatgttcatagcatctcaaaatttgttggtaattcaaaggttgaagtcactacttaatggtgaactttagatgaaggacatgtgagctattagaaagattatgggcatggagatcaagagggatcaagtctaaaagaagatctttttgtgttagaaagaatacattttgaaagtgtttaatcattttgggatggcattcacaaaatcagtatgttttcctctaacaccgtccattcgtctatctgaactcaatactactcgatcaaaattagagaaggaatacatgttttgttccttatgcaagtgttgtaagttggctcatatat

SEQ ID NO: 47719 - DNA, 411 bp, Glycine max
  Clone ID: LIB3107-015-Q1-K1-F4
gggagaagaatcagactccagagcgagcatgagaaatcggtgagttgactcagtagagcgaatcgatggaggaagaagagagtcagtgcttcgagtgcctccaacttcgaataaagtccgatttctcggagcaagtgtttttcaattatgccatttccacttctgcttttcctttcggatcctcagctatcgttaatatttctggtacagctgatggcgaatcttcgggtgctcaatttatattgcagtacatgccgactcgtgataagaattgttttatcaattatgtaaatgaatatattttggatagtggtgaaatcactactaggagtagtgatcctggtattggaagcagtgaagataataatgctgttaatgttagaattacttcatcagatgattctgagagtg

SEQ ID NO: 47720 - DNA, 431 bp, Glycine max
  Clone ID: LIB3107-015-Q1-K1-F5
agggagtatttgatttgcacaatcaaataacattagtcctataacttcttcttcactaattaattaattctttttttttgagaaagtaggataattacaaatcaatttgagcacaaatagaatgtaaaatacatctggatccatggaggacaatgtatatattggaagtgcactagctctctttgatttgtactgtacttaggatttgtagaagccatgaagtgctgtaaggtgactagtgaatttgatttgaatggcaggtacagtgaattatccactattaaccgacgccattaatcaggccaacaagagatctttatgcacgtacactccacatctggatttaatcaatttctgctttgtaacttctatgttctacacttgacacgaaattttccttttggttcccttctaaatgtgtttttgattct

SEQ ID NO: 47721 - DNA, 138 bp, Glycine max
  Clone ID: LIB3107-015-Q1-K1-F6
ggcagttcaattccagaatagtgcattctctctgcgtatatccctacctctcccttgaaggttgcagatcttcggcaagaccctgaccggctagaccatcacccttgaagtggaaagctctgacgccatcgactacga

SEQ ID NO: 47722 - DNA, 424 bp, Glycine max
  Clone ID: LIB3107-015-Q1-K1-F7
gaaggtgcaagagtttgttgtgagctataagctaggttatcgtgaggagaatatgaagttgcttgttttctttgttgctgcagtagttttggtagcatggccatgccatggcgcaggctaccaaaggttccctctccgaatgaaaactggctatggtgagcgttcttcggaggtaaaatgcgcaagttttaggcttgctgtggaagcacacaacatccgagcctttaaaaccattcctgaagagtgcgttgaaccaacaaaggactacattaatggcgaacaatttagatcagactctaaaacagttaaccaacaagctttcttttatgctagtgaacgcgaagtccatcacaacgacatatttatattcggcatagataacaccgtactctctaatatcccatactatgaaaaacatggatat

SEQ ID NO: 47723 - DNA, 431 bp, Glycine max
  Clone ID: LIB3107-015-Q1-K1-F8
ggatacactgatacctctgcttttgctttgtttggctcttcttttgtaatggaaattgatctttctccccagttggccaagaaggtgtatgaaagcaatggtgggtcttaccatgcatggtccccttctgagcttcccatgttgcctgaagggaacattggtgctgccaaactagctcttcaaaaaaatggttttgcccttccttgttactctgactcttccaaggttgcatatgttctccaaggaagtggagttgcaggaattgtgctccctgaatcagaagagaaggtggttgcaattaagaagggtgatgctttggcactcccttttggtgtgataacctggtggtacaacaaggaggacactgagttggttgttctgatcttaggtgacacttcaaaagcccacaagactggtgaattcactgattt

SEQ ID NO: 47724 - DNA, 439 bp, Glycine max
  Clone ID: LIB3107-015-Q1-K1-F9
tatgtggcatctggcctgagaatgaatgtgtagaagtgagttgacctgtcagtttcacattgcaggtccttctttatggggtaattttgaccgtggtaggagagtatcacatggagcttctttgtatccgtgccacataaatctggtccaaacattaaactatagagaatgtgtcaacaggacattctttctttctgttttttaaggtaaaaatagaaagcatggataaagaaaaaaaaaatgaagttagaccagatgtggtacataaagtttcctaaaaataatgcaagtgaagcaaaatgagatttcctgtaataaaaagataaaaataacatgcatataaaataactgcataagctatcttttttatgttacttctggacatagttttatacactataatgaagtctctataatagtatattacacccctgattac

SEQ ID NO: 47725 - DNA, 400 bp, Glycine max
  Clone ID: LIB3107-015-Q1-K1-G10
ccacgcctacccacgcttccatacgactacaaaaagaccacagcataatgatactagcttcactatcataacactgggttttttaatacatacgtaatcaatctcatacgaaaccaaaggcactactaaacttcttcttcataacaatcactgcaacgctctatttacatacgtcactctgaaccagaacaattcttaaaacacatatcttaagactacctaaatctctcaaattcgatccaatctttctatataaaattactaagccatgataacatttcacctacaactcatcactacctgatgccattcaagaatatgcctaagctttttctcaataactttcaacaatttattactctcaactctttccaaactacacaacatgtgtttattcaaa

SEQ ID NO: 47726 - DNA, 414 bp, Glycine max
  Clone ID: LIB3107-015-Q1-K1-G11
gacaccaaacgagccatttgggagttaggttctgcacgctctgcttccagcgagtgttctttcttcgtttcaacaccttaatttgcacacgctgcttcttcagcttgagaaatggcacaagaaacctttctattcacatctgaatctgtaaacgagggtcaccccgacaagctgtgcgaccagatctctgatgcagtgctcgatgcgtgccttgaacaggaccctgacagcaaggttgcctgtgagacatgcaccaagaccaacatggtcatggtctttggagagatcacaaccaaggccaacgtagactatgagaagattgtccgtgacacatgccgcgaaattggattcatctctgatgatgttggtcttgatgctgacaaatgcaaggtgttggtcaacattgagcagcag

SEQ ID NO: 47727 - DNA, 437 bp, Glycine max
  Clone ID: LIB3107-015-Q1-K1-G12
gattcaaaatacaaataaacgctcgcactccaaagatcagatatgaaagttcaccactccgtccaactccttctttctctatttctactgcttgcatttcacgttcctcatatggctgttggcactgcggagcttagagctctgatggagttgaagtcccctctggatccacagggcaagatccttgggtcatggataagtgatggtgatccatgcagtggcttcttcgaaggggttgcgtgcaacgaccaccgcatagtggccaacatctccttgcagggaaagggtctttctggttggacatctccagcactggctgaactcaaatgcttgtcgggtttatacttgcactacaacaacctttctggtgagatacccccacacatttcatatctcactgaactgcttgatctctatcctgacgctaatactttatc

SEQ ID NO: 47728 - DNA, 413 bp, Glycine max
  Clone ID: LIB3107-015-Q1-K1-G2
gaggaacaaaaaattaacatgaagaacaatttcagattaattagaacagaaaaaactcgaatcagttcacccacacagggcattagggagacagaatccacaatggctccagagtggacagacgagaaacacagcatgtatatcaagtctatagaagcatctttcgttaatcagttatatgattctaagcaaatgaaaacttcatatgaccctgctaccacttccggccagttcaaggtactacgtggtggctgttggcaaaaaatcaattttgagagagtgaatccgcaaacgagtaggattaaccagtgtcatgacttgacggaaaatccatggattcagcactaccgatcttcaagcaaacagagaagcatagcagtttcatcccttcaagaaagtgttactaccacaag

SEQ ID NO: 47729 - DNA, 416 bp, Glycine max
  Clone ID: LIB3107-015-Q1-K1-G3
gaaggagagagagagagacgcatttgtaacgacaaagaagcagaaggtgtagtaatactgagtggtcaaattaaggatcgggattcaggaatttccattctgagacacacagaagaacagaaagaaactccttttaattttcaatttcaagtcaagatcgatctgacatcatagaaaatgaccatggatgtcgttcagctgcagaggaagctgcgcgaacaccaagccgctatgtttcaacagggttttttggatgatcagttcagccagcttcagaaactgcaagatgagagcactccagattttgtgattgaggttatcactatgttctttgatgattctgagaatctcctaaaaaacatggcacgttgtctagaacaagtgccagctgatttcaaacaaatagatgctcatgc

SEQ ID NO: 47730 - DNA, 433 bp, Glycine max
  Clone ID: LIB3107-015-Q1-K1-G5
tctgacatcatagaccatgtgtcttccaattcgttggatagatactgatttcatgttaaaaatattgttaaaatttagtatgcatttcgatcaatttatcttaggagtaaaaaaagtcagttttaactcttatgttttataaactaattctcttaaaaaatctaaacaggtacacttcactttaatttttttattttacactttttaagaacaaagtaatctgcaaaagaattaaataatccaattacggttggtgagtcaaatcggtatgcttttcattcttctgtctttccgttctgcatatacgaaagaaatatgttttcggcatattattagacgttgctaacaagtttcagcaactcacggtattgcttttgtcactgtcatatgaaagtggaatcggaaagaatgtttgaacaaaaaaatgattact

SEQ ID NO: 47731 - DNA, 409 bp, Glycine max
  unsure (1)..(409): unsure at all n locations
  Clone ID: LIB3107-015-Q1-K1-G8
ggaaacgaacctcaacaacgctgagcgcagaaaggggaaaaggggattagggtttaggaagcagcgacaacaatggatttcacagtggagaagaaggaatcagagaacaacgccgaaaatgctcacccaacaacgttagattcttcttctcaattggcatcggcacttgattccaacaacaaagaaatcgaagaacgacaagctcgtgaactcaaagccggacttcaccccctaaagcacaagtttgtcttctggtacactcgtcgaacacctggagttcgaaatcaaacatcatatgaggacaacataaagaaaattgttgaatttagtacggttgaaggattttgggtctgctactgccatctngctcgtnctgcttctttacctagtccaacagatttgcaccttt

SEQ ID NO: 47732 - DNA, 446 bp, Glycine max
  Clone ID: LIB3107-015-Q1-K1-G9
tcttgctaatcgagtagctacacttttagaatgtgaggttttttaatgcatacataatcaatctcgcaggaaaccaaaaaaactactagacttcgtaagcatttgtagcactgaaatgctctattgacataggtagccagggacaggaacaagtattaaaagacatatcttgagactacctaaatctttcaattttggatccattcttttggtatagaaaaaggatgtgtagtttaaatatgagagagaagtattcactacctgctggttattgaagacatgtcaactgtattctgtttatagttttaaacaatccattttagtaaatctttaaaaactaatgttttctctttattcaacctgagtctgtacatattttcttccatttcctgtacctctattacctgcgctctcagtttgttatcaccagtaactttgatgtgatg

SEQ ID NO: 47733 - DNA, 430 bp, Glycine max
  Clone ID: LIB3107-015-Q1-K1-H1
gtgatggctttatttagataccatttctcagtttgattagaaaataaaattttccaacgctactcctaaaacttaccatgcaaatgggtgatcaaaccacaagcaataatataaaacacaagaaaggataatacaaatataatgttattaaatagataggaagagaagttacatcaagagtagttggttgtcaagttcccgacaaaggggtttagcctctcattatcatggagactttataattgtaagaggaaaatatttaataaaggaggaaaagataagaaaggaaatggaaggaaggaatgactctcattacttgcttctccttcttctaatctttgccttctataaggaattatattctcttggaatttttgtgggtctttttcttcttctttcttcttcttttataggtgcagattaacgggct

SEQ ID NO: 47734 - DNA, 321 bp, Glycine max
  unsure (1)..(321): unsure at all n locations
  Clone ID: LIB3107-015-Q1-K1-H10
actactctacttcattctaacttcaaagacccacttaaaacttcggtattcatctacaacacatccaataacacnttattcatattctactacctctttattacatcattttcacttataacaacttctccatcaaatcactacttactaaactcaattccaaacttttctattaaataccctacaactttttactttttatttctaattcaaaacatattttatcccacatactgctcttattctaactcaatccaaactcattaaatatctaactaattaaacttatatttactaaactaatctcatcttttcttcaat

SEQ ID NO: 47735 - DNA, 438 bp, Glycine max
  Clone ID: LIB3107-015-Q1-K1-H11
ggtgtgattgtttgttgttgtaactcgttcttcttgttttgttgttctgtgtttgtgtttgttttttctctcacctgaaaatgtcttgctgcggtggtaactgtggttgcggaagctcctgcaagtgcggcaacggctgccgaggctgcaagatgtacccagacttgagctacactgagtcaaccaccaccgagaccttggtcatgggagtggcacctgttaaggctcaatttgagggtgctgaaatgggtgtgcccgctgagaacgatggctgcaaatgtggaccaaactgctcctgcaacccctgcacttgcaagtgaagtgttgggagagcaagcttcaagcagagatagcccttaattaggaataatgataaactattaatgtgtagctaaaaacttatgtattatgtctgtgatggttttcgtgcactctggt

SEQ ID NO: 47736 - DNA, 391 bp, Glycine max
  Clone ID: LIB3107-015-Q1-K1-H2
ggcgtgtgtgtgtgacaaaagcaaaaggaaagaatatcaacaaggtaaagtagattccttactagacatggcgttgaaggacacattctacatatctcatggatcaccaactttgtccatagatgaatccattcaggccaggaagttccttcagtcatggaagaaggacgtgtttcctcaaagaccctcttcaattcttgtcatctctggtcattgggaaaccgcagttcccacggtcaacgtcgttgactccatcaacgacaccatctacgatttctatggcttccccaaacaaatgtaccagcttaaatatcctgcacctggagctccacaattggcaaggaaggtgaaagaactactcaagaaatctggtttcagccatgttgatgaa

SEQ ID NO: 47737 - DNA, 435 bp, Glycine max
  Clone ID: LIB3107-015-Q1-K1-H3
gatagaggcgtatctagtgattccctaagattcctgaggcttttcctttggttgctctgctagggtttccaagcgttaacgagaaggagaagagattggagccttagtttcactatttttgtgtgaggggacatttctctctctacagttattattttgtaaattccaatggttggaatgtaagggattgaattccaaagttggtgtccaaatttcaggatgatccaacggttaatgagtccaggattatagttttaccaggacaaatttgggtgtatgcagaaaaaattaaagggttttggaagaggaagaagggataacaaatttatgaagaagaagaaacatagaaacgcatcgtaaatgtaaaaactaacctaatatgtctctatttatagctgggatactctgagtctattatttactcaatttttcttt

SEQ ID NO: 47738 - DNA, 456 bp, Glycine max
  Clone ID: LIB3107-015-Q1-K1-H4
acggaagacgacagaaggggagttcgaaaggtgaggaggaagtttaggatttgtggtggtagcaattaatttacgtttatgaatggttgggaactttagttcttttgatttgaggtatttttgtttgatgatgctctgtgagtgtgattggttgctcatgcgataacactttcccttctgcttcagtggattgctggaaattgttcttactgatttacatcgactgactgacttgtttctttttactgttattggaatgagaaatttgtggactatttcatgttctgatttcaaattctagtttaatttggttggttgagattgtggaagtctatttttggttgcttttgcagggaaatgaaagtgtctttgttggtgaagggtaagtgagagaaacgaaaggggtgtgtgttgggttgaataggtatagataggatcaatgagcaacaacaacgc

SEQ ID NO: 47739 - DNA, 431 bp, Glycine max
  Clone ID: LIB3107-015-Q1-K1-H5
gatcctcaaaaattaagtttagcttaccaatatcagcacatatatctcagctttcttccatagcattttctccttagctttcagcacattcagcttattccttactgtttggaataatattcgagttttgatcatccaatttgaagaaccaaaggtttgttcgtttatttatagcttatatcggtcattgttaatttgtttaagattgtaagaaattacactcagaaaaaaaaacgaagtgcatttccggatccaatttcaactttatgactttatatacaaatattagaaagttaaagaaaacaatgaatatatatcatagtttaagccaccatttgtaagctccttaacacttcttttactgaattcattggccaatatatagaataagtacttgtgcatacttcattatacaagtagcttttcttatc

SEQ ID NO: 47740 - DNA, 293 bp, Glycine max
  Clone ID: LIB3107-015-Q1-K1-H7
gatgaatgatgatagagatcgaaccatagattgctgttgaatagcttacaatggatcgacaatatgatgtaccggaaaacacccagtcttgagctaagagtgaataaacagcaaagcgttactgttcaaaatgaactgaattgaacgcttgactccagacggagatgccttctgctgatatggacgccggaagcactgtcatgagactgctgaaccacacacaaatatgcatgcaacactattcttacctgtcacacactcttctcagtgactagaagatggatggctaaatt

SEQ ID NO: 47741 - DNA, 432 bp, Glycine max
  Clone ID: LIB3107-015-Q1-K1-H9
agaagttaaaagctactctacttcagtttaacttcaaatgcatgtgtgacccttcgttattcatctacactgattccaataacactggtttatatgctactgtatgttgatgacatcattgtcactggaaacaacttctacatcaaatcactagttactaaactcaattctgagttttctcttaaggacctaggaagtcttgactatttcttgggaatcgaagtcagatctcagtccaatggtgctcttattctaactcagtccaagtacattagggatctgctgagtaaaacaaagatggacgaagctaatctgatctcttctacaatggttagtggtcgcaaattgactaagtcagggtatgaatctttccctgatcccacacactacaggtctgtcgtgggagccatgcagtattcaactattactaga

SEQ ID NO: 47742 - DNA, 356 bp, Glycine max
  Clone ID: LIB3107-016-Q1-K1-A1
ggtgacaaaaaaaagaaggtttgttcaatcttttggaggcctgagtgtcatctccaatccatagcttgcaattcccggcaagcacagtgattggtgtccagaaaggcttcagcttgctcctcccttctcaacttcaacaatttcgctgtaacacttcttctctcattctcgcagtttcacatttttacaacatttctccaaattttatgttttagtttatgggatatggagattgtgttcacatgtgatttgggtctgattttgattttgcgtttgtggggttatggttcccaggagaacatgttttgtggtgcactaatgttgttcgatgaaatgccccactgtcgtgatatttt

SEQ ID NO: 47743 - DNA, 237 bp, Glycine max
  Clone ID: LIB3107-016-Q1-K1-A11
gcttcagaagacaccaagggtatgatccttgtgaattgtttatgctggggggcttataatttgaatgatgtgttgtgaattgttttgtcttgtgatgtcaatattctgataaattgctctgcagtgtattcatttattgaagcattaacattattccttaattcaagtaatctttgacatatatcagagtacaattttactctgtaatctgattatttttaatcactttacttttac

SEQ ID NO: 47744 - DNA, 424 bp, Glycine max
  Clone ID: LIB3107-016-Q1-K1-A2
gactcgctgtacttgtgttgtgttgtgttgtgtggggtaacaatggctcaggggaaagcattccctgttactgctccttcccttcatacaacaggtgttgccctacgtggaaaattgagtaaggttgtgctggcttacagaggtggcttagacacatcagtcattgttccatggctcagagagaattatggatgtgaagtcgattgcttcactgctgatgttggccaaggtatacaagaattggaaggtttagaagcgaaagctaaagccagtggggctagtcaattagtggtaaaagacttgaaggaggaatttgttagtgactatgtatttccttgcctacgtgctggtgcaggttatgagaggaagtatttgcttgggacctcaatggcccgccctgtaattgcaaaggccatggttgatg

SEQ ID NO: 47745 - DNA, 189 bp, Glycine max
  Clone ID: LIB3107-016-Q1-K1-A4
ttctactctttgaaagaatatgatttaggacattctggagattatagattaacagctgatattgatcgagaaagattccctgggcctcaaggttatgagccacatgatcacatgcgggagccatatgcttgggagccgcataagaagccctcatcccatttaagcaagacgactcatcgcagatctgac

SEQ ID NO: 47746 - DNA, 273 bp, Glycine max
  unsure (1)..(273): unsure at all n locations
  Clone ID: LIB3107-016-Q1-K1-A6
aggagaaaacgaagacgaaagagaacagggaagcagcagaagncnaggaagcaaggccaagccanggcgcaggcaaccaaaggaacccacnccgaaagaaaaccggccacggngagcgnncnncggaggaaaaaagcgcaagnanaaggcacgcagaggaagcacacaacaaccgagcccngaaaaccaaacccgaagagngcgnngaaccaacaaaggacnacaanaaaggcgaacaanngagaacagacncgaaaacagggaaccaacaag

SEQ ID NO: 47747 - DNA, 296 bp, Glycine max
  unsure (1)..(296): unsure at all n locations
  Clone ID: LIB3107-016-Q1-K1-A8
agaaggggataggagcnacgcactagcacaagnncgaccaggcgaacccgggcgcggaggaagacncnccctcaaacaccagggaaaaccagcccagaagcccgcgacgacaaaggncacccagcagagagggccaaaaccggnggaaggaccgcngcggccaagaaaanaggagnggaagcangngagaggacaacgacaaagggcgnngccgngaacnnggngacaaaaangacgggnacgaagcannngggcagngccaaaacngccaacacggncaccaacggcaggggaac

SEQ ID NO: 47748 - DNA, 186 bp, Glycine max
  Clone ID: LIB3107-016-Q1-K1-A9
accaactttttaccaaatctacaagaaataatctacgggtgggtttcaatcactaccttaggttgttgcactattcacttcaatgctctggatttattactcactcttcaaaaaggatgctagcctccttttcattactattaacttctttgaatgtgtgatataaactatataccttacaatctt

SEQ ID NO: 47749 - DNA, 389 bp, Glycine max
  Clone ID: LIB3107-016-Q1-K1-B1
atatgtaaaatgtaacatgaaaaaattaaaataagtacatcaatcaatttaaagagacctaaaattcaatgggggcactgaaaggaagaaattcccaagtgtacccaatatgttatatctttactatggcagccatataggagttcacttgcatcccagatcaaaactaatacctattcatgctctcaagagaccgaacctattaaactcataactgggttaaatagcatgcctatttcctgttgtttgacttctattcagtttgcaatttcccattaagtgctggttgctacaatcttatatctttgcaaggctccttgtgactttggttttcagttgaagtaattcttttgtgcaatatgttgattaaggaaagggagatgatcaag

SEQ ID NO: 47750 - DNA, 309 bp, Glycine max
  Clone ID: LIB3107-016-Q1-K1-B10
agatttaagaccgttaaacaattagaatgtattgggatggttaacaaatatttctagtatcaaaattctaaagatggaaagaataatgtgaggttcatcggaaaccaaacttttacacgacctgtttttgtacacattcagcgctatactcaattgcttaggactatttcaccaaactgatacactctgtatccttattcataatcatggctcaaacgttatctagcatactaaatagattgcatatcatctttgtcgccccctcattcagactaacccttacaatgatttaataacctttgacattat

SEQ ID NO: 47751 - DNA, 422 bp, Glycine max
  Clone ID: LIB3107-016-Q1-K1-B12
gaacctatatttgcccaatggatacaatctggtcatggtaaaacttcctatgggttcgatatacttttatcttcaacgaacagtccggcgttcaatgcaggacgaagcatatggttgcctggttggttaaacgctgttaatgagaatagtaattctctattcttaacaatagggcctggagacttcttggttcatcatgctattgctcttggtttacatacaactacattgatcttagtaaagggtgctttggatgcgcgtggttctaagttaatgccagataaaaaagattttggttatagttttccttgcgatggcccgggacgaagcggtacttgcgatatttcggcttgggacgcattttatttggcagttttctggatgttaaataccattgggtgggttactttttattggcattg

SEQ ID NO: 47752 - DNA, 447 bp, Glycine max
  Clone ID: LIB3107-016-Q1-K1-B2
gcttgctcattggtgacatcaggggtgatgacaacagggtccgctggcttccagtttgctggggtagcaaccttgaactttgaggccttctgcaatgactctatcaccctcggcacttcatccatgttccttccagtagtggcagggtacagaaaactcatcttgatctacaacaattaaccctcatattaaattaattaacatgttaattagcccaaaaaaaaaactacatattcattaatttaactagtcaaagaacaagtttcaccttcaaatctgggccaacaatatgaagagcccttgagggtaggttgccagtggagtctttctcatcagggtcaaccatgttgagttgcttgatgatttctctcttcggatcagcaattattggataattcactttcgcacctggctgcatacaaagggaaagatcaaaatctattcaac

SEQ ID NO: 47753 - DNA, 407 bp, Glycine max
  unsure (1)..(407): unsure at all n locations
  Clone ID: LIB3107-016-Q1-K1-B3
cccggtcgaccgagcgtccgacggatcgacaagagacctagcgcatttcagacatcacgggtgatgacaacatgttcggttctcttacatcttaatggggtagcaaccttnaacatggaagcctacatgcaatgactatgtcaaactccgtacattattcatcaacgttgcaggacaggtacatcacagaacacgcatctcgggctacaacagttaaccatgatactacagtcatcaaccagtgaaccaaacaccctattttgctacatactcataagctgaactggagaatgatcagattccaccatgcaaagttaccctacaatatgaagaggcctcgacaacaggctgccacggctgtgttgctgatccaggtcaaacatgccaagttgctataagctttctca

SEQ ID NO: 47754 - DNA, 393 bp, Glycine max
  Clone ID: LIB3107-016-Q1-K1-B4
ggttgtagagtgtgattgtttgttgatgtaactcgttcttcttcttttgttggtctgtgtttgtgtttgttttttctctcacctgaaaatgtcttgctgcggtggtaactgtggttgcggaagctcctgcaagtgcggcaacggctgcggaggctgcaagatgtacccagacttgagctacactgagtcaaccaccaccgagaccttggtcatgggagtggcacctgttaaggctcaatttgagggtgctgaaatgggtgtgcccgctgagaacgatggctgcaaatgtggaccaaactgctcctgcaacccctgcacttgcaagtgaggtgttgggagagcaagcttcaagcagagatagcccttaattaggaataatgataaactattaat

SEQ ID NO: 47755 - DNA, 436 bp, Glycine max
  Clone ID: LIB3107-016-Q1-K1-B8
ggggactcgaagtgtaagcactaagtggttgaggggatgggaacccttgggagagcgatctacagcgttggtaactggattcgagggactggacaggccattgatcgtctcggttccctcctccagggcggttactacgtccaagagcagctgtctaggcatcgaactctgatggacatatttgataaggctcctgttgttgatgaggatgtatttgttgcgcctagtgcctccgtcattggagacgttcaacttggaagaggatcatccatttggtatggagttgtcttgaggggtgatgttaacagcatcagagttggaactggaactaacatacaggacaactctctggtgcatgttgcaaagtcaaatttaagtgggaaggtgttgcctacaattattgggaataatgttactgtcggccacagtgctgtca

SEQ ID NO: 47756 - DNA, 403 bp, Glycine max
  Clone ID: LIB3107-016-Q1-K1-C1
gctgttactaatatgagatttgatgaggagcccgggtatgccaagcttatatcactttttgaaagcttgattgaaccatgcactccgttgagacctattagaatagatggagctttaaaggttggccaaaagcgaggaaggatgcttataaatctggaagaagatgagcaacctaagaagaaagtgcgattggggagtcctgctactcagtggatatcagtgtataatgctcgccgtcccatgaagcagagatatcactataatgttgcagacactaggctacggcagcatgtagacaagggtattgaggatgggttgtatataagctgtgtggcctctgcagcaaatctgtgggctctaatcatggatgcaggaacaggtttttcttcacaagtttatgagt

SEQ ID NO: 47757 - DNA, 405 bp, Glycine max
  Clone ID: LIB3107-016-Q1-K1-C10
ggagttgattaaggcgaggggtgtgatgagattagttttgagaagaaaccagcaatcggcgattaggagtgagagagatatggagggaattgaaggaaatagcagcagatacagtctgaaaccctcgcgaatttgcaacgaagatgttctgatctgcgtcgacgtcgatcctcagtgcctcgtcgaaatgaaaggtgccaccggtcccaatggcagacccctcacccgtttggactccatcaaacaagccatcgttctcttcgtcaatgccaaactcaccatcaaccccgaacaccgttttgccttcgccactctcttcaacaccctcgtctcttgggtcaagaaagagtttagcagtgaaattgagtcaacacttgcagcaatgcgtgttctttcagcttcttc

SEQ ID NO: 47758 - DNA, 336 bp, Glycine max
  Clone ID: LIB3107-016-Q1-K1-C12
tcttgttaaccatagttacatcgatgtagggtatataacaatgagtggtattgcttctatcatctattccgtaacattgctcaatatataactgattatagagagagataaaaaaaagcatgtatgctttttattgatttattgttacgtcaaatcacttgaggaagtcaatgtgtctcatcaagcatgtacttactgatagagcaattgaagaaccatatcccattaggtctgctgatatgaaaagaatgataaatgttctttgatgacttataattgacctgctcttgtgatgacattactgcatatgttgttagaatatgacatctacatttt

SEQ ID NO: 47759 - DNA, 423 bp, Glycine max
  Clone ID: LIB3107-016-Q1-K1-C2
gaaagaggtgcatacaactacaaaggttgctgtaggagataagatattgaagtagtgctaagtgcctaacacctgcagtgaacaatggcctctgcatcagcatctcttctcaagtcttcacttgttcttgacaagtctgagtgggtgaagggacaagcacttcgacaaccttctgctgcatcagttgtgagatgcaaccccaccaccccatcaggcctcaccatcagagctggttcctatgctgatgagctcgttaagaccgcgaaaacagtggcttcaccagggaggggtattttggccatggatgagtccaatgctacctgtgggaagcgtttggcttcaattgggctagagaacactgaagctaaccgccaggcataccgtacccttcttgtgacagttccaggacttggtcagtacatc

SEQ ID NO: 47760 - DNA, 434 bp, Glycine max
  Clone ID: LIB3107-016-Q1-K1-C3
tatcactggttttatgctgttttatcatcatttggggttgggtaaaaaataaaaaacatcagggtacaataaaaaagttctacagcagtattttaattatttaatttaatgtgatatagtaatgggctgatactaacccaatagtttcactgggccgggttgggttgcaatgcaccaattgtttaccttctccaaactaaaaccctcattctaccctatgtaccactttcttttgtgtgagtcggggtctgcaacaaaaccttcgctcgcgtttttcagggtgagtctctccgtcgcatgcattgcaatagcttgttaatttctcaggattgggcttcggatcccaactttatgtggctccatgtatttaatttatcttgtgttttatttatgattcattccaaattcgcaatacctaatcatggcgtatttaa

SEQ ID NO: 47761 - DNA, 440 bp, Glycine max
  Clone ID: LIB3107-016-Q1-K1-C4
gtggtttaccatgtatctactagcatcaaccaggcgatggttatctcggtgacaatgggtgcaccaaaaacaacctttgggttttgatggccttatgcgagagtgtcaacacatattgctctgggaagccagagcaaatgcatcacctatggtagatttaggaatgtcagatgtgggctttgacgaaatctaaagtaatgcaacaaatgctgattgcattgctggtgccataggtgacccaagaatttggtctcatgtggtaaaatgttcccgaggcagattataaagggacagagtcataaaggatgtgccatggttcttgagttccttcttagccttggtggcgatagaggcagcatggggtagaagctcattgaaatcatggagagagctgcatgaacttgcccaaggtaggcagtcatgggcatgccaaattgcta

SEQ ID NO: 47762 - DNA, 417 bp, Glycine max
  unsure (1)..(417): unsure at all n locations
  Clone ID: LIB3107-016-Q1-K1-D1
gatgtaaaaggtgagggtgacccgtgattcgtgaacacgaacaccatcnccatgggcttcaatattctgagaaccacttccatctccactcctatctcttcctccaaatccaaacccattttctcaactcttcttcgttcttctccttccaccattttccccccaaagtccgttactcccaccactcttttcgtttctgccacccccttcttcactctccatcccaagcttggttttcgtggtgggattgtggccatggccgcacctggctctctccgcaaatccgaggaagagtggcgcgcaattctctcccctgaacagtttcggatcctcaggcaaaagggcaccgagttccctggaacaggagagtatgacaagttctatgaaaagggagtttacaactgtgctggttgtggg

SEQ ID NO: 47763 - DNA, 253 bp, Glycine max
  Clone ID: LIB3107-016-Q1-K1-D12
ctattcttctttattactcactcacaagcagtacataaaaaaaattcttagctcttaatcttcttaacactaccattcactactctaacaactccacaatacttctctattacataacctactcaccataactctatttctcacactatctctaacttcactccaccaaccatctcttcttcaaacacacactcacacaactctctacacattccattatcccccatctaccatactctttttaacctacacc

SEQ ID NO: 47764 - DNA, 441 bp, Glycine max
  Clone ID: LIB3107-016-Q1-K1-D2
ggtagtgcccttattttctttgtcctaatctttaggatcctcagatgtcaaacaaaaaaaaaccaacaacctcttcctttgtgtttgtgagctcaagttgaagtttttagttcgaagacttttactctcttcactgttgttgtgttgtgcttcttctgggaaggttctggggttcaacggattcccccccccccccccaagacaagaccaacaagtttctaaatttagatagtgtcgagagatatcattgggattggataagtttctagaaatggaaagttccaagaacaatagagtggagaagagagggtacgagctagttgaggagggtgatgatgcacaacaccatcttacacaatcaaagaaaccaaaactacccggtttaaccagtgtgattgtggaagctttaaaggtggatagtatgcaaagactctgctcatc

SEQ ID NO: 47765 - DNA, 443 bp, Glycine max
  Clone ID: LIB3107-016-Q1-K1-D3
ggatctgcaactgcaacagcaagcacaaacatcaagcatagtcattgttattgtaacgtaaaatcacatggagaaggaagctttgaaggaccaaattgaaactccaaagcactgaacgaactcaattgaaaccctagcacagagtcatacatagatagtagcgtggatagcagtgtgtgatgcggtgatcgcgatcacgatgaaaaatgcaaacggcttgatttcgacgacgtcgtctaatacggcacagtcacaatccactggcctcaagacgtatttcaagactcacgaaggccggtacaagctttattacgataagacttacccttccactcttcttcactacgctcatggcaaaaccgtttctcaggtcgctctcttggtctttttttcccctctttcttattctgcctttgcaatactcttttgtattgctattatgt

SEQ ID NO: 47766 - DNA, 441 bp, Glycine max
  unsure (1)..(441): unsure at all n locations
  Clone ID: LIB3107-016-Q1-K1-D4
gacgcccgagtgggagtaggcgtttgccatgcttgtgcgtgagggatgggcttaacgttaatctcatgtcatgctttttaacccactcacacactctctcttctttcttcatgcccgcctccctttcttcttcctttgatccgttcatacggtggttagatgatggaatcctgtgattgtatagacacacagtatcctccagatgaacttctcgtaaagtatcagtatatctcggatgtgctaattgctcttgcctatttttctattcccgtggagctcatctattttgttcagaagtctgctttctttccatatagatgggtgcttatgcagtttggtgcttttattgatctctgtggagcaactcatttcataaacctgtggacattctccccacactctaaggctgntgctgntgtcatgacgattgccaaagtgtcg

SEQ ID NO: 47767 - DNA, 252 bp, Glycine max
  unsure (1)..(252): unsure at all n locations
  Clone ID: LIB3107-016-Q1-K1-D5
gagcgccgaaaaaggcaggcaaaaggggggggcagagancacaacggggcgcaccagcacaagacnagaggaccacaccaagcgagcaacagcaggccaagggaaggagcgaagagacncggagccgcaagacaacgagaaacgaacgcgacagcngccacaggagacgaaccaccgaggggacagaagagcaggagaggagccacaggaanaacaagcggaacaagcgccaaaccggcagcaggagaaacc

SEQ ID NO: 47768 - DNA, 53 bp, Glycine max
  Clone ID: LIB3107-016-Q1-K1-D9
gagacctcaggtcaggcggggctacccgctgagtgtaagcatatcaataagcg

SEQ ID NO: 47769 - DNA, 461 bp, Glycine max
  unsure (1)..(461): unsure at all n locations
  Clone ID: LIB3107-016-Q1-K1-E1
ggcggcattnggagcatgtggcgaagctccatttactagccacgagaccctatgtggttgggttcgtgttgccactgcggctgaagctcttgatgggcttcaggatctttctatacagaccgtctcaccagtcacgactattccttttccaattgtggcaaattgattacatcaacgaagcccgagtcttcaacgaggccataaaggaacgtgctctcaggctaaattggagaacactcactccttctcgttaattcaacagcgataattcgcaagtcactcaacatagcctgcatgacctttctatgctatcgctctagtcaccactcactttggggttctttgcggtgaaagaaacatagaagaaagttcaatcaacgcggaacgtatgctctacttccatcattccaccttcggacagacgtttccggctactactttatcatacctgttgtgtcttg

SEQ ID NO: 47770 - DNA, 267 bp, Glycine max
  Clone ID: LIB3107-016-Q1-K1-E11
ttttaaaaacaattttacacttaatcttttccaattctaaattcttcaataactttcctaactcacactatttctccatcaaaatcctttaccttaaacatttccttcccctcaactttatttaacatctcattaaataaatatcaaccattaattttattaatcaccccatcttttttacaatactttattatattatttttccatccatacaaatatttacactttttctttatttttttatttattacaactattttacaaaat

SEQ ID NO: 47771 - DNA, 387 bp, Glycine max
  Clone ID: LIB3107-016-Q1-K1-E2
gggggtagccggcgagacacaggggattccttaattctccatggatatggtgctctgttctgtacccatcatctctctttttctttttcctttttggtttattagtgtgccttggatttgatttttgataagcacaggggaagaaagaaggtgaagcccccgtgttgtggttcgaaacctctgactctgtctgttgccaacaccagtttgaacccgatggtcgactctccgtagtgattgttgatgattccaggcccctataccaaaggatggctggatctttcatgaataaatttttcccctcaggatatccgtacagtgtgaatgaaagctatcttagatacacgcagtttcgagctttgcaacatgttaccagggcagcactat

SEQ ID NO: 47772 - DNA, 345 bp, Glycine max
  Clone ID: LIB3107-016-Q1-K1-E5
ccggcgttgacagcgcggcacctgacggaagagcagtgggaggactactgatatatctcggagctggcgatccaaggggactatgaaacgcgcctgatggacacggaggagatgaaagagcggagcgtgtagcagaccacgcaggggacggagtgtatggaacagctggcagcgatggaagggatgagtgaatggctgaggaaggctgaaggagcggcggaatacggctcggagatatgacggagacttgtctatttgtcacgtgcggcacagacgccaggggcattgaccaggcgtaagacatgaacgccattcaccggctggaggaaaagccttcagtgaggg

SEQ ID NO: 47773 - DNA, 196 bp, Glycine max
  unsure (1)..(196): unsure at all n locations
  Clone ID: LIB3107-016-Q1-K1-E6
ggagcacgcaaccgaaccaggcaagaagggaaaccacagcgcaggaaaaggcacaagcgagggaaccgaagcagaaagaggagggacagcnccncgagcgcaccaaggcnncgnnacaccggaacgacagcgagaacagagccaaacnccnnncgcagcnaaaggggggacagacaggnngcagaagccagccacc

SEQ ID NO: 47774 - DNA, 326 bp, Glycine max
  Clone ID: LIB3107-016-Q1-K1-F10
gattccaccttaaacccatttccataatcacttgggggtactttcttctccatgcatcccttgactaattaattatccctcacaactaccaatggccgaagagaaacaccacaagcaccgcctcttccaccaccacaaggactaggataataagccagtagaaaccgatactggttacgacaacacatcatattccaagccttctgatgactatgactctggtttcaacaagccatcgtatgagtcttctggcggtggttatgaaagtggttacaacaaaacatcttattctagtgattagccagcttctggtggtggctattaaa

SEQ ID NO: 47775 - DNA, 460 bp, Glycine max
  Clone ID: LIB3107-016-Q1-K1-F12
cgacagaaggggacaccaacacatccattcattgtcttaatgttagcaatgtcttcctcttgctccatccatttcttcctccggctctcaatagcccttttctcagtttgttgcttagcagcatctcaagctcccaccaccaaatcacacccctatatccttcccattaagaaagaccccgcaacaaatttgtactacacttcagttggcattggaactcctaggcacaactttgatttagtcattgatctttctggtgaaaacttatggtacgattgtgacactcattacaactcatcatcctacagacctatagcttgtggctcaaagcaatgccccgaaattggatgtgttggttgcaatggccccttcaaaccaggttgcacaaacaatacatgccctgctaatgtaatcaaccaattagccaaattcatttacagtggtggcttatgtgaagatt

SEQ ID NO: 47776 - DNA, 385 bp, Glycine max
  Clone ID: LIB3107-016-Q1-K1-F2
atatatcgggctcaatcctgtggctccctccttgagaaggaaggggggatccatgcgacttggttatgaaacccaaccctaaacaacttggtctcaaacaagttgattttgattaagtgaatagggtctgaacatctaaatttgttttaaactttttaaaactgaggttttaaataaacacacaatacaaattatgaaaaatcaccttgaagctagtcacttagctggcgtatcatgaaagtgttatggcgatattgcttaacaattaagtactcaatctcaataagtcaacaatgacattcgaagaaattgaaatacgttatggaagggaagtcccatagtcaatgtgtggagggcaatcgaaagaaatggaaaccttaaactg

SEQ ID NO: 47777 - DNA, 429 bp, Glycine max
  Clone ID: LIB3107-016-Q1-K1-F3
gacggcatcttgctagtatacgtaggaaaacttggacagggtgctaattaatttctttattattttccaaattccaatcaaaatttccagtacgacagtttggaaagcgaacattgaaattcagatagggttcattgattgatacgaataaaaattgaacacgacttatcgtctgaagcatctggcaggttgattagttagtcccttttgtgacaatgatttggtgattttgaatcttcgggtgcagcaagataatcgtgaaaattgggtctccaaaatttgtttgaggggattttgtttcttgagctaaaccaaaacatgaatgaaaatactgtgaggtctgctggtgcagatctgacagctgctatagtaccattgttgaagctgctatgcctaacagtcattggactacttcttgcaaacccaaca

SEQ ID NO: 47778 - DNA, 289 bp, Glycine max
  Clone ID: LIB3107-016-Q1-K1-F4
gacaattgagactagagaacagggaggtgcttgtaccctagtcgtgagaagaaaggaaagggataagaggaaaatggtgtgcataacgaaagcgacggttaaagaccttatgtcgatgcacgcatgcaacctgttctgccttcctgagaactaccagacgaagtactacctctatcacatcctgtcctggccccaactactctacttctgcgaagactacaacgggcgcatcgatcgctacgtgctcgacgagatggaggaagaaaccaccgactgccacggccacatg

SEQ ID NO: 47779 - DNA, 201 bp, Glycine max
  unsure (1)..(201): unsure at all n locations
  Clone ID: LIB3107-016-Q1-K1-F6
nnccacctcaagngaaggggcaagaaaacangccccagaggagaaggagcccagcgcaaaagaaagacacaagcccacgggaaaaacnccaacccgngagaaggggcnagagaaccacanccggagaacacaggnaaagcacggggaaaacaaaaaacacacagggcaagncacgccaagggaggagggacgcgggaccca

SEQ ID NO: 47780 - DNA, 410 bp, Glycine max
  Clone ID: LIB3107-016-Q1-K1-F9
gatttagtgaaggtgaagatccctacttttaaaaggatttatgatccagaagtgtgtcttgagtggaaaatgaaggtcgagtatgtctttgcttgctacaactacaatgaagagaaaaagatcaaattggcctccctggagtttgagggatatgccttagtgtggtggaatcaagtgaggagtgatgttgagagaatgaaaaggttgttaattgatacttggcaatacatgaaaagagttttgagagagagatttgtgttgtcttattatgggagagaccttcacaacaagcttcaaagactaattcgaggaaataggagtgtggttgagtattacaaagagatggagatttccttgattaaggctcaaattgataagtctcaagaggccaccatggcaaagtttttgca

SEQ ID NO: 47781 - DNA, 419 bp, Glycine max
  unsure (1)..(419): unsure at all n locations
  Clone ID: LIB3107-016-Q1-K1-G1
ggggngactggataaaataaaactaagcccataaaataggatagagtgacagacagattcgggatttaccatttaccacaccaaaaccaatcggatcgtttcctctgcggagtcagaaatccatggatccctacaagaatcggccatcaagcgccttcaattctcccttctggactactaattccggtgctcccatctggaacaacaactcatcgctgactgttggatctagaggtccaattctgctggaagattaccatctggtggagaagcttgcaaactttgacagggaacggatccccgaacgtgttgtccatgctcgtggagctagcgcaaagggtttctttgaagtcacgcatgacatttctcaccttacatgtgccgattttctccgagcccctggagttcagacccctctc

SEQ ID NO: 47782 - DNA, 297 bp, Glycine max
  Clone ID: LIB3107-016-Q1-K1-G10
ttgtcatatacagcctcttatcacattgaaaatggatgtggacattcatctagatgtgcaaattcagtaaccagtgttaagaaaatgtcctggcatacaggagttaaatggaacttaacccttgtacaagaaacgtgatttctgatataaagttagaaagccaattttaaaacatatctagcatcaagcaggtaataactcatcagaaacagcatctaagacggagttaatgtttacattttcaggatataaatgaacataaaaaaatgaccccttttattagtacttgacaatgga

SEQ ID NO: 47783 - DNA, 200 bp, Glycine max
  Clone ID: LIB3107-016-Q1-K1-G11
atatcaatgatgatcatgtgtggctatttttaactagaggattaactgctatcttaatttactttaaaatggactcaaataatcaaattttaattgtcattcatcctactgatcatttgtttaatcatcaccaatgtctatcacttataacaaatcttatttcatttgattttaaacatttcctattttatcattaccat

SEQ ID NO: 47784 - DNA, 232 bp, Glycine max
  unsure (1)..(232): unsure at all n locations
  Clone ID: LIB3107-016-Q1-K1-G2
ggcgcanagaagggncgaaagggcngaaagagaacgcgggganaggcggaacgaaaccgggggggaccggaaacaaaagaacaangaaccggncaaagcaaaggcaananaacaagaggaccacggaaacaaaaaaaaagaagggaagagaaggcgaaangagagacangnngngncaccacagagaaaacgcgagacgggggcaaagaaagaaagcgagacancgcagcaa

SEQ ID NO: 47785 - DNA, 369 bp, Glycine max
  unsure (1)..(369): unsure at all n locations
  Clone ID: LIB3107-016-Q1-K1-G7
gagaagagaacgcggaagaagaagaagaaggaacggacgcaggaanaaaccggaccgagcancgaaacgggagcaagagcgaagaagaaaagcgaagagngcggggagaagcagcagccacagcagagagaaggagaaggagaagcagagagagagccgcacgncgcngaaacccnggcacgcgcaccaaaacgacgccgcagcngagcggaagcnccaccaggaggagcccncgcacgacaaggccagagacnacgacaaccgcacgccgcnccacgnggcgncgcaccacggcaggaacgacgncgccaccaggcgcaaacgaggcggcgccgacgncaacgcgcaagaacgcgggaaaaacacccc

SEQ ID NO: 47786 - DNA, 424 bp, Glycine max
  Clone ID: LIB3107-016-Q1-K1-G8
ggcccaaaaatctctcaagaaatcatagcgaaagggcaactagcacttcaaattcgctgtctcagtccctcgtatccaactattttgcttaggattttccttcttcatcacaacctcgtaataaattcgttaagttcctccttgtttggtcccaaacaatctgagaaccctctttcaattcctcttcctcaactccatcgttcatcgccgtccactattattagcaattggtatttagtaattaattaattactaacattagttaataataatggaccctgcagagctgaagcgcgttttccaattgttcgaccgcaacggtgacgggagaatctcattgaaggagctgagcgattcgttggagaatctaagcatcttgatcccggacaaggaccttgctcagatgatcgagagaatcgacatg

SEQ ID NO: 47787 - DNA, 392 bp, Glycine max
  unsure (1)..(392): unsure at all n locations
  Clone ID: LIB3107-016-Q1-K1-H2
cggggccaaccgncgaagacatgggncagaagaatcagggcctggtcgtcttcacttccaaatcagccaatgaagcttctgagggcattgcctatcagtggacatacgtagtataaaaccaatatggagatgatggcatgaaagctgtgtcttgtccaagccgtgcagaatcacccgcattgaacacaaagtctagatcatcggttctggtcaactactttcattctgcttcaaatcgatcttaagcctgcgcttacaattctgcttcactacttgacatgatgaagacttgtcactaaacagccggtaaccgttgggccaatttcattgctgctgattattaccaaaggagtgattgcgcaagagcaccactagccgatgattaagcaaat

SEQ ID NO: 47788 - DNA, 344 bp, Glycine max
  unsure (1)..(344): unsure at all n locations
  Clone ID: LIB3107-016-Q1-K1-H4
gaganaccgacagnggcagagagagaaagacgaggggagggggagagaagctctcgggncagccctaanggccnacgctggcaaccgcngaaacngnaggcgccagncgcgcaaagaaacagagngngccnaagaaanagcaagagcggagagggaccggaaagaagaacagnangggngaggaagaaccagcgaacgaaggcncgaagagcgacncagangagaagagcnngcaggagaacacccgggaagaaannaccgagaaaaaggacccggaaaccgaaggaggaaaagnccnggagaacaaaggaaacaaagagnngaaagaaaanannggaaaagaa

SEQ ID NO: 47789 - DNA, 190 bp, Glycine max
  Clone ID: LIB3107-016-Q1-K1-H6
gccttacggccagggcctgggagagaaaaaccatgaccgggtcagcgacgcggtcgggtcagccctagtggccttcgatggcatcctctataactggacgctccaggtgcacaaccaatcagagggtgctggcgagaaagctaggtcgtgtacaaaccgtgcataatatcacgctgggtgcacaagaacc

SEQ ID NO: 47790 - DNA, 449 bp, Glycine max
  Clone ID: LIB3107-016-Q1-K1-H8
aagaatggagtggacattgtctctggcacacgcggcatgtctcactttgccaaacccaattggcgcagtgtctacaagcgcattgcgcttaatcatccagatgcccgagttggggtattttactgtgggccatcagcccccacccatgagcttcgtcagctagcattggatttctctcacaacacatccaccaagtacgacttccataaagaaaatttctgacaagataggggaattatcggagatcaggtgaaggatgatgtggaacgagctaaggcgtccaccttgatccccattccccaccacctagatgattgcctataaataattaagtttctacatatggttggttgttatggctttgtaaaagcacgaaggctggcggctgctaaatggttgaagtagtgagttggctaccaattacaaaaagtgtgggcgtctggttggat

SEQ ID NO: 47791 - DNA, 317 bp, Glycine max
  Clone ID: LIB3107-016-Q1-K1-H9
gacgattattccacgcacatttaatacttgatattcatgcactgtttctttgttccggtgcctcgcatggcatcaactactctcttcagcttcagactctctttgaacccactgcaccatcaacagacaactaggccaaaatctctgctctcctctcctcgcaccaatccacgcctcgcttctttcattaacaatcatttggccctcacacatgtcacatacccgcttctccaatctcactctgctcctaagcgcaaattccatgtgtattctgatggggaaagctcctagtcgcttgtttctgactctacatacca

SEQ ID NO: 47792 - DNA, 360 bp, Glycine max
  Clone ID: LIB3107-017-Q1-K1-A1
agaaaaagaaaagaagtgttcggaatcaaatgatgctcttggttctcctgaaatctcaaaggaagaattgtctgcagttgctgatatggagcaaaataatcctattagctgcaggagtttagttattgaagcaaatgaaactaatctattgggggatgattctcctaacatcgaagatgaagaattctctagtgagtgtaatactttgaaaccacatgacctctctcatgatgattgcggggaagaaatttcaaatacaaaagatgagatgggtcagtctacaattgaacaatcaatgctctctcatcgaagactaagatgtaagaaagaatttcaacttgatatgcctatgaagtggtc

SEQ ID NO: 47793 - DNA, 432 bp, Glycine max
  unsure (1)..(432): unsure at all n locations
  Clone ID: LIB3107-017-Q1-K1-A11
gaatgatctgttgtgaattgttttatgctgtcagagcttataatttgaatgatctgttgtgaattgttttgtcttgtgatgtcaatattctgataagttgctctgcagtgtattcatttattgaagcattaacattattccttaattcaagtaatctttgagatatatcagagtagagttttactctgtaatctgattatgtttaatcactttacttttacagttgctggttaggttctgtcagttgtatatagctgtacaagagaatgcctaaagactaagagttagttacagagtacagctgtcacacaacagacagcctaactgacaacattaaaagtacagtggttacacatattacatagtaaaactctattctaataaaggtagataattgatggttaatgatatttntaaatgaataatagtttg

SEQ ID NO: 47794 - DNA, 382 bp, Glycine max
  Clone ID: LIB3107-017-Q1-K1-A12
gaattatctgttgtgaattgttctatgctgtacagaacttataatttgaatgagcgggttgtgaattgttttgtcttgtgatgtcaatattctgataagttgctctgcattgtattcatttattgaagcattaacactattccttaattcaagtaatctttgagatatatcagagtagatttttactctgtaatctcattatctttaatcactctacttttacatttgctggttaagttctctcacttgtatatacctgtacaacaaaatgcctaaagactaagagttagttacagagtacatctttctcacatcaaacaccctaactgacaacattattattacaattactacacatattacatatttaaactctatttta

SEQ ID NO: 47795 - DNA, 420 bp, Glycine max
  unsure (1)..(420): unsure at all n locations
  Clone ID: LIB3107-017-Q1-K1-A3
gggaagcaaagacagacactagctattcgaatttgaggtctcccaaataactaggatgatttggatagcactttttttagtttcactggcttttctgcggttatggagaagcaataagaatgcaaagaaattaccacctggtccaaaagggttgccaattttgggaagccttcacaagttgggaccaaatcctcatcgtgacctgcacaaactagcccaaaaatatggacctgtcatgcacttacgtttaggttttgtgccgaccatagttgtttcttcacccaaatctgctgaattgttcctcaagacccatgaccttgtctttgctagtagaccacgtttcgtggcggatcaatacatcttttgggggcagaggaacttangctttgctgaatatggttcttattggcgcaacatgcc

SEQ ID NO: 47796 - DNA, 376 bp, Glycine max
  Clone ID: LIB3107-017-Q1-K1-A5
ggttcctctctctctctttctctctctcctggcggtgttttccagtggcgcattgcatgaaacgagggggagagtttcattgtgaaggtataacccagcctttgtttgcaccattccctcaaaccatttacatcatcatccaccactctctcctccctcctttctgctttcttctttctatttcaacaacccaagttatagattatttatgcgtgcgtgcatcttctattttcctctcactagtgaatgctctagtggttggtattaagttttaagagactaaacacccgttttttcaacgaaatttgtgcatactttgtcaggtaagttacagcgtgaaataaaaccctatttcactccatgtaacatacacaca

SEQ ID NO: 47797 - DNA, 250 bp, Glycine max
  Clone ID: LIB3107-017-Q1-K1-A6
taaggttctggttctatgtttcataatgtgttcaagatgtacataatcattgttagtttaaattgtttgttttaccccgttttgtggtttgcattaattcttttgttcattttacatttttttttgcttattttaagttttgtttttaataataatcttaatttgctttttatttatataaattttacttatattattttttattgaaaatctttttacatttaatggtttgaacttttattatttaatt

SEQ ID NO: 47798 - DNA, 316 bp, Glycine max
  Clone ID: LIB3107-017-Q1-K1-A7
gaaacagggctgggctatcgactctttctaggggtctacgaattcacgtgtaggttgtcagtgaatgttattgagtttgcgcatgccgcgttgcagatatgggatcttgggcggtactttgcaacgggaaagcacttggcaggagcaccagctaatggggtatatcactttcacgctggatcagatcctgacataccttctaatgtcactatcatcatcagctgacactagagcctatgactgggaggccaattgccgtgaagacaagttcccttacatggctaatgcatatggggctttgacctcggttgctttt

SEQ ID NO: 47799 - DNA, 412 bp, Glycine max
  Clone ID: LIB3107-017-Q1-K1-A9
gacctcaccgagtcgcagcgatcgaagtttcacatgagccttatccagtttagggtttcggttccttaccctacctttgacgtatcgaaaccttaaatttgggattaggtctgagcaatctggttggtagaacctttggtcttagagagtcaagttttatgtctggattagacgatcaaattcctactgccttcgatccttttgctgatgcaaatgctgatgactcgggtgctgggtcaaaggagtatgtgcatattcgcgttcagcagcgaaatggtaggaaaagcctgacaaccgttcagggattgaaaaaagaattcagctataacaagatacttaaagacgttaagaaagagttctgttgcaatggaacagttgttcaggacccagaactaggacaggttattcaact

SEQ ID NO: 47800 - DNA, 412 bp, Glycine max
  Clone ID: LIB3107-017-Q1-K1-B1
ggcacaagtgagtttgttgatcgagataactagggacagtgtgatgaaaatgaaggtccttgttttcttcgttgctacaattttggtagcatggcaatgccatgcgtacgatatgttccctctccgaatgaacactggctatggtgcccgtactccggaggtgaaatgcgcaagttggaggcttgctgtggaagcacacaacatctttggctttgagaccattcctgaagagtgcgttgaagcaacaaaggaatacatccatggcgaacaatatagatcagactccaaaacagttaaccaacaagcttacttttatgctagagacctcgaagtccatcccaaggacacatttgtgttcagtatagatggcaccgtactctctaatattccatactacaaaaaacatggatat

SEQ ID NO: 47801 - DNA, 415 bp, Glycine max
  Clone ID: LIB3107-017-Q1-K1-B10
gtgtgaattattgtacatttcctatataatgtgtgtgttttaatttgacagatatgagaatagcttgccgagagtggacatgtttgtgttcacggcagacccaatcattgagccacccatgatggtgattaatacagtgttatctgtgatggcttatgactatccagcagagaagctcagtgtgtatctctcggatgatgcaggctcagacataactttttatgctcttttagaggcttctacctttgccaagcattgggtgccattctgcaagagatttaaggtggaaccgaggtcacctgctgcttattttaatacccttgtatcaacaaactcacacgaccataaccatgccaaagacttagatgccatcaaagtgcggagtaatcacatttttttaggctcatgtcacttg

SEQ ID NO: 47802 - DNA, 426 bp, Glycine max
  Clone ID: LIB3107-017-Q1-K1-B12
caatatgctacggagtgactcaactcgttctagtggtcttctaatattgatacgttgaatatatcaggcttgtatacttgcaagcgtaccctacataataataataggactactcaaaagtctacatatcaaatccaaaatatcaacagcattcctaattatttaagggaattatactcacagttgaggctgattaaaagattctttcaatacacttactgttgcaggcaccagaatctacctccagattatatgtgctacacaggctgatagttatgataagaatgatcaagggtattcacttgctagaaccaagattataccaattcacgttctaatcaactaacttgtacacttaattatcgactactagaactaactcatgcctatgaccaataccataagatgctataactctttgctcaa

SEQ ID NO: 47803 - DNA, 388 bp, Glycine max
  Clone ID: LIB3107-017-Q1-K1-B2
ataaaaaataaacatatattgagaatggagggttgtgtgaagaagttgctatgccttgttgggtttgtggtgcttgtgagtactattggtggggtggagagtgctggtgaatgtgggaaatctacaacccctgataatgaggcttataagcttgcaccatgtgcctcagcagcacaagatgagaatgctagtgtttctcagagttgctgtgctcaggtgaagaaaattgggcagaaccctagttgcctctgtgcagttcttctctctaacacagccaaaatggctggcgtcaaccctcaagttgctgtcaccattcccaagcgttgtaacctggctaatcgccctgttggttacaagtgtggaccttacactctgccttgaaagagtt

SEQ ID NO: 47804 - DNA, 401 bp, Glycine max
  Clone ID: LIB3107-017-Q1-K1-B3
agaagggcaacataagtcatcgaaaggatctcgaagacccaccagggcacgaaagccgggatctttcagaaaatggattcctattcgaagggtgcataaccgcatggataagctcacactaacccgtcaatttgggatccaattcggttccttaggaggtatcgggaaggaattttggaatgtaataatatcgattcatacagatacagaagaaagggttctctattgattcaaacgctctacctacgagatagggatagagaaagaggaaaaaaccgaagatttcacatagtacttttggtcgaaaaatcgatctgatttttttcgtacttttcgctcaatgatgaaatgggtcagattctacaggaccaaaccttgtgggagttaaagaatgatggaag

SEQ ID NO: 47805 - DNA, 114 bp, Glycine max
  Clone ID: LIB3107-017-Q1-K1-B5
ttttattaaaatgtatgatctcatatattacttttctacaatttatatatcatatcaattccatgcttactatatattccctctccgaattaacactgtctattgtgcccctac

SEQ ID NO: 47806 - DNA, 347 bp, Glycine max
  Clone ID: LIB3107-017-Q1-K1-B6
ataaaaaataaacatatattgaggagggagggttgtgtggagaagatgctatgccttgttgggtttgtggtgcttgtgagtactattggtggggtggagaatgctggtgaatgtgggaaatctacaacccctgataatgaggcttataagcttgcaccatgtgcctcagcagcacaagatgagaatgctagtgtttctcagagttgctgtgctcatgtgaagaaaattgggcagaaccctaattgcctctgtgcagttcttctctctaacacaggcaaaatggctggcgttaacccttaagttgctgtcaccattcccaagcgttgtaacctggctaatcgccctgt

SEQ ID NO: 47807 - DNA, 400 bp, Glycine max
  Clone ID: LIB3107-017-Q1-K1-B7
ggcgccactcccatttctcgctctcattcttcttcagatgccaaacctaacctaacctcccaaacaaactcaaccttatcatcatcatcgtcgtcgtttaaataaattctgatctccacgcacacgctctgagtcagatcatgctgcgtttgtgctacggccctctggattgctgcttccgacgccgccgtgccgactgactcctctggcacaccgacttgaagccccacgcctccggcgacttctccatcgccgtcgcccatgccaattactgtctcgaagatcagagccaagtcttcaccttcccctacgccacctacgtcggcgtctacgacggccacagcggccccgaagcttctcgattcgtcaacaagcgcctcttcccttatttgcacaaatt

SEQ ID NO: 47808 - DNA, 413 bp, Glycine max
  Clone ID: LIB3107-017-Q1-K1-B8
ttcctttaatttttttcattatatctattcattgagtaagtgatgatccaacagttcttactcagggaatttttggacttcgatttaaggtttttttgaatcatcgtggttatagtatgaatctgatgtttttttaattgattcatagggtcctaacaagagaattcctatcaataataaaaattcaataataataaagaagacaacagtaaaatcatattatacacaataaaaaatgaagtaaatagtagaatattcaagaggccttaaaagatcaagataaagacgaaagaaccgacttgatattttagcattataaccaaaaagaatagctttcggatctctattttttattatcgtcaaagaaaattagaatcataggattaaataaagaaatttcaaactttctatta

SEQ ID NO: 47809 - DNA, 414 bp, Glycine max
  Clone ID: LIB3107-017-Q1-K1-B9
ggctcacaaacatcacaactatgtccttgggaatggttcgatcccgagcgatttcattggcatcgaagcgattcctctgcaccaatgccgcttccgcttcccctcctcttccccctcctccttccgccgcctctcccagccgctggagcttcctcaaatacgccctcgtcggcgctctcaccggaggcactgtctttgccggttacgcctcttacgcttacagcttggacgaaatagaacagaaaacgaggtcgctccgtgaatcggccaagtacactgctggtgatggagtcactgctcttgataaatttcaaggtttgctatactcaactgcaatgacagttcctgctaaagcagtagagctttatttggatgcaagaagggtaattgaagaacatagtaagaagtatactg

SEQ ID NO: 47810 - DNA, 423 bp, Glycine max
  Clone ID: LIB3107-017-Q1-K1-C12
gtgttgctcttgttaaccatagttacatggaggggtggtatagaacaatcagggttattgcttctatcatctattccggaacattgctcaatatagaactgattagagagagagagaaaaaaaagcatgtatgctttttattgatttattgttacgtgaaatcaggtgaggaagtcaatgtgtcgcatcaagcatgtacttactgagagagcaattgaagaaccagatcccaggaggtctgctgagatgaaaagaatgataaatgttctttgatgacttaaaattgacctgttcttgtgatgacattactgggtatgttgttagaataggacatctacatttgcggatgtaaggttcgctaacttgaagcattgtccaaaaatattgtttatgaaggagtttacccgtgaatgatttttgctt

SEQ ID NO: 47811 - DNA, 417 bp, Glycine max
  Clone ID: LIB3107-017-Q1-K1-C2
gagggcggtgttactccttctctcgttgattcggatctagagtcttttttcactcttcagttctcgttgttgttcttcgctttcctgaaactagggttttcaatttcgattcattcgttaataattaaagatgtttgggagggcaccgaagaagagcgataatacgaggtactacgaaatcctcggcgtctcgaagaacgcttcgcaggatgatctgaagaaggcttacaagaaagccgccatcaagaatcaccctgacaagggcggtgatcccgagaagtttaaagagctggcacaagcatatgaagttctgagtgaccctgagaagcgtgagatatatgatcagtatggtgaagatgcgcttaaagaaagaatgggtggtggcggtggccatgatccgtttgatatcttttcatc

SEQ ID NO: 47812 - DNA, 404 bp, Glycine max
  Clone ID: LIB3107-017-Q1-K1-C3
gggtggagagtggtgagtagtgaccaaagcaaacgcacgcactctattattgaagggaagatgaaagatgaagatggcacaccccaaagtgcaggtaagggacagtacaagttgtgggtgttgggtgctatcattcttcttgctctttggtccatgttcactgcttctctcactctcaaatggtcagctgggaacctcaaccgtgacttcgattctgccactctcaacgatttcgatgtcctggaagtggaggagagggagaaagtggtgaggcgcatgtgggatgtgtatactcaaagcaagagtggcaggggaagtggcttacctcgtttttggagtgatgcttttcatgcggcttacgaccacttggtcagtgatgttcagagcgttcgaaatgctgctgt

SEQ ID NO: 47813 - DNA, 392 bp, Glycine max
  Clone ID: LIB3107-017-Q1-K1-C4
gaatgtgagataaccatcaaacgctctttccagaacttgttccataactgacaacctgatcttcatgaatttgagaagtattgccacacccactgtttcctgtaaagcgggaagcaacaacaatttccttttctggattttggtttgcttcttgctaccaagttttctgggagctcctgaagtatatgctcatttccaattgataaagctcatttggggtgtgatcttttggcaaggcacacccatttgtggtgtcattttctgaagtttccttgtttttatcaaaggaccatggtttccgcccagttctctatcttgaatgaaaatggttcacagaagcctttcctgaatcagttgcttctaccaaatgggccgcctgatcgtttgccttc

SEQ ID NO: 47814 - DNA, 369 bp, Glycine max
  Clone ID: LIB3107-017-Q1-K1-C5
ctcacacaagcctacagctgggagaacacgacatacagcgaatgctagataaccatcgggcgctgtttacagaactgggtacataactgacagcctgatcttcatgaatttgagacgtattgccacacccacatgatgactgtcatgcgggaagcaacaactcttaccttatctggattttggcctgcttgttcctaccaaactcactggcagctcctaaactatatgctcattttcaatagagctatctcatttgacttgatatcatctgtcgaggcacactcatttgtggtgagcttttctgaagtttactagtgaatatcaaaggaccacagttgacgtacagttccctatccctaatgaaattgg

SEQ ID NO: 47815 - DNA, 330 bp, Glycine max
  Clone ID: LIB3107-017-Q1-K1-C6
gattccaatcctgtctttctttccctcttggtctgtgctttcaagtagttccataaggcactttgtgttgtgtctacaatttttaagtcacttgtcaaccttatcaaattaaccccctacacatttatttagctagctagcctatgtattaattaggcacataatgtgaagcccagaatccaatctgctacccggttttatgattcacccaacctatgagtaacttattgttgaataccttagtaaaaaggtaccaattcatacccttgaccgtttacattattgctgaggttgatatctacaaattggatccatggagacttactatct

SEQ ID NO: 47816 - DNA, 416 bp, Glycine max
  Clone ID: LIB3107-017-Q1-K1-C7
tcaaaaaatggagagtaatccgtatcatctttcggggggacgatatactgatgtatactatggctgaagttcgaacaacacgcaattcattttgggccgttttcactttgttagggtcattggctttaatgttcgttgcaatttccacctatctagctatggatctcgctctttatttctgagaaaattaccgattacctcttctattactgactctatttatactacatttattccacaaggggccacgatggctttatatggaatcgccgctctctttagtagtttacatttagcgtcaattattttttgagatatataccgtggttttgatatcttcaattaaaaacggaaaaaggcactttttgatcgatggggattacctgcaaaaaactgttggattattctcgaaatac

SEQ ID NO: 47817 - DNA, 415 bp, Glycine max
  Clone ID: LIB3107-017-Q1-K1-C8
ataagcagcatcaactaaacctaaaatcttctgcgccacccagcattgtagcatagtgattctgctcactacaatgccatcatcactatcctcattcctccgtatggctcctattctctcccttcttgtactctcatgtgtgattagttctagtagtgctcagggaccaccttcacctggctactatcctagttctaaaattagtcctgttagtttttatcaagggtttagaaacctctggggatctcagcatcagagactagaccagggctcattgacaatctggcttgactctaactcatgaagtggattcaagtcacttcactcttatcgatctggttactttggtgctgccattaagcttcaacctggttacactgcgggagtcattacatcattatatctttcaaacaac

SEQ ID NO: 47818 - DNA, 325 bp, Glycine max
  Clone ID: LIB3107-017-Q1-K1-C9
ctttcactacccttattctgatatatcatcatttgctgttttttaaaacatgggaaacatcaccacacaattaataagttctacagcacaattttaattattcaatttaatgtcatatactaatgaacttattctaacccaatattttcactacccactattacattacaatgcaccaattgtttaccttctacaaactaaaaccctcattttaccctatataccactatctttattctcattccaactcttcaacaaaaccttctctcacattactcaaacttagtctcttcatctcattcatcgctatagcttgctaattttt

SEQ ID NO: 47819 - DNA, 402 bp, Glycine max
  Clone ID: LIB3107-017-Q1-K1-D1
ggcacaagtgagtttgttgatcgagataacttggaacagtgtgatgaaaatgaaggtgcttggtttcttcgttgctacaattttggtagcatggcaatgccatgcgtacgatatggtccctcttcgaatgaacactggctattgggcccgtacttcggaagtgaaatgcgcaagttggaagcttgcttgggagcacacaacattttggtttgagacattctgaaagtgcgttgagccacaaggaatacattcatggcgaacaatatagatcagactcaaaacagttaaccaacaagcttacctttatgctagagacctcgaagtccatccaggacacatttgtgttcagtatagatggcaccgtactctctaatattccatactacaaaaaacatggatatg

SEQ ID NO: 47820 - DNA, 210 bp, Glycine max
  Clone ID: LIB3107-017-Q1-K1-D10
ttaaatcaatccaaattaaacatttttttgaacatattatatttttcttaaaatgtttacgataattttatatcactttgaaatcaaatatttatattattgatcctcttccttccatcaacaatacttattctcttttcttacaacaaatattacaacttcaaattaaatttaactatttacttaaacgttttttttaccttttcaaat

SEQ ID NO: 47821 - DNA, 423 bp, Glycine max
  Clone ID: LIB3107-017-Q1-K1-D12
gaccctattcttctctctcactcactcacaggcaggacaaaagaaaaattcatagctatgagtggtgctgaagcgcgaccttgtgactactgtggcaactccacagcacttctctattgcagagccgattcagcaaaactctgtttctcgtgcgatcgcgaagttcactccaccaaccagctcttctccaagcacacgcgcacgctgctctgcgacgcatgcgatgatccccctgcgaccatactctgttcaaccgacacctctgttctgtgccagaactgcgactgggagaaccacaaccctgcgctctccgattcccttcacgagcgaaggcccctcgaaggcttcactgggtgcccttccgtctccgaactcttgttcatcgtggggttttcggatatcagcaaaaaatctctgcttttt

SEQ ID NO: 47822 - DNA, 411 bp, Glycine max
  Clone ID: LIB3107-017-Q1-K1-D2
ggcacaagtgagtttgttgatcgagataactaggggcggcgtgatgaaaatgaaggtccttgttttcttcgttgctacaattttggtagcatggcaatgccatgcgtacgatatgttccctctccgaatgaacactggctatggtgcccgtacttcggaggtgaaatgcgcacgttggaggcttgctgtggaagcacacaacatctttggctttgagaccattcctgaagagtgcgcttaagcatcacaggaatacatccatggcgaacaatatagatcacactccaaaacagttaaccaacaagcttacttttatgctagagacctcgaagaccattccaaggacacatttgtgttcagtatagatggcaccgtactctctaatattgcatactacaaaaaacatggata

SEQ ID NO: 47823 - DNA, 412 bp, Glycine max
  Clone ID: LIB3107-017-Q1-K1-D3
gtacatagtatagatacggatacccggttagtgtatgggtatgtacgtgattcatcacttttatattgttataagacacttttttaaaaaaagaatctggtatttggtaattggtacgttgaattcaatacaaggtacacaggattattgacaaagtctttgtttggatatatgttacttgagaaaccacgtcggctataactgttgaaaacatgtcccatatatgtaagcaaacacgtttaaaattctttaactatgattttgactgcctctgccagtgacatgattagaggtctgcctatatgagaatttggaccaatgacatgcagaaggaatttatttgattgcgtttttctatagtatgaaatgaaataaatggaatttaattttcagaacacattattgactaatt

SEQ ID NO: 47824 - DNA, 350 bp, Glycine max
  Clone ID: LIB3107-017-Q1-K1-D5
aaacggtcctcggccgtgaacaatatgtcttggggggaagacggcagtggtggtggctgcttctgaacgatgtggtaccgtggcatgaggcgcatgccgtgggggcgttacgcggcggatataagggacccttaatcttaggagcggcgattgctgggaaccttggacacggttgaagaagccgtttgcgcctacgactgctctgctagagccatgacgtgtctcaaagctcgcaccaacttcgtttacccaacttttatcgtaaccttctttcgacaccactgaacacttgttccctaacttcaataacttcaacatctttcacatacacttactcttcaatcaccatc

SEQ ID NO: 47825 - DNA, 71 bp, Glycine max
  Clone ID: LIB3107-017-Q1-K1-D8
ccactctccctataaatgctcattaatcacggcttatttttacttactcacaacttgaccactatactttc

SEQ ID NO: 47826 - DNA, 272 bp, Glycine max
  Clone ID: LIB3107-017-Q1-K1-D9
aattccctcgtcgacccactcttacgtactgctacaaaaacccccaaaagggactctttaatcttattcagcttccaccatccttgaagaatatcaataatcttaacactaataatcatatatacatataaacttactcatacactctttctactttattcaacccaacatacttaatttaatcctttcatacattcatacattaattatatcatttattcctatgtttaattatacaaacactatcacccttatcaactcctacttaatta

SEQ ID NO: 47827 - DNA, 410 bp, Glycine max
  Clone ID: LIB3107-017-Q1-K1-E1
ttgagggggaagcacaagagaagagaagaggggagaggagagggggggagaaggggttgcagagagagagagagagagatgtcatcatcttcagacctggacaggcaaatagagcagttgaagaggtgtgagcctcttaaggagtctgaagtgaaggcgctttgcctcaaagccatggaaatccttgtcgaagagagcaacgttcaaagggtcgacgcccctgtcaccatatgtggtgatattcacggtcagttttatgacatgaaggagcttttcaaagtaggaggggattgccccaaaactaactatttgtttctgggggattttgttgatagagggttttactcggttgaaacgtttctgcttctgctcgctcttaaagtgaggtatccggatcggataacactcat

SEQ ID NO: 47828 - DNA, 421 bp, Glycine max
  Clone ID: LIB3107-017-Q1-K1-E10
gtcggagatatcgaactgcagctacagcaaaggggcaccggtgacggtgacggcgcagttctcggcggcggatagggaggctagagtgttgaggtacagggagaagaggaagaaccgaaagttcgagaagaccattcgttacgcatcgagaaaagcgtatgccgaaacgaggccaagaatcaaaggaaggttcgcgaaacgcactgatgcggaccctctggctggatacggcgtcgttccgtcgtgttgatgattatcatatatatcatatatgaatatgaatgcttacttttttgttttcttatgtttgcttttgctgctgtatatatggactacgccttcttttgtttgaattatgcaatgtaaagttgcaaaaaaaaaaatttaatataaaaaaaaaaagcggccgttttaaaggatc

SEQ ID NO: 47829 - DNA, 399 bp, Glycine max
  Clone ID: LIB3107-017-Q1-K1-E11
attatataaacatttgtagaccatctcatgacgaaagatctaacaagatagagcatagatgagataatcaacattggacgtctgacaagcaagtctcatagggcaccatatcatgtagtaaccacagaggctccaataagtgacatagccacaattagaccttcaactgtgggttcactttgtaattgaaactccctttctatgtacaacataaatcctgcatgcgaactcaggttattggttatatcaaccaattttaattcatcgcaaaataaataaaatcaattcaccatacctgcaataatctcattatcccatccttgtaataagttacctatggcatcagcaacagctacaagaacagctacactcatcgtttcagttagtttcctaatcaat

SEQ ID NO: 47830 - DNA, 401 bp, Glycine max
  Clone ID: LIB3107-017-Q1-K1-E12
gagagagatagtgtgtgcagaggatgtggctattcggcagagaaggggcttctgggttttcatcatcatccactgcagagcaagtcactgaaggaattgatggaactggtttcactgccattgtcacaggggcatccagtggtattggcactgagactacgcgtgttcttgctttgcgtggtgtccatgtgattatgggtgtgagaaatatgcttgctgctaaagatgtcaaataaacaatactcaaggagattccctccgctaaagttgatgccatggagttagatctcagttcgatgaactctgtcaggaaatttgcatcagagtttaagtcctctggtcttccatcgaacatcttaattaacaatgcatgaattatggcttgccctttcagtctctct

SEQ ID NO: 47831 - DNA, 395 bp, Glycine max
  Clone ID: LIB3107-017-Q1-K1-E2
ggttcaccacagtttacactcacgagagtacccagtttctcttctcaatttctcaagtgtgccgagaaaatcatggtggacgcagcagaacgtagatacttggaggatgatgattcatctctcatgaaaactatcaagggcgcaacaactggtttagtggctggaactatctggggtactgtagttgccacctggtatgatgtcccccgtgtcgagagaaatgttgctcttccagggctgattaggactatcaggatgatgggcaactatggtttgacctttgctgccataggaggagtctacataggtgtagagcagttggtgcagaactataggatgaagagggatttagtcaatggagctgttggcggatttgttgcaggtgcaactattct

SEQ ID NO: 47832 - DNA, 411 bp, Glycine max
  Clone ID: LIB3107-017-Q1-K1-E3
ggttgccactagtgactactatgaattttataaaggtggcataagacatattcttactaacttcttgggtgccaatgcacagaagcgacaccatatccaccgagaaaccatgatggaaaatattttgagccaatttagtgaacatgtcaagaccttctctgatttggcagttaattttatgaaaatattcgtaactcaactttttggattagcactgaagcaagctctgtgaagttatggatagaccatttatgtgtaggagcttgcgagtacattatcaaaagaggacatatataagattctagaggttgatataatggagggtgcaactgaagtgtattgacgagatttctttccatacttgaagtggatatcaaataggaggctggagatgaaaattcagaatcttta

SEQ ID NO: 47833 - DNA, 408 bp, Glycine max
  Clone ID: LIB3107-017-Q1-K1-E4
ggttctagtgtatgtgattgttgtgactcgttcttgttcgtcgttatcttcttcttttgttgtttgtgtgtttgttttttctctcacctgaaaatgtcttgctgcggtggtaactgtggttgcggaagcgcctgcaagtgcggcaacggctgcggaggctgcaagatgtacccagacttgagctacaccgagtcaaccaccaccgagaccttggtcatgggagtggcaccagttaaggctcaattcgagagtgctgaaatgggtgttcccgctgagaacgatggctgcaaatgtggagctaactgcacctgcaacccctgcacttgcaagtgaggtgttggagagctaaagcttcaagcagaaatggcccttagaaataatgataaaaactatatgtaggttcaaaac

SEQ ID NO: 47834 - DNA, 410 bp, Glycine max
  Clone ID: LIB3107-017-Q1-K1-E5
gaatggacatggtgctccaaaatctagataaggggcttaattgaattgagacatgagtgagaatagtaaaaccctgcgtttcggcatcttaagctgcgccaacatcgccagaaaagtggctcgagccattgctctcgctccgaacgccactctctgcgccatcgctagccgttccatagagaaggcggagaagttcgccgacgagaacgggtttcctgcgaccgtgagggtttacgggagctacgatcaggtgttggaagatccatgcgtggacgccgtgtacctgcccctgcccacgagtctgcacgtgcagtgggcggttatggccgccagtaaaaagaaacacgtgctggtggacaagcccgtggctcttgacgtggcagaacttgatcgaatcttggatgcagttg

SEQ ID NO: 47835 - DNA, 418 bp, Glycine max
  Clone ID: LIB3107-017-Q1-K1-E6
tgattgttcaagagtttgttgcgagctataaggtggtttatcgcgaggagaatatgaagttgtctgttttctttgttgctgcactaattttggtagcatggccatgccatggcgcatgctaccaaaggttccctctccgaatgaaaactggctatcgtgagcattcttccgaagtaaaatgcccacgttttaagcttgctgtggaagcacacaacatccgagcctttaaaaccatttctgaagaatacgtttaaccaacataggactacattaatcgctaacaatttatatcagactctaaaacagttaaccaacaagctttcttttatgctagtgaacgcgatgtccatcacaacgacatatttatattcggcaatagatacaccgtactctttaatattccatactatgaaaaaca

SEQ ID NO: 47836 - DNA, 383 bp, Glycine max
  Clone ID: LIB3107-017-Q1-K1-E7
gagcgcagagccgcctcaacatctgaaacagactcgatccctaatccctatcttcttctctggtctctccgcacgctttggctcctctgatctcagtttctggttttgaattgtaggtgctgttggcttggtatccgtgcaagttctgctgtagccgatttgaaggtgagggtgtcaccttaaaggttctctcatgttagatcacgctactatccatgcgggagcaactgagctgctaggagagtatggtgcttctcctagaaaaaattacagaccctcatcccacagagttagctgtatgcattgcgagacatatcacaaattcattcagctttctggttgcggatggccaccttccattatactcgagggagattcttcaa

SEQ ID NO: 47837 - DNA, 403 bp, Glycine max
  Clone ID: LIB3107-017-Q1-K1-E8
gttacaaatccgcatgttagaaggtaatgctttgcttcaggcccatttctctaggcaatttgttggtgggaaccttgcattggaccagaaggaggtgcttctttctgcaaatagactgcttcaggcaatggtagatgtgatatcgagcaacggttggctgagcctggccttacttgctatggaagtcagtcaaatggtgacacagggaatgtgggaacgcgactccatgctgcttcaacttcctcatttcacaaaggatctggctaagaaatgccaggagaacccaaggaagagtatagaaactgtgtttgatttattagaaatggaggatgaggagaggcaaaaattgttgggcatgtcagatttgcagttgttggatattgcccgattttgtaaccgattc

SEQ ID NO: 47838 - DNA, 406 bp, Glycine max
  Clone ID: LIB3107-017-Q1-K1-E9
gttcatccaaaaacccctttatgtgactcactcgagccaacaacctctcagacgcgaccaacccccccataactcataaggccaaaaccatttctcacaaaacccttcattacacacattattatcatacacacacaaaaaaaacctctcatttcaaagatagagagagagatttcacagaccaaattgcagaggacgacaaagttcacaacttcaaggaaaatcgaaatggcccaagtgagcagagtgcacaatcttgctcaaagcactcaaattttcggtcattcttccaatcccaacaaacccaaatcatctaattctgtttcattgatgccacgcctttggtgtccctcaaaatctcgcatcttggtgaacaaaactggaagccttatgggaaattctaatg

SEQ ID NO: 47839 - DNA, 416 bp, Glycine max
  Clone ID: LIB3107-017-Q1-K1-F1
gacaatcaatcccattattaaagggataagccttgaagcttgcaacacaacactacaacctaaggtctgcactacgagaatgtctcagggaagaggcagtgcatctttacctattgtggtcactgtggtttcactactgtgccttttggttcttttggaacgtgctgatgcagcaacttacaccgttggaggacctgggggatggaccttcaacactaatgcttggcccaaaggaaaaagattcagagctggtgatatcctaatcttcaattatgattcaacgacccacaatgtggttgctgtggacagaagtggatacaacagctgcaaaacgccagggggtgctaaagtgttcagttcagggaaggaccaaatcaaactagcaagagggcagaactacttcatatgcaactacc

SEQ ID NO: 47840 - DNA, 397 bp, Glycine max
  Clone ID: LIB3107-017-Q1-K1-F2
gaaccaaacacaacacttcactctcaagcttcaagcatgactcctttttacttcctcctatttgccttcatccttttcctctccatgaacttcttgatccaaacaagaaggttcaaaaaccttcctccgggaccattttctttccctataatcggaaacctccaccaactcaagcaacccctccaccgcacgttccatgccttatcacaaaaatatggccctattttctccctctggttcggctcccgttttgtcgtcgtcgtttcgtcgccgctcgcggtgcaagaatgcttcaccaagaacgacatcgtcttggccaacccgcctcacttcctcaccggcaagtatatagggtacaacaacaccaccgtcgccgtttccccctacggcgaccact

SEQ ID NO: 47841 - DNA, 416 bp, Glycine max
  Clone ID: LIB3107-017-Q1-K1-F3
tataaagatggcagagacattcctatttacctcagaggcggtgaacgagggacaccctgacaagctctgcgaccaaatctccgatgctgtcctcgacgcttgcctcgagcaggacccagacagcaaagttgcctgcgaaacatgcaccaaaaccaacttggtcatggtcttcggagaaatcacgaccaaggccaacgttgactacgagaagatagtgcgtgacacctgcaggaacatcggcttcgtctcaaatgatgtgggactggatgccgacaactgcaaggtcctcgtcaacattgagcagcagagccctgatattgctcaaggtgtacacggccaccttaccaaaaaacctgaagaaattggtgctggtgaccagggtcacatgtttggctatgccactgatgaaacccctg

SEQ ID NO: 47842 - DNA, 420 bp, Glycine max
  Clone ID: LIB3107-017-Q1-K1-F4
tataaagatggcagagacattcctatttacctgagaggcggtgaacgagggacaccctgacaagctctgcgaccaaatctccggtgctgtcctatacgcttgcctggagcaggacccacacagctaagctgcctgcgaaacatgctccaaatccaacttggtcatggacttcggagaaatcacgaccaaggccaacgttgactaccagaagatagcgcgtgacacctgcatgaacattggcttcatgtcaaatgatgtgggactggatgccgacaactgcaaggtcctcgtgaacattgagcatctgagccctgatattgctcacggtgtacacggtcaccttaccaaaaaacctgaagaaattggtgctggtgaccagggacacatgttaggctatgccactgatgaaacccctgaatt

SEQ ID NO: 47843 - DNA, 373 bp, Glycine max
  Clone ID: LIB3107-017-Q1-K1-F5
ggtagatgaaggatggagcccaagatgtgctgaaggatgatggtaactactgcaaattctgacacgtacttgcttaatgtgatcgggaatatgctgtgtttgcatctgtagcgcaggagaaagtttctgatcctggaggctgagcactgtggtctaaacatgcctgcgaattggtacccaccatgccgtggattcacgcatatcctagatggaatctagtatgagctgaagagcagagttcctcaattggagatagtctatgcgtccattgaagaacactaggatgcctttaatagcttgtatgcagacatgccttcgatagcaataacaatctcggatgtggaaacatggaaattcttgaccagaaactact

SEQ ID NO: 47844 - DNA, 396 bp, Glycine max
  Clone ID: LIB3107-017-Q1-K1-F6
atctaactttataaaacaagcatcctttcaacgagtgttttcctatttattaaaatgacaatagttgattcagaacacaagcaatactatataaaacataatgaattgtattgtttttatacacagattttataacacctagtacaatttatttattttctatatatctccattgcgtatcatccatcatatcttacacttattttctttttcatacttctctcttagttgaacagaagtaatgtacaaatagaatttgtcttgcataatgttaaaattttgatacttaaaaggtgcaacaatttaacatgtaaaatttctcaccataccactatcccaatgaagaatcttcagggttgttcaaagggtgaaaaaacaagcttgtagctactactg

SEQ ID NO: 47845 - DNA, 359 bp, Glycine max
  Clone ID: LIB3107-017-Q1-K1-F7
acaccacatatggtataaatattgcagagacattcctatttacctcagaagccgttaactaaagacaccgtgccaagctcttcaaccaaatcttcgatactgtccttgacgcttgcctctaacaaaacccatacagcaaagtttccttcgaaacatgcaccaaaaccaacttgctcattgacttctgaaaaatcacgaccaatgccaacgttgactactataatatagtgcgtgacaccttcaagaacatctacttcgtctcaaatgatgtgggacttgatgcctacaactgcaaagtcctactcaacattaaacatcataacccttatattgctcatggtgtacacagtcaccttacc

SEQ ID NO: 47846 - DNA, 407 bp, Glycine max
  Clone ID: LIB3107-017-Q1-K1-F8
caaatggatacatccatctatggcggactggtccaccaagtctagcttcatatgcaaaatgaataggcagatgctccattaaatcaaaaaacccaaggggaaatattttctccaacttgcacagaattaatggaatattttgttccattctactcaagtcatccttcatcaaagttgtagaacacaaatatttaaagagatgaattatttcaataagtagatttaagacatgtggcgaaaataagccaaaaacaataggaagtaagcactccatgaatacatgacaatcatgaattttcatcccatgcacagttcccttatcaacattggcacatatggtcaagttagaagaataaccatttgacattcatagttcttttatccattgacatactaactttgtttgg

SEQ ID NO: 47847 - DNA, 400 bp, Glycine max
  unsure (1)..(400): unsure at all n locations
  Clone ID: LIB3107-017-Q1-K1-F9
gatccaaagggaaaacaagaagctcaattgtctagttgaagagcttcaaaacaagatttacaagagtaaaaggggaaatgggtattgcttatctcaacatgccaggcttcatgagggcaatgtttattatgttatgtgctatgatgatattgccagaactaacacatgcaaagcatgcaagagtaactaggcactacaagtttaatatcaaaatgcaaaacttcacaaggctttgccaaacaaagagcattgtaactgtcaatggacgatttcctggtcctagaatcatagcaagagaaggagacagaattgtggttaaagtcgttaaccacgttcaatacaatgtcacccttcattggcatggaattcgccaactaanaagtgcatgggcagatggacc

SEQ ID NO: 47848 - DNA, 304 bp, Glycine max
  Clone ID: LIB3107-017-Q1-K1-G10
tactcttaaggggcttcgtttctttttacgggtgattcatcttccctttgtggttccctccacccaaccagatttagacaccgaaaatggctttcaaactgaaatcactacctctcctttgctctcttcacttcccttcccgcctaaaccctaattcaacactctcaaaccatcacttttctcgtctcttcttcacaccttccattcctcccaccctgttcctatctcacgcaacctcatcttccacctttcatctccattgcttcttcgtaaccgttctaaaccaagactaataccatatcac

SEQ ID NO: 47849 - DNA, 386 bp, Glycine max
  Clone ID: LIB3107-017-Q1-K1-G3
ctgttcatggctagcgacactagaggtattgcgctgttgtcagattcgcctgatgagggaggaaatttcagctgcgtggattagctcaggacataaaccttgcccgtgcaactatcgggtacacgataactgcttcaattcctatgggggcatggaataggtcgaattcgctatccaagcctgggcatcatgttaagtgctataccgtgaacaacccttgaatgatcctttttgcctgcatgacagatcgacgcttatccagataccagcatggtcataagctctggtggctctccattgctgcagatttatgtgttgtgcacagtcttccattggcctaaggctctcaaaatctaacttgtcacctgggggacagccttgtctgt

SEQ ID NO: 47850 - DNA, 167 bp, Glycine max
  Clone ID: LIB3107-017-Q1-K1-G4
tatacctatggtctagacattcttatctacctgagagggcgtttactaaggacacgctggcaagctatgacaccaaatctacaatactcaactttacgctcgccttcatccgaacccatacatcttatttaccttcacaatcattcacctaaaccaactttgtcatt

SEQ ID NO: 47851 - DNA, 417 bp, Glycine max
  Clone ID: LIB3107-017-Q1-K1-G6
gaaagaaaccatcttgctcgacggctgctacttcgggcactggctcgtcgtcatggagaagcccgagggcgaccctacccgcgatgacatcatcgatagctacattaaaaccttggccaaggtcatcggaagtgaagaggaggcgaggatgaagatatattcggtttcgactaggcactactttgcgtttggggctcttgtgtctgaagagctttctatcaagcttaaagaattgcctggagttcggtgggtgcttcctgattcttacttgaatgttaaggaaaaggattatggatgtgagccctttattaacgggcaagcagttccctatgatcccaagtatcacgaagagtgggttagaaacaatgcacgtgccaatgagagaaacaggcgcaatgacaggccttgtaatgctga

SEQ ID NO: 47852 - DNA, 149 bp, Glycine max
  Clone ID: LIB3107-017-Q1-K1-G8
caaaattcttaagacgtttttatttatgtctaggcaaacattatcttgtctattttaaatatccatcattcatatgctccttatgtctttatataaatactccctatcattttcaataatttaaattatctccaaattttcaaccaatt

SEQ ID NO: 47853 - DNA, 417 bp, Glycine max
  Clone ID: LIB3107-017-Q1-K1-H1
gaaagcaagtttgttattcagagagagaactcggtgtggctggccgacagaaaattttctattggatgacaaggaagttggctatccattgcttagtgtaaagcgaagaagtgtgaacaaatatcctcagaagctgccttttcaaaagcaaatacatttcgatttataaaaaagattgtactagtagtagtagaaaccaatattaaaaaggaaagaaagaaaaataggagaaaaagatgaaaaatcacacatagaccctttcctctctcgatactataactgcgaatgcgtaggggacagtgagagccagatgtctcctctatatagttcgtaacgcctctttcttacctctcattcatgcattagcaatatttctcaatctctcttcttacccatttcctccccccctctttctct

SEQ ID NO: 47854 - DNA, 403 bp, Glycine max
  Clone ID: LIB3107-017-Q1-K1-H10
gagtcctgatgttttctggaaatgttgcttgctggacgcaacccgttagaagcctcttaccagagactaaaagtgaaggtggatgacacagagcccacaaagtatttcatttgtcacagctgttcaaaaggaagtgatttgttgctgagtagttttgatggggcaaggtgttcctgtagaaaattgatgcaaaagaaaatggagctgctggaagagtccaaggacgaggcttctgtggtcgacggtattttcgataaaggggatgccatgttcttgatctttgatgacttgacagtgctccgaagcttcccaagtgactctgtacaacggcccctccaacttggacacaaaaacttcagcagcaagctggaagaaaagtatagtgacgttggcacgaaggaga

SEQ ID NO: 47855 - DNA, 400 bp, Glycine max
  Clone ID: LIB3107-017-Q1-K1-H2
cactaggtttggaactcatttgcgagcattcttatcattgggaattacgaaaacatgttggagctaagagaaataccctttgtattgtagttgtttcttttcccgcagaaactcaaaactgttttagaaaaataacgatctcagactcgttaaccgttgtattattgtgaaattttaatatgtggtttgcgattcatttccgcacatctttaccattgggattttcaaaataacatctgttggggggagaaatccccatcgcgtgtagacagtggaatggaggcttcaatccattctccttctctctaacgtttgggaaccctattagagtagtcagaggaatctcaggaaatcgctagagatgctgctattgctgtcacaatacacacgtgagttcgct

SEQ ID NO: 47856 - DNA, 392 bp, Glycine max
  Clone ID: LIB3107-017-Q1-K1-H3
ggcatagggagggattatcttattccctccattgtccgtgggcgcagcgttgagtggcggtgacaaccatggcctactcatctcaagaccttgaccaactcctcaatagtgctttggatgattttcagtccttcaacctcaatcctccccctccaagtggggaagcaagtgcgaacattaagaaggagagtccttctttggcgtccgaggtgcaaggattgatcatggctttacccaatttgagaacgacgaataaggggaaacagaatgctgattccaaagacagccacgtgtcggaggctctcaacaagcttacggagcagaccaaagaggctgccatagggctggagtctatttccacacccactgccgattattttgcgaaagatgcc

SEQ ID NO: 47857 - DNA, 424 bp, Glycine max
  Clone ID: LIB3107-017-Q1-K1-H4
gatgattgaagtgcaagcaaatgccatggagcagagtgggtgggccaatatgcctcacgagcttctcagagaggtcctcctccgaattgaatcgtcggagtccacgtggccgctgcggaggagcgtcgtggcttgtggcggagtgtgccgcacctggaggaggctcatcgtcaaggagattgtcaagccacctcaattctcttccaacataaccttccccatctctctcaaacaggttcagtgctctttctctctattcaaattaaatcaattttgtttattttcttgctttaaatttggcagcctggcccgagggaacatctactttagtgctttattaggcgcaacagtgcctcacagacatattatctgtttctcaggttatctagtggttagtacttagttaatactacttgagcttata

SEQ ID NO: 47858 - DNA, 418 bp, Glycine max
  Clone ID: LIB3107-017-Q1-K1-H5
tgggatgattgaagtgcaagcaaatgccatggagcaggggtggtgtgccaatatgcctcacgagcttctcagagaggtcctactacgaattgaatcgtctgaatccacgtggccgctacggaggagcgttgaagcttgaggcggagtgtgccgcacctggaggaggctcatcctcaaggagattgacaagccatctcaattctcttccaacataaccttccctatctctatcaaacaggttcagtgctcatttctgtctattcaaattaaatcaatcttgtttattcacttgctttaaattttgcagcctgtcccgagggaacatctacttcagtgcttcattaggcgcaacagtgccttacagacatattatctgtttctcagtatatctagtggttagtacttaggtaatactact

SEQ ID NO: 47859 - DNA, 410 bp, Glycine max
  Clone ID: LIB3107-017-Q1-K1-H6
cagatttgaaagctcatttagagcacaaaatgtggtgctcttctctccctctcccctcattcatctccttcttcctccaagctcttatccatggcctcctatggtggtgagcttcttctagactcatcttctccttgaagtagcgtctcctctctctcttcctttccccattccgctgccattcatcttccaagaagcaaaggaatccattgatgaagaagatcctaggcctacaagctccaatggagcttacatcatgtggtatcagagcatcttcatctaggtgatgttcttttgcttcctctatctttatgtttggagaattctctttaattccttgttcttcatcttattctccatgtatatactccattgtcttgtggtttggtgcttgctaaagtagattaatt

SEQ ID NO: 47860 - DNA, 418 bp, Glycine max
  unsure (1)..(418): unsure at all n locations
  Clone ID: LIB3107-017-Q1-K1-H9
ggcccactcccagaatctactcttctgttcttgggatgggtttccttcttcaccctcttccctgaaaccacataaccccatggccatggcactcgacgcggcactctggatcgtgaagatgacgtggattgctctcagtggctggatttcttcttgtttaattgttgctgacgaatttgcctcttctctacgctctggcgatattggcccctttcatgtaggttgatccaattacgctctctttcgtccaagatgggtactttacttattgggtatgctgcaagttttgtaattttatattgcccttcaaaataggcttggtttgatgtagtgggtatgaatcaaaatctctctcttttttctttttttataagtctggcttgtgtgtttttgagctggngtgaagtgggtggtcatg

SEQ ID NO: 47861 - DNA, 382 bp, Glycine max
  Clone ID: LIB3107-018-Q1-K1-A1
ctctaccccaaaaaaacaacaaaagggtcccctcttgttttttttcttgcccaattgatggtccagcgtgagccatgatcatttgctcataaggattcaattcttccctttgtccaccactttcgtagtatgaaccttgtagcactattagaggaaattgtggtaactcttcaccgtggtttttccaccaataatcatttggcatgaacccttcctcataaagatccctcatcacatcatcaacaaacttgaaaacattatatttgcatttcttgcagggacaccttgtttgttctccttgcatttgaaacatgtcctgactagtaacaaactatacaaattcaaacactccttctctaaacttatttgtccaacatttatt

SEQ ID NO: 47862 - DNA, 415 bp, Glycine max
  Clone ID: LIB3107-018-Q1-K1-A11
attcttatttgtacaaatggtacttcggggttggaacgagtatgaagaaattaacgatacttctttaccttttgagttgttctgccggatcggtcgctcaagacctttggtctctacccggacctgatgaaaaaaatgggatcacatcttatggactcgttgagaataattctgatctagttcatggcctattagaagtagaaggcgctctggtgggatcctcacgtacagaaaaagattgcagtcagtttgataaggatcgagtgacattgcttcttcggtccgaaccaaggaatcccttaaatatgattcaaaatggatcttattctatcgttgatcagagatttctctatgaaaaatatgaatcggagtttgaagaaggggggggagtcctcgacccacaacagatagagga

SEQ ID NO: 47863 - DNA, 56 bp, Glycine max
  Clone ID: LIB3107-018-Q1-K1-A12
atataaactcacatatcatcttaatacaaatatctttttaatatccccccctacaa

SEQ ID NO: 47864 - DNA, 217 bp, Glycine max
  Clone ID: LIB3107-018-Q1-K1-A2
cctcccacctctcgggagacacgagctttgctggggatttgaatcgaaagtgtttgttaatgggtgaggtgaatcagagaagtcataagacagagaattgtaatccttatgagttattggcggtataaagctgctaccattgatgcgaggaaatttacttcgatctcatacaattctgtccgattatttcagacttcgattaccttcaacagatatg

SEQ ID NO: 47865 - DNA, 404 bp, Glycine max
  unsure (1)..(404): unsure at all n locations
  Clone ID: LIB3107-018-Q1-K1-A3
tgtgtgaatttggaagttgcangcatanggacacgcncgacattcaggggaggaggactggtggggaaaatccctttgtagctaagttcatagggttttgtttatgttctttctctatcaatcagaatggtatatggaaccaaaaccccaacaagttatgcattctccactgctgctagctgcaatctgctatgtatctgccattctttttcatttgcaccaatgcccaattacgtagccacttgatggcattgaacatcaaatgcaccgtgtggccccatccattttcaaaggatggagatagttaatgcttttgtgcactttgttttaaatgattttaggtttatataattaatcttaattaaaattactgattaaaagtgtattaaaaacatatcaaaatc

SEQ ID NO: 47866 - DNA, 303 bp, Glycine max
  unsure (1)..(303): unsure at all n locations
  Clone ID: LIB3107-018-Q1-K1-A6
tcccaatttnanttttnattctcaccatcctnnanaccttatcaaaattgatcaatttcattcttttttcaacntttttcaaccttaaaatactccttacatcnattacactcccttccaaaatcaacnncntnctatnacttttcctananaaaatatnaattatcncnanaaccatttcccccctcancaacaaaantttcactctattatcccaccacccaannnntatttaactccttttccatttccaaaaaaccntnattattttccatatncaaatncttcntacaaaaatcttac

SEQ ID NO: 47867 - DNA, 248 bp, Glycine max
  unsure (1)..(248): unsure at all n locations
  Clone ID: LIB3107-018-Q1-K1-A8
caaaacggggatagcactaatttaaccgccgcatatcaaacattcggcgtgttacttttanctaacactttctgcaataattgcacgtactancatccaaacaagctcttcatcacgggcaaaaaaaatttaatcttttttcatcgctctcttctcaaaagactattcatcatccacattgtgcatgaaagagctgacaaagatctttaattttcttcaataaacaaatccaaatctcctccctcttt

SEQ ID NO: 47868 - DNA, 297 bp, Glycine max
  unsure (1)..(297): unsure at all n locations
  Clone ID: LIB3107-018-Q1-K1-A9
ggtcatgaccctgatgcttttaagagttcactccatccgaacaatgggcatggggaaaatanctgnattgatccacgggtgcaaatacagcaacaccttgaagctgtgaggcagagaagagagttaggagatactgttacatcatcatatctaaacatacctgcatctgctggtgctcatgaagagagttcaccacgaggttttatggaacgacttcatcaaaaactgggcgttcaatccacacaaccatcaactgttgataaatggcatcctctttcatcaaaaagtgacaaatct

SEQ ID NO: 47869 - DNA, 420 bp, Glycine max
  Clone ID: LIB3107-018-Q1-K1-B10
cgagtctggccaggtccatcgccacaggttcctgagtgtatctgctattggagcaatatctgcatcctttgtcattgttttaggagtgattgctgttagcctacttaatgtttctgtaaggagaaggctaacatttgtggataatgctttggaaagcatgtgctcaagctcctcaagatcaggaagtccagccacaggaaagcttatcctgttcgattcccattcctcacctgattggatcagcaatcctgagtccttgctcaacaaggcatctgagattggagaaggagtctttggaacactctacaaggttccattgggatcacaaggtagaatggtagcaatcaagaagcttatatcctcaaacataatccaatatccagaagactttgatagggaagttagaatcctagggaaagc

SEQ ID NO: 47870 - DNA, 413 bp, Glycine max
  unsure (1)..(413): unsure at all n locations
  Clone ID: LIB3107-018-Q1-K1-B3
cctaccggttgcaaaaaaacaacaaaagggtccattttggggtttatttcatctattccatgaggcgaacantgggagatacacgttacaccacgattttgaatcanaagagatatttcaagaaatggcagatctattcactctatcaataaccgagccggatctggtgtatcataagggatttgctttttctattgattcctccggattgggtcaaaaacatttcttgaatgagttattcaactccagggatgaatcgaaaaatcactctttattggttctacctcctctttttatgaagagaatgaatctttttatcgaaggatcataaaaaaatgggtccagacctcttgcgggaataatttggaagatccaaaacctaaaatagttgtatttactagcaacaacataat

SEQ ID NO: 47871 - DNA, 400 bp, Glycine max
  unsure (1)..(400): unsure at all n locations
  Clone ID: LIB3107-018-Q1-K1-B5
ggaatccatccgtcacctagtaaccannttctgccgagctctcacttgcagaggagaaagttctaaactttcccctggttaaatcctaaccccagttttcttcctctcactttaagcactccccaatttgacaattttcccctctctcctcaaaaggggtgtgagccactttctctctcctcaattggggtgtgaaagtttctaccttttttcctttctatttttccattatctatgttagttttgcattgtgtgttgtttggcttgcaatcttattgcatgctggttgttggtgttggtgtcccaattcactctcaaatttcaaggttcttagaactagtaggaccttgcgaccatggctgccaaaaaagcatgtgagacattctcaaagtccttgatt

SEQ ID NO: 47872 - DNA, 308 bp, Glycine max
  unsure (1)..(308): unsure at all n locations
  Clone ID: LIB3107-018-Q1-K1-B8
tgttacaaaaattataaagggggggtcattatcgcgggactagctaatttatatataatccanatgagaacagtaaccttttcttattgattgttctgggttgaatcattgcgttataatttaaaaataatatagtacattgaactttcgtgcttgctttattgcttggaagagccaattctaaacagttaatgaagaccgatttgtgtaaattgtgacgcttctattttaaatgcgtaagttatagttgaaattaattctcggggaaaatatgatttcttttggtattaacattaaattgtggcttt

SEQ ID NO: 47873 - DNA, 314 bp, Glycine max
  unsure (1)..(314): unsure at all n locations
  Clone ID: LIB3107-018-Q1-K1-B9
gattcccntanttatttcggcggactatttttgaatgggaaaaaccaaanaancnttancnaactnaacaatgtaaaataaattaanangaaccctcnatttgtgcttttcaattttctaccccttttctttctttgcgttgatttaattaatactatcaactaagcccttttctgtttgcaatctcgaactattagttcttcttccccacatgtttttccaccaattcaagaaattatgcttgagttccgtgctaacaaaatgtttcttgacgaaaaaataattcttccccatacacttaaaccacttttttc

SEQ ID NO: 47874 - DNA, 296 bp, Glycine max
  unsure (1)..(296): unsure at all n locations
  Clone ID: LIB3107-018-Q1-K1-C1
tttcttcnttnctacaattttnntagcatggcaatgccatgcgtactatatgttccctctccgaatgaacactggctatttttcccttactccggaaaaaaaatacgcaagttggacgcttgctgtggaagcacacaacatctttggctttgagaccattcctgaagagtccctttaatcaacaaaagaatacatccattgcgaacaatatatatcacactcccaaacagttaaccaacaatcttacttttattcccacaacctccaaattccatcccaaggacacatttttgttc

SEQ ID NO: 47875 - DNA, 245 bp, Glycine max
  unsure (1)..(245): unsure at all n locations
  Clone ID: LIB3107-018-Q1-K1-C10
tttaacctccgacatctaaaacatcccccccctttttaaacacgcgcggccccccnnanacacttaanctnatttaaacattctttgataacccaaaaaaccaaccacaaatttttaaacaatctccgcccccatttttttatcctggncnttaaaaaaacaccaccaaatttcctcatccaatggaaataaaacttttttcacttttttcaacaattctaaacaaatataaaccttcaattatt

SEQ ID NO: 47876 - DNA, 482 bp, Glycine max
  unsure (1)..(482): unsure at all n locations
  Clone ID: LIB3107-018-Q1-K1-C11
ggaattncccgggtgcgggccgacgcgtaccgtagcttgcgagaaagacgacccagaaggggaattgcgaatcaaattagtgtcaattctcttttgcgcggggtnccctacctctccggtcgaggatgcannnatcttcgtcaagaaccctcanccggaaagaaaccatcacccttganggtggaaagcgtctgacanccatcgacgaacgtcaanggccaagtatccagngacccaaggaaggaattcctcccggatccagcaacccgtctcaatcttcgcnccggaaagcagctttcgaggaccggccccgtaccctcgcccgactacccaacatccagaagggagtcannacccttcaccttgtcccttcgtcttccgtgggtggcagtgcgagaatcttcgtcaaagacttctcnnactggcaaaaccccataacccnntagaggtcgaaagctttctgacaccattgacanacgtca

SEQ ID NO: 47877 - DNA, 423 bp, Glycine max
  unsure (1)..(423): unsure at all n locations
  Clone ID: LIB3107-018-Q1-K1-C12
ggtgaatagtgtttgtgttgcctttatctgcggcggttaatttaaccaggcctaccctttttatnaacatatgaaaagatcggttttttgtggttcctccactcattgttgttgaagggtctcgcgaaatcaatcaagtttttagacctgttttctggtagaggtgtaagtacaagatcttaataataaggattttgtacaaaggaaaagttgagaataagatgggggaagatggttattcttggattaggaggacaaaattttcacacactgtctgccatcgtttggatcctgctaggttaggctctattcctatcagtgttcagtcagagcaaaaatcaaggcctgctgcctcaaaggctcagagacaccccataacaaacaagcagagatctttgtcaccattgcctgagacttatcttt

SEQ ID NO: 47878 - DNA, 265 bp, Glycine max
  Clone ID: LIB3107-018-Q1-K1-C2
ttctattgattcctccggattgggtcaaaaacatttcttgaatgagttattcaactccagggatgaatcgaaaaatcactctttattggttctacctcctctttttatgaagagaatgaatctttttatcgaaggatcataaaaaaatgggtccagacctcttgcgggaataatttggaagatccaaaacctaaaatagttgtatttactagcaacaacataatggaggcagtcaatcaatatagattgatccgaaatctgattc

SEQ ID NO: 47879 - DNA, 393 bp, Glycine max
  Clone ID: LIB3107-018-Q1-K1-C3
ggctgaagaaaaacgcaagctgcttgtttgggagggaagagaagggggagagaaaacaaagggcggtggtgagtgcttctgcttcatcatcatcagagaatggcggctactgtgtcttctgcttggtcaaagcccggcgcgtgggccctatattccgaggaacacgaagccgagctccttcaacagaacaacaacaaccccaacgacaagcctaaaggtgttaatccgttcggagaggcgaggccgagggagcaggttttggcggaaaaagggcaggattggaagaagattgatgagcagcttgagagcgtcaggattaaagaggcaagtggtggtgatgggtttggaaagaggggttttggctcttccaacggtggtggaggacgtgctact

SEQ ID NO: 47880 - DNA, 334 bp, Glycine max
  unsure (1)..(334): unsure at all n locations
  Clone ID: LIB3107-018-Q1-K1-C4
tatttacaatntnttcactctcaatantntcatctcncaaatcttttaaaacgcctttatccaacctaccttctgngaaatttattccaatttctgtaaacaacaaacacctctgttacctcatctcagtcaagacaattaaaagataactttcaagacattatttttaaacaactgccaccaataattttacactctctaaagatatcaagaataacctaataacgctgattaaagtcacgtcaacctctctaattatcaaatacaatagaaaccaaccaatccaaaaaaacttatttttttcaatatcatatttatttcacaactatataat

SEQ ID NO: 47881 - DNA, 412 bp, Glycine max
  unsure (1)..(412): unsure at all n locations
  Clone ID: LIB3107-018-Q1-K1-C5
ggaccttntgcatctagaacatcctacggcggacttctacgggcggttaagagggagacacttaagctgattgagacattcttggataaggcagaagaccagccacaaattggtaaacaatttgtgccgccaatgatggatcctgttcttggagattatgccaggaatgttcctgatgcaagggaatcagaggttttgtcactttttgcaacaattgtaaacaaatataaagctgcaatgattgaagatgtacctcgcatatttgaagctgtttttcagtgcacacttgagatgattacaagaaattttgaagattacccagagcatcggctcaagttcttctctctactccgtgccatagccactcattgttttcctgcattaatctgcttgtcaagtcagcaactgaagc

SEQ ID NO: 47882 - DNA, 399 bp, Glycine max
  Clone ID: LIB3107-018-Q1-K1-C7
gataaaacaacacaaagggaaattaaatatttaaattaataaaattaatcatccgcgattctattttatgaatccctttttttttacaatacctaatcctaatcaccgaacttacacaatcagctagaatgggttataaagatatctatagatatatatagatttatttatctatcgatatctctaaaaaaaaaaaaactaaaataaacaaataacacctctcattttatttatactaaaggggaattatgagacaaaaaataaatccgcttggtttcaaactttgtacaactcaaactcatgattctatttagaatgctcaaccaacaaaatattccgacaatatacaaaaagataaaaaaatacgatattgtatcaaaaattatatacaaaaaaata

SEQ ID NO: 47883 - DNA, 243 bp, Glycine max
  unsure (1)..(243): unsure at all n locations
  Clone ID: LIB3107-018-Q1-K1-C8
atgacagttcttcatcatcccgctaactttataaagataacacgcactcnanatcacantaaatatattcgattattaatactacaacaaaataataatcgcaacataaaatatgcggcaaaaaatattttttacgcattcatttactaaaaacacaaagccacactccttaggacaaaaatgcttatatctctcaacaaatcattccattcctattctttctccagatcttaatcctcttca

SEQ ID NO: 47884 - DNA, 315 bp, Glycine max
  unsure (1)..(315): unsure at all n locations
  Clone ID: LIB3107-018-Q1-K1-C9
ccactcntccntacaacttcacaagactacanaanangacacgcacctctttcttatcgccgctttatatcacacgctctcttcaatttctatgagttttnctattactttacctccgttccccctttctcacaaaaacaacaccttttctcttctccttcctatctatttttttcctttaatttttaaaaaataaaatccattcacagcttaattcaattcttcattttaatccatctatctaaccatcacttaattacctaatccaatctaaaagttcaaaaaaaaactccactattaaaattactaaatcaa

SEQ ID NO: 47885 - DNA, 421 bp, Glycine max
  unsure (1)..(421): unsure at all n locations
  Clone ID: LIB3107-018-Q1-K1-D10
ggcattgctgaaaatgtcgcanttnttngaaggcgccaaatactatggggcggagaaactcaccaacatgcccaanccanangcgagtgtcaccgacgtggacttcaagcgcgtgagccgcgacagcgtcgagtactttttcaatgtctccgttcagaacccttattccacttccattcccatttgtgagatcaagtactccctcaaaagtgctggcagggagatagcagtaggaacaatacctgacccagggtcattgaaggcaaatgacacaacaatgttggatgtgccagtgaaggtgcctcatagcatattactgagcttggcaaaggacattggtgcagattgggacattgattaccaattggatattggacttgttattgaccttcctgtcattggcaacttcaccattcctctt

SEQ ID NO: 47886 - DNA, 421 bp, Glycine max
  unsure (1)..(421): unsure at all n locations
  Clone ID: LIB3107-018-Q1-K1-D12
tgggtgttgtaagttgcaatggatatanacggcgcttttttttatgaggggggttttttacttctctaaacnctttactanntnntcanaaaancannnttncctttncaaaaataacttttaagaagccacacataatatttcttgatgagccatccaatcatctggtacgctgctgtgtctctccatcattgtttgttgcttcttggtgggctagtggaccaatggcaactagtttactgacttatttgttgcagggaaagtacatgtgtctattgaatctttgtttttgttttttgtcatggttgtgcttattttctctgttaaaatggtatgccaacaacttatgtgaggagaaaatagctgaacgtggtcctatgatcgtctcaattaagcttctgacttgaccttgtcattttaa

SEQ ID NO: 47887 - DNA, 407 bp, Glycine max
  Clone ID: LIB3107-018-Q1-K1-D3
ggacaacgttgcttgaatttggagtgttcgtttttttacgtgacgtgagtgtcaccgataaatcggaacaaaacaaacaaccttagcctgatgcctgagttctccgagcccgatcatgcatttcatcgtccatgtccatggatatgaagatgaacatgcttttctttctcgtcctttttgcttctgcaatttcctcttctcttgccaagggttccttgcaacaaacccttcttccttcagaagaattcaatgacggtagtaatgcaagcagtgcaaggcatttattagaggatgagtctcaggctcagacaagtgttgatttggcacaaggatttatgtccaatgatgaacttgaatgggccatccaagaatttggacaaagatgcaacaacatttccagggtatac

SEQ ID NO: 47888 - DNA, 446 bp, Glycine max
  unsure (1)..(446): unsure at all n locations
  Clone ID: LIB3107-018-Q1-K1-D4
ggccgaatcccggtcgagcgaggctccccaacctcctccggttcaaaaaaccacaagggcctcaaaataacccaagcgagcacaacacagcgcagcacttcttaattcccttcacactctanacagatttacangtgcttacacttaaatggctttgaagctcttcaatcacccaccacagccactccatcgttagtccctttgaagaaaccagtctcagttacttagagacaccgtggacgaaaggaaagcgttctaagcgtagccgcacggagcaacaactgcaacacccttcatgcaccgaggaagagtacctcgctctttgtctcatcatgctcgctcgcggcggcgccggcagtgtctccaccgccaaacccgctgtctccgacaacaattctgcgccgctatccgccgccaaactgagctacaaatgttcggtttgcaac

SEQ ID NO: 47889 - DNA, 400 bp, Glycine max
  unsure (1)..(400): unsure at all n locations
  Clone ID: LIB3107-018-Q1-K1-D6
aaaaaaacaacaaaaagggcctcaattcacaattccttccaanttttatcagacggctttctaatctttgcgggtgcgaatcttcttcatctttttttgtcccttcgaaaagctaaggaattggtgaattggtgtatgacatgaagccttctgcaaggagtttatagattttctcttcttagaataatcaattagaaccaccttgaagttgagacaagagtaattgcagccttattttaattagacaatatcaggacaaatcactattcaagagatattatgatcactatggatgtaaaaagtataaaatgggttggaaatatgtaccagaaatttgagaatatgttcctggaggcagaagacgtgatgtacgaggatacacttaaatacatagagaatc

SEQ ID NO: 47890 - DNA, 358 bp, Glycine max
  Clone ID: LIB3107-018-Q1-K1-D7
gacaccaggggcttctatttcatggagtcatctctcatctgaaacacaacaagagaaacaatggaactcttgcaaaatggccacaaaaatttggtcagcatcaaaccctccgagttacccctcttgaatggggccgcgttaactctcctcaactcgctctccgaaactcatgagtactatggcaacatagatccttccagagtttttgtcaccaaagtgaagcgtatcattgtaaaagtactgcttttaatttatcattggtttatattatttattttattcatagaaatcaaactcaaactctaagacaagtttatatcaatttatatatcagtactatttctcctttttttaatcg

SEQ ID NO: 47891 - DNA, 356 bp, Glycine max
  unsure (1)..(356): unsure at all n locations
  Clone ID: LIB3107-018-Q1-K1-D8
tcaaaacacaaacgcggtttccttcctaacattattttccccgattttttaccgggagtcttacaccacacatttctcattacttaactaaaaaaatttccttaccattttcaaaagcatttatacttttcttttatnnccttaacaaatcccttttcatcttttcctttcaattctaaattctttaacaataacctctcatctcataatataatactctacaaaacaaaacaactctaaatcttaaaacaatatggntcacataatantttattgntaatcaaaagttaaatatatacctttaataatattttacgctcatattttctgagatccaatttcacaccccacaccct

SEQ ID NO: 47892 - DNA, 295 bp, Glycine max
  Clone ID: LIB3107-018-Q1-K1-E2
acggcgctagttttaattcggggttggagagtccaaaataaacaaaaaaaattgaccactttcaaattactcattccggaattatgtacacaattccagaaacatttgtttatacatgcaaaagctttgatttcgaattatgaatgcttacacaagtttgtcaatttgagttgaaataactcttctaaataaattggatttcggcagaatcctaccaattattaccttctatatatgcaaaagccttgattttcttgagagatatactacactaaattgtttgagcttcttattc

SEQ ID NO: 47893 - DNA, 463 bp, Glycine max
  unsure (1)..(463): unsure at all n locations
  Clone ID: LIB3107-018-Q1-K1-E3
gcccgaaatncccgggcggccgcgggcttccgtacggttgcaaaaaaacaacaaaagggggccatcattagaccaggaatgaatcattcctcgtggtcctgatcctaagtagggttagggttagggtttatgcaatcgaattcctgagacggtgcatttgtacgtaatcgatggcgaatcgcacggatcctgcagctaagatcataaggggcacgaaccctcagaacctggtggagaagattctccgatcgaagatataccagaacacctactggaaggagcaatgtttcgggttaacggcggagacgttggtggacaaggccatggagctcgaccacctcggcggcacctacggcggaaaccgcaaacccacgccgttcgtgtgcctcgtcatgaagatgctccagattcagcccgagaaagaaatcgtcattgagttcataaaaaacgaggattacaagta

SEQ ID NO: 47894 - DNA, 455 bp, Glycine max
  unsure (1)..(455): unsure at all n locations
  Clone ID: LIB3107-018-Q1-K1-E4
tcctaccggttccaaaaaaccaacaaaaggggccactaacctttggcacaaacacacacccatcggcggcatccttatgcgggcgaactctanctacctgagcacanatttgtagccatgttggggaagaggccccagccgcggattggaaaaatctgcgaattattggtctcttgcgactgcaccaccaagctttttgatgccctcggaagaagccctagaagcccgtttgacatgatgaacttgaagatgcaatcaccaaagggtcttaaaagctatgaccttggtggtgtaggtctaggaattgtggtggcccttgataaaaaatcatcatccgaggaacaaggccatgacgttgtgcccaaacacgccgttatttgcacgtcaaattcaaaccgatccgtaccaatcccagttaaaaaccatcaagggtttcaaaagggtgtgaatgaaat

SEQ ID NO: 47895 - DNA, 425 bp, Glycine max
  unsure (1)..(425): unsure at all n locations
  Clone ID: LIB3107-018-Q1-K1-E5
cagaaggtatatcctgaagatatgatcaatcagtgcggggggcacctgagggcggcaggtaaatanccggtataacttccttcactctctggtagcgagaaagcttctgtaaatcagagggtagaaggtgaagcggtggtggtgatctagtcttcaaaagaaaatctcgaagaactagacaatactttacttaccagccttactaggcaagacagaaaccaatcctagaactacaagatgatacgacttctcctaacgacaagtaaaggcatacccgaacataaaggagagcggctttccctctattagaaaacaagaatggaagtccatataaattagggggaaaggagaaagctcaagcgcgtggcacaaaacagtgggttcctgatcttgtcttccttcaggctaaagcttcaagtctcaat

SEQ ID NO: 47896 - DNA, 248 bp, Glycine max
  unsure (1)..(248): unsure at all n locations
  Clone ID: LIB3107-018-Q1-K1-E7
tactattctttcccaaattatattcctaactggcgctccttattacttgggggctgccttatttnntaaaaaaaaaagttggtttaaccaattttctaatatttcaagttaatgatatttgcgctcttggattatcctttttttcttaaacaaatctttaacttttagggtcctacttctaactgaattttttttgttccacaattttttttctttttaattttttaaattaaacacccttaaaataa

SEQ ID NO: 47897 - DNA, 387 bp, Glycine max
  Clone ID: LIB3107-018-Q1-K1-E9
gacatcttcttgacgtattgaatcggagaattctctaaaagagatctttttctgctctttgaagaaagaagggtctttgcttgattttggagatgtctctgctctcagatctcatcaaccttaacctctccgataccaccgagaaggtgatcgcagagtacatatggatcggtggatcaggaatggacctgaggagcaaagcaaggactctcccaggaccagttagcgacccttcagagcttcccaagtggaactatgatggttccagcacaggtcaagctcctggtgaagacagtgaagtgattttatacccacaagccattttcagggatccattcagaaggggtaacaatatcttggttatctgtgatgcctacactcctgctg

SEQ ID NO: 47898 - DNA, 330 bp, Glycine max
  unsure (1)..(330): unsure at all n locations
  Clone ID: LIB3107-018-Q1-K1-F1
attttaanancattttaattgacaaggcggattatgaggttgtcattctgccccaccacaaaagatctttttgtagaaatgttctaattgttgtgccagcaaagaaccttattttgttatgctataagaatattgttctgttccctgtccctccccttctattatatgctttactgggatcgggaatgttccagagtaatgaatgctgtttagctttatatcttcctccattatgtttattcaaagttttctattttttctctacatgctgccttcttaattcaactaatattcaatcaactatcttgcttacatttttcatatttatta

SEQ ID NO: 47899 - DNA, 402 bp, Glycine max
  unsure (1)..(402): unsure at all n locations
  Clone ID: LIB3107-018-Q1-K1-F10
gtggtcatcataatangcctgtccgcgatttttctgggggaggcttacatttactgtatgaaagggattgcagacacccattttgccctcctgctttgtggctttctcctgctagaaaaagccggccaccaattgcagttgctgccagaactcatgaagttttagcaaccaacctgagatctgatgattcatcagcttcactgagtgtaggttctgttgtcaccattgttcctcatgttttcccttttgaggaaagagttgagatgtttcgtgaatttatcaagatggacaaagcatcccgaaaaatggctggtgaaatttctgaacctggttcacgggccattgagatagtaatacgtcggggccatattgttgaagatggatttcggcaattaaattccc

SEQ ID NO: 47900 - DNA, 132 bp, Glycine max
  Clone ID: LIB3107-018-Q1-K1-F11
ttttcacctttttttttacccccctcattttatttcccccccttttttttaaccgcccgcccccccctttattttttttttttttttttttttttttcctcttctctttatcttcctttttctacttttttt

SEQ ID NO: 47901 - DNA, 332 bp, Glycine max
  Clone ID: LIB3107-018-Q1-K1-F2
tttacccattatggaaattgagtggtaggggggattatttttttaaccagtcttctggtggtgggcttaaaactttttggattaaaactgactgggatactcaaattgggaaataactagacattggagccattggttatattactcattatatggttccaaaatcagggattcatgcttggaacttttgattttgcagagaacactcgtgcagcatatcctattgagtacatacccaatgctaagataccgtgtgttgctccccatgcaaagaatgtcatccttctagcttgtgatgcatttggggtgctccccccagtaagcaagctgag

SEQ ID NO: 47902 - DNA, 243 bp, Glycine max
  unsure (1)..(243): unsure at all n locations
  Clone ID: LIB3107-018-Q1-K1-F3
ttaacatnnttnctnctcactactacaaaatactcaatgtaaatcatccacccactcatnaatatattatttaactcttataacaaaaaaacaatcaaatcccacccagataagaaccttcaataccctcttaataaacaacactttcaacccaaatttaaacaaatttcttatccctatcatctccttattcacccaaaaaaccgccagatctatgacttttacngtcactattcccttaac

SEQ ID NO: 47903 - DNA, 354 bp, Glycine max
  unsure (1)..(354): unsure at all n locations
  Clone ID: LIB3107-018-Q1-K1-F4
tctccnaaaaaagaaagcggtttaggcctttttaatctcaaggactggaaccttgcgcttctttcccgtatcctgtttgactttcattgtaaaaaagattctctatgggttcggtgggttcaccattactatttcagagggagcgatgtgtggaattacaattcttcttcatcagattcagttttgataaagaaaatcattcaaataagggactttattatctctaaagagctaagtacggaagaggccaaaaagaggattcaatcatggagcaccaatgaacaatttcttattgacaaagtctatgaatatattagaggtgtcaagcctactgttaattggtcttctgttata

SEQ ID NO: 47904 - DNA, 413 bp, Glycine max
  unsure (1)..(413): unsure at all n locations
  Clone ID: LIB3107-018-Q1-K1-F7
acacctgcaaaaacacttcataaaaccgttctactntataattccgcgctcttttaacacccccgtcttcttttcttattctctntttatatttnttttttctctcacctcaaaatctcttncttccatattaacctcccttacataaacttttttttttctgcaacaaataaaaacgctgcaaaatgtacccacactttagctacacttagtcaaccaccacctagacctttgtcatgggactctcacctcttaatgctcaatttcatgcttcttaaatcgctctcccccctgaaaacgatagctacaaatattgaccaaacttctccttcaaccccttcacttccaactaaactttttctataccaaacttcaaacagagataccccttaattaccaataatgataaacta

SEQ ID NO: 47905 - DNA, 384 bp, Glycine max
  Clone ID: LIB3107-018-Q1-K1-F9
accagcattttctcaaagctgccatgatatgatgagcatgtggaagggaatggtgtcatcagatggaaaatgtgagattgacatttggcctttccttcagaatttaactcgggatgtaatttctcaaacagcatttggaagcagctatgcagaaggagaaaaattttttcgaaatctgagaatgcaggggtatcttttaatggcaggaaagtacaagaacataccaatattgcggcatctacgtacaactaccaccaagaggatggaagcaattgaaagagagatacgagattcaattgagggtatcataaaaaaacgagagaaagccatggagaatggtgaaacctctaatgaagatttattaagcatacttttggaatcaaa

SEQ ID NO: 47906 - DNA, 428 bp, Glycine max
  unsure (1)..(428): unsure at all n locations
  Clone ID: LIB3107-018-Q1-K1-G11
agaagggggaaaaaaagagtgaagaaaagaacgcataaactgaggtaaaatatggcagggcgcgagggttaaatacnatcgtcaactcaaaatatggggtgaacaaggacaggcagcccttgagaagtctagtattggcttacttaactgttgttctactggttctgaaacacttaagaatcttgttcttggtggggttggaagcatcactgtagttgatggatctaaagttgaagcgggagacctcggaaacaattttttgggtacatgacttcttgttgtacactggttatgtgtttgtaaatgtcttttggttctgatttttgtcccatgtttgtagtggatgaagcaagtcttgggaagtcaaaggcaaaatgtgtatgctcatttcttcaagagctgaatgatgcagttaaagcaaaatttgt

SEQ ID NO: 47907 - DNA, 411 bp, Glycine max
  Clone ID: LIB3107-018-Q1-K1-G12
cagaaggggggtgtttgtaacgatgaagaagaggacaataacaacgccaattttaataagaagaataacaattataacgttgtggatgacggagatgctggaggaggaaagtctttcggttcagtgtcgtgttccatttgcctcgaggttgttttctataatggggatagatcctggtctaagcttcaatgcggtcatcaatttcatctcgattgcattggttcggcattcaacataaaaggagcaatgcagtgccctaattgtcggaagattgagaaaggtcaatggctatatgctaatggttgtcggtcatatcctgaatttagcatggatgagtggactcacgatgaggacctttatgatcttagctactctgagatgtcctttggagttcattggtgcccttttggc

SEQ ID NO: 47908 - DNA, 361 bp, Glycine max
  Clone ID: LIB3107-018-Q1-K1-G7
gacaaggcacaggcttccctccctcctttgaagaggcaaattataagagggtggtgtgttgtgttgaaataccaagctagcaaagatgtttggcatcttaggaggcaataaggggcacaagatcaagggtactgtggtgttgattagcaagaatgtgttggacttcaacgaaatagtgtccactactcagggtggtttggttggtgctgccaccggcatcttcggtgctgccaccggtattgttggtggagttgtcgatggtgctactgccatcttcagtcgcaacattgccatccagttgatcaatgccaccaaagactgatggacttggaaatgggaaagttggaaagcaaacctattt

SEQ ID NO: 47909 - DNA, 191 bp, Glycine max
  Clone ID: LIB3107-018-Q1-K1-G8
cataattttcttcttatacaacaatacccttttatacaccctttttaattcctatattgacttatttttcttttcaatcctccataaaaaaacattcttattccatacctcataaactcattttcactacttatccttcttacatccgaaataacaattttcttaaaaatctacttattaaaacaaacaac

SEQ ID NO: 47910 - DNA, 288 bp, Glycine max
  Clone ID: LIB3107-018-Q1-K1-H1
ccatttcattataatactacataattctcctccctctacatccaccttttcttatactataattcctatcatccaacatcctcacacattttatacttcacctcttacaaaatcatactccaattccccttaacttttatacttcaaattacctttttatatcatcaattacactcctctaacaatacacctctcctattattactaactcacccatattcaaaatttccacccatatatcactccaacattcatcctacatacctctctttttatttcccaccttac

SEQ ID NO: 47911 - DNA, 444 bp, Glycine max
  Clone ID: LIB3107-018-Q1-K1-H10
cccacgcgtccgacatacttgtgatgataaatatgtgacaattataaaatatttttatgagagtaatagtcagtgcaaagaaagactattatttgacaaaactaattgtcaatatttgatcttgagagtaccaattataaaataatttttctattcaaagattaggaactaacgttgtgccgagtatcttgtggtgagtctattatttaaaatattagttgtcttgtttatatatatatatatataaacttgtttgttatttgtaaagatgttaaatattaggaatgattctttgttattgactaagtagatatatgacttatgacagaaataatgtcaatgtacaaaatattgattttgatacaatattagtatatatcacattatctatgggtgtaggtggtttggaaattaacaatgactgatttcattctactttttttt

SEQ ID NO: 47912 - DNA, 120 bp, Glycine max
  Clone ID: LIB3107-018-Q1-K1-H12
taagtaataaaataatctatgataaaaagatcacaattttctcattaaagaaaatctttcttccttcacggatgattaaataaaaacgaaacacatcataaaaagctttaatccacttct

SEQ ID NO: 47913 - DNA, 370 bp, Glycine max
  unsure (1)..(370): unsure at all n locations
  Clone ID: LIB3107-018-Q1-K1-H4
catacttntnatnccaattatttaacacttataaaatatttttatcccggtaattttcaaaccacagaaacactattatttcacaaaactaattntcaatatttgatctttaaagtaccaattataaaataatttttctattcaaacattagctttttactttctgcccaatatcaaatcataaatctattatttaaaatattacttgtcttctttatatatatatatatataaacttgtttcttatttctaaaaatcttaaatattaccaatcattcttttttatttactaactagatatattacttatcacacaaataatctcaatttacaaaatattcatttttaatccatattaatatatattaca

SEQ ID NO: 47914 - DNA, 385 bp, Glycine max
  unsure (1)..(385): unsure at all n locations
  Clone ID: LIB3107-018-Q1-K1-H5
atacaacatacttatgatgataaatatcttacaattattaaatatttttatcaggattatatttaaagcggggaaagactattattttacaaaactaattgtcaatatttgatcttgacagtaccaattataaaataatttttctattcaaagattacgaactaacgttgtgccgagtatcttgtgatgactctattatttaaaatattaattgncttgcttatatatatatatatataaacatatttgttatttgttaacatgttaaatattaataatgattctttgctattgactaaatagatatataacttattacacaaataatgtcaatgtacaaaatattgattttcatacaatattaatatatattacattatctatg

SEQ ID NO: 47915 - DNA, 257 bp, Glycine max
  Clone ID: LIB3107-019-Q1-K1-A3
ggatcactcctctaggctcgtgttggaggtggcgcagcattttaatgagggcgttgtccgaaccattgccatggattccaccgaaggggtcgttagaggttgtcgcgttctcaacactggctcccctattaccgatccattttttagtgctacctttggccgtatcataaatgtcattggagatcctattgatgacatgcgataaatcaattccaatcatttttttcccattcatagaaaatcttttgctttttttt

SEQ ID NO: 47916 - DNA, 342 bp, Glycine max
  Clone ID: LIB3107-019-Q1-K1-A4
gataaagaccacaggaaaaaaggatggcgttttaataaaagagaagctcagaattgaatcgataaatcgccatgaatcccaaaatcctcttcgggtttgctcttcttctgaatctcgtatccaattcgttccaaaaccctaaccctaaaacccctaaatcaacgccgtcgcaggctcacgtggagctcgtcaactactgcttacccgtcggtcttctccccgccaccacggtcttgggctacgccgggaaccggacctcctgcgaggttaccgtgcagctcaacggctcgtgcaagaacacgctcccgccggacaactacttcggcacctattccgacacca

SEQ ID NO: 47917 - DNA, 211 bp, Glycine max
  Clone ID: LIB3107-019-Q1-K1-A5
cattaaatcaaaatccttctgtcggcataaaaaacaaatcagaagcaccacccaccttattctttttttaacaaattaaaaattattattctccacataacattattttttcgtcattttatttaactactatttgcacccacattcttcatttccactacaaatttccttctaaataacaatacttctcatttaattttaaaatattatt

SEQ ID NO: 47918 - DNA, 383 bp, Glycine max
  Clone ID: LIB3107-019-Q1-K1-B11
ggtggtcacaactcacaagctcacagagcaggaggactgttccaatacggaatctaaggcaaagcaaaccaaacatcttgaatcatgggttcaacaggtgagactcagattaccccaacccacgtatctgatgaagaagcaaaccttttcgccatgcaactagccagtgcttctgtccttccaatgatcctcaaatcagcacttgagcttgatctgttggaaatcatagccaaggctggccctggtgttcatctttcccccactgacatttcttctcagctcccaacacagaaccctgatgcacccgttatgttggaccgtatattgcgcctattggcttgctacaatatcctctctttttctctccgcactctccctgatgg

SEQ ID NO: 47919 - DNA, 173 bp, Glycine max
  Clone ID: LIB3107-019-Q1-K1-B2
ggatcactattcgaggctcttgttctatgtggcgcgaaattacgaggagaactacacccacaccacttccatccatgctacctaacttgatagtagataccgtcccatacataacactagctcctctatcacccattcatttcctaagcctacaatatgaccattcatatata

SEQ ID NO: 47920 - DNA, 379 bp, Glycine max
  Clone ID: LIB3107-019-Q1-K1-B3
ggtttctgatttctcactcttcgtttctcgggcgggtcatcagcgtgtgtctcagccatggcgtttccctacatggaagccgttgtcggatttatgatattaatgtacatttttgaaacttacttggatgtgcgacaacatagggccctcaaacttcctactcttccaaagactttagaaggtgttatcagccaagagaaatttgagaaatctagagcctatagtcttgataaaagccacttccattttgttcacgagtttgtgacaatagtgacagactctacaattttgtactttggggtattgccctggttttggaagaaatcaggagattttatgacaatagctggtttcaatgctgagaatgaaatactgcata

SEQ ID NO: 47921 - DNA, 280 bp, Glycine max
  Clone ID: LIB3107-019-Q1-K1-B5
tcattccactccaacttaccggctgaaaccccatacattagcctctccacatcttcactgcttcttccatacaaatcctaaaccagactgaattcacaaaaaactttaccatgtcggacgatgatagatattataattaattttatctcacttctccctaagttgtcactaattacaacatctccgcttatattattaacaattcctttcatttatttattttttaatttaaactaaacacaaaaattgtttaccttttctataaaaggtattcttatat

SEQ ID NO: 47922 - DNA, 372 bp, Glycine max
  Clone ID: LIB3107-019-Q1-K1-C1
gtcacgaacgccattcagtgttttctgagaaccgtagcacgatatgtatagatcggaatgaatttacttcagatactgtcttctggcaagaacaaattggtcattactggagactgatgaatattggggagacagaaatacgcaatgtgatggatatgaatgcctattgtggtggatttgctgttgcgctcaataagtttcctgtttggatattgaatgtagttcctgcaagcatgaaaaacaccttatctggaatttatgcccggggattgaatggaatttatcatgattggtgtgaaccatttttaaattactctttgacatattatttttttgttgcccactacccttttttccacttcaaaacaaaaa

SEQ ID NO: 47923 - DNA, 363 bp, Glycine max
  Clone ID: LIB3107-019-Q1-K1-C10
gtttgaaccaacagaaaacgaggtcgctcaggaggggatttggctcatgcccttcccctggggtgcttggttttggccattattgtgatcggttctctgtgaaagtgtgcagggcttttaggactgaggatggtggggatgtaaaggagaaaaagttacgaaatttgaagaaaaatgaagagaaaaccaaaagggaaagtgggttttggagttccctcaagtctatcttgttgaggaatttcatggtgggttcaaaatcagatgatgagtatcgccaagctgtggccaaggtggagggtctcctatcctcgatcgccattcaaaatggaagatatattgtgactatgatgagcacttgggtca

SEQ ID NO: 47924 - DNA, 394 bp, Glycine max
  Clone ID: LIB3107-019-Q1-K1-C11
ggacgaggaacgcagagtgaatctgagcagggagacgtgtccggggttcatatcagacggttacgggagggtgacggggacgaatgaagcatacgagaagatgatggagggtgatgagggacagggaccagtgttgctggtgaataaggtgaacacagtggttccgcacgcgtcgttcacgtgcttggtgagggtggtgcaatacgcgtgtgggagggagagaagctctctcacggtgccctgcgacgtgtggagaatggactctggtgggtttgcatggagattagacgttgaaactgcgcttagcttgagactgggttactaattcacaaaggtatcacgaactccgaacgcaaaacggcgtcggtttatggtcatagaactatatataact

SEQ ID NO: 47925 - DNA, 343 bp, Glycine max
  unsure (1)..(343): unsure at all n locations
  Clone ID: LIB3107-019-Q1-K1-C5
ggggttctattttgtaattgtttgttgttgaaactggtcgttctttttttgttgtcctgtgttcgtntttgttttttctctcacctaaaaatgtcttgctccggtggtaactgtggttgcggaagctcctgcaagtgcggcaactgctgctgaggctgcaagatgtacccagacttgagctacactgagtcaaccaccaccgagaccttggtcatgggagtggcacctgttaaggctcaatttgagggtgctgaaatgggtgtgcccgcttaaaacgattgctgcaaatgtggaccaaactgctcctgcaacccctgcacttgcaagtgaagtgtttggagag

SEQ ID NO: 47926 - DNA, 275 bp, Glycine max
  unsure (1)..(275): unsure at all n locations
  Clone ID: LIB3107-019-Q1-K1-C7
ggagacgagggtaaggtcgcgttgtgttgcgtcgggtggtgcgctgttcctctgtctgtcntttttgttttcagaccaaaccctagctccgcatcgcaaccatgtctaccaagcaaggtggaaaagctaagcctttgaagaaacccaagtctgataagaaggattacgacgagggtgacatggcttacattcataagaaaaaggaagaggagaaggcgcttaaagagttgaaagccaaggcgcaacacaaggggagcttttgaggttctgggctc

SEQ ID NO: 47927 - DNA, 355 bp, Glycine max
  Clone ID: LIB3107-019-Q1-K1-C8
ggtttctgatttctcactcttcgtttctcgtggggttcatcagcgtgtgtctcacccatggcgtttccctacatggaagccgttgtcggatttatgatattaatgtacatttttgaaacttacttggatgtgcgacaacatagggccctcaaacttcctactcttccaaagactttagaaggtgttatcagccaagagaaatttgagaaatctagagcctatagtcttgataaaagccacttccattttgttcacgagtttgtgacaatagtgacagactctacaattttgtactttggggtattgcccctgttttgaagaaatcaggagattttatgacaatagcttgtttcaa

SEQ ID NO: 47928 - DNA, 294 bp, Glycine max
  unsure (1)..(294): unsure at all n locations
  Clone ID: LIB3107-019-Q1-K1-C9
ccggggcgccgacgcgtacgacagccncanaacaccacaaaaaggactttctaatttctcactctcaacttatggctcgcgtgattattaaatgtggcaaccatcaccttcacctacaactaaacctttataatatttataatattaatgtacatttctcaaacatacttgcatttccgacatcataaaaccctcaaactacttactctttcacaaacttaacaaatcattatcagccaacaaaaaattaataaaactacaacctatattcttaataaaaaccactcccatatt

SEQ ID NO: 47929 - DNA, 271 bp, Glycine max
  unsure (1)..(271): unsure at all n locations
  Clone ID: LIB3107-019-Q1-K1-D2
gggttatctcttgccattgattgacactataatatttgacgacaaggcctcgactcatgtccatgtcacataccactagtacctaagcaacctaaatgcttgccatgagtacgtatggggagtcattgcactagcgtgcctctacgaccatctctcctatgcgagccaatataccagcaagcagtatggagggtatatgatngtactcatgctaaagaaattattttagtattggaattattttttattattgaaattaatatttttttta

SEQ ID NO: 47930 - DNA, 277 bp, Glycine max
  unsure (1)..(277): unsure at all n locations
  Clone ID: LIB3107-019-Q1-K1-D6
aaaccatacccattnctacttgatcagccacattattactatgatcactcatacctacaaccatcccatcattcaactctataaaccattcantttttttgcttcaaaaccgttctttgaatctacccaataatatagtttccttcattgatcaagcatccaaaccccctattgttatggaaatttcaaatgtccatcctcaatttaagcctcctttttttgtgttcactaatactccataaatattgaactctaaatacttcattattgtaatcat

SEQ ID NO: 47931 - DNA, 373 bp, Glycine max
  unsure (1)..(373): unsure at all n locations
  Clone ID: LIB3107-019-Q1-K1-D7
cattcatatcttttcaatgggcgaaaaaaaataatggggtggctatcctacantggggagttctaagtactggtggatttagtccataatcttcatggtctaaaattcctctgctagctacattttacatttgcttgcatcgtgattgtaaattttttaattttatatatacatacatatatataggggctatggggcgttcgggttctactacaaaaagacatcattttgaaattccgaccacgtcaatgttatcggtgtttagcgaagttcataaaaataacatcaattttataaaaaaataacttttacaacatcacatttttaatggtttttctaaggaagtgcaaaaacattcctttacgattcccaa

SEQ ID NO: 47932 - DNA, 218 bp, Glycine max
  unsure (1)..(218): unsure at all n locations
  Clone ID: LIB3107-019-Q1-K1-E1
aaaagggacaccaccaacaccaacaaagaaaggggaaaagaaatactcaaacacaaaaagcaccctcctctcttcttcttcccctttttctctcttcttcactctcacccttatctttttcttcaaatccaaaaacaaaccatccccatttcatttcaaaagaaaccctnttttcttcaaagcttctcggaaccagtgtgcttttttatttcttttaa

SEQ ID NO: 47933 - DNA, 303 bp, Glycine max
  unsure (1)..(303): unsure at all n locations
  Clone ID: LIB3107-019-Q1-K1-E10
cgacggctncnaaaacaccacagagggtggtgtgagtagtgagaatgaantttcaagggttgccggtatttagcagggcgtgggatactctctcncactacnccnncngacgtgtgtaggttttccgtcttatcaaagattttccgttcggccgctgaatcggactcttttgtggaaacgttttcttccttccgattaccattccatcatttcccagtctcctttgcctctcaactattctttcaagaaggagctctatctcgctctctcggatcgccctatcatcatctatcatggtaaaaa

SEQ ID NO: 47934 - DNA, 398 bp, Glycine max
  unsure (1)..(398): unsure at all n locations
  Clone ID: LIB3107-019-Q1-K1-E11
cactaatctcatanattcgggccgttctttttctaaaaatcgccaaaccttccaatanattctctatttaaatccacatatttaacttttaattcatttctcatcaaattacgtcatataaatcacaatatttctttcatctaaccaatttttttctgatatacttaacactctcatttatatcattctttttataaaaaacactcacattttttttaatttttatctattccacttacttttctttatcctaaaaattaattatcctcttatattttcaactcttctatatattttacatttttcactatactaaaatttcattttactttttacaaattttaaaattttttacatattcttatttctctattcattttcttcttttaaaacctttt

SEQ ID NO: 47935 - DNA, 412 bp, Glycine max
  unsure (1)..(412): unsure at all n locations
  Clone ID: LIB3107-019-Q1-K1-E2
gtgtgtgatttggtttgttgttgtaggctcgttctttcttcttttggtggtgcgtgtgtttgtgtttgtttttttctctcaacctgaaaatgtcttgnctgcggtggtaacctgtggttgctggaagctcctgcaagtgcggcaacggctgcggagggtaagattttcgttgtaacattgtttttttcttgggaaaatagagtttttccgggaaaattttctttttggatttttaattgttattatggttacccttttggttcaattgcatgaaaaaactatgctttgtttattttcttgcatgggggggagattctgatcacccgaaccctttttttgcttttacagaacatgtcgaatttgttttcttttcatgggatggttttctggggtgttatatgcttggcttttt

SEQ ID NO: 47936 - DNA, 275 bp, Glycine max
  unsure (1)..(275): unsure at all n locations
  Clone ID: LIB3107-019-Q1-K1-E4
agggccattgttgttgctattatcatccncanctgcgttgattctcaccgcagacagtgagccatggccgtctgaaagaacaagcgcatctccaaggggaagaagggtggcaagaagaatgcagctgatccctttgccaagaatgattggtatgacattaaggctccttctgtttttcaagtgaaaaatgttggcaaaaccctcgtctctcgtactcagggtaccaagattgcttctgaaagactcaagcataaaatgtttgaagtctccttggc

SEQ ID NO: 47937 - DNA, 403 bp, Glycine max
  unsure (1)..(403): unsure at all n locations
  Clone ID: LIB3107-019-Q1-K1-E6
aatgcataaaaagcaanataatgtacgtataatttgatcaacacgtgcaaatntaangcatntatattcccccttggggtttgagctaaaaatccaaatactattgtcaaatgagaacttcaatagttcaagtttttaacctaccaacatttttggcatctgagaagctaaggcctggaattcccctttgttgttggaacccataacagactgccatgtacattaatgcccttgctacatcccctctaaccttaangaggtaacatctcaaacgttgttcaaacaaaaaataaattaattgtccatgttaaaaaacattataaccaattataaatataataaatacatccttttaaactttcaccatctatccaagatcctttaaacttttttttttgttttt

SEQ ID NO: 47938 - DNA, 443 bp, Glycine max
  Clone ID: LIB3107-019-Q1-K1-E7
gaaccttttcttatcacatcttgatatcgggttgagaagggacccaagtaatttgcgcccaaggatcaacaaacttgattcaaccaaggacagagaacaaaagtctgccgggtcttattattaccttgatgactgagttcatactttggggctgttctttcaccaacacaaccttgcatctgtttgagcttttcatgggatctcagatttggttcagttcatgccttgaaatataagattgccatttttgccgatgaaagcatctttcccaatgaatagaggagcctgcatgcaattgcaagccctatgttggttggtgcattttgtatatttacccttatatttagtgcagttactcatcaccaggtttgctacgacttgtgtgggtgaattttaatattacatgagttttatattggtcatggttttcatttcatgtccta

SEQ ID NO: 47939 - DNA, 166 bp, Glycine max
  unsure (1)..(166): unsure at all n locations
  Clone ID: LIB3107-019-Q1-K1-E8
cccgggccgacccacacgaaacaaaccganaanacaacacaacanagcgatattctttacttatactcctatatcatcggcgcgcctttttattaatatgatcccacaccaaaccttcactctancttcaactttccactcctcttccattataccttcctattta

SEQ ID NO: 47940 - DNA, 334 bp, Glycine max
  Clone ID: LIB3107-019-Q1-K1-E9
ctattatacgcagtgatggaaaagtgaggagtgagggcaaatattgtttgaaagattatgtgggccgtgacaataagaatgagacttcaaccttacaacgtcatatggggaaatgtgatgtatatttgaaggcattctaatagtgatgttggaaatattattcttgatcatgctgggagattaagaaataaaaaaattgatcaaagtgtggtacatgagatgatatctatgatgattattgagcatgatcttccattctcttttgttgaacataggagggttaaagagttattacaatatttgcatcttgatatgaaagttccctttaagcatg

SEQ ID NO: 47941 - DNA, 332 bp, Glycine max
  Clone ID: LIB3107-019-Q1-K1-F10
gacccaagtgaccgttgagtattacaatgacaagggtgccagggttcctattcgtgtacacaccgtgctaatctccacccaacacgacgagactgtcaccaatgacgaaattgctgctgacctcaaagagcatgtgatcaagcctgtgatcccagagaagtaccttgatgagaagaccattttccacttgaacccttcaggccgttttgtcattggtggccctcatggcgatgctggtcttaccggccgcaagatcattatcgatacttattgaggatggggtgctcatggtggtggtgctttcttctggaaggaccctaccaaggttgata

SEQ ID NO: 47942 - DNA, 287 bp, Glycine max
  Clone ID: LIB3107-019-Q1-K1-F11
ttacagtaaggggtgctgtgacaacctactacggcgggtgctctatagtactactgtggtgctgtattcttcgacgttcggaaatgcttgactttgagtggtggttgcttgtcctcttgagggtgctacctcgctgtgatgaccactacattttctgccctaacgactatcccatctgcaacacttatgcttgaacttgtctcaagagcaagaacaacctattctgagtgaaggcattgatgcgtactctggcttaaccccattggacctttgtgcgtaagaacaag

SEQ ID NO: 47943 - DNA, 346 bp, Glycine max
  unsure (1)..(346): unsure at all n locations
  Clone ID: LIB3107-019-Q1-K1-F5
ggcacttcatcatcaacttcatcctattctttgaggttgtcttcttccaagcctcacagtgtcactataaggaattctcaagctgaagggcctataagaaggccagtggcacctccaataagagaaccatcatcatcatcatcaagtgcccctcagcttcagaagccaacacttccttctcagcctccaccatccccttcacccccacagaagccagctactgttgttggagatgataagaacgtcattacgttggagtttcagaggcaaaaggctaatgagttgcaggaatacttcaaacagaagaagcttgaacaagcagatcagggtcctttctntggttcat

SEQ ID NO: 47944 - DNA, 291 bp, Glycine max
  Clone ID: LIB3107-019-Q1-K1-F7
gaagggcactggtaagtggactgttcagcaagctgctggattatcaattgctgctgccactattgaagcatcattggatgcaaggttcctgagtgggttgaaggaggaaagagttgaagctgcaaaggtctttaaatcaggtggtattggtgatatcgtgactgatcaacctgtagacaagaaaaaattggttgatgatgttaggaaggctctttatgcagccaaaatctgtagttatgcacagggaatgaatttgatccgtgcaaagagtatttaaaagggttgggattt

SEQ ID NO: 47945 - DNA, 359 bp, Glycine max
  Clone ID: LIB3107-019-Q1-K1-G1
agggctgcgagggagtgctcctgatactcaaatacaggggtggtgagaactagcttatactggattcctactggataagctacttgtccttacaagtcccatgagttgtgaacgtcaaaggactacctcacgattaccgagcattcattctatgttctgaccaatagttacttaagctcaaccccaatgtatatgtatccgtgcttgctgctcgagatccaagaactgtagactctgttgccattattatggatttggaagataaggattctgaccctatggtgcgtgcgcgtgctattcaccaaaaagccatgcattttcgagctgcctctatgggttccttatatatacagactttt

SEQ ID NO: 47946 - DNA, 438 bp, Glycine max
  unsure (1)..(438): unsure at all n locations
  Clone ID: LIB3107-019-Q1-K1-G2
ctgcnataaaaccacagaaggttggctcattaccactaatcttnttnattcgagtaagtcttactctaaaaatcgagaaatctttcaatatattctctattataatccacatattttatgtttaattcttttttcaacataaaaaggtagagaaatcacatattattttttctatctatcctatatattactctaacttcttatcatatgttattaatatcttactttataaatttaaacacttacaatttttttttaattttttctattccacattctttcttttattccaatttatttataatctcttatctattttatttttcttttttttttttttcattatttactatctttttatttttcttttacttttaaatatatcatttattcttattttatattttattatttttatttttttatatttttatattt

SEQ ID NO: 47947 - DNA, 335 bp, Glycine max
  Clone ID: LIB3107-019-Q1-K1-G7
gggcacatgaccactaatcttgttgattcgggtggggcgtactctagaaatcaagaaatctgccaatagatgcgctagtaaaatccacatatttaaggtgtaatgcattgctcaacaaaagagggagagaaatcacaataatgcttgcatctagccaagtttgtacggaagtgctaaacagggtcatcaaaggcatacttaaaaaggaaaacactcacaatgtttttgagtttgatcgatgcgacatacggttcttgatccaaaagataataaaccccgagagaggtttcaacctgctagagatttcactgtcagactagactaaaggtggtgtg

SEQ ID NO: 47948 - DNA, 303 bp, Glycine max
  Clone ID: LIB3107-019-Q1-K1-G9
gataccaaaaacaaaacacaagccaagtgaaagttagaaaaaataaaaatcaaagagcataatgtcagggatcattcacaagattggggagacccttcatgtgggagggcacaagaaggatgaggagcataagggtgagcaccatgctggagaatacaaaggggagcaccatggtgaacacagtagtgagtacaaaggagagcatcatggtgaacacaaagctggaaagtaccatggtgagcacaagccagagcacaaagaggggttcctagacaaagtcaaggacaagatccatggttaggg

SEQ ID NO: 47949 - DNA, 326 bp, Glycine max
  Clone ID: LIB3107-019-Q1-K1-H1
agggctgcgagggagtgctactgctactcaaatacaagagggggagaacaagctcaaactgtattcctactggataagctcctgttccttccgagtccgatttgctctcaacctcaaaggactaccttacgattacctagcagtcactttattttctgaccctgagtttcttaagctcacccccattgtatatgttcccgtgcttgtcgatcgagatatcaaaattgtacactctcttgccattattatgtatttggaagataaggatccttaccctcctgtgcttgctcgtgatattcaccaaaaaaccatcaattttcaagctg

SEQ ID NO: 47950 - DNA, 272 bp, Glycine max
  Clone ID: LIB3107-019-Q1-K1-H2
ccgaacggttccaagaggactacaaagggggacccacacaactcatcaactggaagagtgaggctatctgtacttggagttttattggatgaggcaatgggggtgacagtgtacatgactagtgggagtttcaggggcactaccactttcaggcctgtagatgctgtgtactttacaatggtaactctgggcactattggatatggagatattggtgctgactccacgattaccaagatctttacatgtggtttcattttggagggatttgg

SEQ ID NO: 47951 - DNA, 306 bp, Glycine max
  Clone ID: LIB3107-019-Q1-K1-H9
gtcaaattcgaaatcaaagaccgactcatccgtctggttgttctgtccaaacaaaatgactgtgttttggatttacaagacgttttcaagagattctcgttcgacagcatttgtagattctccttcgggttggaccctatgtgtctggagctgtctctgcctatatcggagtttgctatgtcctttgacttggcgttcaaactgtcctcggagagagccatgtcgggtgtcccctctaatatggaagatcaaacggttccttaacgtgggctcctagaagaagctgagaaaagctattaaaatgat

SEQ ID NO: 47952 - DNA, 211 bp, Glycine max
  Clone ID: LIB3107-020-Q1-K1-A1
acaagaggtctttcaagtatgcctgggtgctggacaaacttaatgctgagcgtgaaagaggaatcaccattgatattgctttgtagaagtttgaaacaactaagtattattgcacatttattgatgcgcctttacatatggatttcattaataatatgattactgggacatcccaagctgtctgtgcttttcttatcattgattctaccac

SEQ ID NO: 47953 - DNA, 361 bp, Glycine max
  Clone ID: LIB3107-020-Q1-K1-A11
tgaggggaagaacttgatggttgacattcgaactgcaagccaacaagtcactcggggataccaacatctctatattcaacggattttatttattgccaaaaactggcagcatattgaaatggtttcatgctcatgagtatcaggaatcatcatctttctcacaatccttgtgtgttgaataaccatcctcagtggttctattgtcattcaagtataaagtttgttttgttccccttggaaacatttgaatggttttggacatggataacatgtttattataacatctaaattttcatcatataatttcatgttgaaaaaatacccatggtatcttttatttttttcccagttcacttataa

SEQ ID NO: 47954 - DNA, 307 bp, Glycine max
  Clone ID: LIB3107-020-Q1-K1-A12
catcaatccagctgaagttgtctgatgccgcgcgcgttgtttctcgcgtgtgggcaccatcatacaatccgagatgttccagcattcattgatgcatcatgacccggtaacgtaagaagttaccaactgctgtcaatgcgttttcctcccaaacaactcgatcatttgcaccagactatacaacaagcttgcatcgccaactcatttgttatccaaaagttgtatggttgtttaccagattctattttcagtctacttgaaattactatttttatgcttaaacattgattgatctacttatatttta

SEQ ID NO: 47955 - DNA, 235 bp, Glycine max
  Clone ID: LIB3107-020-Q1-K1-A5
aagcttggaggcattgacaagggtgttattgagaggtttgagaaggaagctgctgagatgaacaagaggtctttcaagtatgcctgggtgctggacaaacttaaggctgatcgtgaaaaaggattaacatttgttttggcttggggaaatttggaaccaccaaatattattggacaagtattgattccccttgacattaggatttcatttagaatatgatttctgggacattcca

SEQ ID NO: 47956 - DNA, 209 bp, Glycine max
  Clone ID: LIB3107-020-Q1-K1-B1
ctagactacggtaggctcttacatgcttatgcattattgctctgactatactactaagcttattaatcctcatcatcatatatagcatgacttcattattacagttgcttatgctcatggagctatataccctattatacattatcatcctcaactgtatgaagatcttgtcttagcaagagtgtatgaccattaacaacctatcatat

SEQ ID NO: 47957 - DNA, 381 bp, Glycine max
  Clone ID: LIB3107-020-Q1-K1-B11
cccacgcctccgcatttgtgtatttgagcttaggaatagaagtagagggaactactgaagggatgacgaagacggaggcgggttggagtatgacttcttgcacctcttttgcatcctttctcatttcttcttcttcatttccttcattgtgcttcgcgcaaacccactcaatcacatgtaaacaacgcttcccatttccttctgtaaagggaagaagaaagttctcaactttatcattttcatccaccaaaaagctcgttacaagagccgctgattacaaattcccagaccctatttccgaatttgcagatgccgagactcaaatattcaaaagccaccttcttaaaaagctctcatagaaagatatgtatggagaatcaa

SEQ ID NO: 47958 - DNA, 396 bp, Glycine max
  Clone ID: LIB3107-020-Q1-K1-B5
gaatggggcagacgccgtgactagacacgcatctcactcgcgccatcttagggtttctccttttgtttcgcaacatggttgccgctaagaaaactaagaagacccatgagagcatcaacaacaggctcgctcttgtcatgaagagtggcaaattcaccctcggttacaagaccgttctcaaatctcttaggaactccaaaggaaaattgattatcattgctaacaactgcccccctttgagaaagtcagagattgaatactatgctatgttggcaaaggttggagttcatcattacaatgggaacaatgtggatttgggcactgcatgtggaaaatattacagagtgtgctgccttatcattattgatcctggtgattctgatatcatcaagacac

SEQ ID NO: 47959 - DNA, 298 bp, Glycine max
  Clone ID: LIB3107-020-Q1-K1-B7
tctgaaaggggttctagtgtgtgattgtctgttgctgtaactgtatgttcttctcgcggtgttctgtgtttgagttagctttttctctcacctgaaaatgtcttgctgctgtggtatctgtggttgctgaagctcctgctagttcttctactgctgctgaggctgcaagatgtacccagactagagctacactgagtctaccaccaccgagaccttggtcatgggagtggcacctgttaaggctcaatttgagggtgctgaaatgggtgtgcccgctgataacgatggctgcaaatgt

SEQ ID NO: 47960 - DNA, 288 bp, Glycine max
  Clone ID: LIB3107-020-Q1-K1-B8
gatctctgcggatgaataaatcgatttcaatctttgcagtatcgaacatctctgcacacttcattcccaaatcccactcgtttctctgttggttctgcactgatttgaggaggttgaaggggaaaagtgggtatcaaatgtggcttagcagaagtgcattcaactctagtttcttctcttccaagcatcagggtacatggatgcacaatccatgaaaaaatagcattgtttagtgcgtaatggatatgcccttaataagggaaaacgcatagaaactacccttggaag

SEQ ID NO: 47961 - DNA, 58 bp, Glycine max
  Clone ID: LIB3107-020-Q1-K1-B9
tgggttaagaaattcaaccaagcaagggtggtgagtgaccgccaagcagaggttaacg

SEQ ID NO: 47962 - DNA, 379 bp, Glycine max
  Clone ID: LIB3107-020-Q1-K1-C10
gggttcttatacctatcatgtctccatctttttataggacatcctttctcttattaaataaaagttattaataaaaataaaaaataattaatatgaaaattaaaatttaaaacaatcaaaagcatcaatatacttactaacaagaattgattgaagaaaaatgatcctgtgaattgttttcttcttatttcatctggatcttctataaatgactgtctttcatttcttcaattgcgcgattctcaccttctgcccccactccgtctactattcttccacacccttatctgaatattatacacttctcacctttatcaaaacctcttgtgtttatctttcaactgcatttattaaacttatatatctaactacttttttt

SEQ ID NO: 47963 - DNA, 427 bp, Glycine max
  Clone ID: LIB3107-020-Q1-K1-C11
gtgcgcctacgcccatcgcataccttcaggtgagcccattcatgaaggccgagcctactagtgacggcatgatcaccacggaggcaggctctatcaccactggtggcctcgtggtgatcctcagcctatgcctcacaatctatgggatttcatcgttctaacgaacgacacccatccactgacccgacactgaccttgacaggccttatgaaggagcccgatcagctccaaactgctgatcagtgggccacactcaccggatgcttactctagccaggcatttcagatgctattaccgtctacttgcttctgtacatgccgaaccttacttactacatcgcctgattaacgtgctgattatctagaaagacatgtatggagaatccattgtgtatgaatggacaatgggtctaaaatgatcctcact

SEQ ID NO: 47964 - DNA, 429 bp, Glycine max
  Clone ID: LIB3107-020-Q1-K1-C12
cccacgcgtccgaaaaaatgtcaagcttccccaacacggtggcggaaggccgcatgtccaggaaggcaccggaaaaatgcactttttctcagacttgcagcctcttgagccagttcttgaaggagaaacgtgcttctgctgattccacctttcgaattggtgggaaaatggaacccatagcgagtaccaagggtttgttaggaagcctgcaaaactctgatggggctttgaaactaagcgcttctgccatggaatttcttccccagcttgtggaaaacccctgcattaagaagtctagatcacagggacctgaaactccccaattgacaatattctatgctggaaaaatgttggtgtttgatgccttttcgccggagaaggcgacggatgtcatggagatggccaccaagttggccttggacaacttcg

SEQ ID NO: 47965 - DNA, 294 bp, Glycine max
  Clone ID: LIB3107-020-Q1-K1-C3
ggtgttgggaacaaaaaagacatttatgtgataggtttgaaacgctctgtatcttctcctcctcatccttggtctagttatatatacctcactcacggattgaagaaggcaacgctcatttcagctcaaatctgcaaactaggctttttcccaacgggttcagtttattcaagttttacaatttcgtggctctgaaactattagatggggaattgtttgcgcaaggctcatgctgatgatgattctgatcatattgtggagctcgcttctgggaatgtgcaacttattactacc

SEQ ID NO: 47966 - DNA, 356 bp, Glycine max
  Clone ID: LIB3107-020-Q1-K1-C5
aattcgagcggccgctttttcttcttagggtggtgtttttttcatgctaaacaactttaagttgaagaattaatcgatgggaacattttgccagtcaatcatgcattgaatgattaatcactactcgcgatgggaatacgcgatttaaataacgaataatccaatattttaaaatctgatctaaaatgactggaaaagtggaaacaagaccagatataatttgatcattttgagcaaatccaaaatctttatagacgaaaccaatcactagttcccaaccatgggttgaatggaatcctatacataaatcacttaatagaagaatcgaaaaagcttttattgtgtcacttaaatta

SEQ ID NO: 47967 - DNA, 451 bp, Glycine max
  Clone ID: LIB3107-020-Q1-K1-D10
gaacgcagaaaggggaaaaaggggattagggtttaggaagcagcgacaacaatggatttcagagcggagaagaaggaatcagagagcaacaccgaaaatgctcatccaacaactttagattcttcttctcaattggcatcggcacttgattccagcaacaaagaaatcgaagaacgacaagctcgtgaactcaaagccggtcttcaccccctcaagcacaagtttgtcttctggtacacgcgccgaacacctggagttcgaaatcaaacatcatacgaggacaacataaagaaaattgttgaatttagtacggttgaaggattttgggtctgctactgccatcttgctcgtcccgcttctttacctagtccaacagatttgcaccttttcaaggaaggaatccgtcctctatgggaggactctgctaactgcaatggtggtaaatggatta

SEQ ID NO: 47968 - DNA, 389 bp, Glycine max
  unsure (1)..(389): unsure at all n locations
  Clone ID: LIB3107-020-Q1-K1-D12
gaaattaattatctggggcagctgcgtcatcctaatcttgtgaaactgattggttactncgtagaggacgatcaacggcttttggtgtatgagtttttgaccaaaggaagtttggataatcatttaattaggagagcttcttactttcaaccactttcttggaacttccgtatgaaggttgctcttgatgctgctaagggtcttgcatatcttcatagcgatgaagcaaaagtgatatatcgagacttcaaagcttcaaatatcttacttgattcgaattacaatgcaaaactttctgattttggcttggcaaaggatggaccagctggtgataagagccatgtctctacaagggtaatgggcacatatggctaatctgctcctgaata

SEQ ID NO: 47969 - DNA, 334 bp, Glycine max
  Clone ID: LIB3107-020-Q1-K1-D5
ggaaaaatccctagataacaaggtggaggagaaaaaggttgaagatgaagaaaagaaagtagaagagaataaatcagatgagaagaaattcaaggagaaatctgcgcctcctgaaatcgtgcttaaagtgttcatgcattgtgaaggttgtgctcgcaaggttcgtcgctccctcaaaggattcccaggggtcgaagatatactcacagattgtaagtctcacaaggtggtcgtgaatggagaaaaagcggatccgctgaaggttctagagagagttcagatgaataaccatataaaggttgaacttctcttctccgattccaaatccaccctc

SEQ ID NO: 47970 - DNA, 424 bp, Glycine max
  Clone ID: LIB3107-020-Q1-K1-D9
ctacataagttttttttatccatctactactctatatttaagtctattctaaaaaaaatgtgcctcattctcctaatcttccattatatcttcttatcaatttacattcaattttaaactcactcttttacctctctacaactcatttttatccacaatcttttatataattcatcacttcatttaaacctctctcccttttttaaacctatttcaattcatcttaactcttaactactacctatattaaacttattaacattaattttatacatcttcactatacaaatccaatcacaaatcactctatctattaattctaaacaattattataataatcaacctttatcatttaattacactattaatataccttcacacatttacctttatttttcaattccacctcctatttttattttt

SEQ ID NO: 47971 - DNA, 354 bp, Glycine max
  Clone ID: LIB3107-020-Q1-K1-E10
gttttggtttccaaaacctcgtttcttctcaatacaaaaaaaaaaaatgctgcagaagctgggggtgatggcttctcatggaggccctcccggactttctttgcagcaagagctggccatggttggctgcaccattaccaagggttgtaaaccattattgccttctcctgtattgaaactagaaattatcagatatgggtcctccctaaatccattcgaggagtctagcatgtcccagaaagatgtgttcaattctaatcagattgtcaacattaacttgtctacttaaaggcctatgcctcattgatggtcataaacctattcaaacccattatatttttgcttttgcattct

SEQ ID NO: 47972 - DNA, 419 bp, Glycine max
  Clone ID: LIB3107-020-Q1-K1-E3
gggagaaggaaacggcggaaaacggcggatacgactgtgatgactatgccgcgccggagtgtgattcgccggacagtgaaattaccgattcaggatctcaggaaatgcaacccagtgtgatgaacaacaacatatgttctaatcatgaagaatgcgaaagacgttcttcacagataaagctgacaaaaggtttcacagcaaaggagtccgtgaaggggcatatggtgaatgttgtgaaaggattaaagttgtatgaggatgttttctctgaatcagaaatctgcaagctgactgattttgtgaaggagattcatgctgctgcccagaacggggagctctcaggtgaaacttttatactgttcaacatacagatgaagggaaacatgagattgctgattcagttgggtgttccgatattt

SEQ ID NO: 47973 - DNA, 387 bp, Glycine max
  Clone ID: LIB3107-020-Q1-K1-E5
aggcttctgacaccacaagctctgtgctgggcattgcctgagggcactggagactgaaaaggatacatatattagattcagatagtgacaaaccaagcagatatatgttgataccaccacattattaattgtcaaaccaaaaataacttgtttgcttggtttttgcaccttaagtgttgttgtacatgcattttcttcagataagaaattatcaagagctctcaaggaaccgaacttctgtcctgacccagactcaataaaattctgcagaaaaaataactttataaaagtcattgtaagaactttaagccacaagccttgatcatcttgcagtcttacacttttgtgacttctttacattttttaggtacactggaagtgcaagac

SEQ ID NO: 47974 - DNA, 361 bp, Glycine max
  Clone ID: LIB3107-020-Q1-K1-E9
cacacacatcattgattctcattcatccatcctatactctctctaaatacactcactctcactcacccacacttacatacattctaacattcacagacaatcttattcataacatttataacaaactgctgatataaacaacaactctttcaatcattacctccatactacacaaacttcttactgctcatcatagaaacatcactcactcatattacttctttgaaataatatacaacaacatattattactcacacattgattcacctccacatacataattacattcattaatattattactactacatacataccttactactctgctcttatcatcatttataccaccactggttt

SEQ ID NO: 47975 - DNA, 432 bp, Glycine max
  Clone ID: LIB3107-020-Q1-K1-F11
tggtggcgtgtgcagaagagcgtctcagttagagcggtaatcagaagaggcgcagcttcaagcgagtgacagccaccagccatgggtcgtatgcacagccgcggtaagggtatatcctcttctgctttgccctacaaaaggacacctcctagctggctcaagatctcttcgcaagatgtcgaagaaaatatctgcaagtttgcgaagaaaggtttgaccccgtctcagattggtgtcattctcagagattctcacggtattgctcaggtcaatagcgtcactggcagcaaaatccttcgcatcctcaaagctcacggacttgcgcctgaaattccagaggatctgtaccatttgattaagaaggcattttcaattatgaagcatcttgagaggaacaggaaagacaaggactccaagttcaagttgattctt

SEQ ID NO: 47976 - DNA, 245 bp, Glycine max
  Clone ID: LIB3107-020-Q1-K1-F5
tcgggagttcaattccaatatatgaccactctctctgtggaatggcctaccttctacgttcaagatgcatatcttcgacaatacccttaccggctagaccattacccttgaagtggacatgctctgacaccatcgacaacgtcatggccaatatccaggacaaggaatgaatccccccgatccatcaacttctcattttctcctgaaagctacttgatgtactgccgtaccctttctgactacaa

SEQ ID NO: 47977 - DNA, 388 bp, Glycine max
  Clone ID: LIB3107-020-Q1-K1-F9
cccactcgtccatcaatgcatgtactttgctctcattggacatctctaataatatcgggagtgtacatatttcggggtgaatccatcacttgtctggatgttctatatattcattgaaacaattatatctagacatgaatcacatcatatgacacactaccctacctctcaatattctcatctttaacataattatatctttatgcgaacaagctaaatggaaagatttcaatagatattaaattaccacctcaactggacgtactatatatgcaatcaaattccttatatggactgctcactgattatcatactgctaatatgtctaagttacacatcatacacttatctgacaactctatatcgccctttgcatttagccaaaatt

SEQ ID NO: 47978 - DNA, 452 bp, Glycine max
  unsure (1)..(452): unsure at all n locations
  Clone ID: LIB3107-020-Q1-K1-G12
gcttgttggaccatatcaaacatcacagctggtaataaacagcagattcaggctgtgattgaggctaatctaattgctcctttggtcaatctgcttcaaaatgctgagtttgatatcaagaaagaagctgcttgggctatctcaaatgctacatccggtggttctcatgaacaaatcaagttcctagtaagtcaagggtgtatcaaacccttgtgtgatcttctcatctgtcctgatcctaggattgtgacagtttgtctggaaggccttgaaaacatcttgaaggtgggagaagctgataaaaatataggcaatactggtgatgtgaatctatatgcccaaatgattgatgaagctgaagggctggagaaaattgagaacctncagagtcatgacaacacagagatttatgaaaaggcggtcaagattcttgagacatactggttggagga

SEQ ID NO: 47979 - DNA, 381 bp, Glycine max
  Clone ID: LIB3107-020-Q1-K1-H10
gtcttatctcagttgtcagtttatggtggtcaaagtggctttcaatccatgatgaaaagcgatgcaaagaaattggctgaacaagatgaatcagtattgaaaacctcaggaattccttacaccataattaggaccggtgcattacaagatacacctggtgggaagcaaggctttacctttgatgagggttgtgcagctagtggaagtattagcaaagaagatgctgcctttgtttgtgtagcagcttttgattgtgtcccacaaactggattcatttttgaggtggccaatggggataacaaagtttcagattggaaagaatgtttggccacattgatggagaaagcaagtcaaaaacttcagtgactattgacagggaat

SEQ ID NO: 47980 - DNA, 440 bp, Glycine max
  Clone ID: LIB3107-020-Q1-K1-H12
gcttgatggaccatatcaaacatcacagctggtaataaacagcagattcaggctgtgattgaggctaatctaattgctgctttggtcaatctgcttcaaaatgctgagtttgatatcaagaaagaagctgcttgggctatctcaaatgctacatccggtggttctcatgaacaaatcaagttcctagtaagtcaagggtgtatcaaacccttgtgtgatcttctcatctgtcctgatcctaggattgtgacagtttgtctggaaagccttgaaaacatcttgaaggtgggagaagctgataaaaatataggcaatactggtgatgtgaatctatatgcccaaatgattgatgaagctgatgggctggagaaaattgagaacctccagagtcatgacaacacagagatttatgaaaaggcggtcaagattcttgagacata

SEQ ID NO: 47981 - DNA, 199 bp, Glycine max
  Clone ID: LIB3107-020-Q1-K1-H9
tttggttgcattaaaaaacataaccttcctactcacggccggctatctacatgcgtgctgccatgtatctcatcctacatcccactcagaatcacccataagtacctcaaccaactatatatcaacgtcaatcactcattactcacacatttcagacatacttctcatccaactaccttgccttttgtttatctaaccc

SEQ ID NO: 47982 - DNA, 371 bp, Glycine max
  Clone ID: LIB3107-021-Q1-K1-A2
gagatcacaaccaaggccaacgtggactatgagaagattgtgcgtgacacatgcaggaacattggttttgtctctgatgatgttggtcttgatgctgacaactgcaaggtcctcgtcaacattgagcaacagagtcctgatattgctcaaggtgtgcacggccacctcacaaagaggcctgaggagattggtgctggtgaccaaggtcatatgttcggctatgccactgacgagactcccgagctcatgcccttgagccatgtccttgccacgaagctcggtgccaagctcaccgaagttcggaagaacgggacatgcccttggctgagacctgatggcaagacccaagtcacttgtgagtactacaatga

SEQ ID NO: 47983 - DNA, 290 bp, Glycine max
  Clone ID: LIB3107-021-Q1-K1-A3
gagatcacaggcaatgtctacgtggactatgagaagattgtgcgtgacacatgcaggaacattgtttacgtatacgacgatgttgtgtcttgatgctgacaactgatatgttgcttttaacattgagcagacatgatcgcttatatagctcaaagtgttcactgcaacctaacagagatatctaaccagatttgtactacctaccaaagtcttatgttcggatataccactgtcgatactccagagctcatgcaatttagcaataaactttcctcgaataccggattcaa

SEQ ID NO: 47984 - DNA, 434 bp, Glycine max
  Clone ID: LIB3107-021-Q1-K1-A4
gggagtttaaatccccacaaaattgcatcaaattgagccatagatcctcaaagacaattagttattagttaacaaaattttaacccaaagtttttacctgaatagctttgtgttctctgttagaagcaagacagtctgaacaaagggctccattcatacaatccgagcaatacgtgttgcattcacttttgtggaaatctgtgtggactttgcattgaacaaaaaaggcttgtttggagaaatggcctaagccatggtggccacttgttttcttcttcattctttccaaattccaattgttgaatatgctgtaaatttctagaatcatcacaatagaattttctacaagaaaatactacgctagacaatactctcagaaatagattaatctagaaagttcatgtatgaaagtcttaaaaactgagatcttgaac

SEQ ID NO: 47985 - DNA, 327 bp, Glycine max
  Clone ID: LIB3107-021-Q1-K1-A6
taccgatgggggtttgatgcagggtgtaataccacaggggagagcggcaattagcaatctgaaactgaacctgacaacttacagaccaattgtgaagctgatgacagatctgagtctcgagactacaacgtgcgataggactggtgcacattgagatcaggagccctgatattgataaacgtgtatacagactacttatggacagatcgactgagataaagacttgggacctagggaatcaacgcagatattccactagccagactaaattgctaacgaggaccacacatgggatcctgaataagatggaacacaagctccacggat

SEQ ID NO: 47986 - DNA, 144 bp, Glycine max
  Clone ID: LIB3107-021-Q1-K1-A7
tgctattgctttgccttcggtccccctttcttacaaaaacaacgccttttctctttctccttcgtatctattctttgcgtttgggttttgcctgaatgaatgcattcacagcgtaattcgttgctgcattttaatccagttatc

SEQ ID NO: 47987 - DNA, 325 bp, Glycine max
  Clone ID: LIB3107-021-Q1-K1-A8
tttaattgttgacaactcttaaaactgcctatatactacagttatgcctaacattattagctttatgttatatgacacttgatgtctacactagtacgctaccctaatctcttaatgctattgaatctttgatgagtacatacattggcatagatattactttgttcaggatgcatgacaacgtgacataattggtcctaaatctggaacgcgatttggtccgtctattgggcattaaaatattgagacctatatcgtttgagaaaacccttttctttttatcgtcattaactgatctcataagttcataccgagatgtcacttt

SEQ ID NO: 47988 - DNA, 439 bp, Glycine max
  unsure (1)..(439): unsure at all n locations
  Clone ID: LIB3107-021-Q1-K1-B1
gacacgcacctctttctgattgccttcaaatcacacactctcttcaatttctagggttttgctattgctttgcctccgttccccctttctcacaaaaacaacgccttttctcttctccttcgtatctattctttgcgtttggtttttggttgattgaaggcattcacagcgtaattcgttgctgcattttaatcgatttatctaaccaggactgaatgacctaatggagtctaaaggtgggaaaaagaagtctagtagtagtagtagtaaatcaattttttacgaagctcccctcggatacagcattgaagacgttagaccaaacggtggaatcaagaaattcagatctgctgcttactctaactgttctcgcaaaccatcctgatacacatncggattgatagttcgttgcatgcaaccatagttttattaggatttt

SEQ ID NO: 47989 - DNA, 423 bp, Glycine max
  Clone ID: LIB3107-021-Q1-K1-B2
tgcattcaaaatgttagttaattttattagcttatcatttaattgttgacaactcttaaaattgcctatatactagagttatgtctaaaattattgcatttattttctttgatattttaggtctacactagtttgcttttttaatctcttagtgctattgaatctttgatgagtacatacattggcattgatatttctttgttcaggatgcatgacagtgtgacatatgtggttctaaatctggaaggggatttggtaagtatattggaaattaaaatattgagtcctatatggtttgagaaaacccttttttttttatcttcatttcctgttctcataaataattacagaaatgtcactttgtttcctgtttccaaagatttgtgtaagaaactataaattggagattttttggttccacta

SEQ ID NO: 47990 - DNA, 441 bp, Glycine max
  Clone ID: LIB3107-021-Q1-K1-B3
gacactaaacaagttaaaagaagagcatcactgaactaacaaagcaaccctatgtcgaaggtggtttgtgtcaccggagccagcggcgccatcggatcatgggtggtcctactcctcctccagcgtggttacaccgtccatgccaccgtccaagatatcaaggatgaaaatgagacgaaacatttggaggaaatggaaggagcaaagagtcatctccatttttttgaaatggatcttcttgacatcgactccattgccgctgccataaagggttgttccggcgtaatccaccttgcatgtcctaacatcattggtcaagtcgaagatcccgagaaacagatattggaaccggcgataaaaggaacggttaatgtgttgaaggcggcgaaggaagcatgggtggagcgcgtggtggcgacttcatcgatttcgtcgattatg

SEQ ID NO: 47991 - DNA, 446 bp, Glycine max
  Clone ID: LIB3107-021-Q1-K1-B4
tgaagatcctgctacaaaaacatcaactccacaagagaaacgtgctggctctgaaattgaatccaaaagtttcaattccaaacaagatgtttccaaaaaccagaacactcctatagtttcaacttctccaccatcaacatcacctgtagggggaagtgttaagaaccaatcaggattcagtttcatggggtcatcagaacttgatggaatcacacaaggaagtcctaaaaagccaaggaaccatgaaattctacgctctccaaaccgtgtcccttcaatcaacatggatgtgaaagccaatgaggcaaacaatgagcaacaactctctatggatcttgagaagcagaatagggatggctacactttcatggggaaccaaacaaacttcattagtggttttggacaataccctatggaggaaattggtaggtttgatgctgagcaat

SEQ ID NO: 47992 - DNA, 395 bp, Glycine max
  unsure (1)..(395): unsure at all n locations
  Clone ID: LIB3107-021-Q1-K1-B5
gataattgcattgaagaaagaggaagctgtggtctctagctattaatattagtattaatattaggcacggtttgactacaaataaaaggaaccatcgattcgtgtcagcccgtgaggcagccaagtttcagatggagacgagccagctttttaatgttcttgccatttttcttctctcggacccttttgctgttgtgaatgcaaactctgaaggtgatgctctgttcgcgttcagaagagctgtgaaagacccaaataacgttctagagagctgggatccaactttggtggatccttgtacatggttccatattacctgtgatgatgataagcgagttacccgactagnacctcgacacgcaaaactgtctggccattttgttccagagctaggg

SEQ ID NO: 47993 - DNA, 419 bp, Glycine max
  Clone ID: LIB3107-021-Q1-K1-B6
gatgagttctaatatatcattcggaagtttttgaaatgttgtcaccccttcttctatttctatgcctaactcttcctttgtttttgttgtccttcttcaaataccgtaaaaccttcaagaatccaccacttccaccaggtcctagaggccttcccataatagggaatcttcatcaactagatagtccttctcttcatgagcagctatggcatctctcaaagaaatatggtcctttattttcccttcaatttggattaaggccagccatagttgtttcctctccaaaattggccaaagaggtaatgaaagacaatgaccttgagtgctgtggacgacctaaattactaggccaacagaaactaacctataatgggttagacatgggattttcctcatacgatagttattggagagaaatc

SEQ ID NO: 47994 - DNA, 244 bp, Glycine max
  Clone ID: LIB3107-021-Q1-K1-B7
gacactagacacgttaaaagaagagcatcactgaactaacaaggcaaccctatgtcgaaggtggcttgtgtcaccggagccagcggcgccatcggatcatgggtggtcctactcctgctgcagcgtggctacaccgtccatgccaccgtccaagatatcaaggatgaaaatgagacgaaacatttggaggaaatggaaggagcaaaaagtcatctacatttttttgaaatggatctttttgaca

SEQ ID NO: 47995 - DNA, 415 bp, Glycine max
  Clone ID: LIB3107-021-Q1-K1-C4
gatatctcatctccttcagcaaccacaacaaaccacttcaaaggtcctatattgctgatccttgtttctaaattcctctgcatggccaacaatggtgcaaaggatcccttgctgtcaggatcacttgatgcgactcaaaagactaaacagcagttattaaacaagagaaggctcctccgttctagaagtgctcctcacgcagagcttgttcctacagagacaaattgcaatgaatcaattcctcgtactgcatccatatttcagaatttgcatccaagttttaaaagaatggctatctaccttgcagtctatttaggtgtaagtgctttaatcttctaccttgtcagaaaccagattaaggggcagaaaacagatggaattcttgatgctttatacttcacaattgtgacaatga

SEQ ID NO: 47996 - DNA, 412 bp, Glycine max
  Clone ID: LIB3107-021-Q1-K1-C6
ggaaaacagtgaggagcaacaaaagtacagagtccggaaattggagatctcggacaagggcaaaggcttcatcgagttactgcaacaactcagcgtttgcgattccgtctccgacaaggaattcgaggatcgatttcgagacctggatgttctcggcgatgaccacgtgatcggcgtgatcgaagacgaggcttccggaaagatcattgcgaccgggagcgtgtttatcgagaagaagtttttgagaaattgcggcaaagttgggcatattgaggatgttgctgtggattctagcattcgcgggaagcatttgggaaagagaatcatcaagttcctcacggagcatgcgcgttcaatgggatgctacaaggagattcttgattgcagcgtcgagaacaaggcgttctacgag

SEQ ID NO: 47997 - DNA, 386 bp, Glycine max
  Clone ID: LIB3107-021-Q1-K1-C7
ctaataccttccccatgtgtaaacaactgccgaacccttattttcaaaatccatagacccctttttggtttttctaatgttttcctcaaataaacgttggtggcgactcccgcgcatcttcttcatgagaagatgcactttcctattttgccttgccctcctatcgaagggtaggttgcgacacacacaaaatgcaacaacttctctgttggagtctttgtgagctgagcccaaattaaggctcatcggtaacatgcaaaatgtctcccttattgtgtgcattctaagtttggcggtgtgcaatttttcttaattctatatttttgtagtactcttatcgaaaatttgattataaattctaatactagacaaaatagtcttggtca

SEQ ID NO: 47998 - DNA, 433 bp, Glycine max
  Clone ID: LIB3107-021-Q1-K1-C8
tgggcggttatcagttggctggatgtttgcgggcaaggcaatgcatgtaataacttcatattggcgaacaacatatatcatacctttgatgtcttcgttatcaacaatttgtattgctataaacttgagcattttgtaccccactacttgtgggtatcaaaatgaaagatagcatacttggtccaattgttgaaattggagcctttggtggatcattcttttcaaggattcaagtgcatggccttgctttctttgaaagaacatcaggtgggggaattgaaacagatccccttcatctgttttgattatttgaccattgtagtgcactaaccaattgatagatgaggatgacatgttgtgtaatagagaaagaaatatgacaaagggtttatgtttgcaaagttggaaggaagttacatagaaaaaatatgtt

SEQ ID NO: 47999 - DNA, 426 bp, Glycine max
  Clone ID: LIB3107-021-Q1-K1-D1
gaagtgccttcattcgggactttcactagccgcaggagccttatgaggagaatacggatgtctcacaggaagttcgagcacccaaggcacgggtcactgggatttcttcccaagaagcgtgctgctcgtcacaggggaaaagtgaaggcattccccaaggatgacccatccaaggcacccaagctcactgcattcttggggtacaaggctggcatgactcacattgttagagaggtcgagaagccatgatcaaagcttcacatgaaggaaacatgtgagcctgttacaattattgagacccctccaatgggtattgttggcgatgggggttatgtgaaaactccccgtggtctccgaacattgaacactgtatgggctcatcactcgagtgaggaactgaaacgtaggtgttataaaaactggtgc

SEQ ID NO: 48000 - DNA, 435 bp, Glycine max
  Clone ID: LIB3107-021-Q1-K1-D2
gagaaacatggcttccttaagctccttagtgctgctccttgcagctctaattctatcccctcaagttcttgcaaactatgagaatcccccagtgtacaagcctcccactgagaaaccaccagtttataagcccccagttgagaagcttcctgtttacaaacctccagttgaaaaccccccaatttataagcctccagtagagaagccaccagtgtacaaacccccagttgagaaacccccagtgtacaagcccccagttgaaaaaccaccagtgtacaagcccccagttgagaaaccaccagtgtacaagcccccagttgaaaaacccccagtttacaagcccccagttgaaaaacccccagtgtacaagcccccagttgaaaaaccaccagtgtacaagcccccatttgagaagcccccagtttacaagccccc

SEQ ID NO: 48001 - DNA, 426 bp, Glycine max
  Clone ID: LIB3107-021-Q1-K1-D3
gaagatgaagtcctcgaagtctgaatccgagtcgccttgcgattccgactccgacatacgccaccgtagtagcagccgccggtcgtggcgggactccgacggcgataggaagaagtcctcgaggagcatcacagaagaggaaattacaaagtacatggccagaaaggcccaatcgaaggcaatgaaagtagcgaaaaagttgaaaaccagtacggtatcgggctattccaacgattcgaatccgtttggtgactctaatctcaacgagaaataagtagtggtcgctcatatgccagatctatatagattataaacctacacaaatgttatttataggtttgtctggcgcaagaagattgagcgcgatgtttcacaaggtgtgtctattgatgcgttttcaatgaaggcagagaaaaagaaacagag

SEQ ID NO: 48002 - DNA, 383 bp, Glycine max
  Clone ID: LIB3107-021-Q1-K1-D4
ggaccaacacctgtgcagcaattctctgtcaccaaatttgagcgttctatctttctgactttggcggcaatgacagaaacggtggtctctgataattccaagggcttaatactggcaatgggttctaatgcattcataggatccagattcatcttgaagaagaaaggtcttaagcgcgctgctgcacgccgtactagtgcaagagttggtggatatactcatctactagagccgctatggctggctctcatggcgacaatgataattggagagattgcatactatgatgcttatatctatgctacggcagttatgggtactgcccttggtgcacttactattattagcactgcatgattggctcactacttgttgaatgaacg

SEQ ID NO: 48003 - DNA, 374 bp, Glycine max
  unsure (1)..(374): unsure at all n locations
  Clone ID: LIB3107-021-Q1-K1-D6
gtttatggcacaagaaagaaattataaaacaataggtatctgggtgtactgaaaattgatactttggtctttgtgattactgattagtacttgttgactagtgatctgacatttgtggtaagttgtatgtttattgaggaattagtgacagtaacttctgaacctttagggatgcacttgaaaactgttgttaattagcttagcagtaccagtgtttcacactgtatgtctgtcttgcagaagactgaggatgattcaggtgcaaatcgatcatcggtgtccgaatttggggatgacaattntgctgtcgggagttgggagcagaaagaagtaatgagccgtgatggtcacatgaaacttcagacacaggtctt

SEQ ID NO: 48004 - DNA, 325 bp, Glycine max
  Clone ID: LIB3107-021-Q1-K1-D7
caaagggtccgattggattaaagcggcgattaccacaacatgggatgccgacagtgctgatcctatcatagcatcaatacctgcaacatgggaatctcaacttcaccaagatggtcaagaacaaacacatgctctgaacgaattcaccatagtggtaactcatatgatttactactgcaacaaactggatcctactacaccaaagtggagttacaacaaggacaatcacacctgggatgaggcatcttcatacaggataaagatgccatctatctgtgctcacaaaatcttacaattcaccatataattttgccacaaacatcat

SEQ ID NO: 48005 - DNA, 416 bp, Glycine max
  unsure (1)..(416): unsure at all n locations
  Clone ID: LIB3107-021-Q1-K1-E1
ggtgtgctgttgatggatcccaagggctcaaagcagcagcagccacaggaggtggtaccaaaattcctcagcctcccccaacaccactaccaacaacaagggaattccaacaacaacaacatgggagagaacaaaccatcagaggttaaggatttccagatagtggtagctgctgagaaggacgagagcaagaagcagcaacagttggcaccaaagaggagttccaacaaggacaggcacaccaaggttgagggcagggggaggaggataaggatgcctgctctctgtgctgccagaatcttccagttgaccagagaattgggccacaaatctgatggggaaaccatccagtggctcctncagcaggctgagccatccatcatagctgccactgggactggcacaatcccagcatc

SEQ ID NO: 48006 - DNA, 429 bp, Glycine max
  Clone ID: LIB3107-021-Q1-K1-E2
gaaccaattccattattaaagggataagcctcaaccttgcaacccaacacaaccaaaattcgctacttgttaagggctgcactataccagaatgtctcagggaagaggcagtgcatctttgcctattgtggtcactgtggtttcactactgtgccttttggaacgtgctaacgcagcaacttactccgttggaggacctgtgggatggaccttcaacactaatgcttggcccaatggaaaaagattcagagctggtgatatcctaagtaagtaaatttaattatttttttatcatcattttcatttattagttttgttacaaatattacttaaagaattcaaattcacgatttctctctccttcttttttccttaattatttttcaatcacttatcaatttcatatctcataactaattaaatttaatc

SEQ ID NO: 48007 - DNA, 417 bp, Glycine max
  Clone ID: LIB3107-021-Q1-K1-E3
aaactgtgaacccgttcaattatatttcaactcctgttgaatcatcagtttaactcgttttgaattatgatccaaacccctgttcagtctctgttcggtttttgaaacattggttttctgtgcattgtgcgaaccacagacctttagtggcttatgataacaatctaagcgaaaaataaggcacaagctagtttgcgattaaagtaataagatagtgggacacttggatggataggaaggatctgtataggtctctgcaagaaaatgttaggagactcgaggcaggtgaatgactatatagtttaggttgtacatagaaatctcttgcaggaaaatgcaatttgcatccaaaggggactacccagttgcagaaagctcctgctgcatggatactattactcttttgaagggaagaat

SEQ ID NO: 48008 - DNA, 440 bp, Glycine max
  Clone ID: LIB3107-021-Q1-K1-E4
ctgtcaagcactattttgtgcctgcatcttgttggcatggggttttctctcttgtaacaaagattcgcagtgatagcggtgacaagggtgatggaggtgcccaaacgttccatcctgaccatgtttgatgatgccaaaggaaaagggtggggacctaatcttagtatttctgattgtacaattgaattttctaattctaaccaaaacaatagtgctgtgataaacagtagtgggagcaataacaatccttcaaaaaccaatcctatgtatgcttgctttttatgtatatgtaacttcacaagagatgaatgagaaaaatgtgattcgaatcaaagattccactgaatgtgatcaatcagattttataattaatggaaattaatcatccgctgaacctgtggataccttgcaccaaactcttatttataataatgttcaat

SEQ ID NO: 48009 - DNA, 260 bp, Glycine max
  Clone ID: LIB3107-021-Q1-K1-E5
gagcgatattggagcttattatcaatccattggggttcgcatactttggcatgacatgaccatatcaaatgaaaattcaacatcagaagattcatacccgtctagacttttttggcaaaactgcacccttattctttatctgaacaacagtactcttccacaatttttatcacaactcaatgcgcagaataaaggactcatcgagtttacaaacatgaatctagatataacttgtctcaaatacaaatatcaatgctatt

SEQ ID NO: 48010 - DNA, 266 bp, Glycine max
  Clone ID: LIB3107-021-Q1-K1-E6
gcttatggaacaacaccctaattctcgggcattgggcttattcttgaactgatcatagctcactattgacttcatgattactgattaacaattacagactactgctctgacttacccatgtatatggatctatattgatcaattagagcacccaaactatcatcctttaacgatcaacttcacaactgtacttcatctgattaactgagccattgctcttcagcacttatactatgttccagatgacttaatctcattcatgatca

SEQ ID NO: 48011 - DNA, 300 bp, Glycine max
  Clone ID: LIB3107-021-Q1-K1-E7
cgggtgactgaggacccgttcaagtgggtttgaactcctggtgaatcatcagtttatctcggtctgaattatgatccaaactccctgttgagtctctggtcggattatgaaacattggttttctgagcattgggcgaaccacagacctttagaggcttatgatgacaatctaagcgaaagataagctcaagctagtttgcgattaaagtgataagatcgtgggacacttggctggataggtaggatctgcgttggtgtgtgcaagaacatgtatagagactcgatgcaggtgaatgacta

SEQ ID NO: 48012 - DNA, 427 bp, Glycine max
  Clone ID: LIB3107-021-Q1-K1-F1
ggttctagtgtgtgattgcttgttgttgtaactcgttcttcttcttttgttgttctgtgtttgtgtttgatttttctctcacctgaaaatgtcttgctgcggtggtaactgtggttgcggaagctcctgcaagtgctgcaacggctgcggaggctgcaagatgtacccagacttgagctacactgagtcaaccaccaccgagaccttggtcatgggaatggcacctgttaaggctcaatttgagggtgctgaaatgggtgtgcccgctgagaacgatggctgcaaatgtggaccaaactgctcctgcaacccctgcacttgcaagtgaggtgttgggagagcaagcttcaagcagagatagcccctaattaggaataatgatcaactattaatgtgtagctaataacttatgtattatgtctgagat

SEQ ID NO: 48013 - DNA, 412 bp, Glycine max
  Clone ID: LIB3107-021-Q1-K1-F2
ggaccagagacagatgatgatggagatggcgaagcgagacgctgtcgttgcggcactcgcggcgttggtgctactcgcggcgagtgtggcggtggatgctcaggagaactcggacgtgaagacgctggtgaagtacaagcacgggaagaagtactgcgacaaaggatgggaatgtaagggctggtcaatttactgttgtaacctcaccattaccgattatttccagacctaccagttcgagaatctgttctccaagcggaactcgccggtggcgcacgcggtcggattttgggactaccactccttcatcgccgtcgacgcgctttttgagccggaagggttcggcaccaccgggaacaagacgatgcagatgatggagatcgccgccttcttcggacacgtcggcagcaag

SEQ ID NO: 48014 - DNA, 437 bp, Glycine max
  Clone ID: LIB3107-021-Q1-K1-F3
tcggaggttctgactctaaattaaagtcatgcacttcctctattgatgatgatcagaaggttgatcacatgaatgagggaaccattgagaatgaggaattgttggttccaaaagctgttgcaagtgttaagtctgaaaatgaatcaggtgaaaagcaagctgagttatcctcaggcgtggataatgagaaccagatttgttcagaaaaagcaacaggtactggtatactagtgcaaaaggcctctccaattgcagaaaactgtgagtccttatatttaaaaaaggagtcacctacttctggtaatgctgtaatggtatctagggatgaaaatgctgatgacatgaagtcagttgtgattgagcctgatgaacgaagaatggagcaggatttatcagtttcagatgatgttaatgaatgtgctgaagatactatgggc

SEQ ID NO: 48015 - DNA, 388 bp, Glycine max
  Clone ID: LIB3107-021-Q1-K1-F5
gaagacgacagaaggggagacggccaatagaggaaggtatagcacctttcaatgagttgcttgataaatccctgtattaatttcccaaagaataattaaaatgcagttgagaaacaaaagctagaaacatgttcaaaacatcagaaaggaaaagtgacaaaaaacaagggattaggaattacagtatatttaaatatgaaaggtttccaatatttgatggtatgcctccttggaagtaattacccctcaagtacctttaaatacacaatcagatgagacgagtcagccttcagcatgacataaaagcagtgaactaattaggaaattgctaagtagttcattagtagtgaaccaattcacttacagtgctcttagctcaatacaattg

SEQ ID NO: 48016 - DNA, 326 bp, Glycine max
  Clone ID: LIB3107-021-Q1-K1-F7
agctccggcaacagtgatttgttgtgcggatgacgcagctttgtgtgccaaatgtgacgttgaagttcatgttgcaaacaagcttgcaagcaagcaccaaaggcttcttcttcaatgtctatcaagcaagcttccaagatgtgacatttgccaagacaagccagcattcatattttgtgttgaagacagagcactcttctgtcacgattgtgatgaaccaattcattcaaccagaagcctttctgcgaaccatcagcgcttacttgctactggtatccgaatggcatcgagttctaattgcaccaatgacaatgaaaaaaagtaac

SEQ ID NO: 48017 - DNA, 412 bp, Glycine max
  Clone ID: LIB3107-021-Q1-K1-G3
ctcgtataatctatcagataactatttataagtagggttatatctttataaacatcttatattactttgtggtccatttctgcaacttcatccattactcctttaaaccattcaaaagatccaggttccctagtgacccagtagaaataagcatttgtagtccttcgtgatctcttatttcctcctggagttacatttgaagatgtaaagctattggagctctcgtctgatctggttgtttgacttgtttctgtgtttgactcctgcacctgaccttatgaaaattgaaaacttaagataaaagtggaatcaactttctgaaaagggaagcagagtttggatattagtaccactagttcatccattgctctggtgttattgagaagatctctgagaatgctgatgaaaggag

SEQ ID NO: 48018 - DNA, 426 bp, Glycine max
  unsure (1)..(426): unsure at all n locations
  Clone ID: LIB3107-021-Q1-K1-G4
gatagaccaaaaatgtgctcttcgactctatcgggctattctttcctcacaatcagctccacatttttcaaatcccaattttgccctcctcccttcccctctcgcgtggtggcgtgtcacgttggatccaattccaatgttcaaaagcacgttgccaccgacctcaagttcgtcctccacgacgccctccatgactctggaatcaacaccactcatgccagagaagctagggagcatttctgctcacaaattaggagattcactgatattgagaagggaaccagtatttgtatcaacaggtgtgttgatttggggagaactgctctctacatagctgcagaggatgattctctagtgtcacattcatcagttccacttcctgtcgatgattntattacgagattagatgatctttcgatggactac

SEQ ID NO: 48019 - DNA, 312 bp, Glycine max
  Clone ID: LIB3107-021-Q1-K1-G5
taaggactcggagttcagcactggtgtgcaagttgccaaggggagacacgctacttgcagtggtaacagagggactaaaagtgcttttaacaactctggatcggaaaaacaggattccggatatgctatgtccaacactggtgctacgtactactaacttatataagacctatctcttggaggggctgcacttgcaaaacatacatattaatcataggtatggggaataaaaatcacaagtgctcatttgtgggacatgtgtaagatgcgtatacgtaagtggatatatgctaataatgatgatactggttc

SEQ ID NO: 48020 - DNA, 276 bp, Glycine max
  Clone ID: LIB3107-021-Q1-K1-G7
attcggggacgacctacgcgtccgtgcgagaacacgacaaaagggcgactaaagcagtcgtctaactaataagctaactaggtgggtgtaacattgtgtgaccgtgaacaaattatgatgtccaagaaggacatttttacacctaaataggcggatactgttatataatgcaaatatcaagcttagacagattccactgctagtgcacttgctgcaggcacatctgaatgggctgtatcttggaaacttacttaaccatatctaatcatcctttcg

SEQ ID NO: 48021 - DNA, 356 bp, Glycine max
  Clone ID: LIB3107-021-Q1-K1-H2
cagcatgaccgaacggtcggaattcattttaaccgaaattaacggatgatacaattcaaacgatcggtggaaatttattttatttttagattaggcgagaaatgatttaaataaatggcttaagcacgtcaaaagggggtataaaaagcgaatgaaaatgagaataaaaatacatgaaacaaaatgtggaccaccacgggtacatagaatgaattaaaaagctcggtttgaggtactttgatggaagcttgcttgtggggcttctatggaggctggatctttgagcttcaatggggtcctttaatggtgattttccaccatggagatgcagcggaagacaaaggaaaagaggtgag

SEQ ID NO: 48022 - DNA, 405 bp, Glycine max
  Clone ID: LIB3107-021-Q1-K1-H3
gactcacaaaaaccacttacaaagtagtactacttggtttcaatcaaaacaaaaactcacactttggtggccacagcaacaataacaatggcagcctcactacaagctgcagctaccttcatgcaacccaccaaggtgggcatggccactcgcaacctcaaatctacacaatgcatttctaaggcttttggcttggaacccgctgcagctaaactcatttgctcccttaagcccgatctcaaagattttgctcaaaaatgtgtcgacgccaccaaaattgcaggattcgcccttgccacctcagctctcgttgtttctggagcgagtgcagaaggtgttccaaagaggctaaccttcgacgaaatccagagcaagacatacttggaagtgaagggaactggaact

SEQ ID NO: 48023 - DNA, 233 bp, Glycine max
  Clone ID: LIB3107-021-Q1-K1-H4
gaacttacataatctactaccaatcaacatcaaagcaagttcacaaaattcagtgcgtcctacattgaccctttagcccctactactacactaactcgcctttcttgttcattataaatcacattcccaaagcgaccaactacaacacaacccttcaatggcattcatcaacactttcttcacccaaacctccttcaactcccactctctctacaaaaccttttatacccatt

SEQ ID NO: 48024 - DNA, 425 bp, Glycine max
  Clone ID: LIB3107-021-Q1-K1-H5
tggtaacttatcctaacctttaatagaagtgtattggaatatatttatcattttacctctcttttcaacaatctacgtttctaaaattaacaacaggtgacaaaggtgttctcaattggaaacaacggtatgatataattttaggcacagcacgaggactagcatatctacatgaggaatttcatgtgtccattatacatagagatataaagactgctaatatcctcttagatgatgatcttcagcccaaaattgctgattttgggttggctaggcttcttccacgggatcgttcccatcttagtacaaaatttgcaggaacattgtaagtaaaaaacaatgtcattcacattaatttcttgacctttattgagcaacaagttgtagcagaagagatacattaattactaaaattaatggaacat

SEQ ID NO: 48025 - DNA, 356 bp, Glycine max
  Clone ID: LIB3107-021-Q1-K1-H7
ctggggcaccgcttgagcagacttaacatcagggcaaagcgtcatactgggtgctcaagctaccatgtctatatctatctttactagtgcctccttgccacaagctaaaatggcccaagagactctcatattcacatgcgaatcaactaacgaggggcaccctgaccagctctgtgaccagatctccgattctgtactcgatgcatgcttggagcatgaccctgacaagcaacgatgtctgtgaaacctgcaccaataccaacatggcgacggaattccgagagatcacaatcgaagccaaagtgtactatgagaagaatgtacgtgacacatgcgtgcacataggcttagcctct

SEQ ID NO: 48026 - DNA, 182 bp, Glycine max
  unsure (1)..(182): unsure at all n locations
  Clone ID: LIB3107-021-Q1-N1-A10
cacacctgtcatctatacctaccctattttcaaaacacttatcaacaaattcaaatccgtntatttttaaaaatcctttcacccaacaaaacacaaacataaaatgatcaacctctccttcctaaaaacttaacttactcacattaattactttttacaaacttaaaaactctccagtacca

SEQ ID NO: 48027 - DNA, 345 bp, Glycine max
  unsure (1)..(345): unsure at all n locations
  Clone ID: LIB3107-021-Q1-N1-A11
ccacacgtgtggtctanaactagcctatgctcgtgaagcttgtcgacgaattcanatcgacgcgtttagagattggtggggccgactaaattcatgtcgcgcgatagtggggtttatcgccgatagagatggcgatattggaaaaatcgatatttgaaaatatggcatattgaaaatgtcgacgatgtgactttctgtgtaactgatatcgccatttttccaaaagtgatttttgggcatacgcgatatctggcgatagcgcttatatcgtttacgggggatggcgatagacgactttggtgacttgggcgattctgtgtgtcgcaaatatcgcaggttcgatat

SEQ ID NO: 48028 - DNA, 198 bp, Glycine max
  unsure (1)..(198): unsure at all n locations
  Clone ID: LIB3107-021-Q1-N1-A9
ccaaaacccaaaanacatggatacctgctctaaattctcaatctaaacaacacctatggcaccacctgctcagacaaattcccgaacacaccaatatcattttgccacaactcctgaatctgcctttacccacttccaaacattgcatccgtcttgcttgctatgctcccccaaagctcctggaacaaaagcttcaaa

SEQ ID NO: 48029 - DNA, 396 bp, Glycine max
  Clone ID: LIB3107-021-Q1-N1-B11
gataataaatcacattcatacctccgctatgttttacatgatctttggcagggagagagaaaaaatgcagaagcatggttttgcatcaaagcgtaacgtgttgccgtatcaaacgccgaggctaagggaccactacgttctggggaagaagctgggacaggggcaattcggtacgacgtacctgtgcacccacaaggttacagggaagctctacgcgtgcaaatcgatcccgaagaggaagcttctatgccaggaggattacgatgacgtgtggagggagattcagatcatgcaccatttgtcggagcatcccaacgttgtccagatacaaggcacgtacgaggattccgtgttccgtgcaccttgtcatggagctctgtgcagggggagagcttt

SEQ ID NO: 48030 - DNA, 195 bp, Glycine max
  Clone ID: LIB3107-021-Q1-N1-D9
aacactcccttaaccctccctcccacctttttgattctccgcttctccaaaaatcttatgggttcatttctcgacaactctcacctcacatatcgcttcactttctacctcaaaaacttacacaaaagcgaaccttcaaagactcaccctcatgctcactttcataatcaccttgcattaaatagcttaaattcc

SEQ ID NO: 48031 - DNA, 283 bp, Glycine max
  Clone ID: LIB3107-021-Q1-N1-E10
acccttgggcacaacataactcaaccttcccatggccaatggcctcattttgttccacacataatatcccaatcctttgtccaagcaccctcttttctacacctctatccttccattcattccttattttccggctttcatatttgaactgcaccctctcagacactctatttaccctcagtcatctacggacaatcttctcaacctcctcagaccatatttcctctttccccttactataatgataacttagagctcctttttgaaatatgtcatttctgat

SEQ ID NO: 48032 - DNA, 380 bp, Glycine max
  Clone ID: LIB3107-021-Q1-N1-F10
ccgtacgccagaaaactacacaattgttttacagcaaaactatcaaatcagatcgtcttgtttccatatatcgcggctccaacatatcatgtgttggaatcatagtgtaccgccgtctttactttggaatgtatgattctctgaaaccaatggtcttttttggtggattgcacgataacttctttgctagttttcttttgggatgggggatcacaataagtgccggcttggcctcttaccccattgatactgtgcgtaaaagaatgatgatgacatctggagaagctgtaaaatacaagagctctttcgaagcattcaagataatcgtcgcaaaacacggtactaactcactctttaaaggtgctggtgcaaacatatta

SEQ ID NO: 48033 - DNA, 212 bp, Glycine max
  Clone ID: LIB3107-021-Q1-N1-F12
gatccttctgtgcggggaagggcaaaaaatggccggggtgcaacttctctaggaatcatgcccccggctgaacacatcatcacacaacaagtcaagcttctctacaaacacgcaagaacactgctttctccggctcaagaacatcttcatgactgtgctgttcacagccgtgatgcttcactgtcgctggactccacaagaaggagcttgtc

SEQ ID NO: 48034 - DNA, 159 bp, Glycine max
  Clone ID: LIB3107-021-Q1-N1-G9
ccaatatgaatttctgtgtaactgatatccccatttttcccaaagtcattttttggcatacccgatatctttcgataacccctttttttttttacttttcgatccgatagaccactttggtgacttcgaccattctgtctctcccaaatatctcacttt

SEQ ID NO: 48035 - DNA, 263 bp, Glycine max
  Clone ID: LIB3107-021-Q1-N1-H12
ggccgggagctcgggcccccacacgtgtgggctatactagcccattttcgagaagcttgtcgacgaattcaaatggggagccctgctaccatgcctgcagcgactcatggtcgctcggcagcttcttgctcctaacagtggaggccagacttaggcacagcacgatgcccaccaccaccagtgtgccgcacaaggccgtggcggtagggtatgtgtctgaaaatgagctcggggagcgggcttgcaccgctgacgcatttgga

SEQ ID NO: 48036 - DNA, 412 bp, Glycine max
  Clone ID: LIB3107-022-Q1-K1-A1
gaacgccaaaacacaactccttcattttattctcgtcttctctccccactcccactttgctcattcttcgcccctcttctctctctctcacttccactccactcttctctctctctcacacacaccatgaactcttcttattatatgctgcaagctggtgcttcttcctcttgaacagtgaaatgggtttgtgttcttctgtccaccgaatcgagcaaacaaacatgaagcatctaacgctctctttcgagtccaaaactgaacgccttgagattcctccatcacccttcaaagacaaagacaaagccataaacggaaactttgcggtggctgaagatgatgctgcgtttaaggctcagcagtggtcaccctttccgtcaaccacaaccttgttggtcacagactgtgggga

SEQ ID NO: 48037 - DNA, 423 bp, Glycine max
  Clone ID: LIB3107-022-Q1-K1-A10
gatccctaactcataacacaattacactgtctctgtcttttccaaaattagggaaacaacaaggacgcaaaatgacacaatagcccttcttccctgtttccagcttttctccttctctctctccatcttcttcttcttcttcactcagtcagatccaactcctcagataacacaagaccaaacccgctttttctgcatttctagactagacgttctaccggagaagcgaccttagaaattcattatggtggcaacagctgctacttcatcatttttccctgttacttcaccctcgccggactctggtggagcaggcagcaaacttggtggtgggcctgcaaaccttggaggactaaaatccaaatctgcgtcttctggtggcttgaaagcaaaggcgcaagccccttcgaaaattaatggaac

SEQ ID NO: 48038 - DNA, 202 bp, Glycine max
  Clone ID: LIB3107-022-Q1-K1-A11
aacagatgtaaaaacacaatataaagggattcttaactcataacacaattgcgctgactttgtctttttcaaaattacggaaacaacatttactcaaaattactctttagcctttcttccctgcctccacctttaatcctattctctctccattttttaattctttttaacttagatagatccaactcctttgatatcacaa

SEQ ID NO: 48039 - DNA, 338 bp, Glycine max
  Clone ID: LIB3107-022-Q1-K1-A3
cggggcaccgattgagcagacttaacaacagcacaaagcgggttactgtctgttcaagctaccatctctctgtctctttcttagtgcctacttgtcagaagttaaaatggcccaagaaactttcctattcacatctgaatcattgtactatgggcaccctgacaagctctgtgaccagatctccgatgctgggctcgatgcatgcttggagcaggaccctgacagcaaggctgactgtgaaacctgcaccaagaccaacatggtgatggctatccgagagatcacatccaaggccaacgtggactatgataagattgtgcctgacacatgcaggaaca

SEQ ID NO: 48040 - DNA, 419 bp, Glycine max
  unsure (1)..(419): unsure at all n locations
  Clone ID: LIB3107-022-Q1-K1-A6
ggcaccgcttgagcagacttaacaacagcacaaagcgggttactgtctgttcaagctaccatctctctctctctttcttagtgcctccttgccagaagttaaaatggcccaagaaactttcctattcacatctgaatcagtgaacgaggggcaccctgacaagctctgtgaccagatctccgatgctgtgctcgatgcatgcttggagcaggaccctgacagcaaggttgcctgtgaaacctgcaccaagaccaacatggtgatggttttcggagagatcacaaccaaggccaacgtggactatgagaagattgtgcgtgacacatgcaggaacattggttttgtctctgatgatgttggtcttgatgctgacaactgncaggtcctcgtcaacattgagcaacagaatcctgatattg

SEQ ID NO: 48041 - DNA, 421 bp, Glycine max
  Clone ID: LIB3107-022-Q1-K1-A8
tatattataaattagaattataagtttgagaattaagtttttactcttcctagtgtctcaattaggagaaattacgatatgttctaaaataactggtgttcaaatttccaactaatctctacatgactcataacaatttaatcaatttgtttttcgctaaattaaaaaacttaattgcatgtcacgtaaattaaattatgtatgatgttagatgttagaagcaaattaaaacaataattaagatgttcataaaatatatttttctcttatttttgggaggtaattgatcgcaaaactttataataaatttgttggaagagtcacaaaccgtggtcttagtggcaccatgaaacagtagctgtggggcatccttggaataaactagaaacttaaaaacttccataatttcagtaggcgtttg

SEQ ID NO: 48042 - DNA, 234 bp, Glycine max
  Clone ID: LIB3107-022-Q1-K1-A9
attccttgtagattccaagctttacatatactcattacaaacttaccttcccgggcattcgagctcttagaggtatcttcatatcacctacattcaattaaatcaccctctatctacaacatcaagactccttctaacttcaaaatatccttctaaattttcttgcaacataacaacctttaaccatataccccattatccattatttccgcatctttcctattttccaacaat

SEQ ID NO: 48043 - DNA, 168 bp, Glycine max
  Clone ID: LIB3107-022-Q1-K1-B1
gatcgccagagatcatgtaaactagattactctggtcatgcgtatagactatctctgtgcatattctgcgagactagaataatgctctctctcctagttaaacgtgccacatgttatacaccactactttcgtgacaccatatattgctgaagatgtcaggatgctac

SEQ ID NO: 48044 - DNA, 403 bp, Glycine max
  unsure (1)..(403): unsure at all n locations
  Clone ID: LIB3107-022-Q1-K1-B10
gggtctctttttcttttagacccaccgtttctcgggtcttccctttcaacttcaactcaacaacccttcccttctcaaactcattcttgcctttctttttgttcatacttttatttttattgctacttactttttatttctatccaatcatccatggccgaggaaccccaaaaaccagcctccgctgaagaagtggtgcctgttcctgcggacacgccaccaactacccaatctgaagctgaagctgaagttgaagcaaatgcagaaagcatcgaagaagtggtggcggaagcagagaacgcccagagtggtgtagaagacaagatttcccaatctgaagctgaagctgaagctgaagtngaagcaaatgcaaaaagcatcgaagaagtggtggcggaagcag

SEQ ID NO: 48045 - DNA, 396 bp, Glycine max
  Clone ID: LIB3107-022-Q1-K1-B12
ctgatcgctagaactagattgaataaaatgaaattttataccctttactagcttagatactcaaatttctttgaaagggattaaggcataacggttattcggcttatgccatgtgtgagacatttaccacttattagaaagttgcaaattacatcaaagtcaatcttatgccaattagataagtggaacccttaaatgtacattcattttttatggatattttttaaagttctcttaaatatattttttaagatgtaataatcatatgcactatacgaataaattttttaacttgtaattttaattgaatttaaatatatttgtacaatgcacatgattcttgttacaccttattactattattagcaagcatcttactcatccattcgttatatg

SEQ ID NO: 48046 - DNA, 209 bp, Glycine max
  Clone ID: LIB3107-022-Q1-K1-B2
ttccttggtcggcccactcgtgacgtcacacgttcgtacacgtcctaaaagaccacccaagggtctattatacattacaactatcctgttgacgattaaactttgactcttcctagcgtctcaatttggagaaattactatatgctctaaaatcactgcaggtccaatttcccactaatctcttcgttactcataacactttaatccat

SEQ ID NO: 48047 - DNA, 304 bp, Glycine max
  Clone ID: LIB3107-022-Q1-K1-B3
gactgccagagatcgagaaaacggggaaactatcgggattagtattgatcatggctattgcttgtattagaggttcgaacactgatctctctacttgttatactggccacatgctaaggagccttactgtcctgacaccattgattacataaaatttctggatgctgcagaagacataaatgacaatgatagtttcatggatgggaccttctttgtaaatagtgctgatatccttagtatatcagccatgctgcttctgaaaggtgcatacacgaggactcactatgtttcatcttatgaagca

SEQ ID NO: 48048 - DNA, 349 bp, Glycine max
  Clone ID: LIB3107-022-Q1-K1-B5
gacaacatatccattttatttacaacagcggtcgcttatgttcctgaaccaaggatctcccttctaaccttattcttcttctcgttcttcaccatcattgcgcatgcaattgtttctcaacacgaatccttcaaatttgagaactcaggtgaactttgtaccctgcatcgttgagtacggtgcagattacagaatgataagcatcttcaactatccattccaagttggattctactacaccaccccatatgccttcactctagctctgcgtgtaaggcttcaacgctcggagcatctatttcattagaattgggaagccaataggaccaacccagacggagaaaatgcc

SEQ ID NO: 48049 - DNA, 437 bp, Glycine max
  Clone ID: LIB3107-022-Q1-K1-B6
gattgccagggatggtgaagacggtcaaactatcgtgattccaattgatcatggctattgcttgcctgagagttttgaagactgcacttttgactggttatactggccacaagctaaggagccttactctcctgacaccattgattacataaaatctctggatgctgaagaagatataaagcttttgaagtttcatggatgggaccttcctcctaaatgtgcccagatccttcgtatatcaaccatgcttcttctgaaaggtgcatagagaggactcactcctttcgccttaggaagcatcatgtgtagagaaacactgaagaaaaaatctgtcattgagcagattgttgaggaagcagaggaagcggcatttcctggagcaagtgaagctgcatttcttgatctggtttcagtggtcatggatagtcatttggatg

SEQ ID NO: 48050 - DNA, 406 bp, Glycine max
  Clone ID: LIB3107-022-Q1-K1-B8
cgattgtcagagatggtgaaaacggtcaaactatccgcattcgtattgatcatggctattgcttgcctgagagtttcgaagactgcactttttactggttatactggccacaagctaaggagccttactctcctgacaccattgattacataaaatctctgtattctgcataagatataaagctattgaagtttcatggatggtaccttcctcctaaatgtgcccatatccttcgtatatcaaccatgcttcttctgaaaggtgcatatagaggactcactcctttcatcttatgaagcatcatatgtagagaaacactgaataataaatctgtcattgagcagattgatgatgaaacatatgaaacagcttttcctgtagcaagtgaagctgcatttcttgatct

SEQ ID NO: 48051 - DNA, 469 bp, Glycine max
  Clone ID: LIB3107-022-Q1-K1-C1
gccagatgacgacagacgggaagttgagtcgtattcagcatttgatatcttgaaaatgcgatgaatagattgagtaattcatcgtgtaaattcacttagacgaaaatgtaggtaattaagaaaagtgggggtgtaaattgtgattcaattaatatggggatgactaatgcacacatgtgtatttcaataacatacatatttaaatgaaaaatcaataaactactatgtgtcagtaaatcaatcatgagatagtattatcggcaaagagcaaacacgctccgtgccattggttctcattcattgttttggtaaatagcactagcttatagccttgctaatgacgcatggtttctttagaggaatacgtaaccttcttaatactatgtggacactctgtcttctctctaataaacatctgattatcaagtagtttctatctagtcatagacattaaattaatgtatatatt

SEQ ID NO: 48052 - DNA, 438 bp, Glycine max
  Clone ID: LIB3107-022-Q1-K1-C3
gacaatttaagataaagaaaacaagattgtttagggtttgggttgtttcagactaggaccaaattattggatacaattttcattgttgatatttgttcttcttgtaattcaggagctacaagagtggatttgtgtggcatgatctgtgtgaagatgatataattctaccagctcatggaaatgagtatgttctcaagggttctgagctctttgacgaatcaaattcagatcgtttcagtcccattagcaatgttaaaacacaaagtgtgaagctgttgccggggccagctttttctcggagcctggatgagggctcatcctcttctagcatgaatgggaaggagacaagaatctaccaagatgacgagctttcccaagatccacacactggttcctctgatgtttctccagagtctagagctgaaaagagtgatgctc

SEQ ID NO: 48053 - DNA, 269 bp, Glycine max
  Clone ID: LIB3107-022-Q1-K1-C4
gacaatttaagataaagaaaacaagattgtttaatggttatgtgtgataagactgggaccaaattattggatacaattttcattgttgatatttgttcttcttgtaattcaagagctacaagaattgatttgtgtggcatgatctgtgtgaagatgatataatatttccgtattatggaaatgattatgttctcaagggttcttgaacttctttgacgaattaaatttagatcgtttcaatcccattagcaatgtttaaacacaaagtg

SEQ ID NO: 48054 - DNA, 286 bp, Glycine max
  Clone ID: LIB3107-022-Q1-K1-C5
tcatgctatatctacgagcatcagctagggacagggttatttacatattcagttcattatctcttgaacctttgcaatctacagatgatagcattcatttagctaatagatttaattgcttacctcgaagacttaatacaatatgtgcatgtatttattattgtatttatttttaatgttgatctatctgttcttaatatgtaatatggcttatcacatttgtaacttccaagcactataagcctactatctattaaaatagacctattctagatagatatatatc

SEQ ID NO: 48055 - DNA, 438 bp, Glycine max
  Clone ID: LIB3107-022-Q1-K1-C6
gacaatttaagataaagaaaacaagattgtttagtttttgggttgtttcagactaggaccaaattattggatacaattttcattgttgatatttgttcttcttgtaattcaggagctacaagagtggatttgtgtggcatgatctgtgtgaagatgatataattctaccagctcatggaaatgagtatgttctcaagggttctgagctctttgacgaatcaaattcagatcgtttcagtcccattagcaatgttaaaacacaaagtgtgaagctgttgccggggccagcttcttctcggagcctggatgagggctcatcctcttctagcatgaatgggaaagagacaagaatctaccaagatgacgagcttttccaagatccacacactggttcctctgatgtttctccagagtctagagctgaaaagagtgatgctc

SEQ ID NO: 48056 - DNA, 441 bp, Glycine max
  Clone ID: LIB3107-022-Q1-K1-C8
gacagacactaataataataaaaaatttgaaatctgtgcgcatgcttatgaaataaactgcaggcgtaacaaaagttgcgtagccatactctgattcattagtgaagaaaaatggcaaccatcatcgccggcatcccaactacatcgatcactcgcgcaggtcttgtgctcaaacgacctgttggagcctcgtcctctaccgttcttggattgccagcaatggctaaggcagggaaagtgaggtgctccatggaggaaaagccttcaagcagctcaaatatagggatgggggcatccttgttagcagctgcagttgccgcaaccatgtcaagcccagccatggctttggtggatgagagactcagcactgaaggaaccgggctttcctttgggcttaacaacaacctccttggatggatcctgtttggtgtcttcggtctt

SEQ ID NO: 48057 - DNA, 96 bp, Glycine max
  Clone ID: LIB3107-022-Q1-K1-D1
gacatttcaatctagtgaaaccgccatcgtgcctgtgacaggttgagtcatactttgaccaaattctcggatacaatactgattgttgatattaaa

SEQ ID NO: 48058 - DNA, 224 bp, Glycine max
  Clone ID: LIB3107-022-Q1-K1-D10
aggcccggaatgaccgactcgtcccacacatacacataaatttcaatctaaacgatattcacatcctttctttgtatattctctcagggttctgggcaagtttgggaagctctgaaggatatacaaagaaatttgtttatgtactaaacgctattacaataattaaatgcatctcatcctttaaaaatcatatattttaccattaaaaattattacattcttat

SEQ ID NO: 48059 - DNA, 435 bp, Glycine max
  Clone ID: LIB3107-022-Q1-K1-D3
cgacctttcatgctcatgaaaacaagattgtttaggggatgggttgtttcatactaggaccaaattatcggatacaattctcattgttgatatttgaacttcttgtaattcacgagctacaagagtggatttgtgtggcatgatctgcgtgaagatgatataattctaccagctcatggaaatgagtatgtaactcaagggttatgatctctttgacgaatcaaattcagatcagttcagtcccattagcaatgttaaaacacaaagcgtgcagctgttgccgtagacagcttattctcgtagcctggatgatggctcatgctcttctatcatgaatgggaaggatacaagaatctcccatgatgacgagctttcccaagatccacacactggttcctctgatgcttctccagagcctagagctgaaaagagtga

SEQ ID NO: 48060 - DNA, 147 bp, Glycine max
  Clone ID: LIB3107-022-Q1-K1-D4
tggcgactgtgtaaaacctctaattctgctggtaaattgtgaactcttaaaaactcatgattacattctcccaaattataaggaagattgtgatactcccactgtactggatgctcaaatgtctgatcacttaccttggactgtgcc

SEQ ID NO: 48061 - DNA, 430 bp, Glycine max
  Clone ID: LIB3107-022-Q1-K1-D5
cgacagtgtaaaacctctaattctgctagtaaatgggtgctcaaagaaactcatgattacattcttccaaattataaggaagattgtgatactcccactgtagtggatgctcaaatgtctgatcacttaccttgggctgtgcctctcggtcttgatgaattcaatagcagggcaattagttctaaaattaagtctggcacttctggttcctctggaagtgttatgcatagagtggagcctggtggtgcagaatacaattatgcttcagccttcatgggagcaaaattattaggttctaacaaagaagccaaaggcgcctctaatatcttaagcagagacaaagataagtatcttcgcaatccatgttccgccgaatacaaattcgtcatcatagaactttctgaagaaaccttgtgagatacaatataaa

SEQ ID NO: 48062 - DNA, 130 bp, Glycine max
  Clone ID: LIB3107-022-Q1-K1-D7
cactgattttaagagtgtagggtttcattgaacagttacgcatgtatagttattaattgttctacaaaagatgtataataattccattgactctactcctgtaattctattttgatctcatatttaaaat

SEQ ID NO: 48063 - DNA, 438 bp, Glycine max
  Clone ID: LIB3107-022-Q1-K1-D8
gacattttatgatcaagaaaacaagattgtttagtgtttggggtgttacagactaggaccaaattattggatacaattttcattgttgatatttgttcttcttgtaattcaggagctacaagagtggatttgtgtggcatgatctgcgtgaagatgatataatgttaccagctcatggaaatgagtatgttctcaagggttctgatctctttgactaatcaaattcagatcggttcagtaccattagcaatgttaaaacacatagtgtgaagctgttgccggggacagcttattctctgagcctggatgacggctcatcctcttctagcatgaatgggaaggatacaagaatctcccaagatgacgagcttttccaagatccacacactgggtcctctgatgtttctccagagtctataactgaaaagagtgatgctt

SEQ ID NO: 48064 - DNA, 289 bp, Glycine max
  unsure (1)..(289): unsure at all n locations
  Clone ID: LIB3107-022-Q1-K1-E1
tggactctttaactgtaagtcaaacaaatgatttaatagaatattgttatatctataagctctataacttgttatacaactcatgcttgatacataggttattatcatatatacctgactaatgagatgaagttgaattcattaaatcacgactaaaaattactttttttaatatatatattcaccttctatatactacatctatactcttttatgccctgntgtatactctttaacatttaataatcatctccaatcttggtttattgatctatcgaatactacgcta

SEQ ID NO: 48065 - DNA, 253 bp, Glycine max
  Clone ID: LIB3107-022-Q1-K1-E10
atcacactttaaaaaaatatgtttctattactttattaattacctttaaacgagggtttttgctctgtgtaacttaaaacacatctttttacctttatgctattcaatcaacaaacatatatctctctgcatcatcacatacattcccttccacttctaactctaaaactctttcaacgataaatacctacccactgatttaaactattcaattcatctttacactttttccaaaattacaacattactctaa

SEQ ID NO: 48066 - DNA, 152 bp, Glycine max
  Clone ID: LIB3107-022-Q1-K1-E11
tacactttttaaaaaactacatatggcgaaacatatcattctttctttactgcgtaattctgccaaatctcaattctctctcttctaaaaaccatctttcttttgtattactaaatctccaacactcaaaattcatacttgatttgcaaatc

SEQ ID NO: 48067 - DNA, 402 bp, Glycine max
  unsure (1)..(402): unsure at all n locations
  Clone ID: LIB3107-022-Q1-K1-E12
tacggtttggaagcagaagtatgagaagattactgcgaagaaaggttctacttctattgactctctctctcnntactatccctcataatttgcttcatacttccattactgccggtcactgaggtttgatgataaaccagattatgcttatttgaaaagacttctacgtgaccttttcattcgtgaaggattccagtttgattatgtctttgattggaccattttgaaatatcagcaatcttcaagtgccactgcccctgcccgtgctattgtaagtgatagcatgctatcttattgtattagctgattgattgttgagatttagattatttagtggaagtgacatttgcagggtccggccgctggaccaagttcaggtgtgccaccactggttgcaaatgg

SEQ ID NO: 48068 - DNA, 408 bp, Glycine max
  unsure (1)..(408): unsure at all n locations
  Clone ID: LIB3107-022-Q1-K1-E2
gtattagatttgtttcattagattttgcgttcaaggatataaatatgcacatgtaatcatgaccaagaaataaataaataatcaatgaagttttttttctcaaaattcttatgagttaaatttcataagaaaagttaattctgaaataaatgttaatattatatntaatatataattaatatttattttataaatattaaaaattatatattattatatttgttcctatatataataaaaagaaacaaatagtagtgttttttactaatttaaaaattatatgagaccgcttacaagtatattgatttatgattttattcaatgcccctagtttaatgtgaagtctattagggagatatctatattgtttatgaaagtgaatgcatttattatcaatataactcacat

SEQ ID NO: 48069 - DNA, 306 bp, Glycine max
  Clone ID: LIB3107-022-Q1-K1-E3
tctccgagagggcagcttgcgagctcaaggctccaaggctgtaacacgtacttggtgcaatctattcataccgtaatgccgcgactaacttccgctctagaccagggtattacttgcgacgcggaagttgataaggtctgaaaagatcccaatctccgctgaaggtttataaatcaccatgtagatacatgataaaacattggattctcgcacttactccatgacaatggataaacagattctagtcactgctctgacagaacagattgcttctgtaactggagcgttgtctgaacgacaactctt

SEQ ID NO: 48070 - DNA, 418 bp, Glycine max
  Clone ID: LIB3107-022-Q1-K1-E5
gaagccacttgctattgaattaaccaaaggacatggagatggagataatttgggtcctgagagtatagtggtgttgactgcaactgaaggtgttgatagtacaatctggctattggccaatgctcatgttattgtgaatgactctggttatcatcatatcatgatccattgtgtaaatactcatgccatgatggaaccatttgccatatcaaccaatacgcatctcactgtgctccaccctatttataaacttctttatcctcactaccgcgacaccatagatatcaatggacttgctaggcagtccctgattaatgcagatggcattatagagaaatcatttttgccctgaaagatctccattgagatggctttatccgtgtacaagaattggtgttctactgaccaagccttacca

SEQ ID NO: 48071 - DNA, 399 bp, Glycine max
  Clone ID: LIB3107-022-Q1-K1-E6
agggcagcttgagaggtcaaagcgccaaggctgcaacaggcactcgctgccatcccttcaatccctaattccgccactcacttccgctctcagctcagggtattacgtgctacgcggagaatgggaagtactgaaaagatcccaatcagcgctgaaagttcagaaaccaccatcaggataaagatcaaaacattggattctcaaacttacaccctgagagtggataaacagatgccagtccctgctctgaaagaacagattgcttctgtaactggaatgttatctgaacgacaacgcttaatttgacaaggaaaagttctaaatgatgatcagctactgtctgcctatcatgttgaagatggtcacaccttgcatatggttgtgaggcatcctgatcta

SEQ ID NO: 48072 - DNA, 399 bp, Glycine max
  unsure (1)..(399): unsure at all n locations
  Clone ID: LIB3107-022-Q1-K1-E8
ggctttttcttttcatccatcgattaaagacttgcttccaagatggttctgctagagaagctctgggatgacgttgttgctggccctcaacctgagcgtggccttggcaagctcagaaaactcaccaccctcaaaactattgatgaaggagacagtagcaagctgcagaagacgttgtcgatgccgtcgacaccgacaaccccgatgactcccacgactccaacgacaccgggatccgcgcgtaaagctgacaacgtttggaggagcgtcttccatcctgggagcaactncgtcacaaagaccatcggtgctcagatgtttgacaaaccacttgccaacactcccactgtctacgactggctgtacagtggggagaccagaagcaggcaccgctgaaag

SEQ ID NO: 48073 - DNA, 463 bp, Glycine max
  Clone ID: LIB3107-022-Q1-K1-F1
gaagacgacagaaggggatctccattccttccaatggcttcaatctctcacttcagaacctcggcgaattccttcctctcccaatacgaacctctctctctgcttctcgctcctctcctctctctcctcttcgctcacgctctccgctccttcttccacctcctctcccagaacggactcaaagccacgctcctagggtttctcattaactccctcaaattagtccctggcgtgaagggatacatagatgccgaaaaacaaaaggttgtggataagttgcaatctgatggtaaatctaaaagagaaggttggaaaactgagttgccaagcacaggattagggacatctgtccttgagaaaatgagagaggagaaaataaatgatgcggtttggcaaggcaaatgctctggtacagtctacattggaggaagtgaatctgatggacatttttctctgataaatg

SEQ ID NO: 48074 - DNA, 450 bp, Glycine max
  Clone ID: LIB3107-022-Q1-K1-F10
ctccaaagacgcataccaaaggtaccatgcccatcactacacaaatggaacccggtgcgatgtcacaaaccaaccacgagaaactgaggttagatttgtttgctcaaagccacccagagccatactcaattgtatcacagaactatcaacgggcaagtatgcacttacggcgcgatgcccgacactttgcaagcatatgttatttgaagaagagagaccagtgtggtacatcattaactgcaatgagcttccagatgattacaaggaaacagagaggagtgaagaatcaacagatgagattgtcatggttactgacatcaaatatccaaaaaatgaatctgaagattaatgtgaatatatctttatatgatagaagttttatcaaccaaactaaccttacacacaaagctttttcctatgtagatttttctttttcatattcaaattata

SEQ ID NO: 48075 - DNA, 415 bp, Glycine max
  unsure (1)..(415): unsure at all n locations
  Clone ID: LIB3107-022-Q1-K1-F11
acgctctaaatactcattccatacgtaccatacttatcactacacaaattnaaccgggtgctatcgcacaaatcaaccacgagaaacttattatatatttatttcctcaaagccacccacagccataatcaattgtatcacataactatcaacatccacgtattcacttacagttctataccccacactttccaagcatatctaatttgaataacaaagaccactatggtacatcattaactccaatgcgcttccagatgattacaccgaaacacataagattcaacaatcaacatattagattgtcatgcttactgacatcaaataatcacaaattaatctctaaattaatcgaaatatatctttattatatagaaaatttatcaaccacactaaccttacatacaaagttttt

SEQ ID NO: 48076 - DNA, 244 bp, Glycine max
  unsure (1)..(244): unsure at all n locations
  Clone ID: LIB3107-022-Q1-K1-F12
cccacacgtccttctaaatactcatccaaacttctctacttatcaataccacatnaaccccgcccttttaaaaaccaaccacccaaactattttaaatttcttttctaaagcctcccacatctcatctcaattctatcacaaactattaacaccaattattcacttacaatgctattccccacactctcctatcatatcttatttaaacaacacataccattatatttcattattaacttcaat

SEQ ID NO: 48077 - DNA, 129 bp, Glycine max
  Clone ID: LIB3107-022-Q1-K1-F4
caatgggaccattcacgaatacaactcaacgagagcaacaggttaaatttctacaatacccggataacaacctacttccaatagtgttataaatgacaagactacaccagactacggaagacgacataa

SEQ ID NO: 48078 - DNA, 414 bp, Glycine max
  Clone ID: LIB3107-022-Q1-K1-F6
ctacatgccatctagagacgtcaatcgcccaatgctgcaacagcgactctgtcaaattcgtgcaatccctactctctccactcacttctcgctctcagctcacggtatcacgtactaccacgcatattgggaagttcttgaaacatcccaatcagaacctgactgttcatatacctcctttgttatataatattctacatcggattcttacacttacacgattgatacttataaacatattcccatccctgctctgatacaacacattgctactgtaactgtaatgttatctgaacgacaactcttaatccgacaacgaaatgttctacatgattatcagatactatctgcctatcatgtttaaaatagtcacacctttcatctggatgctatgcaacctgatctaccatcacc

SEQ ID NO: 48079 - DNA, 159 bp, Glycine max
  Clone ID: LIB3107-022-Q1-K1-G10
atcaattaatacatcacctcatctctaaattcctctaacatcaccttcaccccgcctttttttaacattcattaattcccatataaaccaatgcatcttccttctcaatacaccatagatccactaactctttaatgagattcaccaacatactttctt

SEQ ID NO: 48080 - DNA, 331 bp, Glycine max
  Clone ID: LIB3107-022-Q1-K1-G2
tgctgggtttcgctgcaagtttctgtgttggggacactgacccacttgatgttgcggcaatcaatagtttgtacgtggctcttggctcaccactccttgagggatggaaagccacaggaggagatccttgttttgatcaatgataatgtgttagttgtgtcttctccaacattactgcattacggctggtaggcatggatttaagtggaaagctgtgaactaatttggatttcccatccatcatagaaatggatcttagcaacaaccagattggatggaccattccattcactttgcccactactttgaggaacttgtcactatcatcaaa

SEQ ID NO: 48081 - DNA, 372 bp, Glycine max
  Clone ID: LIB3107-022-Q1-K1-G3
gttgtgcaggtattcaccaagccaatttacctcggggctgcagatacaagtctatacttcctttaattggaataaaacccgaaaaggctttggccttgcctggtaaatgtggccttcaatcccctcctaattgttgagtgtaatgaagcacttaatgaaagtcttgttcattacaagcacttagtgttcaggtgtttcattaacactgaagatgcttttatgtcctatggaaacatttatgtccctcgaataaagatgcatggtattttaatcagtgttttatgcctaacttgcaagcagatgtcgtgagtgtattaaaatagtcgtctgatgttgtatacaagatatctctactactcaatgagacacaac

SEQ ID NO: 48082 - DNA, 382 bp, Glycine max
  Clone ID: LIB3107-022-Q1-K1-G6
gttgtgcagttattcgccaagccaatttaccttggctctgcggatacaagtctattcttcctttaattggaataaaacccgaaaaggctttggccttgcctggtaaatgtggtctccaatcccctcctaattgttgagtgtagtgaagcaattaatgaaggtcttgttcattacaagcacttagtgttcaggtgtttcattaacactgaagatgcttttatgttttatggaagcatttatgtccctcgaataaagatgcagtttattttaatcagtgttttatgcctaatttgcaagcagatgtgtgtggtgtattaaaatagtgtctgatgttgtatacaagatatctctactcctcaatgagacacaacagtaataatta

SEQ ID NO: 48083 - DNA, 217 bp, Glycine max
  Clone ID: LIB3107-022-Q1-K1-G9
atcaatcaataccttacttcttccctcaattattcttactccattttcacccgggctttctgggtaattcattaatgccgaaaaacacacattgtacttccatccttatacatcatcagtaccacttactcttgacttggaggcaccaacataatctcttcaagattattaccaaagatcaaggtaaaaccaccactccctcttatatcgcattcac

SEQ ID NO: 48084 - DNA, 300 bp, Glycine max
  Clone ID: LIB3107-022-Q1-K1-H10
aacattctttctttatattacattattacaatcgaaccaattccattccacacggcaattcttaaattctaagaccctcaaataccatacaatctttaccatcttacccatatcaccaatttaatccacatactccttcctttcacctttaatccttcctcttcatatcatccaaatcttctagatactcactcacacacaataccgcttcttaattcattttcaaatctatagaactctcccttatttcaacatccaccttatacttgacaatcacctacctcaattttgccttattta

SEQ ID NO: 48085 - DNA, 419 bp, Glycine max
  Clone ID: LIB3107-022-Q1-K1-H12
gaagatggttcttgacaagccattgcgtaatttaaatccagacgttccttttggtcctgggctctcttcgacagttggagacgtatcatttcgatctggtttaaagccttggcaaaagcttaagccttctatagaaatcttatgcaataatcaggtaaatgaaagtacattgtcttgtctgtgtggaagaataacggtttatcctttttgctaggcgattaggcactcaaaagagttgtagtactgagttgtactttaggtttcttatttaactcaagttgaactgtaattactgttttggttcattttccatttttttacctcactttacacccttgagaagaaaacacaactttttattgaaatgatgaaaagagattaatttgtgaaaaataaataaactaatccatagacaaaca

SEQ ID NO: 48086 - DNA, 400 bp, Glycine max
  Clone ID: LIB3107-022-Q1-K1-H3
tatactttatattatacgaacttgtaaggggttagtttatatgtgatctattgtcagggattggtcggagctgctaaggaatgcttccgatgcggtgatcatgaacttgctggaggtagaggaagaaaggaagcacgcgaggaagcaacaacgttgaatgcttttatgttcatacttcatagcgttggataaccacaatataaatgtcgatattatttgttgcgtatataatatgggatcttaatgagagagaccatatgttagatgccttcaacatcactcatttcttgtggctgaattcgcttaataattggtttaggcttcagattatatatctttttaaaaagcaaaaatttattgtaagtaacagaaagcacttctggtgctttgattaattcat

SEQ ID NO: 48087 - DNA, 320 bp, Glycine max
  Clone ID: LIB3107-022-Q1-K1-H7
gacgacagatgggggcactcactgagttttcaaccatgggggcgatacttacacagctacatgtgctgaaggtagccaaccgtaacagcgacgtccgtgaagtccagcgcaagtactacgatcgcgacgtatgtcttctttacctcggcgaactctgtcctcacgaactcttacatttaacgaaaatggatatgggcccttgccctaaggtccactgcttgcaactgcagaaagaatacgaggatgcgaaagcaaacgggaccgatcattatgacaggcagttcgtggatgcaatagatcagcttattggtgaacgtgat

SEQ ID NO: 48088 - DNA, 353 bp, Glycine max
  Clone ID: LIB3107-022-Q1-K1-H8
gtgacatcaaatccttttttgctccttctggtgggacctctgtccatgccgattccttcttgcagctcaatttgtctcgccctttgctccgggcttgtgaggccttggggtattctaaaccaacaccaattcaggcagcttgtattccattggcattgagtggtcgtgatatatgtggtagtgccattaccgggtcagggaagacagctgcatttgcactacctactttagagaggttgttgttccgtccaaagcgcatgcgtgcaataagggtcctcattcttactccgaccagagagttggcagtccaagttcacagtatgatagagaagcttgctcagtttactgatata

SEQ ID NO: 48089 - DNA, 211 bp, Glycine max
  Clone ID: LIB3107-023-Q1-K1-A2
tgcttaagggggattgctctccatatttgaggagagtttatcggaatatttttaccacttacaaggacctctctttggcacttgaaaagatgtttagttgttttacactcattcaatgtgtctcatattgggtttctagtctggaaaatttaagggaaagtagattgatggatcttcttcattgttcagaatatgttcttacctattaata

SEQ ID NO: 48090 - DNA, 172 bp, Glycine max
  Clone ID: LIB3107-023-Q1-K1-A5
aatacccggtcgcggacgcgtccgctacttgtactaaccttacttctcaaacctttaaccttagcctccctataccaaaccagggctacttacgaaggttgtctagcacttccaaccctaactcttcgaactcgacaaccactccgttctccccaaagcttatccacatccc

SEQ ID NO: 48091 - DNA, 404 bp, Glycine max
  Clone ID: LIB3107-023-Q1-K1-A6
ggaaggcgccccatatttgaggaaagtggatctgaatagttttaccacttacaaggacctctctttggcacttgaaaagatgtttagttgttttacactcagtcaatgtggctcatatggggtttctagtcgggaaaatttaagtgaaagtagattgatggatctccttcatggttcagaatatgttcttacctatgaagacaaggatggagattgtatgctagttggtgatgttccgtgggagatgttcactgagtcttacaagaggctgatgataatgaagagttctgaagcaattgggctagcacctatagccatggaaaagttcataagtcgctactagctagtgcaatgctgtatgctttttgctctaatcctgaaagatggaagaccacatttaagca

SEQ ID NO: 48092 - DNA, 213 bp, Glycine max
  Clone ID: LIB3107-023-Q1-K1-A7
tggcggaaggcgccgaatcttagaggggagtggatctgaatcgttttaccacttacataggacctctctttgtcactagaaaagatgtcaagttgttttacactcattcattgtgtctcatatagggatttctagtcagtattatttaagtgaaagtagattgattgatctacttcatgtgtcagaatattgtcttacctatgaacacatggt

SEQ ID NO: 48093 - DNA, 86 bp, Glycine max
  Clone ID: LIB3107-023-Q1-K1-A8
ggaaggcgccccatatttgagggaagtggatctagaatagttttaccacttacaaggacctctctgtggcacttgaaaagatgttt

SEQ ID NO: 48094 - DNA, 209 bp, Glycine max
  Clone ID: LIB3107-023-Q1-K1-B1
ggcatctgactcctatagtttcgggtgctaatggcatatccccgatttccttcactcttgaaccccgattcatttccaccagcacaagaagcatggctgcaatatcaataccttctcacatgaaagcttgtacatactctgagtatggaatatccaatgaagttctcaagtttaatcagagtgtggctttgcctgaggtgaatgaagac

SEQ ID NO: 48095 - DNA, 370 bp, Glycine max
  Clone ID: LIB3107-023-Q1-K1-B10
acccactcgtccgaccacgcctccgaattctagcggcactctttttttctctttttggttcaactctcttttttttgaattcacggactcttctgcttgacgctccaacaacgttactttccccgccctattcaggatcatattgaaatcggtagaagatataatgattaataaaaattctgctgtgaaagcagtgtatggtgatgaattttggacacctgcgaggagttcacctcaggatatttggtccataaggagtgatttgcaagtcccatcttccccttatttccctacctatgcacaatgacaagggccaccccccatggttgcggagcgtttccagagtgttataagtcagcttttccaatac

SEQ ID NO: 48096 - DNA, 255 bp, Glycine max
  Clone ID: LIB3107-023-Q1-K1-B11
tattattatgtatttctttatgctgtcttcctaaggcctaacgctttctaatggaacttaccatgtcaactggtagcattatgttcaaaactattaatctgaacttgaatgtctcactcatctatttatttattcatcgtcataatacattggctacatggtacatgatccatatccaacagcattcatgctgagtaccgacatcttacagcttacacatgtagtgaccaatctaactagatataatggctttca

SEQ ID NO: 48097 - DNA, 215 bp, Glycine max
  Clone ID: LIB3107-023-Q1-K1-B12
ttttaactcttccacgccatcttactttcgactctcaaacaatctttctctctaattacattccaaatatatattaatatatatatcatttacatcaacatcataaagctataatattaaaccataatatgaatattaaccataacaacttttcaacccattgtaatattcatccaaattttaaatctatttccacaaactcataaatctattct

SEQ ID NO: 48098 - DNA, 233 bp, Glycine max
  Clone ID: LIB3107-023-Q1-K1-B6
ggaaaatgcgtaaccgtcgctacatctcacgccgtggaccactcatcgtgtacggaacggaaggagccaaagccgttaaggccttccgtaacgtccccggcgtggaagtcgctaacgtcgagaggcttaaccttctgaaacttgctccaggaggacacctcgggaggtttgtggtttggacaaaaagcgcttttgagaagctggattcgatttatggttcttttgataagccc

SEQ ID NO: 48099 - DNA, 105 bp, Glycine max
  Clone ID: LIB3107-023-Q1-K1-B7
acgaaaatgcgtaaccgtcgctacatgtcacgcgggggaccacgcatagtgtacggaacgtatggagccaaatccgttaaggcctaacataacgatccctgcgtg

SEQ ID NO: 48100 - DNA, 195 bp, Glycine max
  Clone ID: LIB3107-023-Q1-K1-B8
ggaaaatgcgtaaccgtcgctacatctcacgcggtggaccacggatcgtgtacggaacggaaggagccaaagccgttaaggccttccgtaacgttcccggcgtggaagtcgctaacgtcgagaggcttaacctttctgatacttgctccaggaggacacctttggaggtttgtggtttgaacaaaaagcgctttt

SEQ ID NO: 48101 - DNA, 100 bp, Glycine max
  Clone ID: LIB3107-023-Q1-K1-C1
tggttctctacatgggaacattgtggataaatgatacattgaaagtgctagatttaccctaggtaagatttttatccatcatcatctaatatattcatta

SEQ ID NO: 48102 - DNA, 269 bp, Glycine max
  Clone ID: LIB3107-023-Q1-K1-C10
tccaaagattctttcaattatacactacatactatttttcaataattcaataattggatattaacatttaatgatcttatgattcatcattcaatgtataaactgttaactaaagccttcatatcattaaatactctccttataaacccttcaccatgatatcattatcatcacctttgtttattctaataatgatttatgttataatctctttcattcaagttgattaattcaccccatattttctctctctcaaccatattcctctt

SEQ ID NO: 48103 - DNA, 134 bp, Glycine max
  Clone ID: LIB3107-023-Q1-K1-C5
gagagtcagacgacagagtgcagcattgctttgcgtcgctgttgatccattctggagagagaaacactttttcagttctctctctctctctctaaggtggccgacgatccaatgcccacgcgcttgtcttttca

SEQ ID NO: 48104 - DNA, 232 bp, Glycine max
  Clone ID: LIB3107-023-Q1-K1-C6
cttgcaagaggccacctaagggagagagtcacaccactaattgcatcaatgatatgggtaacttttgatccattcttcatacatcaacccttttctagttcagtcattaacaatctaaagaagacggctcctacatgcccaaacgccactaattctattcacttctaattttttaatcatgctaactggttcatcaatatattttcgttacaactaaataatattcttcttt

SEQ ID NO: 48105 - DNA, 389 bp, Glycine max
  Clone ID: LIB3107-023-Q1-K1-D10
ctcacaacctttacaaatacctatattactcagaccacggttatttcaacttgaggcgccgttccatgtacgtttcatcactcctcatactaaaacgctctaatgctcaaatcatctcactcactatatcgatagaccgacttgttacacatgaagagtcattttttaagaaaagataaaatgatcatatccaacttcaacgctcttaaccctctcaacaaccctttgcttcaatatccctacaccaacgccgtcaccactatactcaccaatgttgacagaatttttcacaagtggttgatccattattttaagatagttacattttatggtatcaataagaaggctcctattaatttcaatgtcaacacttttaccaattttttttt

SEQ ID NO: 48106 - DNA, 333 bp, Glycine max
  Clone ID: LIB3107-023-Q1-K1-D11
tttctctctctacaccttctataatcaaaatttccttgttgctcatcaattggtgttatgttagattattttaaaagatagggtcaaatcaacataagttcccctatttttatctgttctcagttggtatgtaatttcattttattttagcctgacacatatctttccctcttataagtattattgctagttcatcatatactatcattaaccacgttcacactctaattttcatcacacattatcttttttgttaataatactatataaccatcttcaattattcttaatttttttatttttttatctaaaatttctctccaaaccatattt

SEQ ID NO: 48107 - DNA, 319 bp, Glycine max
  Clone ID: LIB3107-023-Q1-K1-D2
gacacaccaaaccaaagtaagagtgagcgacttccaagaccatagtgaaatggcttccaaggctgcacttctcttgtgtttcaatgttctcttcttcaccgtggttagctccacatatgtgccatgcaacccaccccccaaaactccaaaacacccacctgtcccaaagccaccttccccaaagcaagcaagttgccccaaagacactattaagtttggtgtgtgttctgatgtgttaggtttgatcaacttgcaacttgttaagccacctaagaccccatgctgcaacctcattgagggtcttgctgatcttgaaact

SEQ ID NO: 48108 - DNA, 413 bp, Glycine max
  Clone ID: LIB3107-023-Q1-K1-D5
ggtcgccacttcgacctcaatcaccctcgcgccgtcgctcttcccttcctggtggcgacaatgtcgactcctgctaggaagaggctgatgagagacttcaagaggctgcaacaagacccgcctgcagggatcagcggtgccccccaggataacaacataatgctgtggaatgctgtcatatttggtcctgatgatactccatgggatggaggcacgttcaagttgactctccagtttactgaggattatccaaataaaccaccaactgtgcgatttgtgtctcgcatgtttcatccaaatatttatgctgatggaagtatttgtttggatatactacaaaatcagtggagtcctatatatgatgtggctgctatactcacatctatccagtcattgctttgtgatcccaaccc

SEQ ID NO: 48109 - DNA, 156 bp, Glycine max
  Clone ID: LIB3107-023-Q1-K1-D7
acgcgttcgaacacttccgagaagactaccgaagggtatacttcattcccttattcggttcttttataggtttcacttcttgcatttttgccagttgtctgtcggatagcaagatctctttgattaaattagtgtccttatctttacttacctttt

SEQ ID NO: 48110 - DNA, 272 bp, Glycine max
  Clone ID: LIB3107-023-Q1-K1-E11
cccttttggtaatagccaatgccaacttgtagtcttctctgggaacctacaatggtaactcaaagcttgctgattgttcctcaaagtgcctccatgtttaatactacaagtactgatcaatctaagtgctgctatgaatctttattctattggtacaaccttaattttcttgttaattaataattgtgcttttaactctttccaaaataataatacgtttgaaatttttccttttcttttatccttattgttcctttattatcaattttaat

SEQ ID NO: 48111 - DNA, 432 bp, Glycine max
  unsure (1)..(432): unsure at all n locations
  Clone ID: LIB3107-023-Q1-K1-E5
gcctcttcttcttgagagttctgtattctgttcgtcttttctcagctatgcacccaccaccacctattctaacagtaaaaccctcccaaaacccacactgttctaaaccccttttagcactctgtttctctgcttaaccatgtcccaatcactgaagctaatcaaggaacacgccttcaaccccaaactctggttggtcattggaataggagttgccggaatcgtggttctggtggagacacggcggagaacacggcggggaaagacacacaaacaagactttggtgcttttgttgagcgttttgagctacttcccttccctcagcctcctcctcctgctgccaagcaatcgctctctgctctaactcttgccataaacgacacatttgatgtgaaagactacgtgacagggnttggaaattctacctggaa

SEQ ID NO: 48112 - DNA, 233 bp, Glycine max
  Clone ID: LIB3107-023-Q1-K1-E6
gagcgagtgtagggagagttactccaggctacggattttaccgagctttaccaggcgtactagctatgtcactggtacccacttctcctaatcgacactgtgccctgctgtcctgagccaccctcttcccctgtcaccgccgtgttcacgaccgacacagctgcatgcacaaacttccaaggtctaactcttcacgttcatccatataggagttgccatagaatgagctactg

SEQ ID NO: 48113 - DNA, 377 bp, Glycine max
  Clone ID: LIB3107-023-Q1-K1-E9
gacctttctctctctctccacaactctttctcacccgctagtgtttccttccatcgcatcttgatttcgcaacctcgtctagcaattctccatggagggtgctgggatggaagagaataatattattaatgatgataataagtctgaggcgcatttgacttctgccgctgcttttgtggagggtggaattcaggatgcttgtgatgatgcttgcagcatatgccttgaagctttctgtgatagtgatccctccacggtgacaagttgcaagcatgagtttcatcttcagtgcattctggaatggtgtcaaagaagcttccagtgccccatgtgttggcaacctatcagtcttaaagatcccacaaggccaagaatta

SEQ ID NO: 48114 - DNA, 358 bp, Glycine max
  Clone ID: LIB3107-023-Q1-K1-F12
gttcgtacagagcgagcgatagttgaatcttaaaaacaatggcggcgaatctagacaccgactccggggcttacgatctgagcgactttctcaacgcttcttcaactgcttttcacgccgtcgactaggcaaagaggcgtttgcgtaacgcggggtaccaccaactctcttagagggaattgtgggaactgcaaccgggcaacaagtacttttttaccataaatcactccaccattgtcgccttcgtcattggcaaaaagtacgttgctggaaatggattctacataattggggctcacacagatagttcttggctcaaacttaagcctgttaccaaagtttgttaaagcttggattt

SEQ ID NO: 48115 - DNA, 186 bp, Glycine max
  Clone ID: LIB3107-023-Q1-K1-F2
ctatttcagctatagctcttaagggggctttagggaagatacaaggcacttgaagtggctgtacactctttgggattcaactacttgagaattctaatgcataatgaaatctacaaacagtcactttgtcaggaaaggtgtgtgatgataggacttgttccatcattaaatgctgaatttgatcaa

SEQ ID NO: 48116 - DNA, 249 bp, Glycine max
  Clone ID: LIB3107-023-Q1-K1-F5
gggtctaaagaacatggtttggagattcctttggcctatttgacaatgttttagcaatttcccatcttttgatactttcaaagactgattcttttggattcaaatcctttcaatttcgttccattgaagaaaaacttaatctggttcgtgcttttcttgcccgagttgacgtttgcaggcaacaagaaaatgagcaaaaactggaaatctagctgctttcgggatcctgcgggagacctgatccttctt

SEQ ID NO: 48117 - DNA, 355 bp, Glycine max
  Clone ID: LIB3107-023-Q1-K1-F6
gacagatcaatagtatcaagcagagccccaagaggagcttaagcttgcgccgaatggccacagatggttgaaaccgatatggatgccgaaactgttgcaaatgtggctacaccaaaggagactgcaaacagtgatcccatctcttatcattcctgacacttacactcttctcttaatgagaggattatttcatccatgaccagaacatctgttgctgcacacccgcgtcacgaccttgatatagggcctggtgctccaacgatcttgaattgagtgattgagattgacaacggcagcaagggaaactattaactggacaaaattttatttcttattaatatcgaccgtgttcttt

SEQ ID NO: 48118 - DNA, 140 bp, Glycine max
  Clone ID: LIB3107-023-Q1-K1-G6
aaaagacctccgaaaggtacttctttctctttaccacactaattcttcggtgtgaaaatcaggatacaatcctccttatcatggaatccaacctacaacctctcatattacatccataagcctctcatgtattccataac

SEQ ID NO: 48119 - DNA, 363 bp, Glycine max
  Clone ID: LIB3107-023-Q1-K1-H5
cctgaatgcctataagtggagacctctgcgagagcagagtgaggcctacgcaagaggtaggcacaggttctacaccacaccattatatctacgtgcaagtcaaagccggctttcatacgagttacaaacatcagcgaacttccgcataaattgtcttgtcttaccacattattactgtatgaggaacagaatagtccacgatggcacagaagagatacatcatcaacgtcgcgaacgcgcacgatgccagctactgaaggccttacacaggacctagctatcgtagcacttttgtcaaggatggaatgtctgatcctattgacgtgatcaatagctgctgggacgtttatcgacagtctgttg

SEQ ID NO: 48120 - DNA, 409 bp, Glycine max
  Clone ID: LIB3107-023-Q1-K1-H6
gaaagtgagaaaaaataaaaatcaaagagcatagtgtcagggatcattcacaagattggggagacccttcatgtgggagggcacaagaaggaggaggagcataagggtgagcaccatgctggagaatacaaaggggagcaccatggtgaacacagtagtgagtacataggagagcatcatggtgaacacatagctggagagtaccatggtgagcacaagccagagcacaaagaggggttcctagacaaagtcaaggacaagatccatggtgagggcagcgccgtcgtaggcgagaagaagaagaaggagaagaacaagaaggagcatggccatgagcatggccatgacagcagcaacagcattgacagtgattaaactgatgcatcacctatatatttaaaagggttat

SEQ ID NO: 48121 - DNA, 134 bp, Glycine max
  Clone ID: LIB3107-023-Q1-K1-H7
ctatatgttgaggtctactcaccatacaactgtgcgcaatttgccagccacggtctcgtactcactctgaactctctctcatccatcaattcctaactgccttacgttgataccacatcatatcatactcatat

SEQ ID NO: 48122 - DNA, 84 bp, Glycine max
  Clone ID: LIB3107-023-Q1-K1-H8
gtaagtgagaaaacttacaaatcaaagatcatggggtcacgggtcatttacatgatagtagatgactccttcatgtcttagtgg

SEQ ID NO: 48123 - DNA, 294 bp, Glycine max
  Clone ID: LIB3107-023-Q1-K1-H9
ggagcaagagtgaagagcgaagagaatggctcccaggggtttggtctttttggctgtgttatgcttctcagcactgtcactgagtcgttgtcttgcggaggataatggacttgttatgaacttctacaaggaatcatgccctcaggctgaagacatcatcaaagaacaagtcaagcttctctacaagcgccacaagaacactgctttctcctggctcagaaacatctttcatgactgtgcttgtcagagttgtgatgcttcacttgtgctggacttcacaagaaggagcttgtc

SEQ ID NO: 48124 - DNA, 379 bp, Glycine max
  Clone ID: LIB3107-024-Q1-K1-A1
ggagtgcgcaagagtgaagagcgaagagaatggctcccgagggtttgagctattcggctgtgttatgcttctcaacactgtcactgagacgttgtcttgcggaggataatggacttggtatgaacttctacaaggaatcatgccctcaggctgaagacatcatcacagaacaagtcaagcttctctacaagcgccacacgaacactgctttctactggctcaaaaacatcttccatgactgtgctgttcagagttgcgaagcttcactgacgctggactccacaagacggagcttgcctgagaaggaaacatatagaagctttgggttgacaaatttcaggtacattgagaccatcaaagaagctttggaaagggaatg

SEQ ID NO: 48125 - DNA, 360 bp, Glycine max
  unsure (1)..(360): unsure at all n locations
  Clone ID: LIB3107-024-Q1-K1-A10
gcagcactgacatgaccacaacaagatcacatttcataacataaagagtatagagcagcaaacgtaaaagtggatccaagaaggctacatggcaagcttccactatcttcacaagcatcagaggagaaagaggacacagtagaagagtttgatgcttataataattatgcatcttggtcttcagaaactgacatgtctgaaatggtttctgctcttgctcaagttatgggaactaccaatcggaacccatacatgccacaatcaacctcctttcctttctcaacttccgtggtcaaagatcaacctcaaccgtacccatctcaacctnctncagatcaagaggtggcaaagaagccacac

SEQ ID NO: 48126 - DNA, 374 bp, Glycine max
  Clone ID: LIB3107-024-Q1-K1-A11
gccgcgagcagacgactgaaggggatcgccttttcagaggaacaatggctgttacaggtttcaacgtgctgggtcttcgtgtttgctctgtctcttcttcttccttttcagatctgcgctgatgaatcatccaataaagagttcgtactcacattgtatcactctaactttcacgacactgtcaacaagcaccatttcatgcgtcaatcgagttctactctccatggcgtggccactgttagaagcttgctcccgagtatgataaagctgcttctatcttgagtagtcatgatcctacccatgttttggcttaaattgatgcctatgaggagaataacacacaccttgcatttcaatatgatcttatgggatac

SEQ ID NO: 48127 - DNA, 395 bp, Glycine max
  Clone ID: LIB3107-024-Q1-K1-A12
gactcactagattttttcacctccaagtctttctggtcactatgttattactaaagggttcatgacattcgcttgaaaccttggtttgtatcaattgtagcactagtttgattttggtgccaagttcttgagctgcggtggtgctgaccctgaaaagttctccaagtccgacatgagataaggctgctgctgctgctgcttttcaaagatgttggagctggtttcaattagtagacaaatttggttgctgaatttcgtgttcatgtgtcttcaatagatggtatttttaaattgatagcatagtgacaatttcttgaatgttgcttcttgacttttgaatttatctccaagacttcaaataagttggctctcttctacaatttcttaaatgctta

SEQ ID NO: 48128 - DNA, 399 bp, Glycine max
  Clone ID: LIB3107-024-Q1-K1-A2
cgatatcatatcaaatataatagtgcgatagggaaacggttgttcctagcttgtattaaaaacaatccgcaatgatatgattatagtagcgaagtgaggatatatcatagacaacacatcctgcaaataggtgctcgactgaagctacttatatcacaaacgtattcgcgtggataataatgtacaagataaagtcacatgctcaaatattaatacaatttaaataggtgaaaaaatgtataagaaaattatatgtatatatatattgtttttacctttatatagaagtcatgaacgaaaagtaaagaatttaacaacaataaataatattggttttacaggaatagaacgaaagtcgttctttgagcctaatcaaaaaaaattattcttcattcttat

SEQ ID NO: 48129 - DNA, 295 bp, Glycine max
  Clone ID: LIB3107-024-Q1-K1-A3
ctccgacaagacgacacacggggataacacatcataaataatccttattgacatactgattgggaacagtcacattcacataatctttgtcctgcattcatataactttgttccattccatctatctatgatcatctccaccaccacttgttgattcattcattaagaaaccacacacttttgaattgacaacgggatacctctacctatcttgctgatctgaatccaatgtattaatctccaattcctgttcctcttccatagactatgataaaatcatcatcatcaatatcca

SEQ ID NO: 48130 - DNA, 199 bp, Glycine max
  Clone ID: LIB3107-024-Q1-K1-A6
ctcacgcatgcgaacacacgtgggaggatgtgatagtacatcacacagagacccgtttcggggggtaagatcctatcggccggtcttcaagagccacacttgtgacagagttggcgagttggcatggctcatgaacaagggaggcaggtgaaccaggatggatgttgtgaaggagcccacgtatttgaagaaccgtgat

SEQ ID NO: 48131 - DNA, 393 bp, Glycine max
  Clone ID: LIB3107-024-Q1-K1-A9
ggtggtggagtgtgcagaagagcgtcgcagtcgcaaccctaggcagaagaagcgcagcttcaagcgagtgacagccaccagccatgggtcgtatgcacagccgcggtaagggtatatcctcttctgctttgccctacaaaaggacacctcctagctggctcaagatctcttcgcaagatgtcgaagaaaatatctgcaagtttgcgaagaaaggtttgaccccgtctcagattggtgtcattctcagagattctcacggtattgctcaggtcaatagcgtcactggcagcaaaatccttcgcatcctcaaagctcacggacttgcgcctgaaattccagaagacctgtaccatttgattaagaaggcagtttcaattaagaagcatcttgaga

SEQ ID NO: 48132 - DNA, 308 bp, Glycine max
  unsure (1)..(308): unsure at all n locations
  Clone ID: LIB3107-024-Q1-K1-B1
gggagatgggaactgcaataagcaaacgccaattgatacgtgcatatcagacatctactgtaaaacacacactcgctccaaaaaaatactatatcaccaagctcacctatctgctnatctcaaggccttatacaccgagcatgcgagataacctaacacatcatgctatatacttacccatcaggattccaagcagatacttacacaggtagcagcactacaccatcaagagcatagaagcagaacgtcatcacaagaatgttccatgatgaaccaatgaaatcattggataccatgtatgaatcata

SEQ ID NO: 48133 - DNA, 364 bp, Glycine max
  Clone ID: LIB3107-024-Q1-K1-B10
ggtgctctgctcgtgcctctagggttatcatttctccatttccattttctctctcacttttcaagaatcgtaagctatgggaaagtcttacccaactgtgagtgctgattaccagaaggccgttgagaaggcgaagaagaagctcagaggcttcatcgctgagaagagatgcgctcctctaatgctccgtttggcatggcactctgctggaacctttgacaagggcacgaagaccggtggacccttcggaaccatcaagcaccctgccgaactggctcacagcgctaacaacggtcttgacatcgctgttaggcttttggagccactcaaggcggagttccctattttgagctacgccgatttc

SEQ ID NO: 48134 - DNA, 181 bp, Glycine max
  Clone ID: LIB3107-024-Q1-K1-B11
aggccacgcgtcacgcttccatacgacgacaaaacgacacaaggtgatatacgacgacagatgggtacgggggcaaaaagacgaccggagggaactgactcacgacatggacgacaatcttggcttaacaatctgatacatgcatgaagacgctgaatgttgaccatggagaaaatgcact

SEQ ID NO: 48135 - DNA, 376 bp, Glycine max
  Clone ID: LIB3107-024-Q1-K1-B12
ggtggcagagagcgaacccaaaactagagctaccttccctgcaaaccttccactcttctctccttttccaatcaagggaataatatttcttagagatattccgaaaccatggctcacgccaatcctatgatttttgttgttggaattctaggtaaccttgtctccttctgttgctttctagcaccagtaccaacattctatcgagtttgtaagaagaaaaccacggaaggtttccaatcacttccttacgtggctgcactcttcacttcaatgctttggatattttatgcttacataaagacgggcgaaatacttctcatcaccattaacgcattcggttggttcatagagacagttacctttgcatctatatcac

SEQ ID NO: 48136 - DNA, 318 bp, Glycine max
  Clone ID: LIB3107-024-Q1-K1-B2
cccactcgacccacacgttcgaacacgacgacaacacctcaccatttcacttttcagatagaaatgaatatcaagggtcaacgttaaacttagcccgttcacgatactcatcactttaccacaccatctgactcttacaaaaccttaaatttctcatcacgtctaaaaccatctctatttgtaaaacccaagttcacatacacataaatccaatgtcataattatactatctaacatctactatcaactaacctctcgctgttgcaaatcctaatgactacgataatgcttcaattgaccatgttcatcttctcgtac

SEQ ID NO: 48137 - DNA, 354 bp, Glycine max
  Clone ID: LIB3107-024-Q1-K1-B3
acgcgaacacaccagaccgagcatactaacttctaaaatcatcgctcttactctctacaagggtctcaggtcactattttacgacaccaccacaccaaattctattactatctccacatatcacccaccttctaatcttactgattctttcaatttcatctgatttgatccatgactctaagactatccatttaactatcactttccctagatcgatgctactcagccaaccaatctacacatcattcagacgcctactacttcctatcacattcttccttttatacactgcttatcatgtaactaatacatatgttgactacagggcaacacttgccatcatatataaaaaca

SEQ ID NO: 48138 - DNA, 104 bp, Glycine max
  Clone ID: LIB3107-024-Q1-K1-B4
catatgtttaggtgtatgttgattagagcaccgacagtggtgaaggttagggaatgtcctgggacatcattggactccatctactctggtttgaaatattggga

SEQ ID NO: 48139 - DNA, 335 bp, Glycine max
  unsure (1)..(335): unsure at all n locations
  Clone ID: LIB3107-024-Q1-K1-B5
gaacatggcctataactatgggaaaggggctctgtgtgtgctttcagccttggccggaaaaaatgatggtgtagttgctggacttgtggggtgtggcctgataaaatccattgtttcaattcatctgatttgatgcatgatttcaagactggccatctcactttcactttccctcgttcgatgcttctaagccaagcaattgggacagcaataggttgtgtagttgctcctctcacattcttcctttnttacaaggcttttgatgtggggaacccagatggtgactacagggctccgtatgccatcatatatagaaacatggcaattcttggtgt

SEQ ID NO: 48140 - DNA, 340 bp, Glycine max
  Clone ID: LIB3107-024-Q1-K1-B6
tgctagaagacgacggcagaagatgacctctccaatttgcaaaaaccaattaccacctggatatcacttaactcctattaaactcacactcaccccatataaaccctccttacacaactcaaatcttcctatctgaacaccttttagcactatcattcgaataacctttacacatcaagattcaaacttactcactaagttacccgttcaaatttcaactgccttcaatcctttccctatctgcatactctaatcaatacgtcaccacaaaaagggacaatgttcataaaatcatacaattgcataccttgtttgaatcaccttaaaacctttaccctat

SEQ ID NO: 48141 - DNA, 127 bp, Glycine max
  Clone ID: LIB3107-024-Q1-K1-B8
cgacagatttcaatttagagctagactatatgaaactgataaatgtcaaagctaggctaacatctacatacacattaattagctccatcatcatacttcatatcctatccacataaccaatagccat

SEQ ID NO: 48142 - DNA, 366 bp, Glycine max
  Clone ID: LIB3107-024-Q1-K1-C1
gcatcggagtttggaaaatcgccgggctttggcggtggtttcgaggtggaacacgaactttcgacaccaccgggccaaatcctctggggatcgccccaaaacacccaccttctagccttgctgagagctacacaaactcaaaaccctaaccctaaccctagtcccatgtccctcaaggtagaaggaaccctattgggccacatggtgagcactgatcagcccttgggttcaaacactttgctgagctaccgaaccttaggctatgatgctgttgcgcaagttccttcttcgcttggtctgactgggagaaacaatcaagatcaacaacaacataatggagggttcctagttcgggaacattacaac

SEQ ID NO: 48143 - DNA, 375 bp, Glycine max
  Clone ID: LIB3107-024-Q1-K1-C10
gaagtgtggaggtgcgtgcttttgtgggggcaaatagtagatagtagatctgtcgcagagcaaagaatcgtcggcgacggcgaggctgcactataaccgcgattaactatgattagccttcgccggagcgtaaacaagatcccggcgaaatcgaagcgattcaaatgccgattggtgaagttcgaggagctgccggagtacttaaaggacagcgagttcatattggactattaccgctctgaatggcccgtgaaggaagccttgtggagcatcttcgcgtggcacaacgaaaccctaaacatttggacgcatataggaggatttctcatattcgccgtgttggcgtcgatgagcaccacctcggaactctggaat

SEQ ID NO: 48144 - DNA, 309 bp, Glycine max
  Clone ID: LIB3107-024-Q1-K1-C12
gaataatataactatataagcggttcttccatttgactcttgttctgaacgacttttcaagagaatcaaaccatggcagtgaaagtatacggtccccactgtgcttccaccaagcgggtgctggtttgtctggttgagaaggaagtcgaatttgaggttgtccctgttgatgtcactaagggggagcagaaggatcctgagtacctcaaactacagccatttggagttgttcctgtcatcaaagatggagattataccttatatgaatctcgtgctataatgaggtattatgcagaaaaatacagatct

SEQ ID NO: 48145 - DNA, 52 bp, Glycine max
  Clone ID: LIB3107-024-Q1-K1-C3
acgcgtgcgaacaccacagaaaagacctcatactttgattacctatcacacc

SEQ ID NO: 48146 - DNA, 375 bp, Glycine max
  unsure (1)..(375): unsure at all n locations
  Clone ID: LIB3107-024-Q1-K1-C4
ttgtaatgtggtaagagtttaaatataaaaagttanatggagcaaacgatacatattcaatatatttatttgtaaatgacgaagtgcattctatttttgctgaataatgacggagtgcatttgcacccatgttctttttatcgtaattgcacccatggttataatgtctttatattttatcaaaattattaaaatttcgaaataagtagaatttgtttgtttgcattttcatcaatgaattgaacttattgactttgtaccgaatatgtaaaattgtaaacacgctgcggtattgccgaatactccctcataggctaacagatactattgtaaattatatacataatttattatatcaatttattaagagtttta

SEQ ID NO: 48147 - DNA, 426 bp, Glycine max
  unsure (1)..(426): unsure at all n locations
  Clone ID: LIB3107-024-Q1-K1-C5
ggttctagtgtatgtgattgttgtgactcgttcgtcttcgtcgttatcttcttcttttgttgtttgtgtgtttgttttttctctcacctgaaaatgtcttgctgcggtggtaactgtggttgcggaagcgcctgcaagtgcggcaacggctgcggaggctgcaagatgtacccagacttgagctacaccgagtcaaccaccaccgagaccttggtcatgggagtggcaccagttaaggctcaattcgagagtgctgaaatgggtgttcccgctgagaacgatggctgcaaatgtggagctaactgcacctgcaacccctgcacttgcaagtgaggtgttggagagctaaagcttcaagcagaaatggcccttagaaataatgantaaaactatatgtagtttcaaaacttcaaaattatgtaatat

SEQ ID NO: 48148 - DNA, 224 bp, Glycine max
  Clone ID: LIB3107-024-Q1-K1-C6
aatggggtaagagtttaaatataaaaagttagaggaagcaaacgatacatattcaatatatttatttgtaaatgaggaagtgcattttatttttgctgaataatgagggagtgcatttgcacccatgttttttttatcggaattgcacccatggttataatgtctttatattttatcaaaattattaaaatttcgaaataagtagaatttgttggtttgcattt

SEQ ID NO: 48149 - DNA, 325 bp, Glycine max
  Clone ID: LIB3107-024-Q1-K1-C7
gatcatccaacatcacacacaactacaagaaagaacttcgttataaccaaaaccaacaacaactatggcaagttatcagaagcactacgatgatcagggtcgcaaggtcgacgagtatggcaatgttgagaggcaaactgacgaatatggcaacccggttcatgccactagtgtcacttatgtagccaccaaaagtgttggtggctacaatgatgacgctaataagcaacatgatattactggtgtctatcccgagaaagacaccggtagacatcattttggtcgtggttacgacggtgacactaacaagcaacatgatgctact

SEQ ID NO: 48150 - DNA, 263 bp, Glycine max
  Clone ID: LIB3107-024-Q1-K1-C8
atgagaccacacgacgggacgatatgatataagacctacattctacaaggtgcttagaatcatccatgacatacttccattatcattcgttcacataagacatacacaatactttgtcctaataatgacgattatcactttccatagtatctaactcacaattattgcaaccttagtgatgcccatagtatatttacattaatcttcttaaattgattcatgttcatcatattacgctgttaaggtcgtacatacatctgatg

SEQ ID NO: 48151 - DNA, 223 bp, Glycine max
  Clone ID: LIB3107-024-Q1-K1-C9
caattcccaattcgaccgacgcgtcacgccacccgtcacgcactgcgtacacgacagcagacaacaggacggggatcgtacactcataaatcaggtacatgggccatgatactacgacctggatctagccaaacgacacacacagctactcataactagattagcgctcaagttctactgttgaataggctgttggtaggcctttcgaatatcacacaatcag

SEQ ID NO: 48152 - DNA, 282 bp, Glycine max
  Clone ID: LIB3107-024-Q1-K1-D1
agagaagggtctgagtgatttggcaacccattatgtcagcgagcatggagttagtgcaatcaggaggctgaggaaaactgataataatagaattgcaaaggcttgtggtgctgttattgtgaacagaccagatgaattgcaggagtctgatgttggtactggtgctgggttatttgaggttaagaaaatcggagatgagtactttgcatatattgttgattgcaaagaacccaaggcttgtactgttctactaaggggtgctagtaaggatctattaaatga

SEQ ID NO: 48153 - DNA, 393 bp, Glycine max
  Clone ID: LIB3107-024-Q1-K1-D11
ggacccaggatgaggatcgcgtgagcactcctgggcagatccgcacaagcatgtgcatatcaaatcaagcatcctgttccttatctctgtctctgcatatcccttccttcttcttctctctctctctctaaaaccctaattctatacatggaagggaaatctcaaatctaatgactaattaattaatccatcgatcaagcatggagtccgaactcaaagacctcaattcgaagccgccgaacggcaacggcaacagcgttcgcgatgaccgtcctctgctgaagccggagccttcggtcttcgtcgacagcatcgacgatatggagaagaagttcgccgcttacatccgccgcgacctgtactgcaccatgggacgcggttagatgccttcca

SEQ ID NO: 48154 - DNA, 330 bp, Glycine max
  Clone ID: LIB3107-024-Q1-K1-D12
acaagggtcctactctgctagatgcacttgaccagatctctgagcccaagaggccttctgacaagcccctcaggctaccccttcaggatgtgtacaagattggaggaattggaactgtgcctgtgggacgggttgagactggtgtcttgaagcctggaatggtggtgacttttgcaccaactggactgacaaccgaagttaagtctgtggaaatgcaccatgaagctctcacagaagctcttcccggtgataatgttggattcaatgttaagaatgttgctgttaaggatctcaagcgtggttatgttgcctcgaactcaaaggatgatc

SEQ ID NO: 48155 - DNA, 288 bp, Glycine max
  Clone ID: LIB3107-024-Q1-K1-D2
cgaccgacggggaattttgaaccatataatacttttgtgcatatgtgacatgtgtgtgcatttaattaattcgtgaatgcttgcttatatggcaaggcatttgctgaaacttcaatcgtgaacacacattttgcagcatagacaaatggaagactacgatataaagacaattgctgttggagttgtatcatggacatcaactattgtcttagtgagaagaatcttttccaaacgctcgatagacttctggaccgcgttgtgtcaacactccatgcaactttagcacta

SEQ ID NO: 48156 - DNA, 300 bp, Glycine max
  Clone ID: LIB3107-024-Q1-K1-D3
gaggcatcacctcgttgtgttgtgcatgaaaatggtgagcgatgtcgaagaatctctgcggatgatgcccaatatataccctttttccgtcgattcatcttctggcaagcaacttgaacaatattctggacggacattagcatttactggggacgtgaattgtatgcaagatgatgataatctactggagattacccgaactaaaattggaagtttgcttataagacactgacatttgacagatcgtcttgctagggattctgacaagataatatttgagcgtctacatatggagtttga

SEQ ID NO: 48157 - DNA, 217 bp, Glycine max
  Clone ID: LIB3107-024-Q1-K1-D4
tgatgcatcacctcgttgtgttgtggttaaaaaggtgaaccgggtgtcaaaaattttttccgaagaagcccaaaaaatacccttttttcgcccattcatcttcttgcaagccattttaaccatattcttgaccgacatttgcatttaccggggaagtgaaattttatgcaagatgatgataatcgcctggagattacccgaactaaatttggaagtt

SEQ ID NO: 48158 - DNA, 189 bp, Glycine max
  Clone ID: LIB3107-024-Q1-K1-D5
gactacattggggtttaaacaaatacaatctctcgatataaaacccaatgatctcaccctcactctgaatctgatttctcactcttcgcatctcgttcggttcatcagcgtgtgtctcagccatggcgtattcctacatggaagccaatgtctgatttatgatattaatgtacatttatgaaacttact

SEQ ID NO: 48159 - DNA, 391 bp, Glycine max
  unsure (1)..(391): unsure at all n locations
  Clone ID: LIB3107-024-Q1-K1-D6
gacagcgcagagccgcctcaacatctgaaacagactgtatccctaatccctatcttcttctctgctctctccgcacgctttggctcctctgatctcaggtgttgttggcttggtatccgtgcaagttctgctgtagccgatttgaaggtgaaggtgtcaccttaaagtttctttcatgtttgatcaggctactatccatttgggagcaactgagctgcttggagagtatttttcttcttctagaaaaaattacagaccctcatcccagagagttagctgtatgcatcgcgagacatatcagaaattcattcagttntctggttgcggttggccaccttccattatacttgagggagattcttcaagggcacaagctaccttagaggctgaa

SEQ ID NO: 48160 - DNA, 203 bp, Glycine max
  Clone ID: LIB3107-024-Q1-K1-D7
cagtacatagaccgctgaacatctgagggacactatatccctaatatgtatcaggtccattactgtctccgaacaactgttgtcgtactctaatgctattgccgatgatcttagccatacatacatgccgtgctatgcgagtatataatattgatgaggaagaataacacttacttgatgtttaatcacaactaccatccata

SEQ ID NO: 48161 - DNA, 150 bp, Glycine max
  Clone ID: LIB3107-024-Q1-K1-D8
aggcgtaagaccacgcgagcgtacgctaatacgacagatgaacatcatagggagtcctgatcctgaacatcaatatagaactctacattgtcattactctatcactacaataacctgagctcgacacctcaagccagacgctcagaacag

SEQ ID NO: 48162 - DNA, 234 bp, Glycine max
  Clone ID: LIB3107-024-Q1-K1-D9
ggaacacaagttcgccaacgtttgatgctcgtcaagcgtgcacttacatagaataccggaacccgatccaaacgccaacttattcctacacagcttcccggaaatatggtactcgtggctgctcaagatgatagctctcaaccacgccgcattcagagcgggattctttaactacataggttacaaaatgtgcaaaccgccgtgtttacccgataagaccttttgttccgatct

SEQ ID NO: 48163 - DNA, 297 bp, Glycine max
  Clone ID: LIB3107-024-Q1-K1-E1
gattgaaaatcttttaatttcagatattggtcaataaatgatcttgacctaatatattgaaaatcaattcaaaaatagaatctactgtctaaagactcattattcaaccaaacgagacagtcgtgttactctatagtgactgagcaccagaaaggttaagaatgtagcataaccaaaacaatgaaacacgtgatgtccaagatcatgctgttaacggaggtatcaatggcgatgatgcttagactataaataaccttgctatccgatctatcaaggcaggattactactttgataaa

SEQ ID NO: 48164 - DNA, 444 bp, Glycine max
  Clone ID: LIB3107-024-Q1-K1-E10
gagagcctaacaattgctcagtttcctaagcattaatgactagttctaacaaaaggcttgaggttcaaacagaagatcaaactccacataaatggtgtgtttcactgggggaagaggctttcaagagatttttcagccagattaatccaacagtgcataaggtttttggtgatggatcacttttcagtccactgttgtttgggaagttctttgatccttctgatgccttccctctatgggagtttgagtcagatgtgttgttatctcatttaaggagttccagccaaaacactgtggattggtgtcagacaggtgaaggctatgtattaaaagcagaaataccaagtaagacaaccagtttttcattttactcttacttgtaagctgaatctatggtaagcaaattatgatacaatgaaactgccccatcatattgaagacctg

SEQ ID NO: 48165 - DNA, 376 bp, Glycine max
  unsure (1)..(376): unsure at all n locations
  Clone ID: LIB3107-024-Q1-K1-E12
ggttctggtttgtcgttctttctctcgcaatcttgactacattcaccgagcatttgcattcacattgaatatggctgagactacacaatctaatgctgagttgttggagtggcctaagaaagataagcgccgcttcctgcatgttgtgtatcgtgttggtgatcttgatcgcaccattaagttttatactgaatgttttgggatgaagcttttgaggaaaagagatattccagaggagaaatatgccaatgcttttcttggatttggccctgaacaatcccattttgttgtggaattaacatacaattatggggtgacctcatatgatatnggaactggatttggacattttgctatcgcaactccagatgtttac

SEQ ID NO: 48166 - DNA, 313 bp, Glycine max
  Clone ID: LIB3107-024-Q1-K1-E4
acattgggaccttacagacatcaacatatctcatgtctctggctaagaatcgaaacagagagctcacacattggcatcagtgtatctaccaagagaacatcaattatcagtctctttcctctattgcaaaccccaaaaatgttctggttattcatccatgatatcgtcgacacctggggtactcaccttatcatgcctcactacaaaatatcaaactttgtaccattgacaatatcgttgactaagtctttaatcaatctttccctgacatatcatcaggatttgactacccacatctaacacttactggtct

SEQ ID NO: 48167 - DNA, 303 bp, Glycine max
  Clone ID: LIB3107-024-Q1-K1-E5
gggagctctcgtcctgtgtatctgactggagctctgtggcccctctcacggtcttcgctatccaaatctctgaacgattcaacgacgccgtctttgagaatcgcgatttgacgctttattacgtgattctccctcctttctgccattaacttcattatcgggtttcttcaaagcgcaagttctttcagctaaacgattgaaggccgttagccattaaaaaagaccgaatcgttgtgagttttattgttaacgtttctttgtttgttacatcaaaatcttaattgcgcagtggtatttaatttt

SEQ ID NO: 48168 - DNA, 433 bp, Glycine max
  Clone ID: LIB3107-024-Q1-K1-E6
taggaacttgaattgagaatagaatactccgggatcttgctgagaggctaaacctaaaacccttacctttccttaccgctctcataatgagggacagaaactgagagtgaaatgcagaaactgctacgccctattacttatccggtcgtcatcctctctatctacgtcaccgtggctactccctatctctcgttgccccccaaagtttcaaacttggtaccaatgtcatcagcgttcacttcttcttccctcaatccccaacttacttattctcgctatttgactctctctaccaacacttgctctgtctgcaagtgtctcagtctaacccactcccacaccaggaacaacaacaagacccttcttcttcttaaccactctagatacctcgtcttacattcggcttcagaaggctccttcatcacccaacatg

SEQ ID NO: 48169 - DNA, 416 bp, Glycine max
  Clone ID: LIB3107-024-Q1-K1-E7
gaagagaaaaggtggtggaagataccttttgtttgagactttctaaagataaagggttttgattctgcattcagaaaggttattggttctgatatagtacaggccggccaatttgtggaatatgcatttgggcagttaaagtcttttaacaattcatatcttccgaagggccagcagtctgatattaataatgataagtatgacactgaaggtacacgggaactgagtgaatctgtttctatcttcaatatgccttctaatgaagctggtagtcaagaagcctccagagaagattgcgttgaacagaggaactcaaatgaatttcacaaacaggacaatgatactgaaaatggacatgcttctgaatcatcatcaaaagttagtgaggaagagctgtcaaatcaaattttttggag

SEQ ID NO: 48170 - DNA, 404 bp, Glycine max
  Clone ID: LIB3107-024-Q1-K1-E8
ggtcttccagtcatcaacatatggcaaggttcttgttttggatggagtcattcagctcacagaaagggatgagtgtgcctaccaagagatgatcactcatcttcctctttgctctatttcaaaccccaaaaaggttttggttattggtggaggagatggtggagtcctgcgggaagtagctcgtcatgcctcagtagagaagatagacatttgtgaaatagacaagatggttgtcgatgtctctaaacaatttttccctgatatagcagtaggttttgaggacccacgtgtaacacttactgttggtgatggagttgcattcttgaagaatgttccagaaggaacttacgatgcagttatagtggattcatccgaccctattggccctgctcaagagctgtttg

SEQ ID NO: 48171 - DNA, 388 bp, Glycine max
  Clone ID: LIB3107-024-Q1-K1-E9
ggtgctctgtgattcccagaccttattttttctgggatttgcttcaaatttcaggagattaattatggctcaacccacaacaagaataggccttgctggattggctgttatgggccaaaatctggcactcaatattgctgataaaggctttcccatttctgtttacaaccgaaccacttccaaggttgatgagacagtataacgagcaaaacacgaacgaaatcttccagtttatggctaccatgaccctgaagctttcgttcattccattcaaaagcctatggtgataataatgcttgctaaggctggcgcacctgttgaccataccattaagaccctatctgcgtacatggaaaaaggcgactgcataatcgatggtggtaacgaa

SEQ ID NO: 48172 - DNA, 375 bp, Glycine max
  Clone ID: LIB3107-024-Q1-K1-F1
aattcgagcgaccgctttctttctttcttttgctagatgactactcttaataaatgattcggtgcaaagggatttttttttagtgaacgtgtcacagttaattactcctttttcttgtaaagacgaagaaacacttgctatttactgtactatttagctcgacgaccaagaatcaaattatcactatatttcttcctttttctacttctttttccaagtgcaggaaaaccccaaggagttgcgggtttatttctaccaattggggccctcccttcaccacccccatgcggatggtatacggggttcataactactcctgtaactacaggacgcttacttagccaacattaaaatccggtttaacctaaattttcc

SEQ ID NO: 48173 - DNA, 418 bp, Glycine max
  Clone ID: LIB3107-024-Q1-K1-F10
cccacgcgtccggggcggaagaaaaaccttgtatacagactgatggaaagtctattagtgcttccacatttcattaatattagttagattagttagattgaatagtttttaatttagctaattcgctttcttaatcttaaaagtatatatatatataattatataatataaatataatttcttatatatataatttaaaatattttacaaaatttttttattctaaaatcgaatagaaaaaagaaaatctttcttttcactaacctctagtaaaaaaaatgaataggcaagctatcttccgattattttagtttttttagagaacgaatcgggagacattacgaaattttttcaaatagaaataagaaagagtataagtatgcaaatgaatctggcttgattcttttttttatactta

SEQ ID NO: 48174 - DNA, 364 bp, Glycine max
  Clone ID: LIB3107-024-Q1-K1-F11
gacagcactgcactcttcgcaacacaacaaaaaaagacaacccagagagcgcgtcttaataaacgctcttctctgaaaacccccatttcttttcttctttcttcttctctttcgcttcttcgatcttcgatcttcgtcgctgaaaatgagagagtgcatttcaatccacatcggccaggccgggattcaggttggaaacgcctgctgggagctttactgcctcgaacacggcattcagcctgatgggcagatgccaagtgacaagaccgttggtggaagtgatgatgctttcaacaccttcttcagtgaaactggggcaggaaagcacgtgccccgtgcgatttttggagatcttgagcccact

SEQ ID NO: 48175 - DNA, 241 bp, Glycine max
  Clone ID: LIB3107-024-Q1-K1-F12
gacacacgaaggcttgatgggtttccttgaaccattaatcaagccgaaatatttgaaagggttaccggcattgacctggggggcaatctgaagcttccagaagaagcactggttgcaaaatgccttggtagaaaaatttgtgatcaatgtggaggaaattttaatattggcttcattatcgtcaaaggtgagaatgggccttccggaatggtcatggcttcacttctttcttctgcacact

SEQ ID NO: 48176 - DNA, 363 bp, Glycine max
  Clone ID: LIB3107-024-Q1-K1-F2
gaactagttgagaaaccacataactaccccattataggaacaaaatgggtatttagaaataaactagatgaaaatggtatagtaattagaaataaagctagactagttgcaaaagggtacaaccaagaagaagggatagactatgaagaaacctttgcacccgtaactagattagaagccattaggatgtttttagcttatgattctattatgaactttaaactatatgaaatggatgtcaagagtgccttcctaaatggtctaatccaagaggaggtatatgtagaacaacctctcgggtttgaagactcacaaaaattagatcatgtctatagattaaagaaagcacttatgggttaaaac

SEQ ID NO: 48177 - DNA, 300 bp, Glycine max
  Clone ID: LIB3107-024-Q1-K1-F3
gattcctaggatgatgcgtctatattacgcacgacggctttctgcttttcaaattatgtgtcgccccaatcctttatgcttctcttctcgccatatccattgagcgactttgccttgccgccactatgattgaatgtagacgacaaccgacatgacagtgcgtgcttgatgttcaagacactgttgcagggacttgaactttgctagaagctgggctataggcaagtgtagtgggattctaactgcgtcacacctgatgagcttgtgcacaaggaagtatcagtgcaacaccattttggc

SEQ ID NO: 48178 - DNA, 380 bp, Glycine max
  Clone ID: LIB3107-024-Q1-K1-F4
actcttcggacgatgccacattattacacactacgcctatgaacatcacaaattctgggtccacccaatcctacatgcctatctcttagacatattcattgactgactgcgcctggcccacactatcatagaatgtacactacaaccaacatgacagtcccgcctttacattaaatacactgctgaagatactacatcattactatattctgacctataacatatattacatctatgctaactgtgactcactcagtgagcttgtccactaagacgtctaagtacaacaccactacagcaatgagctctcctagatatcgaagcatttgtatgtacactacaacgcattccttagatgaaacaaacacttatgccaacat

SEQ ID NO: 48179 - DNA, 177 bp, Glycine max
  Clone ID: LIB3107-024-Q1-K1-F7
tgggctcgtagagcatatcttccgactcaaagcttattgcctctataggatattcctttcatacttcctctatcttgtatactaaatctatctatttgctgattatacctgatggacgctattaaatcccatatatattacccaaccttacatgacattcttaactatcacgactct

SEQ ID NO: 48180 - DNA, 433 bp, Glycine max
  Clone ID: LIB3107-024-Q1-K1-F8
gacaacaccctctattaacctttctctgtcctctgtttcctctctcttggaacaaacgacaagttatggtagtatttgtcattcatttcacaaaactggttcacctttggacccatggcttctaaaaactccacgttgttccagtctcgcttcttcctcttcggcttctattgctgggactgggagtttctcaccgctcttctcctctttagttcttcttcctaatcaaataaccttctccaccatacataaacctttttttttttgtcttttgtacttaaatttctcattactacatcaacaaaagaggcatagattttttcttcttttattaaaataatagtttgtgaggtaggtggagggtagatcgggaagaaaaatgtcgcagcagcagcgttcgatgccggcgccgttttttgacgaaatcgtatct

SEQ ID NO: 48181 - DNA, 410 bp, Glycine max
  unsure (1)..(410): unsure at all n locations
  Clone ID: LIB3107-024-Q1-K1-F9
gaatgtttataagagaagggggaataattgttatgtgttgtcaatagcagttagttttaataggacaacaattactattattaggagtagtttatcaggaatagttagcagttagttttaataggacaacaattactattattaggaacagtttattaggaacaattattttaattaggtagttatgggtatgtgtagaataagaaggaaaaacagaatcatattctggttatcctgaagatgtgtggtttaaaccttgggaggaagagaaccaagctctcgaaatcttggcttgtttgagtgaatattatgattctatgttctaattctatctctgntttggaaagaataattcctgcagagtgtttctataaaattcagtcattattatccaatttctatcacaatac

SEQ ID NO: 48182 - DNA, 377 bp, Glycine max
  Clone ID: LIB3107-024-Q1-K1-G1
gaaaacagcacatcataatgtttggcagtataaaggcatcagcgctgccagtgtcgtcgcgttcagaggaaggaggccttcgcagacgtctttcttcgctgtctctgaagatccaagacagcccaacatggtcattttccagatccaagtccctctcatccatgggtgactatgtaaggacatgcttggcctggatcctctacaggaagctcatctttgccacagatctcgaaatgaacgaccagaaaactaaactccttggctcccccaacaggggcacttggagccatgttttctataagctgccctctgaaatcaaaaggttcatctttacttctgatcacgccacttttcccaaaacctaccacaggtcctaa

SEQ ID NO: 48183 - DNA, 351 bp, Glycine max
  Clone ID: LIB3107-024-Q1-K1-G11
ggagcactgagcaggtgcaccaaacaaaaacaacgacaacttcacacacagctgacgcgtaaactaagattcaacgtctgcgctctgcagccaccatacaatagatccttcattctttctctgcaacgatcaaacaacaaaaaacactgcacctcttcttctggatttggtgaagaagaagaagaagaagaagaagaagaaagtgtgatttgatgattatgaattgaagtgtgagaggtgaagagatgaacgtgagccatgcttcggttcacccagttgaagaagctccaactactgaaggtggtggtgaccaaaacgtcaacgctcctagggtgaggatgaaagatgttc

SEQ ID NO: 48184 - DNA, 328 bp, Glycine max
  unsure (1)..(328): unsure at all n locations
  Clone ID: LIB3107-024-Q1-K1-G12
gtttcagatgatggagctgccatgcttacatttgaagcactttccgagacttctgagtttgcaaggaaatgggttccattctgcaagaagttctgcattgaaccacgggctcctgaatggtattttgctcagaaggttgactacttgaaggataaagtggatgcaacatttataagagaacgtcgtgccattaagagggagtatgaagagttcaaagtgaggattaatgcattggtggctttggcacaaaaagttcctgaagatgggtggacaatgcangatggtactccatggcctgggaacaatgtcagagatcattcccggatga

SEQ ID NO: 48185 - DNA, 393 bp, Glycine max
  unsure (1)..(393): unsure at all n locations
  Clone ID: LIB3107-024-Q1-K1-G2
ggggtttggttctcagtgtacccaaaaacagaggcggaaggaggaagaagtagaagaagattagagagagtgagtgagtgagcgagggataattggcgagttagggtttcgaattgactcactgagtctttgcattgtgtcgccggtttttttttcgccggagaaaactcgtgctccgatctcctctgcttttgttttcgatagcatagctgtttgaaaggttcggttttcccggcgaggatagtgggattttccggggattccttggtgaattgagtttgggggaattcttgattttgacctaaagcaaaggtctttactcaaaagttttactggattttgtgtttntatttttattttctatnnntttttttttgcgttgagtaaaccgag

SEQ ID NO: 48186 - DNA, 281 bp, Glycine max
  Clone ID: LIB3107-024-Q1-K1-G3
aagttaccaaagtttgtggggcattagctaaacggaaacaatggtaatattcggatattatatatagataggagggataagttattttaagagtaactctaaaagagttatttcttattttcatcatttaagtttttaaaatataatgattaagattaattaattaattagtataatcattaaatctaaaaaaatagatgatggaaataaataataactctaaaaaaaattactcttcagataattatatatagagagagagagggagagagatagagagt

SEQ ID NO: 48187 - DNA, 134 bp, Glycine max
  Clone ID: LIB3107-024-Q1-K1-G5
aacaccgaacctgccactacacaatggggcccatgatactttctttttaccgggagttctttttcggcattaacaactaccgtatcacttgctgcttactgaaccgaacaaacgggcctcggaccactttcaat

SEQ ID NO: 48188 - DNA, 109 bp, Glycine max
  Clone ID: LIB3107-024-Q1-K1-G6
acgtgtgagaacacctccaataagaccacagaacgtgacactacacatttgcgcccgtgatacttcttctttaccttcacacctttcactcttctatcaacttccaatc

SEQ ID NO: 48189 - DNA, 424 bp, Glycine max
  Clone ID: LIB3107-024-Q1-K1-G7
gaaggtgcaagagtttgttgtgagctataagctggtttatcgtgaggagaatatgaacttgtctgttttctatgatgctgcactagttttggtagcatggccatgccatggcgcaggctaccaaaggttccctctccgaatgaaaactgtctatggtgagcgttcttctgaggtaaaatgcgcaagttttaagcttgctgtgcatgcacacaccatccgagcttttaatcccattcctgaaaatgcccttgacccaccaaaggactacattaattgctaaccatttaaatcagacttttaaacacttaagccacatgctatcttatatgctaatgaacgctgagtccatcacaacgacatatttatattcggcatatataacaccgtactctctaatatcccatactatgaaaaacatggatat

SEQ ID NO: 48190 - DNA, 434 bp, Glycine max
  Clone ID: LIB3107-024-Q1-K1-G8
ctcacatctaataacttcagaaacagcacaagcatctggcaacacggctgaagcagtttcctgcttagcataccttgttttcaaatttgattctccatccaaattcattgtctgaatataggcaatcccacttggatcactcgtccccaacaagaccatgtcagcaggaatcatctcatcagcagagattttaatgacatcaccagcctgtatatttttccatttcttggggcagaactgagccgattgaagaaccagacactctcgattgttttcattgcgatcggacctgtgcctgcgccaatcctcataggcatccttgatagctgtgacgcaaagcacaaacaagagggggaaaagggagacagttcgcccaaaaacagcgagcggaagaagctgattgagagcggcaatggcaaggaaataaacataag

SEQ ID NO: 48191 - DNA, 438 bp, Glycine max
  Clone ID: LIB3107-024-Q1-K1-G9
aatcccgcgaattacttctgaaaattacttctgaattaatgaaattttttcaataatttaagaaaaaatatttaagaactatagcatttcgcgatttattggtaatccactttgattctctattaaccaataattttggactattaccatggttaaagtgaatagtttgaagtctagacgcagtgtagtactctttctaccactatgttaatacagaaatgaaatggtttcgataaaattattagatttttttttcgatatagaacactcatgtcgataaaatggcttgaatcctatttacttacggcaagaaattgaaaaacgggttaatttaaccctcccttttgtacaatgcgtaatcgatgacctatgtataaatgaataagaattctttggatttgaagaaaaaaaacaactttgctgacatatatttgtttg

SEQ ID NO: 48192 - DNA, 125 bp, Glycine max
  Clone ID: LIB3107-024-Q1-K1-H1
acgcatgcgtacggacgcctgaagacaaccgactggaaggggcaagattgttccaccatctggaagctgggttatcgctctgcgaatattaactttcctgtcaaggatcatgctgcactaggaaa

SEQ ID NO: 48193 - DNA, 266 bp, Glycine max
  Clone ID: LIB3107-024-Q1-K1-H2
ggtttggaaggcagcggaaacaaacatgtcgaggggttactgcgctaagcctatgactttgcagttgccgttgcaaccaagagcatcatcatcattccattcccacgttggaggagtaacagtaacatcctcaacactgtctcttcgactctcttctactcttgttttcacccacaaccttcacttccaacccagactcatacgcgctttcacaaccgttcgatgctcctcggcattgactcctcaattgaagtctaccttggatc

SEQ ID NO: 48194 - DNA, 370 bp, Glycine max
  Clone ID: LIB3107-024-Q1-K1-H3
gcgaaattaaaattgtatcaaaagaaattactactaagcattaactttataactttcgttaatgggttatttctattattacaatgtatataataatttgtataaaataagcaactaaagagaatattatttaaagtacaattcacgttcattaataaagtacaattgatatgtctggtgtcaaatatcaaaagtgcgttggtacaggaaataaaaatttgtgtacgatttacggttgatatgaaagtttaatttaatatagcattacactaccttttttaatctaccacaatattgctaacaaacaccaaccggttttttcttttgatcatatattgtttatcatagtatgctagattcaaatattaac

SEQ ID NO: 48195 - DNA, 366 bp, Glycine max
  Clone ID: LIB3107-024-Q1-K1-H4
ctggagtcacggcctaatgtggggaaaacggacccaaccactaaggcagacaacgggacacatgttcatcaccatccgcaaccacattactttgcttcaacggagtttgatgtcaatgacagtgcgctcaaattcacccacgtcctctacaatctctcccccgctgagctgtatgagcaagcgattaagcacgacacaggatcattcataacagcaacgggagcgttagctacactttctggagcaaaaacggtacgctcttcccgagacaaacgggttgtcaggtactacaccaccgagcatgacctctggaggggaaaaggctcagccaatattgaaatggactaacataccttcttaatcaac

SEQ ID NO: 48196 - DNA, 256 bp, Glycine max
  Clone ID: LIB3107-024-Q1-K1-H5
gggaggattgttctaccatagggaaaatggtcgtaacctctcccaaattaacctttcctgacatggatcatcttcaactagaaaaggaccttgttcaattggattttgatccctctgacaaggcacctgggtcaaagtcttactacttaaaaattaaacccttttatttaaaaaagcatcttttaaattcgcactttgtttaatcaataaaataagctttaactccattaacactacctgaacttttccaaccctc

SEQ ID NO: 48197 - DNA, 344 bp, Glycine max
  Clone ID: LIB3107-024-Q1-K1-H6
gaactcgttctagtgtgtgtgatggctgtgactcgttcttcttcgtcgttatcttcttcttttgtcgtttgtgtgtttgctttttctctcacctgaaaatgtcttgctgcggtggtaactgtggttgcagaagcgcctgcaagtgcggcaacggctgcggaggctgcaagatgtacccagactcgagctacaccgagtcaaccaccatcgagaccttggtcatggcagtggcaccagttaaggctcaattcgagagtgctgaaatgggtgttcccgctgagaacgatggctgcaaatgtgcagctaactgcacctgcaacccctgcactcgcaagtgaggtgtt

SEQ ID NO: 48198 - DNA, 163 bp, Glycine max
  Clone ID: LIB3107-024-Q1-K1-H7
gggagtcacggcctaacgtggtgaaaggggacccagccactaaggcagagaaggggacacatgttcatcaccatccgcaaccacattactttgcttcaacggcgtttgatgtcagtgacagtgcgctcaaattcacccacgacctctacaatctttcccccgc

SEQ ID NO: 48199 - DNA, 374 bp, Glycine max
  Clone ID: LIB3107-024-Q1-K1-H8
tgacatcatatcaaatataatagtgcgaggtggaaacggttgttactagcttctattaaaaacaatccgcaatgttatgattatagtagtgaagtgaggataaatcataaacaacacatgctgcaaataggagtacgactgaagcttcttatatcacaaaagtattcgtttggataataatataaaagataaagtcacatgctcaaatattaagacaatttaaataggtgaaaaaatgaataagaaaattatatgtatatatatattgagagtacctttatatagaggtaatgaacgagaggtaaagaatatagtaacacgaactaatattgcatttacaggacaagaacaaaagtgttttatgagcctaataa

SEQ ID NO: 48200 - DNA, 412 bp, Glycine max
  Clone ID: LIB3107-024-Q1-K1-H9
ggcactgcaaatcacttttctactttgagtcttcgggatccttctttttctgcttgaactcaaacatggcagatgaggtggttctgctagatttctggccaagtccatttgggatgagggtcaggattgcacttgctgaaaagggtatcaaatatgagtacaaagaagaggacttgaggaacaagagtcctcttctcctccaaatgaacccggttcacaagaagattccggttctcatccacaatggcaaacccatttgtgaatccctcattgctgttcagtacattgaggaggtttggaatgacagaaatcccttgttgccttctgacccttaccagagagctcaggctagattctgggctgattatgttgataagaagatatatgatcttggaaagaagatttggacatc

SEQ ID NO: 48201 - DNA, 346 bp, Glycine max
  Clone ID: LIB3107-025-Q1-K1-A3
gcgaaagacgacagaacggggggcgaggtttttgtcttgtgattatccttgcagacacagattgtcttgtcggcaaaatcttccaccaacaacacacagccatggcaggctcaaacattctttctcactctccttcccttcccaaaacctacagccactccttaaaccaaaacgcgttatcccaaaagcttttttttctgcccctcaaattcaaagccaccacaaaaccacgtgctctcagagcggttctctcgcagaacgctgtcaaaacctcggtggaggacacaaagaacgctcattttcagcactggttcaccaaatccgaagatgggtatctgcactgtga

SEQ ID NO: 48202 - DNA, 353 bp, Glycine max
  Clone ID: LIB3107-025-Q1-K1-A4
tccggctgcaagaagacaccaggaggggataagaaataagttataatatattttacattgtaccttatttcttataaaaagaatcaaagatagataagattaagcaacttagtatctttatacacaccatgcacacaccatggatatatatatgtattgtagtaactactatggggaattatcggagatagagctatgcgattggtgccaaagcgagggaagaaattactcgagatcacatagctccaattcgaagaaattagcggtggccggaaacgacgccggaaccacgacccgttcggaatattccggcgagaaaatcaagcaccatgatcgtgatcaagagatgagtg

SEQ ID NO: 48203 - DNA, 393 bp, Glycine max
  Clone ID: LIB3107-025-Q1-K1-A5
agtctgttgatcgatatacaagaccagactttagagagggtgggccgatggcaattgattcatgtaaacacccaatcctggagagcatacacaatgacttcgttgccaataatatatttctgactgaagcctccaatatggcgattgtgatgggccccaatatgagtggaaagagtacttaccttcaacaagtgtgtctcatagttattcttgctcaagttgggtgttatgttcctgctcgtttctcaactgtgagggtagttgatcgtatgtttacaaggatgggtgcagctgataatcttgaatccaactctagcacgttcatgacggagatgaaagaaacagcttttatcatgcataatgtttcacaaaggaatctgattgttatggatg

SEQ ID NO: 48204 - DNA, 400 bp, Glycine max
  Clone ID: LIB3107-025-Q1-K1-A6
accggttgttagaagacaacagaagggggccattggggcggctattatcatccgcagctgcttttattcgcaccgcaaacagtgagccatggccgtcggaaagaacaagcgcatctccaaggggaagaagggtggcaagaagaaggcagctgatccctttgccaagaaggattggtatgacattaaggctccttctgtttttcaagtgaaaaatgttggcaaaaccctcgtctctcgtactcagggtaccaagattgcttctgaaggactcaagcatatactgtttgaggtcttcttggctgatcttcaaggggatgaggatcatgcattcaagaagattaagttgagagctgaaaaagtgcaagggaagaatgttctgacatatttttggggaatggga

SEQ ID NO: 48205 - DNA, 221 bp, Glycine max
  unsure (1)..(221): unsure at all n locations
  Clone ID: LIB3107-025-Q1-K1-A8
gggagtctttgtgatgaaatgagtttgaatgatacgtgtgattgtggaggtgctagagtgtganccacnttcnaggagggccatagttaatggatgtgttgatgtacttggccttcttgcaactttagctggatgaaaatggagccttttgggtttgcttttaaaaatttgggcagttctagggccttgaacagttctggagtctcagataggaaccaaag

SEQ ID NO: 48206 - DNA, 391 bp, Glycine max
  Clone ID: LIB3107-025-Q1-K1-A9
catgaccaagaacaatgcccattctaatggatgccgggacaagtttacaactttggagaagccagccatgtttgctttctgtttgaaacctaggggtctggaatcactgaacaagggattgaaacatcgatcccaaaagaagatttcagtctctgggcatgcaaacagtaatctagatcaggatggcttccacactttcagaagaagacagaatgctttaccttttggtgatgaaaagttcctataccaaggccacaattacgattcttttgatgattcatcattggctctgacctcaccaagggtattcttacctcgtgatgctggcagcttgaaatactatcctactagtaatggagcgggatatagaaatcatatcccaaaatttcac

SEQ ID NO: 48207 - DNA, 118 bp, Glycine max
  Clone ID: LIB3107-025-Q1-K1-B10
ctcaaaaaccgacagaacgggaagccgacacatttaaaataaagaaaccctctctctattttacttccattgcatccacattcacattcttcaactcgcccgtgacacatccattatt

SEQ ID NO: 48208 - DNA, 357 bp, Glycine max
  Clone ID: LIB3107-025-Q1-K1-B11
ggtagagagaagaaagacttgtttattgatccggaaggccgtccaaaagaggcacacaaacgcagaaatagagaaacgcgattttcaaattattattattattttttccgactttgcattttgcaacctaagctcgcatttatttttcttttttttttttcctcttcaaagcactcatcgttttgttcttgttgtttcattagctgcctccgctttctagggctgcaaaccaccgaaacattttccgaaaaattagacaaagctagattgatcgaactaaattcaaataaaaaaataaaaaaaaataaggaaaagttcggaaacgcggagaagaaaaactgaattgacaattcaaaa

SEQ ID NO: 48209 - DNA, 386 bp, Glycine max
  Clone ID: LIB3107-025-Q1-K1-B12
ggtaggagacaaaatgaaaaaggaagatattttgtttgattagtttaaaataagaaaaaagtacatttataaaataatatcaacatccttaaataaatatggatatatggtagtataatgaaaggttttttttttgtcctttcaatttaaagtgtctgactcctctttccaactttattttgtttaggtaagaaaagaaaaagaaaatgagtaaaaactatataaaaaaaaagtgagatgaatcatagattgtttggtacaagaaaaattgaaagaaagaaaaatattttctctcttgtttgattgtagatatgaataataaattcctatttatgggtatcgcttgcacatcttttttttttttttttctaactttgacgataaat

SEQ ID NO: 48210 - DNA, 270 bp, Glycine max
  Clone ID: LIB3107-025-Q1-K1-B4
gatcactcacaaaaaccacttacaaagtagtactgacttggtttcaatcaaaacaaaaactcacactttggtggccacagcaacaataacaatggcagcctcactacaagctgcagctaccttcatgcaacccaccaaggtgggcatggccactcgcaacctcaaatctacacaatgcatttctaaggcttttggcttggaacccgctgcagctaaactcatttgctcccttaagcccgatctcaaagattttgctcaaaaatgtgtcga

SEQ ID NO: 48211 - DNA, 380 bp, Glycine max
  Clone ID: LIB3107-025-Q1-K1-B5
gaagccggcacaagaaaaataaagaaaccctcactttagtttacttccattgcatccacattcacattcttcagctcgccggtgacacatccattatttccgccatgtcctccaattccgagcaaccttagattgtcgtcaacctctctcacctttttcccttatttcaacagaaaaagagagagagtgatttttttttatttttttttatataaaaaaacgatacgatatgtacgttgtgcctccaccccagcgtctggatccgggttcgggatccggtgatttgcgggtctaccaagcgtggaaggggagcaataaattttttcttcagggcaggttcatatttggaccagatgcaagatcattggccctgacaattt

SEQ ID NO: 48212 - DNA, 360 bp, Glycine max
  Clone ID: LIB3107-025-Q1-K1-B6
catgaacgaaacgtaaaattgcttgttcgaacacatgattatatctcaagtagtataataatgtaatttaggttatactgaaagaaaatcctgtaatttagaaacgaattttatacaaatgcactttaattgtgtctgtttatctcgtagtatgagcctctcttgttgctagtaaaaggagaaaattcagatccatttaggtatacttatgagtccatgattgtagtttattcaaggggaactaaaccttcttgttttgtagcttccctttctcgtaatctcatctatatttttttggtgatattttgtgtagagcccaaacaaaacttgggaggtattatacaatactttcgatgagta

SEQ ID NO: 48213 - DNA, 290 bp, Glycine max
  Clone ID: LIB3107-025-Q1-K1-B7
gagagtcgaaccagacacacttccacgtcaccaccacggtggaaggtggagcgtgaggctgtttccggtaacctctcccggcggcgctgagtggtgatcaaggaaatgggtcagacgctgagttgcgtgcaacagcacgaggaccatggtgtgctcttccctgcacttgcaagtggagaattggaggttgttgaggccatggtggaggaagaccccactgtgttggaacacaccattggctgtgacaggctttctcctctgcatgtcgctgctgccaatggtcggatcga

SEQ ID NO: 48214 - DNA, 371 bp, Glycine max
  Clone ID: LIB3107-025-Q1-K1-B9
ctacacaatgagcaacactaagtctaaatactgggcggccacatccacatgtaaagtcaccaacgcaaactgctgtaaaattttcaacatttagactcatgttagatacgataatactggtcaaagcattctacaaagataaaaatctgtagtgcaaccacccaatgtcaaggagattgatcctgatttcactgcaagcaatgaacctctacattgaaagctctcaattacccaattcaatggttgattaacatgactgggtttcgaaaaaaaacccttttccagagttaacagatagcgtattaccatctgatatacaatataccatctccagatctgtactcaattgatatgaacatgggttcatggta

SEQ ID NO: 48215 - DNA, 266 bp, Glycine max
  Clone ID: LIB3107-025-Q1-K1-C1
taggtacttcttttagaagacgacatataatttataaacagcccgtttttatttgtatgaaactcccaacacaattttgtggtctttttgccattcttatctaaagcttgtgtctttctgcttcgattgcatcttctgctgcgtaaaattgattcttttctgattcttccttatatttcatctctgaaactagttctaatactttatctacatatctctatattcttattcaacgtttactttttatcccacttctcacttttcta

SEQ ID NO: 48216 - DNA, 371 bp, Glycine max
  unsure (1)..(371): unsure at all n locations
  Clone ID: LIB3107-025-Q1-K1-C11
ggccccgctttattgcatctcgcaggccaattctttcgccgcttcttctctctttccaacgcttccccctgtggtgttctcgtgttgctggtaacaatatggttgttgacgctttgaatgaggatttgagaatcaacggagcagttgaaccgttgcctgaggactttgatgcaacagctgtaatcatagatcccgtgcctttggcagttgtagacaatggcattgtcaaggaggaggcgcagatcattaaaggaaaagagaaaagagaaatagtactgggaagaaatattcatacctcgtgtctagaagtcacagagcccgaggcagatgatgaggtcacntgngaccgggaagctcatatggcaagtgtg

SEQ ID NO: 48217 - DNA, 393 bp, Glycine max
  Clone ID: LIB3107-025-Q1-K1-C12
gccgaccaaccattttacatttacagtaacagtggtggaatttcggaaaaaatggcgatggctttcaagatggcgacgactggaatgtgggttacagatgagtgcaagaactcgttcatggatatgaaatggaagaaggagcacagatacattgttttcaagatcgacgaaggatcaaggctcgtcaccgttgataaactcggtggccccaccgagggctatgatgatctcaccgcctccttgcccaccgatgattgccgatacgcggtttttgacttcgacttcgtcaccgttgataactgccgcaagagcaagatcttcttcattgcatggtctccaacagcatcaaggattagagctaagattctatacgcaacttcgaaggatgggctg

SEQ ID NO: 48218 - DNA, 398 bp, Glycine max
  Clone ID: LIB3107-025-Q1-K1-C3
gagtgttctaaagtgtcgagtttttatatacgtggtagatcgttcttgtctctgtatacctaaatggtataatttctaattgtttttaacaaaagttatagctgaacaatttctatatttttaaccaaatactttttactctacttttctaacgagtatccttgagtactcgttatcaagcgacccttaactttacagaagagattactgactatataactaatcgacgaggcactaactaattagttgtattttagtgaagacggcataaactctagcaagtcaaagttccgaacagaggcctctaagcttgatttataatgggggcattgacaaatgactaaccgaccacaccagtatttaattatgacgttttatgacactacgcagcatgcatg

SEQ ID NO: 48219 - DNA, 139 bp, Glycine max
  unsure (1)..(139): unsure at all n locations
  Clone ID: LIB3107-025-Q1-K1-C4
attaatatcaacacgggnaactctaattcttacccccccacatctctcaaattacttatncacctacatctaattattatccttttttatattttcttctccctcctaancacatttaaaactctttnttcacctaaat

SEQ ID NO: 48220 - DNA, 379 bp, Glycine max
  Clone ID: LIB3107-025-Q1-K1-C6
agacatggggggtcctatgggaaaatattaaatataaggatcagaaggaattttgcttttattcagtttgaatcccaagaggacgctactagagctttggaggccaccaacctgagcaagtttatggaccgtgttatcactgtggagtatgccattagagatgatgatgacagagacagaaggaatggatacagtcctgatagaagaggccatgactctcctgatgggagatatggtcgtggtagatcccctagtccttatcgtagaagtcggggtagcccagattatggtcatggatcaaatccatcttccagaccagatccaagaggaagccccaagtatgaacgagctgaaagcccaataaataatgggagatata

SEQ ID NO: 48221 - DNA, 387 bp, Glycine max
  unsure (1)..(387): unsure at all n locations
  Clone ID: LIB3107-025-Q1-K1-C7
gagagcaggataaaatatcacgggatcgaattgaattaagatatttgaaaagcaaagctaagaagaaatgagaaaataaaaaggatagcatatcatatgatatcagaagtgagtgtctcataatggaagcataacagcgaagtgatccaaagaagaagaaggatgcaggagaactactcataccaatcgtatccagattccggcgagtcctcaccacgatccagagagatagacttcgacaaccctcctccatgggacgaccaaaactacaaagccaagttcatgtgcagctacggcggcaagatcctncctcgctcccacgacaaccagctctcctacgtcgccggcgagaccaaaattctcgccgtcgaccgctccatcaagttc

SEQ ID NO: 48222 - DNA, 384 bp, Glycine max
  Clone ID: LIB3107-025-Q1-K1-C8
ggcagcgcttgatttgaggccaggcgagccccactcaaccaccacacctctcctcgttcacgctacccctttctgctcttcttctacctttcaagttttaaaagtataaagatggcagagacattcctatttacctcagagtcggtgaacgagggacaccctgacaagctctgcgaccaaatctccgatgctgtcctcgacgcttgcctcgagcaggacccagacagcaaagttgcctgcgaaacatgcaccaaaaccaacttggtcatggtcttcggagaaatcacgaccaaggccaacgttgactacgagaagatagtgcgtgacacctgcaggaacatcggcttcgtctcaaatgatgtgggactggatgccgacaactgc

SEQ ID NO: 48223 - DNA, 397 bp, Glycine max
  Clone ID: LIB3107-025-Q1-K1-D1
gactattctaaaatatacgtctttttatatacgtggtaggtcgttcttttctctttatacctaaatattataatttctaattttttttaacaaaagtaatagctgaacaatttctatatttttaaccaaatactttttactctacttttctaacgagtatccttgagtactcgttatcaagcgacccttaactataaagaagagattacagactaaattactaatcaacaaggcactaactaattagttgtattttagttaaggtggcataaactttagcaagacaaagttccgaacagaagcctctaagcttgatttataattgcggcatttacaaatgactaacccaccacaccagtatttaattatgactgtttatgacactaccagtcatgca

SEQ ID NO: 48224 - DNA, 339 bp, Glycine max
  Clone ID: LIB3107-025-Q1-K1-D10
ggttctagtgtgtgattgtttgttgttgtggctggttcttcttcttttgttgttctgtgtttgtgtttgttttttctctcacctgaaaatgtcttgctgcggtggtaactgtggttgcggaagctcctgcaagtgcggcaacggctgcggaggctgcaagatgtacccagacttgagctacactgagtcaaccaccaccgagaccttggtcatgggagtggcacctgttaaggctcaatttgagggtgctgaaatgggtgtgcccgctgagaacgatggctgcaaatgtggaccaaactgctcctgcaacccctgcacttgcaagtgaggtgttgggag

SEQ ID NO: 48225 - DNA, 357 bp, Glycine max
  Clone ID: LIB3107-025-Q1-K1-D11
gaccatagaagaagcacaaagagaagcaggggcgctaggagcagcaacaactagtctcagctgaaatggcctcttcagtgatggcatctgtggccctcaaacctgcccctttcactgttgagaaggcctcagtgagaggccttccctctctctcaaggaactcttcttcattcaaagttgtcgccagtggcaagaagatcaagactgacaaaccttatggaattaatggcggcatggctttgagggatggaactgatgcatctggcatgaaaggaaagggaaagggagtttaccagtttgcagacaaataccgtgctaatgtcgatggttacagacctatctacgacaccaacgact

SEQ ID NO: 48226 - DNA, 90 bp, Glycine max
  Clone ID: LIB3107-025-Q1-K1-D12
attgcctataaagtaccagcgaggaaaaatgagtactaaaccttgctaactcttgatgaccttgatgtagtgattaaagactactatgaa

SEQ ID NO: 48227 - DNA, 285 bp, Glycine max
  unsure (1)..(285): unsure at all n locations
  Clone ID: LIB3107-025-Q1-K1-D2
agaagaccacagaacggaacacatctaatttttatcacatgtatctctaattgtcatttcgctttattttantaaatttctaacccatccattgcctaanaaatctcctgcaaaaagtagacataactcgaacatcaataatcattaaccattattagaacctaacctcccttttctcccaaaaaaaaaaaagaatcctgaaaactaaccattccaaccctattcaaaattccgcgaattcttaccaccatccaaaaagattgacttcaacaacccttcttcatt

SEQ ID NO: 48228 - DNA, 255 bp, Glycine max
  Clone ID: LIB3107-025-Q1-K1-D4
aagacctccttaccagataacatttacaataacaccgcccgcattttttaaaaaatacctcatcctttcaacatccctacaacttcaattttacttacacatcacttcaacaactcatccatcgttattaaatacataaaggaacacatattcattcattttaacatctacgaaacatcaatactccttacctttcataaactacatccccccacccacatctatcattatctaaccttcttcttacccaccaat

SEQ ID NO: 48229 - DNA, 325 bp, Glycine max
  unsure (1)..(325): unsure at all n locations
  Clone ID: LIB3107-025-Q1-K1-D5
gaattaatgaccctgtcattgtttcaacaggacagggtcgtgagcgtacttgtattgagaagtgnttgcaagcagggcacgggacctgccccaaaacacagcagactctcactagtactgttctcacacctaactatgtattacggagccttatatcacaatggtgtgaagccaatggcatagagccaccaaaacgacctagcgattcacaacctagtaaatcagcatcagcctactctcctgctgagcaaagtaagattgaaagtcttctccaaaagctcacatctgtgagtcctgaagaccagagatcagctgctggcgagat

SEQ ID NO: 48230 - DNA, 354 bp, Glycine max
  Clone ID: LIB3107-025-Q1-K1-D6
gtggtcatcataataggcctctcggggagtgtgctgtcagatgcttacatttactgtatgaaagggattgcagacacccattttgccctcctgctttgtggctttctcctgctagaaaaagccggccaccaattgcagttgctgccagaactcatgaagttttagcaaccaacctgagatctgatgattcatcagcttcactgagtgtaggttctgttgtcaccattgttcctcatgttttcccttttgaagaaagagttgagatgtttcgtgaatttatcaagatggacaaagcatcccgaaaaatggctggtgaaatttctgaacctggttcacgggccattgagatagtaa

SEQ ID NO: 48231 - DNA, 341 bp, Glycine max
  unsure (1)..(341): unsure at all n locations
  Clone ID: LIB3107-025-Q1-K1-D7
tgggagagcaggataaaatatcacgggatcggattgaattaagatatttgaaaagcaaagctaanaagaaatgagaaaataaaaaggatagcatatcatatgatatcagaagtgagtgtctcataatggaagcataacagcgaagtgatccaaagaagaagaaggatgcaggagaactactcataccaatcgtatccagattccggcgagtcctcaccacgatccagagagatagacttcgacaaccctcctccatgggacgaccaaaactacaaagccaagttcatgtgcagctacggcggcaagatccttcctcgctcccacgacaaccagctcttcta

SEQ ID NO: 48232 - DNA, 427 bp, Glycine max
  unsure (1)..(427): unsure at all n locations
  Clone ID: LIB3107-025-Q1-K1-D8
agaacctacagaagggatcatatctaataattttcacatttatgtctaattgtcattttagtttattgtagtaaatttctaaggcatccattgcctaagaaatctcgggcagtaagtagacataaccgtaacgtgaataatcatcaataatggtgataaagtatctttcctttccgaaagaactaacatcagaatgtccacaaatatcagtatgcacaatttcaagaagctgagtgcttcttgtagctcatttctttgtgtgttttatttgttttcccttgatacaatccacacaaatatttagatccgtaaaatctagatcaggaagagtttcattctttattaatctttctatcttttctctaaaaatgtgacctanacgtttatgccacaagaaagcagatcgttcattcactaaactacgtta

SEQ ID NO: 48233 - DNA, 381 bp, Glycine max
  Clone ID: LIB3107-025-Q1-K1-D9
ggcatctggcggcttctcagttctcaccagcggggtggtttcacttggagctacctgtcctctgtgctgttctatgttcatggtgtttgtcactttgagtttggctggggacatagtacaccctgatagtattgctcccagaacgcctggctagaacaacaactttgtcctgcttaaagtccctacttgcattgatggtgtggaaagctctgagtatgtctgctttggtgcaagatttgaccctacattacaatcaacagaaaaacatgctatccatactagagttgcgatagcgaaccctactgattgttgtaacaagcctaagaataagctcactggcgagatcattttggcgcaccgacgacaatgtagtttcacaac

SEQ ID NO: 48234 - DNA, 336 bp, Glycine max
  Clone ID: LIB3107-025-Q1-K1-E10
gaggggggggaccgatttgattcttgtcttcctcgccactgttcccctgtctccataaccaaccaaccatacattaacaccaacactcaacctcactcagtcgctcgctcgctctcttcacaatttcgagatctgaaatcgaaatcgaaaccgaaactgaagagagagacaaaaaaatgagggagccatcgtcggtgggattcgaaggcaacggcgccgtttcttcgccgccgcaagctctcctcgagagactgaaagactacggtcaagaagacgctttcgccctctggtacgagctctcttacgaggaacgcgagtttctcatcaaggacattg

SEQ ID NO: 48235 - DNA, 399 bp, Glycine max
  Clone ID: LIB3107-025-Q1-K1-E11
gacctacaaacagtatatgtaggtaaaaccttgtattctaatttaaatcctccatattgcacacactctctcaatctctctcactcatgcttgtctttctttttcagaaccttccacaacctaagccactactcctcctccctccgccaaacaccaccgcttccactgcaacttacgccatctccctccaccgcaacttgccaggcaggactccatcaccactctcatcgacatcactaccacaccaaaaccctatcctccaacctcacctccgttctcaaacaactccaaaggcgactctgcgctagttttctcccccaatgttctccatgtttggatcctctgtttcgttgctccacctttcttcgttccactctcgcgccgttgatcttcttctac

SEQ ID NO: 48236 - DNA, 402 bp, Glycine max
  Clone ID: LIB3107-025-Q1-K1-E12
cccactcgtccgcccacgcgtccgtcgagtagaccacagaagggatccctatacagggaagctttgagttaacttgagccttccacattgtcttatcttcctctcttccaaattgtcttctttgttccatggaaaatgttccaagtgaatcatcaactccaagtgcttcaatcaattgatcaacccaaataaagtacccacaatatccaacttcatcctgaaaagccccaaatagaaaccctaaatcaaaacccccaatgtgaaatcaaaaccctaaatcaataaatgtgaaatatacataccttattaattgaacaagtgaaaaacgcccttcctctgctaatatttgttccagcaacacgcctaacagcccttctaccacaaccacaaaaaagaacaact

SEQ ID NO: 48237 - DNA, 425 bp, Glycine max
  Clone ID: LIB3107-025-Q1-K1-E3
agaagactacataagggggttctagtgtatgtgattgttgtgactcgttcttcttcggccgcatcttcttcttttgttgtttgtgtgtttgttttttctctcacctgaaaatgtcttgctgcggtggtaactgtggttgcggaagcgcctgcaagtgcggcaacggctgcggaggctgcaagatgtacccagacttgagctacaccgagtcaaccaccaccgagaccttggtcatgggagtggcaccagttaaggctcaattcgagagtgctgaaatgggtgttcccgctgagaacgatggctgcaaatgtggagctaactgcaccttgcacccctgcacttgcaagtgaggtgttggagagcttaagctttaagcagaaatggcccttagaaataatggataaaactatatgtagtttcaaaac

SEQ ID NO: 48238 - DNA, 400 bp, Glycine max
  Clone ID: LIB3107-025-Q1-K1-E4
aaccggacaacgctcatgataaaaaatattcccgatgggtatacttcaaagatgcttcttgttgccatagatgagcaatgtcgaggaacttatgattttctgtatttgccaattgatttcaagaacaaatgtaatgttggctatgcattcatcaatatgattgatcctggacaaattattccattccaccaggcttttcatgggaaaaaatgggagaaattcaacagtgaaaaggtagcggtactcgcctatgcccgaattcaaggaaaatctgctcttattgctcattttcagaattcaagcctaatgaatgaagataaacgttgccgccccattctcttccatacagatggcccaaatgctggtgatccggagcctttccccttgggtaacaatatta

SEQ ID NO: 48239 - DNA, 403 bp, Glycine max
  Clone ID: LIB3107-025-Q1-K1-E5
gaggaatgaagagagagaacaaagcacttagcggtaggcaataattacgaaaaaccaacagcgagtgttgtttttgtttggtccaggctggaccagggaatgaatagagatgagaggctttcggttgaagagaactgagttaagcggcgaagccaaacgcagaatcggcggcagaaattgccaccggaagcacgtcgaagacgggtgaaccaaacacaaaattccatccaccacttctcttttcaatccccaactcaaatctgtgaagaaaatctcaatttctaaattgtaattcttagcactactgctagtagtagtaaaaaaaaacaattagaaagtagtagagtgtttttttttctttttttccgttgttttacttttaagatgggtgagaagagcaacg

SEQ ID NO: 48240 - DNA, 383 bp, Glycine max
  Clone ID: LIB3107-025-Q1-K1-E6
aagatgttcagttagtggggtgggcccttaacaggttgcttgcttggctgatacttcttgtacaacctttttcaaaacaagtatttccttttgttgtgttttttattattaaaaaaggatttgttacaaataaagtgttggctatcattgacttatgtttattaactatgtaggacaaaaagggggctgagggaccggcgaaactggtggatatgctggaactagatgacaatcttctatactagataacattaatgattccagtttttcctcaagcctatgcaggtgttatggaattcaactgtgtttggggtgtataatgatgacgtccccttgtacataaaacattaagatctttctgaaattgcacatagtggtcaatg

SEQ ID NO: 48241 - DNA, 348 bp, Glycine max
  Clone ID: LIB3107-025-Q1-K1-E8
gttagacacagtcactccagtagagagtagcatggtggggactacaacgacacccctttcccacacggttcgcgtgtccaacatcccccaatccgcgaccgcgaacgacctcctcgacttcctcgaatcgacgttgggttcctccacggtgttcgccctcaaaatcttctccgacaacctcaactggaagtcccgcggcttcaggcgcgtccagttcgagactctcgacgccaggtcccgagccctctcgctctcccaactcaaccagctccttttcaaccgccactttctccgcctatccaaaaccgactccgacatcattttccgcccccaacaccgacttcaaaa

SEQ ID NO: 48242 - DNA, 80 bp, Glycine max
  Clone ID: LIB3107-025-Q1-K1-E9
cttattttacacacacacttcactaatcaccacccgcctttattttactacaactcccacccctctctccttttatatat

SEQ ID NO: 48243 - DNA, 342 bp, Glycine max
  Clone ID: LIB3107-025-Q1-K1-F10
ggtgtgcaactagaaagtttttgctgtggggctgtgttgtgaggttggcctagctgaaacaggagatcctcctatggtgacactgacctaacaggaagttgtgatcgtgttcggtgtgaaaaaaaggttgagaggttgatcttgattgatattggagtctgtgctttttcttgagttaatggaatgagtttgagttataacggtgatggtggaggtgcaagggtgtgaggcaagttggaggaggaccacagtttttggatgtgttgttttacttggcctacatgcaattctagctgggtgaagatggagggttcttctgggtctgcttttcacaattcttgc

SEQ ID NO: 48244 - DNA, 310 bp, Glycine max
  Clone ID: LIB3107-025-Q1-K1-F11
tacggtttttataatactacagattggggtctccattcgggactgtaactatcccgagcgcgaggagcaaccttatgaagaaaaaaatttctcacaagaagttcgagcacccaacgcacggttcactgggatttctttccaagaaacgtgctgctcttcacaagggaaaaaagaaagcattccccaaagatgacccattcaaggcacccaaactcactgcattttttggttacaaagccgggatgactcacattgttagagaagttgagaaaccacgatcaaaactttacaaaaaagaaacttgtgagcc

SEQ ID NO: 48245 - DNA, 323 bp, Glycine max
  Clone ID: LIB3107-025-Q1-K1-F12
ggtggcagaaagcgaacccaaaactagagctaccttcccttcaaaccttccactcttctctccttttccaatcaagggaataatattccttagagatattcccaaaccatggctcacgccaatcctatgatttttgttgttggaattctaggtaaccttgtctccttctgttgctttctagcaccagtaccaacattctatcgagtttgtaagaagaaaaccacggaaggtttccaatcacttccttacgtggctgcactcttcacttcaatgctctggatattttatgcttacataaagaccggcgaaatacttctcatcac

SEQ ID NO: 48246 - DNA, 381 bp, Glycine max
  Clone ID: LIB3107-025-Q1-K1-F3
gaccagatcacattgctcaaacgccgagccaaccctatccttttcctcatcaagtttctatttaggctaagatgaaaaagagctcattgacaagaaccaccattaatccttgagcagctccgcaaaaaggattgcatcatgtccataagtcagctgaaatggtgtacaactagtagctttggttggagtatttcggcaaacccacaatgcttcttgcaatgttttgtgccatcttttcagatttttctctaaactcttcttgaagatctaccaagatcttgttagtggcttccgcttgttcatttgcttggtgcccattggcagctgctcattttgtgcccaggtgacaatctagtggtttggttttgtcctttgcggaag

SEQ ID NO: 48247 - DNA, 386 bp, Glycine max
  unsure (1)..(386): unsure at all n locations
  Clone ID: LIB3107-025-Q1-K1-F4
tagatcagaaaatgatggtattctgtgtcccatgccgcagtaccctctgtactcagcctcaattgccctccatggtggctgcctggtaccttattatctagatgaagcaactggctgggggttggaaatacctgaactcaagaagcaattggaggctgccaagtctaagggcatcaatgttagggctttagttgttataaatcctggcaatccaacggngcaggttcttggtgaggcaaatcagcgagatatagtagagttttgcaagcaagaaggtttggttcttttagctgatgaggtatatcaagaaaatgtttatgttcctgagaagaaatttcactctttcaagaaggtgtctcggtccatgggatatggtgagaatgata

SEQ ID NO: 48248 - DNA, 329 bp, Glycine max
  Clone ID: LIB3107-025-Q1-K1-F5
gctgggagaaaacaaccgacaggacatattctcatagtataccatttaattaccttatatgcttgatggggaaataagataattaacgaaccccctactattggcataattacaactgttgttaaccaaggaaaataattcgtgataaaaataagatatacttagactagaaaaacccgcgctcaaaataaaaaaagatcatcttttttatttcgagcgcgggtatttaccattaaaaaaacacacttgtgtgtcgttctttttgaaacgtatcaattatctagacccatgcttcgagttgattcatgccatatataaactctaacact

SEQ ID NO: 48249 - DNA, 307 bp, Glycine max
  Clone ID: LIB3107-025-Q1-K1-F6
cgacggctggataagagacaacaagggtatctattactgactgttacgtttactctttggggcgggatgggtggacctattgtataaaaatttgatgattgtatacatgtggctaaagccaccactgtgaacacctttgctctggatgacactatgtattttgtaaaactcccatattgtggacagctattaaatgatgaatgaacttatgtacaaccttgttatttgaaaagaaagcattagcatactttatttacaaaaaaagttaccgatcccattttaatttattattatcacgtaactacct

SEQ ID NO: 48250 - DNA, 169 bp, Glycine max
  Clone ID: LIB3107-025-Q1-K1-F8
cacaaaaggggatttgcaactttatcttatgattgctagcggttggttacttatgattgctagacccttgactgtctctacaggatttggagctgacgaacgatggatgtcgaaatgtttgttttaagatgggggtatataatcaaaaaaacactcattttatttggcc

SEQ ID NO: 48251 - DNA, 355 bp, Glycine max
  unsure (1)..(355): unsure at all n locations
  Clone ID: LIB3107-025-Q1-K1-G10
gaaccatcgtgacctaggagcttttaacctacccatgtattcacttgctacctcatggtacctnntgattatttatatatatatgagtatatatnnaagttatctttgctcgagccaaaaaaaaaaaggggacctaagtctttgtggatgtgctatactagcacctggtccaaggacctcccttgtaacaaataacaacaacgaaaacaagcaagcctttttctactagatggcatcggctagatggactacattagcaagtgttaaactgttaataaattataattaaggaaattatgctattatcttgtttgacaattgtgggaatgatttcgggatgcactctaactatgat

SEQ ID NO: 48252 - DNA, 263 bp, Glycine max
  unsure (1)..(263): unsure at all n locations
  Clone ID: LIB3107-025-Q1-K1-G11
gtcgggtctatttttttttttattcttttctttaaagaacacttctcttcccccccagatttctttctttactcaccctcaatttcccttctattttncttcctgctaccttattatctatatgaancaactgcctggcgtttggaaatacctttactcaataaacaattggagcctcccaaatctaatggcatcaatgttatcccttaagctgttataaatcccttcaatccaacaaatcaccttctttattacccaaatca

SEQ ID NO: 48253 - DNA, 289 bp, Glycine max
  Clone ID: LIB3107-025-Q1-K1-G12
cggaaggaaggcccggactccgacgccacgcggtcgcagtacggctagcagaaaggactacccattgcccactggattcctgatcttcgtggatttagagggtaagctacccttggaatgacctattctcctaattgcggcttctacaattatcctgcacacatgcatgaatcacccaaaggcaaagatctaccttttttttattctacaaaaggtactaccccaacttcctcactagataaattattcctaatctggactagaatatcgactcatatatgcaacattc

SEQ ID NO: 48254 - DNA, 402 bp, Glycine max
  Clone ID: LIB3107-025-Q1-K1-G3
aaacacaccaaaaggggcccgtttgttaaactaccttaacaattctaaccgcgggacaccaccattattcatatctaattctctaacctttcactctgccttactcactctctactttgctcatcatcgtagatgaaccaacacttctagtctctcttactttataaccatgtaaaaatgagtcacctaatgaaaaattagtagcttcttgttgtgctttttattttgtttgtgttgagataaatttgtttgtttgtttggtattgttttgtgttttatgaattatttgatgggtgaagaaagagaagtggtgagaaagcaaggacaaaggggtgttggtggagataagtggtacttgtatagctgcttacaagactgtaaatattggtgctgtttaataca
